United States Patent Application Publication US 2026/0258423 A1 - sequence listing, part 4

SEQ ID NO: 92526 - DNA, 20 bp, synthetic construct
  source 1..20: mol_type = other DNA
tagtaaataacatgcaaaag

SEQ ID NO: 92527 - DNA, 20 bp, synthetic construct
  source 1..20: mol_type = other DNA
atagtaaataacatgcaaaa

SEQ ID NO: 92528 - DNA, 20 bp, synthetic construct
  source 1..20: mol_type = other DNA
tatagtaaataacatgcaaa

SEQ ID NO: 92529 - DNA, 20 bp, synthetic construct
  source 1..20: mol_type = other DNA
ctatagtaaataacatgcaa

SEQ ID NO: 92530 - DNA, 20 bp, synthetic construct
  source 1..20: mol_type = other DNA
cctatagtaaataacatgca

SEQ ID NO: 92531 - DNA, 20 bp, synthetic construct
  source 1..20: mol_type = other DNA
acctatagtaaataacatgc

SEQ ID NO: 92532 - DNA, 20 bp, synthetic construct
  source 1..20: mol_type = other DNA
tacctatagtaaataacatg

SEQ ID NO: 92533 - DNA, 20 bp, synthetic construct
  source 1..20: mol_type = other DNA
atacctatagtaaataacat

SEQ ID NO: 92534 - DNA, 20 bp, synthetic construct
  source 1..20: mol_type = other DNA
gatacctatagtaaataaca

SEQ ID NO: 92535 - DNA, 20 bp, synthetic construct
  source 1..20: mol_type = other DNA
cgatacctatagtaaataac

SEQ ID NO: 92536 - DNA, 20 bp, synthetic construct
  source 1..20: mol_type = other DNA
tcgatacctatagtaaataa

SEQ ID NO: 92537 - DNA, 20 bp, synthetic construct
  source 1..20: mol_type = other DNA
ctcgatacctatagtaaata

SEQ ID NO: 92538 - DNA, 20 bp, synthetic construct
  source 1..20: mol_type = other DNA
cctcgatacctatagtaaat

SEQ ID NO: 92539 - DNA, 20 bp, synthetic construct
  source 1..20: mol_type = other DNA
acctcgatacctatagtaaa

SEQ ID NO: 92540 - DNA, 20 bp, synthetic construct
  source 1..20: mol_type = other DNA
tacctcgatacctatagtaa

SEQ ID NO: 92541 - DNA, 20 bp, synthetic construct
  source 1..20: mol_type = other DNA
ctacctcgatacctatagta

SEQ ID NO: 92542 - DNA, 20 bp, synthetic construct
  source 1..20: mol_type = other DNA
tctacctcgatacctatagt

SEQ ID NO: 92543 - DNA, 20 bp, synthetic construct
  source 1..20: mol_type = other DNA
atctacctcgatacctatag

SEQ ID NO: 92544 - DNA, 20 bp, synthetic construct
  source 1..20: mol_type = other DNA
aatctacctcgatacctata

SEQ ID NO: 92545 - DNA, 20 bp, synthetic construct
  source 1..20: mol_type = other DNA
aaatctacctcgatacctat

SEQ ID NO: 92546 - DNA, 20 bp, synthetic construct
  source 1..20: mol_type = other DNA
aaaatctacctcgataccta

SEQ ID NO: 92547 - DNA, 20 bp, synthetic construct
  source 1..20: mol_type = other DNA
caaaatctacctcgatacct

SEQ ID NO: 92548 - DNA, 20 bp, synthetic construct
  source 1..20: mol_type = other DNA
tcaaaatctacctcgatacc

SEQ ID NO: 92549 - DNA, 20 bp, synthetic construct
  source 1..20: mol_type = other DNA
ctcaaaatctacctcgatac

SEQ ID NO: 92550 - DNA, 20 bp, synthetic construct
  source 1..20: mol_type = other DNA
tctcaaaatctacctcgata

SEQ ID NO: 92551 - DNA, 20 bp, synthetic construct
  source 1..20: mol_type = other DNA
gtctcaaaatctacctcgat

SEQ ID NO: 92552 - DNA, 20 bp, synthetic construct
  source 1..20: mol_type = other DNA
ggtctcaaaatctacctcga

SEQ ID NO: 92553 - DNA, 20 bp, synthetic construct
  source 1..20: mol_type = other DNA
tggtctcaaaatctacctcg

SEQ ID NO: 92554 - DNA, 20 bp, synthetic construct
  source 1..20: mol_type = other DNA
ttggtctcaaaatctacctc

SEQ ID NO: 92555 - DNA, 20 bp, synthetic construct
  source 1..20: mol_type = other DNA
gttggtctcaaaatctacct

SEQ ID NO: 92556 - DNA, 20 bp, synthetic construct
  source 1..20: mol_type = other DNA
ggttggtctcaaaatctacc

SEQ ID NO: 92557 - DNA, 20 bp, synthetic construct
  source 1..20: mol_type = other DNA
tggttggtctcaaaatctac

SEQ ID NO: 92558 - DNA, 20 bp, synthetic construct
  source 1..20: mol_type = other DNA
ttggttggtctcaaaatcta

SEQ ID NO: 92559 - DNA, 20 bp, synthetic construct
  source 1..20: mol_type = other DNA
attggttggtctcaaaatct

SEQ ID NO: 92560 - DNA, 20 bp, synthetic construct
  source 1..20: mol_type = other DNA
tattggttggtctcaaaatc

SEQ ID NO: 92561 - DNA, 20 bp, synthetic construct
  source 1..20: mol_type = other DNA
ttattggttggtctcaaaat

SEQ ID NO: 92562 - DNA, 20 bp, synthetic construct
  source 1..20: mol_type = other DNA
tttattggttggtctcaaaa

SEQ ID NO: 92563 - DNA, 20 bp, synthetic construct
  source 1..20: mol_type = other DNA
atttattggttggtctcaaa

SEQ ID NO: 92564 - DNA, 20 bp, synthetic construct
  source 1..20: mol_type = other DNA
gatttattggttggtctcaa

SEQ ID NO: 92565 - DNA, 20 bp, synthetic construct
  source 1..20: mol_type = other DNA
agatttattggttggtctca

SEQ ID NO: 92566 - DNA, 20 bp, synthetic construct
  source 1..20: mol_type = other DNA
aagatttattggttggtctc

SEQ ID NO: 92567 - DNA, 20 bp, synthetic construct
  source 1..20: mol_type = other DNA
gaagatttattggttggtct

SEQ ID NO: 92568 - DNA, 20 bp, synthetic construct
  source 1..20: mol_type = other DNA
agaagatttattggttggtc

SEQ ID NO: 92569 - DNA, 20 bp, synthetic construct
  source 1..20: mol_type = other DNA
aagaagatttattggttggt

SEQ ID NO: 92570 - DNA, 20 bp, synthetic construct
  source 1..20: mol_type = other DNA
caagaagatttattggttgg

SEQ ID NO: 92571 - DNA, 20 bp, synthetic construct
  source 1..20: mol_type = other DNA
tcaagaagatttattggttg

SEQ ID NO: 92572 - DNA, 20 bp, synthetic construct
  source 1..20: mol_type = other DNA
ttcaagaagatttattggtt

SEQ ID NO: 92573 - DNA, 20 bp, synthetic construct
  source 1..20: mol_type = other DNA
tttcaagaagatttattggt

SEQ ID NO: 92574 - DNA, 20 bp, synthetic construct
  source 1..20: mol_type = other DNA
gtttcaagaagatttattgg

SEQ ID NO: 92575 - DNA, 20 bp, synthetic construct
  source 1..20: mol_type = other DNA
agtttcaagaagatttattg

SEQ ID NO: 92576 - DNA, 20 bp, synthetic construct
  source 1..20: mol_type = other DNA
aagtttcaagaagatttatt

SEQ ID NO: 92577 - DNA, 20 bp, synthetic construct
  source 1..20: mol_type = other DNA
taagtttcaagaagatttat

SEQ ID NO: 92578 - DNA, 20 bp, synthetic construct
  source 1..20: mol_type = other DNA
ctaagtttcaagaagattta

SEQ ID NO: 92579 - DNA, 20 bp, synthetic construct
  source 1..20: mol_type = other DNA
gctaagtttcaagaagattt

SEQ ID NO: 92580 - DNA, 20 bp, synthetic construct
  source 1..20: mol_type = other DNA
agctaagtttcaagaagatt

SEQ ID NO: 92581 - DNA, 20 bp, synthetic construct
  source 1..20: mol_type = other DNA
aagctaagtttcaagaagat

SEQ ID NO: 92582 - DNA, 20 bp, synthetic construct
  source 1..20: mol_type = other DNA
gaagctaagtttcaagaaga

SEQ ID NO: 92583 - DNA, 20 bp, synthetic construct
  source 1..20: mol_type = other DNA
agaagctaagtttcaagaag

SEQ ID NO: 92584 - DNA, 20 bp, synthetic construct
  source 1..20: mol_type = other DNA
aagaagctaagtttcaagaa

SEQ ID NO: 92585 - DNA, 20 bp, synthetic construct
  source 1..20: mol_type = other DNA
taagaagctaagtttcaaga

SEQ ID NO: 92586 - DNA, 20 bp, synthetic construct
  source 1..20: mol_type = other DNA
ctaagaagctaagtttcaag

SEQ ID NO: 92587 - DNA, 20 bp, synthetic construct
  source 1..20: mol_type = other DNA
tctaagaagctaagtttcaa

SEQ ID NO: 92588 - DNA, 20 bp, synthetic construct
  source 1..20: mol_type = other DNA
ttctaagaagctaagtttca

SEQ ID NO: 92589 - DNA, 20 bp, synthetic construct
  source 1..20: mol_type = other DNA
tttctaagaagctaagtttc

SEQ ID NO: 92590 - DNA, 20 bp, synthetic construct
  source 1..20: mol_type = other DNA
ctttctaagaagctaagttt

SEQ ID NO: 92591 - DNA, 20 bp, synthetic construct
  source 1..20: mol_type = other DNA
cctttctaagaagctaagtt

SEQ ID NO: 92592 - DNA, 20 bp, synthetic construct
  source 1..20: mol_type = other DNA
tcctttctaagaagctaagt

SEQ ID NO: 92593 - DNA, 20 bp, synthetic construct
  source 1..20: mol_type = other DNA
ttcctttctaagaagctaag

SEQ ID NO: 92594 - DNA, 20 bp, synthetic construct
  source 1..20: mol_type = other DNA
tttcctttctaagaagctaa

SEQ ID NO: 92595 - DNA, 20 bp, synthetic construct
  source 1..20: mol_type = other DNA
ttttcctttctaagaagcta

SEQ ID NO: 92596 - DNA, 20 bp, synthetic construct
  source 1..20: mol_type = other DNA
attttcctttctaagaagct

SEQ ID NO: 92597 - DNA, 20 bp, synthetic construct
  source 1..20: mol_type = other DNA
gattttcctttctaagaagc

SEQ ID NO: 92598 - DNA, 20 bp, synthetic construct
  source 1..20: mol_type = other DNA
agattttcctttctaagaag

SEQ ID NO: 92599 - DNA, 20 bp, synthetic construct
  source 1..20: mol_type = other DNA
tagattttcctttctaagaa

SEQ ID NO: 92600 - DNA, 20 bp, synthetic construct
  source 1..20: mol_type = other DNA
ttagattttcctttctaaga

SEQ ID NO: 92601 - DNA, 20 bp, synthetic construct
  source 1..20: mol_type = other DNA
tttagattttcctttctaag

SEQ ID NO: 92602 - DNA, 20 bp, synthetic construct
  source 1..20: mol_type = other DNA
atttagattttcctttctaa

SEQ ID NO: 92603 - DNA, 20 bp, synthetic construct
  source 1..20: mol_type = other DNA
tatttagattttcctttcta

SEQ ID NO: 92604 - DNA, 20 bp, synthetic construct
  source 1..20: mol_type = other DNA
gtatttagattttcctttct

SEQ ID NO: 92605 - DNA, 20 bp, synthetic construct
  source 1..20: mol_type = other DNA
ggtatttagattttcctttc

SEQ ID NO: 92606 - DNA, 20 bp, synthetic construct
  source 1..20: mol_type = other DNA
tggtatttagattttccttt

SEQ ID NO: 92607 - DNA, 20 bp, synthetic construct
  source 1..20: mol_type = other DNA
ctggtatttagattttcctt

SEQ ID NO: 92608 - DNA, 20 bp, synthetic construct
  source 1..20: mol_type = other DNA
gctggtatttagattttcct

SEQ ID NO: 92609 - DNA, 20 bp, synthetic construct
  source 1..20: mol_type = other DNA
ggctggtatttagattttcc

SEQ ID NO: 92610 - DNA, 20 bp, synthetic construct
  source 1..20: mol_type = other DNA
aggctggtatttagattttc

SEQ ID NO: 92611 - DNA, 20 bp, synthetic construct
  source 1..20: mol_type = other DNA
aaggctggtatttagatttt

SEQ ID NO: 92612 - DNA, 20 bp, synthetic construct
  source 1..20: mol_type = other DNA
aaaggctggtatttagattt

SEQ ID NO: 92613 - DNA, 20 bp, synthetic construct
  source 1..20: mol_type = other DNA
aaaaggctggtatttagatt

SEQ ID NO: 92614 - DNA, 20 bp, synthetic construct
  source 1..20: mol_type = other DNA
taaaaggctggtatttagat

SEQ ID NO: 92615 - DNA, 20 bp, synthetic construct
  source 1..20: mol_type = other DNA
ttaaaaggctggtatttaga

SEQ ID NO: 92616 - DNA, 20 bp, synthetic construct
  source 1..20: mol_type = other DNA
tttaaaaggctggtatttag

SEQ ID NO: 92617 - DNA, 20 bp, synthetic construct
  source 1..20: mol_type = other DNA
ttttaaaaggctggtattta

SEQ ID NO: 92618 - DNA, 20 bp, synthetic construct
  source 1..20: mol_type = other DNA
tttttaaaaggctggtattt

SEQ ID NO: 92619 - DNA, 20 bp, synthetic construct
  source 1..20: mol_type = other DNA
ttttttaaaaggctggtatt

SEQ ID NO: 92620 - DNA, 20 bp, synthetic construct
  source 1..20: mol_type = other DNA
tttttttaaaaggctggtat

SEQ ID NO: 92621 - DNA, 20 bp, synthetic construct
  source 1..20: mol_type = other DNA
ctttttttaaaaggctggta

SEQ ID NO: 92622 - DNA, 20 bp, synthetic construct
  source 1..20: mol_type = other DNA
actttttttaaaaggctggt

SEQ ID NO: 92623 - DNA, 20 bp, synthetic construct
  source 1..20: mol_type = other DNA
tactttttttaaaaggctgg

SEQ ID NO: 92624 - DNA, 20 bp, synthetic construct
  source 1..20: mol_type = other DNA
ctactttttttaaaaggctg

SEQ ID NO: 92625 - DNA, 20 bp, synthetic construct
  source 1..20: mol_type = other DNA
gctactttttttaaaaggct

SEQ ID NO: 92626 - DNA, 20 bp, synthetic construct
  source 1..20: mol_type = other DNA
agctactttttttaaaaggc

SEQ ID NO: 92627 - DNA, 20 bp, synthetic construct
  source 1..20: mol_type = other DNA
cagctactttttttaaaagg

SEQ ID NO: 92628 - DNA, 20 bp, synthetic construct
  source 1..20: mol_type = other DNA
tcagctactttttttaaaag

SEQ ID NO: 92629 - DNA, 20 bp, synthetic construct
  source 1..20: mol_type = other DNA
ttcagctactttttttaaaa

SEQ ID NO: 92630 - DNA, 20 bp, synthetic construct
  source 1..20: mol_type = other DNA
attcagctactttttttaaa

SEQ ID NO: 92631 - DNA, 20 bp, synthetic construct
  source 1..20: mol_type = other DNA
aattcagctactttttttaa

SEQ ID NO: 92632 - DNA, 20 bp, synthetic construct
  source 1..20: mol_type = other DNA
taattcagctacttttttta

SEQ ID NO: 92633 - DNA, 20 bp, synthetic construct
  source 1..20: mol_type = other DNA
ttaattcagctacttttttt

SEQ ID NO: 92634 - DNA, 20 bp, synthetic construct
  source 1..20: mol_type = other DNA
tttaattcagctactttttt

SEQ ID NO: 92635 - DNA, 20 bp, synthetic construct
  source 1..20: mol_type = other DNA
ctttaattcagctacttttt

SEQ ID NO: 92636 - DNA, 20 bp, synthetic construct
  source 1..20: mol_type = other DNA
cctttaattcagctactttt

SEQ ID NO: 92637 - DNA, 20 bp, synthetic construct
  source 1..20: mol_type = other DNA
tcctttaattcagctacttt

SEQ ID NO: 92638 - DNA, 20 bp, synthetic construct
  source 1..20: mol_type = other DNA
atcctttaattcagctactt

SEQ ID NO: 92639 - DNA, 20 bp, synthetic construct
  source 1..20: mol_type = other DNA
catcctttaattcagctact

SEQ ID NO: 92640 - DNA, 20 bp, synthetic construct
  source 1..20: mol_type = other DNA
tcatcctttaattcagctac

SEQ ID NO: 92641 - DNA, 20 bp, synthetic construct
  source 1..20: mol_type = other DNA
ctcatcctttaattcagcta

SEQ ID NO: 92642 - DNA, 20 bp, synthetic construct
  source 1..20: mol_type = other DNA
actcatcctttaattcagct

SEQ ID NO: 92643 - DNA, 20 bp, synthetic construct
  source 1..20: mol_type = other DNA
cactcatcctttaattcagc

SEQ ID NO: 92644 - DNA, 20 bp, synthetic construct
  source 1..20: mol_type = other DNA
tcactcatcctttaattcag

SEQ ID NO: 92645 - DNA, 20 bp, synthetic construct
  source 1..20: mol_type = other DNA
ttcactcatcctttaattca

SEQ ID NO: 92646 - DNA, 20 bp, synthetic construct
  source 1..20: mol_type = other DNA
gttcactcatcctttaattc

SEQ ID NO: 92647 - DNA, 20 bp, synthetic construct
  source 1..20: mol_type = other DNA
ggttcactcatcctttaatt

SEQ ID NO: 92648 - DNA, 20 bp, synthetic construct
  source 1..20: mol_type = other DNA
tggttcactcatcctttaat

SEQ ID NO: 92649 - DNA, 20 bp, synthetic construct
  source 1..20: mol_type = other DNA
ttggttcactcatcctttaa

SEQ ID NO: 92650 - DNA, 20 bp, synthetic construct
  source 1..20: mol_type = other DNA
tttggttcactcatccttta

SEQ ID NO: 92651 - DNA, 20 bp, synthetic construct
  source 1..20: mol_type = other DNA
ctttggttcactcatccttt

SEQ ID NO: 92652 - DNA, 20 bp, synthetic construct
  source 1..20: mol_type = other DNA
cctttggttcactcatcctt

SEQ ID NO: 92653 - DNA, 20 bp, synthetic construct
  source 1..20: mol_type = other DNA
gcctttggttcactcatcct

SEQ ID NO: 92654 - DNA, 20 bp, synthetic construct
  source 1..20: mol_type = other DNA
tgcctttggttcactcatcc

SEQ ID NO: 92655 - DNA, 20 bp, synthetic construct
  source 1..20: mol_type = other DNA
ttgcctttggttcactcatc

SEQ ID NO: 92656 - DNA, 20 bp, synthetic construct
  source 1..20: mol_type = other DNA
tttgcctttggttcactcat

SEQ ID NO: 92657 - DNA, 20 bp, synthetic construct
  source 1..20: mol_type = other DNA
ctttgcctttggttcactca

SEQ ID NO: 92658 - DNA, 20 bp, synthetic construct
  source 1..20: mol_type = other DNA
cctttgcctttggttcactc

SEQ ID NO: 92659 - DNA, 20 bp, synthetic construct
  source 1..20: mol_type = other DNA
acctttgcctttggttcact

SEQ ID NO: 92660 - DNA, 20 bp, synthetic construct
  source 1..20: mol_type = other DNA
tacctttgcctttggttcac

SEQ ID NO: 92661 - DNA, 20 bp, synthetic construct
  source 1..20: mol_type = other DNA
ctacctttgcctttggttca

SEQ ID NO: 92662 - DNA, 20 bp, synthetic construct
  source 1..20: mol_type = other DNA
gctacctttgcctttggttc

SEQ ID NO: 92663 - DNA, 20 bp, synthetic construct
  source 1..20: mol_type = other DNA
ggctacctttgcctttggtt

SEQ ID NO: 92664 - DNA, 20 bp, synthetic construct
  source 1..20: mol_type = other DNA
aggctacctttgcctttggt

SEQ ID NO: 92665 - DNA, 20 bp, synthetic construct
  source 1..20: mol_type = other DNA
aaggctacctttgcctttgg

SEQ ID NO: 92666 - DNA, 20 bp, synthetic construct
  source 1..20: mol_type = other DNA
aaaggctacctttgcctttg

SEQ ID NO: 92667 - DNA, 20 bp, synthetic construct
  source 1..20: mol_type = other DNA
gaaaggctacctttgccttt

SEQ ID NO: 92668 - DNA, 20 bp, synthetic construct
  source 1..20: mol_type = other DNA
ggaaaggctacctttgcctt

SEQ ID NO: 92669 - DNA, 20 bp, synthetic construct
  source 1..20: mol_type = other DNA
aggaaaggctacctttgcct

SEQ ID NO: 92670 - DNA, 20 bp, synthetic construct
  source 1..20: mol_type = other DNA
gaggaaaggctacctttgcc

SEQ ID NO: 92671 - DNA, 20 bp, synthetic construct
  source 1..20: mol_type = other DNA
tgaggaaaggctacctttgc

SEQ ID NO: 92672 - DNA, 20 bp, synthetic construct
  source 1..20: mol_type = other DNA
ctgaggaaaggctacctttg

SEQ ID NO: 92673 - DNA, 20 bp, synthetic construct
  source 1..20: mol_type = other DNA
gctgaggaaaggctaccttt

SEQ ID NO: 92674 - DNA, 20 bp, synthetic construct
  source 1..20: mol_type = other DNA
ggctgaggaaaggctacctt

SEQ ID NO: 92675 - DNA, 20 bp, synthetic construct
  source 1..20: mol_type = other DNA
aggctgaggaaaggctacct

SEQ ID NO: 92676 - DNA, 20 bp, synthetic construct
  source 1..20: mol_type = other DNA
caggctgaggaaaggctacc

SEQ ID NO: 92677 - DNA, 20 bp, synthetic construct
  source 1..20: mol_type = other DNA
acaggctgaggaaaggctac

SEQ ID NO: 92678 - DNA, 20 bp, synthetic construct
  source 1..20: mol_type = other DNA
cacaggctgaggaaaggcta

SEQ ID NO: 92679 - DNA, 20 bp, synthetic construct
  source 1..20: mol_type = other DNA
acacaggctgaggaaaggct

SEQ ID NO: 92680 - DNA, 20 bp, synthetic construct
  source 1..20: mol_type = other DNA
aacacaggctgaggaaaggc

SEQ ID NO: 92681 - DNA, 20 bp, synthetic construct
  source 1..20: mol_type = other DNA
aaacacaggctgaggaaagg

SEQ ID NO: 92682 - DNA, 20 bp, synthetic construct
  source 1..20: mol_type = other DNA
aaaacacaggctgaggaaag

SEQ ID NO: 92683 - DNA, 20 bp, synthetic construct
  source 1..20: mol_type = other DNA
taaaacacaggctgaggaaa

SEQ ID NO: 92684 - DNA, 20 bp, synthetic construct
  source 1..20: mol_type = other DNA
ctaaaacacaggctgaggaa

SEQ ID NO: 92685 - DNA, 20 bp, synthetic construct
  source 1..20: mol_type = other DNA
gctaaaacacaggctgagga

SEQ ID NO: 92686 - DNA, 20 bp, synthetic construct
  source 1..20: mol_type = other DNA
agctaaaacacaggctgagg

SEQ ID NO: 92687 - DNA, 20 bp, synthetic construct
  source 1..20: mol_type = other DNA
aagctaaaacacaggctgag

SEQ ID NO: 92688 - DNA, 20 bp, synthetic construct
  source 1..20: mol_type = other DNA
aaagctaaaacacaggctga

SEQ ID NO: 92689 - DNA, 20 bp, synthetic construct
  source 1..20: mol_type = other DNA
gaaagctaaaacacaggctg

SEQ ID NO: 92690 - DNA, 20 bp, synthetic construct
  source 1..20: mol_type = other DNA
agaaagctaaaacacaggct

SEQ ID NO: 92691 - DNA, 20 bp, synthetic construct
  source 1..20: mol_type = other DNA
tagaaagctaaaacacaggc

SEQ ID NO: 92692 - DNA, 20 bp, synthetic construct
  source 1..20: mol_type = other DNA
ttagaaagctaaaacacagg

SEQ ID NO: 92693 - DNA, 20 bp, synthetic construct
  source 1..20: mol_type = other DNA
tttagaaagctaaaacacag

SEQ ID NO: 92694 - DNA, 20 bp, synthetic construct
  source 1..20: mol_type = other DNA
atttagaaagctaaaacaca

SEQ ID NO: 92695 - DNA, 20 bp, synthetic construct
  source 1..20: mol_type = other DNA
catttagaaagctaaaacac

SEQ ID NO: 92696 - DNA, 20 bp, synthetic construct
  source 1..20: mol_type = other DNA
acatttagaaagctaaaaca

SEQ ID NO: 92697 - DNA, 20 bp, synthetic construct
  source 1..20: mol_type = other DNA
aacatttagaaagctaaaac

SEQ ID NO: 92698 - DNA, 20 bp, synthetic construct
  source 1..20: mol_type = other DNA
taacatttagaaagctaaaa

SEQ ID NO: 92699 - DNA, 20 bp, synthetic construct
  source 1..20: mol_type = other DNA
ttaacatttagaaagctaaa

SEQ ID NO: 92700 - DNA, 20 bp, synthetic construct
  source 1..20: mol_type = other DNA
gttaacatttagaaagctaa

SEQ ID NO: 92701 - DNA, 20 bp, synthetic construct
  source 1..20: mol_type = other DNA
tgttaacatttagaaagcta

SEQ ID NO: 92702 - DNA, 20 bp, synthetic construct
  source 1..20: mol_type = other DNA
ttgttaacatttagaaagct

SEQ ID NO: 92703 - DNA, 20 bp, synthetic construct
  source 1..20: mol_type = other DNA
attgttaacatttagaaagc

SEQ ID NO: 92704 - DNA, 20 bp, synthetic construct
  source 1..20: mol_type = other DNA
tattgttaacatttagaaag

SEQ ID NO: 92705 - DNA, 20 bp, synthetic construct
  source 1..20: mol_type = other DNA
ctattgttaacatttagaaa

SEQ ID NO: 92706 - DNA, 20 bp, synthetic construct
  source 1..20: mol_type = other DNA
gctattgttaacatttagaa

SEQ ID NO: 92707 - DNA, 20 bp, synthetic construct
  source 1..20: mol_type = other DNA
agctattgttaacatttaga

SEQ ID NO: 92708 - DNA, 20 bp, synthetic construct
  source 1..20: mol_type = other DNA
aagctattgttaacatttag

SEQ ID NO: 92709 - DNA, 20 bp, synthetic construct
  source 1..20: mol_type = other DNA
gaagctattgttaacattta

SEQ ID NO: 92710 - DNA, 20 bp, synthetic construct
  source 1..20: mol_type = other DNA
tgaagctattgttaacattt

SEQ ID NO: 92711 - DNA, 20 bp, synthetic construct
  source 1..20: mol_type = other DNA
atgaagctattgttaacatt

SEQ ID NO: 92712 - DNA, 20 bp, synthetic construct
  source 1..20: mol_type = other DNA
aatgaagctattgttaacat

SEQ ID NO: 92713 - DNA, 20 bp, synthetic construct
  source 1..20: mol_type = other DNA
gaatgaagctattgttaaca

SEQ ID NO: 92714 - DNA, 20 bp, synthetic construct
  source 1..20: mol_type = other DNA
agaatgaagctattgttaac

SEQ ID NO: 92715 - DNA, 20 bp, synthetic construct
  source 1..20: mol_type = other DNA
aagaatgaagctattgttaa

SEQ ID NO: 92716 - DNA, 20 bp, synthetic construct
  source 1..20: mol_type = other DNA
caagaatgaagctattgtta

SEQ ID NO: 92717 - DNA, 20 bp, synthetic construct
  source 1..20: mol_type = other DNA
tcaagaatgaagctattgtt

SEQ ID NO: 92718 - DNA, 20 bp, synthetic construct
  source 1..20: mol_type = other DNA
gtcaagaatgaagctattgt

SEQ ID NO: 92719 - DNA, 20 bp, synthetic construct
  source 1..20: mol_type = other DNA
agtcaagaatgaagctattg

SEQ ID NO: 92720 - DNA, 20 bp, synthetic construct
  source 1..20: mol_type = other DNA
aagtcaagaatgaagctatt

SEQ ID NO: 92721 - DNA, 20 bp, synthetic construct
  source 1..20: mol_type = other DNA
taagtcaagaatgaagctat

SEQ ID NO: 92722 - DNA, 20 bp, synthetic construct
  source 1..20: mol_type = other DNA
ataagtcaagaatgaagcta

SEQ ID NO: 92723 - DNA, 20 bp, synthetic construct
  source 1..20: mol_type = other DNA
aataagtcaagaatgaagct

SEQ ID NO: 92724 - DNA, 20 bp, synthetic construct
  source 1..20: mol_type = other DNA
caataagtcaagaatgaagc

SEQ ID NO: 92725 - DNA, 20 bp, synthetic construct
  source 1..20: mol_type = other DNA
ccaataagtcaagaatgaag

SEQ ID NO: 92726 - DNA, 20 bp, synthetic construct
  source 1..20: mol_type = other DNA
accaataagtcaagaatgaa

SEQ ID NO: 92727 - DNA, 20 bp, synthetic construct
  source 1..20: mol_type = other DNA
taccaataagtcaagaatga

SEQ ID NO: 92728 - DNA, 20 bp, synthetic construct
  source 1..20: mol_type = other DNA
ttaccaataagtcaagaatg

SEQ ID NO: 92729 - DNA, 20 bp, synthetic construct
  source 1..20: mol_type = other DNA
gttaccaataagtcaagaat

SEQ ID NO: 92730 - DNA, 20 bp, synthetic construct
  source 1..20: mol_type = other DNA
tgttaccaataagtcaagaa

SEQ ID NO: 92731 - DNA, 20 bp, synthetic construct
  source 1..20: mol_type = other DNA
atgttaccaataagtcaaga

SEQ ID NO: 92732 - DNA, 20 bp, synthetic construct
  source 1..20: mol_type = other DNA
aatgttaccaataagtcaag

SEQ ID NO: 92733 - DNA, 20 bp, synthetic construct
  source 1..20: mol_type = other DNA
gaatgttaccaataagtcaa

SEQ ID NO: 92734 - DNA, 20 bp, synthetic construct
  source 1..20: mol_type = other DNA
tgaatgttaccaataagtca

SEQ ID NO: 92735 - DNA, 20 bp, synthetic construct
  source 1..20: mol_type = other DNA
ttgaatgttaccaataagtc

SEQ ID NO: 92736 - DNA, 20 bp, synthetic construct
  source 1..20: mol_type = other DNA
tttgaatgttaccaataagt

SEQ ID NO: 92737 - DNA, 20 bp, synthetic construct
  source 1..20: mol_type = other DNA
ttttgaatgttaccaataag

SEQ ID NO: 92738 - DNA, 20 bp, synthetic construct
  source 1..20: mol_type = other DNA
attttgaatgttaccaataa

SEQ ID NO: 92739 - DNA, 20 bp, synthetic construct
  source 1..20: mol_type = other DNA
tattttgaatgttaccaata

SEQ ID NO: 92740 - DNA, 20 bp, synthetic construct
  source 1..20: mol_type = other DNA
gtattttgaatgttaccaat

SEQ ID NO: 92741 - DNA, 20 bp, synthetic construct
  source 1..20: mol_type = other DNA
agtattttgaatgttaccaa

SEQ ID NO: 92742 - DNA, 20 bp, synthetic construct
  source 1..20: mol_type = other DNA
tagtattttgaatgttacca

SEQ ID NO: 92743 - DNA, 20 bp, synthetic construct
  source 1..20: mol_type = other DNA
gtagtattttgaatgttacc

SEQ ID NO: 92744 - DNA, 20 bp, synthetic construct
  source 1..20: mol_type = other DNA
agtagtattttgaatgttac

SEQ ID NO: 92745 - DNA, 20 bp, synthetic construct
  source 1..20: mol_type = other DNA
aagtagtattttgaatgtta

SEQ ID NO: 92746 - DNA, 20 bp, synthetic construct
  source 1..20: mol_type = other DNA
taagtagtattttgaatgtt

SEQ ID NO: 92747 - DNA, 20 bp, synthetic construct
  source 1..20: mol_type = other DNA
ataagtagtattttgaatgt

SEQ ID NO: 92748 - DNA, 20 bp, synthetic construct
  source 1..20: mol_type = other DNA
aataagtagtattttgaatg

SEQ ID NO: 92749 - DNA, 20 bp, synthetic construct
  source 1..20: mol_type = other DNA
taataagtagtattttgaat

SEQ ID NO: 92750 - DNA, 20 bp, synthetic construct
  source 1..20: mol_type = other DNA
ataataagtagtattttgaa

SEQ ID NO: 92751 - DNA, 20 bp, synthetic construct
  source 1..20: mol_type = other DNA
aataataagtagtattttga

SEQ ID NO: 92752 - DNA, 20 bp, synthetic construct
  source 1..20: mol_type = other DNA
aaataataagtagtattttg

SEQ ID NO: 92753 - DNA, 20 bp, synthetic construct
  source 1..20: mol_type = other DNA
gaaataataagtagtatttt

SEQ ID NO: 92754 - DNA, 20 bp, synthetic construct
  source 1..20: mol_type = other DNA
tgaaataataagtagtattt

SEQ ID NO: 92755 - DNA, 20 bp, synthetic construct
  source 1..20: mol_type = other DNA
atgaaataataagtagtatt

SEQ ID NO: 92756 - DNA, 20 bp, synthetic construct
  source 1..20: mol_type = other DNA
tatgaaataataagtagtat

SEQ ID NO: 92757 - DNA, 20 bp, synthetic construct
  source 1..20: mol_type = other DNA
gtatgaaataataagtagta

SEQ ID NO: 92758 - DNA, 20 bp, synthetic construct
  source 1..20: mol_type = other DNA
agtatgaaataataagtagt

SEQ ID NO: 92759 - DNA, 20 bp, synthetic construct
  source 1..20: mol_type = other DNA
aagtatgaaataataagtag

SEQ ID NO: 92760 - DNA, 20 bp, synthetic construct
  source 1..20: mol_type = other DNA
aaagtatgaaataataagta

SEQ ID NO: 92761 - DNA, 20 bp, synthetic construct
  source 1..20: mol_type = other DNA
taaagtatgaaataataagt

SEQ ID NO: 92762 - DNA, 20 bp, synthetic construct
  source 1..20: mol_type = other DNA
ctaaagtatgaaataataag

SEQ ID NO: 92763 - DNA, 20 bp, synthetic construct
  source 1..20: mol_type = other DNA
gctaaagtatgaaataataa

SEQ ID NO: 92764 - DNA, 20 bp, synthetic construct
  source 1..20: mol_type = other DNA
tgctaaagtatgaaataata

SEQ ID NO: 92765 - DNA, 20 bp, synthetic construct
  source 1..20: mol_type = other DNA
gtgctaaagtatgaaataat

SEQ ID NO: 92766 - DNA, 20 bp, synthetic construct
  source 1..20: mol_type = other DNA
tgtgctaaagtatgaaataa

SEQ ID NO: 92767 - DNA, 20 bp, synthetic construct
  source 1..20: mol_type = other DNA
atgtgctaaagtatgaaata

SEQ ID NO: 92768 - DNA, 20 bp, synthetic construct
  source 1..20: mol_type = other DNA
catgtgctaaagtatgaaat

SEQ ID NO: 92769 - DNA, 20 bp, synthetic construct
  source 1..20: mol_type = other DNA
acatgtgctaaagtatgaaa

SEQ ID NO: 92770 - DNA, 20 bp, synthetic construct
  source 1..20: mol_type = other DNA
tacatgtgctaaagtatgaa

SEQ ID NO: 92771 - DNA, 20 bp, synthetic construct
  source 1..20: mol_type = other DNA
atacatgtgctaaagtatga

SEQ ID NO: 92772 - DNA, 20 bp, synthetic construct
  source 1..20: mol_type = other DNA
gatacatgtgctaaagtatg

SEQ ID NO: 92773 - DNA, 20 bp, synthetic construct
  source 1..20: mol_type = other DNA
agatacatgtgctaaagtat

SEQ ID NO: 92774 - DNA, 20 bp, synthetic construct
  source 1..20: mol_type = other DNA
tagatacatgtgctaaagta

SEQ ID NO: 92775 - DNA, 20 bp, synthetic construct
  source 1..20: mol_type = other DNA
atagatacatgtgctaaagt

SEQ ID NO: 92776 - DNA, 20 bp, synthetic construct
  source 1..20: mol_type = other DNA
aatagatacatgtgctaaag

SEQ ID NO: 92777 - DNA, 20 bp, synthetic construct
  source 1..20: mol_type = other DNA
gaatagatacatgtgctaaa

SEQ ID NO: 92778 - DNA, 20 bp, synthetic construct
  source 1..20: mol_type = other DNA
tgaatagatacatgtgctaa

SEQ ID NO: 92779 - DNA, 20 bp, synthetic construct
  source 1..20: mol_type = other DNA
ctgaatagatacatgtgcta

SEQ ID NO: 92780 - DNA, 20 bp, synthetic construct
  source 1..20: mol_type = other DNA
gctgaatagatacatgtgct

SEQ ID NO: 92781 - DNA, 20 bp, synthetic construct
  source 1..20: mol_type = other DNA
agctgaatagatacatgtgc

SEQ ID NO: 92782 - DNA, 20 bp, synthetic construct
  source 1..20: mol_type = other DNA
aagctgaatagatacatgtg

SEQ ID NO: 92783 - DNA, 20 bp, synthetic construct
  source 1..20: mol_type = other DNA
aaagctgaatagatacatgt

SEQ ID NO: 92784 - DNA, 20 bp, synthetic construct
  source 1..20: mol_type = other DNA
taaagctgaatagatacatg

SEQ ID NO: 92785 - DNA, 20 bp, synthetic construct
  source 1..20: mol_type = other DNA
ttaaagctgaatagatacat

SEQ ID NO: 92786 - DNA, 20 bp, synthetic construct
  source 1..20: mol_type = other DNA
attaaagctgaatagataca

SEQ ID NO: 92787 - DNA, 20 bp, synthetic construct
  source 1..20: mol_type = other DNA
cattaaagctgaatagatac

SEQ ID NO: 92788 - DNA, 20 bp, synthetic construct
  source 1..20: mol_type = other DNA
gcattaaagctgaatagata

SEQ ID NO: 92789 - DNA, 20 bp, synthetic construct
  source 1..20: mol_type = other DNA
agcattaaagctgaatagat

SEQ ID NO: 92790 - DNA, 20 bp, synthetic construct
  source 1..20: mol_type = other DNA
tagcattaaagctgaataga

SEQ ID NO: 92791 - DNA, 20 bp, synthetic construct
  source 1..20: mol_type = other DNA
atagcattaaagctgaatag

SEQ ID NO: 92792 - DNA, 20 bp, synthetic construct
  source 1..20: mol_type = other DNA
aatagcattaaagctgaata

SEQ ID NO: 92793 - DNA, 20 bp, synthetic construct
  source 1..20: mol_type = other DNA
taatagcattaaagctgaat

SEQ ID NO: 92794 - DNA, 20 bp, synthetic construct
  source 1..20: mol_type = other DNA
ttaatagcattaaagctgaa

SEQ ID NO: 92795 - DNA, 20 bp, synthetic construct
  source 1..20: mol_type = other DNA
gttaatagcattaaagctga

SEQ ID NO: 92796 - DNA, 20 bp, synthetic construct
  source 1..20: mol_type = other DNA
tgttaatagcattaaagctg

SEQ ID NO: 92797 - DNA, 20 bp, synthetic construct
  source 1..20: mol_type = other DNA
ctgttaatagcattaaagct

SEQ ID NO: 92798 - DNA, 20 bp, synthetic construct
  source 1..20: mol_type = other DNA
actgttaatagcattaaagc

SEQ ID NO: 92799 - DNA, 20 bp, synthetic construct
  source 1..20: mol_type = other DNA
aactgttaatagcattaaag

SEQ ID NO: 92800 - DNA, 20 bp, synthetic construct
  source 1..20: mol_type = other DNA
caactgttaatagcattaaa

SEQ ID NO: 92801 - DNA, 20 bp, synthetic construct
  source 1..20: mol_type = other DNA
acaactgttaatagcattaa

SEQ ID NO: 92802 - DNA, 20 bp, synthetic construct
  source 1..20: mol_type = other DNA
aacaactgttaatagcatta

SEQ ID NO: 92803 - DNA, 20 bp, synthetic construct
  source 1..20: mol_type = other DNA
taacaactgttaatagcatt

SEQ ID NO: 92804 - DNA, 20 bp, synthetic construct
  source 1..20: mol_type = other DNA
ttaacaactgttaatagcat

SEQ ID NO: 92805 - DNA, 20 bp, synthetic construct
  source 1..20: mol_type = other DNA
gttaacaactgttaatagca

SEQ ID NO: 92806 - DNA, 20 bp, synthetic construct
  source 1..20: mol_type = other DNA
ggttaacaactgttaatagc

SEQ ID NO: 92807 - DNA, 20 bp, synthetic construct
  source 1..20: mol_type = other DNA
aggttaacaactgttaatag

SEQ ID NO: 92808 - DNA, 20 bp, synthetic construct
  source 1..20: mol_type = other DNA
taggttaacaactgttaata

SEQ ID NO: 92809 - DNA, 20 bp, synthetic construct
  source 1..20: mol_type = other DNA
ttaggttaacaactgttaat

SEQ ID NO: 92810 - DNA, 20 bp, synthetic construct
  source 1..20: mol_type = other DNA
cttaggttaacaactgttaa

SEQ ID NO: 92811 - DNA, 20 bp, synthetic construct
  source 1..20: mol_type = other DNA
acttaggttaacaactgtta

SEQ ID NO: 92812 - DNA, 20 bp, synthetic construct
  source 1..20: mol_type = other DNA
aacttaggttaacaactgtt

SEQ ID NO: 92813 - DNA, 20 bp, synthetic construct
  source 1..20: mol_type = other DNA
aaacttaggttaacaactgt

SEQ ID NO: 92814 - DNA, 20 bp, synthetic construct
  source 1..20: mol_type = other DNA
aaaacttaggttaacaactg

SEQ ID NO: 92815 - DNA, 20 bp, synthetic construct
  source 1..20: mol_type = other DNA
gaaaacttaggttaacaact

SEQ ID NO: 92816 - DNA, 20 bp, synthetic construct
  source 1..20: mol_type = other DNA
tgaaaacttaggttaacaac

SEQ ID NO: 92817 - DNA, 20 bp, synthetic construct
  source 1..20: mol_type = other DNA
atgaaaacttaggttaacaa

SEQ ID NO: 92818 - DNA, 20 bp, synthetic construct
  source 1..20: mol_type = other DNA
aatgaaaacttaggttaaca

SEQ ID NO: 92819 - DNA, 20 bp, synthetic construct
  source 1..20: mol_type = other DNA
aaatgaaaacttaggttaac

SEQ ID NO: 92820 - DNA, 20 bp, synthetic construct
  source 1..20: mol_type = other DNA
caaatgaaaacttaggttaa

SEQ ID NO: 92821 - DNA, 20 bp, synthetic construct
  source 1..20: mol_type = other DNA
acaaatgaaaacttaggtta

SEQ ID NO: 92822 - DNA, 20 bp, synthetic construct
  source 1..20: mol_type = other DNA
aacaaatgaaaacttaggtt

SEQ ID NO: 92823 - DNA, 20 bp, synthetic construct
  source 1..20: mol_type = other DNA
caacaaatgaaaacttaggt

SEQ ID NO: 92824 - DNA, 20 bp, synthetic construct
  source 1..20: mol_type = other DNA
ccaacaaatgaaaacttagg

SEQ ID NO: 92825 - DNA, 20 bp, synthetic construct
  source 1..20: mol_type = other DNA
gccaacaaatgaaaacttag

SEQ ID NO: 92826 - DNA, 20 bp, synthetic construct
  source 1..20: mol_type = other DNA
cgccaacaaatgaaaactta

SEQ ID NO: 92827 - DNA, 20 bp, synthetic construct
  source 1..20: mol_type = other DNA
ccgccaacaaatgaaaactt

SEQ ID NO: 92828 - DNA, 20 bp, synthetic construct
  source 1..20: mol_type = other DNA
cccgccaacaaatgaaaact

SEQ ID NO: 92829 - DNA, 20 bp, synthetic construct
  source 1..20: mol_type = other DNA
gcccgccaacaaatgaaaac

SEQ ID NO: 92830 - DNA, 20 bp, synthetic construct
  source 1..20: mol_type = other DNA
tgcccgccaacaaatgaaaa

SEQ ID NO: 92831 - DNA, 20 bp, synthetic construct
  source 1..20: mol_type = other DNA
gtgcccgccaacaaatgaaa

SEQ ID NO: 92832 - DNA, 20 bp, synthetic construct
  source 1..20: mol_type = other DNA
cgtgcccgccaacaaatgaa

SEQ ID NO: 92833 - DNA, 20 bp, synthetic construct
  source 1..20: mol_type = other DNA
ccgtgcccgccaacaaatga

SEQ ID NO: 92834 - DNA, 20 bp, synthetic construct
  source 1..20: mol_type = other DNA
accgtgcccgccaacaaatg

SEQ ID NO: 92835 - DNA, 20 bp, synthetic construct
  source 1..20: mol_type = other DNA
caccgtgcccgccaacaaat

SEQ ID NO: 92836 - DNA, 20 bp, synthetic construct
  source 1..20: mol_type = other DNA
ccaccgtgcccgccaacaaa

SEQ ID NO: 92837 - DNA, 20 bp, synthetic construct
  source 1..20: mol_type = other DNA
gccaccgtgcccgccaacaa

SEQ ID NO: 92838 - DNA, 20 bp, synthetic construct
  source 1..20: mol_type = other DNA
agccaccgtgcccgccaaca

SEQ ID NO: 92839 - DNA, 20 bp, synthetic construct
  source 1..20: mol_type = other DNA
gagccaccgtgcccgccaac

SEQ ID NO: 92840 - DNA, 20 bp, synthetic construct
  source 1..20: mol_type = other DNA
tgagccaccgtgcccgccaa

SEQ ID NO: 92841 - DNA, 20 bp, synthetic construct
  source 1..20: mol_type = other DNA
gtgagccaccgtgcccgcca

SEQ ID NO: 92842 - DNA, 20 bp, synthetic construct
  source 1..20: mol_type = other DNA
tgtgagccaccgtgcccgcc

SEQ ID NO: 92843 - DNA, 20 bp, synthetic construct
  source 1..20: mol_type = other DNA
gtgtgagccaccgtgcccgc

SEQ ID NO: 92844 - DNA, 20 bp, synthetic construct
  source 1..20: mol_type = other DNA
ggtgtgagccaccgtgcccg

SEQ ID NO: 92845 - DNA, 20 bp, synthetic construct
  source 1..20: mol_type = other DNA
aggtgtgagccaccgtgccc

SEQ ID NO: 92846 - DNA, 20 bp, synthetic construct
  source 1..20: mol_type = other DNA
caggtgtgagccaccgtgcc

SEQ ID NO: 92847 - DNA, 20 bp, synthetic construct
  source 1..20: mol_type = other DNA
acaggtgtgagccaccgtgc

SEQ ID NO: 92848 - DNA, 20 bp, synthetic construct
  source 1..20: mol_type = other DNA
tacaggtgtgagccaccgtg

SEQ ID NO: 92849 - DNA, 20 bp, synthetic construct
  source 1..20: mol_type = other DNA
ttacaggtgtgagccaccgt

SEQ ID NO: 92850 - DNA, 20 bp, synthetic construct
  source 1..20: mol_type = other DNA
attacaggtgtgagccaccg

SEQ ID NO: 92851 - DNA, 20 bp, synthetic construct
  source 1..20: mol_type = other DNA
gattacaggtgtgagccacc

SEQ ID NO: 92852 - DNA, 20 bp, synthetic construct
  source 1..20: mol_type = other DNA
ggattacaggtgtgagccac

SEQ ID NO: 92853 - DNA, 20 bp, synthetic construct
  source 1..20: mol_type = other DNA
aggattacaggtgtgagcca

SEQ ID NO: 92854 - DNA, 20 bp, synthetic construct
  source 1..20: mol_type = other DNA
taggattacaggtgtgagcc

SEQ ID NO: 92855 - DNA, 20 bp, synthetic construct
  source 1..20: mol_type = other DNA
ctaggattacaggtgtgagc

SEQ ID NO: 92856 - DNA, 20 bp, synthetic construct
  source 1..20: mol_type = other DNA
gctaggattacaggtgtgag

SEQ ID NO: 92857 - DNA, 20 bp, synthetic construct
  source 1..20: mol_type = other DNA
tgctaggattacaggtgtga

SEQ ID NO: 92858 - DNA, 20 bp, synthetic construct
  source 1..20: mol_type = other DNA
gtgctaggattacaggtgtg

SEQ ID NO: 92859 - DNA, 20 bp, synthetic construct
  source 1..20: mol_type = other DNA
agtgctaggattacaggtgt

SEQ ID NO: 92860 - DNA, 20 bp, synthetic construct
  source 1..20: mol_type = other DNA
aagtgctaggattacaggtg

SEQ ID NO: 92861 - DNA, 20 bp, synthetic construct
  source 1..20: mol_type = other DNA
aaagtgctaggattacaggt

SEQ ID NO: 92862 - DNA, 20 bp, synthetic construct
  source 1..20: mol_type = other DNA
caaagtgctaggattacagg

SEQ ID NO: 92863 - DNA, 20 bp, synthetic construct
  source 1..20: mol_type = other DNA
ccaaagtgctaggattacag

SEQ ID NO: 92864 - DNA, 20 bp, synthetic construct
  source 1..20: mol_type = other DNA
cccaaagtgctaggattaca

SEQ ID NO: 92865 - DNA, 20 bp, synthetic construct
  source 1..20: mol_type = other DNA
tcccaaagtgctaggattac

SEQ ID NO: 92866 - DNA, 20 bp, synthetic construct
  source 1..20: mol_type = other DNA
ctcccaaagtgctaggatta

SEQ ID NO: 92867 - DNA, 20 bp, synthetic construct
  source 1..20: mol_type = other DNA
cctcccaaagtgctaggatt

SEQ ID NO: 92868 - DNA, 20 bp, synthetic construct
  source 1..20: mol_type = other DNA
gcctcccaaagtgctaggat

SEQ ID NO: 92869 - DNA, 20 bp, synthetic construct
  source 1..20: mol_type = other DNA
ggcctcccaaagtgctagga

SEQ ID NO: 92870 - DNA, 20 bp, synthetic construct
  source 1..20: mol_type = other DNA
cggcctcccaaagtgctagg

SEQ ID NO: 92871 - DNA, 20 bp, synthetic construct
  source 1..20: mol_type = other DNA
tcggcctcccaaagtgctag

SEQ ID NO: 92872 - DNA, 20 bp, synthetic construct
  source 1..20: mol_type = other DNA
ctcggcctcccaaagtgcta

SEQ ID NO: 92873 - DNA, 20 bp, synthetic construct
  source 1..20: mol_type = other DNA
cctcggcctcccaaagtgct

SEQ ID NO: 92874 - DNA, 20 bp, synthetic construct
  source 1..20: mol_type = other DNA
acctcggcctcccaaagtgc

SEQ ID NO: 92875 - DNA, 20 bp, synthetic construct
  source 1..20: mol_type = other DNA
cacctcggcctcccaaagtg

SEQ ID NO: 92876 - DNA, 20 bp, synthetic construct
  source 1..20: mol_type = other DNA
ccacctcggcctcccaaagt

SEQ ID NO: 92877 - DNA, 20 bp, synthetic construct
  source 1..20: mol_type = other DNA
cccacctcggcctcccaaag

SEQ ID NO: 92878 - DNA, 20 bp, synthetic construct
  source 1..20: mol_type = other DNA
gcccacctcggcctcccaaa

SEQ ID NO: 92879 - DNA, 20 bp, synthetic construct
  source 1..20: mol_type = other DNA
tgcccacctcggcctcccaa

SEQ ID NO: 92880 - DNA, 20 bp, synthetic construct
  source 1..20: mol_type = other DNA
ctgcccacctcggcctccca

SEQ ID NO: 92881 - DNA, 20 bp, synthetic construct
  source 1..20: mol_type = other DNA
tctgcccacctcggcctccc

SEQ ID NO: 92882 - DNA, 20 bp, synthetic construct
  source 1..20: mol_type = other DNA
atctgcccacctcggcctcc

SEQ ID NO: 92883 - DNA, 20 bp, synthetic construct
  source 1..20: mol_type = other DNA
gatctgcccacctcggcctc

SEQ ID NO: 92884 - DNA, 20 bp, synthetic construct
  source 1..20: mol_type = other DNA
tgatctgcccacctcggcct

SEQ ID NO: 92885 - DNA, 20 bp, synthetic construct
  source 1..20: mol_type = other DNA
gtgatctgcccacctcggcc

SEQ ID NO: 92886 - DNA, 20 bp, synthetic construct
  source 1..20: mol_type = other DNA
ggtgatctgcccacctcggc

SEQ ID NO: 92887 - DNA, 20 bp, synthetic construct
  source 1..20: mol_type = other DNA
aggtgatctgcccacctcgg

SEQ ID NO: 92888 - DNA, 20 bp, synthetic construct
  source 1..20: mol_type = other DNA
taggtgatctgcccacctcg

SEQ ID NO: 92889 - DNA, 20 bp, synthetic construct
  source 1..20: mol_type = other DNA
ttaggtgatctgcccacctc

SEQ ID NO: 92890 - DNA, 20 bp, synthetic construct
  source 1..20: mol_type = other DNA
cttaggtgatctgcccacct

SEQ ID NO: 92891 - DNA, 20 bp, synthetic construct
  source 1..20: mol_type = other DNA
ccttaggtgatctgcccacc

SEQ ID NO: 92892 - DNA, 20 bp, synthetic construct
  source 1..20: mol_type = other DNA
accttaggtgatctgcccac

SEQ ID NO: 92893 - DNA, 20 bp, synthetic construct
  source 1..20: mol_type = other DNA
gaccttaggtgatctgccca

SEQ ID NO: 92894 - DNA, 20 bp, synthetic construct
  source 1..20: mol_type = other DNA
tgaccttaggtgatctgccc

SEQ ID NO: 92895 - DNA, 20 bp, synthetic construct
  source 1..20: mol_type = other DNA
ctgaccttaggtgatctgcc

SEQ ID NO: 92896 - DNA, 20 bp, synthetic construct
  source 1..20: mol_type = other DNA
cctgaccttaggtgatctgc

SEQ ID NO: 92897 - DNA, 20 bp, synthetic construct
  source 1..20: mol_type = other DNA
tcctgaccttaggtgatctg

SEQ ID NO: 92898 - DNA, 20 bp, synthetic construct
  source 1..20: mol_type = other DNA
ctcctgaccttaggtgatct

SEQ ID NO: 92899 - DNA, 20 bp, synthetic construct
  source 1..20: mol_type = other DNA
actcctgaccttaggtgatc

SEQ ID NO: 92900 - DNA, 20 bp, synthetic construct
  source 1..20: mol_type = other DNA
aactcctgaccttaggtgat

SEQ ID NO: 92901 - DNA, 20 bp, synthetic construct
  source 1..20: mol_type = other DNA
gaactcctgaccttaggtga

SEQ ID NO: 92902 - DNA, 20 bp, synthetic construct
  source 1..20: mol_type = other DNA
cgaactcctgaccttaggtg

SEQ ID NO: 92903 - DNA, 20 bp, synthetic construct
  source 1..20: mol_type = other DNA
tcgaactcctgaccttaggt

SEQ ID NO: 92904 - DNA, 20 bp, synthetic construct
  source 1..20: mol_type = other DNA
ctcgaactcctgaccttagg

SEQ ID NO: 92905 - DNA, 20 bp, synthetic construct
  source 1..20: mol_type = other DNA
tctcgaactcctgaccttag

SEQ ID NO: 92906 - DNA, 20 bp, synthetic construct
  source 1..20: mol_type = other DNA
gtctcgaactcctgacctta

SEQ ID NO: 92907 - DNA, 20 bp, synthetic construct
  source 1..20: mol_type = other DNA
ggtctcgaactcctgacctt

SEQ ID NO: 92908 - DNA, 20 bp, synthetic construct
  source 1..20: mol_type = other DNA
tggtctcgaactcctgacct

SEQ ID NO: 92909 - DNA, 20 bp, synthetic construct
  source 1..20: mol_type = other DNA
ctggtctcgaactcctgacc

SEQ ID NO: 92910 - DNA, 20 bp, synthetic construct
  source 1..20: mol_type = other DNA
gctggtctcgaactcctgac

SEQ ID NO: 92911 - DNA, 20 bp, synthetic construct
  source 1..20: mol_type = other DNA
ggctggtctcgaactcctga

SEQ ID NO: 92912 - DNA, 20 bp, synthetic construct
  source 1..20: mol_type = other DNA
aggctggtctcgaactcctg

SEQ ID NO: 92913 - DNA, 20 bp, synthetic construct
  source 1..20: mol_type = other DNA
caggctggtctcgaactcct

SEQ ID NO: 92914 - DNA, 20 bp, synthetic construct
  source 1..20: mol_type = other DNA
ccaggctggtctcgaactcc

SEQ ID NO: 92915 - DNA, 20 bp, synthetic construct
  source 1..20: mol_type = other DNA
accaggctggtctcgaactc

SEQ ID NO: 92916 - DNA, 20 bp, synthetic construct
  source 1..20: mol_type = other DNA
gaccaggctggtctcgaact

SEQ ID NO: 92917 - DNA, 20 bp, synthetic construct
  source 1..20: mol_type = other DNA
tgaccaggctggtctcgaac

SEQ ID NO: 92918 - DNA, 20 bp, synthetic construct
  source 1..20: mol_type = other DNA
ttgaccaggctggtctcgaa

SEQ ID NO: 92919 - DNA, 20 bp, synthetic construct
  source 1..20: mol_type = other DNA
gttgaccaggctggtctcga

SEQ ID NO: 92920 - DNA, 20 bp, synthetic construct
  source 1..20: mol_type = other DNA
tgttgaccaggctggtctcg

SEQ ID NO: 92921 - DNA, 20 bp, synthetic construct
  source 1..20: mol_type = other DNA
atgttgaccaggctggtctc

SEQ ID NO: 92922 - DNA, 20 bp, synthetic construct
  source 1..20: mol_type = other DNA
catgttgaccaggctggtct

SEQ ID NO: 92923 - DNA, 20 bp, synthetic construct
  source 1..20: mol_type = other DNA
ccatgttgaccaggctggtc

SEQ ID NO: 92924 - DNA, 20 bp, synthetic construct
  source 1..20: mol_type = other DNA
accatgttgaccaggctggt

SEQ ID NO: 92925 - DNA, 20 bp, synthetic construct
  source 1..20: mol_type = other DNA
caccatgttgaccaggctgg

SEQ ID NO: 92926 - DNA, 20 bp, synthetic construct
  source 1..20: mol_type = other DNA
tcaccatgttgaccaggctg

SEQ ID NO: 92927 - DNA, 20 bp, synthetic construct
  source 1..20: mol_type = other DNA
ttcaccatgttgaccaggct

SEQ ID NO: 92928 - DNA, 20 bp, synthetic construct
  source 1..20: mol_type = other DNA
tttcaccatgttgaccaggc

SEQ ID NO: 92929 - DNA, 20 bp, synthetic construct
  source 1..20: mol_type = other DNA
gtttcaccatgttgaccagg

SEQ ID NO: 92930 - DNA, 20 bp, synthetic construct
  source 1..20: mol_type = other DNA
ggtttcaccatgttgaccag

SEQ ID NO: 92931 - DNA, 20 bp, synthetic construct
  source 1..20: mol_type = other DNA
gggtttcaccatgttgacca

SEQ ID NO: 92932 - DNA, 20 bp, synthetic construct
  source 1..20: mol_type = other DNA
agggtttcaccatgttgacc

SEQ ID NO: 92933 - DNA, 20 bp, synthetic construct
  source 1..20: mol_type = other DNA
cagggtttcaccatgttgac

SEQ ID NO: 92934 - DNA, 20 bp, synthetic construct
  source 1..20: mol_type = other DNA
acagggtttcaccatgttga

SEQ ID NO: 92935 - DNA, 20 bp, synthetic construct
  source 1..20: mol_type = other DNA
gacagggtttcaccatgttg

SEQ ID NO: 92936 - DNA, 20 bp, synthetic construct
  source 1..20: mol_type = other DNA
agacagggtttcaccatgtt

SEQ ID NO: 92937 - DNA, 20 bp, synthetic construct
  source 1..20: mol_type = other DNA
aagacagggtttcaccatgt

SEQ ID NO: 92938 - DNA, 20 bp, synthetic construct
  source 1..20: mol_type = other DNA
caagacagggtttcaccatg

SEQ ID NO: 92939 - DNA, 20 bp, synthetic construct
  source 1..20: mol_type = other DNA
tcaagacagggtttcaccat

SEQ ID NO: 92940 - DNA, 20 bp, synthetic construct
  source 1..20: mol_type = other DNA
gtcaagacagggtttcacca

SEQ ID NO: 92941 - DNA, 20 bp, synthetic construct
  source 1..20: mol_type = other DNA
ggtcaagacagggtttcacc

SEQ ID NO: 92942 - DNA, 20 bp, synthetic construct
  source 1..20: mol_type = other DNA
tggtcaagacagggtttcac

SEQ ID NO: 92943 - DNA, 20 bp, synthetic construct
  source 1..20: mol_type = other DNA
ttggtcaagacagggtttca

SEQ ID NO: 92944 - DNA, 20 bp, synthetic construct
  source 1..20: mol_type = other DNA
tttggtcaagacagggtttc

SEQ ID NO: 92945 - DNA, 20 bp, synthetic construct
  source 1..20: mol_type = other DNA
ttttggtcaagacagggttt

SEQ ID NO: 92946 - DNA, 20 bp, synthetic construct
  source 1..20: mol_type = other DNA
tttttggtcaagacagggtt

SEQ ID NO: 92947 - DNA, 20 bp, synthetic construct
  source 1..20: mol_type = other DNA
atttttggtcaagacagggt

SEQ ID NO: 92948 - DNA, 20 bp, synthetic construct
  source 1..20: mol_type = other DNA
tatttttggtcaagacaggg

SEQ ID NO: 92949 - DNA, 20 bp, synthetic construct
  source 1..20: mol_type = other DNA
ctatttttggtcaagacagg

SEQ ID NO: 92950 - DNA, 20 bp, synthetic construct
  source 1..20: mol_type = other DNA
tctatttttggtcaagacag

SEQ ID NO: 92951 - DNA, 20 bp, synthetic construct
  source 1..20: mol_type = other DNA
ttctatttttggtcaagaca

SEQ ID NO: 92952 - DNA, 20 bp, synthetic construct
  source 1..20: mol_type = other DNA
tttctatttttggtcaagac

SEQ ID NO: 92953 - DNA, 20 bp, synthetic construct
  source 1..20: mol_type = other DNA
ttttctatttttggtcaaga

SEQ ID NO: 92954 - DNA, 20 bp, synthetic construct
  source 1..20: mol_type = other DNA
tttttctatttttggtcaag

SEQ ID NO: 92955 - DNA, 20 bp, synthetic construct
  source 1..20: mol_type = other DNA
atttttctatttttggtcaa

SEQ ID NO: 92956 - DNA, 20 bp, synthetic construct
  source 1..20: mol_type = other DNA
aatttttctatttttggtca

SEQ ID NO: 92957 - DNA, 20 bp, synthetic construct
  source 1..20: mol_type = other DNA
taatttttctatttttggtc

SEQ ID NO: 92958 - DNA, 20 bp, synthetic construct
  source 1..20: mol_type = other DNA
ctaatttttctatttttggt

SEQ ID NO: 92959 - DNA, 20 bp, synthetic construct
  source 1..20: mol_type = other DNA
gctaatttttctatttttgg

SEQ ID NO: 92960 - DNA, 20 bp, synthetic construct
  source 1..20: mol_type = other DNA
agctaatttttctatttttg

SEQ ID NO: 92961 - DNA, 20 bp, synthetic construct
  source 1..20: mol_type = other DNA
tagctaatttttctattttt

SEQ ID NO: 92962 - DNA, 20 bp, synthetic construct
  source 1..20: mol_type = other DNA
ctagctaatttttctatttt

SEQ ID NO: 92963 - DNA, 20 bp, synthetic construct
  source 1..20: mol_type = other DNA
cctagctaatttttctattt

SEQ ID NO: 92964 - DNA, 20 bp, synthetic construct
  source 1..20: mol_type = other DNA
gcctagctaatttttctatt

SEQ ID NO: 92965 - DNA, 20 bp, synthetic construct
  source 1..20: mol_type = other DNA
tgcctagctaatttttctat

SEQ ID NO: 92966 - DNA, 20 bp, synthetic construct
  source 1..20: mol_type = other DNA
atgcctagctaatttttcta

SEQ ID NO: 92967 - DNA, 20 bp, synthetic construct
  source 1..20: mol_type = other DNA
catgcctagctaatttttct

SEQ ID NO: 92968 - DNA, 20 bp, synthetic construct
  source 1..20: mol_type = other DNA
ccatgcctagctaatttttc

SEQ ID NO: 92969 - DNA, 20 bp, synthetic construct
  source 1..20: mol_type = other DNA
accatgcctagctaattttt

SEQ ID NO: 92970 - DNA, 20 bp, synthetic construct
  source 1..20: mol_type = other DNA
caccatgcctagctaatttt

SEQ ID NO: 92971 - DNA, 20 bp, synthetic construct
  source 1..20: mol_type = other DNA
ccaccatgcctagctaattt

SEQ ID NO: 92972 - DNA, 20 bp, synthetic construct
  source 1..20: mol_type = other DNA
gccaccatgcctagctaatt

SEQ ID NO: 92973 - DNA, 20 bp, synthetic construct
  source 1..20: mol_type = other DNA
cgccaccatgcctagctaat

SEQ ID NO: 92974 - DNA, 20 bp, synthetic construct
  source 1..20: mol_type = other DNA
gcgccaccatgcctagctaa

SEQ ID NO: 92975 - DNA, 20 bp, synthetic construct
  source 1..20: mol_type = other DNA
tgcgccaccatgcctagcta

SEQ ID NO: 92976 - DNA, 20 bp, synthetic construct
  source 1..20: mol_type = other DNA
gtgcgccaccatgcctagct

SEQ ID NO: 92977 - DNA, 20 bp, synthetic construct
  source 1..20: mol_type = other DNA
tgtgcgccaccatgcctagc

SEQ ID NO: 92978 - DNA, 20 bp, synthetic construct
  source 1..20: mol_type = other DNA
gtgtgcgccaccatgcctag

SEQ ID NO: 92979 - DNA, 20 bp, synthetic construct
  source 1..20: mol_type = other DNA
agtgtgcgccaccatgccta

SEQ ID NO: 92980 - DNA, 20 bp, synthetic construct
  source 1..20: mol_type = other DNA
aagtgtgcgccaccatgcct

SEQ ID NO: 92981 - DNA, 20 bp, synthetic construct
  source 1..20: mol_type = other DNA
caagtgtgcgccaccatgcc

SEQ ID NO: 92982 - DNA, 20 bp, synthetic construct
  source 1..20: mol_type = other DNA
acaagtgtgcgccaccatgc

SEQ ID NO: 92983 - DNA, 20 bp, synthetic construct
  source 1..20: mol_type = other DNA
tacaagtgtgcgccaccatg

SEQ ID NO: 92984 - DNA, 20 bp, synthetic construct
  source 1..20: mol_type = other DNA
ttacaagtgtgcgccaccat

SEQ ID NO: 92985 - DNA, 20 bp, synthetic construct
  source 1..20: mol_type = other DNA
attacaagtgtgcgccacca

SEQ ID NO: 92986 - DNA, 20 bp, synthetic construct
  source 1..20: mol_type = other DNA
gattacaagtgtgcgccacc

SEQ ID NO: 92987 - DNA, 20 bp, synthetic construct
  source 1..20: mol_type = other DNA
ggattacaagtgtgcgccac

SEQ ID NO: 92988 - DNA, 20 bp, synthetic construct
  source 1..20: mol_type = other DNA
gggattacaagtgtgcgcca

SEQ ID NO: 92989 - DNA, 20 bp, synthetic construct
  source 1..20: mol_type = other DNA
tgggattacaagtgtgcgcc

SEQ ID NO: 92990 - DNA, 20 bp, synthetic construct
  source 1..20: mol_type = other DNA
ctgggattacaagtgtgcgc

SEQ ID NO: 92991 - DNA, 20 bp, synthetic construct
  source 1..20: mol_type = other DNA
gctgggattacaagtgtgcg

SEQ ID NO: 92992 - DNA, 20 bp, synthetic construct
  source 1..20: mol_type = other DNA
agctgggattacaagtgtgc

SEQ ID NO: 92993 - DNA, 20 bp, synthetic construct
  source 1..20: mol_type = other DNA
tagctgggattacaagtgtg

SEQ ID NO: 92994 - DNA, 20 bp, synthetic construct
  source 1..20: mol_type = other DNA
gtagctgggattacaagtgt

SEQ ID NO: 92995 - DNA, 20 bp, synthetic construct
  source 1..20: mol_type = other DNA
agtagctgggattacaagtg

SEQ ID NO: 92996 - DNA, 20 bp, synthetic construct
  source 1..20: mol_type = other DNA
aagtagctgggattacaagt

SEQ ID NO: 92997 - DNA, 20 bp, synthetic construct
  source 1..20: mol_type = other DNA
caagtagctgggattacaag

SEQ ID NO: 92998 - DNA, 20 bp, synthetic construct
  source 1..20: mol_type = other DNA
ccaagtagctgggattacaa

SEQ ID NO: 92999 - DNA, 20 bp, synthetic construct
  source 1..20: mol_type = other DNA
gccaagtagctgggattaca

SEQ ID NO: 93000 - DNA, 20 bp, synthetic construct
  source 1..20: mol_type = other DNA
tgccaagtagctgggattac

SEQ ID NO: 93001 - DNA, 20 bp, synthetic construct
  source 1..20: mol_type = other DNA
ctgccaagtagctgggatta

SEQ ID NO: 93002 - DNA, 20 bp, synthetic construct
  source 1..20: mol_type = other DNA
cctgccaagtagctgggatt

SEQ ID NO: 93003 - DNA, 20 bp, synthetic construct
  source 1..20: mol_type = other DNA
gcctgccaagtagctgggat

SEQ ID NO: 93004 - DNA, 20 bp, synthetic construct
  source 1..20: mol_type = other DNA
agcctgccaagtagctggga

SEQ ID NO: 93005 - DNA, 20 bp, synthetic construct
  source 1..20: mol_type = other DNA
cagcctgccaagtagctggg

SEQ ID NO: 93006 - DNA, 20 bp, synthetic construct
  source 1..20: mol_type = other DNA
tcagcctgccaagtagctgg

SEQ ID NO: 93007 - DNA, 20 bp, synthetic construct
  source 1..20: mol_type = other DNA
ctcagcctgccaagtagctg

SEQ ID NO: 93008 - DNA, 20 bp, synthetic construct
  source 1..20: mol_type = other DNA
cctcagcctgccaagtagct

SEQ ID NO: 93009 - DNA, 20 bp, synthetic construct
  source 1..20: mol_type = other DNA
gcctcagcctgccaagtagc

SEQ ID NO: 93010 - DNA, 20 bp, synthetic construct
  source 1..20: mol_type = other DNA
tgcctcagcctgccaagtag

SEQ ID NO: 93011 - DNA, 20 bp, synthetic construct
  source 1..20: mol_type = other DNA
ctgcctcagcctgccaagta

SEQ ID NO: 93012 - DNA, 20 bp, synthetic construct
  source 1..20: mol_type = other DNA
cctgcctcagcctgccaagt

SEQ ID NO: 93013 - DNA, 20 bp, synthetic construct
  source 1..20: mol_type = other DNA
tcctgcctcagcctgccaag

SEQ ID NO: 93014 - DNA, 20 bp, synthetic construct
  source 1..20: mol_type = other DNA
atcctgcctcagcctgccaa

SEQ ID NO: 93015 - DNA, 20 bp, synthetic construct
  source 1..20: mol_type = other DNA
tatcctgcctcagcctgcca

SEQ ID NO: 93016 - DNA, 20 bp, synthetic construct
  source 1..20: mol_type = other DNA
ttatcctgcctcagcctgcc

SEQ ID NO: 93017 - DNA, 20 bp, synthetic construct
  source 1..20: mol_type = other DNA
attatcctgcctcagcctgc

SEQ ID NO: 93018 - DNA, 20 bp, synthetic construct
  source 1..20: mol_type = other DNA
gattatcctgcctcagcctg

SEQ ID NO: 93019 - DNA, 20 bp, synthetic construct
  source 1..20: mol_type = other DNA
cgattatcctgcctcagcct

SEQ ID NO: 93020 - DNA, 20 bp, synthetic construct
  source 1..20: mol_type = other DNA
gcgattatcctgcctcagcc

SEQ ID NO: 93021 - DNA, 20 bp, synthetic construct
  source 1..20: mol_type = other DNA
agcgattatcctgcctcagc

SEQ ID NO: 93022 - DNA, 20 bp, synthetic construct
  source 1..20: mol_type = other DNA
aagcgattatcctgcctcag

SEQ ID NO: 93023 - DNA, 20 bp, synthetic construct
  source 1..20: mol_type = other DNA
caagcgattatcctgcctca

SEQ ID NO: 93024 - DNA, 20 bp, synthetic construct
  source 1..20: mol_type = other DNA
tcaagcgattatcctgcctc

SEQ ID NO: 93025 - DNA, 20 bp, synthetic construct
  source 1..20: mol_type = other DNA
ttcaagcgattatcctgcct

SEQ ID NO: 93026 - DNA, 20 bp, synthetic construct
  source 1..20: mol_type = other DNA
gttcaagcgattatcctgcc

SEQ ID NO: 93027 - DNA, 20 bp, synthetic construct
  source 1..20: mol_type = other DNA
ggttcaagcgattatcctgc

SEQ ID NO: 93028 - DNA, 20 bp, synthetic construct
  source 1..20: mol_type = other DNA
gggttcaagcgattatcctg

SEQ ID NO: 93029 - DNA, 20 bp, synthetic construct
  source 1..20: mol_type = other DNA
tgggttcaagcgattatcct

SEQ ID NO: 93030 - DNA, 20 bp, synthetic construct
  source 1..20: mol_type = other DNA
ctgggttcaagcgattatcc

SEQ ID NO: 93031 - DNA, 20 bp, synthetic construct
  source 1..20: mol_type = other DNA
cctgggttcaagcgattatc

SEQ ID NO: 93032 - DNA, 20 bp, synthetic construct
  source 1..20: mol_type = other DNA
tcctgggttcaagcgattat

SEQ ID NO: 93033 - DNA, 20 bp, synthetic construct
  source 1..20: mol_type = other DNA
ctcctgggttcaagcgatta

SEQ ID NO: 93034 - DNA, 20 bp, synthetic construct
  source 1..20: mol_type = other DNA
tctcctgggttcaagcgatt

SEQ ID NO: 93035 - DNA, 20 bp, synthetic construct
  source 1..20: mol_type = other DNA
gtctcctgggttcaagcgat

SEQ ID NO: 93036 - DNA, 20 bp, synthetic construct
  source 1..20: mol_type = other DNA
tgtctcctgggttcaagcga

SEQ ID NO: 93037 - DNA, 20 bp, synthetic construct
  source 1..20: mol_type = other DNA
ctgtctcctgggttcaagcg

SEQ ID NO: 93038 - DNA, 20 bp, synthetic construct
  source 1..20: mol_type = other DNA
tctgtctcctgggttcaagc

SEQ ID NO: 93039 - DNA, 20 bp, synthetic construct
  source 1..20: mol_type = other DNA
ctctgtctcctgggttcaag

SEQ ID NO: 93040 - DNA, 20 bp, synthetic construct
  source 1..20: mol_type = other DNA
cctctgtctcctgggttcaa

SEQ ID NO: 93041 - DNA, 20 bp, synthetic construct
  source 1..20: mol_type = other DNA
acctctgtctcctgggttca

SEQ ID NO: 93042 - DNA, 20 bp, synthetic construct
  source 1..20: mol_type = other DNA
aacctctgtctcctgggttc

SEQ ID NO: 93043 - DNA, 20 bp, synthetic construct
  source 1..20: mol_type = other DNA
caacctctgtctcctgggtt

SEQ ID NO: 93044 - DNA, 20 bp, synthetic construct
  source 1..20: mol_type = other DNA
gcaacctctgtctcctgggt

SEQ ID NO: 93045 - DNA, 20 bp, synthetic construct
  source 1..20: mol_type = other DNA
tgcaacctctgtctcctggg

SEQ ID NO: 93046 - DNA, 20 bp, synthetic construct
  source 1..20: mol_type = other DNA
ctgcaacctctgtctcctgg

SEQ ID NO: 93047 - DNA, 20 bp, synthetic construct
  source 1..20: mol_type = other DNA
actgcaacctctgtctcctg

SEQ ID NO: 93048 - DNA, 20 bp, synthetic construct
  source 1..20: mol_type = other DNA
cactgcaacctctgtctcct

SEQ ID NO: 93049 - DNA, 20 bp, synthetic construct
  source 1..20: mol_type = other DNA
tcactgcaacctctgtctcc

SEQ ID NO: 93050 - DNA, 20 bp, synthetic construct
  source 1..20: mol_type = other DNA
ctcactgcaacctctgtctc

SEQ ID NO: 93051 - DNA, 20 bp, synthetic construct
  source 1..20: mol_type = other DNA
gctcactgcaacctctgtct

SEQ ID NO: 93052 - DNA, 20 bp, synthetic construct
  source 1..20: mol_type = other DNA
ggctcactgcaacctctgtc

SEQ ID NO: 93053 - DNA, 20 bp, synthetic construct
  source 1..20: mol_type = other DNA
cggctcactgcaacctctgt

SEQ ID NO: 93054 - DNA, 20 bp, synthetic construct
  source 1..20: mol_type = other DNA
tcggctcactgcaacctctg

SEQ ID NO: 93055 - DNA, 20 bp, synthetic construct
  source 1..20: mol_type = other DNA
ctcggctcactgcaacctct

SEQ ID NO: 93056 - DNA, 20 bp, synthetic construct
  source 1..20: mol_type = other DNA
tctcggctcactgcaacctc

SEQ ID NO: 93057 - DNA, 20 bp, synthetic construct
  source 1..20: mol_type = other DNA
atctcggctcactgcaacct

SEQ ID NO: 93058 - DNA, 20 bp, synthetic construct
  source 1..20: mol_type = other DNA
gatctcggctcactgcaacc

SEQ ID NO: 93059 - DNA, 20 bp, synthetic construct
  source 1..20: mol_type = other DNA
tgatctcggctcactgcaac

SEQ ID NO: 93060 - DNA, 20 bp, synthetic construct
  source 1..20: mol_type = other DNA
gtgatctcggctcactgcaa

SEQ ID NO: 93061 - DNA, 20 bp, synthetic construct
  source 1..20: mol_type = other DNA
tgtgatctcggctcactgca

SEQ ID NO: 93062 - DNA, 20 bp, synthetic construct
  source 1..20: mol_type = other DNA
gtgtgatctcggctcactgc

SEQ ID NO: 93063 - DNA, 20 bp, synthetic construct
  source 1..20: mol_type = other DNA
ggtgtgatctcggctcactg

SEQ ID NO: 93064 - DNA, 20 bp, synthetic construct
  source 1..20: mol_type = other DNA
tggtgtgatctcggctcact

SEQ ID NO: 93065 - DNA, 20 bp, synthetic construct
  source 1..20: mol_type = other DNA
gtggtgtgatctcggctcac

SEQ ID NO: 93066 - DNA, 20 bp, synthetic construct
  source 1..20: mol_type = other DNA
agtggtgtgatctcggctca

SEQ ID NO: 93067 - DNA, 20 bp, synthetic construct
  source 1..20: mol_type = other DNA
gagtggtgtgatctcggctc

SEQ ID NO: 93068 - DNA, 20 bp, synthetic construct
  source 1..20: mol_type = other DNA
ggagtggtgtgatctcggct

SEQ ID NO: 93069 - DNA, 20 bp, synthetic construct
  source 1..20: mol_type = other DNA
tggagtggtgtgatctcggc

SEQ ID NO: 93070 - DNA, 20 bp, synthetic construct
  source 1..20: mol_type = other DNA
gtggagtggtgtgatctcgg

SEQ ID NO: 93071 - DNA, 20 bp, synthetic construct
  source 1..20: mol_type = other DNA
agtggagtggtgtgatctcg

SEQ ID NO: 93072 - DNA, 20 bp, synthetic construct
  source 1..20: mol_type = other DNA
gagtggagtggtgtgatctc

SEQ ID NO: 93073 - DNA, 20 bp, synthetic construct
  source 1..20: mol_type = other DNA
ggagtggagtggtgtgatct

SEQ ID NO: 93074 - DNA, 20 bp, synthetic construct
  source 1..20: mol_type = other DNA
tggagtggagtggtgtgatc

SEQ ID NO: 93075 - DNA, 20 bp, synthetic construct
  source 1..20: mol_type = other DNA
atggagtggagtggtgtgat

SEQ ID NO: 93076 - DNA, 20 bp, synthetic construct
  source 1..20: mol_type = other DNA
gatggagtggagtggtgtga

SEQ ID NO: 93077 - DNA, 20 bp, synthetic construct
  source 1..20: mol_type = other DNA
ggatggagtggagtggtgtg

SEQ ID NO: 93078 - DNA, 20 bp, synthetic construct
  source 1..20: mol_type = other DNA
aggatggagtggagtggtgt

SEQ ID NO: 93079 - DNA, 20 bp, synthetic construct
  source 1..20: mol_type = other DNA
caggatggagtggagtggtg

SEQ ID NO: 93080 - DNA, 20 bp, synthetic construct
  source 1..20: mol_type = other DNA
ccaggatggagtggagtggt

SEQ ID NO: 93081 - DNA, 20 bp, synthetic construct
  source 1..20: mol_type = other DNA
cccaggatggagtggagtgg

SEQ ID NO: 93082 - DNA, 20 bp, synthetic construct
  source 1..20: mol_type = other DNA
gcccaggatggagtggagtg

SEQ ID NO: 93083 - DNA, 20 bp, synthetic construct
  source 1..20: mol_type = other DNA
cgcccaggatggagtggagt

SEQ ID NO: 93084 - DNA, 20 bp, synthetic construct
  source 1..20: mol_type = other DNA
tcgcccaggatggagtggag

SEQ ID NO: 93085 - DNA, 20 bp, synthetic construct
  source 1..20: mol_type = other DNA
gtcgcccaggatggagtgga

SEQ ID NO: 93086 - DNA, 20 bp, synthetic construct
  source 1..20: mol_type = other DNA
tgtcgcccaggatggagtgg

SEQ ID NO: 93087 - DNA, 20 bp, synthetic construct
  source 1..20: mol_type = other DNA
ctgtcgcccaggatggagtg

SEQ ID NO: 93088 - DNA, 20 bp, synthetic construct
  source 1..20: mol_type = other DNA
tctgtcgcccaggatggagt

SEQ ID NO: 93089 - DNA, 20 bp, synthetic construct
  source 1..20: mol_type = other DNA
ctctgtcgcccaggatggag

SEQ ID NO: 93090 - DNA, 20 bp, synthetic construct
  source 1..20: mol_type = other DNA
gctctgtcgcccaggatgga

SEQ ID NO: 93091 - DNA, 20 bp, synthetic construct
  source 1..20: mol_type = other DNA
tgctctgtcgcccaggatgg

SEQ ID NO: 93092 - DNA, 20 bp, synthetic construct
  source 1..20: mol_type = other DNA
ttgctctgtcgcccaggatg

SEQ ID NO: 93093 - DNA, 20 bp, synthetic construct
  source 1..20: mol_type = other DNA
cttgctctgtcgcccaggat

SEQ ID NO: 93094 - DNA, 20 bp, synthetic construct
  source 1..20: mol_type = other DNA
tcttgctctgtcgcccagga

SEQ ID NO: 93095 - DNA, 20 bp, synthetic construct
  source 1..20: mol_type = other DNA
gtcttgctctgtcgcccagg

SEQ ID NO: 93096 - DNA, 20 bp, synthetic construct
  source 1..20: mol_type = other DNA
agtcttgctctgtcgcccag

SEQ ID NO: 93097 - DNA, 20 bp, synthetic construct
  source 1..20: mol_type = other DNA
cagtcttgctctgtcgccca

SEQ ID NO: 93098 - DNA, 20 bp, synthetic construct
  source 1..20: mol_type = other DNA
gcagtcttgctctgtcgccc

SEQ ID NO: 93099 - DNA, 20 bp, synthetic construct
  source 1..20: mol_type = other DNA
tgcagtcttgctctgtcgcc

SEQ ID NO: 93100 - DNA, 20 bp, synthetic construct
  source 1..20: mol_type = other DNA
atgcagtcttgctctgtcgc

SEQ ID NO: 93101 - DNA, 20 bp, synthetic construct
  source 1..20: mol_type = other DNA
gatgcagtcttgctctgtcg

SEQ ID NO: 93102 - DNA, 20 bp, synthetic construct
  source 1..20: mol_type = other DNA
agatgcagtcttgctctgtc

SEQ ID NO: 93103 - DNA, 20 bp, synthetic construct
  source 1..20: mol_type = other DNA
gagatgcagtcttgctctgt

SEQ ID NO: 93104 - DNA, 20 bp, synthetic construct
  source 1..20: mol_type = other DNA
tgagatgcagtcttgctctg

SEQ ID NO: 93105 - DNA, 20 bp, synthetic construct
  source 1..20: mol_type = other DNA
ttgagatgcagtcttgctct

SEQ ID NO: 93106 - DNA, 20 bp, synthetic construct
  source 1..20: mol_type = other DNA
tttgagatgcagtcttgctc

SEQ ID NO: 93107 - DNA, 20 bp, synthetic construct
  source 1..20: mol_type = other DNA
ttttgagatgcagtcttgct

SEQ ID NO: 93108 - DNA, 20 bp, synthetic construct
  source 1..20: mol_type = other DNA
tttttgagatgcagtcttgc

SEQ ID NO: 93109 - DNA, 20 bp, synthetic construct
  source 1..20: mol_type = other DNA
ttttttgagatgcagtcttg

SEQ ID NO: 93110 - DNA, 20 bp, synthetic construct
  source 1..20: mol_type = other DNA
tttttttgagatgcagtctt

SEQ ID NO: 93111 - DNA, 20 bp, synthetic construct
  source 1..20: mol_type = other DNA
ttttttttgagatgcagtct

SEQ ID NO: 93112 - DNA, 20 bp, synthetic construct
  source 1..20: mol_type = other DNA
tttttttttgagatgcagtc

SEQ ID NO: 93113 - DNA, 20 bp, synthetic construct
  source 1..20: mol_type = other DNA
ttttttttttgagatgcagt

SEQ ID NO: 93114 - DNA, 20 bp, synthetic construct
  source 1..20: mol_type = other DNA
tttttttttttgagatgcag

SEQ ID NO: 93115 - DNA, 20 bp, synthetic construct
  source 1..20: mol_type = other DNA
ttttttttttttgagatgca

SEQ ID NO: 93116 - DNA, 20 bp, synthetic construct
  source 1..20: mol_type = other DNA
tttttttttttttgagatgc

SEQ ID NO: 93117 - DNA, 20 bp, synthetic construct
  source 1..20: mol_type = other DNA
ttttttttttttttgagatg

SEQ ID NO: 93118 - DNA, 20 bp, synthetic construct
  source 1..20: mol_type = other DNA
tttttttttttttttgagat

SEQ ID NO: 93119 - DNA, 20 bp, synthetic construct
  source 1..20: mol_type = other DNA
ttttttttttttttttgaga

SEQ ID NO: 93120 - DNA, 20 bp, synthetic construct
  source 1..20: mol_type = other DNA
tttttttttttttttttgag

SEQ ID NO: 93121 - DNA, 20 bp, synthetic construct
  source 1..20: mol_type = other DNA
ttttttttttttttttttga

SEQ ID NO: 93122 - DNA, 20 bp, synthetic construct
  source 1..20: mol_type = other DNA
tttttttttttttttttttg

SEQ ID NO: 93123 - DNA, 20 bp, synthetic construct
  source 1..20: mol_type = other DNA
tttttttttttttttttttt

SEQ ID NO: 93124 - DNA, 20 bp, synthetic construct
  source 1..20: mol_type = other DNA
tttttttttttttttttttt

SEQ ID NO: 93125 - DNA, 20 bp, synthetic construct
  source 1..20: mol_type = other DNA
tttttttttttttttttttt

SEQ ID NO: 93126 - DNA, 20 bp, synthetic construct
  source 1..20: mol_type = other DNA
tttttttttttttttttttt

SEQ ID NO: 93127 - DNA, 20 bp, synthetic construct
  source 1..20: mol_type = other DNA
cttttttttttttttttttt

SEQ ID NO: 93128 - DNA, 20 bp, synthetic construct
  source 1..20: mol_type = other DNA
actttttttttttttttttt

SEQ ID NO: 93129 - DNA, 20 bp, synthetic construct
  source 1..20: mol_type = other DNA
aacttttttttttttttttt

SEQ ID NO: 93130 - DNA, 20 bp, synthetic construct
  source 1..20: mol_type = other DNA
aaactttttttttttttttt

SEQ ID NO: 93131 - DNA, 20 bp, synthetic construct
  source 1..20: mol_type = other DNA
aaaacttttttttttttttt

SEQ ID NO: 93132 - DNA, 20 bp, synthetic construct
  source 1..20: mol_type = other DNA
aaaaactttttttttttttt

SEQ ID NO: 93133 - DNA, 20 bp, synthetic construct
  source 1..20: mol_type = other DNA
gaaaaacttttttttttttt

SEQ ID NO: 93134 - DNA, 20 bp, synthetic construct
  source 1..20: mol_type = other DNA
tgaaaaactttttttttttt

SEQ ID NO: 93135 - DNA, 20 bp, synthetic construct
  source 1..20: mol_type = other DNA
ttgaaaaacttttttttttt

SEQ ID NO: 93136 - DNA, 20 bp, synthetic construct
  source 1..20: mol_type = other DNA
attgaaaaactttttttttt

SEQ ID NO: 93137 - DNA, 20 bp, synthetic construct
  source 1..20: mol_type = other DNA
aattgaaaaacttttttttt

SEQ ID NO: 93138 - DNA, 20 bp, synthetic construct
  source 1..20: mol_type = other DNA
aaattgaaaaactttttttt

SEQ ID NO: 93139 - DNA, 20 bp, synthetic construct
  source 1..20: mol_type = other DNA
caaattgaaaaacttttttt

SEQ ID NO: 93140 - DNA, 20 bp, synthetic construct
  source 1..20: mol_type = other DNA
acaaattgaaaaactttttt

SEQ ID NO: 93141 - DNA, 20 bp, synthetic construct
  source 1..20: mol_type = other DNA
aacaaattgaaaaacttttt

SEQ ID NO: 93142 - DNA, 20 bp, synthetic construct
  source 1..20: mol_type = other DNA
taacaaattgaaaaactttt

SEQ ID NO: 93143 - DNA, 20 bp, synthetic construct
  source 1..20: mol_type = other DNA
ttaacaaattgaaaaacttt

SEQ ID NO: 93144 - DNA, 20 bp, synthetic construct
  source 1..20: mol_type = other DNA
tttaacaaattgaaaaactt

SEQ ID NO: 93145 - DNA, 20 bp, synthetic construct
  source 1..20: mol_type = other DNA
gtttaacaaattgaaaaact

SEQ ID NO: 93146 - DNA, 20 bp, synthetic construct
  source 1..20: mol_type = other DNA
tgtttaacaaattgaaaaac

SEQ ID NO: 93147 - DNA, 20 bp, synthetic construct
  source 1..20: mol_type = other DNA
ttgtttaacaaattgaaaaa

SEQ ID NO: 93148 - DNA, 20 bp, synthetic construct
  source 1..20: mol_type = other DNA
attgtttaacaaattgaaaa

SEQ ID NO: 93149 - DNA, 20 bp, synthetic construct
  source 1..20: mol_type = other DNA
tattgtttaacaaattgaaa

SEQ ID NO: 93150 - DNA, 20 bp, synthetic construct
  source 1..20: mol_type = other DNA
ctattgtttaacaaattgaa

SEQ ID NO: 93151 - DNA, 20 bp, synthetic construct
  source 1..20: mol_type = other DNA
actattgtttaacaaattga

SEQ ID NO: 93152 - DNA, 20 bp, synthetic construct
  source 1..20: mol_type = other DNA
aactattgtttaacaaattg

SEQ ID NO: 93153 - DNA, 20 bp, synthetic construct
  source 1..20: mol_type = other DNA
taactattgtttaacaaatt

SEQ ID NO: 93154 - DNA, 20 bp, synthetic construct
  source 1..20: mol_type = other DNA
ttaactattgtttaacaaat

SEQ ID NO: 93155 - DNA, 20 bp, synthetic construct
  source 1..20: mol_type = other DNA
gttaactattgtttaacaaa

SEQ ID NO: 93156 - DNA, 20 bp, synthetic construct
  source 1..20: mol_type = other DNA
tgttaactattgtttaacaa

SEQ ID NO: 93157 - DNA, 20 bp, synthetic construct
  source 1..20: mol_type = other DNA
gtgttaactattgtttaaca

SEQ ID NO: 93158 - DNA, 20 bp, synthetic construct
  source 1..20: mol_type = other DNA
tgtgttaactattgtttaac

SEQ ID NO: 93159 - DNA, 20 bp, synthetic construct
  source 1..20: mol_type = other DNA
atgtgttaactattgtttaa

SEQ ID NO: 93160 - DNA, 20 bp, synthetic construct
  source 1..20: mol_type = other DNA
tatgtgttaactattgttta

SEQ ID NO: 93161 - DNA, 20 bp, synthetic construct
  source 1..20: mol_type = other DNA
gtatgtgttaactattgttt

SEQ ID NO: 93162 - DNA, 20 bp, synthetic construct
  source 1..20: mol_type = other DNA
tgtatgtgttaactattgtt

SEQ ID NO: 93163 - DNA, 20 bp, synthetic construct
  source 1..20: mol_type = other DNA
ttgtatgtgttaactattgt

SEQ ID NO: 93164 - DNA, 20 bp, synthetic construct
  source 1..20: mol_type = other DNA
tttgtatgtgttaactattg

SEQ ID NO: 93165 - DNA, 20 bp, synthetic construct
  source 1..20: mol_type = other DNA
atttgtatgtgttaactatt

SEQ ID NO: 93166 - DNA, 20 bp, synthetic construct
  source 1..20: mol_type = other DNA
catttgtatgtgttaactat

SEQ ID NO: 93167 - DNA, 20 bp, synthetic construct
  source 1..20: mol_type = other DNA
tcatttgtatgtgttaacta

SEQ ID NO: 93168 - DNA, 20 bp, synthetic construct
  source 1..20: mol_type = other DNA
atcatttgtatgtgttaact

SEQ ID NO: 93169 - DNA, 20 bp, synthetic construct
  source 1..20: mol_type = other DNA
tatcatttgtatgtgttaac

SEQ ID NO: 93170 - DNA, 20 bp, synthetic construct
  source 1..20: mol_type = other DNA
gtatcatttgtatgtgttaa

SEQ ID NO: 93171 - DNA, 20 bp, synthetic construct
  source 1..20: mol_type = other DNA
tgtatcatttgtatgtgtta

SEQ ID NO: 93172 - DNA, 20 bp, synthetic construct
  source 1..20: mol_type = other DNA
ttgtatcatttgtatgtgtt

SEQ ID NO: 93173 - DNA, 20 bp, synthetic construct
  source 1..20: mol_type = other DNA
tttgtatcatttgtatgtgt

SEQ ID NO: 93174 - DNA, 20 bp, synthetic construct
  source 1..20: mol_type = other DNA
ctttgtatcatttgtatgtg

SEQ ID NO: 93175 - DNA, 20 bp, synthetic construct
  source 1..20: mol_type = other DNA
tctttgtatcatttgtatgt

SEQ ID NO: 93176 - DNA, 20 bp, synthetic construct
  source 1..20: mol_type = other DNA
ttctttgtatcatttgtatg

SEQ ID NO: 93177 - DNA, 20 bp, synthetic construct
  source 1..20: mol_type = other DNA
attctttgtatcatttgtat

SEQ ID NO: 93178 - DNA, 20 bp, synthetic construct
  source 1..20: mol_type = other DNA
tattctttgtatcatttgta

SEQ ID NO: 93179 - DNA, 20 bp, synthetic construct
  source 1..20: mol_type = other DNA
atattctttgtatcatttgt

SEQ ID NO: 93180 - DNA, 20 bp, synthetic construct
  source 1..20: mol_type = other DNA
aatattctttgtatcatttg

SEQ ID NO: 93181 - DNA, 20 bp, synthetic construct
  source 1..20: mol_type = other DNA
caatattctttgtatcattt

SEQ ID NO: 93182 - DNA, 20 bp, synthetic construct
  source 1..20: mol_type = other DNA
tcaatattctttgtatcatt

SEQ ID NO: 93183 - DNA, 20 bp, synthetic construct
  source 1..20: mol_type = other DNA
ttcaatattctttgtatcat

SEQ ID NO: 93184 - DNA, 20 bp, synthetic construct
  source 1..20: mol_type = other DNA
attcaatattctttgtatca

SEQ ID NO: 93185 - DNA, 20 bp, synthetic construct
  source 1..20: mol_type = other DNA
tattcaatattctttgtatc

SEQ ID NO: 93186 - DNA, 20 bp, synthetic construct
  source 1..20: mol_type = other DNA
atattcaatattctttgtat

SEQ ID NO: 93187 - DNA, 20 bp, synthetic construct
  source 1..20: mol_type = other DNA
catattcaatattctttgta

SEQ ID NO: 93188 - DNA, 20 bp, synthetic construct
  source 1..20: mol_type = other DNA
tcatattcaatattctttgt

SEQ ID NO: 93189 - DNA, 20 bp, synthetic construct
  source 1..20: mol_type = other DNA
atcatattcaatattctttg

SEQ ID NO: 93190 - DNA, 20 bp, synthetic construct
  source 1..20: mol_type = other DNA
gatcatattcaatattcttt

SEQ ID NO: 93191 - DNA, 20 bp, synthetic construct
  source 1..20: mol_type = other DNA
tgatcatattcaatattctt

SEQ ID NO: 93192 - DNA, 20 bp, synthetic construct
  source 1..20: mol_type = other DNA
atgatcatattcaatattct

SEQ ID NO: 93193 - DNA, 20 bp, synthetic construct
  source 1..20: mol_type = other DNA
catgatcatattcaatattc

SEQ ID NO: 93194 - DNA, 20 bp, synthetic construct
  source 1..20: mol_type = other DNA
acatgatcatattcaatatt

SEQ ID NO: 93195 - DNA, 20 bp, synthetic construct
  source 1..20: mol_type = other DNA
cacatgatcatattcaatat

SEQ ID NO: 93196 - DNA, 20 bp, synthetic construct
  source 1..20: mol_type = other DNA
gcacatgatcatattcaata

SEQ ID NO: 93197 - DNA, 20 bp, synthetic construct
  source 1..20: mol_type = other DNA
ggcacatgatcatattcaat

SEQ ID NO: 93198 - DNA, 20 bp, synthetic construct
  source 1..20: mol_type = other DNA
gggcacatgatcatattcaa

SEQ ID NO: 93199 - DNA, 20 bp, synthetic construct
  source 1..20: mol_type = other DNA
tgggcacatgatcatattca

SEQ ID NO: 93200 - DNA, 20 bp, synthetic construct
  source 1..20: mol_type = other DNA
gtgggcacatgatcatattc

SEQ ID NO: 93201 - DNA, 20 bp, synthetic construct
  source 1..20: mol_type = other DNA
agtgggcacatgatcatatt

SEQ ID NO: 93202 - DNA, 20 bp, synthetic construct
  source 1..20: mol_type = other DNA
tagtgggcacatgatcatat

SEQ ID NO: 93203 - DNA, 20 bp, synthetic construct
  source 1..20: mol_type = other DNA
gtagtgggcacatgatcata

SEQ ID NO: 93204 - DNA, 20 bp, synthetic construct
  source 1..20: mol_type = other DNA
ggtagtgggcacatgatcat

SEQ ID NO: 93205 - DNA, 20 bp, synthetic construct
  source 1..20: mol_type = other DNA
gggtagtgggcacatgatca

SEQ ID NO: 93206 - DNA, 20 bp, synthetic construct
  source 1..20: mol_type = other DNA
tgggtagtgggcacatgatc

SEQ ID NO: 93207 - DNA, 20 bp, synthetic construct
  source 1..20: mol_type = other DNA
ctgggtagtgggcacatgat

SEQ ID NO: 93208 - DNA, 20 bp, synthetic construct
  source 1..20: mol_type = other DNA
gctgggtagtgggcacatga

SEQ ID NO: 93209 - DNA, 20 bp, synthetic construct
  source 1..20: mol_type = other DNA
agctgggtagtgggcacatg

SEQ ID NO: 93210 - DNA, 20 bp, synthetic construct
  source 1..20: mol_type = other DNA
aagctgggtagtgggcacat

SEQ ID NO: 93211 - DNA, 20 bp, synthetic construct
  source 1..20: mol_type = other DNA
taagctgggtagtgggcaca

SEQ ID NO: 93212 - DNA, 20 bp, synthetic construct
  source 1..20: mol_type = other DNA
ctaagctgggtagtgggcac

SEQ ID NO: 93213 - DNA, 20 bp, synthetic construct
  source 1..20: mol_type = other DNA
actaagctgggtagtgggca

SEQ ID NO: 93214 - DNA, 20 bp, synthetic construct
  source 1..20: mol_type = other DNA
tactaagctgggtagtgggc

SEQ ID NO: 93215 - DNA, 20 bp, synthetic construct
  source 1..20: mol_type = other DNA
ttactaagctgggtagtggg

SEQ ID NO: 93216 - DNA, 20 bp, synthetic construct
  source 1..20: mol_type = other DNA
tttactaagctgggtagtgg

SEQ ID NO: 93217 - DNA, 20 bp, synthetic construct
  source 1..20: mol_type = other DNA
atttactaagctgggtagtg

SEQ ID NO: 93218 - DNA, 20 bp, synthetic construct
  source 1..20: mol_type = other DNA
tatttactaagctgggtagt

SEQ ID NO: 93219 - DNA, 20 bp, synthetic construct
  source 1..20: mol_type = other DNA
ttatttactaagctgggtag

SEQ ID NO: 93220 - DNA, 20 bp, synthetic construct
  source 1..20: mol_type = other DNA
tttatttactaagctgggta

SEQ ID NO: 93221 - DNA, 20 bp, synthetic construct
  source 1..20: mol_type = other DNA
ctttatttactaagctgggt

SEQ ID NO: 93222 - DNA, 20 bp, synthetic construct
  source 1..20: mol_type = other DNA
gctttatttactaagctggg

SEQ ID NO: 93223 - DNA, 20 bp, synthetic construct
  source 1..20: mol_type = other DNA
tgctttatttactaagctgg

SEQ ID NO: 93224 - DNA, 20 bp, synthetic construct
  source 1..20: mol_type = other DNA
atgctttatttactaagctg

SEQ ID NO: 93225 - DNA, 20 bp, synthetic construct
  source 1..20: mol_type = other DNA
aatgctttatttactaagct

SEQ ID NO: 93226 - DNA, 20 bp, synthetic construct
  source 1..20: mol_type = other DNA
gaatgctttatttactaagc

SEQ ID NO: 93227 - DNA, 20 bp, synthetic construct
  source 1..20: mol_type = other DNA
agaatgctttatttactaag

SEQ ID NO: 93228 - DNA, 20 bp, synthetic construct
  source 1..20: mol_type = other DNA
tagaatgctttatttactaa

SEQ ID NO: 93229 - DNA, 20 bp, synthetic construct
  source 1..20: mol_type = other DNA
ttagaatgctttatttacta

SEQ ID NO: 93230 - DNA, 20 bp, synthetic construct
  source 1..20: mol_type = other DNA
gttagaatgctttatttact

SEQ ID NO: 93231 - DNA, 20 bp, synthetic construct
  source 1..20: mol_type = other DNA
tgttagaatgctttatttac

SEQ ID NO: 93232 - DNA, 20 bp, synthetic construct
  source 1..20: mol_type = other DNA
gtgttagaatgctttattta

SEQ ID NO: 93233 - DNA, 20 bp, synthetic construct
  source 1..20: mol_type = other DNA
tgtgttagaatgctttattt

SEQ ID NO: 93234 - DNA, 20 bp, synthetic construct
  source 1..20: mol_type = other DNA
ctgtgttagaatgctttatt

SEQ ID NO: 93235 - DNA, 20 bp, synthetic construct
  source 1..20: mol_type = other DNA
actgtgttagaatgctttat

SEQ ID NO: 93236 - DNA, 20 bp, synthetic construct
  source 1..20: mol_type = other DNA
aactgtgttagaatgcttta

SEQ ID NO: 93237 - DNA, 20 bp, synthetic construct
  source 1..20: mol_type = other DNA
taactgtgttagaatgcttt

SEQ ID NO: 93238 - DNA, 20 bp, synthetic construct
  source 1..20: mol_type = other DNA
ttaactgtgttagaatgctt

SEQ ID NO: 93239 - DNA, 20 bp, synthetic construct
  source 1..20: mol_type = other DNA
tttaactgtgttagaatgct

SEQ ID NO: 93240 - DNA, 20 bp, synthetic construct
  source 1..20: mol_type = other DNA
gtttaactgtgttagaatgc

SEQ ID NO: 93241 - DNA, 20 bp, synthetic construct
  source 1..20: mol_type = other DNA
agtttaactgtgttagaatg

SEQ ID NO: 93242 - DNA, 20 bp, synthetic construct
  source 1..20: mol_type = other DNA
gagtttaactgtgttagaat

SEQ ID NO: 93243 - DNA, 20 bp, synthetic construct
  source 1..20: mol_type = other DNA
ggagtttaactgtgttagaa

SEQ ID NO: 93244 - DNA, 20 bp, synthetic construct
  source 1..20: mol_type = other DNA
aggagtttaactgtgttaga

SEQ ID NO: 93245 - DNA, 20 bp, synthetic construct
  source 1..20: mol_type = other DNA
gaggagtttaactgtgttag

SEQ ID NO: 93246 - DNA, 20 bp, synthetic construct
  source 1..20: mol_type = other DNA
agaggagtttaactgtgtta

SEQ ID NO: 93247 - DNA, 20 bp, synthetic construct
  source 1..20: mol_type = other DNA
aagaggagtttaactgtgtt

SEQ ID NO: 93248 - DNA, 20 bp, synthetic construct
  source 1..20: mol_type = other DNA
taagaggagtttaactgtgt

SEQ ID NO: 93249 - DNA, 20 bp, synthetic construct
  source 1..20: mol_type = other DNA
ataagaggagtttaactgtg

SEQ ID NO: 93250 - DNA, 20 bp, synthetic construct
  source 1..20: mol_type = other DNA
cataagaggagtttaactgt

SEQ ID NO: 93251 - DNA, 20 bp, synthetic construct
  source 1..20: mol_type = other DNA
acataagaggagtttaactg

SEQ ID NO: 93252 - DNA, 20 bp, synthetic construct
  source 1..20: mol_type = other DNA
tacataagaggagtttaact

SEQ ID NO: 93253 - DNA, 20 bp, synthetic construct
  source 1..20: mol_type = other DNA
atacataagaggagtttaac

SEQ ID NO: 93254 - DNA, 20 bp, synthetic construct
  source 1..20: mol_type = other DNA
gatacataagaggagtttaa

SEQ ID NO: 93255 - DNA, 20 bp, synthetic construct
  source 1..20: mol_type = other DNA
agatacataagaggagttta

SEQ ID NO: 93256 - DNA, 20 bp, synthetic construct
  source 1..20: mol_type = other DNA
cagatacataagaggagttt

SEQ ID NO: 93257 - DNA, 20 bp, synthetic construct
  source 1..20: mol_type = other DNA
gcagatacataagaggagtt

SEQ ID NO: 93258 - DNA, 20 bp, synthetic construct
  source 1..20: mol_type = other DNA
ggcagatacataagaggagt

SEQ ID NO: 93259 - DNA, 20 bp, synthetic construct
  source 1..20: mol_type = other DNA
gggcagatacataagaggag

SEQ ID NO: 93260 - DNA, 20 bp, synthetic construct
  source 1..20: mol_type = other DNA
ggggcagatacataagagga

SEQ ID NO: 93261 - DNA, 20 bp, synthetic construct
  source 1..20: mol_type = other DNA
aggggcagatacataagagg

SEQ ID NO: 93262 - DNA, 20 bp, synthetic construct
  source 1..20: mol_type = other DNA
gaggggcagatacataagag

SEQ ID NO: 93263 - DNA, 20 bp, synthetic construct
  source 1..20: mol_type = other DNA
ggaggggcagatacataaga

SEQ ID NO: 93264 - DNA, 20 bp, synthetic construct
  source 1..20: mol_type = other DNA
aggaggggcagatacataag

SEQ ID NO: 93265 - DNA, 20 bp, synthetic construct
  source 1..20: mol_type = other DNA
gaggaggggcagatacataa

SEQ ID NO: 93266 - DNA, 20 bp, synthetic construct
  source 1..20: mol_type = other DNA
tgaggaggggcagatacata

SEQ ID NO: 93267 - DNA, 20 bp, synthetic construct
  source 1..20: mol_type = other DNA
ctgaggaggggcagatacat

SEQ ID NO: 93268 - DNA, 20 bp, synthetic construct
  source 1..20: mol_type = other DNA
gctgaggaggggcagataca

SEQ ID NO: 93269 - DNA, 20 bp, synthetic construct
  source 1..20: mol_type = other DNA
agctgaggaggggcagatac

SEQ ID NO: 93270 - DNA, 20 bp, synthetic construct
  source 1..20: mol_type = other DNA
cagctgaggaggggcagata

SEQ ID NO: 93271 - DNA, 20 bp, synthetic construct
  source 1..20: mol_type = other DNA
gcagctgaggaggggcagat

SEQ ID NO: 93272 - DNA, 20 bp, synthetic construct
  source 1..20: mol_type = other DNA
agcagctgaggaggggcaga

SEQ ID NO: 93273 - DNA, 20 bp, synthetic construct
  source 1..20: mol_type = other DNA
aagcagctgaggaggggcag

SEQ ID NO: 93274 - DNA, 20 bp, synthetic construct
  source 1..20: mol_type = other DNA
gaagcagctgaggaggggca

SEQ ID NO: 93275 - DNA, 20 bp, synthetic construct
  source 1..20: mol_type = other DNA
ggaagcagctgaggaggggc

SEQ ID NO: 93276 - DNA, 20 bp, synthetic construct
  source 1..20: mol_type = other DNA
gggaagcagctgaggagggg

SEQ ID NO: 93277 - DNA, 20 bp, synthetic construct
  source 1..20: mol_type = other DNA
ggggaagcagctgaggaggg

SEQ ID NO: 93278 - DNA, 20 bp, synthetic construct
  source 1..20: mol_type = other DNA
gggggaagcagctgaggagg

SEQ ID NO: 93279 - DNA, 20 bp, synthetic construct
  source 1..20: mol_type = other DNA
agggggaagcagctgaggag

SEQ ID NO: 93280 - DNA, 20 bp, synthetic construct
  source 1..20: mol_type = other DNA
cagggggaagcagctgagga

SEQ ID NO: 93281 - DNA, 20 bp, synthetic construct
  source 1..20: mol_type = other DNA
acagggggaagcagctgagg

SEQ ID NO: 93282 - DNA, 20 bp, synthetic construct
  source 1..20: mol_type = other DNA
aacagggggaagcagctgag

SEQ ID NO: 93283 - DNA, 20 bp, synthetic construct
  source 1..20: mol_type = other DNA
aaacagggggaagcagctga

SEQ ID NO: 93284 - DNA, 20 bp, synthetic construct
  source 1..20: mol_type = other DNA
gaaacagggggaagcagctg

SEQ ID NO: 93285 - DNA, 20 bp, synthetic construct
  source 1..20: mol_type = other DNA
ggaaacagggggaagcagct

SEQ ID NO: 93286 - DNA, 20 bp, synthetic construct
  source 1..20: mol_type = other DNA
aggaaacagggggaagcagc

SEQ ID NO: 93287 - DNA, 20 bp, synthetic construct
  source 1..20: mol_type = other DNA
aaggaaacagggggaagcag

SEQ ID NO: 93288 - DNA, 20 bp, synthetic construct
  source 1..20: mol_type = other DNA
gaaggaaacagggggaagca

SEQ ID NO: 93289 - DNA, 20 bp, synthetic construct
  source 1..20: mol_type = other DNA
ggaaggaaacagggggaagc

SEQ ID NO: 93290 - DNA, 20 bp, synthetic construct
  source 1..20: mol_type = other DNA
tggaaggaaacagggggaag

SEQ ID NO: 93291 - DNA, 20 bp, synthetic construct
  source 1..20: mol_type = other DNA
ttggaaggaaacagggggaa

SEQ ID NO: 93292 - DNA, 20 bp, synthetic construct
  source 1..20: mol_type = other DNA
tttggaaggaaacaggggga

SEQ ID NO: 93293 - DNA, 20 bp, synthetic construct
  source 1..20: mol_type = other DNA
ttttggaaggaaacaggggg

SEQ ID NO: 93294 - DNA, 20 bp, synthetic construct
  source 1..20: mol_type = other DNA
cttttggaaggaaacagggg

SEQ ID NO: 93295 - DNA, 20 bp, synthetic construct
  source 1..20: mol_type = other DNA
ccttttggaaggaaacaggg

SEQ ID NO: 93296 - DNA, 20 bp, synthetic construct
  source 1..20: mol_type = other DNA
tccttttggaaggaaacagg

SEQ ID NO: 93297 - DNA, 20 bp, synthetic construct
  source 1..20: mol_type = other DNA
ttccttttggaaggaaacag

SEQ ID NO: 93298 - DNA, 20 bp, synthetic construct
  source 1..20: mol_type = other DNA
cttccttttggaaggaaaca

SEQ ID NO: 93299 - DNA, 20 bp, synthetic construct
  source 1..20: mol_type = other DNA
ccttccttttggaaggaaac

SEQ ID NO: 93300 - DNA, 20 bp, synthetic construct
  source 1..20: mol_type = other DNA
cccttccttttggaaggaaa

SEQ ID NO: 93301 - DNA, 20 bp, synthetic construct
  source 1..20: mol_type = other DNA
acccttccttttggaaggaa

SEQ ID NO: 93302 - DNA, 20 bp, synthetic construct
  source 1..20: mol_type = other DNA
aacccttccttttggaagga

SEQ ID NO: 93303 - DNA, 20 bp, synthetic construct
  source 1..20: mol_type = other DNA
aaacccttccttttggaagg

SEQ ID NO: 93304 - DNA, 20 bp, synthetic construct
  source 1..20: mol_type = other DNA
gaaacccttccttttggaag

SEQ ID NO: 93305 - DNA, 20 bp, synthetic construct
  source 1..20: mol_type = other DNA
agaaacccttccttttggaa

SEQ ID NO: 93306 - DNA, 20 bp, synthetic construct
  source 1..20: mol_type = other DNA
aagaaacccttccttttgga

SEQ ID NO: 93307 - DNA, 20 bp, synthetic construct
  source 1..20: mol_type = other DNA
aaagaaacccttccttttgg

SEQ ID NO: 93308 - DNA, 20 bp, synthetic construct
  source 1..20: mol_type = other DNA
aaaagaaacccttccttttg

SEQ ID NO: 93309 - DNA, 20 bp, synthetic construct
  source 1..20: mol_type = other DNA
gaaaagaaacccttcctttt

SEQ ID NO: 93310 - DNA, 20 bp, synthetic construct
  source 1..20: mol_type = other DNA
agaaaagaaacccttccttt

SEQ ID NO: 93311 - DNA, 20 bp, synthetic construct
  source 1..20: mol_type = other DNA
cagaaaagaaacccttcctt

SEQ ID NO: 93312 - DNA, 20 bp, synthetic construct
  source 1..20: mol_type = other DNA
acagaaaagaaacccttcct

SEQ ID NO: 93313 - DNA, 20 bp, synthetic construct
  source 1..20: mol_type = other DNA
cacagaaaagaaacccttcc

SEQ ID NO: 93314 - DNA, 20 bp, synthetic construct
  source 1..20: mol_type = other DNA
gcacagaaaagaaacccttc

SEQ ID NO: 93315 - DNA, 20 bp, synthetic construct
  source 1..20: mol_type = other DNA
tgcacagaaaagaaaccctt

SEQ ID NO: 93316 - DNA, 20 bp, synthetic construct
  source 1..20: mol_type = other DNA
ctgcacagaaaagaaaccct

SEQ ID NO: 93317 - DNA, 20 bp, synthetic construct
  source 1..20: mol_type = other DNA
actgcacagaaaagaaaccc

SEQ ID NO: 93318 - DNA, 20 bp, synthetic construct
  source 1..20: mol_type = other DNA
aactgcacagaaaagaaacc

SEQ ID NO: 93319 - DNA, 20 bp, synthetic construct
  source 1..20: mol_type = other DNA
gaactgcacagaaaagaaac

SEQ ID NO: 93320 - DNA, 20 bp, synthetic construct
  source 1..20: mol_type = other DNA
agaactgcacagaaaagaaa

SEQ ID NO: 93321 - DNA, 20 bp, synthetic construct
  source 1..20: mol_type = other DNA
aagaactgcacagaaaagaa

SEQ ID NO: 93322 - DNA, 20 bp, synthetic construct
  source 1..20: mol_type = other DNA
aaagaactgcacagaaaaga

SEQ ID NO: 93323 - DNA, 20 bp, synthetic construct
  source 1..20: mol_type = other DNA
taaagaactgcacagaaaag

SEQ ID NO: 93324 - DNA, 20 bp, synthetic construct
  source 1..20: mol_type = other DNA
ataaagaactgcacagaaaa

SEQ ID NO: 93325 - DNA, 20 bp, synthetic construct
  source 1..20: mol_type = other DNA
tataaagaactgcacagaaa

SEQ ID NO: 93326 - DNA, 20 bp, synthetic construct
  source 1..20: mol_type = other DNA
atataaagaactgcacagaa

SEQ ID NO: 93327 - DNA, 20 bp, synthetic construct
  source 1..20: mol_type = other DNA
aatataaagaactgcacaga

SEQ ID NO: 93328 - DNA, 20 bp, synthetic construct
  source 1..20: mol_type = other DNA
aaatataaagaactgcacag

SEQ ID NO: 93329 - DNA, 20 bp, synthetic construct
  source 1..20: mol_type = other DNA
taaatataaagaactgcaca

SEQ ID NO: 93330 - DNA, 20 bp, synthetic construct
  source 1..20: mol_type = other DNA
ataaatataaagaactgcac

SEQ ID NO: 93331 - DNA, 20 bp, synthetic construct
  source 1..20: mol_type = other DNA
tataaatataaagaactgca

SEQ ID NO: 93332 - DNA, 20 bp, synthetic construct
  source 1..20: mol_type = other DNA
gtataaatataaagaactgc

SEQ ID NO: 93333 - DNA, 20 bp, synthetic construct
  source 1..20: mol_type = other DNA
agtataaatataaagaactg

SEQ ID NO: 93334 - DNA, 20 bp, synthetic construct
  source 1..20: mol_type = other DNA
cagtataaatataaagaact

SEQ ID NO: 93335 - DNA, 20 bp, synthetic construct
  source 1..20: mol_type = other DNA
gcagtataaatataaagaac

SEQ ID NO: 93336 - DNA, 20 bp, synthetic construct
  source 1..20: mol_type = other DNA
tgcagtataaatataaagaa

SEQ ID NO: 93337 - DNA, 20 bp, synthetic construct
  source 1..20: mol_type = other DNA
atgcagtataaatataaaga

SEQ ID NO: 93338 - DNA, 20 bp, synthetic construct
  source 1..20: mol_type = other DNA
tatgcagtataaatataaag

SEQ ID NO: 93339 - DNA, 20 bp, synthetic construct
  source 1..20: mol_type = other DNA
atatgcagtataaatataaa

SEQ ID NO: 93340 - DNA, 20 bp, synthetic construct
  source 1..20: mol_type = other DNA
catatgcagtataaatataa

SEQ ID NO: 93341 - DNA, 20 bp, synthetic construct
  source 1..20: mol_type = other DNA
tcatatgcagtataaatata

SEQ ID NO: 93342 - DNA, 20 bp, synthetic construct
  source 1..20: mol_type = other DNA
ttcatatgcagtataaatat

SEQ ID NO: 93343 - DNA, 20 bp, synthetic construct
  source 1..20: mol_type = other DNA
attcatatgcagtataaata

SEQ ID NO: 93344 - DNA, 20 bp, synthetic construct
  source 1..20: mol_type = other DNA
tattcatatgcagtataaat

SEQ ID NO: 93345 - DNA, 20 bp, synthetic construct
  source 1..20: mol_type = other DNA
atattcatatgcagtataaa

SEQ ID NO: 93346 - DNA, 20 bp, synthetic construct
  source 1..20: mol_type = other DNA
tatattcatatgcagtataa

SEQ ID NO: 93347 - DNA, 20 bp, synthetic construct
  source 1..20: mol_type = other DNA
atatattcatatgcagtata

SEQ ID NO: 93348 - DNA, 20 bp, synthetic construct
  source 1..20: mol_type = other DNA
gatatattcatatgcagtat

SEQ ID NO: 93349 - DNA, 20 bp, synthetic construct
  source 1..20: mol_type = other DNA
agatatattcatatgcagta

SEQ ID NO: 93350 - DNA, 20 bp, synthetic construct
  source 1..20: mol_type = other DNA
cagatatattcatatgcagt

SEQ ID NO: 93351 - DNA, 20 bp, synthetic construct
  source 1..20: mol_type = other DNA
acagatatattcatatgcag

SEQ ID NO: 93352 - DNA, 20 bp, synthetic construct
  source 1..20: mol_type = other DNA
cacagatatattcatatgca

SEQ ID NO: 93353 - DNA, 20 bp, synthetic construct
  source 1..20: mol_type = other DNA
tcacagatatattcatatgc

SEQ ID NO: 93354 - DNA, 20 bp, synthetic construct
  source 1..20: mol_type = other DNA
ctcacagatatattcatatg

SEQ ID NO: 93355 - DNA, 20 bp, synthetic construct
  source 1..20: mol_type = other DNA
gctcacagatatattcatat

SEQ ID NO: 93356 - DNA, 20 bp, synthetic construct
  source 1..20: mol_type = other DNA
tgctcacagatatattcata

SEQ ID NO: 93357 - DNA, 20 bp, synthetic construct
  source 1..20: mol_type = other DNA
ttgctcacagatatattcat

SEQ ID NO: 93358 - DNA, 20 bp, synthetic construct
  source 1..20: mol_type = other DNA
attgctcacagatatattca

SEQ ID NO: 93359 - DNA, 20 bp, synthetic construct
  source 1..20: mol_type = other DNA
tattgctcacagatatattc

SEQ ID NO: 93360 - DNA, 20 bp, synthetic construct
  source 1..20: mol_type = other DNA
ctattgctcacagatatatt

SEQ ID NO: 93361 - DNA, 20 bp, synthetic construct
  source 1..20: mol_type = other DNA
tctattgctcacagatatat

SEQ ID NO: 93362 - DNA, 20 bp, synthetic construct
  source 1..20: mol_type = other DNA
atctattgctcacagatata

SEQ ID NO: 93363 - DNA, 20 bp, synthetic construct
  source 1..20: mol_type = other DNA
catctattgctcacagatat

SEQ ID NO: 93364 - DNA, 20 bp, synthetic construct
  source 1..20: mol_type = other DNA
tcatctattgctcacagata

SEQ ID NO: 93365 - DNA, 20 bp, synthetic construct
  source 1..20: mol_type = other DNA
atcatctattgctcacagat

SEQ ID NO: 93366 - DNA, 20 bp, synthetic construct
  source 1..20: mol_type = other DNA
tatcatctattgctcacaga

SEQ ID NO: 93367 - DNA, 20 bp, synthetic construct
  source 1..20: mol_type = other DNA
atatcatctattgctcacag

SEQ ID NO: 93368 - DNA, 20 bp, synthetic construct
  source 1..20: mol_type = other DNA
aatatcatctattgctcaca

SEQ ID NO: 93369 - DNA, 20 bp, synthetic construct
  source 1..20: mol_type = other DNA
aaatatcatctattgctcac

SEQ ID NO: 93370 - DNA, 20 bp, synthetic construct
  source 1..20: mol_type = other DNA
aaaatatcatctattgctca

SEQ ID NO: 93371 - DNA, 20 bp, synthetic construct
  source 1..20: mol_type = other DNA
caaaatatcatctattgctc

SEQ ID NO: 93372 - DNA, 20 bp, synthetic construct
  source 1..20: mol_type = other DNA
gcaaaatatcatctattgct

SEQ ID NO: 93373 - DNA, 20 bp, synthetic construct
  source 1..20: mol_type = other DNA
tgcaaaatatcatctattgc

SEQ ID NO: 93374 - DNA, 20 bp, synthetic construct
  source 1..20: mol_type = other DNA
atgcaaaatatcatctattg

SEQ ID NO: 93375 - DNA, 20 bp, synthetic construct
  source 1..20: mol_type = other DNA
tatgcaaaatatcatctatt

SEQ ID NO: 93376 - DNA, 20 bp, synthetic construct
  source 1..20: mol_type = other DNA
ttatgcaaaatatcatctat

SEQ ID NO: 93377 - DNA, 20 bp, synthetic construct
  source 1..20: mol_type = other DNA
attatgcaaaatatcatcta

SEQ ID NO: 93378 - DNA, 20 bp, synthetic construct
  source 1..20: mol_type = other DNA
gattatgcaaaatatcatct

SEQ ID NO: 93379 - DNA, 20 bp, synthetic construct
  source 1..20: mol_type = other DNA
agattatgcaaaatatcatc

SEQ ID NO: 93380 - DNA, 20 bp, synthetic construct
  source 1..20: mol_type = other DNA
aagattatgcaaaatatcat

SEQ ID NO: 93381 - DNA, 20 bp, synthetic construct
  source 1..20: mol_type = other DNA
taagattatgcaaaatatca

SEQ ID NO: 93382 - DNA, 20 bp, synthetic construct
  source 1..20: mol_type = other DNA
ttaagattatgcaaaatatc

SEQ ID NO: 93383 - DNA, 20 bp, synthetic construct
  source 1..20: mol_type = other DNA
tttaagattatgcaaaatat

SEQ ID NO: 93384 - DNA, 20 bp, synthetic construct
  source 1..20: mol_type = other DNA
atttaagattatgcaaaata

SEQ ID NO: 93385 - DNA, 20 bp, synthetic construct
  source 1..20: mol_type = other DNA
aatttaagattatgcaaaat

SEQ ID NO: 93386 - DNA, 20 bp, synthetic construct
  source 1..20: mol_type = other DNA
aaatttaagattatgcaaaa

SEQ ID NO: 93387 - DNA, 20 bp, synthetic construct
  source 1..20: mol_type = other DNA
caaatttaagattatgcaaa

SEQ ID NO: 93388 - DNA, 20 bp, synthetic construct
  source 1..20: mol_type = other DNA
gcaaatttaagattatgcaa

SEQ ID NO: 93389 - DNA, 20 bp, synthetic construct
  source 1..20: mol_type = other DNA
agcaaatttaagattatgca

SEQ ID NO: 93390 - DNA, 20 bp, synthetic construct
  source 1..20: mol_type = other DNA
tagcaaatttaagattatgc

SEQ ID NO: 93391 - DNA, 20 bp, synthetic construct
  source 1..20: mol_type = other DNA
atagcaaatttaagattatg

SEQ ID NO: 93392 - DNA, 20 bp, synthetic construct
  source 1..20: mol_type = other DNA
tatagcaaatttaagattat

SEQ ID NO: 93393 - DNA, 20 bp, synthetic construct
  source 1..20: mol_type = other DNA
ttatagcaaatttaagatta

SEQ ID NO: 93394 - DNA, 20 bp, synthetic construct
  source 1..20: mol_type = other DNA
tttatagcaaatttaagatt

SEQ ID NO: 93395 - DNA, 20 bp, synthetic construct
  source 1..20: mol_type = other DNA
ctttatagcaaatttaagat

SEQ ID NO: 93396 - DNA, 20 bp, synthetic construct
  source 1..20: mol_type = other DNA
actttatagcaaatttaaga

SEQ ID NO: 93397 - DNA, 20 bp, synthetic construct
  source 1..20: mol_type = other DNA
gactttatagcaaatttaag

SEQ ID NO: 93398 - DNA, 20 bp, synthetic construct
  source 1..20: mol_type = other DNA
agactttatagcaaatttaa

SEQ ID NO: 93399 - DNA, 20 bp, synthetic construct
  source 1..20: mol_type = other DNA
aagactttatagcaaattta

SEQ ID NO: 93400 - DNA, 20 bp, synthetic construct
  source 1..20: mol_type = other DNA
aaagactttatagcaaattt

SEQ ID NO: 93401 - DNA, 20 bp, synthetic construct
  source 1..20: mol_type = other DNA
aaaagactttatagcaaatt

SEQ ID NO: 93402 - DNA, 20 bp, synthetic construct
  source 1..20: mol_type = other DNA
aaaaagactttatagcaaat

SEQ ID NO: 93403 - DNA, 20 bp, synthetic construct
  source 1..20: mol_type = other DNA
aaaaaagactttatagcaaa

SEQ ID NO: 93404 - DNA, 20 bp, synthetic construct
  source 1..20: mol_type = other DNA
aaaaaaagactttatagcaa

SEQ ID NO: 93405 - DNA, 20 bp, synthetic construct
  source 1..20: mol_type = other DNA
aaaaaaaagactttatagca

SEQ ID NO: 93406 - DNA, 20 bp, synthetic construct
  source 1..20: mol_type = other DNA
aaaaaaaaagactttatagc

SEQ ID NO: 93407 - DNA, 20 bp, synthetic construct
  source 1..20: mol_type = other DNA
aaaaaaaaaagactttatag

SEQ ID NO: 93408 - DNA, 20 bp, synthetic construct
  source 1..20: mol_type = other DNA
aaaaaaaaaaagactttata

SEQ ID NO: 93409 - DNA, 20 bp, synthetic construct
  source 1..20: mol_type = other DNA
aaaaaaaaaaaagactttat

SEQ ID NO: 93410 - DNA, 20 bp, synthetic construct
  source 1..20: mol_type = other DNA
aaaaaaaaaaaaagacttta

SEQ ID NO: 93411 - DNA, 20 bp, synthetic construct
  source 1..20: mol_type = other DNA
aaaaaaaaaaaaaagacttt

SEQ ID NO: 93412 - DNA, 20 bp, synthetic construct
  source 1..20: mol_type = other DNA
taaaaaaaaaaaaaagactt

SEQ ID NO: 93413 - DNA, 20 bp, synthetic construct
  source 1..20: mol_type = other DNA
ttaaaaaaaaaaaaaagact

SEQ ID NO: 93414 - DNA, 20 bp, synthetic construct
  source 1..20: mol_type = other DNA
attaaaaaaaaaaaaaagac

SEQ ID NO: 93415 - DNA, 20 bp, synthetic construct
  source 1..20: mol_type = other DNA
aattaaaaaaaaaaaaaaga

SEQ ID NO: 93416 - DNA, 20 bp, synthetic construct
  source 1..20: mol_type = other DNA
caattaaaaaaaaaaaaaag

SEQ ID NO: 93417 - DNA, 20 bp, synthetic construct
  source 1..20: mol_type = other DNA
tcaattaaaaaaaaaaaaaa

SEQ ID NO: 93418 - DNA, 20 bp, synthetic construct
  source 1..20: mol_type = other DNA
atcaattaaaaaaaaaaaaa

SEQ ID NO: 93419 - DNA, 20 bp, synthetic construct
  source 1..20: mol_type = other DNA
gatcaattaaaaaaaaaaaa

SEQ ID NO: 93420 - DNA, 20 bp, synthetic construct
  source 1..20: mol_type = other DNA
tgatcaattaaaaaaaaaaa

SEQ ID NO: 93421 - DNA, 20 bp, synthetic construct
  source 1..20: mol_type = other DNA
atgatcaattaaaaaaaaaa

SEQ ID NO: 93422 - DNA, 20 bp, synthetic construct
  source 1..20: mol_type = other DNA
aatgatcaattaaaaaaaaa

SEQ ID NO: 93423 - DNA, 20 bp, synthetic construct
  source 1..20: mol_type = other DNA
gaatgatcaattaaaaaaaa

SEQ ID NO: 93424 - DNA, 20 bp, synthetic construct
  source 1..20: mol_type = other DNA
agaatgatcaattaaaaaaa

SEQ ID NO: 93425 - DNA, 20 bp, synthetic construct
  source 1..20: mol_type = other DNA
aagaatgatcaattaaaaaa

SEQ ID NO: 93426 - DNA, 20 bp, synthetic construct
  source 1..20: mol_type = other DNA
caagaatgatcaattaaaaa

SEQ ID NO: 93427 - DNA, 20 bp, synthetic construct
  source 1..20: mol_type = other DNA
ccaagaatgatcaattaaaa

SEQ ID NO: 93428 - DNA, 20 bp, synthetic construct
  source 1..20: mol_type = other DNA
cccaagaatgatcaattaaa

SEQ ID NO: 93429 - DNA, 20 bp, synthetic construct
  source 1..20: mol_type = other DNA
acccaagaatgatcaattaa

SEQ ID NO: 93430 - DNA, 20 bp, synthetic construct
  source 1..20: mol_type = other DNA
cacccaagaatgatcaatta

SEQ ID NO: 93431 - DNA, 20 bp, synthetic construct
  source 1..20: mol_type = other DNA
acacccaagaatgatcaatt

SEQ ID NO: 93432 - DNA, 20 bp, synthetic construct
  source 1..20: mol_type = other DNA
aacacccaagaatgatcaat

SEQ ID NO: 93433 - DNA, 20 bp, synthetic construct
  source 1..20: mol_type = other DNA
aaacacccaagaatgatcaa

SEQ ID NO: 93434 - DNA, 20 bp, synthetic construct
  source 1..20: mol_type = other DNA
gaaacacccaagaatgatca

SEQ ID NO: 93435 - DNA, 20 bp, synthetic construct
  source 1..20: mol_type = other DNA
agaaacacccaagaatgatc

SEQ ID NO: 93436 - DNA, 20 bp, synthetic construct
  source 1..20: mol_type = other DNA
gagaaacacccaagaatgat

SEQ ID NO: 93437 - DNA, 20 bp, synthetic construct
  source 1..20: mol_type = other DNA
cgagaaacacccaagaatga

SEQ ID NO: 93438 - DNA, 20 bp, synthetic construct
  source 1..20: mol_type = other DNA
gcgagaaacacccaagaatg

SEQ ID NO: 93439 - DNA, 20 bp, synthetic construct
  source 1..20: mol_type = other DNA
tgcgagaaacacccaagaat

SEQ ID NO: 93440 - DNA, 20 bp, synthetic construct
  source 1..20: mol_type = other DNA
ctgcgagaaacacccaagaa

SEQ ID NO: 93441 - DNA, 20 bp, synthetic construct
  source 1..20: mol_type = other DNA
tctgcgagaaacacccaaga

SEQ ID NO: 93442 - DNA, 20 bp, synthetic construct
  source 1..20: mol_type = other DNA
ctctgcgagaaacacccaag

SEQ ID NO: 93443 - DNA, 20 bp, synthetic construct
  source 1..20: mol_type = other DNA
cctctgcgagaaacacccaa

SEQ ID NO: 93444 - DNA, 20 bp, synthetic construct
  source 1..20: mol_type = other DNA
ccctctgcgagaaacaccca

SEQ ID NO: 93445 - DNA, 20 bp, synthetic construct
  source 1..20: mol_type = other DNA
cccctctgcgagaaacaccc

SEQ ID NO: 93446 - DNA, 20 bp, synthetic construct
  source 1..20: mol_type = other DNA
ccccctctgcgagaaacacc

SEQ ID NO: 93447 - DNA, 20 bp, synthetic construct
  source 1..20: mol_type = other DNA
tccccctctgcgagaaacac

SEQ ID NO: 93448 - DNA, 20 bp, synthetic construct
  source 1..20: mol_type = other DNA
atccccctctgcgagaaaca

SEQ ID NO: 93449 - DNA, 20 bp, synthetic construct
  source 1..20: mol_type = other DNA
aatccccctctgcgagaaac

SEQ ID NO: 93450 - DNA, 20 bp, synthetic construct
  source 1..20: mol_type = other DNA
aaatccccctctgcgagaaa

SEQ ID NO: 93451 - DNA, 20 bp, synthetic construct
  source 1..20: mol_type = other DNA
caaatccccctctgcgagaa

SEQ ID NO: 93452 - DNA, 20 bp, synthetic construct
  source 1..20: mol_type = other DNA
ccaaatccccctctgcgaga

SEQ ID NO: 93453 - DNA, 20 bp, synthetic construct
  source 1..20: mol_type = other DNA
gccaaatccccctctgcgag

SEQ ID NO: 93454 - DNA, 20 bp, synthetic construct
  source 1..20: mol_type = other DNA
tgccaaatccccctctgcga

SEQ ID NO: 93455 - DNA, 20 bp, synthetic construct
  source 1..20: mol_type = other DNA
ctgccaaatccccctctgcg

SEQ ID NO: 93456 - DNA, 20 bp, synthetic construct
  source 1..20: mol_type = other DNA
cctgccaaatccccctctgc

SEQ ID NO: 93457 - DNA, 20 bp, synthetic construct
  source 1..20: mol_type = other DNA
ccctgccaaatccccctctg

SEQ ID NO: 93458 - DNA, 20 bp, synthetic construct
  source 1..20: mol_type = other DNA
accctgccaaatccccctct

SEQ ID NO: 93459 - DNA, 20 bp, synthetic construct
  source 1..20: mol_type = other DNA
gaccctgccaaatccccctc

SEQ ID NO: 93460 - DNA, 20 bp, synthetic construct
  source 1..20: mol_type = other DNA
tgaccctgccaaatccccct

SEQ ID NO: 93461 - DNA, 20 bp, synthetic construct
  source 1..20: mol_type = other DNA
atgaccctgccaaatccccc

SEQ ID NO: 93462 - DNA, 20 bp, synthetic construct
  source 1..20: mol_type = other DNA
tatgaccctgccaaatcccc

SEQ ID NO: 93463 - DNA, 20 bp, synthetic construct
  source 1..20: mol_type = other DNA
ctatgaccctgccaaatccc

SEQ ID NO: 93464 - DNA, 20 bp, synthetic construct
  source 1..20: mol_type = other DNA
cctatgaccctgccaaatcc

SEQ ID NO: 93465 - DNA, 20 bp, synthetic construct
  source 1..20: mol_type = other DNA
tcctatgaccctgccaaatc

SEQ ID NO: 93466 - DNA, 20 bp, synthetic construct
  source 1..20: mol_type = other DNA
gtcctatgaccctgccaaat

SEQ ID NO: 93467 - DNA, 20 bp, synthetic construct
  source 1..20: mol_type = other DNA
tgtcctatgaccctgccaaa

SEQ ID NO: 93468 - DNA, 20 bp, synthetic construct
  source 1..20: mol_type = other DNA
ttgtcctatgaccctgccaa

SEQ ID NO: 93469 - DNA, 20 bp, synthetic construct
  source 1..20: mol_type = other DNA
attgtcctatgaccctgcca

SEQ ID NO: 93470 - DNA, 20 bp, synthetic construct
  source 1..20: mol_type = other DNA
tattgtcctatgaccctgcc

SEQ ID NO: 93471 - DNA, 20 bp, synthetic construct
  source 1..20: mol_type = other DNA
ctattgtcctatgaccctgc

SEQ ID NO: 93472 - DNA, 20 bp, synthetic construct
  source 1..20: mol_type = other DNA
actattgtcctatgaccctg

SEQ ID NO: 93473 - DNA, 20 bp, synthetic construct
  source 1..20: mol_type = other DNA
cactattgtcctatgaccct

SEQ ID NO: 93474 - DNA, 20 bp, synthetic construct
  source 1..20: mol_type = other DNA
ccactattgtcctatgaccc

SEQ ID NO: 93475 - DNA, 20 bp, synthetic construct
  source 1..20: mol_type = other DNA
tccactattgtcctatgacc

SEQ ID NO: 93476 - DNA, 20 bp, synthetic construct
  source 1..20: mol_type = other DNA
ctccactattgtcctatgac

SEQ ID NO: 93477 - DNA, 20 bp, synthetic construct
  source 1..20: mol_type = other DNA
cctccactattgtcctatga

SEQ ID NO: 93478 - DNA, 20 bp, synthetic construct
  source 1..20: mol_type = other DNA
ccctccactattgtcctatg

SEQ ID NO: 93479 - DNA, 20 bp, synthetic construct
  source 1..20: mol_type = other DNA
tccctccactattgtcctat

SEQ ID NO: 93480 - DNA, 20 bp, synthetic construct
  source 1..20: mol_type = other DNA
ttccctccactattgtccta

SEQ ID NO: 93481 - DNA, 20 bp, synthetic construct
  source 1..20: mol_type = other DNA
cttccctccactattgtcct

SEQ ID NO: 93482 - DNA, 20 bp, synthetic construct
  source 1..20: mol_type = other DNA
ccttccctccactattgtcc

SEQ ID NO: 93483 - DNA, 20 bp, synthetic construct
  source 1..20: mol_type = other DNA
accttccctccactattgtc

SEQ ID NO: 93484 - DNA, 20 bp, synthetic construct
  source 1..20: mol_type = other DNA
gaccttccctccactattgt

SEQ ID NO: 93485 - DNA, 20 bp, synthetic construct
  source 1..20: mol_type = other DNA
tgaccttccctccactattg

SEQ ID NO: 93486 - DNA, 20 bp, synthetic construct
  source 1..20: mol_type = other DNA
ctgaccttccctccactatt

SEQ ID NO: 93487 - DNA, 20 bp, synthetic construct
  source 1..20: mol_type = other DNA
gctgaccttccctccactat

SEQ ID NO: 93488 - DNA, 20 bp, synthetic construct
  source 1..20: mol_type = other DNA
tgctgaccttccctccacta

SEQ ID NO: 93489 - DNA, 20 bp, synthetic construct
  source 1..20: mol_type = other DNA
ctgctgaccttccctccact

SEQ ID NO: 93490 - DNA, 20 bp, synthetic construct
  source 1..20: mol_type = other DNA
tctgctgaccttccctccac

SEQ ID NO: 93491 - DNA, 20 bp, synthetic construct
  source 1..20: mol_type = other DNA
atctgctgaccttccctcca

SEQ ID NO: 93492 - DNA, 20 bp, synthetic construct
  source 1..20: mol_type = other DNA
tatctgctgaccttccctcc

SEQ ID NO: 93493 - DNA, 20 bp, synthetic construct
  source 1..20: mol_type = other DNA
ttatctgctgaccttccctc

SEQ ID NO: 93494 - DNA, 20 bp, synthetic construct
  source 1..20: mol_type = other DNA
tttatctgctgaccttccct

SEQ ID NO: 93495 - DNA, 20 bp, synthetic construct
  source 1..20: mol_type = other DNA
ttttatctgctgaccttccc

SEQ ID NO: 93496 - DNA, 20 bp, synthetic construct
  source 1..20: mol_type = other DNA
tttttatctgctgaccttcc

SEQ ID NO: 93497 - DNA, 20 bp, synthetic construct
  source 1..20: mol_type = other DNA
ctttttatctgctgaccttc

SEQ ID NO: 93498 - DNA, 20 bp, synthetic construct
  source 1..20: mol_type = other DNA
actttttatctgctgacctt

SEQ ID NO: 93499 - DNA, 20 bp, synthetic construct
  source 1..20: mol_type = other DNA
cactttttatctgctgacct

SEQ ID NO: 93500 - DNA, 20 bp, synthetic construct
  source 1..20: mol_type = other DNA
tcactttttatctgctgacc

SEQ ID NO: 93501 - DNA, 20 bp, synthetic construct
  source 1..20: mol_type = other DNA
ttcactttttatctgctgac

SEQ ID NO: 93502 - DNA, 20 bp, synthetic construct
  source 1..20: mol_type = other DNA
gttcactttttatctgctga

SEQ ID NO: 93503 - DNA, 20 bp, synthetic construct
  source 1..20: mol_type = other DNA
tgttcactttttatctgctg

SEQ ID NO: 93504 - DNA, 20 bp, synthetic construct
  source 1..20: mol_type = other DNA
ttgttcactttttatctgct

SEQ ID NO: 93505 - DNA, 20 bp, synthetic construct
  source 1..20: mol_type = other DNA
tttgttcactttttatctgc

SEQ ID NO: 93506 - DNA, 20 bp, synthetic construct
  source 1..20: mol_type = other DNA
ctttgttcactttttatctg

SEQ ID NO: 93507 - DNA, 20 bp, synthetic construct
  source 1..20: mol_type = other DNA
cctttgttcactttttatct

SEQ ID NO: 93508 - DNA, 20 bp, synthetic construct
  source 1..20: mol_type = other DNA
acctttgttcactttttatc

SEQ ID NO: 93509 - DNA, 20 bp, synthetic construct
  source 1..20: mol_type = other DNA
gacctttgttcactttttat

SEQ ID NO: 93510 - DNA, 20 bp, synthetic construct
  source 1..20: mol_type = other DNA
agacctttgttcacttttta

SEQ ID NO: 93511 - DNA, 20 bp, synthetic construct
  source 1..20: mol_type = other DNA
gagacctttgttcacttttt

SEQ ID NO: 93512 - DNA, 20 bp, synthetic construct
  source 1..20: mol_type = other DNA
agagacctttgttcactttt

SEQ ID NO: 93513 - DNA, 20 bp, synthetic construct
  source 1..20: mol_type = other DNA
cagagacctttgttcacttt

SEQ ID NO: 93514 - DNA, 20 bp, synthetic construct
  source 1..20: mol_type = other DNA
ccagagacctttgttcactt

SEQ ID NO: 93515 - DNA, 20 bp, synthetic construct
  source 1..20: mol_type = other DNA
accagagacctttgttcact

SEQ ID NO: 93516 - DNA, 20 bp, synthetic construct
  source 1..20: mol_type = other DNA
aaccagagacctttgttcac

SEQ ID NO: 93517 - DNA, 20 bp, synthetic construct
  source 1..20: mol_type = other DNA
aaaccagagacctttgttca

SEQ ID NO: 93518 - DNA, 20 bp, synthetic construct
  source 1..20: mol_type = other DNA
aaaaccagagacctttgttc

SEQ ID NO: 93519 - DNA, 20 bp, synthetic construct
  source 1..20: mol_type = other DNA
gaaaaccagagacctttgtt

SEQ ID NO: 93520 - DNA, 20 bp, synthetic construct
  source 1..20: mol_type = other DNA
ggaaaaccagagacctttgt

SEQ ID NO: 93521 - DNA, 20 bp, synthetic construct
  source 1..20: mol_type = other DNA
aggaaaaccagagacctttg

SEQ ID NO: 93522 - DNA, 20 bp, synthetic construct
  source 1..20: mol_type = other DNA
taggaaaaccagagaccttt

SEQ ID NO: 93523 - DNA, 20 bp, synthetic construct
  source 1..20: mol_type = other DNA
ctaggaaaaccagagacctt

SEQ ID NO: 93524 - DNA, 20 bp, synthetic construct
  source 1..20: mol_type = other DNA
cctaggaaaaccagagacct

SEQ ID NO: 93525 - DNA, 20 bp, synthetic construct
  source 1..20: mol_type = other DNA
gcctaggaaaaccagagacc

SEQ ID NO: 93526 - DNA, 20 bp, synthetic construct
  source 1..20: mol_type = other DNA
tgcctaggaaaaccagagac

SEQ ID NO: 93527 - DNA, 20 bp, synthetic construct
  source 1..20: mol_type = other DNA
ctgcctaggaaaaccagaga

SEQ ID NO: 93528 - DNA, 20 bp, synthetic construct
  source 1..20: mol_type = other DNA
tctgcctaggaaaaccagag

SEQ ID NO: 93529 - DNA, 20 bp, synthetic construct
  source 1..20: mol_type = other DNA
ctctgcctaggaaaaccaga

SEQ ID NO: 93530 - DNA, 20 bp, synthetic construct
  source 1..20: mol_type = other DNA
cctctgcctaggaaaaccag

SEQ ID NO: 93531 - DNA, 20 bp, synthetic construct
  source 1..20: mol_type = other DNA
tcctctgcctaggaaaacca

SEQ ID NO: 93532 - DNA, 20 bp, synthetic construct
  source 1..20: mol_type = other DNA
gtcctctgcctaggaaaacc

SEQ ID NO: 93533 - DNA, 20 bp, synthetic construct
  source 1..20: mol_type = other DNA
ggtcctctgcctaggaaaac

SEQ ID NO: 93534 - DNA, 20 bp, synthetic construct
  source 1..20: mol_type = other DNA
gggtcctctgcctaggaaaa

SEQ ID NO: 93535 - DNA, 20 bp, synthetic construct
  source 1..20: mol_type = other DNA
agggtcctctgcctaggaaa

SEQ ID NO: 93536 - DNA, 20 bp, synthetic construct
  source 1..20: mol_type = other DNA
cagggtcctctgcctaggaa

SEQ ID NO: 93537 - DNA, 20 bp, synthetic construct
  source 1..20: mol_type = other DNA
gcagggtcctctgcctagga

SEQ ID NO: 93538 - DNA, 20 bp, synthetic construct
  source 1..20: mol_type = other DNA
cgcagggtcctctgcctagg

SEQ ID NO: 93539 - DNA, 20 bp, synthetic construct
  source 1..20: mol_type = other DNA
ccgcagggtcctctgcctag

SEQ ID NO: 93540 - DNA, 20 bp, synthetic construct
  source 1..20: mol_type = other DNA
gccgcagggtcctctgccta

SEQ ID NO: 93541 - DNA, 20 bp, synthetic construct
  source 1..20: mol_type = other DNA
ggccgcagggtcctctgcct

SEQ ID NO: 93542 - DNA, 20 bp, synthetic construct
  source 1..20: mol_type = other DNA
aggccgcagggtcctctgcc

SEQ ID NO: 93543 - DNA, 20 bp, synthetic construct
  source 1..20: mol_type = other DNA
aaggccgcagggtcctctgc

SEQ ID NO: 93544 - DNA, 20 bp, synthetic construct
  source 1..20: mol_type = other DNA
gaaggccgcagggtcctctg

SEQ ID NO: 93545 - DNA, 20 bp, synthetic construct
  source 1..20: mol_type = other DNA
ggaaggccgcagggtcctct

SEQ ID NO: 93546 - DNA, 20 bp, synthetic construct
  source 1..20: mol_type = other DNA
cggaaggccgcagggtcctc

SEQ ID NO: 93547 - DNA, 20 bp, synthetic construct
  source 1..20: mol_type = other DNA
gcggaaggccgcagggtcct

SEQ ID NO: 93548 - DNA, 20 bp, synthetic construct
  source 1..20: mol_type = other DNA
tgcggaaggccgcagggtcc

SEQ ID NO: 93549 - DNA, 20 bp, synthetic construct
  source 1..20: mol_type = other DNA
ctgcggaaggccgcagggtc

SEQ ID NO: 93550 - DNA, 20 bp, synthetic construct
  source 1..20: mol_type = other DNA
actgcggaaggccgcagggt

SEQ ID NO: 93551 - DNA, 20 bp, synthetic construct
  source 1..20: mol_type = other DNA
cactgcggaaggccgcaggg

SEQ ID NO: 93552 - DNA, 20 bp, synthetic construct
  source 1..20: mol_type = other DNA
acactgcggaaggccgcagg

SEQ ID NO: 93553 - DNA, 20 bp, synthetic construct
  source 1..20: mol_type = other DNA
aacactgcggaaggccgcag

SEQ ID NO: 93554 - DNA, 20 bp, synthetic construct
  source 1..20: mol_type = other DNA
aaacactgcggaaggccgca

SEQ ID NO: 93555 - DNA, 20 bp, synthetic construct
  source 1..20: mol_type = other DNA
caaacactgcggaaggccgc

SEQ ID NO: 93556 - DNA, 20 bp, synthetic construct
  source 1..20: mol_type = other DNA
acaaacactgcggaaggccg

SEQ ID NO: 93557 - DNA, 20 bp, synthetic construct
  source 1..20: mol_type = other DNA
cacaaacactgcggaaggcc

SEQ ID NO: 93558 - DNA, 20 bp, synthetic construct
  source 1..20: mol_type = other DNA
acacaaacactgcggaaggc

SEQ ID NO: 93559 - DNA, 20 bp, synthetic construct
  source 1..20: mol_type = other DNA
gacacaaacactgcggaagg

SEQ ID NO: 93560 - DNA, 20 bp, synthetic construct
  source 1..20: mol_type = other DNA
ggacacaaacactgcggaag

SEQ ID NO: 93561 - DNA, 20 bp, synthetic construct
  source 1..20: mol_type = other DNA
gggacacaaacactgcggaa

SEQ ID NO: 93562 - DNA, 20 bp, synthetic construct
  source 1..20: mol_type = other DNA
agggacacaaacactgcgga

SEQ ID NO: 93563 - DNA, 20 bp, synthetic construct
  source 1..20: mol_type = other DNA
cagggacacaaacactgcgg

SEQ ID NO: 93564 - DNA, 20 bp, synthetic construct
  source 1..20: mol_type = other DNA
ccagggacacaaacactgcg

SEQ ID NO: 93565 - DNA, 20 bp, synthetic construct
  source 1..20: mol_type = other DNA
cccagggacacaaacactgc

SEQ ID NO: 93566 - DNA, 20 bp, synthetic construct
  source 1..20: mol_type = other DNA
acccagggacacaaacactg

SEQ ID NO: 93567 - DNA, 20 bp, synthetic construct
  source 1..20: mol_type = other DNA
tacccagggacacaaacact

SEQ ID NO: 93568 - DNA, 20 bp, synthetic construct
  source 1..20: mol_type = other DNA
gtacccagggacacaaacac

SEQ ID NO: 93569 - DNA, 20 bp, synthetic construct
  source 1..20: mol_type = other DNA
agtacccagggacacaaaca

SEQ ID NO: 93570 - DNA, 20 bp, synthetic construct
  source 1..20: mol_type = other DNA
aagtacccagggacacaaac

SEQ ID NO: 93571 - DNA, 20 bp, synthetic construct
  source 1..20: mol_type = other DNA
caagtacccagggacacaaa

SEQ ID NO: 93572 - DNA, 20 bp, synthetic construct
  source 1..20: mol_type = other DNA
tcaagtacccagggacacaa

SEQ ID NO: 93573 - DNA, 20 bp, synthetic construct
  source 1..20: mol_type = other DNA
ctcaagtacccagggacaca

SEQ ID NO: 93574 - DNA, 20 bp, synthetic construct
  source 1..20: mol_type = other DNA
tctcaagtacccagggacac

SEQ ID NO: 93575 - DNA, 20 bp, synthetic construct
  source 1..20: mol_type = other DNA
atctcaagtacccagggaca

SEQ ID NO: 93576 - DNA, 20 bp, synthetic construct
  source 1..20: mol_type = other DNA
aatctcaagtacccagggac

SEQ ID NO: 93577 - DNA, 20 bp, synthetic construct
  source 1..20: mol_type = other DNA
taatctcaagtacccaggga

SEQ ID NO: 93578 - DNA, 20 bp, synthetic construct
  source 1..20: mol_type = other DNA
ctaatctcaagtacccaggg

SEQ ID NO: 93579 - DNA, 20 bp, synthetic construct
  source 1..20: mol_type = other DNA
cctaatctcaagtacccagg

SEQ ID NO: 93580 - DNA, 20 bp, synthetic construct
  source 1..20: mol_type = other DNA
ccctaatctcaagtacccag

SEQ ID NO: 93581 - DNA, 20 bp, synthetic construct
  source 1..20: mol_type = other DNA
tccctaatctcaagtaccca

SEQ ID NO: 93582 - DNA, 20 bp, synthetic construct
  source 1..20: mol_type = other DNA
ctccctaatctcaagtaccc

SEQ ID NO: 93583 - DNA, 20 bp, synthetic construct
  source 1..20: mol_type = other DNA
actccctaatctcaagtacc

SEQ ID NO: 93584 - DNA, 20 bp, synthetic construct
  source 1..20: mol_type = other DNA
cactccctaatctcaagtac

SEQ ID NO: 93585 - DNA, 20 bp, synthetic construct
  source 1..20: mol_type = other DNA
ccactccctaatctcaagta

SEQ ID NO: 93586 - DNA, 20 bp, synthetic construct
  source 1..20: mol_type = other DNA
accactccctaatctcaagt

SEQ ID NO: 93587 - DNA, 20 bp, synthetic construct
  source 1..20: mol_type = other DNA
caccactccctaatctcaag

SEQ ID NO: 93588 - DNA, 20 bp, synthetic construct
  source 1..20: mol_type = other DNA
tcaccactccctaatctcaa

SEQ ID NO: 93589 - DNA, 20 bp, synthetic construct
  source 1..20: mol_type = other DNA
atcaccactccctaatctca

SEQ ID NO: 93590 - DNA, 20 bp, synthetic construct
  source 1..20: mol_type = other DNA
catcaccactccctaatctc

SEQ ID NO: 93591 - DNA, 20 bp, synthetic construct
  source 1..20: mol_type = other DNA
tcatcaccactccctaatct

SEQ ID NO: 93592 - DNA, 20 bp, synthetic construct
  source 1..20: mol_type = other DNA
gtcatcaccactccctaatc

SEQ ID NO: 93593 - DNA, 20 bp, synthetic construct
  source 1..20: mol_type = other DNA
agtcatcaccactccctaat

SEQ ID NO: 93594 - DNA, 20 bp, synthetic construct
  source 1..20: mol_type = other DNA
gagtcatcaccactccctaa

SEQ ID NO: 93595 - DNA, 20 bp, synthetic construct
  source 1..20: mol_type = other DNA
agagtcatcaccactcccta

SEQ ID NO: 93596 - DNA, 20 bp, synthetic construct
  source 1..20: mol_type = other DNA
aagagtcatcaccactccct

SEQ ID NO: 93597 - DNA, 20 bp, synthetic construct
  source 1..20: mol_type = other DNA
taagagtcatcaccactccc

SEQ ID NO: 93598 - DNA, 20 bp, synthetic construct
  source 1..20: mol_type = other DNA
ttaagagtcatcaccactcc

SEQ ID NO: 93599 - DNA, 20 bp, synthetic construct
  source 1..20: mol_type = other DNA
gttaagagtcatcaccactc

SEQ ID NO: 93600 - DNA, 20 bp, synthetic construct
  source 1..20: mol_type = other DNA
cgttaagagtcatcaccact

SEQ ID NO: 93601 - DNA, 20 bp, synthetic construct
  source 1..20: mol_type = other DNA
tcgttaagagtcatcaccac

SEQ ID NO: 93602 - DNA, 20 bp, synthetic construct
  source 1..20: mol_type = other DNA
ctcgttaagagtcatcacca

SEQ ID NO: 93603 - DNA, 20 bp, synthetic construct
  source 1..20: mol_type = other DNA
gctcgttaagagtcatcacc

SEQ ID NO: 93604 - DNA, 20 bp, synthetic construct
  source 1..20: mol_type = other DNA
tgctcgttaagagtcatcac

SEQ ID NO: 93605 - DNA, 20 bp, synthetic construct
  source 1..20: mol_type = other DNA
atgctcgttaagagtcatca

SEQ ID NO: 93606 - DNA, 20 bp, synthetic construct
  source 1..20: mol_type = other DNA
catgctcgttaagagtcatc

SEQ ID NO: 93607 - DNA, 20 bp, synthetic construct
  source 1..20: mol_type = other DNA
gcatgctcgttaagagtcat

SEQ ID NO: 93608 - DNA, 20 bp, synthetic construct
  source 1..20: mol_type = other DNA
agcatgctcgttaagagtca

SEQ ID NO: 93609 - DNA, 20 bp, synthetic construct
  source 1..20: mol_type = other DNA
cagcatgctcgttaagagtc

SEQ ID NO: 93610 - DNA, 20 bp, synthetic construct
  source 1..20: mol_type = other DNA
gcagcatgctcgttaagagt

SEQ ID NO: 93611 - DNA, 20 bp, synthetic construct
  source 1..20: mol_type = other DNA
ggcagcatgctcgttaagag

SEQ ID NO: 93612 - DNA, 20 bp, synthetic construct
  source 1..20: mol_type = other DNA
aggcagcatgctcgttaaga

SEQ ID NO: 93613 - DNA, 20 bp, synthetic construct
  source 1..20: mol_type = other DNA
aaggcagcatgctcgttaag

SEQ ID NO: 93614 - DNA, 20 bp, synthetic construct
  source 1..20: mol_type = other DNA
gaaggcagcatgctcgttaa

SEQ ID NO: 93615 - DNA, 20 bp, synthetic construct
  source 1..20: mol_type = other DNA
tgaaggcagcatgctcgtta

SEQ ID NO: 93616 - DNA, 20 bp, synthetic construct
  source 1..20: mol_type = other DNA
ttgaaggcagcatgctcgtt

SEQ ID NO: 93617 - DNA, 20 bp, synthetic construct
  source 1..20: mol_type = other DNA
cttgaaggcagcatgctcgt

SEQ ID NO: 93618 - DNA, 20 bp, synthetic construct
  source 1..20: mol_type = other DNA
gcttgaaggcagcatgctcg

SEQ ID NO: 93619 - DNA, 20 bp, synthetic construct
  source 1..20: mol_type = other DNA
tgcttgaaggcagcatgctc

SEQ ID NO: 93620 - DNA, 20 bp, synthetic construct
  source 1..20: mol_type = other DNA
atgcttgaaggcagcatgct

SEQ ID NO: 93621 - DNA, 20 bp, synthetic construct
  source 1..20: mol_type = other DNA
gatgcttgaaggcagcatgc

SEQ ID NO: 93622 - DNA, 20 bp, synthetic construct
  source 1..20: mol_type = other DNA
agatgcttgaaggcagcatg

SEQ ID NO: 93623 - DNA, 20 bp, synthetic construct
  source 1..20: mol_type = other DNA
cagatgcttgaaggcagcat

SEQ ID NO: 93624 - DNA, 20 bp, synthetic construct
  source 1..20: mol_type = other DNA
acagatgcttgaaggcagca

SEQ ID NO: 93625 - DNA, 20 bp, synthetic construct
  source 1..20: mol_type = other DNA
aacagatgcttgaaggcagc

SEQ ID NO: 93626 - DNA, 20 bp, synthetic construct
  source 1..20: mol_type = other DNA
aaacagatgcttgaaggcag

SEQ ID NO: 93627 - DNA, 20 bp, synthetic construct
  source 1..20: mol_type = other DNA
taaacagatgcttgaaggca

SEQ ID NO: 93628 - DNA, 20 bp, synthetic construct
  source 1..20: mol_type = other DNA
ttaaacagatgcttgaaggc

SEQ ID NO: 93629 - DNA, 20 bp, synthetic construct
  source 1..20: mol_type = other DNA
gttaaacagatgcttgaagg

SEQ ID NO: 93630 - DNA, 20 bp, synthetic construct
  source 1..20: mol_type = other DNA
tgttaaacagatgcttgaag

SEQ ID NO: 93631 - DNA, 20 bp, synthetic construct
  source 1..20: mol_type = other DNA
ttgttaaacagatgcttgaa

SEQ ID NO: 93632 - DNA, 20 bp, synthetic construct
  source 1..20: mol_type = other DNA
tttgttaaacagatgcttga

SEQ ID NO: 93633 - DNA, 20 bp, synthetic construct
  source 1..20: mol_type = other DNA
ctttgttaaacagatgcttg

SEQ ID NO: 93634 - DNA, 20 bp, synthetic construct
  source 1..20: mol_type = other DNA
gctttgttaaacagatgctt

SEQ ID NO: 93635 - DNA, 20 bp, synthetic construct
  source 1..20: mol_type = other DNA
tgctttgttaaacagatgct

SEQ ID NO: 93636 - DNA, 20 bp, synthetic construct
  source 1..20: mol_type = other DNA
gtgctttgttaaacagatgc

SEQ ID NO: 93637 - DNA, 20 bp, synthetic construct
  source 1..20: mol_type = other DNA
tgtgctttgttaaacagatg

SEQ ID NO: 93638 - DNA, 20 bp, synthetic construct
  source 1..20: mol_type = other DNA
atgtgctttgttaaacagat

SEQ ID NO: 93639 - DNA, 20 bp, synthetic construct
  source 1..20: mol_type = other DNA
gatgtgctttgttaaacaga

SEQ ID NO: 93640 - DNA, 20 bp, synthetic construct
  source 1..20: mol_type = other DNA
agatgtgctttgttaaacag

SEQ ID NO: 93641 - DNA, 20 bp, synthetic construct
  source 1..20: mol_type = other DNA
aagatgtgctttgttaaaca

SEQ ID NO: 93642 - DNA, 20 bp, synthetic construct
  source 1..20: mol_type = other DNA
caagatgtgctttgttaaac

SEQ ID NO: 93643 - DNA, 20 bp, synthetic construct
  source 1..20: mol_type = other DNA
gcaagatgtgctttgttaaa

SEQ ID NO: 93644 - DNA, 20 bp, synthetic construct
  source 1..20: mol_type = other DNA
tgcaagatgtgctttgttaa

SEQ ID NO: 93645 - DNA, 20 bp, synthetic construct
  source 1..20: mol_type = other DNA
gtgcaagatgtgctttgtta

SEQ ID NO: 93646 - DNA, 20 bp, synthetic construct
  source 1..20: mol_type = other DNA
ggtgcaagatgtgctttgtt

SEQ ID NO: 93647 - DNA, 20 bp, synthetic construct
  source 1..20: mol_type = other DNA
cggtgcaagatgtgctttgt

SEQ ID NO: 93648 - DNA, 20 bp, synthetic construct
  source 1..20: mol_type = other DNA
gcggtgcaagatgtgctttg

SEQ ID NO: 93649 - DNA, 20 bp, synthetic construct
  source 1..20: mol_type = other DNA
ggcggtgcaagatgtgcttt

SEQ ID NO: 93650 - DNA, 20 bp, synthetic construct
  source 1..20: mol_type = other DNA
gggcggtgcaagatgtgctt

SEQ ID NO: 93651 - DNA, 20 bp, synthetic construct
  source 1..20: mol_type = other DNA
agggcggtgcaagatgtgct

SEQ ID NO: 93652 - DNA, 20 bp, synthetic construct
  source 1..20: mol_type = other DNA
aagggcggtgcaagatgtgc

SEQ ID NO: 93653 - DNA, 20 bp, synthetic construct
  source 1..20: mol_type = other DNA
taagggcggtgcaagatgtg

SEQ ID NO: 93654 - DNA, 20 bp, synthetic construct
  source 1..20: mol_type = other DNA
ttaagggcggtgcaagatgt

SEQ ID NO: 93655 - DNA, 20 bp, synthetic construct
  source 1..20: mol_type = other DNA
attaagggcggtgcaagatg

SEQ ID NO: 93656 - DNA, 20 bp, synthetic construct
  source 1..20: mol_type = other DNA
gattaagggcggtgcaagat

SEQ ID NO: 93657 - DNA, 20 bp, synthetic construct
  source 1..20: mol_type = other DNA
ggattaagggcggtgcaaga

SEQ ID NO: 93658 - DNA, 20 bp, synthetic construct
  source 1..20: mol_type = other DNA
tggattaagggcggtgcaag

SEQ ID NO: 93659 - DNA, 20 bp, synthetic construct
  source 1..20: mol_type = other DNA
atggattaagggcggtgcaa

SEQ ID NO: 93660 - DNA, 20 bp, synthetic construct
  source 1..20: mol_type = other DNA
aatggattaagggcggtgca

SEQ ID NO: 93661 - DNA, 20 bp, synthetic construct
  source 1..20: mol_type = other DNA
aaatggattaagggcggtgc

SEQ ID NO: 93662 - DNA, 20 bp, synthetic construct
  source 1..20: mol_type = other DNA
taaatggattaagggcggtg

SEQ ID NO: 93663 - DNA, 20 bp, synthetic construct
  source 1..20: mol_type = other DNA
ttaaatggattaagggcggt

SEQ ID NO: 93664 - DNA, 20 bp, synthetic construct
  source 1..20: mol_type = other DNA
gttaaatggattaagggcgg

SEQ ID NO: 93665 - DNA, 20 bp, synthetic construct
  source 1..20: mol_type = other DNA
ggttaaatggattaagggcg

SEQ ID NO: 93666 - DNA, 20 bp, synthetic construct
  source 1..20: mol_type = other DNA
gggttaaatggattaagggc

SEQ ID NO: 93667 - DNA, 20 bp, synthetic construct
  source 1..20: mol_type = other DNA
agggttaaatggattaaggg

SEQ ID NO: 93668 - DNA, 20 bp, synthetic construct
  source 1..20: mol_type = other DNA
cagggttaaatggattaagg

SEQ ID NO: 93669 - DNA, 20 bp, synthetic construct
  source 1..20: mol_type = other DNA
tcagggttaaatggattaag

SEQ ID NO: 93670 - DNA, 20 bp, synthetic construct
  source 1..20: mol_type = other DNA
ctcagggttaaatggattaa

SEQ ID NO: 93671 - DNA, 20 bp, synthetic construct
  source 1..20: mol_type = other DNA
actcagggttaaatggatta

SEQ ID NO: 93672 - DNA, 20 bp, synthetic construct
  source 1..20: mol_type = other DNA
cactcagggttaaatggatt

SEQ ID NO: 93673 - DNA, 20 bp, synthetic construct
  source 1..20: mol_type = other DNA
tcactcagggttaaatggat

SEQ ID NO: 93674 - DNA, 20 bp, synthetic construct
  source 1..20: mol_type = other DNA
gtcactcagggttaaatgga

SEQ ID NO: 93675 - DNA, 20 bp, synthetic construct
  source 1..20: mol_type = other DNA
tgtcactcagggttaaatgg

SEQ ID NO: 93676 - DNA, 20 bp, synthetic construct
  source 1..20: mol_type = other DNA
gtgtcactcagggttaaatg

SEQ ID NO: 93677 - DNA, 20 bp, synthetic construct
  source 1..20: mol_type = other DNA
tgtgtcactcagggttaaat

SEQ ID NO: 93678 - DNA, 20 bp, synthetic construct
  source 1..20: mol_type = other DNA
ctgtgtcactcagggttaaa

SEQ ID NO: 93679 - DNA, 20 bp, synthetic construct
  source 1..20: mol_type = other DNA
gctgtgtcactcagggttaa

SEQ ID NO: 93680 - DNA, 20 bp, synthetic construct
  source 1..20: mol_type = other DNA
tgctgtgtcactcagggtta

SEQ ID NO: 93681 - DNA, 20 bp, synthetic construct
  source 1..20: mol_type = other DNA
gtgctgtgtcactcagggtt

SEQ ID NO: 93682 - DNA, 20 bp, synthetic construct
  source 1..20: mol_type = other DNA
tgtgctgtgtcactcagggt

SEQ ID NO: 93683 - DNA, 20 bp, synthetic construct
  source 1..20: mol_type = other DNA
atgtgctgtgtcactcaggg

SEQ ID NO: 93684 - DNA, 20 bp, synthetic construct
  source 1..20: mol_type = other DNA
catgtgctgtgtcactcagg

SEQ ID NO: 93685 - DNA, 20 bp, synthetic construct
  source 1..20: mol_type = other DNA
acatgtgctgtgtcactcag

SEQ ID NO: 93686 - DNA, 20 bp, synthetic construct
  source 1..20: mol_type = other DNA
aacatgtgctgtgtcactca

SEQ ID NO: 93687 - DNA, 20 bp, synthetic construct
  source 1..20: mol_type = other DNA
aaacatgtgctgtgtcactc

SEQ ID NO: 93688 - DNA, 20 bp, synthetic construct
  source 1..20: mol_type = other DNA
gaaacatgtgctgtgtcact

SEQ ID NO: 93689 - DNA, 20 bp, synthetic construct
  source 1..20: mol_type = other DNA
tgaaacatgtgctgtgtcac

SEQ ID NO: 93690 - DNA, 20 bp, synthetic construct
  source 1..20: mol_type = other DNA
ctgaaacatgtgctgtgtca

SEQ ID NO: 93691 - DNA, 20 bp, synthetic construct
  source 1..20: mol_type = other DNA
tctgaaacatgtgctgtgtc

SEQ ID NO: 93692 - DNA, 20 bp, synthetic construct
  source 1..20: mol_type = other DNA
ctctgaaacatgtgctgtgt

SEQ ID NO: 93693 - DNA, 20 bp, synthetic construct
  source 1..20: mol_type = other DNA
tctctgaaacatgtgctgtg

SEQ ID NO: 93694 - DNA, 20 bp, synthetic construct
  source 1..20: mol_type = other DNA
ctctctgaaacatgtgctgt

SEQ ID NO: 93695 - DNA, 20 bp, synthetic construct
  source 1..20: mol_type = other DNA
gctctctgaaacatgtgctg

SEQ ID NO: 93696 - DNA, 20 bp, synthetic construct
  source 1..20: mol_type = other DNA
tgctctctgaaacatgtgct

SEQ ID NO: 93697 - DNA, 20 bp, synthetic construct
  source 1..20: mol_type = other DNA
gtgctctctgaaacatgtgc

SEQ ID NO: 93698 - DNA, 20 bp, synthetic construct
  source 1..20: mol_type = other DNA
tgtgctctctgaaacatgtg

SEQ ID NO: 93699 - DNA, 20 bp, synthetic construct
  source 1..20: mol_type = other DNA
ctgtgctctctgaaacatgt

SEQ ID NO: 93700 - DNA, 20 bp, synthetic construct
  source 1..20: mol_type = other DNA
cctgtgctctctgaaacatg

SEQ ID NO: 93701 - DNA, 20 bp, synthetic construct
  source 1..20: mol_type = other DNA
ccctgtgctctctgaaacat

SEQ ID NO: 93702 - DNA, 20 bp, synthetic construct
  source 1..20: mol_type = other DNA
accctgtgctctctgaaaca

SEQ ID NO: 93703 - DNA, 20 bp, synthetic construct
  source 1..20: mol_type = other DNA
aaccctgtgctctctgaaac

SEQ ID NO: 93704 - DNA, 20 bp, synthetic construct
  source 1..20: mol_type = other DNA
caaccctgtgctctctgaaa

SEQ ID NO: 93705 - DNA, 20 bp, synthetic construct
  source 1..20: mol_type = other DNA
ccaaccctgtgctctctgaa

SEQ ID NO: 93706 - DNA, 20 bp, synthetic construct
  source 1..20: mol_type = other DNA
cccaaccctgtgctctctga

SEQ ID NO: 93707 - DNA, 20 bp, synthetic construct
  source 1..20: mol_type = other DNA
ccccaaccctgtgctctctg

SEQ ID NO: 93708 - DNA, 20 bp, synthetic construct
  source 1..20: mol_type = other DNA
cccccaaccctgtgctctct

SEQ ID NO: 93709 - DNA, 20 bp, synthetic construct
  source 1..20: mol_type = other DNA
acccccaaccctgtgctctc

SEQ ID NO: 93710 - DNA, 20 bp, synthetic construct
  source 1..20: mol_type = other DNA
tacccccaaccctgtgctct

SEQ ID NO: 93711 - DNA, 20 bp, synthetic construct
  source 1..20: mol_type = other DNA
ttacccccaaccctgtgctc

SEQ ID NO: 93712 - DNA, 20 bp, synthetic construct
  source 1..20: mol_type = other DNA
cttacccccaaccctgtgct

SEQ ID NO: 93713 - DNA, 20 bp, synthetic construct
  source 1..20: mol_type = other DNA
ccttacccccaaccctgtgc

SEQ ID NO: 93714 - DNA, 20 bp, synthetic construct
  source 1..20: mol_type = other DNA
accttacccccaaccctgtg

SEQ ID NO: 93715 - DNA, 20 bp, synthetic construct
  source 1..20: mol_type = other DNA
gaccttacccccaaccctgt

SEQ ID NO: 93716 - DNA, 20 bp, synthetic construct
  source 1..20: mol_type = other DNA
tgaccttacccccaaccctg

SEQ ID NO: 93717 - DNA, 20 bp, synthetic construct
  source 1..20: mol_type = other DNA
atgaccttacccccaaccct

SEQ ID NO: 93718 - DNA, 20 bp, synthetic construct
  source 1..20: mol_type = other DNA
tatgaccttacccccaaccc

SEQ ID NO: 93719 - DNA, 20 bp, synthetic construct
  source 1..20: mol_type = other DNA
ctatgaccttacccccaacc

SEQ ID NO: 93720 - DNA, 20 bp, synthetic construct
  source 1..20: mol_type = other DNA
tctatgaccttacccccaac

SEQ ID NO: 93721 - DNA, 20 bp, synthetic construct
  source 1..20: mol_type = other DNA
atctatgaccttacccccaa

SEQ ID NO: 93722 - DNA, 20 bp, synthetic construct
  source 1..20: mol_type = other DNA
gatctatgaccttaccccca

SEQ ID NO: 93723 - DNA, 20 bp, synthetic construct
  source 1..20: mol_type = other DNA
tgatctatgaccttaccccc

SEQ ID NO: 93724 - DNA, 20 bp, synthetic construct
  source 1..20: mol_type = other DNA
ttgatctatgaccttacccc

SEQ ID NO: 93725 - DNA, 20 bp, synthetic construct
  source 1..20: mol_type = other DNA
gttgatctatgaccttaccc

SEQ ID NO: 93726 - DNA, 20 bp, synthetic construct
  source 1..20: mol_type = other DNA
tgttgatctatgaccttacc

SEQ ID NO: 93727 - DNA, 20 bp, synthetic construct
  source 1..20: mol_type = other DNA
ctgttgatctatgaccttac

SEQ ID NO: 93728 - DNA, 20 bp, synthetic construct
  source 1..20: mol_type = other DNA
cctgttgatctatgacctta

SEQ ID NO: 93729 - DNA, 20 bp, synthetic construct
  source 1..20: mol_type = other DNA
tcctgttgatctatgacctt

SEQ ID NO: 93730 - DNA, 20 bp, synthetic construct
  source 1..20: mol_type = other DNA
atcctgttgatctatgacct

SEQ ID NO: 93731 - DNA, 20 bp, synthetic construct
  source 1..20: mol_type = other DNA
gatcctgttgatctatgacc

SEQ ID NO: 93732 - DNA, 20 bp, synthetic construct
  source 1..20: mol_type = other DNA
ggatcctgttgatctatgac

SEQ ID NO: 93733 - DNA, 20 bp, synthetic construct
  source 1..20: mol_type = other DNA
gggatcctgttgatctatga

SEQ ID NO: 93734 - DNA, 20 bp, synthetic construct
  source 1..20: mol_type = other DNA
tgggatcctgttgatctatg

SEQ ID NO: 93735 - DNA, 20 bp, synthetic construct
  source 1..20: mol_type = other DNA
ttgggatcctgttgatctat

SEQ ID NO: 93736 - DNA, 20 bp, synthetic construct
  source 1..20: mol_type = other DNA
cttgggatcctgttgatcta

SEQ ID NO: 93737 - DNA, 20 bp, synthetic construct
  source 1..20: mol_type = other DNA
ccttgggatcctgttgatct

SEQ ID NO: 93738 - DNA, 20 bp, synthetic construct
  source 1..20: mol_type = other DNA
gccttgggatcctgttgatc

SEQ ID NO: 93739 - DNA, 20 bp, synthetic construct
  source 1..20: mol_type = other DNA
tgccttgggatcctgttgat

SEQ ID NO: 93740 - DNA, 20 bp, synthetic construct
  source 1..20: mol_type = other DNA
ctgccttgggatcctgttga

SEQ ID NO: 93741 - DNA, 20 bp, synthetic construct
  source 1..20: mol_type = other DNA
tctgccttgggatcctgttg

SEQ ID NO: 93742 - DNA, 20 bp, synthetic construct
  source 1..20: mol_type = other DNA
ttctgccttgggatcctgtt

SEQ ID NO: 93743 - DNA, 20 bp, synthetic construct
  source 1..20: mol_type = other DNA
cttctgccttgggatcctgt

SEQ ID NO: 93744 - DNA, 20 bp, synthetic construct
  source 1..20: mol_type = other DNA
tcttctgccttgggatcctg

SEQ ID NO: 93745 - DNA, 20 bp, synthetic construct
  source 1..20: mol_type = other DNA
ttcttctgccttgggatcct

SEQ ID NO: 93746 - DNA, 20 bp, synthetic construct
  source 1..20: mol_type = other DNA
attcttctgccttgggatcc

SEQ ID NO: 93747 - DNA, 20 bp, synthetic construct
  source 1..20: mol_type = other DNA
gattcttctgccttgggatc

SEQ ID NO: 93748 - DNA, 20 bp, synthetic construct
  source 1..20: mol_type = other DNA
agattcttctgccttgggat

SEQ ID NO: 93749 - DNA, 20 bp, synthetic construct
  source 1..20: mol_type = other DNA
aagattcttctgccttggga

SEQ ID NO: 93750 - DNA, 20 bp, synthetic construct
  source 1..20: mol_type = other DNA
aaagattcttctgccttggg

SEQ ID NO: 93751 - DNA, 20 bp, synthetic construct
  source 1..20: mol_type = other DNA
gaaagattcttctgccttgg

SEQ ID NO: 93752 - DNA, 20 bp, synthetic construct
  source 1..20: mol_type = other DNA
agaaagattcttctgccttg

SEQ ID NO: 93753 - DNA, 20 bp, synthetic construct
  source 1..20: mol_type = other DNA
aagaaagattcttctgcctt

SEQ ID NO: 93754 - DNA, 20 bp, synthetic construct
  source 1..20: mol_type = other DNA
taagaaagattcttctgcct

SEQ ID NO: 93755 - DNA, 20 bp, synthetic construct
  source 1..20: mol_type = other DNA
ctaagaaagattcttctgcc

SEQ ID NO: 93756 - DNA, 20 bp, synthetic construct
  source 1..20: mol_type = other DNA
actaagaaagattcttctgc

SEQ ID NO: 93757 - DNA, 20 bp, synthetic construct
  source 1..20: mol_type = other DNA
tactaagaaagattcttctg

SEQ ID NO: 93758 - DNA, 20 bp, synthetic construct
  source 1..20: mol_type = other DNA
gtactaagaaagattcttct

SEQ ID NO: 93759 - DNA, 20 bp, synthetic construct
  source 1..20: mol_type = other DNA
tgtactaagaaagattcttc

SEQ ID NO: 93760 - DNA, 20 bp, synthetic construct
  source 1..20: mol_type = other DNA
ctgtactaagaaagattctt

SEQ ID NO: 93761 - DNA, 20 bp, synthetic construct
  source 1..20: mol_type = other DNA
tctgtactaagaaagattct

SEQ ID NO: 93762 - DNA, 20 bp, synthetic construct
  source 1..20: mol_type = other DNA
ttctgtactaagaaagattc

SEQ ID NO: 93763 - DNA, 20 bp, synthetic construct
  source 1..20: mol_type = other DNA
gttctgtactaagaaagatt

SEQ ID NO: 93764 - DNA, 20 bp, synthetic construct
  source 1..20: mol_type = other DNA
tgttctgtactaagaaagat

SEQ ID NO: 93765 - DNA, 20 bp, synthetic construct
  source 1..20: mol_type = other DNA
ttgttctgtactaagaaaga

SEQ ID NO: 93766 - DNA, 20 bp, synthetic construct
  source 1..20: mol_type = other DNA
tttgttctgtactaagaaag

SEQ ID NO: 93767 - DNA, 20 bp, synthetic construct
  source 1..20: mol_type = other DNA
ttttgttctgtactaagaaa

SEQ ID NO: 93768 - DNA, 20 bp, synthetic construct
  source 1..20: mol_type = other DNA
attttgttctgtactaagaa

SEQ ID NO: 93769 - DNA, 20 bp, synthetic construct
  source 1..20: mol_type = other DNA
cattttgttctgtactaaga

SEQ ID NO: 93770 - DNA, 20 bp, synthetic construct
  source 1..20: mol_type = other DNA
tcattttgttctgtactaag

SEQ ID NO: 93771 - DNA, 20 bp, synthetic construct
  source 1..20: mol_type = other DNA
ttcattttgttctgtactaa

SEQ ID NO: 93772 - DNA, 20 bp, synthetic construct
  source 1..20: mol_type = other DNA
tttcattttgttctgtacta

SEQ ID NO: 93773 - DNA, 20 bp, synthetic construct
  source 1..20: mol_type = other DNA
ttttcattttgttctgtact

SEQ ID NO: 93774 - DNA, 20 bp, synthetic construct
  source 1..20: mol_type = other DNA
cttttcattttgttctgtac

SEQ ID NO: 93775 - DNA, 20 bp, synthetic construct
  source 1..20: mol_type = other DNA
acttttcattttgttctgta

SEQ ID NO: 93776 - DNA, 20 bp, synthetic construct
  source 1..20: mol_type = other DNA
gacttttcattttgttctgt

SEQ ID NO: 93777 - DNA, 20 bp, synthetic construct
  source 1..20: mol_type = other DNA
agacttttcattttgttctg

SEQ ID NO: 93778 - DNA, 20 bp, synthetic construct
  source 1..20: mol_type = other DNA
tagacttttcattttgttct

SEQ ID NO: 93779 - DNA, 20 bp, synthetic construct
  source 1..20: mol_type = other DNA
gtagacttttcattttgttc

SEQ ID NO: 93780 - DNA, 20 bp, synthetic construct
  source 1..20: mol_type = other DNA
ggtagacttttcattttgtt

SEQ ID NO: 93781 - DNA, 20 bp, synthetic construct
  source 1..20: mol_type = other DNA
tggtagacttttcattttgt

SEQ ID NO: 93782 - DNA, 20 bp, synthetic construct
  source 1..20: mol_type = other DNA
atggtagacttttcattttg

SEQ ID NO: 93783 - DNA, 20 bp, synthetic construct
  source 1..20: mol_type = other DNA
catggtagacttttcatttt

SEQ ID NO: 93784 - DNA, 20 bp, synthetic construct
  source 1..20: mol_type = other DNA
acatggtagacttttcattt

SEQ ID NO: 93785 - DNA, 20 bp, synthetic construct
  source 1..20: mol_type = other DNA
gacatggtagacttttcatt

SEQ ID NO: 93786 - DNA, 20 bp, synthetic construct
  source 1..20: mol_type = other DNA
agacatggtagacttttcat

SEQ ID NO: 93787 - DNA, 20 bp, synthetic construct
  source 1..20: mol_type = other DNA
tagacatggtagacttttca

SEQ ID NO: 93788 - DNA, 20 bp, synthetic construct
  source 1..20: mol_type = other DNA
gtagacatggtagacttttc

SEQ ID NO: 93789 - DNA, 20 bp, synthetic construct
  source 1..20: mol_type = other DNA
agtagacatggtagactttt

SEQ ID NO: 93790 - DNA, 20 bp, synthetic construct
  source 1..20: mol_type = other DNA
aagtagacatggtagacttt

SEQ ID NO: 93791 - DNA, 20 bp, synthetic construct
  source 1..20: mol_type = other DNA
gaagtagacatggtagactt

SEQ ID NO: 93792 - DNA, 20 bp, synthetic construct
  source 1..20: mol_type = other DNA
agaagtagacatggtagact

SEQ ID NO: 93793 - DNA, 20 bp, synthetic construct
  source 1..20: mol_type = other DNA
aagaagtagacatggtagac

SEQ ID NO: 93794 - DNA, 20 bp, synthetic construct
  source 1..20: mol_type = other DNA
aaagaagtagacatggtaga

SEQ ID NO: 93795 - DNA, 20 bp, synthetic construct
  source 1..20: mol_type = other DNA
gaaagaagtagacatggtag

SEQ ID NO: 93796 - DNA, 20 bp, synthetic construct
  source 1..20: mol_type = other DNA
agaaagaagtagacatggta

SEQ ID NO: 93797 - DNA, 20 bp, synthetic construct
  source 1..20: mol_type = other DNA
gagaaagaagtagacatggt

SEQ ID NO: 93798 - DNA, 20 bp, synthetic construct
  source 1..20: mol_type = other DNA
ggagaaagaagtagacatgg

SEQ ID NO: 93799 - DNA, 20 bp, synthetic construct
  source 1..20: mol_type = other DNA
tggagaaagaagtagacatg

SEQ ID NO: 93800 - DNA, 20 bp, synthetic construct
  source 1..20: mol_type = other DNA
gtggagaaagaagtagacat

SEQ ID NO: 93801 - DNA, 20 bp, synthetic construct
  source 1..20: mol_type = other DNA
tgtggagaaagaagtagaca

SEQ ID NO: 93802 - DNA, 20 bp, synthetic construct
  source 1..20: mol_type = other DNA
ctgtggagaaagaagtagac

SEQ ID NO: 93803 - DNA, 20 bp, synthetic construct
  source 1..20: mol_type = other DNA
tctgtggagaaagaagtaga

SEQ ID NO: 93804 - DNA, 20 bp, synthetic construct
  source 1..20: mol_type = other DNA
gtctgtggagaaagaagtag

SEQ ID NO: 93805 - DNA, 20 bp, synthetic construct
  source 1..20: mol_type = other DNA
cgtctgtggagaaagaagta

SEQ ID NO: 93806 - DNA, 20 bp, synthetic construct
  source 1..20: mol_type = other DNA
gcgtctgtggagaaagaagt

SEQ ID NO: 93807 - DNA, 20 bp, synthetic construct
  source 1..20: mol_type = other DNA
tgcgtctgtggagaaagaag

SEQ ID NO: 93808 - DNA, 20 bp, synthetic construct
  source 1..20: mol_type = other DNA
ctgcgtctgtggagaaagaa

SEQ ID NO: 93809 - DNA, 20 bp, synthetic construct
  source 1..20: mol_type = other DNA
gctgcgtctgtggagaaaga

SEQ ID NO: 93810 - DNA, 20 bp, synthetic construct
  source 1..20: mol_type = other DNA
tgctgcgtctgtggagaaag

SEQ ID NO: 93811 - DNA, 20 bp, synthetic construct
  source 1..20: mol_type = other DNA
ttgctgcgtctgtggagaaa

SEQ ID NO: 93812 - DNA, 20 bp, synthetic construct
  source 1..20: mol_type = other DNA
gttgctgcgtctgtggagaa

SEQ ID NO: 93813 - DNA, 20 bp, synthetic construct
  source 1..20: mol_type = other DNA
ggttgctgcgtctgtggaga

SEQ ID NO: 93814 - DNA, 20 bp, synthetic construct
  source 1..20: mol_type = other DNA
tggttgctgcgtctgtggag

SEQ ID NO: 93815 - DNA, 20 bp, synthetic construct
  source 1..20: mol_type = other DNA
atggttgctgcgtctgtgga

SEQ ID NO: 93816 - DNA, 20 bp, synthetic construct
  source 1..20: mol_type = other DNA
gatggttgctgcgtctgtgg

SEQ ID NO: 93817 - DNA, 20 bp, synthetic construct
  source 1..20: mol_type = other DNA
ggatggttgctgcgtctgtg

SEQ ID NO: 93818 - DNA, 20 bp, synthetic construct
  source 1..20: mol_type = other DNA
cggatggttgctgcgtctgt

SEQ ID NO: 93819 - DNA, 20 bp, synthetic construct
  source 1..20: mol_type = other DNA
tcggatggttgctgcgtctg

SEQ ID NO: 93820 - DNA, 20 bp, synthetic construct
  source 1..20: mol_type = other DNA
atcggatggttgctgcgtct

SEQ ID NO: 93821 - DNA, 20 bp, synthetic construct
  source 1..20: mol_type = other DNA
aatcggatggttgctgcgtc

SEQ ID NO: 93822 - DNA, 20 bp, synthetic construct
  source 1..20: mol_type = other DNA
aaatcggatggttgctgcgt

SEQ ID NO: 93823 - DNA, 20 bp, synthetic construct
  source 1..20: mol_type = other DNA
gaaatcggatggttgctgcg

SEQ ID NO: 93824 - DNA, 20 bp, synthetic construct
  source 1..20: mol_type = other DNA
agaaatcggatggttgctgc

SEQ ID NO: 93825 - DNA, 20 bp, synthetic construct
  source 1..20: mol_type = other DNA
gagaaatcggatggttgctg

SEQ ID NO: 93826 - DNA, 20 bp, synthetic construct
  source 1..20: mol_type = other DNA
tgagaaatcggatggttgct

SEQ ID NO: 93827 - DNA, 20 bp, synthetic construct
  source 1..20: mol_type = other DNA
ttgagaaatcggatggttgc

SEQ ID NO: 93828 - DNA, 20 bp, synthetic construct
  source 1..20: mol_type = other DNA
attgagaaatcggatggttg

SEQ ID NO: 93829 - DNA, 20 bp, synthetic construct
  source 1..20: mol_type = other DNA
gattgagaaatcggatggtt

SEQ ID NO: 93830 - DNA, 20 bp, synthetic construct
  source 1..20: mol_type = other DNA
agattgagaaatcggatggt

SEQ ID NO: 93831 - DNA, 20 bp, synthetic construct
  source 1..20: mol_type = other DNA
aagattgagaaatcggatgg

SEQ ID NO: 93832 - DNA, 20 bp, synthetic construct
  source 1..20: mol_type = other DNA
aaagattgagaaatcggatg

SEQ ID NO: 93833 - DNA, 20 bp, synthetic construct
  source 1..20: mol_type = other DNA
aaaagattgagaaatcggat

SEQ ID NO: 93834 - DNA, 20 bp, synthetic construct
  source 1..20: mol_type = other DNA
gaaaagattgagaaatcgga

SEQ ID NO: 93835 - DNA, 20 bp, synthetic construct
  source 1..20: mol_type = other DNA
ggaaaagattgagaaatcgg

SEQ ID NO: 93836 - DNA, 20 bp, synthetic construct
  source 1..20: mol_type = other DNA
gggaaaagattgagaaatcg

SEQ ID NO: 93837 - DNA, 20 bp, synthetic construct
  source 1..20: mol_type = other DNA
ggggaaaagattgagaaatc

SEQ ID NO: 93838 - DNA, 20 bp, synthetic construct
  source 1..20: mol_type = other DNA
tggggaaaagattgagaaat

SEQ ID NO: 93839 - DNA, 20 bp, synthetic construct
  source 1..20: mol_type = other DNA
gtggggaaaagattgagaaa

SEQ ID NO: 93840 - DNA, 20 bp, synthetic construct
  source 1..20: mol_type = other DNA
ggtggggaaaagattgagaa

SEQ ID NO: 93841 - DNA, 20 bp, synthetic construct
  source 1..20: mol_type = other DNA
aggtggggaaaagattgaga

SEQ ID NO: 93842 - DNA, 20 bp, synthetic construct
  source 1..20: mol_type = other DNA
aaggtggggaaaagattgag

SEQ ID NO: 93843 - DNA, 20 bp, synthetic construct
  source 1..20: mol_type = other DNA
aaaggtggggaaaagattga

SEQ ID NO: 93844 - DNA, 20 bp, synthetic construct
  source 1..20: mol_type = other DNA
gaaaggtggggaaaagattg

SEQ ID NO: 93845 - DNA, 20 bp, synthetic construct
  source 1..20: mol_type = other DNA
ggaaaggtggggaaaagatt

SEQ ID NO: 93846 - DNA, 20 bp, synthetic construct
  source 1..20: mol_type = other DNA
gggaaaggtggggaaaagat

SEQ ID NO: 93847 - DNA, 20 bp, synthetic construct
  source 1..20: mol_type = other DNA
ggggaaaggtggggaaaaga

SEQ ID NO: 93848 - DNA, 20 bp, synthetic construct
  source 1..20: mol_type = other DNA
gggggaaaggtggggaaaag

SEQ ID NO: 93849 - DNA, 20 bp, synthetic construct
  source 1..20: mol_type = other DNA
agggggaaaggtggggaaaa

SEQ ID NO: 93850 - DNA, 20 bp, synthetic construct
  source 1..20: mol_type = other DNA
aagggggaaaggtggggaaa

SEQ ID NO: 93851 - DNA, 20 bp, synthetic construct
  source 1..20: mol_type = other DNA
aaagggggaaaggtggggaa

SEQ ID NO: 93852 - DNA, 20 bp, synthetic construct
  source 1..20: mol_type = other DNA
aaaagggggaaaggtgggga

SEQ ID NO: 93853 - DNA, 20 bp, synthetic construct
  source 1..20: mol_type = other DNA
gaaaagggggaaaggtgggg

SEQ ID NO: 93854 - DNA, 20 bp, synthetic construct
  source 1..20: mol_type = other DNA
agaaaagggggaaaggtggg

SEQ ID NO: 93855 - DNA, 20 bp, synthetic construct
  source 1..20: mol_type = other DNA
tagaaaagggggaaaggtgg

SEQ ID NO: 93856 - DNA, 20 bp, synthetic construct
  source 1..20: mol_type = other DNA
atagaaaagggggaaaggtg

SEQ ID NO: 93857 - DNA, 20 bp, synthetic construct
  source 1..20: mol_type = other DNA
aatagaaaagggggaaaggt

SEQ ID NO: 93858 - DNA, 20 bp, synthetic construct
  source 1..20: mol_type = other DNA
gaatagaaaagggggaaagg

SEQ ID NO: 93859 - DNA, 20 bp, synthetic construct
  source 1..20: mol_type = other DNA
ggaatagaaaagggggaaag

SEQ ID NO: 93860 - DNA, 20 bp, synthetic construct
  source 1..20: mol_type = other DNA
tggaatagaaaagggggaaa

SEQ ID NO: 93861 - DNA, 20 bp, synthetic construct
  source 1..20: mol_type = other DNA
gtggaatagaaaagggggaa

SEQ ID NO: 93862 - DNA, 20 bp, synthetic construct
  source 1..20: mol_type = other DNA
tgtggaatagaaaaggggga

SEQ ID NO: 93863 - DNA, 20 bp, synthetic construct
  source 1..20: mol_type = other DNA
ttgtggaatagaaaaggggg

SEQ ID NO: 93864 - DNA, 20 bp, synthetic construct
  source 1..20: mol_type = other DNA
tttgtggaatagaaaagggg

SEQ ID NO: 93865 - DNA, 20 bp, synthetic construct
  source 1..20: mol_type = other DNA
ctttgtggaatagaaaaggg

SEQ ID NO: 93866 - DNA, 20 bp, synthetic construct
  source 1..20: mol_type = other DNA
gctttgtggaatagaaaagg

SEQ ID NO: 93867 - DNA, 20 bp, synthetic construct
  source 1..20: mol_type = other DNA
ggctttgtggaatagaaaag

SEQ ID NO: 93868 - DNA, 20 bp, synthetic construct
  source 1..20: mol_type = other DNA
cggctttgtggaatagaaaa

SEQ ID NO: 93869 - DNA, 20 bp, synthetic construct
  source 1..20: mol_type = other DNA
gcggctttgtggaatagaaa

SEQ ID NO: 93870 - DNA, 20 bp, synthetic construct
  source 1..20: mol_type = other DNA
ggcggctttgtggaatagaa

SEQ ID NO: 93871 - DNA, 20 bp, synthetic construct
  source 1..20: mol_type = other DNA
tggcggctttgtggaataga

SEQ ID NO: 93872 - DNA, 20 bp, synthetic construct
  source 1..20: mol_type = other DNA
atggcggctttgtggaatag

SEQ ID NO: 93873 - DNA, 20 bp, synthetic construct
  source 1..20: mol_type = other DNA
aatggcggctttgtggaata

SEQ ID NO: 93874 - DNA, 20 bp, synthetic construct
  source 1..20: mol_type = other DNA
caatggcggctttgtggaat

SEQ ID NO: 93875 - DNA, 20 bp, synthetic construct
  source 1..20: mol_type = other DNA
acaatggcggctttgtggaa

SEQ ID NO: 93876 - DNA, 20 bp, synthetic construct
  source 1..20: mol_type = other DNA
gacaatggcggctttgtgga

SEQ ID NO: 93877 - DNA, 20 bp, synthetic construct
  source 1..20: mol_type = other DNA
tgacaatggcggctttgtgg

SEQ ID NO: 93878 - DNA, 20 bp, synthetic construct
  source 1..20: mol_type = other DNA
atgacaatggcggctttgtg

SEQ ID NO: 93879 - DNA, 20 bp, synthetic construct
  source 1..20: mol_type = other DNA
gatgacaatggcggctttgt

SEQ ID NO: 93880 - DNA, 20 bp, synthetic construct
  source 1..20: mol_type = other DNA
tgatgacaatggcggctttg

SEQ ID NO: 93881 - DNA, 20 bp, synthetic construct
  source 1..20: mol_type = other DNA
atgatgacaatggcggcttt

SEQ ID NO: 93882 - DNA, 20 bp, synthetic construct
  source 1..20: mol_type = other DNA
catgatgacaatggcggctt

SEQ ID NO: 93883 - DNA, 20 bp, synthetic construct
  source 1..20: mol_type = other DNA
ccatgatgacaatggcggct

SEQ ID NO: 93884 - DNA, 20 bp, synthetic construct
  source 1..20: mol_type = other DNA
gccatgatgacaatggcggc

SEQ ID NO: 93885 - DNA, 20 bp, synthetic construct
  source 1..20: mol_type = other DNA
ggccatgatgacaatggcgg

SEQ ID NO: 93886 - DNA, 20 bp, synthetic construct
  source 1..20: mol_type = other DNA
gggccatgatgacaatggcg

SEQ ID NO: 93887 - DNA, 20 bp, synthetic construct
  source 1..20: mol_type = other DNA
cgggccatgatgacaatggc

SEQ ID NO: 93888 - DNA, 20 bp, synthetic construct
  source 1..20: mol_type = other DNA
acgggccatgatgacaatgg

SEQ ID NO: 93889 - DNA, 20 bp, synthetic construct
  source 1..20: mol_type = other DNA
aacgggccatgatgacaatg

SEQ ID NO: 93890 - DNA, 20 bp, synthetic construct
  source 1..20: mol_type = other DNA
gaacgggccatgatgacaat

SEQ ID NO: 93891 - DNA, 20 bp, synthetic construct
  source 1..20: mol_type = other DNA
agaacgggccatgatgacaa

SEQ ID NO: 93892 - DNA, 20 bp, synthetic construct
  source 1..20: mol_type = other DNA
gagaacgggccatgatgaca

SEQ ID NO: 93893 - DNA, 20 bp, synthetic construct
  source 1..20: mol_type = other DNA
tgagaacgggccatgatgac

SEQ ID NO: 93894 - DNA, 20 bp, synthetic construct
  source 1..20: mol_type = other DNA
ttgagaacgggccatgatga

SEQ ID NO: 93895 - DNA, 20 bp, synthetic construct
  source 1..20: mol_type = other DNA
attgagaacgggccatgatg

SEQ ID NO: 93896 - DNA, 20 bp, synthetic construct
  source 1..20: mol_type = other DNA
tattgagaacgggccatgat

SEQ ID NO: 93897 - DNA, 20 bp, synthetic construct
  source 1..20: mol_type = other DNA
ttattgagaacgggccatga

SEQ ID NO: 93898 - DNA, 20 bp, synthetic construct
  source 1..20: mol_type = other DNA
cttattgagaacgggccatg

SEQ ID NO: 93899 - DNA, 20 bp, synthetic construct
  source 1..20: mol_type = other DNA
gcttattgagaacgggccat

SEQ ID NO: 93900 - DNA, 20 bp, synthetic construct
  source 1..20: mol_type = other DNA
agcttattgagaacgggcca

SEQ ID NO: 93901 - DNA, 20 bp, synthetic construct
  source 1..20: mol_type = other DNA
cagcttattgagaacgggcc

SEQ ID NO: 93902 - DNA, 20 bp, synthetic construct
  source 1..20: mol_type = other DNA
acagcttattgagaacgggc

SEQ ID NO: 93903 - DNA, 20 bp, synthetic construct
  source 1..20: mol_type = other DNA
aacagcttattgagaacggg

SEQ ID NO: 93904 - DNA, 20 bp, synthetic construct
  source 1..20: mol_type = other DNA
caacagcttattgagaacgg

SEQ ID NO: 93905 - DNA, 20 bp, synthetic construct
  source 1..20: mol_type = other DNA
ccaacagcttattgagaacg

SEQ ID NO: 93906 - DNA, 20 bp, synthetic construct
  source 1..20: mol_type = other DNA
cccaacagcttattgagaac

SEQ ID NO: 93907 - DNA, 20 bp, synthetic construct
  source 1..20: mol_type = other DNA
acccaacagcttattgagaa

SEQ ID NO: 93908 - DNA, 20 bp, synthetic construct
  source 1..20: mol_type = other DNA
tacccaacagcttattgaga

SEQ ID NO: 93909 - DNA, 20 bp, synthetic construct
  source 1..20: mol_type = other DNA
gtacccaacagcttattgag

SEQ ID NO: 93910 - DNA, 20 bp, synthetic construct
  source 1..20: mol_type = other DNA
tgtacccaacagcttattga

SEQ ID NO: 93911 - DNA, 20 bp, synthetic construct
  source 1..20: mol_type = other DNA
gtgtacccaacagcttattg

SEQ ID NO: 93912 - DNA, 20 bp, synthetic construct
  source 1..20: mol_type = other DNA
ggtgtacccaacagcttatt

SEQ ID NO: 93913 - DNA, 20 bp, synthetic construct
  source 1..20: mol_type = other DNA
aggtgtacccaacagcttat

SEQ ID NO: 93914 - DNA, 20 bp, synthetic construct
  source 1..20: mol_type = other DNA
gaggtgtacccaacagctta

SEQ ID NO: 93915 - DNA, 20 bp, synthetic construct
  source 1..20: mol_type = other DNA
ggaggtgtacccaacagctt

SEQ ID NO: 93916 - DNA, 20 bp, synthetic construct
  source 1..20: mol_type = other DNA
gggaggtgtacccaacagct

SEQ ID NO: 93917 - DNA, 20 bp, synthetic construct
  source 1..20: mol_type = other DNA
tgggaggtgtacccaacagc

SEQ ID NO: 93918 - DNA, 20 bp, synthetic construct
  source 1..20: mol_type = other DNA
ctgggaggtgtacccaacag

SEQ ID NO: 93919 - DNA, 20 bp, synthetic construct
  source 1..20: mol_type = other DNA
tctgggaggtgtacccaaca

SEQ ID NO: 93920 - DNA, 20 bp, synthetic construct
  source 1..20: mol_type = other DNA
gtctgggaggtgtacccaac

SEQ ID NO: 93921 - DNA, 20 bp, synthetic construct
  source 1..20: mol_type = other DNA
cgtctgggaggtgtacccaa

SEQ ID NO: 93922 - DNA, 20 bp, synthetic construct
  source 1..20: mol_type = other DNA
ccgtctgggaggtgtaccca

SEQ ID NO: 93923 - DNA, 20 bp, synthetic construct
  source 1..20: mol_type = other DNA
cccgtctgggaggtgtaccc

SEQ ID NO: 93924 - DNA, 20 bp, synthetic construct
  source 1..20: mol_type = other DNA
ccccgtctgggaggtgtacc

SEQ ID NO: 93925 - DNA, 20 bp, synthetic construct
  source 1..20: mol_type = other DNA
accccgtctgggaggtgtac

SEQ ID NO: 93926 - DNA, 20 bp, synthetic construct
  source 1..20: mol_type = other DNA
caccccgtctgggaggtgta

SEQ ID NO: 93927 - DNA, 20 bp, synthetic construct
  source 1..20: mol_type = other DNA
ccaccccgtctgggaggtgt

SEQ ID NO: 93928 - DNA, 20 bp, synthetic construct
  source 1..20: mol_type = other DNA
accaccccgtctgggaggtg

SEQ ID NO: 93929 - DNA, 20 bp, synthetic construct
  source 1..20: mol_type = other DNA
caccaccccgtctgggaggt

SEQ ID NO: 93930 - DNA, 20 bp, synthetic construct
  source 1..20: mol_type = other DNA
ccaccaccccgtctgggagg

SEQ ID NO: 93931 - DNA, 20 bp, synthetic construct
  source 1..20: mol_type = other DNA
gccaccaccccgtctgggag

SEQ ID NO: 93932 - DNA, 20 bp, synthetic construct
  source 1..20: mol_type = other DNA
ggccaccaccccgtctggga

SEQ ID NO: 93933 - DNA, 20 bp, synthetic construct
  source 1..20: mol_type = other DNA
cggccaccaccccgtctggg

SEQ ID NO: 93934 - DNA, 20 bp, synthetic construct
  source 1..20: mol_type = other DNA
ccggccaccaccccgtctgg

SEQ ID NO: 93935 - DNA, 20 bp, synthetic construct
  source 1..20: mol_type = other DNA
cccggccaccaccccgtctg

SEQ ID NO: 93936 - DNA, 20 bp, synthetic construct
  source 1..20: mol_type = other DNA
gcccggccaccaccccgtct

SEQ ID NO: 93937 - DNA, 20 bp, synthetic construct
  source 1..20: mol_type = other DNA
tgcccggccaccaccccgtc

SEQ ID NO: 93938 - DNA, 20 bp, synthetic construct
  source 1..20: mol_type = other DNA
ctgcccggccaccaccccgt

SEQ ID NO: 93939 - DNA, 20 bp, synthetic construct
  source 1..20: mol_type = other DNA
tctgcccggccaccaccccg

SEQ ID NO: 93940 - DNA, 20 bp, synthetic construct
  source 1..20: mol_type = other DNA
ctctgcccggccaccacccc

SEQ ID NO: 93941 - DNA, 20 bp, synthetic construct
  source 1..20: mol_type = other DNA
cctctgcccggccaccaccc

SEQ ID NO: 93942 - DNA, 20 bp, synthetic construct
  source 1..20: mol_type = other DNA
ccctctgcccggccaccacc

SEQ ID NO: 93943 - DNA, 20 bp, synthetic construct
  source 1..20: mol_type = other DNA
cccctctgcccggccaccac

SEQ ID NO: 93944 - DNA, 20 bp, synthetic construct
  source 1..20: mol_type = other DNA
gcccctctgcccggccacca

SEQ ID NO: 93945 - DNA, 20 bp, synthetic construct
  source 1..20: mol_type = other DNA
agcccctctgcccggccacc

SEQ ID NO: 93946 - DNA, 20 bp, synthetic construct
  source 1..20: mol_type = other DNA
gagcccctctgcccggccac

SEQ ID NO: 93947 - DNA, 20 bp, synthetic construct
  source 1..20: mol_type = other DNA
ggagcccctctgcccggcca

SEQ ID NO: 93948 - DNA, 20 bp, synthetic construct
  source 1..20: mol_type = other DNA
aggagcccctctgcccggcc

SEQ ID NO: 93949 - DNA, 20 bp, synthetic construct
  source 1..20: mol_type = other DNA
gaggagcccctctgcccggc

SEQ ID NO: 93950 - DNA, 20 bp, synthetic construct
  source 1..20: mol_type = other DNA
tgaggagcccctctgcccgg

SEQ ID NO: 93951 - DNA, 20 bp, synthetic construct
  source 1..20: mol_type = other DNA
gtgaggagcccctctgcccg

SEQ ID NO: 93952 - DNA, 20 bp, synthetic construct
  source 1..20: mol_type = other DNA
agtgaggagcccctctgccc

SEQ ID NO: 93953 - DNA, 20 bp, synthetic construct
  source 1..20: mol_type = other DNA
aagtgaggagcccctctgcc

SEQ ID NO: 93954 - DNA, 20 bp, synthetic construct
  source 1..20: mol_type = other DNA
gaagtgaggagcccctctgc

SEQ ID NO: 93955 - DNA, 20 bp, synthetic construct
  source 1..20: mol_type = other DNA
ggaagtgaggagcccctctg

SEQ ID NO: 93956 - DNA, 20 bp, synthetic construct
  source 1..20: mol_type = other DNA
gggaagtgaggagcccctct

SEQ ID NO: 93957 - DNA, 20 bp, synthetic construct
  source 1..20: mol_type = other DNA
tgggaagtgaggagcccctc

SEQ ID NO: 93958 - DNA, 20 bp, synthetic construct
  source 1..20: mol_type = other DNA
ctgggaagtgaggagcccct

SEQ ID NO: 93959 - DNA, 20 bp, synthetic construct
  source 1..20: mol_type = other DNA
tctgggaagtgaggagcccc

SEQ ID NO: 93960 - DNA, 20 bp, synthetic construct
  source 1..20: mol_type = other DNA
ttctgggaagtgaggagccc

SEQ ID NO: 93961 - DNA, 20 bp, synthetic construct
  source 1..20: mol_type = other DNA
cttctgggaagtgaggagcc

SEQ ID NO: 93962 - DNA, 20 bp, synthetic construct
  source 1..20: mol_type = other DNA
ccttctgggaagtgaggagc

SEQ ID NO: 93963 - DNA, 20 bp, synthetic construct
  source 1..20: mol_type = other DNA
cccttctgggaagtgaggag

SEQ ID NO: 93964 - DNA, 20 bp, synthetic construct
  source 1..20: mol_type = other DNA
ccccttctgggaagtgagga

SEQ ID NO: 93965 - DNA, 20 bp, synthetic construct
  source 1..20: mol_type = other DNA
gccccttctgggaagtgagg

SEQ ID NO: 93966 - DNA, 20 bp, synthetic construct
  source 1..20: mol_type = other DNA
cgccccttctgggaagtgag

SEQ ID NO: 93967 - DNA, 20 bp, synthetic construct
  source 1..20: mol_type = other DNA
ccgccccttctgggaagtga

SEQ ID NO: 93968 - DNA, 20 bp, synthetic construct
  source 1..20: mol_type = other DNA
gccgccccttctgggaagtg

SEQ ID NO: 93969 - DNA, 20 bp, synthetic construct
  source 1..20: mol_type = other DNA
ggccgccccttctgggaagt

SEQ ID NO: 93970 - DNA, 20 bp, synthetic construct
  source 1..20: mol_type = other DNA
cggccgccccttctgggaag

SEQ ID NO: 93971 - DNA, 20 bp, synthetic construct
  source 1..20: mol_type = other DNA
ccggccgccccttctgggaa

SEQ ID NO: 93972 - DNA, 20 bp, synthetic construct
  source 1..20: mol_type = other DNA
cccggccgccccttctggga

SEQ ID NO: 93973 - DNA, 20 bp, synthetic construct
  source 1..20: mol_type = other DNA
gcccggccgccccttctggg

SEQ ID NO: 93974 - DNA, 20 bp, synthetic construct
  source 1..20: mol_type = other DNA
tgcccggccgccccttctgg

SEQ ID NO: 93975 - DNA, 20 bp, synthetic construct
  source 1..20: mol_type = other DNA
ctgcccggccgccccttctg

SEQ ID NO: 93976 - DNA, 20 bp, synthetic construct
  source 1..20: mol_type = other DNA
tctgcccggccgccccttct

SEQ ID NO: 93977 - DNA, 20 bp, synthetic construct
  source 1..20: mol_type = other DNA
ctctgcccggccgccccttc

SEQ ID NO: 93978 - DNA, 20 bp, synthetic construct
  source 1..20: mol_type = other DNA
cctctgcccggccgcccctt

SEQ ID NO: 93979 - DNA, 20 bp, synthetic construct
  source 1..20: mol_type = other DNA
acctctgcccggccgcccct

SEQ ID NO: 93980 - DNA, 20 bp, synthetic construct
  source 1..20: mol_type = other DNA
cacctctgcccggccgcccc

SEQ ID NO: 93981 - DNA, 20 bp, synthetic construct
  source 1..20: mol_type = other DNA
gcacctctgcccggccgccc

SEQ ID NO: 93982 - DNA, 20 bp, synthetic construct
  source 1..20: mol_type = other DNA
ggcacctctgcccggccgcc

SEQ ID NO: 93983 - DNA, 20 bp, synthetic construct
  source 1..20: mol_type = other DNA
gggcacctctgcccggccgc

SEQ ID NO: 93984 - DNA, 20 bp, synthetic construct
  source 1..20: mol_type = other DNA
ggggcacctctgcccggccg

SEQ ID NO: 93985 - DNA, 20 bp, synthetic construct
  source 1..20: mol_type = other DNA
gggggcacctctgcccggcc

SEQ ID NO: 93986 - DNA, 20 bp, synthetic construct
  source 1..20: mol_type = other DNA
ggggggcacctctgcccggc

SEQ ID NO: 93987 - DNA, 20 bp, synthetic construct
  source 1..20: mol_type = other DNA
tggggggcacctctgcccgg

SEQ ID NO: 93988 - DNA, 20 bp, synthetic construct
  source 1..20: mol_type = other DNA
gtggggggcacctctgcccg

SEQ ID NO: 93989 - DNA, 20 bp, synthetic construct
  source 1..20: mol_type = other DNA
ggtggggggcacctctgccc

SEQ ID NO: 93990 - DNA, 20 bp, synthetic construct
  source 1..20: mol_type = other DNA
aggtggggggcacctctgcc

SEQ ID NO: 93991 - DNA, 20 bp, synthetic construct
  source 1..20: mol_type = other DNA
gaggtggggggcacctctgc

SEQ ID NO: 93992 - DNA, 20 bp, synthetic construct
  source 1..20: mol_type = other DNA
ggaggtggggggcacctctg

SEQ ID NO: 93993 - DNA, 20 bp, synthetic construct
  source 1..20: mol_type = other DNA
gggaggtggggggcacctct

SEQ ID NO: 93994 - DNA, 20 bp, synthetic construct
  source 1..20: mol_type = other DNA
cgggaggtggggggcacctc

SEQ ID NO: 93995 - DNA, 20 bp, synthetic construct
  source 1..20: mol_type = other DNA
ccgggaggtggggggcacct

SEQ ID NO: 93996 - DNA, 20 bp, synthetic construct
  source 1..20: mol_type = other DNA
tccgggaggtggggggcacc

SEQ ID NO: 93997 - DNA, 20 bp, synthetic construct
  source 1..20: mol_type = other DNA
gtccgggaggtggggggcac

SEQ ID NO: 93998 - DNA, 20 bp, synthetic construct
  source 1..20: mol_type = other DNA
cgtccgggaggtggggggca

SEQ ID NO: 93999 - DNA, 20 bp, synthetic construct
  source 1..20: mol_type = other DNA
ccgtccgggaggtggggggc

SEQ ID NO: 94000 - DNA, 20 bp, synthetic construct
  source 1..20: mol_type = other DNA
cccgtccgggaggtgggggg

SEQ ID NO: 94001 - DNA, 20 bp, synthetic construct
  source 1..20: mol_type = other DNA
ccccgtccgggaggtggggg

SEQ ID NO: 94002 - DNA, 20 bp, synthetic construct
  source 1..20: mol_type = other DNA
gccccgtccgggaggtgggg

SEQ ID NO: 94003 - DNA, 20 bp, synthetic construct
  source 1..20: mol_type = other DNA
cgccccgtccgggaggtggg

SEQ ID NO: 94004 - DNA, 20 bp, synthetic construct
  source 1..20: mol_type = other DNA
ccgccccgtccgggaggtgg

SEQ ID NO: 94005 - DNA, 20 bp, synthetic construct
  source 1..20: mol_type = other DNA
gccgccccgtccgggaggtg

SEQ ID NO: 94006 - DNA, 20 bp, synthetic construct
  source 1..20: mol_type = other DNA
agccgccccgtccgggaggt

SEQ ID NO: 94007 - DNA, 20 bp, synthetic construct
  source 1..20: mol_type = other DNA
cagccgccccgtccgggagg

SEQ ID NO: 94008 - DNA, 20 bp, synthetic construct
  source 1..20: mol_type = other DNA
ccagccgccccgtccgggag

SEQ ID NO: 94009 - DNA, 20 bp, synthetic construct
  source 1..20: mol_type = other DNA
gccagccgccccgtccggga

SEQ ID NO: 94010 - DNA, 20 bp, synthetic construct
  source 1..20: mol_type = other DNA
agccagccgccccgtccggg

SEQ ID NO: 94011 - DNA, 20 bp, synthetic construct
  source 1..20: mol_type = other DNA
cagccagccgccccgtccgg

SEQ ID NO: 94012 - DNA, 20 bp, synthetic construct
  source 1..20: mol_type = other DNA
ccagccagccgccccgtccg

SEQ ID NO: 94013 - DNA, 20 bp, synthetic construct
  source 1..20: mol_type = other DNA
cccagccagccgccccgtcc

SEQ ID NO: 94014 - DNA, 20 bp, synthetic construct
  source 1..20: mol_type = other DNA
gcccagccagccgccccgtc

SEQ ID NO: 94015 - DNA, 20 bp, synthetic construct
  source 1..20: mol_type = other DNA
cgcccagccagccgccccgt

SEQ ID NO: 94016 - DNA, 20 bp, synthetic construct
  source 1..20: mol_type = other DNA
ccgcccagccagccgccccg

SEQ ID NO: 94017 - DNA, 20 bp, synthetic construct
  source 1..20: mol_type = other DNA
cccgcccagccagccgcccc

SEQ ID NO: 94018 - DNA, 20 bp, synthetic construct
  source 1..20: mol_type = other DNA
ccccgcccagccagccgccc

SEQ ID NO: 94019 - DNA, 20 bp, synthetic construct
  source 1..20: mol_type = other DNA
cccccgcccagccagccgcc

SEQ ID NO: 94020 - DNA, 20 bp, synthetic construct
  source 1..20: mol_type = other DNA
gcccccgcccagccagccgc

SEQ ID NO: 94021 - DNA, 20 bp, synthetic construct
  source 1..20: mol_type = other DNA
agcccccgcccagccagccg

SEQ ID NO: 94022 - DNA, 20 bp, synthetic construct
  source 1..20: mol_type = other DNA
cagcccccgcccagccagcc

SEQ ID NO: 94023 - DNA, 20 bp, synthetic construct
  source 1..20: mol_type = other DNA
tcagcccccgcccagccagc

SEQ ID NO: 94024 - DNA, 20 bp, synthetic construct
  source 1..20: mol_type = other DNA
gtcagcccccgcccagccag

SEQ ID NO: 94025 - DNA, 20 bp, synthetic construct
  source 1..20: mol_type = other DNA
ggtcagcccccgcccagcca

SEQ ID NO: 94026 - DNA, 20 bp, synthetic construct
  source 1..20: mol_type = other DNA
gggtcagcccccgcccagcc

SEQ ID NO: 94027 - DNA, 20 bp, synthetic construct
  source 1..20: mol_type = other DNA
ggggtcagcccccgcccagc

SEQ ID NO: 94028 - DNA, 20 bp, synthetic construct
  source 1..20: mol_type = other DNA
gggggtcagcccccgcccag

SEQ ID NO: 94029 - DNA, 20 bp, synthetic construct
  source 1..20: mol_type = other DNA
ggggggtcagcccccgccca

SEQ ID NO: 94030 - DNA, 20 bp, synthetic construct
  source 1..20: mol_type = other DNA
tggggggtcagcccccgccc

SEQ ID NO: 94031 - DNA, 20 bp, synthetic construct
  source 1..20: mol_type = other DNA
gtggggggtcagcccccgcc

SEQ ID NO: 94032 - DNA, 20 bp, synthetic construct
  source 1..20: mol_type = other DNA
ggtggggggtcagcccccgc

SEQ ID NO: 94033 - DNA, 20 bp, synthetic construct
  source 1..20: mol_type = other DNA
aggtggggggtcagcccccg

SEQ ID NO: 94034 - DNA, 20 bp, synthetic construct
  source 1..20: mol_type = other DNA
gaggtggggggtcagccccc

SEQ ID NO: 94035 - DNA, 20 bp, synthetic construct
  source 1..20: mol_type = other DNA
ggaggtggggggtcagcccc

SEQ ID NO: 94036 - DNA, 20 bp, synthetic construct
  source 1..20: mol_type = other DNA
gggaggtggggggtcagccc

SEQ ID NO: 94037 - DNA, 20 bp, synthetic construct
  source 1..20: mol_type = other DNA
agggaggtggggggtcagcc

SEQ ID NO: 94038 - DNA, 20 bp, synthetic construct
  source 1..20: mol_type = other DNA
gagggaggtggggggtcagc

SEQ ID NO: 94039 - DNA, 20 bp, synthetic construct
  source 1..20: mol_type = other DNA
ggagggaggtggggggtcag

SEQ ID NO: 94040 - DNA, 20 bp, synthetic construct
  source 1..20: mol_type = other DNA
gggagggaggtggggggtca

SEQ ID NO: 94041 - DNA, 20 bp, synthetic construct
  source 1..20: mol_type = other DNA
cgggagggaggtggggggtc

SEQ ID NO: 94042 - DNA, 20 bp, synthetic construct
  source 1..20: mol_type = other DNA
ccgggagggaggtggggggt

SEQ ID NO: 94043 - DNA, 20 bp, synthetic construct
  source 1..20: mol_type = other DNA
tccgggagggaggtgggggg

SEQ ID NO: 94044 - DNA, 20 bp, synthetic construct
  source 1..20: mol_type = other DNA
atccgggagggaggtggggg

SEQ ID NO: 94045 - DNA, 20 bp, synthetic construct
  source 1..20: mol_type = other DNA
catccgggagggaggtgggg

SEQ ID NO: 94046 - DNA, 20 bp, synthetic construct
  source 1..20: mol_type = other DNA
ccatccgggagggaggtggg

SEQ ID NO: 94047 - DNA, 20 bp, synthetic construct
  source 1..20: mol_type = other DNA
cccatccgggagggaggtgg

SEQ ID NO: 94048 - DNA, 20 bp, synthetic construct
  source 1..20: mol_type = other DNA
ccccatccgggagggaggtg

SEQ ID NO: 94049 - DNA, 20 bp, synthetic construct
  source 1..20: mol_type = other DNA
gccccatccgggagggaggt

SEQ ID NO: 94050 - DNA, 20 bp, synthetic construct
  source 1..20: mol_type = other DNA
cgccccatccgggagggagg

SEQ ID NO: 94051 - DNA, 20 bp, synthetic construct
  source 1..20: mol_type = other DNA
ccgccccatccgggagggag

SEQ ID NO: 94052 - DNA, 20 bp, synthetic construct
  source 1..20: mol_type = other DNA
gccgccccatccgggaggga

SEQ ID NO: 94053 - DNA, 20 bp, synthetic construct
  source 1..20: mol_type = other DNA
agccgccccatccgggaggg

SEQ ID NO: 94054 - DNA, 20 bp, synthetic construct
  source 1..20: mol_type = other DNA
cagccgccccatccgggagg

SEQ ID NO: 94055 - DNA, 20 bp, synthetic construct
  source 1..20: mol_type = other DNA
ccagccgccccatccgggag

SEQ ID NO: 94056 - DNA, 20 bp, synthetic construct
  source 1..20: mol_type = other DNA
gccagccgccccatccggga

SEQ ID NO: 94057 - DNA, 20 bp, synthetic construct
  source 1..20: mol_type = other DNA
ggccagccgccccatccggg

SEQ ID NO: 94058 - DNA, 20 bp, synthetic construct
  source 1..20: mol_type = other DNA
cggccagccgccccatccgg

SEQ ID NO: 94059 - DNA, 20 bp, synthetic construct
  source 1..20: mol_type = other DNA
ccggccagccgccccatccg

SEQ ID NO: 94060 - DNA, 20 bp, synthetic construct
  source 1..20: mol_type = other DNA
cccggccagccgccccatcc

SEQ ID NO: 94061 - DNA, 20 bp, synthetic construct
  source 1..20: mol_type = other DNA
gcccggccagccgccccatc

SEQ ID NO: 94062 - DNA, 20 bp, synthetic construct
  source 1..20: mol_type = other DNA
cgcccggccagccgccccat

SEQ ID NO: 94063 - DNA, 20 bp, synthetic construct
  source 1..20: mol_type = other DNA
ccgcccggccagccgcccca

SEQ ID NO: 94064 - DNA, 20 bp, synthetic construct
  source 1..20: mol_type = other DNA
cccgcccggccagccgcccc

SEQ ID NO: 94065 - DNA, 20 bp, synthetic construct
  source 1..20: mol_type = other DNA
ccccgcccggccagccgccc

SEQ ID NO: 94066 - DNA, 20 bp, synthetic construct
  source 1..20: mol_type = other DNA
cccccgcccggccagccgcc

SEQ ID NO: 94067 - DNA, 20 bp, synthetic construct
  source 1..20: mol_type = other DNA
gcccccgcccggccagccgc

SEQ ID NO: 94068 - DNA, 20 bp, synthetic construct
  source 1..20: mol_type = other DNA
agcccccgcccggccagccg

SEQ ID NO: 94069 - DNA, 20 bp, synthetic construct
  source 1..20: mol_type = other DNA
cagcccccgcccggccagcc

SEQ ID NO: 94070 - DNA, 20 bp, synthetic construct
  source 1..20: mol_type = other DNA
tcagcccccgcccggccagc

SEQ ID NO: 94071 - DNA, 20 bp, synthetic construct
  source 1..20: mol_type = other DNA
gtcagcccccgcccggccag

SEQ ID NO: 94072 - DNA, 20 bp, synthetic construct
  source 1..20: mol_type = other DNA
ggtcagcccccgcccggcca

SEQ ID NO: 94073 - DNA, 20 bp, synthetic construct
  source 1..20: mol_type = other DNA
gggtcagcccccgcccggcc

SEQ ID NO: 94074 - DNA, 20 bp, synthetic construct
  source 1..20: mol_type = other DNA
ggggtcagcccccgcccggc

SEQ ID NO: 94075 - DNA, 20 bp, synthetic construct
  source 1..20: mol_type = other DNA
gggggtcagcccccgcccgg

SEQ ID NO: 94076 - DNA, 20 bp, synthetic construct
  source 1..20: mol_type = other DNA
tgggggtcagcccccgcccg

SEQ ID NO: 94077 - DNA, 20 bp, synthetic construct
  source 1..20: mol_type = other DNA
gtgggggtcagcccccgccc

SEQ ID NO: 94078 - DNA, 20 bp, synthetic construct
  source 1..20: mol_type = other DNA
ggtgggggtcagcccccgcc

SEQ ID NO: 94079 - DNA, 20 bp, synthetic construct
  source 1..20: mol_type = other DNA
aggtgggggtcagcccccgc

SEQ ID NO: 94080 - DNA, 20 bp, synthetic construct
  source 1..20: mol_type = other DNA
gaggtgggggtcagcccccg

SEQ ID NO: 94081 - DNA, 20 bp, synthetic construct
  source 1..20: mol_type = other DNA
ggaggtgggggtcagccccc

SEQ ID NO: 94082 - DNA, 20 bp, synthetic construct
  source 1..20: mol_type = other DNA
gggaggtgggggtcagcccc

SEQ ID NO: 94083 - DNA, 20 bp, synthetic construct
  source 1..20: mol_type = other DNA
agggaggtgggggtcagccc

SEQ ID NO: 94084 - DNA, 20 bp, synthetic construct
  source 1..20: mol_type = other DNA
gagggaggtgggggtcagcc

SEQ ID NO: 94085 - DNA, 20 bp, synthetic construct
  source 1..20: mol_type = other DNA
ggagggaggtgggggtcagc

SEQ ID NO: 94086 - DNA, 20 bp, synthetic construct
  source 1..20: mol_type = other DNA
gggagggaggtgggggtcag

SEQ ID NO: 94087 - DNA, 20 bp, synthetic construct
  source 1..20: mol_type = other DNA
cgggagggaggtgggggtca

SEQ ID NO: 94088 - DNA, 20 bp, synthetic construct
  source 1..20: mol_type = other DNA
ccgggagggaggtgggggtc

SEQ ID NO: 94089 - DNA, 20 bp, synthetic construct
  source 1..20: mol_type = other DNA
tccgggagggaggtgggggt

SEQ ID NO: 94090 - DNA, 20 bp, synthetic construct
  source 1..20: mol_type = other DNA
gtccgggagggaggtggggg

SEQ ID NO: 94091 - DNA, 20 bp, synthetic construct
  source 1..20: mol_type = other DNA
cgtccgggagggaggtgggg

SEQ ID NO: 94092 - DNA, 20 bp, synthetic construct
  source 1..20: mol_type = other DNA
ccgtccgggagggaggtggg

SEQ ID NO: 94093 - DNA, 20 bp, synthetic construct
  source 1..20: mol_type = other DNA
cccgtccgggagggaggtgg

SEQ ID NO: 94094 - DNA, 20 bp, synthetic construct
  source 1..20: mol_type = other DNA
acccgtccgggagggaggtg

SEQ ID NO: 94095 - DNA, 20 bp, synthetic construct
  source 1..20: mol_type = other DNA
aacccgtccgggagggaggt

SEQ ID NO: 94096 - DNA, 20 bp, synthetic construct
  source 1..20: mol_type = other DNA
caacccgtccgggagggagg

SEQ ID NO: 94097 - DNA, 20 bp, synthetic construct
  source 1..20: mol_type = other DNA
ccaacccgtccgggagggag

SEQ ID NO: 94098 - DNA, 20 bp, synthetic construct
  source 1..20: mol_type = other DNA
gccaacccgtccgggaggga

SEQ ID NO: 94099 - DNA, 20 bp, synthetic construct
  source 1..20: mol_type = other DNA
agccaacccgtccgggaggg

SEQ ID NO: 94100 - DNA, 20 bp, synthetic construct
  source 1..20: mol_type = other DNA
cagccaacccgtccgggagg

SEQ ID NO: 94101 - DNA, 20 bp, synthetic construct
  source 1..20: mol_type = other DNA
gcagccaacccgtccgggag

SEQ ID NO: 94102 - DNA, 20 bp, synthetic construct
  source 1..20: mol_type = other DNA
ggcagccaacccgtccggga

SEQ ID NO: 94103 - DNA, 20 bp, synthetic construct
  source 1..20: mol_type = other DNA
cggcagccaacccgtccggg

SEQ ID NO: 94104 - DNA, 20 bp, synthetic construct
  source 1..20: mol_type = other DNA
ccggcagccaacccgtccgg

SEQ ID NO: 94105 - DNA, 20 bp, synthetic construct
  source 1..20: mol_type = other DNA
cccggcagccaacccgtccg

SEQ ID NO: 94106 - DNA, 20 bp, synthetic construct
  source 1..20: mol_type = other DNA
acccggcagccaacccgtcc

SEQ ID NO: 94107 - DNA, 20 bp, synthetic construct
  source 1..20: mol_type = other DNA
cacccggcagccaacccgtc

SEQ ID NO: 94108 - DNA, 20 bp, synthetic construct
  source 1..20: mol_type = other DNA
ccacccggcagccaacccgt

SEQ ID NO: 94109 - DNA, 20 bp, synthetic construct
  source 1..20: mol_type = other DNA
tccacccggcagccaacccg

SEQ ID NO: 94110 - DNA, 20 bp, synthetic construct
  source 1..20: mol_type = other DNA
ctccacccggcagccaaccc

SEQ ID NO: 94111 - DNA, 20 bp, synthetic construct
  source 1..20: mol_type = other DNA
tctccacccggcagccaacc

SEQ ID NO: 94112 - DNA, 20 bp, synthetic construct
  source 1..20: mol_type = other DNA
atctccacccggcagccaac

SEQ ID NO: 94113 - DNA, 20 bp, synthetic construct
  source 1..20: mol_type = other DNA
catctccacccggcagccaa

SEQ ID NO: 94114 - DNA, 20 bp, synthetic construct
  source 1..20: mol_type = other DNA
gcatctccacccggcagcca

SEQ ID NO: 94115 - DNA, 20 bp, synthetic construct
  source 1..20: mol_type = other DNA
agcatctccacccggcagcc

SEQ ID NO: 94116 - DNA, 20 bp, synthetic construct
  source 1..20: mol_type = other DNA
gagcatctccacccggcagc

SEQ ID NO: 94117 - DNA, 20 bp, synthetic construct
  source 1..20: mol_type = other DNA
ggagcatctccacccggcag

SEQ ID NO: 94118 - DNA, 20 bp, synthetic construct
  source 1..20: mol_type = other DNA
aggagcatctccacccggca

SEQ ID NO: 94119 - DNA, 20 bp, synthetic construct
  source 1..20: mol_type = other DNA
gaggagcatctccacccggc

SEQ ID NO: 94120 - DNA, 20 bp, synthetic construct
  source 1..20: mol_type = other DNA
tgaggagcatctccacccgg

SEQ ID NO: 94121 - DNA, 20 bp, synthetic construct
  source 1..20: mol_type = other DNA
gtgaggagcatctccacccg

SEQ ID NO: 94122 - DNA, 20 bp, synthetic construct
  source 1..20: mol_type = other DNA
agtgaggagcatctccaccc

SEQ ID NO: 94123 - DNA, 20 bp, synthetic construct
  source 1..20: mol_type = other DNA
aagtgaggagcatctccacc

SEQ ID NO: 94124 - DNA, 20 bp, synthetic construct
  source 1..20: mol_type = other DNA
gaagtgaggagcatctccac

SEQ ID NO: 94125 - DNA, 20 bp, synthetic construct
  source 1..20: mol_type = other DNA
ggaagtgaggagcatctcca

SEQ ID NO: 94126 - DNA, 20 bp, synthetic construct
  source 1..20: mol_type = other DNA
gggaagtgaggagcatctcc

SEQ ID NO: 94127 - DNA, 20 bp, synthetic construct
  source 1..20: mol_type = other DNA
tgggaagtgaggagcatctc

SEQ ID NO: 94128 - DNA, 20 bp, synthetic construct
  source 1..20: mol_type = other DNA
ctgggaagtgaggagcatct

SEQ ID NO: 94129 - DNA, 20 bp, synthetic construct
  source 1..20: mol_type = other DNA
tctgggaagtgaggagcatc

SEQ ID NO: 94130 - DNA, 20 bp, synthetic construct
  source 1..20: mol_type = other DNA
gtctgggaagtgaggagcat

SEQ ID NO: 94131 - DNA, 20 bp, synthetic construct
  source 1..20: mol_type = other DNA
cgtctgggaagtgaggagca

SEQ ID NO: 94132 - DNA, 20 bp, synthetic construct
  source 1..20: mol_type = other DNA
ccgtctgggaagtgaggagc

SEQ ID NO: 94133 - DNA, 20 bp, synthetic construct
  source 1..20: mol_type = other DNA
cccgtctgggaagtgaggag

SEQ ID NO: 94134 - DNA, 20 bp, synthetic construct
  source 1..20: mol_type = other DNA
ccccgtctgggaagtgagga

SEQ ID NO: 94135 - DNA, 20 bp, synthetic construct
  source 1..20: mol_type = other DNA
accccgtctgggaagtgagg

SEQ ID NO: 94136 - DNA, 20 bp, synthetic construct
  source 1..20: mol_type = other DNA
caccccgtctgggaagtgag

SEQ ID NO: 94137 - DNA, 20 bp, synthetic construct
  source 1..20: mol_type = other DNA
ccaccccgtctgggaagtga

SEQ ID NO: 94138 - DNA, 20 bp, synthetic construct
  source 1..20: mol_type = other DNA
gccaccccgtctgggaagtg

SEQ ID NO: 94139 - DNA, 20 bp, synthetic construct
  source 1..20: mol_type = other DNA
agccaccccgtctgggaagt

SEQ ID NO: 94140 - DNA, 20 bp, synthetic construct
  source 1..20: mol_type = other DNA
cagccaccccgtctgggaag

SEQ ID NO: 94141 - DNA, 20 bp, synthetic construct
  source 1..20: mol_type = other DNA
gcagccaccccgtctgggaa

SEQ ID NO: 94142 - DNA, 20 bp, synthetic construct
  source 1..20: mol_type = other DNA
ggcagccaccccgtctggga

SEQ ID NO: 94143 - DNA, 20 bp, synthetic construct
  source 1..20: mol_type = other DNA
tggcagccaccccgtctggg

SEQ ID NO: 94144 - DNA, 20 bp, synthetic construct
  source 1..20: mol_type = other DNA
ctggcagccaccccgtctgg

SEQ ID NO: 94145 - DNA, 20 bp, synthetic construct
  source 1..20: mol_type = other DNA
cctggcagccaccccgtctg

SEQ ID NO: 94146 - DNA, 20 bp, synthetic construct
  source 1..20: mol_type = other DNA
gcctggcagccaccccgtct

SEQ ID NO: 94147 - DNA, 20 bp, synthetic construct
  source 1..20: mol_type = other DNA
cgcctggcagccaccccgtc

SEQ ID NO: 94148 - DNA, 20 bp, synthetic construct
  source 1..20: mol_type = other DNA
ccgcctggcagccaccccgt

SEQ ID NO: 94149 - DNA, 20 bp, synthetic construct
  source 1..20: mol_type = other DNA
tccgcctggcagccaccccg

SEQ ID NO: 94150 - DNA, 20 bp, synthetic construct
  source 1..20: mol_type = other DNA
ctccgcctggcagccacccc

SEQ ID NO: 94151 - DNA, 20 bp, synthetic construct
  source 1..20: mol_type = other DNA
cctccgcctggcagccaccc

SEQ ID NO: 94152 - DNA, 20 bp, synthetic construct
  source 1..20: mol_type = other DNA
ccctccgcctggcagccacc

SEQ ID NO: 94153 - DNA, 20 bp, synthetic construct
  source 1..20: mol_type = other DNA
cccctccgcctggcagccac

SEQ ID NO: 94154 - DNA, 20 bp, synthetic construct
  source 1..20: mol_type = other DNA
gcccctccgcctggcagcca

SEQ ID NO: 94155 - DNA, 20 bp, synthetic construct
  source 1..20: mol_type = other DNA
agcccctccgcctggcagcc

SEQ ID NO: 94156 - DNA, 20 bp, synthetic construct
  source 1..20: mol_type = other DNA
aagcccctccgcctggcagc

SEQ ID NO: 94157 - DNA, 20 bp, synthetic construct
  source 1..20: mol_type = other DNA
gaagcccctccgcctggcag

SEQ ID NO: 94158 - DNA, 20 bp, synthetic construct
  source 1..20: mol_type = other DNA
agaagcccctccgcctggca

SEQ ID NO: 94159 - DNA, 20 bp, synthetic construct
  source 1..20: mol_type = other DNA
gagaagcccctccgcctggc

SEQ ID NO: 94160 - DNA, 20 bp, synthetic construct
  source 1..20: mol_type = other DNA
tgagaagcccctccgcctgg

SEQ ID NO: 94161 - DNA, 20 bp, synthetic construct
  source 1..20: mol_type = other DNA
gtgagaagcccctccgcctg

SEQ ID NO: 94162 - DNA, 20 bp, synthetic construct
  source 1..20: mol_type = other DNA
agtgagaagcccctccgcct

SEQ ID NO: 94163 - DNA, 20 bp, synthetic construct
  source 1..20: mol_type = other DNA
aagtgagaagcccctccgcc

SEQ ID NO: 94164 - DNA, 20 bp, synthetic construct
  source 1..20: mol_type = other DNA
gaagtgagaagcccctccgc

SEQ ID NO: 94165 - DNA, 20 bp, synthetic construct
  source 1..20: mol_type = other DNA
agaagtgagaagcccctccg

SEQ ID NO: 94166 - DNA, 20 bp, synthetic construct
  source 1..20: mol_type = other DNA
gagaagtgagaagcccctcc

SEQ ID NO: 94167 - DNA, 20 bp, synthetic construct
  source 1..20: mol_type = other DNA
tgagaagtgagaagcccctc

SEQ ID NO: 94168 - DNA, 20 bp, synthetic construct
  source 1..20: mol_type = other DNA
ctgagaagtgagaagcccct

SEQ ID NO: 94169 - DNA, 20 bp, synthetic construct
  source 1..20: mol_type = other DNA
tctgagaagtgagaagcccc

SEQ ID NO: 94170 - DNA, 20 bp, synthetic construct
  source 1..20: mol_type = other DNA
gtctgagaagtgagaagccc

SEQ ID NO: 94171 - DNA, 20 bp, synthetic construct
  source 1..20: mol_type = other DNA
cgtctgagaagtgagaagcc

SEQ ID NO: 94172 - DNA, 20 bp, synthetic construct
  source 1..20: mol_type = other DNA
ccgtctgagaagtgagaagc

SEQ ID NO: 94173 - DNA, 20 bp, synthetic construct
  source 1..20: mol_type = other DNA
cccgtctgagaagtgagaag

SEQ ID NO: 94174 - DNA, 20 bp, synthetic construct
  source 1..20: mol_type = other DNA
ccccgtctgagaagtgagaa

SEQ ID NO: 94175 - DNA, 20 bp, synthetic construct
  source 1..20: mol_type = other DNA
gccccgtctgagaagtgaga

SEQ ID NO: 94176 - DNA, 20 bp, synthetic construct
  source 1..20: mol_type = other DNA
cgccccgtctgagaagtgag

SEQ ID NO: 94177 - DNA, 20 bp, synthetic construct
  source 1..20: mol_type = other DNA
ccgccccgtctgagaagtga

SEQ ID NO: 94178 - DNA, 20 bp, synthetic construct
  source 1..20: mol_type = other DNA
gccgccccgtctgagaagtg

SEQ ID NO: 94179 - DNA, 20 bp, synthetic construct
  source 1..20: mol_type = other DNA
agccgccccgtctgagaagt

SEQ ID NO: 94180 - DNA, 20 bp, synthetic construct
  source 1..20: mol_type = other DNA
cagccgccccgtctgagaag

SEQ ID NO: 94181 - DNA, 20 bp, synthetic construct
  source 1..20: mol_type = other DNA
gcagccgccccgtctgagaa

SEQ ID NO: 94182 - DNA, 20 bp, synthetic construct
  source 1..20: mol_type = other DNA
ggcagccgccccgtctgaga

SEQ ID NO: 94183 - DNA, 20 bp, synthetic construct
  source 1..20: mol_type = other DNA
cggcagccgccccgtctgag

SEQ ID NO: 94184 - DNA, 20 bp, synthetic construct
  source 1..20: mol_type = other DNA
ccggcagccgccccgtctga

SEQ ID NO: 94185 - DNA, 20 bp, synthetic construct
  source 1..20: mol_type = other DNA
cccggcagccgccccgtctg

SEQ ID NO: 94186 - DNA, 20 bp, synthetic construct
  source 1..20: mol_type = other DNA
gcccggcagccgccccgtct

SEQ ID NO: 94187 - DNA, 20 bp, synthetic construct
  source 1..20: mol_type = other DNA
tgcccggcagccgccccgtc

SEQ ID NO: 94188 - DNA, 20 bp, synthetic construct
  source 1..20: mol_type = other DNA
ctgcccggcagccgccccgt

SEQ ID NO: 94189 - DNA, 20 bp, synthetic construct
  source 1..20: mol_type = other DNA
tctgcccggcagccgccccg

SEQ ID NO: 94190 - DNA, 20 bp, synthetic construct
  source 1..20: mol_type = other DNA
ctctgcccggcagccgcccc

SEQ ID NO: 94191 - DNA, 20 bp, synthetic construct
  source 1..20: mol_type = other DNA
cctctgcccggcagccgccc

SEQ ID NO: 94192 - DNA, 20 bp, synthetic construct
  source 1..20: mol_type = other DNA
ccctctgcccggcagccgcc

SEQ ID NO: 94193 - DNA, 20 bp, synthetic construct
  source 1..20: mol_type = other DNA
cccctctgcccggcagccgc

SEQ ID NO: 94194 - DNA, 20 bp, synthetic construct
  source 1..20: mol_type = other DNA
gcccctctgcccggcagccg

SEQ ID NO: 94195 - DNA, 20 bp, synthetic construct
  source 1..20: mol_type = other DNA
agcccctctgcccggcagcc

SEQ ID NO: 94196 - DNA, 20 bp, synthetic construct
  source 1..20: mol_type = other DNA
gagcccctctgcccggcagc

SEQ ID NO: 94197 - DNA, 20 bp, synthetic construct
  source 1..20: mol_type = other DNA
ggagcccctctgcccggcag

SEQ ID NO: 94198 - DNA, 20 bp, synthetic construct
  source 1..20: mol_type = other DNA
aggagcccctctgcccggca

SEQ ID NO: 94199 - DNA, 20 bp, synthetic construct
  source 1..20: mol_type = other DNA
gaggagcccctctgcccggc

SEQ ID NO: 94200 - DNA, 20 bp, synthetic construct
  source 1..20: mol_type = other DNA
tgaggagcccctctgcccgg

SEQ ID NO: 94201 - DNA, 20 bp, synthetic construct
  source 1..20: mol_type = other DNA
gtgaggagcccctctgcccg

SEQ ID NO: 94202 - DNA, 20 bp, synthetic construct
  source 1..20: mol_type = other DNA
agtgaggagcccctctgccc

SEQ ID NO: 94203 - DNA, 20 bp, synthetic construct
  source 1..20: mol_type = other DNA
aagtgaggagcccctctgcc

SEQ ID NO: 94204 - DNA, 20 bp, synthetic construct
  source 1..20: mol_type = other DNA
gaagtgaggagcccctctgc

SEQ ID NO: 94205 - DNA, 20 bp, synthetic construct
  source 1..20: mol_type = other DNA
agaagtgaggagcccctctg

SEQ ID NO: 94206 - DNA, 20 bp, synthetic construct
  source 1..20: mol_type = other DNA
gagaagtgaggagcccctct

SEQ ID NO: 94207 - DNA, 20 bp, synthetic construct
  source 1..20: mol_type = other DNA
tgagaagtgaggagcccctc

SEQ ID NO: 94208 - DNA, 20 bp, synthetic construct
  source 1..20: mol_type = other DNA
ctgagaagtgaggagcccct

SEQ ID NO: 94209 - DNA, 20 bp, synthetic construct
  source 1..20: mol_type = other DNA
tctgagaagtgaggagcccc

SEQ ID NO: 94210 - DNA, 20 bp, synthetic construct
  source 1..20: mol_type = other DNA
gtctgagaagtgaggagccc

SEQ ID NO: 94211 - DNA, 20 bp, synthetic construct
  source 1..20: mol_type = other DNA
cgtctgagaagtgaggagcc

SEQ ID NO: 94212 - DNA, 20 bp, synthetic construct
  source 1..20: mol_type = other DNA
ccgtctgagaagtgaggagc

SEQ ID NO: 94213 - DNA, 20 bp, synthetic construct
  source 1..20: mol_type = other DNA
cccgtctgagaagtgaggag

SEQ ID NO: 94214 - DNA, 20 bp, synthetic construct
  source 1..20: mol_type = other DNA
ccccgtctgagaagtgagga

SEQ ID NO: 94215 - DNA, 20 bp, synthetic construct
  source 1..20: mol_type = other DNA
gccccgtctgagaagtgagg

SEQ ID NO: 94216 - DNA, 20 bp, synthetic construct
  source 1..20: mol_type = other DNA
cgccccgtctgagaagtgag

SEQ ID NO: 94217 - DNA, 20 bp, synthetic construct
  source 1..20: mol_type = other DNA
ccgccccgtctgagaagtga

SEQ ID NO: 94218 - DNA, 20 bp, synthetic construct
  source 1..20: mol_type = other DNA
gccgccccgtctgagaagtg

SEQ ID NO: 94219 - DNA, 20 bp, synthetic construct
  source 1..20: mol_type = other DNA
ggccgccccgtctgagaagt

SEQ ID NO: 94220 - DNA, 20 bp, synthetic construct
  source 1..20: mol_type = other DNA
tggccgccccgtctgagaag

SEQ ID NO: 94221 - DNA, 20 bp, synthetic construct
  source 1..20: mol_type = other DNA
ctggccgccccgtctgagaa

SEQ ID NO: 94222 - DNA, 20 bp, synthetic construct
  source 1..20: mol_type = other DNA
cctggccgccccgtctgaga

SEQ ID NO: 94223 - DNA, 20 bp, synthetic construct
  source 1..20: mol_type = other DNA
gcctggccgccccgtctgag

SEQ ID NO: 94224 - DNA, 20 bp, synthetic construct
  source 1..20: mol_type = other DNA
tgcctggccgccccgtctga

SEQ ID NO: 94225 - DNA, 20 bp, synthetic construct
  source 1..20: mol_type = other DNA
ctgcctggccgccccgtctg

SEQ ID NO: 94226 - DNA, 20 bp, synthetic construct
  source 1..20: mol_type = other DNA
tctgcctggccgccccgtct

SEQ ID NO: 94227 - DNA, 20 bp, synthetic construct
  source 1..20: mol_type = other DNA
ctctgcctggccgccccgtc

SEQ ID NO: 94228 - DNA, 20 bp, synthetic construct
  source 1..20: mol_type = other DNA
tctctgcctggccgccccgt

SEQ ID NO: 94229 - DNA, 20 bp, synthetic construct
  source 1..20: mol_type = other DNA
gtctctgcctggccgccccg

SEQ ID NO: 94230 - DNA, 20 bp, synthetic construct
  source 1..20: mol_type = other DNA
cgtctctgcctggccgcccc

SEQ ID NO: 94231 - DNA, 20 bp, synthetic construct
  source 1..20: mol_type = other DNA
gcgtctctgcctggccgccc

SEQ ID NO: 94232 - DNA, 20 bp, synthetic construct
  source 1..20: mol_type = other DNA
agcgtctctgcctggccgcc

SEQ ID NO: 94233 - DNA, 20 bp, synthetic construct
  source 1..20: mol_type = other DNA
gagcgtctctgcctggccgc

SEQ ID NO: 94234 - DNA, 20 bp, synthetic construct
  source 1..20: mol_type = other DNA
ggagcgtctctgcctggccg

SEQ ID NO: 94235 - DNA, 20 bp, synthetic construct
  source 1..20: mol_type = other DNA
aggagcgtctctgcctggcc

SEQ ID NO: 94236 - DNA, 20 bp, synthetic construct
  source 1..20: mol_type = other DNA
gaggagcgtctctgcctggc

SEQ ID NO: 94237 - DNA, 20 bp, synthetic construct
  source 1..20: mol_type = other DNA
tgaggagcgtctctgcctgg

SEQ ID NO: 94238 - DNA, 20 bp, synthetic construct
  source 1..20: mol_type = other DNA
gtgaggagcgtctctgcctg

SEQ ID NO: 94239 - DNA, 20 bp, synthetic construct
  source 1..20: mol_type = other DNA
ggtgaggagcgtctctgcct

SEQ ID NO: 94240 - DNA, 20 bp, synthetic construct
  source 1..20: mol_type = other DNA
aggtgaggagcgtctctgcc

SEQ ID NO: 94241 - DNA, 20 bp, synthetic construct
  source 1..20: mol_type = other DNA
gaggtgaggagcgtctctgc

SEQ ID NO: 94242 - DNA, 20 bp, synthetic construct
  source 1..20: mol_type = other DNA
ggaggtgaggagcgtctctg

SEQ ID NO: 94243 - DNA, 20 bp, synthetic construct
  source 1..20: mol_type = other DNA
gggaggtgaggagcgtctct

SEQ ID NO: 94244 - DNA, 20 bp, synthetic construct
  source 1..20: mol_type = other DNA
tgggaggtgaggagcgtctc

SEQ ID NO: 94245 - DNA, 20 bp, synthetic construct
  source 1..20: mol_type = other DNA
ctgggaggtgaggagcgtct

SEQ ID NO: 94246 - DNA, 20 bp, synthetic construct
  source 1..20: mol_type = other DNA
tctgggaggtgaggagcgtc

SEQ ID NO: 94247 - DNA, 20 bp, synthetic construct
  source 1..20: mol_type = other DNA
gtctgggaggtgaggagcgt

SEQ ID NO: 94248 - DNA, 20 bp, synthetic construct
  source 1..20: mol_type = other DNA
cgtctgggaggtgaggagcg

SEQ ID NO: 94249 - DNA, 20 bp, synthetic construct
  source 1..20: mol_type = other DNA
ccgtctgggaggtgaggagc

SEQ ID NO: 94250 - DNA, 20 bp, synthetic construct
  source 1..20: mol_type = other DNA
cccgtctgggaggtgaggag

SEQ ID NO: 94251 - DNA, 20 bp, synthetic construct
  source 1..20: mol_type = other DNA
ccccgtctgggaggtgagga

SEQ ID NO: 94252 - DNA, 20 bp, synthetic construct
  source 1..20: mol_type = other DNA
accccgtctgggaggtgagg

SEQ ID NO: 94253 - DNA, 20 bp, synthetic construct
  source 1..20: mol_type = other DNA
gaccccgtctgggaggtgag

SEQ ID NO: 94254 - DNA, 20 bp, synthetic construct
  source 1..20: mol_type = other DNA
cgaccccgtctgggaggtga

SEQ ID NO: 94255 - DNA, 20 bp, synthetic construct
  source 1..20: mol_type = other DNA
gcgaccccgtctgggaggtg

SEQ ID NO: 94256 - DNA, 20 bp, synthetic construct
  source 1..20: mol_type = other DNA
cgcgaccccgtctgggaggt

SEQ ID NO: 94257 - DNA, 20 bp, synthetic construct
  source 1..20: mol_type = other DNA
ccgcgaccccgtctgggagg

SEQ ID NO: 94258 - DNA, 20 bp, synthetic construct
  source 1..20: mol_type = other DNA
gccgcgaccccgtctgggag

SEQ ID NO: 94259 - DNA, 20 bp, synthetic construct
  source 1..20: mol_type = other DNA
ggccgcgaccccgtctggga

SEQ ID NO: 94260 - DNA, 20 bp, synthetic construct
  source 1..20: mol_type = other DNA
cggccgcgaccccgtctggg

SEQ ID NO: 94261 - DNA, 20 bp, synthetic construct
  source 1..20: mol_type = other DNA
ccggccgcgaccccgtctgg

SEQ ID NO: 94262 - DNA, 20 bp, synthetic construct
  source 1..20: mol_type = other DNA
cccggccgcgaccccgtctg

SEQ ID NO: 94263 - DNA, 20 bp, synthetic construct
  source 1..20: mol_type = other DNA
gcccggccgcgaccccgtct

SEQ ID NO: 94264 - DNA, 20 bp, synthetic construct
  source 1..20: mol_type = other DNA
tgcccggccgcgaccccgtc

SEQ ID NO: 94265 - DNA, 20 bp, synthetic construct
  source 1..20: mol_type = other DNA
ctgcccggccgcgaccccgt

SEQ ID NO: 94266 - DNA, 20 bp, synthetic construct
  source 1..20: mol_type = other DNA
tctgcccggccgcgaccccg

SEQ ID NO: 94267 - DNA, 20 bp, synthetic construct
  source 1..20: mol_type = other DNA
ctctgcccggccgcgacccc

SEQ ID NO: 94268 - DNA, 20 bp, synthetic construct
  source 1..20: mol_type = other DNA
cctctgcccggccgcgaccc

SEQ ID NO: 94269 - DNA, 20 bp, synthetic construct
  source 1..20: mol_type = other DNA
gcctctgcccggccgcgacc

SEQ ID NO: 94270 - DNA, 20 bp, synthetic construct
  source 1..20: mol_type = other DNA
cgcctctgcccggccgcgac

SEQ ID NO: 94271 - DNA, 20 bp, synthetic construct
  source 1..20: mol_type = other DNA
gcgcctctgcccggccgcga

SEQ ID NO: 94272 - DNA, 20 bp, synthetic construct
  source 1..20: mol_type = other DNA
agcgcctctgcccggccgcg

SEQ ID NO: 94273 - DNA, 20 bp, synthetic construct
  source 1..20: mol_type = other DNA
gagcgcctctgcccggccgc

SEQ ID NO: 94274 - DNA, 20 bp, synthetic construct
  source 1..20: mol_type = other DNA
ggagcgcctctgcccggccg

SEQ ID NO: 94275 - DNA, 20 bp, synthetic construct
  source 1..20: mol_type = other DNA
aggagcgcctctgcccggcc

SEQ ID NO: 94276 - DNA, 20 bp, synthetic construct
  source 1..20: mol_type = other DNA
gaggagcgcctctgcccggc

SEQ ID NO: 94277 - DNA, 20 bp, synthetic construct
  source 1..20: mol_type = other DNA
tgaggagcgcctctgcccgg

SEQ ID NO: 94278 - DNA, 20 bp, synthetic construct
  source 1..20: mol_type = other DNA
gtgaggagcgcctctgcccg

SEQ ID NO: 94279 - DNA, 20 bp, synthetic construct
  source 1..20: mol_type = other DNA
tgtgaggagcgcctctgccc

SEQ ID NO: 94280 - DNA, 20 bp, synthetic construct
  source 1..20: mol_type = other DNA
atgtgaggagcgcctctgcc

SEQ ID NO: 94281 - DNA, 20 bp, synthetic construct
  source 1..20: mol_type = other DNA
gatgtgaggagcgcctctgc

SEQ ID NO: 94282 - DNA, 20 bp, synthetic construct
  source 1..20: mol_type = other DNA
ggatgtgaggagcgcctctg

SEQ ID NO: 94283 - DNA, 20 bp, synthetic construct
  source 1..20: mol_type = other DNA
gggatgtgaggagcgcctct

SEQ ID NO: 94284 - DNA, 20 bp, synthetic construct
  source 1..20: mol_type = other DNA
tgggatgtgaggagcgcctc

SEQ ID NO: 94285 - DNA, 20 bp, synthetic construct
  source 1..20: mol_type = other DNA
ctgggatgtgaggagcgcct

SEQ ID NO: 94286 - DNA, 20 bp, synthetic construct
  source 1..20: mol_type = other DNA
tctgggatgtgaggagcgcc

SEQ ID NO: 94287 - DNA, 20 bp, synthetic construct
  source 1..20: mol_type = other DNA
gtctgggatgtgaggagcgc

SEQ ID NO: 94288 - DNA, 20 bp, synthetic construct
  source 1..20: mol_type = other DNA
cgtctgggatgtgaggagcg

SEQ ID NO: 94289 - DNA, 20 bp, synthetic construct
  source 1..20: mol_type = other DNA
ccgtctgggatgtgaggagc

SEQ ID NO: 94290 - DNA, 20 bp, synthetic construct
  source 1..20: mol_type = other DNA
cccgtctgggatgtgaggag

SEQ ID NO: 94291 - DNA, 20 bp, synthetic construct
  source 1..20: mol_type = other DNA
ccccgtctgggatgtgagga

SEQ ID NO: 94292 - DNA, 20 bp, synthetic construct
  source 1..20: mol_type = other DNA
gccccgtctgggatgtgagg

SEQ ID NO: 94293 - DNA, 20 bp, synthetic construct
  source 1..20: mol_type = other DNA
tgccccgtctgggatgtgag

SEQ ID NO: 94294 - DNA, 20 bp, synthetic construct
  source 1..20: mol_type = other DNA
ctgccccgtctgggatgtga

SEQ ID NO: 94295 - DNA, 20 bp, synthetic construct
  source 1..20: mol_type = other DNA
gctgccccgtctgggatgtg

SEQ ID NO: 94296 - DNA, 20 bp, synthetic construct
  source 1..20: mol_type = other DNA
cgctgccccgtctgggatgt

SEQ ID NO: 94297 - DNA, 20 bp, synthetic construct
  source 1..20: mol_type = other DNA
ccgctgccccgtctgggatg

SEQ ID NO: 94298 - DNA, 20 bp, synthetic construct
  source 1..20: mol_type = other DNA
cccgctgccccgtctgggat

SEQ ID NO: 94299 - DNA, 20 bp, synthetic construct
  source 1..20: mol_type = other DNA
ccccgctgccccgtctggga

SEQ ID NO: 94300 - DNA, 20 bp, synthetic construct
  source 1..20: mol_type = other DNA
gccccgctgccccgtctggg

SEQ ID NO: 94301 - DNA, 20 bp, synthetic construct
  source 1..20: mol_type = other DNA
tgccccgctgccccgtctgg

SEQ ID NO: 94302 - DNA, 20 bp, synthetic construct
  source 1..20: mol_type = other DNA
ctgccccgctgccccgtctg

SEQ ID NO: 94303 - DNA, 20 bp, synthetic construct
  source 1..20: mol_type = other DNA
tctgccccgctgccccgtct

SEQ ID NO: 94304 - DNA, 20 bp, synthetic construct
  source 1..20: mol_type = other DNA
ctctgccccgctgccccgtc

SEQ ID NO: 94305 - DNA, 20 bp, synthetic construct
  source 1..20: mol_type = other DNA
cctctgccccgctgccccgt

SEQ ID NO: 94306 - DNA, 20 bp, synthetic construct
  source 1..20: mol_type = other DNA
gcctctgccccgctgccccg

SEQ ID NO: 94307 - DNA, 20 bp, synthetic construct
  source 1..20: mol_type = other DNA
cgcctctgccccgctgcccc

SEQ ID NO: 94308 - DNA, 20 bp, synthetic construct
  source 1..20: mol_type = other DNA
gcgcctctgccccgctgccc

SEQ ID NO: 94309 - DNA, 20 bp, synthetic construct
  source 1..20: mol_type = other DNA
agcgcctctgccccgctgcc

SEQ ID NO: 94310 - DNA, 20 bp, synthetic construct
  source 1..20: mol_type = other DNA
gagcgcctctgccccgctgc

SEQ ID NO: 94311 - DNA, 20 bp, synthetic construct
  source 1..20: mol_type = other DNA
ggagcgcctctgccccgctg

SEQ ID NO: 94312 - DNA, 20 bp, synthetic construct
  source 1..20: mol_type = other DNA
gggagcgcctctgccccgct

SEQ ID NO: 94313 - DNA, 20 bp, synthetic construct
  source 1..20: mol_type = other DNA
ggggagcgcctctgccccgc

SEQ ID NO: 94314 - DNA, 20 bp, synthetic construct
  source 1..20: mol_type = other DNA
tggggagcgcctctgccccg

SEQ ID NO: 94315 - DNA, 20 bp, synthetic construct
  source 1..20: mol_type = other DNA
gtggggagcgcctctgcccc

SEQ ID NO: 94316 - DNA, 20 bp, synthetic construct
  source 1..20: mol_type = other DNA
tgtggggagcgcctctgccc

SEQ ID NO: 94317 - DNA, 20 bp, synthetic construct
  source 1..20: mol_type = other DNA
atgtggggagcgcctctgcc

SEQ ID NO: 94318 - DNA, 20 bp, synthetic construct
  source 1..20: mol_type = other DNA
gatgtggggagcgcctctgc

SEQ ID NO: 94319 - DNA, 20 bp, synthetic construct
  source 1..20: mol_type = other DNA
agatgtggggagcgcctctg

SEQ ID NO: 94320 - DNA, 20 bp, synthetic construct
  source 1..20: mol_type = other DNA
gagatgtggggagcgcctct

SEQ ID NO: 94321 - DNA, 20 bp, synthetic construct
  source 1..20: mol_type = other DNA
tgagatgtggggagcgcctc

SEQ ID NO: 94322 - DNA, 20 bp, synthetic construct
  source 1..20: mol_type = other DNA
ctgagatgtggggagcgcct

SEQ ID NO: 94323 - DNA, 20 bp, synthetic construct
  source 1..20: mol_type = other DNA
tctgagatgtggggagcgcc

SEQ ID NO: 94324 - DNA, 20 bp, synthetic construct
  source 1..20: mol_type = other DNA
gtctgagatgtggggagcgc

SEQ ID NO: 94325 - DNA, 20 bp, synthetic construct
  source 1..20: mol_type = other DNA
cgtctgagatgtggggagcg

SEQ ID NO: 94326 - DNA, 20 bp, synthetic construct
  source 1..20: mol_type = other DNA
tcgtctgagatgtggggagc

SEQ ID NO: 94327 - DNA, 20 bp, synthetic construct
  source 1..20: mol_type = other DNA
gtcgtctgagatgtggggag

SEQ ID NO: 94328 - DNA, 20 bp, synthetic construct
  source 1..20: mol_type = other DNA
cgtcgtctgagatgtgggga

SEQ ID NO: 94329 - DNA, 20 bp, synthetic construct
  source 1..20: mol_type = other DNA
ccgtcgtctgagatgtgggg

SEQ ID NO: 94330 - DNA, 20 bp, synthetic construct
  source 1..20: mol_type = other DNA
cccgtcgtctgagatgtggg

SEQ ID NO: 94331 - DNA, 20 bp, synthetic construct
  source 1..20: mol_type = other DNA
acccgtcgtctgagatgtgg

SEQ ID NO: 94332 - DNA, 20 bp, synthetic construct
  source 1..20: mol_type = other DNA
cacccgtcgtctgagatgtg

SEQ ID NO: 94333 - DNA, 20 bp, synthetic construct
  source 1..20: mol_type = other DNA
ccacccgtcgtctgagatgt

SEQ ID NO: 94334 - DNA, 20 bp, synthetic construct
  source 1..20: mol_type = other DNA
gccacccgtcgtctgagatg

SEQ ID NO: 94335 - DNA, 20 bp, synthetic construct
  source 1..20: mol_type = other DNA
ggccacccgtcgtctgagat

SEQ ID NO: 94336 - DNA, 20 bp, synthetic construct
  source 1..20: mol_type = other DNA
cggccacccgtcgtctgaga

SEQ ID NO: 94337 - DNA, 20 bp, synthetic construct
  source 1..20: mol_type = other DNA
ccggccacccgtcgtctgag

SEQ ID NO: 94338 - DNA, 20 bp, synthetic construct
  source 1..20: mol_type = other DNA
cccggccacccgtcgtctga

SEQ ID NO: 94339 - DNA, 20 bp, synthetic construct
  source 1..20: mol_type = other DNA
gcccggccacccgtcgtctg

SEQ ID NO: 94340 - DNA, 20 bp, synthetic construct
  source 1..20: mol_type = other DNA
tgcccggccacccgtcgtct

SEQ ID NO: 94341 - DNA, 20 bp, synthetic construct
  source 1..20: mol_type = other DNA
ctgcccggccacccgtcgtc

SEQ ID NO: 94342 - DNA, 20 bp, synthetic construct
  source 1..20: mol_type = other DNA
tctgcccggccacccgtcgt

SEQ ID NO: 94343 - DNA, 20 bp, synthetic construct
  source 1..20: mol_type = other DNA
ctctgcccggccacccgtcg

SEQ ID NO: 94344 - DNA, 20 bp, synthetic construct
  source 1..20: mol_type = other DNA
tctctgcccggccacccgtc

SEQ ID NO: 94345 - DNA, 20 bp, synthetic construct
  source 1..20: mol_type = other DNA
gtctctgcccggccacccgt

SEQ ID NO: 94346 - DNA, 20 bp, synthetic construct
  source 1..20: mol_type = other DNA
cgtctctgcccggccacccg

SEQ ID NO: 94347 - DNA, 20 bp, synthetic construct
  source 1..20: mol_type = other DNA
gcgtctctgcccggccaccc

SEQ ID NO: 94348 - DNA, 20 bp, synthetic construct
  source 1..20: mol_type = other DNA
agcgtctctgcccggccacc

SEQ ID NO: 94349 - DNA, 20 bp, synthetic construct
  source 1..20: mol_type = other DNA
gagcgtctctgcccggccac

SEQ ID NO: 94350 - DNA, 20 bp, synthetic construct
  source 1..20: mol_type = other DNA
ggagcgtctctgcccggcca

SEQ ID NO: 94351 - DNA, 20 bp, synthetic construct
  source 1..20: mol_type = other DNA
aggagcgtctctgcccggcc

SEQ ID NO: 94352 - DNA, 20 bp, synthetic construct
  source 1..20: mol_type = other DNA
gaggagcgtctctgcccggc

SEQ ID NO: 94353 - DNA, 20 bp, synthetic construct
  source 1..20: mol_type = other DNA
tgaggagcgtctctgcccgg

SEQ ID NO: 94354 - DNA, 20 bp, synthetic construct
  source 1..20: mol_type = other DNA
gtgaggagcgtctctgcccg

SEQ ID NO: 94355 - DNA, 20 bp, synthetic construct
  source 1..20: mol_type = other DNA
agtgaggagcgtctctgccc

SEQ ID NO: 94356 - DNA, 20 bp, synthetic construct
  source 1..20: mol_type = other DNA
aagtgaggagcgtctctgcc

SEQ ID NO: 94357 - DNA, 20 bp, synthetic construct
  source 1..20: mol_type = other DNA
gaagtgaggagcgtctctgc

SEQ ID NO: 94358 - DNA, 20 bp, synthetic construct
  source 1..20: mol_type = other DNA
ggaagtgaggagcgtctctg

SEQ ID NO: 94359 - DNA, 20 bp, synthetic construct
  source 1..20: mol_type = other DNA
aggaagtgaggagcgtctct

SEQ ID NO: 94360 - DNA, 20 bp, synthetic construct
  source 1..20: mol_type = other DNA
taggaagtgaggagcgtctc

SEQ ID NO: 94361 - DNA, 20 bp, synthetic construct
  source 1..20: mol_type = other DNA
ctaggaagtgaggagcgtct

SEQ ID NO: 94362 - DNA, 20 bp, synthetic construct
  source 1..20: mol_type = other DNA
tctaggaagtgaggagcgtc

SEQ ID NO: 94363 - DNA, 20 bp, synthetic construct
  source 1..20: mol_type = other DNA
gtctaggaagtgaggagcgt

SEQ ID NO: 94364 - DNA, 20 bp, synthetic construct
  source 1..20: mol_type = other DNA
cgtctaggaagtgaggagcg

SEQ ID NO: 94365 - DNA, 20 bp, synthetic construct
  source 1..20: mol_type = other DNA
ccgtctaggaagtgaggagc

SEQ ID NO: 94366 - DNA, 20 bp, synthetic construct
  source 1..20: mol_type = other DNA
cccgtctaggaagtgaggag

SEQ ID NO: 94367 - DNA, 20 bp, synthetic construct
  source 1..20: mol_type = other DNA
tcccgtctaggaagtgagga

SEQ ID NO: 94368 - DNA, 20 bp, synthetic construct
  source 1..20: mol_type = other DNA
atcccgtctaggaagtgagg

SEQ ID NO: 94369 - DNA, 20 bp, synthetic construct
  source 1..20: mol_type = other DNA
catcccgtctaggaagtgag

SEQ ID NO: 94370 - DNA, 20 bp, synthetic construct
  source 1..20: mol_type = other DNA
ccatcccgtctaggaagtga

SEQ ID NO: 94371 - DNA, 20 bp, synthetic construct
  source 1..20: mol_type = other DNA
gccatcccgtctaggaagtg

SEQ ID NO: 94372 - DNA, 20 bp, synthetic construct
  source 1..20: mol_type = other DNA
cgccatcccgtctaggaagt

SEQ ID NO: 94373 - DNA, 20 bp, synthetic construct
  source 1..20: mol_type = other DNA
ccgccatcccgtctaggaag

SEQ ID NO: 94374 - DNA, 20 bp, synthetic construct
  source 1..20: mol_type = other DNA
gccgccatcccgtctaggaa

SEQ ID NO: 94375 - DNA, 20 bp, synthetic construct
  source 1..20: mol_type = other DNA
ggccgccatcccgtctagga

SEQ ID NO: 94376 - DNA, 20 bp, synthetic construct
  source 1..20: mol_type = other DNA
cggccgccatcccgtctagg

SEQ ID NO: 94377 - DNA, 20 bp, synthetic construct
  source 1..20: mol_type = other DNA
ccggccgccatcccgtctag

SEQ ID NO: 94378 - DNA, 20 bp, synthetic construct
  source 1..20: mol_type = other DNA
cccggccgccatcccgtcta

SEQ ID NO: 94379 - DNA, 20 bp, synthetic construct
  source 1..20: mol_type = other DNA
tcccggccgccatcccgtct

SEQ ID NO: 94380 - DNA, 20 bp, synthetic construct
  source 1..20: mol_type = other DNA
ttcccggccgccatcccgtc

SEQ ID NO: 94381 - DNA, 20 bp, synthetic construct
  source 1..20: mol_type = other DNA
cttcccggccgccatcccgt

SEQ ID NO: 94382 - DNA, 20 bp, synthetic construct
  source 1..20: mol_type = other DNA
tcttcccggccgccatcccg

SEQ ID NO: 94383 - DNA, 20 bp, synthetic construct
  source 1..20: mol_type = other DNA
ctcttcccggccgccatccc

SEQ ID NO: 94384 - DNA, 20 bp, synthetic construct
  source 1..20: mol_type = other DNA
cctcttcccggccgccatcc

SEQ ID NO: 94385 - DNA, 20 bp, synthetic construct
  source 1..20: mol_type = other DNA
acctcttcccggccgccatc

SEQ ID NO: 94386 - DNA, 20 bp, synthetic construct
  source 1..20: mol_type = other DNA
cacctcttcccggccgccat

SEQ ID NO: 94387 - DNA, 20 bp, synthetic construct
  source 1..20: mol_type = other DNA
gcacctcttcccggccgcca

SEQ ID NO: 94388 - DNA, 20 bp, synthetic construct
  source 1..20: mol_type = other DNA
agcacctcttcccggccgcc

SEQ ID NO: 94389 - DNA, 20 bp, synthetic construct
  source 1..20: mol_type = other DNA
gagcacctcttcccggccgc

SEQ ID NO: 94390 - DNA, 20 bp, synthetic construct
  source 1..20: mol_type = other DNA
ggagcacctcttcccggccg

SEQ ID NO: 94391 - DNA, 20 bp, synthetic construct
  source 1..20: mol_type = other DNA
aggagcacctcttcccggcc

SEQ ID NO: 94392 - DNA, 20 bp, synthetic construct
  source 1..20: mol_type = other DNA
gaggagcacctcttcccggc

SEQ ID NO: 94393 - DNA, 20 bp, synthetic construct
  source 1..20: mol_type = other DNA
tgaggagcacctcttcccgg

SEQ ID NO: 94394 - DNA, 20 bp, synthetic construct
  source 1..20: mol_type = other DNA
gtgaggagcacctcttcccg

SEQ ID NO: 94395 - DNA, 20 bp, synthetic construct
  source 1..20: mol_type = other DNA
agtgaggagcacctcttccc

SEQ ID NO: 94396 - DNA, 20 bp, synthetic construct
  source 1..20: mol_type = other DNA
aagtgaggagcacctcttcc

SEQ ID NO: 94397 - DNA, 20 bp, synthetic construct
  source 1..20: mol_type = other DNA
gaagtgaggagcacctcttc

SEQ ID NO: 94398 - DNA, 20 bp, synthetic construct
  source 1..20: mol_type = other DNA
ggaagtgaggagcacctctt

SEQ ID NO: 94399 - DNA, 20 bp, synthetic construct
  source 1..20: mol_type = other DNA
gggaagtgaggagcacctct

SEQ ID NO: 94400 - DNA, 20 bp, synthetic construct
  source 1..20: mol_type = other DNA
tgggaagtgaggagcacctc

SEQ ID NO: 94401 - DNA, 20 bp, synthetic construct
  source 1..20: mol_type = other DNA
ctgggaagtgaggagcacct

SEQ ID NO: 94402 - DNA, 20 bp, synthetic construct
  source 1..20: mol_type = other DNA
tctgggaagtgaggagcacc

SEQ ID NO: 94403 - DNA, 20 bp, synthetic construct
  source 1..20: mol_type = other DNA
gtctgggaagtgaggagcac

SEQ ID NO: 94404 - DNA, 20 bp, synthetic construct
  source 1..20: mol_type = other DNA
agtctgggaagtgaggagca

SEQ ID NO: 94405 - DNA, 20 bp, synthetic construct
  source 1..20: mol_type = other DNA
cagtctgggaagtgaggagc

SEQ ID NO: 94406 - DNA, 20 bp, synthetic construct
  source 1..20: mol_type = other DNA
ccagtctgggaagtgaggag

SEQ ID NO: 94407 - DNA, 20 bp, synthetic construct
  source 1..20: mol_type = other DNA
cccagtctgggaagtgagga

SEQ ID NO: 94408 - DNA, 20 bp, synthetic construct
  source 1..20: mol_type = other DNA
gcccagtctgggaagtgagg

SEQ ID NO: 94409 - DNA, 20 bp, synthetic construct
  source 1..20: mol_type = other DNA
tgcccagtctgggaagtgag

SEQ ID NO: 94410 - DNA, 20 bp, synthetic construct
  source 1..20: mol_type = other DNA
ctgcccagtctgggaagtga

SEQ ID NO: 94411 - DNA, 20 bp, synthetic construct
  source 1..20: mol_type = other DNA
gctgcccagtctgggaagtg

SEQ ID NO: 94412 - DNA, 20 bp, synthetic construct
  source 1..20: mol_type = other DNA
ggctgcccagtctgggaagt

SEQ ID NO: 94413 - DNA, 20 bp, synthetic construct
  source 1..20: mol_type = other DNA
cggctgcccagtctgggaag

SEQ ID NO: 94414 - DNA, 20 bp, synthetic construct
  source 1..20: mol_type = other DNA
ccggctgcccagtctgggaa

SEQ ID NO: 94415 - DNA, 20 bp, synthetic construct
  source 1..20: mol_type = other DNA
cccggctgcccagtctggga

SEQ ID NO: 94416 - DNA, 20 bp, synthetic construct
  source 1..20: mol_type = other DNA
gcccggctgcccagtctggg

SEQ ID NO: 94417 - DNA, 20 bp, synthetic construct
  source 1..20: mol_type = other DNA
tgcccggctgcccagtctgg

SEQ ID NO: 94418 - DNA, 20 bp, synthetic construct
  source 1..20: mol_type = other DNA
ctgcccggctgcccagtctg

SEQ ID NO: 94419 - DNA, 20 bp, synthetic construct
  source 1..20: mol_type = other DNA
tctgcccggctgcccagtct

SEQ ID NO: 94420 - DNA, 20 bp, synthetic construct
  source 1..20: mol_type = other DNA
ctctgcccggctgcccagtc

SEQ ID NO: 94421 - DNA, 20 bp, synthetic construct
  source 1..20: mol_type = other DNA
cctctgcccggctgcccagt

SEQ ID NO: 94422 - DNA, 20 bp, synthetic construct
  source 1..20: mol_type = other DNA
ccctctgcccggctgcccag

SEQ ID NO: 94423 - DNA, 20 bp, synthetic construct
  source 1..20: mol_type = other DNA
cccctctgcccggctgccca

SEQ ID NO: 94424 - DNA, 20 bp, synthetic construct
  source 1..20: mol_type = other DNA
gcccctctgcccggctgccc

SEQ ID NO: 94425 - DNA, 20 bp, synthetic construct
  source 1..20: mol_type = other DNA
agcccctctgcccggctgcc

SEQ ID NO: 94426 - DNA, 20 bp, synthetic construct
  source 1..20: mol_type = other DNA
gagcccctctgcccggctgc

SEQ ID NO: 94427 - DNA, 20 bp, synthetic construct
  source 1..20: mol_type = other DNA
ggagcccctctgcccggctg

SEQ ID NO: 94428 - DNA, 20 bp, synthetic construct
  source 1..20: mol_type = other DNA
aggagcccctctgcccggct

SEQ ID NO: 94429 - DNA, 20 bp, synthetic construct
  source 1..20: mol_type = other DNA
gaggagcccctctgcccggc

SEQ ID NO: 94430 - DNA, 20 bp, synthetic construct
  source 1..20: mol_type = other DNA
tgaggagcccctctgcccgg

SEQ ID NO: 94431 - DNA, 20 bp, synthetic construct
  source 1..20: mol_type = other DNA
gtgaggagcccctctgcccg

SEQ ID NO: 94432 - DNA, 20 bp, synthetic construct
  source 1..20: mol_type = other DNA
tgtgaggagcccctctgccc

SEQ ID NO: 94433 - DNA, 20 bp, synthetic construct
  source 1..20: mol_type = other DNA
atgtgaggagcccctctgcc

SEQ ID NO: 94434 - DNA, 20 bp, synthetic construct
  source 1..20: mol_type = other DNA
gatgtgaggagcccctctgc

SEQ ID NO: 94435 - DNA, 20 bp, synthetic construct
  source 1..20: mol_type = other DNA
ggatgtgaggagcccctctg

SEQ ID NO: 94436 - DNA, 20 bp, synthetic construct
  source 1..20: mol_type = other DNA
gggatgtgaggagcccctct

SEQ ID NO: 94437 - DNA, 20 bp, synthetic construct
  source 1..20: mol_type = other DNA
tgggatgtgaggagcccctc

SEQ ID NO: 94438 - DNA, 20 bp, synthetic construct
  source 1..20: mol_type = other DNA
ctgggatgtgaggagcccct

SEQ ID NO: 94439 - DNA, 20 bp, synthetic construct
  source 1..20: mol_type = other DNA
tctgggatgtgaggagcccc

SEQ ID NO: 94440 - DNA, 20 bp, synthetic construct
  source 1..20: mol_type = other DNA
gtctgggatgtgaggagccc

SEQ ID NO: 94441 - DNA, 20 bp, synthetic construct
  source 1..20: mol_type = other DNA
cgtctgggatgtgaggagcc

SEQ ID NO: 94442 - DNA, 20 bp, synthetic construct
  source 1..20: mol_type = other DNA
tcgtctgggatgtgaggagc

SEQ ID NO: 94443 - DNA, 20 bp, synthetic construct
  source 1..20: mol_type = other DNA
atcgtctgggatgtgaggag

SEQ ID NO: 94444 - DNA, 20 bp, synthetic construct
  source 1..20: mol_type = other DNA
catcgtctgggatgtgagga

SEQ ID NO: 94445 - DNA, 20 bp, synthetic construct
  source 1..20: mol_type = other DNA
ccatcgtctgggatgtgagg

SEQ ID NO: 94446 - DNA, 20 bp, synthetic construct
  source 1..20: mol_type = other DNA
cccatcgtctgggatgtgag

SEQ ID NO: 94447 - DNA, 20 bp, synthetic construct
  source 1..20: mol_type = other DNA
acccatcgtctgggatgtga

SEQ ID NO: 94448 - DNA, 20 bp, synthetic construct
  source 1..20: mol_type = other DNA
cacccatcgtctgggatgtg

SEQ ID NO: 94449 - DNA, 20 bp, synthetic construct
  source 1..20: mol_type = other DNA
ccacccatcgtctgggatgt

SEQ ID NO: 94450 - DNA, 20 bp, synthetic construct
  source 1..20: mol_type = other DNA
gccacccatcgtctgggatg

SEQ ID NO: 94451 - DNA, 20 bp, synthetic construct
  source 1..20: mol_type = other DNA
ggccacccatcgtctgggat

SEQ ID NO: 94452 - DNA, 20 bp, synthetic construct
  source 1..20: mol_type = other DNA
tggccacccatcgtctggga

SEQ ID NO: 94453 - DNA, 20 bp, synthetic construct
  source 1..20: mol_type = other DNA
ctggccacccatcgtctggg

SEQ ID NO: 94454 - DNA, 20 bp, synthetic construct
  source 1..20: mol_type = other DNA
cctggccacccatcgtctgg

SEQ ID NO: 94455 - DNA, 20 bp, synthetic construct
  source 1..20: mol_type = other DNA
gcctggccacccatcgtctg

SEQ ID NO: 94456 - DNA, 20 bp, synthetic construct
  source 1..20: mol_type = other DNA
tgcctggccacccatcgtct

SEQ ID NO: 94457 - DNA, 20 bp, synthetic construct
  source 1..20: mol_type = other DNA
ctgcctggccacccatcgtc

SEQ ID NO: 94458 - DNA, 20 bp, synthetic construct
  source 1..20: mol_type = other DNA
tctgcctggccacccatcgt

SEQ ID NO: 94459 - DNA, 20 bp, synthetic construct
  source 1..20: mol_type = other DNA
ctctgcctggccacccatcg

SEQ ID NO: 94460 - DNA, 20 bp, synthetic construct
  source 1..20: mol_type = other DNA
tctctgcctggccacccatc

SEQ ID NO: 94461 - DNA, 20 bp, synthetic construct
  source 1..20: mol_type = other DNA
gtctctgcctggccacccat

SEQ ID NO: 94462 - DNA, 20 bp, synthetic construct
  source 1..20: mol_type = other DNA
cgtctctgcctggccaccca

SEQ ID NO: 94463 - DNA, 20 bp, synthetic construct
  source 1..20: mol_type = other DNA
gcgtctctgcctggccaccc

SEQ ID NO: 94464 - DNA, 20 bp, synthetic construct
  source 1..20: mol_type = other DNA
agcgtctctgcctggccacc

SEQ ID NO: 94465 - DNA, 20 bp, synthetic construct
  source 1..20: mol_type = other DNA
gagcgtctctgcctggccac

SEQ ID NO: 94466 - DNA, 20 bp, synthetic construct
  source 1..20: mol_type = other DNA
ggagcgtctctgcctggcca

SEQ ID NO: 94467 - DNA, 20 bp, synthetic construct
  source 1..20: mol_type = other DNA
aggagcgtctctgcctggcc

SEQ ID NO: 94468 - DNA, 20 bp, synthetic construct
  source 1..20: mol_type = other DNA
gaggagcgtctctgcctggc

SEQ ID NO: 94469 - DNA, 20 bp, synthetic construct
  source 1..20: mol_type = other DNA
tgaggagcgtctctgcctgg

SEQ ID NO: 94470 - DNA, 20 bp, synthetic construct
  source 1..20: mol_type = other DNA
gtgaggagcgtctctgcctg

SEQ ID NO: 94471 - DNA, 20 bp, synthetic construct
  source 1..20: mol_type = other DNA
agtgaggagcgtctctgcct

SEQ ID NO: 94472 - DNA, 20 bp, synthetic construct
  source 1..20: mol_type = other DNA
aagtgaggagcgtctctgcc

SEQ ID NO: 94473 - DNA, 20 bp, synthetic construct
  source 1..20: mol_type = other DNA
gaagtgaggagcgtctctgc

SEQ ID NO: 94474 - DNA, 20 bp, synthetic construct
  source 1..20: mol_type = other DNA
ggaagtgaggagcgtctctg

SEQ ID NO: 94475 - DNA, 20 bp, synthetic construct
  source 1..20: mol_type = other DNA
gggaagtgaggagcgtctct

SEQ ID NO: 94476 - DNA, 20 bp, synthetic construct
  source 1..20: mol_type = other DNA
tgggaagtgaggagcgtctc

SEQ ID NO: 94477 - DNA, 20 bp, synthetic construct
  source 1..20: mol_type = other DNA
ctgggaagtgaggagcgtct

SEQ ID NO: 94478 - DNA, 20 bp, synthetic construct
  source 1..20: mol_type = other DNA
tctgggaagtgaggagcgtc

SEQ ID NO: 94479 - DNA, 20 bp, synthetic construct
  source 1..20: mol_type = other DNA
gtctgggaagtgaggagcgt

SEQ ID NO: 94480 - DNA, 20 bp, synthetic construct
  source 1..20: mol_type = other DNA
cgtctgggaagtgaggagcg

SEQ ID NO: 94481 - DNA, 20 bp, synthetic construct
  source 1..20: mol_type = other DNA
ccgtctgggaagtgaggagc

SEQ ID NO: 94482 - DNA, 20 bp, synthetic construct
  source 1..20: mol_type = other DNA
cccgtctgggaagtgaggag

SEQ ID NO: 94483 - DNA, 20 bp, synthetic construct
  source 1..20: mol_type = other DNA
ccccgtctgggaagtgagga

SEQ ID NO: 94484 - DNA, 20 bp, synthetic construct
  source 1..20: mol_type = other DNA
accccgtctgggaagtgagg

SEQ ID NO: 94485 - DNA, 20 bp, synthetic construct
  source 1..20: mol_type = other DNA
caccccgtctgggaagtgag

SEQ ID NO: 94486 - DNA, 20 bp, synthetic construct
  source 1..20: mol_type = other DNA
ccaccccgtctgggaagtga

SEQ ID NO: 94487 - DNA, 20 bp, synthetic construct
  source 1..20: mol_type = other DNA
gccaccccgtctgggaagtg

SEQ ID NO: 94488 - DNA, 20 bp, synthetic construct
  source 1..20: mol_type = other DNA
cgccaccccgtctgggaagt

SEQ ID NO: 94489 - DNA, 20 bp, synthetic construct
  source 1..20: mol_type = other DNA
ccgccaccccgtctgggaag

SEQ ID NO: 94490 - DNA, 20 bp, synthetic construct
  source 1..20: mol_type = other DNA
gccgccaccccgtctgggaa

SEQ ID NO: 94491 - DNA, 20 bp, synthetic construct
  source 1..20: mol_type = other DNA
ggccgccaccccgtctggga

SEQ ID NO: 94492 - DNA, 20 bp, synthetic construct
  source 1..20: mol_type = other DNA
cggccgccaccccgtctggg

SEQ ID NO: 94493 - DNA, 20 bp, synthetic construct
  source 1..20: mol_type = other DNA
ccggccgccaccccgtctgg

SEQ ID NO: 94494 - DNA, 20 bp, synthetic construct
  source 1..20: mol_type = other DNA
cccggccgccaccccgtctg

SEQ ID NO: 94495 - DNA, 20 bp, synthetic construct
  source 1..20: mol_type = other DNA
gcccggccgccaccccgtct

SEQ ID NO: 94496 - DNA, 20 bp, synthetic construct
  source 1..20: mol_type = other DNA
tgcccggccgccaccccgtc

SEQ ID NO: 94497 - DNA, 20 bp, synthetic construct
  source 1..20: mol_type = other DNA
ctgcccggccgccaccccgt

SEQ ID NO: 94498 - DNA, 20 bp, synthetic construct
  source 1..20: mol_type = other DNA
tctgcccggccgccaccccg

SEQ ID NO: 94499 - DNA, 20 bp, synthetic construct
  source 1..20: mol_type = other DNA
ctctgcccggccgccacccc

SEQ ID NO: 94500 - DNA, 20 bp, synthetic construct
  source 1..20: mol_type = other DNA
cctctgcccggccgccaccc

SEQ ID NO: 94501 - DNA, 20 bp, synthetic construct
  source 1..20: mol_type = other DNA
gcctctgcccggccgccacc

SEQ ID NO: 94502 - DNA, 20 bp, synthetic construct
  source 1..20: mol_type = other DNA
agcctctgcccggccgccac

SEQ ID NO: 94503 - DNA, 20 bp, synthetic construct
  source 1..20: mol_type = other DNA
cagcctctgcccggccgcca

SEQ ID NO: 94504 - DNA, 20 bp, synthetic construct
  source 1..20: mol_type = other DNA
gcagcctctgcccggccgcc

SEQ ID NO: 94505 - DNA, 20 bp, synthetic construct
  source 1..20: mol_type = other DNA
tgcagcctctgcccggccgc

SEQ ID NO: 94506 - DNA, 20 bp, synthetic construct
  source 1..20: mol_type = other DNA
ttgcagcctctgcccggccg

SEQ ID NO: 94507 - DNA, 20 bp, synthetic construct
  source 1..20: mol_type = other DNA
attgcagcctctgcccggcc

SEQ ID NO: 94508 - DNA, 20 bp, synthetic construct
  source 1..20: mol_type = other DNA
gattgcagcctctgcccggc

SEQ ID NO: 94509 - DNA, 20 bp, synthetic construct
  source 1..20: mol_type = other DNA
agattgcagcctctgcccgg

SEQ ID NO: 94510 - DNA, 20 bp, synthetic construct
  source 1..20: mol_type = other DNA
gagattgcagcctctgcccg

SEQ ID NO: 94511 - DNA, 20 bp, synthetic construct
  source 1..20: mol_type = other DNA
cgagattgcagcctctgccc

SEQ ID NO: 94512 - DNA, 20 bp, synthetic construct
  source 1..20: mol_type = other DNA
ccgagattgcagcctctgcc

SEQ ID NO: 94513 - DNA, 20 bp, synthetic construct
  source 1..20: mol_type = other DNA
gccgagattgcagcctctgc

SEQ ID NO: 94514 - DNA, 20 bp, synthetic construct
  source 1..20: mol_type = other DNA
tgccgagattgcagcctctg

SEQ ID NO: 94515 - DNA, 20 bp, synthetic construct
  source 1..20: mol_type = other DNA
gtgccgagattgcagcctct

SEQ ID NO: 94516 - DNA, 20 bp, synthetic construct
  source 1..20: mol_type = other DNA
agtgccgagattgcagcctc

SEQ ID NO: 94517 - DNA, 20 bp, synthetic construct
  source 1..20: mol_type = other DNA
aagtgccgagattgcagcct

SEQ ID NO: 94518 - DNA, 20 bp, synthetic construct
  source 1..20: mol_type = other DNA
aaagtgccgagattgcagcc

SEQ ID NO: 94519 - DNA, 20 bp, synthetic construct
  source 1..20: mol_type = other DNA
caaagtgccgagattgcagc

SEQ ID NO: 94520 - DNA, 20 bp, synthetic construct
  source 1..20: mol_type = other DNA
ccaaagtgccgagattgcag

SEQ ID NO: 94521 - DNA, 20 bp, synthetic construct
  source 1..20: mol_type = other DNA
cccaaagtgccgagattgca

SEQ ID NO: 94522 - DNA, 20 bp, synthetic construct
  source 1..20: mol_type = other DNA
tcccaaagtgccgagattgc

SEQ ID NO: 94523 - DNA, 20 bp, synthetic construct
  source 1..20: mol_type = other DNA
ctcccaaagtgccgagattg

SEQ ID NO: 94524 - DNA, 20 bp, synthetic construct
  source 1..20: mol_type = other DNA
cctcccaaagtgccgagatt

SEQ ID NO: 94525 - DNA, 20 bp, synthetic construct
  source 1..20: mol_type = other DNA
gcctcccaaagtgccgagat

SEQ ID NO: 94526 - DNA, 20 bp, synthetic construct
  source 1..20: mol_type = other DNA
ggcctcccaaagtgccgaga

SEQ ID NO: 94527 - DNA, 20 bp, synthetic construct
  source 1..20: mol_type = other DNA
tggcctcccaaagtgccgag

SEQ ID NO: 94528 - DNA, 20 bp, synthetic construct
  source 1..20: mol_type = other DNA
ttggcctcccaaagtgccga

SEQ ID NO: 94529 - DNA, 20 bp, synthetic construct
  source 1..20: mol_type = other DNA
cttggcctcccaaagtgccg

SEQ ID NO: 94530 - DNA, 20 bp, synthetic construct
  source 1..20: mol_type = other DNA
ccttggcctcccaaagtgcc

SEQ ID NO: 94531 - DNA, 20 bp, synthetic construct
  source 1..20: mol_type = other DNA
gccttggcctcccaaagtgc

SEQ ID NO: 94532 - DNA, 20 bp, synthetic construct
  source 1..20: mol_type = other DNA
tgccttggcctcccaaagtg

SEQ ID NO: 94533 - DNA, 20 bp, synthetic construct
  source 1..20: mol_type = other DNA
ctgccttggcctcccaaagt

SEQ ID NO: 94534 - DNA, 20 bp, synthetic construct
  source 1..20: mol_type = other DNA
cctgccttggcctcccaaag

SEQ ID NO: 94535 - DNA, 20 bp, synthetic construct
  source 1..20: mol_type = other DNA
acctgccttggcctcccaaa

SEQ ID NO: 94536 - DNA, 20 bp, synthetic construct
  source 1..20: mol_type = other DNA
cacctgccttggcctcccaa

SEQ ID NO: 94537 - DNA, 20 bp, synthetic construct
  source 1..20: mol_type = other DNA
ccacctgccttggcctccca

SEQ ID NO: 94538 - DNA, 20 bp, synthetic construct
  source 1..20: mol_type = other DNA
gccacctgccttggcctccc

SEQ ID NO: 94539 - DNA, 20 bp, synthetic construct
  source 1..20: mol_type = other DNA
agccacctgccttggcctcc

SEQ ID NO: 94540 - DNA, 20 bp, synthetic construct
  source 1..20: mol_type = other DNA
cagccacctgccttggcctc

SEQ ID NO: 94541 - DNA, 20 bp, synthetic construct
  source 1..20: mol_type = other DNA
ccagccacctgccttggcct

SEQ ID NO: 94542 - DNA, 20 bp, synthetic construct
  source 1..20: mol_type = other DNA
cccagccacctgccttggcc

SEQ ID NO: 94543 - DNA, 20 bp, synthetic construct
  source 1..20: mol_type = other DNA
tcccagccacctgccttggc

SEQ ID NO: 94544 - DNA, 20 bp, synthetic construct
  source 1..20: mol_type = other DNA
ctcccagccacctgccttgg

SEQ ID NO: 94545 - DNA, 20 bp, synthetic construct
  source 1..20: mol_type = other DNA
cctcccagccacctgccttg

SEQ ID NO: 94546 - DNA, 20 bp, synthetic construct
  source 1..20: mol_type = other DNA
acctcccagccacctgcctt

SEQ ID NO: 94547 - DNA, 20 bp, synthetic construct
  source 1..20: mol_type = other DNA
cacctcccagccacctgcct

SEQ ID NO: 94548 - DNA, 20 bp, synthetic construct
  source 1..20: mol_type = other DNA
ccacctcccagccacctgcc

SEQ ID NO: 94549 - DNA, 20 bp, synthetic construct
  source 1..20: mol_type = other DNA
tccacctcccagccacctgc

SEQ ID NO: 94550 - DNA, 20 bp, synthetic construct
  source 1..20: mol_type = other DNA
ctccacctcccagccacctg

SEQ ID NO: 94551 - DNA, 20 bp, synthetic construct
  source 1..20: mol_type = other DNA
cctccacctcccagccacct

SEQ ID NO: 94552 - DNA, 20 bp, synthetic construct
  source 1..20: mol_type = other DNA
acctccacctcccagccacc

SEQ ID NO: 94553 - DNA, 20 bp, synthetic construct
  source 1..20: mol_type = other DNA
aacctccacctcccagccac

SEQ ID NO: 94554 - DNA, 20 bp, synthetic construct
  source 1..20: mol_type = other DNA
caacctccacctcccagcca

SEQ ID NO: 94555 - DNA, 20 bp, synthetic construct
  source 1..20: mol_type = other DNA
acaacctccacctcccagcc

SEQ ID NO: 94556 - DNA, 20 bp, synthetic construct
  source 1..20: mol_type = other DNA
tacaacctccacctcccagc

SEQ ID NO: 94557 - DNA, 20 bp, synthetic construct
  source 1..20: mol_type = other DNA
ctacaacctccacctcccag

SEQ ID NO: 94558 - DNA, 20 bp, synthetic construct
  source 1..20: mol_type = other DNA
gctacaacctccacctccca

SEQ ID NO: 94559 - DNA, 20 bp, synthetic construct
  source 1..20: mol_type = other DNA
cgctacaacctccacctccc

SEQ ID NO: 94560 - DNA, 20 bp, synthetic construct
  source 1..20: mol_type = other DNA
tcgctacaacctccacctcc

SEQ ID NO: 94561 - DNA, 20 bp, synthetic construct
  source 1..20: mol_type = other DNA
ctcgctacaacctccacctc

SEQ ID NO: 94562 - DNA, 20 bp, synthetic construct
  source 1..20: mol_type = other DNA
gctcgctacaacctccacct

SEQ ID NO: 94563 - DNA, 20 bp, synthetic construct
  source 1..20: mol_type = other DNA
ggctcgctacaacctccacc

SEQ ID NO: 94564 - DNA, 20 bp, synthetic construct
  source 1..20: mol_type = other DNA
cggctcgctacaacctccac

SEQ ID NO: 94565 - DNA, 20 bp, synthetic construct
  source 1..20: mol_type = other DNA
tcggctcgctacaacctcca

SEQ ID NO: 94566 - DNA, 20 bp, synthetic construct
  source 1..20: mol_type = other DNA
ctcggctcgctacaacctcc

SEQ ID NO: 94567 - DNA, 20 bp, synthetic construct
  source 1..20: mol_type = other DNA
tctcggctcgctacaacctc

SEQ ID NO: 94568 - DNA, 20 bp, synthetic construct
  source 1..20: mol_type = other DNA
atctcggctcgctacaacct

SEQ ID NO: 94569 - DNA, 20 bp, synthetic construct
  source 1..20: mol_type = other DNA
gatctcggctcgctacaacc

SEQ ID NO: 94570 - DNA, 20 bp, synthetic construct
  source 1..20: mol_type = other DNA
tgatctcggctcgctacaac

SEQ ID NO: 94571 - DNA, 20 bp, synthetic construct
  source 1..20: mol_type = other DNA
gtgatctcggctcgctacaa

SEQ ID NO: 94572 - DNA, 20 bp, synthetic construct
  source 1..20: mol_type = other DNA
cgtgatctcggctcgctaca

SEQ ID NO: 94573 - DNA, 20 bp, synthetic construct
  source 1..20: mol_type = other DNA
gcgtgatctcggctcgctac

SEQ ID NO: 94574 - DNA, 20 bp, synthetic construct
  source 1..20: mol_type = other DNA
ggcgtgatctcggctcgcta

SEQ ID NO: 94575 - DNA, 20 bp, synthetic construct
  source 1..20: mol_type = other DNA
tggcgtgatctcggctcgct

SEQ ID NO: 94576 - DNA, 20 bp, synthetic construct
  source 1..20: mol_type = other DNA
gtggcgtgatctcggctcgc

SEQ ID NO: 94577 - DNA, 20 bp, synthetic construct
  source 1..20: mol_type = other DNA
agtggcgtgatctcggctcg

SEQ ID NO: 94578 - DNA, 20 bp, synthetic construct
  source 1..20: mol_type = other DNA
cagtggcgtgatctcggctc

SEQ ID NO: 94579 - DNA, 20 bp, synthetic construct
  source 1..20: mol_type = other DNA
gcagtggcgtgatctcggct

SEQ ID NO: 94580 - DNA, 20 bp, synthetic construct
  source 1..20: mol_type = other DNA
tgcagtggcgtgatctcggc

SEQ ID NO: 94581 - DNA, 20 bp, synthetic construct
  source 1..20: mol_type = other DNA
gtgcagtggcgtgatctcgg

SEQ ID NO: 94582 - DNA, 20 bp, synthetic construct
  source 1..20: mol_type = other DNA
agtgcagtggcgtgatctcg

SEQ ID NO: 94583 - DNA, 20 bp, synthetic construct
  source 1..20: mol_type = other DNA
gagtgcagtggcgtgatctc

SEQ ID NO: 94584 - DNA, 20 bp, synthetic construct
  source 1..20: mol_type = other DNA
ggagtgcagtggcgtgatct

SEQ ID NO: 94585 - DNA, 20 bp, synthetic construct
  source 1..20: mol_type = other DNA
tggagtgcagtggcgtgatc

SEQ ID NO: 94586 - DNA, 20 bp, synthetic construct
  source 1..20: mol_type = other DNA
ctggagtgcagtggcgtgat

SEQ ID NO: 94587 - DNA, 20 bp, synthetic construct
  source 1..20: mol_type = other DNA
gctggagtgcagtggcgtga

SEQ ID NO: 94588 - DNA, 20 bp, synthetic construct
  source 1..20: mol_type = other DNA
ggctggagtgcagtggcgtg

SEQ ID NO: 94589 - DNA, 20 bp, synthetic construct
  source 1..20: mol_type = other DNA
aggctggagtgcagtggcgt

SEQ ID NO: 94590 - DNA, 20 bp, synthetic construct
  source 1..20: mol_type = other DNA
caggctggagtgcagtggcg

SEQ ID NO: 94591 - DNA, 20 bp, synthetic construct
  source 1..20: mol_type = other DNA
ccaggctggagtgcagtggc

SEQ ID NO: 94592 - DNA, 20 bp, synthetic construct
  source 1..20: mol_type = other DNA
cccaggctggagtgcagtgg

SEQ ID NO: 94593 - DNA, 20 bp, synthetic construct
  source 1..20: mol_type = other DNA
gcccaggctggagtgcagtg

SEQ ID NO: 94594 - DNA, 20 bp, synthetic construct
  source 1..20: mol_type = other DNA
tgcccaggctggagtgcagt

SEQ ID NO: 94595 - DNA, 20 bp, synthetic construct
  source 1..20: mol_type = other DNA
gtgcccaggctggagtgcag

SEQ ID NO: 94596 - DNA, 20 bp, synthetic construct
  source 1..20: mol_type = other DNA
ggtgcccaggctggagtgca

SEQ ID NO: 94597 - DNA, 20 bp, synthetic construct
  source 1..20: mol_type = other DNA
tggtgcccaggctggagtgc

SEQ ID NO: 94598 - DNA, 20 bp, synthetic construct
  source 1..20: mol_type = other DNA
atggtgcccaggctggagtg

SEQ ID NO: 94599 - DNA, 20 bp, synthetic construct
  source 1..20: mol_type = other DNA
aatggtgcccaggctggagt

SEQ ID NO: 94600 - DNA, 20 bp, synthetic construct
  source 1..20: mol_type = other DNA
caatggtgcccaggctggag

SEQ ID NO: 94601 - DNA, 20 bp, synthetic construct
  source 1..20: mol_type = other DNA
tcaatggtgcccaggctgga

SEQ ID NO: 94602 - DNA, 20 bp, synthetic construct
  source 1..20: mol_type = other DNA
ctcaatggtgcccaggctgg

SEQ ID NO: 94603 - DNA, 20 bp, synthetic construct
  source 1..20: mol_type = other DNA
gctcaatggtgcccaggctg

SEQ ID NO: 94604 - DNA, 20 bp, synthetic construct
  source 1..20: mol_type = other DNA
tgctcaatggtgcccaggct

SEQ ID NO: 94605 - DNA, 20 bp, synthetic construct
  source 1..20: mol_type = other DNA
gtgctcaatggtgcccaggc

SEQ ID NO: 94606 - DNA, 20 bp, synthetic construct
  source 1..20: mol_type = other DNA
agtgctcaatggtgcccagg

SEQ ID NO: 94607 - DNA, 20 bp, synthetic construct
  source 1..20: mol_type = other DNA
cagtgctcaatggtgcccag

SEQ ID NO: 94608 - DNA, 20 bp, synthetic construct
  source 1..20: mol_type = other DNA
tcagtgctcaatggtgccca

SEQ ID NO: 94609 - DNA, 20 bp, synthetic construct
  source 1..20: mol_type = other DNA
ctcagtgctcaatggtgccc

SEQ ID NO: 94610 - DNA, 20 bp, synthetic construct
  source 1..20: mol_type = other DNA
actcagtgctcaatggtgcc

SEQ ID NO: 94611 - DNA, 20 bp, synthetic construct
  source 1..20: mol_type = other DNA
cactcagtgctcaatggtgc

SEQ ID NO: 94612 - DNA, 20 bp, synthetic construct
  source 1..20: mol_type = other DNA
tcactcagtgctcaatggtg

SEQ ID NO: 94613 - DNA, 20 bp, synthetic construct
  source 1..20: mol_type = other DNA
ttcactcagtgctcaatggt

SEQ ID NO: 94614 - DNA, 20 bp, synthetic construct
  source 1..20: mol_type = other DNA
gttcactcagtgctcaatgg

SEQ ID NO: 94615 - DNA, 20 bp, synthetic construct
  source 1..20: mol_type = other DNA
cgttcactcagtgctcaatg

SEQ ID NO: 94616 - DNA, 20 bp, synthetic construct
  source 1..20: mol_type = other DNA
tcgttcactcagtgctcaat

SEQ ID NO: 94617 - DNA, 20 bp, synthetic construct
  source 1..20: mol_type = other DNA
ctcgttcactcagtgctcaa

SEQ ID NO: 94618 - DNA, 20 bp, synthetic construct
  source 1..20: mol_type = other DNA
tctcgttcactcagtgctca

SEQ ID NO: 94619 - DNA, 20 bp, synthetic construct
  source 1..20: mol_type = other DNA
gtctcgttcactcagtgctc

SEQ ID NO: 94620 - DNA, 20 bp, synthetic construct
  source 1..20: mol_type = other DNA
agtctcgttcactcagtgct

SEQ ID NO: 94621 - DNA, 20 bp, synthetic construct
  source 1..20: mol_type = other DNA
gagtctcgttcactcagtgc

SEQ ID NO: 94622 - DNA, 20 bp, synthetic construct
  source 1..20: mol_type = other DNA
ggagtctcgttcactcagtg

SEQ ID NO: 94623 - DNA, 20 bp, synthetic construct
  source 1..20: mol_type = other DNA
cggagtctcgttcactcagt

SEQ ID NO: 94624 - DNA, 20 bp, synthetic construct
  source 1..20: mol_type = other DNA
acggagtctcgttcactcag

SEQ ID NO: 94625 - DNA, 20 bp, synthetic construct
  source 1..20: mol_type = other DNA
gacggagtctcgttcactca

SEQ ID NO: 94626 - DNA, 20 bp, synthetic construct
  source 1..20: mol_type = other DNA
agacggagtctcgttcactc

SEQ ID NO: 94627 - DNA, 20 bp, synthetic construct
  source 1..20: mol_type = other DNA
cagacggagtctcgttcact

SEQ ID NO: 94628 - DNA, 20 bp, synthetic construct
  source 1..20: mol_type = other DNA
gcagacggagtctcgttcac

SEQ ID NO: 94629 - DNA, 20 bp, synthetic construct
  source 1..20: mol_type = other DNA
tgcagacggagtctcgttca

SEQ ID NO: 94630 - DNA, 20 bp, synthetic construct
  source 1..20: mol_type = other DNA
ttgcagacggagtctcgttc

SEQ ID NO: 94631 - DNA, 20 bp, synthetic construct
  source 1..20: mol_type = other DNA
attgcagacggagtctcgtt

SEQ ID NO: 94632 - DNA, 20 bp, synthetic construct
  source 1..20: mol_type = other DNA
gattgcagacggagtctcgt

SEQ ID NO: 94633 - DNA, 20 bp, synthetic construct
  source 1..20: mol_type = other DNA
ggattgcagacggagtctcg

SEQ ID NO: 94634 - DNA, 20 bp, synthetic construct
  source 1..20: mol_type = other DNA
gggattgcagacggagtctc

SEQ ID NO: 94635 - DNA, 20 bp, synthetic construct
  source 1..20: mol_type = other DNA
cgggattgcagacggagtct

SEQ ID NO: 94636 - DNA, 20 bp, synthetic construct
  source 1..20: mol_type = other DNA
ccgggattgcagacggagtc

SEQ ID NO: 94637 - DNA, 20 bp, synthetic construct
  source 1..20: mol_type = other DNA
gccgggattgcagacggagt

SEQ ID NO: 94638 - DNA, 20 bp, synthetic construct
  source 1..20: mol_type = other DNA
tgccgggattgcagacggag

SEQ ID NO: 94639 - DNA, 20 bp, synthetic construct
  source 1..20: mol_type = other DNA
gtgccgggattgcagacgga

SEQ ID NO: 94640 - DNA, 20 bp, synthetic construct
  source 1..20: mol_type = other DNA
ggtgccgggattgcagacgg

SEQ ID NO: 94641 - DNA, 20 bp, synthetic construct
  source 1..20: mol_type = other DNA
aggtgccgggattgcagacg

SEQ ID NO: 94642 - DNA, 20 bp, synthetic construct
  source 1..20: mol_type = other DNA
gaggtgccgggattgcagac

SEQ ID NO: 94643 - DNA, 20 bp, synthetic construct
  source 1..20: mol_type = other DNA
cgaggtgccgggattgcaga

SEQ ID NO: 94644 - DNA, 20 bp, synthetic construct
  source 1..20: mol_type = other DNA
ccgaggtgccgggattgcag

SEQ ID NO: 94645 - DNA, 20 bp, synthetic construct
  source 1..20: mol_type = other DNA
cccgaggtgccgggattgca

SEQ ID NO: 94646 - DNA, 20 bp, synthetic construct
  source 1..20: mol_type = other DNA
tcccgaggtgccgggattgc

SEQ ID NO: 94647 - DNA, 20 bp, synthetic construct
  source 1..20: mol_type = other DNA
ctcccgaggtgccgggattg

SEQ ID NO: 94648 - DNA, 20 bp, synthetic construct
  source 1..20: mol_type = other DNA
cctcccgaggtgccgggatt

SEQ ID NO: 94649 - DNA, 20 bp, synthetic construct
  source 1..20: mol_type = other DNA
gcctcccgaggtgccgggat

SEQ ID NO: 94650 - DNA, 20 bp, synthetic construct
  source 1..20: mol_type = other DNA
ggcctcccgaggtgccggga

SEQ ID NO: 94651 - DNA, 20 bp, synthetic construct
  source 1..20: mol_type = other DNA
cggcctcccgaggtgccggg

SEQ ID NO: 94652 - DNA, 20 bp, synthetic construct
  source 1..20: mol_type = other DNA
tcggcctcccgaggtgccgg

SEQ ID NO: 94653 - DNA, 20 bp, synthetic construct
  source 1..20: mol_type = other DNA
ctcggcctcccgaggtgccg

SEQ ID NO: 94654 - DNA, 20 bp, synthetic construct
  source 1..20: mol_type = other DNA
cctcggcctcccgaggtgcc

SEQ ID NO: 94655 - DNA, 20 bp, synthetic construct
  source 1..20: mol_type = other DNA
gcctcggcctcccgaggtgc

SEQ ID NO: 94656 - DNA, 20 bp, synthetic construct
  source 1..20: mol_type = other DNA
agcctcggcctcccgaggtg

SEQ ID NO: 94657 - DNA, 20 bp, synthetic construct
  source 1..20: mol_type = other DNA
cagcctcggcctcccgaggt

SEQ ID NO: 94658 - DNA, 20 bp, synthetic construct
  source 1..20: mol_type = other DNA
ccagcctcggcctcccgagg

SEQ ID NO: 94659 - DNA, 20 bp, synthetic construct
  source 1..20: mol_type = other DNA
gccagcctcggcctcccgag

SEQ ID NO: 94660 - DNA, 20 bp, synthetic construct
  source 1..20: mol_type = other DNA
tgccagcctcggcctcccga

SEQ ID NO: 94661 - DNA, 20 bp, synthetic construct
  source 1..20: mol_type = other DNA
ctgccagcctcggcctcccg

SEQ ID NO: 94662 - DNA, 20 bp, synthetic construct
  source 1..20: mol_type = other DNA
tctgccagcctcggcctccc

SEQ ID NO: 94663 - DNA, 20 bp, synthetic construct
  source 1..20: mol_type = other DNA
atctgccagcctcggcctcc

SEQ ID NO: 94664 - DNA, 20 bp, synthetic construct
  source 1..20: mol_type = other DNA
gatctgccagcctcggcctc

SEQ ID NO: 94665 - DNA, 20 bp, synthetic construct
  source 1..20: mol_type = other DNA
tgatctgccagcctcggcct

SEQ ID NO: 94666 - DNA, 20 bp, synthetic construct
  source 1..20: mol_type = other DNA
gtgatctgccagcctcggcc

SEQ ID NO: 94667 - DNA, 20 bp, synthetic construct
  source 1..20: mol_type = other DNA
agtgatctgccagcctcggc

SEQ ID NO: 94668 - DNA, 20 bp, synthetic construct
  source 1..20: mol_type = other DNA
gagtgatctgccagcctcgg

SEQ ID NO: 94669 - DNA, 20 bp, synthetic construct
  source 1..20: mol_type = other DNA
cgagtgatctgccagcctcg

SEQ ID NO: 94670 - DNA, 20 bp, synthetic construct
  source 1..20: mol_type = other DNA
gcgagtgatctgccagcctc

SEQ ID NO: 94671 - DNA, 20 bp, synthetic construct
  source 1..20: mol_type = other DNA
cgcgagtgatctgccagcct

SEQ ID NO: 94672 - DNA, 20 bp, synthetic construct
  source 1..20: mol_type = other DNA
ccgcgagtgatctgccagcc

SEQ ID NO: 94673 - DNA, 20 bp, synthetic construct
  source 1..20: mol_type = other DNA
accgcgagtgatctgccagc

SEQ ID NO: 94674 - DNA, 20 bp, synthetic construct
  source 1..20: mol_type = other DNA
aaccgcgagtgatctgccag

SEQ ID NO: 94675 - DNA, 20 bp, synthetic construct
  source 1..20: mol_type = other DNA
taaccgcgagtgatctgcca

SEQ ID NO: 94676 - DNA, 20 bp, synthetic construct
  source 1..20: mol_type = other DNA
ctaaccgcgagtgatctgcc

SEQ ID NO: 94677 - DNA, 20 bp, synthetic construct
  source 1..20: mol_type = other DNA
cctaaccgcgagtgatctgc

SEQ ID NO: 94678 - DNA, 20 bp, synthetic construct
  source 1..20: mol_type = other DNA
tcctaaccgcgagtgatctg

SEQ ID NO: 94679 - DNA, 20 bp, synthetic construct
  source 1..20: mol_type = other DNA
ctcctaaccgcgagtgatct

SEQ ID NO: 94680 - DNA, 20 bp, synthetic construct
  source 1..20: mol_type = other DNA
gctcctaaccgcgagtgatc

SEQ ID NO: 94681 - DNA, 20 bp, synthetic construct
  source 1..20: mol_type = other DNA
agctcctaaccgcgagtgat

SEQ ID NO: 94682 - DNA, 20 bp, synthetic construct
  source 1..20: mol_type = other DNA
cagctcctaaccgcgagtga

SEQ ID NO: 94683 - DNA, 20 bp, synthetic construct
  source 1..20: mol_type = other DNA
ccagctcctaaccgcgagtg

SEQ ID NO: 94684 - DNA, 20 bp, synthetic construct
  source 1..20: mol_type = other DNA
tccagctcctaaccgcgagt

SEQ ID NO: 94685 - DNA, 20 bp, synthetic construct
  source 1..20: mol_type = other DNA
ctccagctcctaaccgcgag

SEQ ID NO: 94686 - DNA, 20 bp, synthetic construct
  source 1..20: mol_type = other DNA
tctccagctcctaaccgcga

SEQ ID NO: 94687 - DNA, 20 bp, synthetic construct
  source 1..20: mol_type = other DNA
gtctccagctcctaaccgcg

SEQ ID NO: 94688 - DNA, 20 bp, synthetic construct
  source 1..20: mol_type = other DNA
ggtctccagctcctaaccgc

SEQ ID NO: 94689 - DNA, 20 bp, synthetic construct
  source 1..20: mol_type = other DNA
tggtctccagctcctaaccg

SEQ ID NO: 94690 - DNA, 20 bp, synthetic construct
  source 1..20: mol_type = other DNA
ctggtctccagctcctaacc

SEQ ID NO: 94691 - DNA, 20 bp, synthetic construct
  source 1..20: mol_type = other DNA
gctggtctccagctcctaac

SEQ ID NO: 94692 - DNA, 20 bp, synthetic construct
  source 1..20: mol_type = other DNA
ggctggtctccagctcctaa

SEQ ID NO: 94693 - DNA, 20 bp, synthetic construct
  source 1..20: mol_type = other DNA
gggctggtctccagctccta

SEQ ID NO: 94694 - DNA, 20 bp, synthetic construct
  source 1..20: mol_type = other DNA
cgggctggtctccagctcct

SEQ ID NO: 94695 - DNA, 20 bp, synthetic construct
  source 1..20: mol_type = other DNA
ccgggctggtctccagctcc

SEQ ID NO: 94696 - DNA, 20 bp, synthetic construct
  source 1..20: mol_type = other DNA
gccgggctggtctccagctc

SEQ ID NO: 94697 - DNA, 20 bp, synthetic construct
  source 1..20: mol_type = other DNA
ggccgggctggtctccagct

SEQ ID NO: 94698 - DNA, 20 bp, synthetic construct
  source 1..20: mol_type = other DNA
tggccgggctggtctccagc

SEQ ID NO: 94699 - DNA, 20 bp, synthetic construct
  source 1..20: mol_type = other DNA
ttggccgggctggtctccag

SEQ ID NO: 94700 - DNA, 20 bp, synthetic construct
  source 1..20: mol_type = other DNA
gttggccgggctggtctcca

SEQ ID NO: 94701 - DNA, 20 bp, synthetic construct
  source 1..20: mol_type = other DNA
tgttggccgggctggtctcc

SEQ ID NO: 94702 - DNA, 20 bp, synthetic construct
  source 1..20: mol_type = other DNA
gtgttggccgggctggtctc

SEQ ID NO: 94703 - DNA, 20 bp, synthetic construct
  source 1..20: mol_type = other DNA
tgtgttggccgggctggtct

SEQ ID NO: 94704 - DNA, 20 bp, synthetic construct
  source 1..20: mol_type = other DNA
ctgtgttggccgggctggtc

SEQ ID NO: 94705 - DNA, 20 bp, synthetic construct
  source 1..20: mol_type = other DNA
gctgtgttggccgggctggt

SEQ ID NO: 94706 - DNA, 20 bp, synthetic construct
  source 1..20: mol_type = other DNA
cgctgtgttggccgggctgg

SEQ ID NO: 94707 - DNA, 20 bp, synthetic construct
  source 1..20: mol_type = other DNA
tcgctgtgttggccgggctg

SEQ ID NO: 94708 - DNA, 20 bp, synthetic construct
  source 1..20: mol_type = other DNA
ttcgctgtgttggccgggct

SEQ ID NO: 94709 - DNA, 20 bp, synthetic construct
  source 1..20: mol_type = other DNA
tttcgctgtgttggccgggc

SEQ ID NO: 94710 - DNA, 20 bp, synthetic construct
  source 1..20: mol_type = other DNA
gtttcgctgtgttggccggg

SEQ ID NO: 94711 - DNA, 20 bp, synthetic construct
  source 1..20: mol_type = other DNA
ggtttcgctgtgttggccgg

SEQ ID NO: 94712 - DNA, 20 bp, synthetic construct
  source 1..20: mol_type = other DNA
gggtttcgctgtgttggccg

SEQ ID NO: 94713 - DNA, 20 bp, synthetic construct
  source 1..20: mol_type = other DNA
ggggtttcgctgtgttggcc

SEQ ID NO: 94714 - DNA, 20 bp, synthetic construct
  source 1..20: mol_type = other DNA
cggggtttcgctgtgttggc

SEQ ID NO: 94715 - DNA, 20 bp, synthetic construct
  source 1..20: mol_type = other DNA
acggggtttcgctgtgttgg

SEQ ID NO: 94716 - DNA, 20 bp, synthetic construct
  source 1..20: mol_type = other DNA
gacggggtttcgctgtgttg

SEQ ID NO: 94717 - DNA, 20 bp, synthetic construct
  source 1..20: mol_type = other DNA
agacggggtttcgctgtgtt

SEQ ID NO: 94718 - DNA, 20 bp, synthetic construct
  source 1..20: mol_type = other DNA
gagacggggtttcgctgtgt

SEQ ID NO: 94719 - DNA, 20 bp, synthetic construct
  source 1..20: mol_type = other DNA
ggagacggggtttcgctgtg

SEQ ID NO: 94720 - DNA, 20 bp, synthetic construct
  source 1..20: mol_type = other DNA
tggagacggggtttcgctgt

SEQ ID NO: 94721 - DNA, 20 bp, synthetic construct
  source 1..20: mol_type = other DNA
gtggagacggggtttcgctg

SEQ ID NO: 94722 - DNA, 20 bp, synthetic construct
  source 1..20: mol_type = other DNA
ggtggagacggggtttcgct

SEQ ID NO: 94723 - DNA, 20 bp, synthetic construct
  source 1..20: mol_type = other DNA
tggtggagacggggtttcgc

SEQ ID NO: 94724 - DNA, 20 bp, synthetic construct
  source 1..20: mol_type = other DNA
ttggtggagacggggtttcg

SEQ ID NO: 94725 - DNA, 20 bp, synthetic construct
  source 1..20: mol_type = other DNA
tttggtggagacggggtttc

SEQ ID NO: 94726 - DNA, 20 bp, synthetic construct
  source 1..20: mol_type = other DNA
ttttggtggagacggggttt

SEQ ID NO: 94727 - DNA, 20 bp, synthetic construct
  source 1..20: mol_type = other DNA
tttttggtggagacggggtt

SEQ ID NO: 94728 - DNA, 20 bp, synthetic construct
  source 1..20: mol_type = other DNA
ttttttggtggagacggggt

SEQ ID NO: 94729 - DNA, 20 bp, synthetic construct
  source 1..20: mol_type = other DNA
tttttttggtggagacgggg

SEQ ID NO: 94730 - DNA, 20 bp, synthetic construct
  source 1..20: mol_type = other DNA
atttttttggtggagacggg

SEQ ID NO: 94731 - DNA, 20 bp, synthetic construct
  source 1..20: mol_type = other DNA
tatttttttggtggagacgg

SEQ ID NO: 94732 - DNA, 20 bp, synthetic construct
  source 1..20: mol_type = other DNA
gtatttttttggtggagacg

SEQ ID NO: 94733 - DNA, 20 bp, synthetic construct
  source 1..20: mol_type = other DNA
cgtatttttttggtggagac

SEQ ID NO: 94734 - DNA, 20 bp, synthetic construct
  source 1..20: mol_type = other DNA
tcgtatttttttggtggaga

SEQ ID NO: 94735 - DNA, 20 bp, synthetic construct
  source 1..20: mol_type = other DNA
ttcgtatttttttggtggag

SEQ ID NO: 94736 - DNA, 20 bp, synthetic construct
  source 1..20: mol_type = other DNA
tttcgtatttttttggtgga

SEQ ID NO: 94737 - DNA, 20 bp, synthetic construct
  source 1..20: mol_type = other DNA
ttttcgtatttttttggtgg

SEQ ID NO: 94738 - DNA, 20 bp, synthetic construct
  source 1..20: mol_type = other DNA
gttttcgtatttttttggtg

SEQ ID NO: 94739 - DNA, 20 bp, synthetic construct
  source 1..20: mol_type = other DNA
ggttttcgtatttttttggt

SEQ ID NO: 94740 - DNA, 20 bp, synthetic construct
  source 1..20: mol_type = other DNA
tggttttcgtatttttttgg

SEQ ID NO: 94741 - DNA, 20 bp, synthetic construct
  source 1..20: mol_type = other DNA
ctggttttcgtatttttttg

SEQ ID NO: 94742 - DNA, 20 bp, synthetic construct
  source 1..20: mol_type = other DNA
actggttttcgtattttttt

SEQ ID NO: 94743 - DNA, 20 bp, synthetic construct
  source 1..20: mol_type = other DNA
gactggttttcgtatttttt

SEQ ID NO: 94744 - DNA, 20 bp, synthetic construct
  source 1..20: mol_type = other DNA
tgactggttttcgtattttt

SEQ ID NO: 94745 - DNA, 20 bp, synthetic construct
  source 1..20: mol_type = other DNA
ctgactggttttcgtatttt

SEQ ID NO: 94746 - DNA, 20 bp, synthetic construct
  source 1..20: mol_type = other DNA
cctgactggttttcgtattt

SEQ ID NO: 94747 - DNA, 20 bp, synthetic construct
  source 1..20: mol_type = other DNA
gcctgactggttttcgtatt

SEQ ID NO: 94748 - DNA, 20 bp, synthetic construct
  source 1..20: mol_type = other DNA
cgcctgactggttttcgtat

SEQ ID NO: 94749 - DNA, 20 bp, synthetic construct
  source 1..20: mol_type = other DNA
acgcctgactggttttcgta

SEQ ID NO: 94750 - DNA, 20 bp, synthetic construct
  source 1..20: mol_type = other DNA
cacgcctgactggttttcgt

SEQ ID NO: 94751 - DNA, 20 bp, synthetic construct
  source 1..20: mol_type = other DNA
ccacgcctgactggttttcg

SEQ ID NO: 94752 - DNA, 20 bp, synthetic construct
  source 1..20: mol_type = other DNA
gccacgcctgactggttttc

SEQ ID NO: 94753 - DNA, 20 bp, synthetic construct
  source 1..20: mol_type = other DNA
cgccacgcctgactggtttt

SEQ ID NO: 94754 - DNA, 20 bp, synthetic construct
  source 1..20: mol_type = other DNA
ccgccacgcctgactggttt

SEQ ID NO: 94755 - DNA, 20 bp, synthetic construct
  source 1..20: mol_type = other DNA
gccgccacgcctgactggtt

SEQ ID NO: 94756 - DNA, 20 bp, synthetic construct
  source 1..20: mol_type = other DNA
cgccgccacgcctgactggt

SEQ ID NO: 94757 - DNA, 20 bp, synthetic construct
  source 1..20: mol_type = other DNA
gcgccgccacgcctgactgg

SEQ ID NO: 94758 - DNA, 20 bp, synthetic construct
  source 1..20: mol_type = other DNA
cgcgccgccacgcctgactg

SEQ ID NO: 94759 - DNA, 20 bp, synthetic construct
  source 1..20: mol_type = other DNA
ccgcgccgccacgcctgact

SEQ ID NO: 94760 - DNA, 20 bp, synthetic construct
  source 1..20: mol_type = other DNA
cccgcgccgccacgcctgac

SEQ ID NO: 94761 - DNA, 20 bp, synthetic construct
  source 1..20: mol_type = other DNA
gcccgcgccgccacgcctga

SEQ ID NO: 94762 - DNA, 20 bp, synthetic construct
  source 1..20: mol_type = other DNA
ggcccgcgccgccacgcctg

SEQ ID NO: 94763 - DNA, 20 bp, synthetic construct
  source 1..20: mol_type = other DNA
aggcccgcgccgccacgcct

SEQ ID NO: 94764 - DNA, 20 bp, synthetic construct
  source 1..20: mol_type = other DNA
caggcccgcgccgccacgcc

SEQ ID NO: 94765 - DNA, 20 bp, synthetic construct
  source 1..20: mol_type = other DNA
gcaggcccgcgccgccacgc

SEQ ID NO: 94766 - DNA, 20 bp, synthetic construct
  source 1..20: mol_type = other DNA
tgcaggcccgcgccgccacg

SEQ ID NO: 94767 - DNA, 20 bp, synthetic construct
  source 1..20: mol_type = other DNA
ttgcaggcccgcgccgccac

SEQ ID NO: 94768 - DNA, 20 bp, synthetic construct
  source 1..20: mol_type = other DNA
attgcaggcccgcgccgcca

SEQ ID NO: 94769 - DNA, 20 bp, synthetic construct
  source 1..20: mol_type = other DNA
gattgcaggcccgcgccgcc

SEQ ID NO: 94770 - DNA, 20 bp, synthetic construct
  source 1..20: mol_type = other DNA
tgattgcaggcccgcgccgc

SEQ ID NO: 94771 - DNA, 20 bp, synthetic construct
  source 1..20: mol_type = other DNA
gtgattgcaggcccgcgccg

SEQ ID NO: 94772 - DNA, 20 bp, synthetic construct
  source 1..20: mol_type = other DNA
tgtgattgcaggcccgcgcc

SEQ ID NO: 94773 - DNA, 20 bp, synthetic construct
  source 1..20: mol_type = other DNA
ctgtgattgcaggcccgcgc

SEQ ID NO: 94774 - DNA, 20 bp, synthetic construct
  source 1..20: mol_type = other DNA
cctgtgattgcaggcccgcg

SEQ ID NO: 94775 - DNA, 20 bp, synthetic construct
  source 1..20: mol_type = other DNA
gcctgtgattgcaggcccgc

SEQ ID NO: 94776 - DNA, 20 bp, synthetic construct
  source 1..20: mol_type = other DNA
tgcctgtgattgcaggcccg

SEQ ID NO: 94777 - DNA, 20 bp, synthetic construct
  source 1..20: mol_type = other DNA
gtgcctgtgattgcaggccc

SEQ ID NO: 94778 - DNA, 20 bp, synthetic construct
  source 1..20: mol_type = other DNA
agtgcctgtgattgcaggcc

SEQ ID NO: 94779 - DNA, 20 bp, synthetic construct
  source 1..20: mol_type = other DNA
tagtgcctgtgattgcaggc

SEQ ID NO: 94780 - DNA, 20 bp, synthetic construct
  source 1..20: mol_type = other DNA
ctagtgcctgtgattgcagg

SEQ ID NO: 94781 - DNA, 20 bp, synthetic construct
  source 1..20: mol_type = other DNA
cctagtgcctgtgattgcag

SEQ ID NO: 94782 - DNA, 20 bp, synthetic construct
  source 1..20: mol_type = other DNA
gcctagtgcctgtgattgca

SEQ ID NO: 94783 - DNA, 20 bp, synthetic construct
  source 1..20: mol_type = other DNA
tgcctagtgcctgtgattgc

SEQ ID NO: 94784 - DNA, 20 bp, synthetic construct
  source 1..20: mol_type = other DNA
ctgcctagtgcctgtgattg

SEQ ID NO: 94785 - DNA, 20 bp, synthetic construct
  source 1..20: mol_type = other DNA
cctgcctagtgcctgtgatt

SEQ ID NO: 94786 - DNA, 20 bp, synthetic construct
  source 1..20: mol_type = other DNA
gcctgcctagtgcctgtgat

SEQ ID NO: 94787 - DNA, 20 bp, synthetic construct
  source 1..20: mol_type = other DNA
agcctgcctagtgcctgtga

SEQ ID NO: 94788 - DNA, 20 bp, synthetic construct
  source 1..20: mol_type = other DNA
cagcctgcctagtgcctgtg

SEQ ID NO: 94789 - DNA, 20 bp, synthetic construct
  source 1..20: mol_type = other DNA
tcagcctgcctagtgcctgt

SEQ ID NO: 94790 - DNA, 20 bp, synthetic construct
  source 1..20: mol_type = other DNA
ctcagcctgcctagtgcctg

SEQ ID NO: 94791 - DNA, 20 bp, synthetic construct
  source 1..20: mol_type = other DNA
cctcagcctgcctagtgcct

SEQ ID NO: 94792 - DNA, 20 bp, synthetic construct
  source 1..20: mol_type = other DNA
gcctcagcctgcctagtgcc

SEQ ID NO: 94793 - DNA, 20 bp, synthetic construct
  source 1..20: mol_type = other DNA
tgcctcagcctgcctagtgc

SEQ ID NO: 94794 - DNA, 20 bp, synthetic construct
  source 1..20: mol_type = other DNA
ctgcctcagcctgcctagtg

SEQ ID NO: 94795 - DNA, 20 bp, synthetic construct
  source 1..20: mol_type = other DNA
cctgcctcagcctgcctagt

SEQ ID NO: 94796 - DNA, 20 bp, synthetic construct
  source 1..20: mol_type = other DNA
tcctgcctcagcctgcctag

SEQ ID NO: 94797 - DNA, 20 bp, synthetic construct
  source 1..20: mol_type = other DNA
ctcctgcctcagcctgccta

SEQ ID NO: 94798 - DNA, 20 bp, synthetic construct
  source 1..20: mol_type = other DNA
tctcctgcctcagcctgcct

SEQ ID NO: 94799 - DNA, 20 bp, synthetic construct
  source 1..20: mol_type = other DNA
ttctcctgcctcagcctgcc

SEQ ID NO: 94800 - DNA, 20 bp, synthetic construct
  source 1..20: mol_type = other DNA
attctcctgcctcagcctgc

SEQ ID NO: 94801 - DNA, 20 bp, synthetic construct
  source 1..20: mol_type = other DNA
gattctcctgcctcagcctg

SEQ ID NO: 94802 - DNA, 20 bp, synthetic construct
  source 1..20: mol_type = other DNA
tgattctcctgcctcagcct

SEQ ID NO: 94803 - DNA, 20 bp, synthetic construct
  source 1..20: mol_type = other DNA
ctgattctcctgcctcagcc

SEQ ID NO: 94804 - DNA, 20 bp, synthetic construct
  source 1..20: mol_type = other DNA
cctgattctcctgcctcagc

SEQ ID NO: 94805 - DNA, 20 bp, synthetic construct
  source 1..20: mol_type = other DNA
gcctgattctcctgcctcag

SEQ ID NO: 94806 - DNA, 20 bp, synthetic construct
  source 1..20: mol_type = other DNA
tgcctgattctcctgcctca

SEQ ID NO: 94807 - DNA, 20 bp, synthetic construct
  source 1..20: mol_type = other DNA
ctgcctgattctcctgcctc

SEQ ID NO: 94808 - DNA, 20 bp, synthetic construct
  source 1..20: mol_type = other DNA
cctgcctgattctcctgcct

SEQ ID NO: 94809 - DNA, 20 bp, synthetic construct
  source 1..20: mol_type = other DNA
ccctgcctgattctcctgcc

SEQ ID NO: 94810 - DNA, 20 bp, synthetic construct
  source 1..20: mol_type = other DNA
tccctgcctgattctcctgc

SEQ ID NO: 94811 - DNA, 20 bp, synthetic construct
  source 1..20: mol_type = other DNA
ctccctgcctgattctcctg

SEQ ID NO: 94812 - DNA, 20 bp, synthetic construct
  source 1..20: mol_type = other DNA
cctccctgcctgattctcct

SEQ ID NO: 94813 - DNA, 20 bp, synthetic construct
  source 1..20: mol_type = other DNA
acctccctgcctgattctcc

SEQ ID NO: 94814 - DNA, 20 bp, synthetic construct
  source 1..20: mol_type = other DNA
aacctccctgcctgattctc

SEQ ID NO: 94815 - DNA, 20 bp, synthetic construct
  source 1..20: mol_type = other DNA
caacctccctgcctgattct

SEQ ID NO: 94816 - DNA, 20 bp, synthetic construct
  source 1..20: mol_type = other DNA
gcaacctccctgcctgattc

SEQ ID NO: 94817 - DNA, 20 bp, synthetic construct
  source 1..20: mol_type = other DNA
tgcaacctccctgcctgatt

SEQ ID NO: 94818 - DNA, 20 bp, synthetic construct
  source 1..20: mol_type = other DNA
ctgcaacctccctgcctgat

SEQ ID NO: 94819 - DNA, 20 bp, synthetic construct
  source 1..20: mol_type = other DNA
actgcaacctccctgcctga

SEQ ID NO: 94820 - DNA, 20 bp, synthetic construct
  source 1..20: mol_type = other DNA
cactgcaacctccctgcctg

SEQ ID NO: 94821 - DNA, 20 bp, synthetic construct
  source 1..20: mol_type = other DNA
tcactgcaacctccctgcct

SEQ ID NO: 94822 - DNA, 20 bp, synthetic construct
  source 1..20: mol_type = other DNA
ctcactgcaacctccctgcc

SEQ ID NO: 94823 - DNA, 20 bp, synthetic construct
  source 1..20: mol_type = other DNA
gctcactgcaacctccctgc

SEQ ID NO: 94824 - DNA, 20 bp, synthetic construct
  source 1..20: mol_type = other DNA
ggctcactgcaacctccctg

SEQ ID NO: 94825 - DNA, 20 bp, synthetic construct
  source 1..20: mol_type = other DNA
cggctcactgcaacctccct

SEQ ID NO: 94826 - DNA, 20 bp, synthetic construct
  source 1..20: mol_type = other DNA
tcggctcactgcaacctccc

SEQ ID NO: 94827 - DNA, 20 bp, synthetic construct
  source 1..20: mol_type = other DNA
ctcggctcactgcaacctcc

SEQ ID NO: 94828 - DNA, 20 bp, synthetic construct
  source 1..20: mol_type = other DNA
tctcggctcactgcaacctc

SEQ ID NO: 94829 - DNA, 20 bp, synthetic construct
  source 1..20: mol_type = other DNA
atctcggctcactgcaacct

SEQ ID NO: 94830 - DNA, 20 bp, synthetic construct
  source 1..20: mol_type = other DNA
catctcggctcactgcaacc

SEQ ID NO: 94831 - DNA, 20 bp, synthetic construct
  source 1..20: mol_type = other DNA
ccatctcggctcactgcaac

SEQ ID NO: 94832 - DNA, 20 bp, synthetic construct
  source 1..20: mol_type = other DNA
gccatctcggctcactgcaa

SEQ ID NO: 94833 - DNA, 20 bp, synthetic construct
  source 1..20: mol_type = other DNA
tgccatctcggctcactgca

SEQ ID NO: 94834 - DNA, 20 bp, synthetic construct
  source 1..20: mol_type = other DNA
ctgccatctcggctcactgc

SEQ ID NO: 94835 - DNA, 20 bp, synthetic construct
  source 1..20: mol_type = other DNA
gctgccatctcggctcactg

SEQ ID NO: 94836 - DNA, 20 bp, synthetic construct
  source 1..20: mol_type = other DNA
tgctgccatctcggctcact

SEQ ID NO: 94837 - DNA, 20 bp, synthetic construct
  source 1..20: mol_type = other DNA
ctgctgccatctcggctcac

SEQ ID NO: 94838 - DNA, 20 bp, synthetic construct
  source 1..20: mol_type = other DNA
actgctgccatctcggctca

SEQ ID NO: 94839 - DNA, 20 bp, synthetic construct
  source 1..20: mol_type = other DNA
tactgctgccatctcggctc

SEQ ID NO: 94840 - DNA, 20 bp, synthetic construct
  source 1..20: mol_type = other DNA
gtactgctgccatctcggct

SEQ ID NO: 94841 - DNA, 20 bp, synthetic construct
  source 1..20: mol_type = other DNA
tgtactgctgccatctcggc

SEQ ID NO: 94842 - DNA, 20 bp, synthetic construct
  source 1..20: mol_type = other DNA
ctgtactgctgccatctcgg

SEQ ID NO: 94843 - DNA, 20 bp, synthetic construct
  source 1..20: mol_type = other DNA
actgtactgctgccatctcg

SEQ ID NO: 94844 - DNA, 20 bp, synthetic construct
  source 1..20: mol_type = other DNA
gactgtactgctgccatctc

SEQ ID NO: 94845 - DNA, 20 bp, synthetic construct
  source 1..20: mol_type = other DNA
agactgtactgctgccatct

SEQ ID NO: 94846 - DNA, 20 bp, synthetic construct
  source 1..20: mol_type = other DNA
tagactgtactgctgccatc

SEQ ID NO: 94847 - DNA, 20 bp, synthetic construct
  source 1..20: mol_type = other DNA
ctagactgtactgctgccat

SEQ ID NO: 94848 - DNA, 20 bp, synthetic construct
  source 1..20: mol_type = other DNA
gctagactgtactgctgcca

SEQ ID NO: 94849 - DNA, 20 bp, synthetic construct
  source 1..20: mol_type = other DNA
agctagactgtactgctgcc

SEQ ID NO: 94850 - DNA, 20 bp, synthetic construct
  source 1..20: mol_type = other DNA
aagctagactgtactgctgc

SEQ ID NO: 94851 - DNA, 20 bp, synthetic construct
  source 1..20: mol_type = other DNA
gaagctagactgtactgctg

SEQ ID NO: 94852 - DNA, 20 bp, synthetic construct
  source 1..20: mol_type = other DNA
cgaagctagactgtactgct

SEQ ID NO: 94853 - DNA, 20 bp, synthetic construct
  source 1..20: mol_type = other DNA
ccgaagctagactgtactgc

SEQ ID NO: 94854 - DNA, 20 bp, synthetic construct
  source 1..20: mol_type = other DNA
gccgaagctagactgtactg

SEQ ID NO: 94855 - DNA, 20 bp, synthetic construct
  source 1..20: mol_type = other DNA
agccgaagctagactgtact

SEQ ID NO: 94856 - DNA, 20 bp, synthetic construct
  source 1..20: mol_type = other DNA
gagccgaagctagactgtac

SEQ ID NO: 94857 - DNA, 20 bp, synthetic construct
  source 1..20: mol_type = other DNA
cgagccgaagctagactgta

SEQ ID NO: 94858 - DNA, 20 bp, synthetic construct
  source 1..20: mol_type = other DNA
ccgagccgaagctagactgt

SEQ ID NO: 94859 - DNA, 20 bp, synthetic construct
  source 1..20: mol_type = other DNA
gccgagccgaagctagactg

SEQ ID NO: 94860 - DNA, 20 bp, synthetic construct
  source 1..20: mol_type = other DNA
tgccgagccgaagctagact

SEQ ID NO: 94861 - DNA, 20 bp, synthetic construct
  source 1..20: mol_type = other DNA
atgccgagccgaagctagac

SEQ ID NO: 94862 - DNA, 20 bp, synthetic construct
  source 1..20: mol_type = other DNA
gatgccgagccgaagctaga

SEQ ID NO: 94863 - DNA, 20 bp, synthetic construct
  source 1..20: mol_type = other DNA
tgatgccgagccgaagctag

SEQ ID NO: 94864 - DNA, 20 bp, synthetic construct
  source 1..20: mol_type = other DNA
ctgatgccgagccgaagcta

SEQ ID NO: 94865 - DNA, 20 bp, synthetic construct
  source 1..20: mol_type = other DNA
tctgatgccgagccgaagct

SEQ ID NO: 94866 - DNA, 20 bp, synthetic construct
  source 1..20: mol_type = other DNA
ctctgatgccgagccgaagc

SEQ ID NO: 94867 - DNA, 20 bp, synthetic construct
  source 1..20: mol_type = other DNA
cctctgatgccgagccgaag

SEQ ID NO: 94868 - DNA, 20 bp, synthetic construct
  source 1..20: mol_type = other DNA
ccctctgatgccgagccgaa

SEQ ID NO: 94869 - DNA, 20 bp, synthetic construct
  source 1..20: mol_type = other DNA
tccctctgatgccgagccga

SEQ ID NO: 94870 - DNA, 20 bp, synthetic construct
  source 1..20: mol_type = other DNA
ctccctctgatgccgagccg

SEQ ID NO: 94871 - DNA, 20 bp, synthetic construct
  source 1..20: mol_type = other DNA
tctccctctgatgccgagcc

SEQ ID NO: 94872 - DNA, 20 bp, synthetic construct
  source 1..20: mol_type = other DNA
gtctccctctgatgccgagc

SEQ ID NO: 94873 - DNA, 20 bp, synthetic construct
  source 1..20: mol_type = other DNA
ggtctccctctgatgccgag

SEQ ID NO: 94874 - DNA, 20 bp, synthetic construct
  source 1..20: mol_type = other DNA
cggtctccctctgatgccga

SEQ ID NO: 94875 - DNA, 20 bp, synthetic construct
  source 1..20: mol_type = other DNA
acggtctccctctgatgccg

SEQ ID NO: 94876 - DNA, 20 bp, synthetic construct
  source 1..20: mol_type = other DNA
cacggtctccctctgatgcc

SEQ ID NO: 94877 - DNA, 20 bp, synthetic construct
  source 1..20: mol_type = other DNA
ccacggtctccctctgatgc

SEQ ID NO: 94878 - DNA, 20 bp, synthetic construct
  source 1..20: mol_type = other DNA
tccacggtctccctctgatg

SEQ ID NO: 94879 - DNA, 20 bp, synthetic construct
  source 1..20: mol_type = other DNA
ttccacggtctccctctgat

SEQ ID NO: 94880 - DNA, 20 bp, synthetic construct
  source 1..20: mol_type = other DNA
tttccacggtctccctctga

SEQ ID NO: 94881 - DNA, 20 bp, synthetic construct
  source 1..20: mol_type = other DNA
ctttccacggtctccctctg

SEQ ID NO: 94882 - DNA, 20 bp, synthetic construct
  source 1..20: mol_type = other DNA
tctttccacggtctccctct

SEQ ID NO: 94883 - DNA, 20 bp, synthetic construct
  source 1..20: mol_type = other DNA
ctctttccacggtctccctc

SEQ ID NO: 94884 - DNA, 20 bp, synthetic construct
  source 1..20: mol_type = other DNA
tctctttccacggtctccct

SEQ ID NO: 94885 - DNA, 20 bp, synthetic construct
  source 1..20: mol_type = other DNA
ctctctttccacggtctccc

SEQ ID NO: 94886 - DNA, 20 bp, synthetic construct
  source 1..20: mol_type = other DNA
cctctctttccacggtctcc

SEQ ID NO: 94887 - DNA, 20 bp, synthetic construct
  source 1..20: mol_type = other DNA
ccctctctttccacggtctc

SEQ ID NO: 94888 - DNA, 20 bp, synthetic construct
  source 1..20: mol_type = other DNA
tccctctctttccacggtct

SEQ ID NO: 94889 - DNA, 20 bp, synthetic construct
  source 1..20: mol_type = other DNA
ctccctctctttccacggtc

SEQ ID NO: 94890 - DNA, 20 bp, synthetic construct
  source 1..20: mol_type = other DNA
tctccctctctttccacggt

SEQ ID NO: 94891 - DNA, 20 bp, synthetic construct
  source 1..20: mol_type = other DNA
ctctccctctctttccacgg

SEQ ID NO: 94892 - DNA, 20 bp, synthetic construct
  source 1..20: mol_type = other DNA
cctctccctctctttccacg

SEQ ID NO: 94893 - DNA, 20 bp, synthetic construct
  source 1..20: mol_type = other DNA
ccctctccctctctttccac

SEQ ID NO: 94894 - DNA, 20 bp, synthetic construct
  source 1..20: mol_type = other DNA
tccctctccctctctttcca

SEQ ID NO: 94895 - DNA, 20 bp, synthetic construct
  source 1..20: mol_type = other DNA
ctccctctccctctctttcc

SEQ ID NO: 94896 - DNA, 20 bp, synthetic construct
  source 1..20: mol_type = other DNA
tctccctctccctctctttc

SEQ ID NO: 94897 - DNA, 20 bp, synthetic construct
  source 1..20: mol_type = other DNA
gtctccctctccctctcttt

SEQ ID NO: 94898 - DNA, 20 bp, synthetic construct
  source 1..20: mol_type = other DNA
ggtctccctctccctctctt

SEQ ID NO: 94899 - DNA, 20 bp, synthetic construct
  source 1..20: mol_type = other DNA
cggtctccctctccctctct

SEQ ID NO: 94900 - DNA, 20 bp, synthetic construct
  source 1..20: mol_type = other DNA
acggtctccctctccctctc

SEQ ID NO: 94901 - DNA, 20 bp, synthetic construct
  source 1..20: mol_type = other DNA
cacggtctccctctccctct

SEQ ID NO: 94902 - DNA, 20 bp, synthetic construct
  source 1..20: mol_type = other DNA
ccacggtctccctctccctc

SEQ ID NO: 94903 - DNA, 20 bp, synthetic construct
  source 1..20: mol_type = other DNA
cccacggtctccctctccct

SEQ ID NO: 94904 - DNA, 20 bp, synthetic construct
  source 1..20: mol_type = other DNA
ccccacggtctccctctccc

SEQ ID NO: 94905 - DNA, 20 bp, synthetic construct
  source 1..20: mol_type = other DNA
tccccacggtctccctctcc

SEQ ID NO: 94906 - DNA, 20 bp, synthetic construct
  source 1..20: mol_type = other DNA
ctccccacggtctccctctc

SEQ ID NO: 94907 - DNA, 20 bp, synthetic construct
  source 1..20: mol_type = other DNA
tctccccacggtctccctct

SEQ ID NO: 94908 - DNA, 20 bp, synthetic construct
  source 1..20: mol_type = other DNA
ttctccccacggtctccctc

SEQ ID NO: 94909 - DNA, 20 bp, synthetic construct
  source 1..20: mol_type = other DNA
cttctccccacggtctccct

SEQ ID NO: 94910 - DNA, 20 bp, synthetic construct
  source 1..20: mol_type = other DNA
ccttctccccacggtctccc

SEQ ID NO: 94911 - DNA, 20 bp, synthetic construct
  source 1..20: mol_type = other DNA
tccttctccccacggtctcc

SEQ ID NO: 94912 - DNA, 20 bp, synthetic construct
  source 1..20: mol_type = other DNA
ctccttctccccacggtctc

SEQ ID NO: 94913 - DNA, 20 bp, synthetic construct
  source 1..20: mol_type = other DNA
tctccttctccccacggtct

SEQ ID NO: 94914 - DNA, 20 bp, synthetic construct
  source 1..20: mol_type = other DNA
ttctccttctccccacggtc

SEQ ID NO: 94915 - DNA, 20 bp, synthetic construct
  source 1..20: mol_type = other DNA
cttctccttctccccacggt

SEQ ID NO: 94916 - DNA, 20 bp, synthetic construct
  source 1..20: mol_type = other DNA
ccttctccttctccccacgg

SEQ ID NO: 94917 - DNA, 20 bp, synthetic construct
  source 1..20: mol_type = other DNA
tccttctccttctccccacg

SEQ ID NO: 94918 - DNA, 20 bp, synthetic construct
  source 1..20: mol_type = other DNA
ctccttctccttctccccac

SEQ ID NO: 94919 - DNA, 20 bp, synthetic construct
  source 1..20: mol_type = other DNA
cctccttctccttctcccca

SEQ ID NO: 94920 - DNA, 20 bp, synthetic construct
  source 1..20: mol_type = other DNA
ccctccttctccttctcccc

SEQ ID NO: 94921 - DNA, 20 bp, synthetic construct
  source 1..20: mol_type = other DNA
cccctccttctccttctccc

SEQ ID NO: 94922 - DNA, 20 bp, synthetic construct
  source 1..20: mol_type = other DNA
ccccctccttctccttctcc

SEQ ID NO: 94923 - DNA, 20 bp, synthetic construct
  source 1..20: mol_type = other DNA
tccccctccttctccttctc

SEQ ID NO: 94924 - DNA, 20 bp, synthetic construct
  source 1..20: mol_type = other DNA
ctccccctccttctccttct

SEQ ID NO: 94925 - DNA, 20 bp, synthetic construct
  source 1..20: mol_type = other DNA
cctccccctccttctccttc

SEQ ID NO: 94926 - DNA, 20 bp, synthetic construct
  source 1..20: mol_type = other DNA
ccctccccctccttctcctt

SEQ ID NO: 94927 - DNA, 20 bp, synthetic construct
  source 1..20: mol_type = other DNA
cccctccccctccttctcct

SEQ ID NO: 94928 - DNA, 20 bp, synthetic construct
  source 1..20: mol_type = other DNA
ccccctccccctccttctcc

SEQ ID NO: 94929 - DNA, 20 bp, synthetic construct
  source 1..20: mol_type = other DNA
tccccctccccctccttctc

SEQ ID NO: 94930 - DNA, 20 bp, synthetic construct
  source 1..20: mol_type = other DNA
ctccccctccccctccttct

SEQ ID NO: 94931 - DNA, 20 bp, synthetic construct
  source 1..20: mol_type = other DNA
cctccccctccccctccttc

SEQ ID NO: 94932 - DNA, 20 bp, synthetic construct
  source 1..20: mol_type = other DNA
ccctccccctccccctcctt

SEQ ID NO: 94933 - DNA, 20 bp, synthetic construct
  source 1..20: mol_type = other DNA
cccctccccctccccctcct

SEQ ID NO: 94934 - DNA, 20 bp, synthetic construct
  source 1..20: mol_type = other DNA
ccccctccccctccccctcc

SEQ ID NO: 94935 - DNA, 20 bp, synthetic construct
  source 1..20: mol_type = other DNA
cccccctccccctccccctc

SEQ ID NO: 94936 - DNA, 20 bp, synthetic construct
  source 1..20: mol_type = other DNA
ccccccctccccctccccct

SEQ ID NO: 94937 - DNA, 20 bp, synthetic construct
  source 1..20: mol_type = other DNA
tccccccctccccctccccc

SEQ ID NO: 94938 - DNA, 20 bp, synthetic construct
  source 1..20: mol_type = other DNA
ctccccccctccccctcccc

SEQ ID NO: 94939 - DNA, 20 bp, synthetic construct
  source 1..20: mol_type = other DNA
tctccccccctccccctccc

SEQ ID NO: 94940 - DNA, 20 bp, synthetic construct
  source 1..20: mol_type = other DNA
ctctccccccctccccctcc

SEQ ID NO: 94941 - DNA, 20 bp, synthetic construct
  source 1..20: mol_type = other DNA
cctctccccccctccccctc

SEQ ID NO: 94942 - DNA, 20 bp, synthetic construct
  source 1..20: mol_type = other DNA
ccctctccccccctccccct

SEQ ID NO: 94943 - DNA, 20 bp, synthetic construct
  source 1..20: mol_type = other DNA
tccctctccccccctccccc

SEQ ID NO: 94944 - DNA, 20 bp, synthetic construct
  source 1..20: mol_type = other DNA
ctccctctccccccctcccc

SEQ ID NO: 94945 - DNA, 20 bp, synthetic construct
  source 1..20: mol_type = other DNA
tctccctctccccccctccc

SEQ ID NO: 94946 - DNA, 20 bp, synthetic construct
  source 1..20: mol_type = other DNA
ctctccctctccccccctcc

SEQ ID NO: 94947 - DNA, 20 bp, synthetic construct
  source 1..20: mol_type = other DNA
cctctccctctccccccctc

SEQ ID NO: 94948 - DNA, 20 bp, synthetic construct
  source 1..20: mol_type = other DNA
ccctctccctctccccccct

SEQ ID NO: 94949 - DNA, 20 bp, synthetic construct
  source 1..20: mol_type = other DNA
tccctctccctctccccccc

SEQ ID NO: 94950 - DNA, 20 bp, synthetic construct
  source 1..20: mol_type = other DNA
gtccctctccctctcccccc

SEQ ID NO: 94951 - DNA, 20 bp, synthetic construct
  source 1..20: mol_type = other DNA
tgtccctctccctctccccc

SEQ ID NO: 94952 - DNA, 20 bp, synthetic construct
  source 1..20: mol_type = other DNA
ttgtccctctccctctcccc

SEQ ID NO: 94953 - DNA, 20 bp, synthetic construct
  source 1..20: mol_type = other DNA
attgtccctctccctctccc

SEQ ID NO: 94954 - DNA, 20 bp, synthetic construct
  source 1..20: mol_type = other DNA
cattgtccctctccctctcc

SEQ ID NO: 94955 - DNA, 20 bp, synthetic construct
  source 1..20: mol_type = other DNA
tcattgtccctctccctctc

SEQ ID NO: 94956 - DNA, 20 bp, synthetic construct
  source 1..20: mol_type = other DNA
atcattgtccctctccctct

SEQ ID NO: 94957 - DNA, 20 bp, synthetic construct
  source 1..20: mol_type = other DNA
catcattgtccctctccctc

SEQ ID NO: 94958 - DNA, 20 bp, synthetic construct
  source 1..20: mol_type = other DNA
acatcattgtccctctccct

SEQ ID NO: 94959 - DNA, 20 bp, synthetic construct
  source 1..20: mol_type = other DNA
gacatcattgtccctctccc

SEQ ID NO: 94960 - DNA, 20 bp, synthetic construct
  source 1..20: mol_type = other DNA
agacatcattgtccctctcc

SEQ ID NO: 94961 - DNA, 20 bp, synthetic construct
  source 1..20: mol_type = other DNA
aagacatcattgtccctctc

SEQ ID NO: 94962 - DNA, 20 bp, synthetic construct
  source 1..20: mol_type = other DNA
caagacatcattgtccctct

SEQ ID NO: 94963 - DNA, 20 bp, synthetic construct
  source 1..20: mol_type = other DNA
gcaagacatcattgtccctc

SEQ ID NO: 94964 - DNA, 20 bp, synthetic construct
  source 1..20: mol_type = other DNA
agcaagacatcattgtccct

SEQ ID NO: 94965 - DNA, 20 bp, synthetic construct
  source 1..20: mol_type = other DNA
cagcaagacatcattgtccc

SEQ ID NO: 94966 - DNA, 20 bp, synthetic construct
  source 1..20: mol_type = other DNA
acagcaagacatcattgtcc

SEQ ID NO: 94967 - DNA, 20 bp, synthetic construct
  source 1..20: mol_type = other DNA
tacagcaagacatcattgtc

SEQ ID NO: 94968 - DNA, 20 bp, synthetic construct
  source 1..20: mol_type = other DNA
ctacagcaagacatcattgt

SEQ ID NO: 94969 - DNA, 20 bp, synthetic construct
  source 1..20: mol_type = other DNA
cctacagcaagacatcattg

SEQ ID NO: 94970 - DNA, 20 bp, synthetic construct
  source 1..20: mol_type = other DNA
acctacagcaagacatcatt

SEQ ID NO: 94971 - DNA, 20 bp, synthetic construct
  source 1..20: mol_type = other DNA
tacctacagcaagacatcat

SEQ ID NO: 94972 - DNA, 20 bp, synthetic construct
  source 1..20: mol_type = other DNA
atacctacagcaagacatca

SEQ ID NO: 94973 - DNA, 20 bp, synthetic construct
  source 1..20: mol_type = other DNA
aatacctacagcaagacatc

SEQ ID NO: 94974 - DNA, 20 bp, synthetic construct
  source 1..20: mol_type = other DNA
gaatacctacagcaagacat

SEQ ID NO: 94975 - DNA, 20 bp, synthetic construct
  source 1..20: mol_type = other DNA
agaatacctacagcaagaca

SEQ ID NO: 94976 - DNA, 20 bp, synthetic construct
  source 1..20: mol_type = other DNA
aagaatacctacagcaagac

SEQ ID NO: 94977 - DNA, 20 bp, synthetic construct
  source 1..20: mol_type = other DNA
gaagaatacctacagcaaga

SEQ ID NO: 94978 - DNA, 20 bp, synthetic construct
  source 1..20: mol_type = other DNA
ggaagaatacctacagcaag

SEQ ID NO: 94979 - DNA, 20 bp, synthetic construct
  source 1..20: mol_type = other DNA
gggaagaatacctacagcaa

SEQ ID NO: 94980 - DNA, 20 bp, synthetic construct
  source 1..20: mol_type = other DNA
ggggaagaatacctacagca

SEQ ID NO: 94981 - DNA, 20 bp, synthetic construct
  source 1..20: mol_type = other DNA
tggggaagaatacctacagc

SEQ ID NO: 94982 - DNA, 20 bp, synthetic construct
  source 1..20: mol_type = other DNA
atggggaagaatacctacag

SEQ ID NO: 94983 - DNA, 20 bp, synthetic construct
  source 1..20: mol_type = other DNA
aatggggaagaatacctaca

SEQ ID NO: 94984 - DNA, 20 bp, synthetic construct
  source 1..20: mol_type = other DNA
aaatggggaagaatacctac

SEQ ID NO: 94985 - DNA, 20 bp, synthetic construct
  source 1..20: mol_type = other DNA
caaatggggaagaataccta

SEQ ID NO: 94986 - DNA, 20 bp, synthetic construct
  source 1..20: mol_type = other DNA
tcaaatggggaagaatacct

SEQ ID NO: 94987 - DNA, 20 bp, synthetic construct
  source 1..20: mol_type = other DNA
ttcaaatggggaagaatacc

SEQ ID NO: 94988 - DNA, 20 bp, synthetic construct
  source 1..20: mol_type = other DNA
attcaaatggggaagaatac

SEQ ID NO: 94989 - DNA, 20 bp, synthetic construct
  source 1..20: mol_type = other DNA
aattcaaatggggaagaata

SEQ ID NO: 94990 - DNA, 20 bp, synthetic construct
  source 1..20: mol_type = other DNA
aaattcaaatggggaagaat

SEQ ID NO: 94991 - DNA, 20 bp, synthetic construct
  source 1..20: mol_type = other DNA
aaaattcaaatggggaagaa

SEQ ID NO: 94992 - DNA, 20 bp, synthetic construct
  source 1..20: mol_type = other DNA
aaaaattcaaatggggaaga

SEQ ID NO: 94993 - DNA, 20 bp, synthetic construct
  source 1..20: mol_type = other DNA
aaaaaattcaaatggggaag

SEQ ID NO: 94994 - DNA, 20 bp, synthetic construct
  source 1..20: mol_type = other DNA
gaaaaaattcaaatggggaa

SEQ ID NO: 94995 - DNA, 20 bp, synthetic construct
  source 1..20: mol_type = other DNA
ggaaaaaattcaaatgggga

SEQ ID NO: 94996 - DNA, 20 bp, synthetic construct
  source 1..20: mol_type = other DNA
aggaaaaaattcaaatgggg

SEQ ID NO: 94997 - DNA, 20 bp, synthetic construct
  source 1..20: mol_type = other DNA
gaggaaaaaattcaaatggg

SEQ ID NO: 94998 - DNA, 20 bp, synthetic construct
  source 1..20: mol_type = other DNA
tgaggaaaaaattcaaatgg

SEQ ID NO: 94999 - DNA, 20 bp, synthetic construct
  source 1..20: mol_type = other DNA
ctgaggaaaaaattcaaatg

SEQ ID NO: 95000 - DNA, 20 bp, synthetic construct
  source 1..20: mol_type = other DNA
gctgaggaaaaaattcaaat

SEQ ID NO: 95001 - DNA, 20 bp, synthetic construct
  source 1..20: mol_type = other DNA
tgctgaggaaaaaattcaaa

SEQ ID NO: 95002 - DNA, 20 bp, synthetic construct
  source 1..20: mol_type = other DNA
atgctgaggaaaaaattcaa

SEQ ID NO: 95003 - DNA, 20 bp, synthetic construct
  source 1..20: mol_type = other DNA
aatgctgaggaaaaaattca

SEQ ID NO: 95004 - DNA, 20 bp, synthetic construct
  source 1..20: mol_type = other DNA
taatgctgaggaaaaaattc

SEQ ID NO: 95005 - DNA, 20 bp, synthetic construct
  source 1..20: mol_type = other DNA
ataatgctgaggaaaaaatt

SEQ ID NO: 95006 - DNA, 20 bp, synthetic construct
  source 1..20: mol_type = other DNA
aataatgctgaggaaaaaat

SEQ ID NO: 95007 - DNA, 20 bp, synthetic construct
  source 1..20: mol_type = other DNA
aaataatgctgaggaaaaaa

SEQ ID NO: 95008 - DNA, 20 bp, synthetic construct
  source 1..20: mol_type = other DNA
aaaataatgctgaggaaaaa

SEQ ID NO: 95009 - DNA, 20 bp, synthetic construct
  source 1..20: mol_type = other DNA
aaaaataatgctgaggaaaa

SEQ ID NO: 95010 - DNA, 20 bp, synthetic construct
  source 1..20: mol_type = other DNA
aaaaaataatgctgaggaaa

SEQ ID NO: 95011 - DNA, 20 bp, synthetic construct
  source 1..20: mol_type = other DNA
aaaaaaataatgctgaggaa

SEQ ID NO: 95012 - DNA, 20 bp, synthetic construct
  source 1..20: mol_type = other DNA
aaaaaaaataatgctgagga

SEQ ID NO: 95013 - DNA, 20 bp, synthetic construct
  source 1..20: mol_type = other DNA
taaaaaaaataatgctgagg

SEQ ID NO: 95014 - DNA, 20 bp, synthetic construct
  source 1..20: mol_type = other DNA
ttaaaaaaaataatgctgag

SEQ ID NO: 95015 - DNA, 20 bp, synthetic construct
  source 1..20: mol_type = other DNA
gttaaaaaaaataatgctga

SEQ ID NO: 95016 - DNA, 20 bp, synthetic construct
  source 1..20: mol_type = other DNA
tgttaaaaaaaataatgctg

SEQ ID NO: 95017 - DNA, 20 bp, synthetic construct
  source 1..20: mol_type = other DNA
atgttaaaaaaaataatgct

SEQ ID NO: 95018 - DNA, 20 bp, synthetic construct
  source 1..20: mol_type = other DNA
gatgttaaaaaaaataatgc

SEQ ID NO: 95019 - DNA, 20 bp, synthetic construct
  source 1..20: mol_type = other DNA
tgatgttaaaaaaaataatg

SEQ ID NO: 95020 - DNA, 20 bp, synthetic construct
  source 1..20: mol_type = other DNA
atgatgttaaaaaaaataat

SEQ ID NO: 95021 - DNA, 20 bp, synthetic construct
  source 1..20: mol_type = other DNA
aatgatgttaaaaaaaataa

SEQ ID NO: 95022 - DNA, 20 bp, synthetic construct
  source 1..20: mol_type = other DNA
gaatgatgttaaaaaaaata

SEQ ID NO: 95023 - DNA, 20 bp, synthetic construct
  source 1..20: mol_type = other DNA
tgaatgatgttaaaaaaaat

SEQ ID NO: 95024 - DNA, 20 bp, synthetic construct
  source 1..20: mol_type = other DNA
ctgaatgatgttaaaaaaaa

SEQ ID NO: 95025 - DNA, 20 bp, synthetic construct
  source 1..20: mol_type = other DNA
actgaatgatgttaaaaaaa

SEQ ID NO: 95026 - DNA, 20 bp, synthetic construct
  source 1..20: mol_type = other DNA
gactgaatgatgttaaaaaa

SEQ ID NO: 95027 - DNA, 20 bp, synthetic construct
  source 1..20: mol_type = other DNA
agactgaatgatgttaaaaa

SEQ ID NO: 95028 - DNA, 20 bp, synthetic construct
  source 1..20: mol_type = other DNA
gagactgaatgatgttaaaa

SEQ ID NO: 95029 - DNA, 20 bp, synthetic construct
  source 1..20: mol_type = other DNA
ggagactgaatgatgttaaa

SEQ ID NO: 95030 - DNA, 20 bp, synthetic construct
  source 1..20: mol_type = other DNA
aggagactgaatgatgttaa

SEQ ID NO: 95031 - DNA, 20 bp, synthetic construct
  source 1..20: mol_type = other DNA
gaggagactgaatgatgtta

SEQ ID NO: 95032 - DNA, 20 bp, synthetic construct
  source 1..20: mol_type = other DNA
agaggagactgaatgatgtt

SEQ ID NO: 95033 - DNA, 20 bp, synthetic construct
  source 1..20: mol_type = other DNA
aagaggagactgaatgatgt

SEQ ID NO: 95034 - DNA, 20 bp, synthetic construct
  source 1..20: mol_type = other DNA
taagaggagactgaatgatg

SEQ ID NO: 95035 - DNA, 20 bp, synthetic construct
  source 1..20: mol_type = other DNA
ataagaggagactgaatgat

SEQ ID NO: 95036 - DNA, 20 bp, synthetic construct
  source 1..20: mol_type = other DNA
tataagaggagactgaatga

SEQ ID NO: 95037 - DNA, 20 bp, synthetic construct
  source 1..20: mol_type = other DNA
gtataagaggagactgaatg

SEQ ID NO: 95038 - DNA, 20 bp, synthetic construct
  source 1..20: mol_type = other DNA
agtataagaggagactgaat

SEQ ID NO: 95039 - DNA, 20 bp, synthetic construct
  source 1..20: mol_type = other DNA
tagtataagaggagactgaa

SEQ ID NO: 95040 - DNA, 20 bp, synthetic construct
  source 1..20: mol_type = other DNA
gtagtataagaggagactga

SEQ ID NO: 95041 - DNA, 20 bp, synthetic construct
  source 1..20: mol_type = other DNA
tgtagtataagaggagactg

SEQ ID NO: 95042 - DNA, 20 bp, synthetic construct
  source 1..20: mol_type = other DNA
gtgtagtataagaggagact

SEQ ID NO: 95043 - DNA, 20 bp, synthetic construct
  source 1..20: mol_type = other DNA
agtgtagtataagaggagac

SEQ ID NO: 95044 - DNA, 20 bp, synthetic construct
  source 1..20: mol_type = other DNA
aagtgtagtataagaggaga

SEQ ID NO: 95045 - DNA, 20 bp, synthetic construct
  source 1..20: mol_type = other DNA
caagtgtagtataagaggag

SEQ ID NO: 95046 - DNA, 20 bp, synthetic construct
  source 1..20: mol_type = other DNA
ccaagtgtagtataagagga

SEQ ID NO: 95047 - DNA, 20 bp, synthetic construct
  source 1..20: mol_type = other DNA
tccaagtgtagtataagagg

SEQ ID NO: 95048 - DNA, 20 bp, synthetic construct
  source 1..20: mol_type = other DNA
atccaagtgtagtataagag

SEQ ID NO: 95049 - DNA, 20 bp, synthetic construct
  source 1..20: mol_type = other DNA
aatccaagtgtagtataaga

SEQ ID NO: 95050 - DNA, 20 bp, synthetic construct
  source 1..20: mol_type = other DNA
caatccaagtgtagtataag

SEQ ID NO: 95051 - DNA, 20 bp, synthetic construct
  source 1..20: mol_type = other DNA
tcaatccaagtgtagtataa

SEQ ID NO: 95052 - DNA, 20 bp, synthetic construct
  source 1..20: mol_type = other DNA
ttcaatccaagtgtagtata

SEQ ID NO: 95053 - DNA, 20 bp, synthetic construct
  source 1..20: mol_type = other DNA
attcaatccaagtgtagtat

SEQ ID NO: 95054 - DNA, 20 bp, synthetic construct
  source 1..20: mol_type = other DNA
aattcaatccaagtgtagta

SEQ ID NO: 95055 - DNA, 20 bp, synthetic construct
  source 1..20: mol_type = other DNA
aaattcaatccaagtgtagt

SEQ ID NO: 95056 - DNA, 20 bp, synthetic construct
  source 1..20: mol_type = other DNA
taaattcaatccaagtgtag

SEQ ID NO: 95057 - DNA, 20 bp, synthetic construct
  source 1..20: mol_type = other DNA
ttaaattcaatccaagtgta

SEQ ID NO: 95058 - DNA, 20 bp, synthetic construct
  source 1..20: mol_type = other DNA
attaaattcaatccaagtgt

SEQ ID NO: 95059 - DNA, 20 bp, synthetic construct
  source 1..20: mol_type = other DNA
tattaaattcaatccaagtg

SEQ ID NO: 95060 - DNA, 20 bp, synthetic construct
  source 1..20: mol_type = other DNA
atattaaattcaatccaagt

SEQ ID NO: 95061 - DNA, 20 bp, synthetic construct
  source 1..20: mol_type = other DNA
gatattaaattcaatccaag

SEQ ID NO: 95062 - DNA, 20 bp, synthetic construct
  source 1..20: mol_type = other DNA
agatattaaattcaatccaa

SEQ ID NO: 95063 - DNA, 20 bp, synthetic construct
  source 1..20: mol_type = other DNA
gagatattaaattcaatcca

SEQ ID NO: 95064 - DNA, 20 bp, synthetic construct
  source 1..20: mol_type = other DNA
tgagatattaaattcaatcc

SEQ ID NO: 95065 - DNA, 20 bp, synthetic construct
  source 1..20: mol_type = other DNA
atgagatattaaattcaatc

SEQ ID NO: 95066 - DNA, 20 bp, synthetic construct
  source 1..20: mol_type = other DNA
catgagatattaaattcaat

SEQ ID NO: 95067 - DNA, 20 bp, synthetic construct
  source 1..20: mol_type = other DNA
tcatgagatattaaattcaa

SEQ ID NO: 95068 - DNA, 20 bp, synthetic construct
  source 1..20: mol_type = other DNA
ttcatgagatattaaattca

SEQ ID NO: 95069 - DNA, 20 bp, synthetic construct
  source 1..20: mol_type = other DNA
cttcatgagatattaaattc

SEQ ID NO: 95070 - DNA, 20 bp, synthetic construct
  source 1..20: mol_type = other DNA
tcttcatgagatattaaatt

SEQ ID NO: 95071 - DNA, 20 bp, synthetic construct
  source 1..20: mol_type = other DNA
ttcttcatgagatattaaat

SEQ ID NO: 95072 - DNA, 20 bp, synthetic construct
  source 1..20: mol_type = other DNA
tttcttcatgagatattaaa

SEQ ID NO: 95073 - DNA, 20 bp, synthetic construct
  source 1..20: mol_type = other DNA
ttttcttcatgagatattaa

SEQ ID NO: 95074 - DNA, 20 bp, synthetic construct
  source 1..20: mol_type = other DNA
tttttcttcatgagatatta

SEQ ID NO: 95075 - DNA, 20 bp, synthetic construct
  source 1..20: mol_type = other DNA
ttttttcttcatgagatatt

SEQ ID NO: 95076 - DNA, 20 bp, synthetic construct
  source 1..20: mol_type = other DNA
gttttttcttcatgagatat

SEQ ID NO: 95077 - DNA, 20 bp, synthetic construct
  source 1..20: mol_type = other DNA
tgttttttcttcatgagata

SEQ ID NO: 95078 - DNA, 20 bp, synthetic construct
  source 1..20: mol_type = other DNA
atgttttttcttcatgagat

SEQ ID NO: 95079 - DNA, 20 bp, synthetic construct
  source 1..20: mol_type = other DNA
aatgttttttcttcatgaga

SEQ ID NO: 95080 - DNA, 20 bp, synthetic construct
  source 1..20: mol_type = other DNA
aaatgttttttcttcatgag

SEQ ID NO: 95081 - DNA, 20 bp, synthetic construct
  source 1..20: mol_type = other DNA
gaaatgttttttcttcatga

SEQ ID NO: 95082 - DNA, 20 bp, synthetic construct
  source 1..20: mol_type = other DNA
agaaatgttttttcttcatg

SEQ ID NO: 95083 - DNA, 20 bp, synthetic construct
  source 1..20: mol_type = other DNA
tagaaatgttttttcttcat

SEQ ID NO: 95084 - DNA, 20 bp, synthetic construct
  source 1..20: mol_type = other DNA
gtagaaatgttttttcttca

SEQ ID NO: 95085 - DNA, 20 bp, synthetic construct
  source 1..20: mol_type = other DNA
agtagaaatgttttttcttc

SEQ ID NO: 95086 - DNA, 20 bp, synthetic construct
  source 1..20: mol_type = other DNA
aagtagaaatgttttttctt

SEQ ID NO: 95087 - DNA, 20 bp, synthetic construct
  source 1..20: mol_type = other DNA
aaagtagaaatgttttttct

SEQ ID NO: 95088 - DNA, 20 bp, synthetic construct
  source 1..20: mol_type = other DNA
caaagtagaaatgttttttc

SEQ ID NO: 95089 - DNA, 20 bp, synthetic construct
  source 1..20: mol_type = other DNA
tcaaagtagaaatgtttttt

SEQ ID NO: 95090 - DNA, 20 bp, synthetic construct
  source 1..20: mol_type = other DNA
ttcaaagtagaaatgttttt

SEQ ID NO: 95091 - DNA, 20 bp, synthetic construct
  source 1..20: mol_type = other DNA
cttcaaagtagaaatgtttt

SEQ ID NO: 95092 - DNA, 20 bp, synthetic construct
  source 1..20: mol_type = other DNA
gcttcaaagtagaaatgttt

SEQ ID NO: 95093 - DNA, 20 bp, synthetic construct
  source 1..20: mol_type = other DNA
tgcttcaaagtagaaatgtt

SEQ ID NO: 95094 - DNA, 20 bp, synthetic construct
  source 1..20: mol_type = other DNA
atgcttcaaagtagaaatgt

SEQ ID NO: 95095 - DNA, 20 bp, synthetic construct
  source 1..20: mol_type = other DNA
catgcttcaaagtagaaatg

SEQ ID NO: 95096 - DNA, 20 bp, synthetic construct
  source 1..20: mol_type = other DNA
acatgcttcaaagtagaaat

SEQ ID NO: 95097 - DNA, 20 bp, synthetic construct
  source 1..20: mol_type = other DNA
cacatgcttcaaagtagaaa

SEQ ID NO: 95098 - DNA, 20 bp, synthetic construct
  source 1..20: mol_type = other DNA
tcacatgcttcaaagtagaa

SEQ ID NO: 95099 - DNA, 20 bp, synthetic construct
  source 1..20: mol_type = other DNA
ttcacatgcttcaaagtaga

SEQ ID NO: 95100 - DNA, 20 bp, synthetic construct
  source 1..20: mol_type = other DNA
attcacatgcttcaaagtag

SEQ ID NO: 95101 - DNA, 20 bp, synthetic construct
  source 1..20: mol_type = other DNA
aattcacatgcttcaaagta

SEQ ID NO: 95102 - DNA, 20 bp, synthetic construct
  source 1..20: mol_type = other DNA
taattcacatgcttcaaagt

SEQ ID NO: 95103 - DNA, 20 bp, synthetic construct
  source 1..20: mol_type = other DNA
ctaattcacatgcttcaaag

SEQ ID NO: 95104 - DNA, 20 bp, synthetic construct
  source 1..20: mol_type = other DNA
gctaattcacatgcttcaaa

SEQ ID NO: 95105 - DNA, 20 bp, synthetic construct
  source 1..20: mol_type = other DNA
tgctaattcacatgcttcaa

SEQ ID NO: 95106 - DNA, 20 bp, synthetic construct
  source 1..20: mol_type = other DNA
atgctaattcacatgcttca

SEQ ID NO: 95107 - DNA, 20 bp, synthetic construct
  source 1..20: mol_type = other DNA
catgctaattcacatgcttc

SEQ ID NO: 95108 - DNA, 20 bp, synthetic construct
  source 1..20: mol_type = other DNA
acatgctaattcacatgctt

SEQ ID NO: 95109 - DNA, 20 bp, synthetic construct
  source 1..20: mol_type = other DNA
aacatgctaattcacatgct

SEQ ID NO: 95110 - DNA, 20 bp, synthetic construct
  source 1..20: mol_type = other DNA
aaacatgctaattcacatgc

SEQ ID NO: 95111 - DNA, 20 bp, synthetic construct
  source 1..20: mol_type = other DNA
aaaacatgctaattcacatg

SEQ ID NO: 95112 - DNA, 20 bp, synthetic construct
  source 1..20: mol_type = other DNA
aaaaacatgctaattcacat

SEQ ID NO: 95113 - DNA, 20 bp, synthetic construct
  source 1..20: mol_type = other DNA
taaaaacatgctaattcaca

SEQ ID NO: 95114 - DNA, 20 bp, synthetic construct
  source 1..20: mol_type = other DNA
ataaaaacatgctaattcac

SEQ ID NO: 95115 - DNA, 20 bp, synthetic construct
  source 1..20: mol_type = other DNA
tataaaaacatgctaattca

SEQ ID NO: 95116 - DNA, 20 bp, synthetic construct
  source 1..20: mol_type = other DNA
ttataaaaacatgctaattc

SEQ ID NO: 95117 - DNA, 20 bp, synthetic construct
  source 1..20: mol_type = other DNA
gttataaaaacatgctaatt

SEQ ID NO: 95118 - DNA, 20 bp, synthetic construct
  source 1..20: mol_type = other DNA
tgttataaaaacatgctaat

SEQ ID NO: 95119 - DNA, 20 bp, synthetic construct
  source 1..20: mol_type = other DNA
ctgttataaaaacatgctaa

SEQ ID NO: 95120 - DNA, 20 bp, synthetic construct
  source 1..20: mol_type = other DNA
gctgttataaaaacatgcta

SEQ ID NO: 95121 - DNA, 20 bp, synthetic construct
  source 1..20: mol_type = other DNA
agctgttataaaaacatgct

SEQ ID NO: 95122 - DNA, 20 bp, synthetic construct
  source 1..20: mol_type = other DNA
aagctgttataaaaacatgc

SEQ ID NO: 95123 - DNA, 20 bp, synthetic construct
  source 1..20: mol_type = other DNA
aaagctgttataaaaacatg

SEQ ID NO: 95124 - DNA, 20 bp, synthetic construct
  source 1..20: mol_type = other DNA
taaagctgttataaaaacat

SEQ ID NO: 95125 - DNA, 20 bp, synthetic construct
  source 1..20: mol_type = other DNA
ataaagctgttataaaaaca

SEQ ID NO: 95126 - DNA, 20 bp, synthetic construct
  source 1..20: mol_type = other DNA
aataaagctgttataaaaac

SEQ ID NO: 95127 - DNA, 20 bp, synthetic construct
  source 1..20: mol_type = other DNA
caataaagctgttataaaaa

SEQ ID NO: 95128 - DNA, 20 bp, synthetic construct
  source 1..20: mol_type = other DNA
tcaataaagctgttataaaa

SEQ ID NO: 95129 - DNA, 20 bp, synthetic construct
  source 1..20: mol_type = other DNA
ctcaataaagctgttataaa

SEQ ID NO: 95130 - DNA, 20 bp, synthetic construct
  source 1..20: mol_type = other DNA
tctcaataaagctgttataa

SEQ ID NO: 95131 - DNA, 20 bp, synthetic construct
  source 1..20: mol_type = other DNA
atctcaataaagctgttata

SEQ ID NO: 95132 - DNA, 20 bp, synthetic construct
  source 1..20: mol_type = other DNA
tatctcaataaagctgttat

SEQ ID NO: 95133 - DNA, 20 bp, synthetic construct
  source 1..20: mol_type = other DNA
atatctcaataaagctgtta

SEQ ID NO: 95134 - DNA, 20 bp, synthetic construct
  source 1..20: mol_type = other DNA
tatatctcaataaagctgtt

SEQ ID NO: 95135 - DNA, 20 bp, synthetic construct
  source 1..20: mol_type = other DNA
ttatatctcaataaagctgt

SEQ ID NO: 95136 - DNA, 20 bp, synthetic construct
  source 1..20: mol_type = other DNA
attatatctcaataaagctg

SEQ ID NO: 95137 - DNA, 20 bp, synthetic construct
  source 1..20: mol_type = other DNA
aattatatctcaataaagct

SEQ ID NO: 95138 - DNA, 20 bp, synthetic construct
  source 1..20: mol_type = other DNA
aaattatatctcaataaagc

SEQ ID NO: 95139 - DNA, 20 bp, synthetic construct
  source 1..20: mol_type = other DNA
taaattatatctcaataaag

SEQ ID NO: 95140 - DNA, 20 bp, synthetic construct
  source 1..20: mol_type = other DNA
gtaaattatatctcaataaa

SEQ ID NO: 95141 - DNA, 20 bp, synthetic construct
  source 1..20: mol_type = other DNA
tgtaaattatatctcaataa

SEQ ID NO: 95142 - DNA, 20 bp, synthetic construct
  source 1..20: mol_type = other DNA
atgtaaattatatctcaata

SEQ ID NO: 95143 - DNA, 20 bp, synthetic construct
  source 1..20: mol_type = other DNA
tatgtaaattatatctcaat

SEQ ID NO: 95144 - DNA, 20 bp, synthetic construct
  source 1..20: mol_type = other DNA
atatgtaaattatatctcaa

SEQ ID NO: 95145 - DNA, 20 bp, synthetic construct
  source 1..20: mol_type = other DNA
tatatgtaaattatatctca

SEQ ID NO: 95146 - DNA, 20 bp, synthetic construct
  source 1..20: mol_type = other DNA
atatatgtaaattatatctc

SEQ ID NO: 95147 - DNA, 20 bp, synthetic construct
  source 1..20: mol_type = other DNA
tatatatgtaaattatatct

SEQ ID NO: 95148 - DNA, 20 bp, synthetic construct
  source 1..20: mol_type = other DNA
ttatatatgtaaattatatc

SEQ ID NO: 95149 - DNA, 20 bp, synthetic construct
  source 1..20: mol_type = other DNA
tttatatatgtaaattatat

SEQ ID NO: 95150 - DNA, 20 bp, synthetic construct
  source 1..20: mol_type = other DNA
atttatatatgtaaattata

SEQ ID NO: 95151 - DNA, 20 bp, synthetic construct
  source 1..20: mol_type = other DNA
tatttatatatgtaaattat

SEQ ID NO: 95152 - DNA, 20 bp, synthetic construct
  source 1..20: mol_type = other DNA
ttatttatatatgtaaatta

SEQ ID NO: 95153 - DNA, 20 bp, synthetic construct
  source 1..20: mol_type = other DNA
tttatttatatatgtaaatt

SEQ ID NO: 95154 - DNA, 20 bp, synthetic construct
  source 1..20: mol_type = other DNA
gtttatttatatatgtaaat

SEQ ID NO: 95155 - DNA, 20 bp, synthetic construct
  source 1..20: mol_type = other DNA
ggtttatttatatatgtaaa

SEQ ID NO: 95156 - DNA, 20 bp, synthetic construct
  source 1..20: mol_type = other DNA
cggtttatttatatatgtaa

SEQ ID NO: 95157 - DNA, 20 bp, synthetic construct
  source 1..20: mol_type = other DNA
acggtttatttatatatgta

SEQ ID NO: 95158 - DNA, 20 bp, synthetic construct
  source 1..20: mol_type = other DNA
aacggtttatttatatatgt

SEQ ID NO: 95159 - DNA, 20 bp, synthetic construct
  source 1..20: mol_type = other DNA
aaacggtttatttatatatg

SEQ ID NO: 95160 - DNA, 20 bp, synthetic construct
  source 1..20: mol_type = other DNA
taaacggtttatttatatat

SEQ ID NO: 95161 - DNA, 20 bp, synthetic construct
  source 1..20: mol_type = other DNA
ttaaacggtttatttatata

SEQ ID NO: 95162 - DNA, 20 bp, synthetic construct
  source 1..20: mol_type = other DNA
tttaaacggtttatttatat

SEQ ID NO: 95163 - DNA, 20 bp, synthetic construct
  source 1..20: mol_type = other DNA
ctttaaacggtttatttata

SEQ ID NO: 95164 - DNA, 20 bp, synthetic construct
  source 1..20: mol_type = other DNA
actttaaacggtttatttat

SEQ ID NO: 95165 - DNA, 20 bp, synthetic construct
  source 1..20: mol_type = other DNA
cactttaaacggtttattta

SEQ ID NO: 95166 - DNA, 20 bp, synthetic construct
  source 1..20: mol_type = other DNA
acactttaaacggtttattt

SEQ ID NO: 95167 - DNA, 20 bp, synthetic construct
  source 1..20: mol_type = other DNA
tacactttaaacggtttatt

SEQ ID NO: 95168 - DNA, 20 bp, synthetic construct
  source 1..20: mol_type = other DNA
atacactttaaacggtttat

SEQ ID NO: 95169 - DNA, 20 bp, synthetic construct
  source 1..20: mol_type = other DNA
tatacactttaaacggttta

SEQ ID NO: 95170 - DNA, 20 bp, synthetic construct
  source 1..20: mol_type = other DNA
ttatacactttaaacggttt

SEQ ID NO: 95171 - DNA, 20 bp, synthetic construct
  source 1..20: mol_type = other DNA
tttatacactttaaacggtt

SEQ ID NO: 95172 - DNA, 20 bp, synthetic construct
  source 1..20: mol_type = other DNA
atttatacactttaaacggt

SEQ ID NO: 95173 - DNA, 20 bp, synthetic construct
  source 1..20: mol_type = other DNA
gatttatacactttaaacgg

SEQ ID NO: 95174 - DNA, 20 bp, synthetic construct
  source 1..20: mol_type = other DNA
tgatttatacactttaaacg

SEQ ID NO: 95175 - DNA, 20 bp, synthetic construct
  source 1..20: mol_type = other DNA
ctgatttatacactttaaac

SEQ ID NO: 95176 - DNA, 20 bp, synthetic construct
  source 1..20: mol_type = other DNA
actgatttatacactttaaa

SEQ ID NO: 95177 - DNA, 20 bp, synthetic construct
  source 1..20: mol_type = other DNA
cactgatttatacactttaa

SEQ ID NO: 95178 - DNA, 20 bp, synthetic construct
  source 1..20: mol_type = other DNA
ccactgatttatacacttta

SEQ ID NO: 95179 - DNA, 20 bp, synthetic construct
  source 1..20: mol_type = other DNA
accactgatttatacacttt

SEQ ID NO: 95180 - DNA, 20 bp, synthetic construct
  source 1..20: mol_type = other DNA
aaccactgatttatacactt

SEQ ID NO: 95181 - DNA, 20 bp, synthetic construct
  source 1..20: mol_type = other DNA
aaaccactgatttatacact

SEQ ID NO: 95182 - DNA, 20 bp, synthetic construct
  source 1..20: mol_type = other DNA
aaaaccactgatttatacac

SEQ ID NO: 95183 - DNA, 20 bp, synthetic construct
  source 1..20: mol_type = other DNA
aaaaaccactgatttataca

SEQ ID NO: 95184 - DNA, 20 bp, synthetic construct
  source 1..20: mol_type = other DNA
taaaaaccactgatttatac

SEQ ID NO: 95185 - DNA, 20 bp, synthetic construct
  source 1..20: mol_type = other DNA
ttaaaaaccactgatttata

SEQ ID NO: 95186 - DNA, 20 bp, synthetic construct
  source 1..20: mol_type = other DNA
attaaaaaccactgatttat

SEQ ID NO: 95187 - DNA, 20 bp, synthetic construct
  source 1..20: mol_type = other DNA
cattaaaaaccactgattta

SEQ ID NO: 95188 - DNA, 20 bp, synthetic construct
  source 1..20: mol_type = other DNA
tcattaaaaaccactgattt

SEQ ID NO: 95189 - DNA, 20 bp, synthetic construct
  source 1..20: mol_type = other DNA
ctcattaaaaaccactgatt

SEQ ID NO: 95190 - DNA, 20 bp, synthetic construct
  source 1..20: mol_type = other DNA
tctcattaaaaaccactgat

SEQ ID NO: 95191 - DNA, 20 bp, synthetic construct
  source 1..20: mol_type = other DNA
atctcattaaaaaccactga

SEQ ID NO: 95192 - DNA, 20 bp, synthetic construct
  source 1..20: mol_type = other DNA
tatctcattaaaaaccactg

SEQ ID NO: 95193 - DNA, 20 bp, synthetic construct
  source 1..20: mol_type = other DNA
atatctcattaaaaaccact

SEQ ID NO: 95194 - DNA, 20 bp, synthetic construct
  source 1..20: mol_type = other DNA
tatatctcattaaaaaccac

SEQ ID NO: 95195 - DNA, 20 bp, synthetic construct
  source 1..20: mol_type = other DNA
ttatatctcattaaaaacca

SEQ ID NO: 95196 - DNA, 20 bp, synthetic construct
  source 1..20: mol_type = other DNA
attatatctcattaaaaacc

SEQ ID NO: 95197 - DNA, 20 bp, synthetic construct
  source 1..20: mol_type = other DNA
aattatatctcattaaaaac

SEQ ID NO: 95198 - DNA, 20 bp, synthetic construct
  source 1..20: mol_type = other DNA
aaattatatctcattaaaaa

SEQ ID NO: 95199 - DNA, 20 bp, synthetic construct
  source 1..20: mol_type = other DNA
taaattatatctcattaaaa

SEQ ID NO: 95200 - DNA, 20 bp, synthetic construct
  source 1..20: mol_type = other DNA
gtaaattatatctcattaaa

SEQ ID NO: 95201 - DNA, 20 bp, synthetic construct
  source 1..20: mol_type = other DNA
tgtaaattatatctcattaa

SEQ ID NO: 95202 - DNA, 20 bp, synthetic construct
  source 1..20: mol_type = other DNA
atgtaaattatatctcatta

SEQ ID NO: 95203 - DNA, 20 bp, synthetic construct
  source 1..20: mol_type = other DNA
tatgtaaattatatctcatt

SEQ ID NO: 95204 - DNA, 20 bp, synthetic construct
  source 1..20: mol_type = other DNA
atatgtaaattatatctcat

SEQ ID NO: 95205 - DNA, 20 bp, synthetic construct
  source 1..20: mol_type = other DNA
tatatgtaaattatatctca

SEQ ID NO: 95206 - DNA, 20 bp, synthetic construct
  source 1..20: mol_type = other DNA
atatatgtaaattatatctc

SEQ ID NO: 95207 - DNA, 20 bp, synthetic construct
  source 1..20: mol_type = other DNA
tatatatgtaaattatatct

SEQ ID NO: 95208 - DNA, 20 bp, synthetic construct
  source 1..20: mol_type = other DNA
ttatatatgtaaattatatc

SEQ ID NO: 95209 - DNA, 20 bp, synthetic construct
  source 1..20: mol_type = other DNA
tttatatatgtaaattatat

SEQ ID NO: 95210 - DNA, 20 bp, synthetic construct
  source 1..20: mol_type = other DNA
atttatatatgtaaattata

SEQ ID NO: 95211 - DNA, 20 bp, synthetic construct
  source 1..20: mol_type = other DNA
gatttatatatgtaaattat

SEQ ID NO: 95212 - DNA, 20 bp, synthetic construct
  source 1..20: mol_type = other DNA
tgatttatatatgtaaatta

SEQ ID NO: 95213 - DNA, 20 bp, synthetic construct
  source 1..20: mol_type = other DNA
ttgatttatatatgtaaatt

SEQ ID NO: 95214 - DNA, 20 bp, synthetic construct
  source 1..20: mol_type = other DNA
gttgatttatatatgtaaat

SEQ ID NO: 95215 - DNA, 20 bp, synthetic construct
  source 1..20: mol_type = other DNA
ggttgatttatatatgtaaa

SEQ ID NO: 95216 - DNA, 20 bp, synthetic construct
  source 1..20: mol_type = other DNA
tggttgatttatatatgtaa

SEQ ID NO: 95217 - DNA, 20 bp, synthetic construct
  source 1..20: mol_type = other DNA
atggttgatttatatatgta

SEQ ID NO: 95218 - DNA, 20 bp, synthetic construct
  source 1..20: mol_type = other DNA
aatggttgatttatatatgt

SEQ ID NO: 95219 - DNA, 20 bp, synthetic construct
  source 1..20: mol_type = other DNA
aaatggttgatttatatatg

SEQ ID NO: 95220 - DNA, 20 bp, synthetic construct
  source 1..20: mol_type = other DNA
taaatggttgatttatatat

SEQ ID NO: 95221 - DNA, 20 bp, synthetic construct
  source 1..20: mol_type = other DNA
ttaaatggttgatttatata

SEQ ID NO: 95222 - DNA, 20 bp, synthetic construct
  source 1..20: mol_type = other DNA
tttaaatggttgatttatat

SEQ ID NO: 95223 - DNA, 20 bp, synthetic construct
  source 1..20: mol_type = other DNA
ctttaaatggttgatttata

SEQ ID NO: 95224 - DNA, 20 bp, synthetic construct
  source 1..20: mol_type = other DNA
actttaaatggttgatttat

SEQ ID NO: 95225 - DNA, 20 bp, synthetic construct
  source 1..20: mol_type = other DNA
cactttaaatggttgattta

SEQ ID NO: 95226 - DNA, 20 bp, synthetic construct
  source 1..20: mol_type = other DNA
acactttaaatggttgattt

SEQ ID NO: 95227 - DNA, 20 bp, synthetic construct
  source 1..20: mol_type = other DNA
tacactttaaatggttgatt

SEQ ID NO: 95228 - DNA, 20 bp, synthetic construct
  source 1..20: mol_type = other DNA
atacactttaaatggttgat

SEQ ID NO: 95229 - DNA, 20 bp, synthetic construct
  source 1..20: mol_type = other DNA
tatacactttaaatggttga

SEQ ID NO: 95230 - DNA, 20 bp, synthetic construct
  source 1..20: mol_type = other DNA
ttatacactttaaatggttg

SEQ ID NO: 95231 - DNA, 20 bp, synthetic construct
  source 1..20: mol_type = other DNA
tttatacactttaaatggtt

SEQ ID NO: 95232 - DNA, 20 bp, synthetic construct
  source 1..20: mol_type = other DNA
atttatacactttaaatggt

SEQ ID NO: 95233 - DNA, 20 bp, synthetic construct
  source 1..20: mol_type = other DNA
gatttatacactttaaatgg

SEQ ID NO: 95234 - DNA, 20 bp, synthetic construct
  source 1..20: mol_type = other DNA
tgatttatacactttaaatg

SEQ ID NO: 95235 - DNA, 20 bp, synthetic construct
  source 1..20: mol_type = other DNA
ctgatttatacactttaaat

SEQ ID NO: 95236 - DNA, 20 bp, synthetic construct
  source 1..20: mol_type = other DNA
actgatttatacactttaaa

SEQ ID NO: 95237 - DNA, 20 bp, synthetic construct
  source 1..20: mol_type = other DNA
cactgatttatacactttaa

SEQ ID NO: 95238 - DNA, 20 bp, synthetic construct
  source 1..20: mol_type = other DNA
ccactgatttatacacttta

SEQ ID NO: 95239 - DNA, 20 bp, synthetic construct
  source 1..20: mol_type = other DNA
accactgatttatacacttt

SEQ ID NO: 95240 - DNA, 20 bp, synthetic construct
  source 1..20: mol_type = other DNA
aaccactgatttatacactt

SEQ ID NO: 95241 - DNA, 20 bp, synthetic construct
  source 1..20: mol_type = other DNA
aaaccactgatttatacact

SEQ ID NO: 95242 - DNA, 20 bp, synthetic construct
  source 1..20: mol_type = other DNA
aaaaccactgatttatacac

SEQ ID NO: 95243 - DNA, 20 bp, synthetic construct
  source 1..20: mol_type = other DNA
aaaaaccactgatttataca

SEQ ID NO: 95244 - DNA, 20 bp, synthetic construct
  source 1..20: mol_type = other DNA
taaaaaccactgatttatac

SEQ ID NO: 95245 - DNA, 20 bp, synthetic construct
  source 1..20: mol_type = other DNA
ttaaaaaccactgatttata

SEQ ID NO: 95246 - DNA, 20 bp, synthetic construct
  source 1..20: mol_type = other DNA
tttaaaaaccactgatttat

SEQ ID NO: 95247 - DNA, 20 bp, synthetic construct
  source 1..20: mol_type = other DNA
ttttaaaaaccactgattta

SEQ ID NO: 95248 - DNA, 20 bp, synthetic construct
  source 1..20: mol_type = other DNA
attttaaaaaccactgattt

SEQ ID NO: 95249 - DNA, 20 bp, synthetic construct
  source 1..20: mol_type = other DNA
tattttaaaaaccactgatt

SEQ ID NO: 95250 - DNA, 20 bp, synthetic construct
  source 1..20: mol_type = other DNA
atattttaaaaaccactgat

SEQ ID NO: 95251 - DNA, 20 bp, synthetic construct
  source 1..20: mol_type = other DNA
aatattttaaaaaccactga

SEQ ID NO: 95252 - DNA, 20 bp, synthetic construct
  source 1..20: mol_type = other DNA
gaatattttaaaaaccactg

SEQ ID NO: 95253 - DNA, 20 bp, synthetic construct
  source 1..20: mol_type = other DNA
tgaatattttaaaaaccact

SEQ ID NO: 95254 - DNA, 20 bp, synthetic construct
  source 1..20: mol_type = other DNA
gtgaatattttaaaaaccac

SEQ ID NO: 95255 - DNA, 20 bp, synthetic construct
  source 1..20: mol_type = other DNA
tgtgaatattttaaaaacca

SEQ ID NO: 95256 - DNA, 20 bp, synthetic construct
  source 1..20: mol_type = other DNA
ttgtgaatattttaaaaacc

SEQ ID NO: 95257 - DNA, 20 bp, synthetic construct
  source 1..20: mol_type = other DNA
attgtgaatattttaaaaac

SEQ ID NO: 95258 - DNA, 20 bp, synthetic construct
  source 1..20: mol_type = other DNA
cattgtgaatattttaaaaa

SEQ ID NO: 95259 - DNA, 20 bp, synthetic construct
  source 1..20: mol_type = other DNA
acattgtgaatattttaaaa

SEQ ID NO: 95260 - DNA, 20 bp, synthetic construct
  source 1..20: mol_type = other DNA
aacattgtgaatattttaaa

SEQ ID NO: 95261 - DNA, 20 bp, synthetic construct
  source 1..20: mol_type = other DNA
caacattgtgaatattttaa

SEQ ID NO: 95262 - DNA, 20 bp, synthetic construct
  source 1..20: mol_type = other DNA
acaacattgtgaatatttta

SEQ ID NO: 95263 - DNA, 20 bp, synthetic construct
  source 1..20: mol_type = other DNA
tacaacattgtgaatatttt

SEQ ID NO: 95264 - DNA, 20 bp, synthetic construct
  source 1..20: mol_type = other DNA
gtacaacattgtgaatattt

SEQ ID NO: 95265 - DNA, 20 bp, synthetic construct
  source 1..20: mol_type = other DNA
tgtacaacattgtgaatatt

SEQ ID NO: 95266 - DNA, 20 bp, synthetic construct
  source 1..20: mol_type = other DNA
ttgtacaacattgtgaatat

SEQ ID NO: 95267 - DNA, 20 bp, synthetic construct
  source 1..20: mol_type = other DNA
gttgtacaacattgtgaata

SEQ ID NO: 95268 - DNA, 20 bp, synthetic construct
  source 1..20: mol_type = other DNA
ggttgtacaacattgtgaat

SEQ ID NO: 95269 - DNA, 20 bp, synthetic construct
  source 1..20: mol_type = other DNA
cggttgtacaacattgtgaa

SEQ ID NO: 95270 - DNA, 20 bp, synthetic construct
  source 1..20: mol_type = other DNA
acggttgtacaacattgtga

SEQ ID NO: 95271 - DNA, 20 bp, synthetic construct
  source 1..20: mol_type = other DNA
gacggttgtacaacattgtg

SEQ ID NO: 95272 - DNA, 20 bp, synthetic construct
  source 1..20: mol_type = other DNA
agacggttgtacaacattgt

SEQ ID NO: 95273 - DNA, 20 bp, synthetic construct
  source 1..20: mol_type = other DNA
aagacggttgtacaacattg

SEQ ID NO: 95274 - DNA, 20 bp, synthetic construct
  source 1..20: mol_type = other DNA
gaagacggttgtacaacatt

SEQ ID NO: 95275 - DNA, 20 bp, synthetic construct
  source 1..20: mol_type = other DNA
agaagacggttgtacaacat

SEQ ID NO: 95276 - DNA, 20 bp, synthetic construct
  source 1..20: mol_type = other DNA
gagaagacggttgtacaaca

SEQ ID NO: 95277 - DNA, 20 bp, synthetic construct
  source 1..20: mol_type = other DNA
tgagaagacggttgtacaac

SEQ ID NO: 95278 - DNA, 20 bp, synthetic construct
  source 1..20: mol_type = other DNA
ctgagaagacggttgtacaa

SEQ ID NO: 95279 - DNA, 20 bp, synthetic construct
  source 1..20: mol_type = other DNA
actgagaagacggttgtaca

SEQ ID NO: 95280 - DNA, 20 bp, synthetic construct
  source 1..20: mol_type = other DNA
aactgagaagacggttgtac

SEQ ID NO: 95281 - DNA, 20 bp, synthetic construct
  source 1..20: mol_type = other DNA
caactgagaagacggttgta

SEQ ID NO: 95282 - DNA, 20 bp, synthetic construct
  source 1..20: mol_type = other DNA
tcaactgagaagacggttgt

SEQ ID NO: 95283 - DNA, 20 bp, synthetic construct
  source 1..20: mol_type = other DNA
atcaactgagaagacggttg

SEQ ID NO: 95284 - DNA, 20 bp, synthetic construct
  source 1..20: mol_type = other DNA
aatcaactgagaagacggtt

SEQ ID NO: 95285 - DNA, 20 bp, synthetic construct
  source 1..20: mol_type = other DNA
aaatcaactgagaagacggt

SEQ ID NO: 95286 - DNA, 20 bp, synthetic construct
  source 1..20: mol_type = other DNA
aaaatcaactgagaagacgg

SEQ ID NO: 95287 - DNA, 20 bp, synthetic construct
  source 1..20: mol_type = other DNA
taaaatcaactgagaagacg

SEQ ID NO: 95288 - DNA, 20 bp, synthetic construct
  source 1..20: mol_type = other DNA
ttaaaatcaactgagaagac

SEQ ID NO: 95289 - DNA, 20 bp, synthetic construct
  source 1..20: mol_type = other DNA
tttaaaatcaactgagaaga

SEQ ID NO: 95290 - DNA, 20 bp, synthetic construct
  source 1..20: mol_type = other DNA
ttttaaaatcaactgagaag

SEQ ID NO: 95291 - DNA, 20 bp, synthetic construct
  source 1..20: mol_type = other DNA
gttttaaaatcaactgagaa

SEQ ID NO: 95292 - DNA, 20 bp, synthetic construct
  source 1..20: mol_type = other DNA
tgttttaaaatcaactgaga

SEQ ID NO: 95293 - DNA, 20 bp, synthetic construct
  source 1..20: mol_type = other DNA
atgttttaaaatcaactgag

SEQ ID NO: 95294 - DNA, 20 bp, synthetic construct
  source 1..20: mol_type = other DNA
tatgttttaaaatcaactga

SEQ ID NO: 95295 - DNA, 20 bp, synthetic construct
  source 1..20: mol_type = other DNA
gtatgttttaaaatcaactg

SEQ ID NO: 95296 - DNA, 20 bp, synthetic construct
  source 1..20: mol_type = other DNA
agtatgttttaaaatcaact

SEQ ID NO: 95297 - DNA, 20 bp, synthetic construct
  source 1..20: mol_type = other DNA
gagtatgttttaaaatcaac

SEQ ID NO: 95298 - DNA, 20 bp, synthetic construct
  source 1..20: mol_type = other DNA
agagtatgttttaaaatcaa

SEQ ID NO: 95299 - DNA, 20 bp, synthetic construct
  source 1..20: mol_type = other DNA
aagagtatgttttaaaatca

SEQ ID NO: 95300 - DNA, 20 bp, synthetic construct
  source 1..20: mol_type = other DNA
gaagagtatgttttaaaatc

SEQ ID NO: 95301 - DNA, 20 bp, synthetic construct
  source 1..20: mol_type = other DNA
tgaagagtatgttttaaaat

SEQ ID NO: 95302 - DNA, 20 bp, synthetic construct
  source 1..20: mol_type = other DNA
gtgaagagtatgttttaaaa

SEQ ID NO: 95303 - DNA, 20 bp, synthetic construct
  source 1..20: mol_type = other DNA
ggtgaagagtatgttttaaa

SEQ ID NO: 95304 - DNA, 20 bp, synthetic construct
  source 1..20: mol_type = other DNA
gggtgaagagtatgttttaa

SEQ ID NO: 95305 - DNA, 20 bp, synthetic construct
  source 1..20: mol_type = other DNA
ggggtgaagagtatgtttta

SEQ ID NO: 95306 - DNA, 20 bp, synthetic construct
  source 1..20: mol_type = other DNA
gggggtgaagagtatgtttt

SEQ ID NO: 95307 - DNA, 20 bp, synthetic construct
  source 1..20: mol_type = other DNA
tgggggtgaagagtatgttt

SEQ ID NO: 95308 - DNA, 20 bp, synthetic construct
  source 1..20: mol_type = other DNA
ttgggggtgaagagtatgtt

SEQ ID NO: 95309 - DNA, 20 bp, synthetic construct
  source 1..20: mol_type = other DNA
tttgggggtgaagagtatgt

SEQ ID NO: 95310 - DNA, 20 bp, synthetic construct
  source 1..20: mol_type = other DNA
ttttgggggtgaagagtatg

SEQ ID NO: 95311 - DNA, 20 bp, synthetic construct
  source 1..20: mol_type = other DNA
cttttgggggtgaagagtat

SEQ ID NO: 95312 - DNA, 20 bp, synthetic construct
  source 1..20: mol_type = other DNA
tcttttgggggtgaagagta

SEQ ID NO: 95313 - DNA, 20 bp, synthetic construct
  source 1..20: mol_type = other DNA
ttcttttgggggtgaagagt

SEQ ID NO: 95314 - DNA, 20 bp, synthetic construct
  source 1..20: mol_type = other DNA
tttcttttgggggtgaagag

SEQ ID NO: 95315 - DNA, 20 bp, synthetic construct
  source 1..20: mol_type = other DNA
gtttcttttgggggtgaaga

SEQ ID NO: 95316 - DNA, 20 bp, synthetic construct
  source 1..20: mol_type = other DNA
ggtttcttttgggggtgaag

SEQ ID NO: 95317 - DNA, 20 bp, synthetic construct
  source 1..20: mol_type = other DNA
gggtttcttttgggggtgaa

SEQ ID NO: 95318 - DNA, 20 bp, synthetic construct
  source 1..20: mol_type = other DNA
ggggtttcttttgggggtga

SEQ ID NO: 95319 - DNA, 20 bp, synthetic construct
  source 1..20: mol_type = other DNA
cggggtttcttttgggggtg

SEQ ID NO: 95320 - DNA, 20 bp, synthetic construct
  source 1..20: mol_type = other DNA
acggggtttcttttgggggt

SEQ ID NO: 95321 - DNA, 20 bp, synthetic construct
  source 1..20: mol_type = other DNA
cacggggtttcttttggggg

SEQ ID NO: 95322 - DNA, 20 bp, synthetic construct
  source 1..20: mol_type = other DNA
gcacggggtttcttttgggg

SEQ ID NO: 95323 - DNA, 20 bp, synthetic construct
  source 1..20: mol_type = other DNA
ggcacggggtttcttttggg

SEQ ID NO: 95324 - DNA, 20 bp, synthetic construct
  source 1..20: mol_type = other DNA
gggcacggggtttcttttgg

SEQ ID NO: 95325 - DNA, 20 bp, synthetic construct
  source 1..20: mol_type = other DNA
tgggcacggggtttcttttg

SEQ ID NO: 95326 - DNA, 20 bp, synthetic construct
  source 1..20: mol_type = other DNA
ctgggcacggggtttctttt

SEQ ID NO: 95327 - DNA, 20 bp, synthetic construct
  source 1..20: mol_type = other DNA
actgggcacggggtttcttt

SEQ ID NO: 95328 - DNA, 20 bp, synthetic construct
  source 1..20: mol_type = other DNA
aactgggcacggggtttctt

SEQ ID NO: 95329 - DNA, 20 bp, synthetic construct
  source 1..20: mol_type = other DNA
aaactgggcacggggtttct

SEQ ID NO: 95330 - DNA, 20 bp, synthetic construct
  source 1..20: mol_type = other DNA
taaactgggcacggggtttc

SEQ ID NO: 95331 - DNA, 20 bp, synthetic construct
  source 1..20: mol_type = other DNA
ctaaactgggcacggggttt

SEQ ID NO: 95332 - DNA, 20 bp, synthetic construct
  source 1..20: mol_type = other DNA
gctaaactgggcacggggtt

SEQ ID NO: 95333 - DNA, 20 bp, synthetic construct
  source 1..20: mol_type = other DNA
tgctaaactgggcacggggt

SEQ ID NO: 95334 - DNA, 20 bp, synthetic construct
  source 1..20: mol_type = other DNA
ctgctaaactgggcacgggg

SEQ ID NO: 95335 - DNA, 20 bp, synthetic construct
  source 1..20: mol_type = other DNA
actgctaaactgggcacggg

SEQ ID NO: 95336 - DNA, 20 bp, synthetic construct
  source 1..20: mol_type = other DNA
gactgctaaactgggcacgg

SEQ ID NO: 95337 - DNA, 20 bp, synthetic construct
  source 1..20: mol_type = other DNA
cgactgctaaactgggcacg

SEQ ID NO: 95338 - DNA, 20 bp, synthetic construct
  source 1..20: mol_type = other DNA
acgactgctaaactgggcac

SEQ ID NO: 95339 - DNA, 20 bp, synthetic construct
  source 1..20: mol_type = other DNA
aacgactgctaaactgggca

SEQ ID NO: 95340 - DNA, 20 bp, synthetic construct
  source 1..20: mol_type = other DNA
gaacgactgctaaactgggc

SEQ ID NO: 95341 - DNA, 20 bp, synthetic construct
  source 1..20: mol_type = other DNA
ggaacgactgctaaactggg

SEQ ID NO: 95342 - DNA, 20 bp, synthetic construct
  source 1..20: mol_type = other DNA
tggaacgactgctaaactgg

SEQ ID NO: 95343 - DNA, 20 bp, synthetic construct
  source 1..20: mol_type = other DNA
gtggaacgactgctaaactg

SEQ ID NO: 95344 - DNA, 20 bp, synthetic construct
  source 1..20: mol_type = other DNA
tgtggaacgactgctaaact

SEQ ID NO: 95345 - DNA, 20 bp, synthetic construct
  source 1..20: mol_type = other DNA
atgtggaacgactgctaaac

SEQ ID NO: 95346 - DNA, 20 bp, synthetic construct
  source 1..20: mol_type = other DNA
aatgtggaacgactgctaaa

SEQ ID NO: 95347 - DNA, 20 bp, synthetic construct
  source 1..20: mol_type = other DNA
aaatgtggaacgactgctaa

SEQ ID NO: 95348 - DNA, 20 bp, synthetic construct
  source 1..20: mol_type = other DNA
caaatgtggaacgactgcta

SEQ ID NO: 95349 - DNA, 20 bp, synthetic construct
  source 1..20: mol_type = other DNA
gcaaatgtggaacgactgct

SEQ ID NO: 95350 - DNA, 20 bp, synthetic construct
  source 1..20: mol_type = other DNA
ggcaaatgtggaacgactgc

SEQ ID NO: 95351 - DNA, 20 bp, synthetic construct
  source 1..20: mol_type = other DNA
aggcaaatgtggaacgactg

SEQ ID NO: 95352 - DNA, 20 bp, synthetic construct
  source 1..20: mol_type = other DNA
gaggcaaatgtggaacgact

SEQ ID NO: 95353 - DNA, 20 bp, synthetic construct
  source 1..20: mol_type = other DNA
ggaggcaaatgtggaacgac

SEQ ID NO: 95354 - DNA, 20 bp, synthetic construct
  source 1..20: mol_type = other DNA
tggaggcaaatgtggaacga

SEQ ID NO: 95355 - DNA, 20 bp, synthetic construct
  source 1..20: mol_type = other DNA
ctggaggcaaatgtggaacg

SEQ ID NO: 95356 - DNA, 20 bp, synthetic construct
  source 1..20: mol_type = other DNA
gctggaggcaaatgtggaac

SEQ ID NO: 95357 - DNA, 20 bp, synthetic construct
  source 1..20: mol_type = other DNA
ggctggaggcaaatgtggaa

SEQ ID NO: 95358 - DNA, 20 bp, synthetic construct
  source 1..20: mol_type = other DNA
gggctggaggcaaatgtgga

SEQ ID NO: 95359 - DNA, 20 bp, synthetic construct
  source 1..20: mol_type = other DNA
agggctggaggcaaatgtgg

SEQ ID NO: 95360 - DNA, 20 bp, synthetic construct
  source 1..20: mol_type = other DNA
aagggctggaggcaaatgtg

SEQ ID NO: 95361 - DNA, 20 bp, synthetic construct
  source 1..20: mol_type = other DNA
gaagggctggaggcaaatgt

SEQ ID NO: 95362 - DNA, 20 bp, synthetic construct
  source 1..20: mol_type = other DNA
agaagggctggaggcaaatg

SEQ ID NO: 95363 - DNA, 20 bp, synthetic construct
  source 1..20: mol_type = other DNA
gagaagggctggaggcaaat

SEQ ID NO: 95364 - DNA, 20 bp, synthetic construct
  source 1..20: mol_type = other DNA
agagaagggctggaggcaaa

SEQ ID NO: 95365 - DNA, 20 bp, synthetic construct
  source 1..20: mol_type = other DNA
aagagaagggctggaggcaa

SEQ ID NO: 95366 - DNA, 20 bp, synthetic construct
  source 1..20: mol_type = other DNA
aaagagaagggctggaggca

SEQ ID NO: 95367 - DNA, 20 bp, synthetic construct
  source 1..20: mol_type = other DNA
gaaagagaagggctggaggc

SEQ ID NO: 95368 - DNA, 20 bp, synthetic construct
  source 1..20: mol_type = other DNA
ggaaagagaagggctggagg

SEQ ID NO: 95369 - DNA, 20 bp, synthetic construct
  source 1..20: mol_type = other DNA
gggaaagagaagggctggag

SEQ ID NO: 95370 - DNA, 20 bp, synthetic construct
  source 1..20: mol_type = other DNA
ggggaaagagaagggctgga

SEQ ID NO: 95371 - DNA, 20 bp, synthetic construct
  source 1..20: mol_type = other DNA
aggggaaagagaagggctgg

SEQ ID NO: 95372 - DNA, 20 bp, synthetic construct
  source 1..20: mol_type = other DNA
taggggaaagagaagggctg

SEQ ID NO: 95373 - DNA, 20 bp, synthetic construct
  source 1..20: mol_type = other DNA
gtaggggaaagagaagggct

SEQ ID NO: 95374 - DNA, 20 bp, synthetic construct
  source 1..20: mol_type = other DNA
agtaggggaaagagaagggc

SEQ ID NO: 95375 - DNA, 20 bp, synthetic construct
  source 1..20: mol_type = other DNA
gagtaggggaaagagaaggg

SEQ ID NO: 95376 - DNA, 20 bp, synthetic construct
  source 1..20: mol_type = other DNA
ggagtaggggaaagagaagg

SEQ ID NO: 95377 - DNA, 20 bp, synthetic construct
  source 1..20: mol_type = other DNA
gggagtaggggaaagagaag

SEQ ID NO: 95378 - DNA, 20 bp, synthetic construct
  source 1..20: mol_type = other DNA
tgggagtaggggaaagagaa

SEQ ID NO: 95379 - DNA, 20 bp, synthetic construct
  source 1..20: mol_type = other DNA
ttgggagtaggggaaagaga

SEQ ID NO: 95380 - DNA, 20 bp, synthetic construct
  source 1..20: mol_type = other DNA
gttgggagtaggggaaagag

SEQ ID NO: 95381 - DNA, 20 bp, synthetic construct
  source 1..20: mol_type = other DNA
ggttgggagtaggggaaaga

SEQ ID NO: 95382 - DNA, 20 bp, synthetic construct
  source 1..20: mol_type = other DNA
gggttgggagtaggggaaag

SEQ ID NO: 95383 - DNA, 20 bp, synthetic construct
  source 1..20: mol_type = other DNA
agggttgggagtaggggaaa

SEQ ID NO: 95384 - DNA, 20 bp, synthetic construct
  source 1..20: mol_type = other DNA
tagggttgggagtaggggaa

SEQ ID NO: 95385 - DNA, 20 bp, synthetic construct
  source 1..20: mol_type = other DNA
ttagggttgggagtagggga

SEQ ID NO: 95386 - DNA, 20 bp, synthetic construct
  source 1..20: mol_type = other DNA
cttagggttgggagtagggg

SEQ ID NO: 95387 - DNA, 20 bp, synthetic construct
  source 1..20: mol_type = other DNA
gcttagggttgggagtaggg

SEQ ID NO: 95388 - DNA, 20 bp, synthetic construct
  source 1..20: mol_type = other DNA
tgcttagggttgggagtagg

SEQ ID NO: 95389 - DNA, 20 bp, synthetic construct
  source 1..20: mol_type = other DNA
ttgcttagggttgggagtag

SEQ ID NO: 95390 - DNA, 20 bp, synthetic construct
  source 1..20: mol_type = other DNA
gttgcttagggttgggagta

SEQ ID NO: 95391 - DNA, 20 bp, synthetic construct
  source 1..20: mol_type = other DNA
ggttgcttagggttgggagt

SEQ ID NO: 95392 - DNA, 20 bp, synthetic construct
  source 1..20: mol_type = other DNA
cggttgcttagggttgggag

SEQ ID NO: 95393 - DNA, 20 bp, synthetic construct
  source 1..20: mol_type = other DNA
acggttgcttagggttggga

SEQ ID NO: 95394 - DNA, 20 bp, synthetic construct
  source 1..20: mol_type = other DNA
aacggttgcttagggttggg

SEQ ID NO: 95395 - DNA, 20 bp, synthetic construct
  source 1..20: mol_type = other DNA
taacggttgcttagggttgg

SEQ ID NO: 95396 - DNA, 20 bp, synthetic construct
  source 1..20: mol_type = other DNA
ttaacggttgcttagggttg

SEQ ID NO: 95397 - DNA, 20 bp, synthetic construct
  source 1..20: mol_type = other DNA
attaacggttgcttagggtt

SEQ ID NO: 95398 - DNA, 20 bp, synthetic construct
  source 1..20: mol_type = other DNA
gattaacggttgcttagggt

SEQ ID NO: 95399 - DNA, 20 bp, synthetic construct
  source 1..20: mol_type = other DNA
agattaacggttgcttaggg

SEQ ID NO: 95400 - DNA, 20 bp, synthetic construct
  source 1..20: mol_type = other DNA
tagattaacggttgcttagg

SEQ ID NO: 95401 - DNA, 20 bp, synthetic construct
  source 1..20: mol_type = other DNA
gtagattaacggttgcttag

SEQ ID NO: 95402 - DNA, 20 bp, synthetic construct
  source 1..20: mol_type = other DNA
agtagattaacggttgctta

SEQ ID NO: 95403 - DNA, 20 bp, synthetic construct
  source 1..20: mol_type = other DNA
aagtagattaacggttgctt

SEQ ID NO: 95404 - DNA, 20 bp, synthetic construct
  source 1..20: mol_type = other DNA
aaagtagattaacggttgct

SEQ ID NO: 95405 - DNA, 20 bp, synthetic construct
  source 1..20: mol_type = other DNA
gaaagtagattaacggttgc

SEQ ID NO: 95406 - DNA, 20 bp, synthetic construct
  source 1..20: mol_type = other DNA
agaaagtagattaacggttg

SEQ ID NO: 95407 - DNA, 20 bp, synthetic construct
  source 1..20: mol_type = other DNA
cagaaagtagattaacggtt

SEQ ID NO: 95408 - DNA, 20 bp, synthetic construct
  source 1..20: mol_type = other DNA
acagaaagtagattaacggt

SEQ ID NO: 95409 - DNA, 20 bp, synthetic construct
  source 1..20: mol_type = other DNA
gacagaaagtagattaacgg

SEQ ID NO: 95410 - DNA, 20 bp, synthetic construct
  source 1..20: mol_type = other DNA
agacagaaagtagattaacg

SEQ ID NO: 95411 - DNA, 20 bp, synthetic construct
  source 1..20: mol_type = other DNA
gagacagaaagtagattaac

SEQ ID NO: 95412 - DNA, 20 bp, synthetic construct
  source 1..20: mol_type = other DNA
agagacagaaagtagattaa

SEQ ID NO: 95413 - DNA, 20 bp, synthetic construct
  source 1..20: mol_type = other DNA
tagagacagaaagtagatta

SEQ ID NO: 95414 - DNA, 20 bp, synthetic construct
  source 1..20: mol_type = other DNA
atagagacagaaagtagatt

SEQ ID NO: 95415 - DNA, 20 bp, synthetic construct
  source 1..20: mol_type = other DNA
catagagacagaaagtagat

SEQ ID NO: 95416 - DNA, 20 bp, synthetic construct
  source 1..20: mol_type = other DNA
ccatagagacagaaagtaga

SEQ ID NO: 95417 - DNA, 20 bp, synthetic construct
  source 1..20: mol_type = other DNA
tccatagagacagaaagtag

SEQ ID NO: 95418 - DNA, 20 bp, synthetic construct
  source 1..20: mol_type = other DNA
atccatagagacagaaagta

SEQ ID NO: 95419 - DNA, 20 bp, synthetic construct
  source 1..20: mol_type = other DNA
catccatagagacagaaagt

SEQ ID NO: 95420 - DNA, 20 bp, synthetic construct
  source 1..20: mol_type = other DNA
ccatccatagagacagaaag

SEQ ID NO: 95421 - DNA, 20 bp, synthetic construct
  source 1..20: mol_type = other DNA
cccatccatagagacagaaa

SEQ ID NO: 95422 - DNA, 20 bp, synthetic construct
  source 1..20: mol_type = other DNA
gcccatccatagagacagaa

SEQ ID NO: 95423 - DNA, 20 bp, synthetic construct
  source 1..20: mol_type = other DNA
agcccatccatagagacaga

SEQ ID NO: 95424 - DNA, 20 bp, synthetic construct
  source 1..20: mol_type = other DNA
aagcccatccatagagacag

SEQ ID NO: 95425 - DNA, 20 bp, synthetic construct
  source 1..20: mol_type = other DNA
taagcccatccatagagaca

SEQ ID NO: 95426 - DNA, 20 bp, synthetic construct
  source 1..20: mol_type = other DNA
ataagcccatccatagagac

SEQ ID NO: 95427 - DNA, 20 bp, synthetic construct
  source 1..20: mol_type = other DNA
aataagcccatccatagaga

SEQ ID NO: 95428 - DNA, 20 bp, synthetic construct
  source 1..20: mol_type = other DNA
aaataagcccatccatagag

SEQ ID NO: 95429 - DNA, 20 bp, synthetic construct
  source 1..20: mol_type = other DNA
caaataagcccatccataga

SEQ ID NO: 95430 - DNA, 20 bp, synthetic construct
  source 1..20: mol_type = other DNA
ccaaataagcccatccatag

SEQ ID NO: 95431 - DNA, 20 bp, synthetic construct
  source 1..20: mol_type = other DNA
cccaaataagcccatccata

SEQ ID NO: 95432 - DNA, 20 bp, synthetic construct
  source 1..20: mol_type = other DNA
ccccaaataagcccatccat

SEQ ID NO: 95433 - DNA, 20 bp, synthetic construct
  source 1..20: mol_type = other DNA
gccccaaataagcccatcca

SEQ ID NO: 95434 - DNA, 20 bp, synthetic construct
  source 1..20: mol_type = other DNA
tgccccaaataagcccatcc

SEQ ID NO: 95435 - DNA, 20 bp, synthetic construct
  source 1..20: mol_type = other DNA
ttgccccaaataagcccatc

SEQ ID NO: 95436 - DNA, 20 bp, synthetic construct
  source 1..20: mol_type = other DNA
tttgccccaaataagcccat

SEQ ID NO: 95437 - DNA, 20 bp, synthetic construct
  source 1..20: mol_type = other DNA
atttgccccaaataagccca

SEQ ID NO: 95438 - DNA, 20 bp, synthetic construct
  source 1..20: mol_type = other DNA
aatttgccccaaataagccc

SEQ ID NO: 95439 - DNA, 20 bp, synthetic construct
  source 1..20: mol_type = other DNA
gaatttgccccaaataagcc

SEQ ID NO: 95440 - DNA, 20 bp, synthetic construct
  source 1..20: mol_type = other DNA
ggaatttgccccaaataagc

SEQ ID NO: 95441 - DNA, 20 bp, synthetic construct
  source 1..20: mol_type = other DNA
tggaatttgccccaaataag

SEQ ID NO: 95442 - DNA, 20 bp, synthetic construct
  source 1..20: mol_type = other DNA
atggaatttgccccaaataa

SEQ ID NO: 95443 - DNA, 20 bp, synthetic construct
  source 1..20: mol_type = other DNA
aatggaatttgccccaaata

SEQ ID NO: 95444 - DNA, 20 bp, synthetic construct
  source 1..20: mol_type = other DNA
aaatggaatttgccccaaat

SEQ ID NO: 95445 - DNA, 20 bp, synthetic construct
  source 1..20: mol_type = other DNA
gaaatggaatttgccccaaa

SEQ ID NO: 95446 - DNA, 20 bp, synthetic construct
  source 1..20: mol_type = other DNA
tgaaatggaatttgccccaa

SEQ ID NO: 95447 - DNA, 20 bp, synthetic construct
  source 1..20: mol_type = other DNA
atgaaatggaatttgcccca

SEQ ID NO: 95448 - DNA, 20 bp, synthetic construct
  source 1..20: mol_type = other DNA
tatgaaatggaatttgcccc

SEQ ID NO: 95449 - DNA, 20 bp, synthetic construct
  source 1..20: mol_type = other DNA
gtatgaaatggaatttgccc

SEQ ID NO: 95450 - DNA, 20 bp, synthetic construct
  source 1..20: mol_type = other DNA
tgtatgaaatggaatttgcc

SEQ ID NO: 95451 - DNA, 20 bp, synthetic construct
  source 1..20: mol_type = other DNA
ttgtatgaaatggaatttgc

SEQ ID NO: 95452 - DNA, 20 bp, synthetic construct
  source 1..20: mol_type = other DNA
tttgtatgaaatggaatttg

SEQ ID NO: 95453 - DNA, 20 bp, synthetic construct
  source 1..20: mol_type = other DNA
atttgtatgaaatggaattt

SEQ ID NO: 95454 - DNA, 20 bp, synthetic construct
  source 1..20: mol_type = other DNA
catttgtatgaaatggaatt

SEQ ID NO: 95455 - DNA, 20 bp, synthetic construct
  source 1..20: mol_type = other DNA
ccatttgtatgaaatggaat

SEQ ID NO: 95456 - DNA, 20 bp, synthetic construct
  source 1..20: mol_type = other DNA
tccatttgtatgaaatggaa

SEQ ID NO: 95457 - DNA, 20 bp, synthetic construct
  source 1..20: mol_type = other DNA
ttccatttgtatgaaatgga

SEQ ID NO: 95458 - DNA, 20 bp, synthetic construct
  source 1..20: mol_type = other DNA
attccatttgtatgaaatgg

SEQ ID NO: 95459 - DNA, 20 bp, synthetic construct
  source 1..20: mol_type = other DNA
tattccatttgtatgaaatg

SEQ ID NO: 95460 - DNA, 20 bp, synthetic construct
  source 1..20: mol_type = other DNA
ttattccatttgtatgaaat

SEQ ID NO: 95461 - DNA, 20 bp, synthetic construct
  source 1..20: mol_type = other DNA
attattccatttgtatgaaa

SEQ ID NO: 95462 - DNA, 20 bp, synthetic construct
  source 1..20: mol_type = other DNA
tattattccatttgtatgaa

SEQ ID NO: 95463 - DNA, 20 bp, synthetic construct
  source 1..20: mol_type = other DNA
ttattattccatttgtatga

SEQ ID NO: 95464 - DNA, 20 bp, synthetic construct
  source 1..20: mol_type = other DNA
tttattattccatttgtatg

SEQ ID NO: 95465 - DNA, 20 bp, synthetic construct
  source 1..20: mol_type = other DNA
ttttattattccatttgtat

SEQ ID NO: 95466 - DNA, 20 bp, synthetic construct
  source 1..20: mol_type = other DNA
attttattattccatttgta

SEQ ID NO: 95467 - DNA, 20 bp, synthetic construct
  source 1..20: mol_type = other DNA
tattttattattccatttgt

SEQ ID NO: 95468 - DNA, 20 bp, synthetic construct
  source 1..20: mol_type = other DNA
atattttattattccatttg

SEQ ID NO: 95469 - DNA, 20 bp, synthetic construct
  source 1..20: mol_type = other DNA
catattttattattccattt

SEQ ID NO: 95470 - DNA, 20 bp, synthetic construct
  source 1..20: mol_type = other DNA
acatattttattattccatt

SEQ ID NO: 95471 - DNA, 20 bp, synthetic construct
  source 1..20: mol_type = other DNA
cacatattttattattccat

SEQ ID NO: 95472 - DNA, 20 bp, synthetic construct
  source 1..20: mol_type = other DNA
ccacatattttattattcca

SEQ ID NO: 95473 - DNA, 20 bp, synthetic construct
  source 1..20: mol_type = other DNA
gccacatattttattattcc

SEQ ID NO: 95474 - DNA, 20 bp, synthetic construct
  source 1..20: mol_type = other DNA
agccacatattttattattc

SEQ ID NO: 95475 - DNA, 20 bp, synthetic construct
  source 1..20: mol_type = other DNA
aagccacatattttattatt

SEQ ID NO: 95476 - DNA, 20 bp, synthetic construct
  source 1..20: mol_type = other DNA
aaagccacatattttattat

SEQ ID NO: 95477 - DNA, 20 bp, synthetic construct
  source 1..20: mol_type = other DNA
aaaagccacatattttatta

SEQ ID NO: 95478 - DNA, 20 bp, synthetic construct
  source 1..20: mol_type = other DNA
taaaagccacatattttatt

SEQ ID NO: 95479 - DNA, 20 bp, synthetic construct
  source 1..20: mol_type = other DNA
ataaaagccacatattttat

SEQ ID NO: 95480 - DNA, 20 bp, synthetic construct
  source 1..20: mol_type = other DNA
cataaaagccacatatttta

SEQ ID NO: 95481 - DNA, 20 bp, synthetic construct
  source 1..20: mol_type = other DNA
tcataaaagccacatatttt

SEQ ID NO: 95482 - DNA, 20 bp, synthetic construct
  source 1..20: mol_type = other DNA
gtcataaaagccacatattt

SEQ ID NO: 95483 - DNA, 20 bp, synthetic construct
  source 1..20: mol_type = other DNA
agtcataaaagccacatatt

SEQ ID NO: 95484 - DNA, 20 bp, synthetic construct
  source 1..20: mol_type = other DNA
cagtcataaaagccacatat

SEQ ID NO: 95485 - DNA, 20 bp, synthetic construct
  source 1..20: mol_type = other DNA
ccagtcataaaagccacata

SEQ ID NO: 95486 - DNA, 20 bp, synthetic construct
  source 1..20: mol_type = other DNA
gccagtcataaaagccacat

SEQ ID NO: 95487 - DNA, 20 bp, synthetic construct
  source 1..20: mol_type = other DNA
agccagtcataaaagccaca

SEQ ID NO: 95488 - DNA, 20 bp, synthetic construct
  source 1..20: mol_type = other DNA
aagccagtcataaaagccac

SEQ ID NO: 95489 - DNA, 20 bp, synthetic construct
  source 1..20: mol_type = other DNA
gaagccagtcataaaagcca

SEQ ID NO: 95490 - DNA, 20 bp, synthetic construct
  source 1..20: mol_type = other DNA
agaagccagtcataaaagcc

SEQ ID NO: 95491 - DNA, 20 bp, synthetic construct
  source 1..20: mol_type = other DNA
aagaagccagtcataaaagc

SEQ ID NO: 95492 - DNA, 20 bp, synthetic construct
  source 1..20: mol_type = other DNA
aaagaagccagtcataaaag

SEQ ID NO: 95493 - DNA, 20 bp, synthetic construct
  source 1..20: mol_type = other DNA
gaaagaagccagtcataaaa

SEQ ID NO: 95494 - DNA, 20 bp, synthetic construct
  source 1..20: mol_type = other DNA
tgaaagaagccagtcataaa

SEQ ID NO: 95495 - DNA, 20 bp, synthetic construct
  source 1..20: mol_type = other DNA
gtgaaagaagccagtcataa

SEQ ID NO: 95496 - DNA, 20 bp, synthetic construct
  source 1..20: mol_type = other DNA
agtgaaagaagccagtcata

SEQ ID NO: 95497 - DNA, 20 bp, synthetic construct
  source 1..20: mol_type = other DNA
gagtgaaagaagccagtcat

SEQ ID NO: 95498 - DNA, 20 bp, synthetic construct
  source 1..20: mol_type = other DNA
tgagtgaaagaagccagtca

SEQ ID NO: 95499 - DNA, 20 bp, synthetic construct
  source 1..20: mol_type = other DNA
ctgagtgaaagaagccagtc

SEQ ID NO: 95500 - DNA, 20 bp, synthetic construct
  source 1..20: mol_type = other DNA
tctgagtgaaagaagccagt

SEQ ID NO: 95501 - DNA, 20 bp, synthetic construct
  source 1..20: mol_type = other DNA
ctctgagtgaaagaagccag

SEQ ID NO: 95502 - DNA, 20 bp, synthetic construct
  source 1..20: mol_type = other DNA
actctgagtgaaagaagcca

SEQ ID NO: 95503 - DNA, 20 bp, synthetic construct
  source 1..20: mol_type = other DNA
tactctgagtgaaagaagcc

SEQ ID NO: 95504 - DNA, 20 bp, synthetic construct
  source 1..20: mol_type = other DNA
ctactctgagtgaaagaagc

SEQ ID NO: 95505 - DNA, 20 bp, synthetic construct
  source 1..20: mol_type = other DNA
actactctgagtgaaagaag

SEQ ID NO: 95506 - DNA, 20 bp, synthetic construct
  source 1..20: mol_type = other DNA
cactactctgagtgaaagaa

SEQ ID NO: 95507 - DNA, 20 bp, synthetic construct
  source 1..20: mol_type = other DNA
acactactctgagtgaaaga

SEQ ID NO: 95508 - DNA, 20 bp, synthetic construct
  source 1..20: mol_type = other DNA
aacactactctgagtgaaag

SEQ ID NO: 95509 - DNA, 20 bp, synthetic construct
  source 1..20: mol_type = other DNA
taacactactctgagtgaaa

SEQ ID NO: 95510 - DNA, 20 bp, synthetic construct
  source 1..20: mol_type = other DNA
ataacactactctgagtgaa

SEQ ID NO: 95511 - DNA, 20 bp, synthetic construct
  source 1..20: mol_type = other DNA
tataacactactctgagtga

SEQ ID NO: 95512 - DNA, 20 bp, synthetic construct
  source 1..20: mol_type = other DNA
ttataacactactctgagtg

SEQ ID NO: 95513 - DNA, 20 bp, synthetic construct
  source 1..20: mol_type = other DNA
tttataacactactctgagt

SEQ ID NO: 95514 - DNA, 20 bp, synthetic construct
  source 1..20: mol_type = other DNA
ttttataacactactctgag

SEQ ID NO: 95515 - DNA, 20 bp, synthetic construct
  source 1..20: mol_type = other DNA
cttttataacactactctga

SEQ ID NO: 95516 - DNA, 20 bp, synthetic construct
  source 1..20: mol_type = other DNA
acttttataacactactctg

SEQ ID NO: 95517 - DNA, 20 bp, synthetic construct
  source 1..20: mol_type = other DNA
aacttttataacactactct

SEQ ID NO: 95518 - DNA, 20 bp, synthetic construct
  source 1..20: mol_type = other DNA
gaacttttataacactactc

SEQ ID NO: 95519 - DNA, 20 bp, synthetic construct
  source 1..20: mol_type = other DNA
tgaacttttataacactact

SEQ ID NO: 95520 - DNA, 20 bp, synthetic construct
  source 1..20: mol_type = other DNA
atgaacttttataacactac

SEQ ID NO: 95521 - DNA, 20 bp, synthetic construct
  source 1..20: mol_type = other DNA
gatgaacttttataacacta

SEQ ID NO: 95522 - DNA, 20 bp, synthetic construct
  source 1..20: mol_type = other DNA
ggatgaacttttataacact

SEQ ID NO: 95523 - DNA, 20 bp, synthetic construct
  source 1..20: mol_type = other DNA
tggatgaacttttataacac

SEQ ID NO: 95524 - DNA, 20 bp, synthetic construct
  source 1..20: mol_type = other DNA
atggatgaacttttataaca

SEQ ID NO: 95525 - DNA, 20 bp, synthetic construct
  source 1..20: mol_type = other DNA
catggatgaacttttataac

SEQ ID NO: 95526 - DNA, 20 bp, synthetic construct
  source 1..20: mol_type = other DNA
acatggatgaacttttataa

SEQ ID NO: 95527 - DNA, 20 bp, synthetic construct
  source 1..20: mol_type = other DNA
aacatggatgaacttttata

SEQ ID NO: 95528 - DNA, 20 bp, synthetic construct
  source 1..20: mol_type = other DNA
caacatggatgaacttttat

SEQ ID NO: 95529 - DNA, 20 bp, synthetic construct
  source 1..20: mol_type = other DNA
ccaacatggatgaactttta

SEQ ID NO: 95530 - DNA, 20 bp, synthetic construct
  source 1..20: mol_type = other DNA
tccaacatggatgaactttt

SEQ ID NO: 95531 - DNA, 20 bp, synthetic construct
  source 1..20: mol_type = other DNA
ctccaacatggatgaacttt

SEQ ID NO: 95532 - DNA, 20 bp, synthetic construct
  source 1..20: mol_type = other DNA
gctccaacatggatgaactt

SEQ ID NO: 95533 - DNA, 20 bp, synthetic construct
  source 1..20: mol_type = other DNA
tgctccaacatggatgaact

SEQ ID NO: 95534 - DNA, 20 bp, synthetic construct
  source 1..20: mol_type = other DNA
atgctccaacatggatgaac

SEQ ID NO: 95535 - DNA, 20 bp, synthetic construct
  source 1..20: mol_type = other DNA
catgctccaacatggatgaa

SEQ ID NO: 95536 - DNA, 20 bp, synthetic construct
  source 1..20: mol_type = other DNA
acatgctccaacatggatga

SEQ ID NO: 95537 - DNA, 20 bp, synthetic construct
  source 1..20: mol_type = other DNA
aacatgctccaacatggatg

SEQ ID NO: 95538 - DNA, 20 bp, synthetic construct
  source 1..20: mol_type = other DNA
aaacatgctccaacatggat

SEQ ID NO: 95539 - DNA, 20 bp, synthetic construct
  source 1..20: mol_type = other DNA
gaaacatgctccaacatgga

SEQ ID NO: 95540 - DNA, 20 bp, synthetic construct
  source 1..20: mol_type = other DNA
tgaaacatgctccaacatgg

SEQ ID NO: 95541 - DNA, 20 bp, synthetic construct
  source 1..20: mol_type = other DNA
ctgaaacatgctccaacatg

SEQ ID NO: 95542 - DNA, 20 bp, synthetic construct
  source 1..20: mol_type = other DNA
actgaaacatgctccaacat

SEQ ID NO: 95543 - DNA, 20 bp, synthetic construct
  source 1..20: mol_type = other DNA
tactgaaacatgctccaaca

SEQ ID NO: 95544 - DNA, 20 bp, synthetic construct
  source 1..20: mol_type = other DNA
gtactgaaacatgctccaac

SEQ ID NO: 95545 - DNA, 20 bp, synthetic construct
  source 1..20: mol_type = other DNA
agtactgaaacatgctccaa

SEQ ID NO: 95546 - DNA, 20 bp, synthetic construct
  source 1..20: mol_type = other DNA
aagtactgaaacatgctcca

SEQ ID NO: 95547 - DNA, 20 bp, synthetic construct
  source 1..20: mol_type = other DNA
gaagtactgaaacatgctcc

SEQ ID NO: 95548 - DNA, 20 bp, synthetic construct
  source 1..20: mol_type = other DNA
tgaagtactgaaacatgctc

SEQ ID NO: 95549 - DNA, 20 bp, synthetic construct
  source 1..20: mol_type = other DNA
atgaagtactgaaacatgct

SEQ ID NO: 95550 - DNA, 20 bp, synthetic construct
  source 1..20: mol_type = other DNA
aatgaagtactgaaacatgc

SEQ ID NO: 95551 - DNA, 20 bp, synthetic construct
  source 1..20: mol_type = other DNA
aaatgaagtactgaaacatg

SEQ ID NO: 95552 - DNA, 20 bp, synthetic construct
  source 1..20: mol_type = other DNA
gaaatgaagtactgaaacat

SEQ ID NO: 95553 - DNA, 20 bp, synthetic construct
  source 1..20: mol_type = other DNA
agaaatgaagtactgaaaca

SEQ ID NO: 95554 - DNA, 20 bp, synthetic construct
  source 1..20: mol_type = other DNA
aagaaatgaagtactgaaac

SEQ ID NO: 95555 - DNA, 20 bp, synthetic construct
  source 1..20: mol_type = other DNA
aaagaaatgaagtactgaaa

SEQ ID NO: 95556 - DNA, 20 bp, synthetic construct
  source 1..20: mol_type = other DNA
aaaagaaatgaagtactgaa

SEQ ID NO: 95557 - DNA, 20 bp, synthetic construct
  source 1..20: mol_type = other DNA
aaaaagaaatgaagtactga

SEQ ID NO: 95558 - DNA, 20 bp, synthetic construct
  source 1..20: mol_type = other DNA
caaaaagaaatgaagtactg

SEQ ID NO: 95559 - DNA, 20 bp, synthetic construct
  source 1..20: mol_type = other DNA
acaaaaagaaatgaagtact

SEQ ID NO: 95560 - DNA, 20 bp, synthetic construct
  source 1..20: mol_type = other DNA
cacaaaaagaaatgaagtac

SEQ ID NO: 95561 - DNA, 20 bp, synthetic construct
  source 1..20: mol_type = other DNA
tcacaaaaagaaatgaagta

SEQ ID NO: 95562 - DNA, 20 bp, synthetic construct
  source 1..20: mol_type = other DNA
gtcacaaaaagaaatgaagt

SEQ ID NO: 95563 - DNA, 20 bp, synthetic construct
  source 1..20: mol_type = other DNA
agtcacaaaaagaaatgaag

SEQ ID NO: 95564 - DNA, 20 bp, synthetic construct
  source 1..20: mol_type = other DNA
cagtcacaaaaagaaatgaa

SEQ ID NO: 95565 - DNA, 20 bp, synthetic construct
  source 1..20: mol_type = other DNA
tcagtcacaaaaagaaatga

SEQ ID NO: 95566 - DNA, 20 bp, synthetic construct
  source 1..20: mol_type = other DNA
gtcagtcacaaaaagaaatg

SEQ ID NO: 95567 - DNA, 20 bp, synthetic construct
  source 1..20: mol_type = other DNA
agtcagtcacaaaaagaaat

SEQ ID NO: 95568 - DNA, 20 bp, synthetic construct
  source 1..20: mol_type = other DNA
tagtcagtcacaaaaagaaa

SEQ ID NO: 95569 - DNA, 20 bp, synthetic construct
  source 1..20: mol_type = other DNA
ttagtcagtcacaaaaagaa

SEQ ID NO: 95570 - DNA, 20 bp, synthetic construct
  source 1..20: mol_type = other DNA
attagtcagtcacaaaaaga

SEQ ID NO: 95571 - DNA, 20 bp, synthetic construct
  source 1..20: mol_type = other DNA
tattagtcagtcacaaaaag

SEQ ID NO: 95572 - DNA, 20 bp, synthetic construct
  source 1..20: mol_type = other DNA
atattagtcagtcacaaaaa

SEQ ID NO: 95573 - DNA, 20 bp, synthetic construct
  source 1..20: mol_type = other DNA
aatattagtcagtcacaaaa

SEQ ID NO: 95574 - DNA, 20 bp, synthetic construct
  source 1..20: mol_type = other DNA
gaatattagtcagtcacaaa

SEQ ID NO: 95575 - DNA, 20 bp, synthetic construct
  source 1..20: mol_type = other DNA
ggaatattagtcagtcacaa

SEQ ID NO: 95576 - DNA, 20 bp, synthetic construct
  source 1..20: mol_type = other DNA
aggaatattagtcagtcaca

SEQ ID NO: 95577 - DNA, 20 bp, synthetic construct
  source 1..20: mol_type = other DNA
aaggaatattagtcagtcac

SEQ ID NO: 95578 - DNA, 20 bp, synthetic construct
  source 1..20: mol_type = other DNA
caaggaatattagtcagtca

SEQ ID NO: 95579 - DNA, 20 bp, synthetic construct
  source 1..20: mol_type = other DNA
tcaaggaatattagtcagtc

SEQ ID NO: 95580 - DNA, 20 bp, synthetic construct
  source 1..20: mol_type = other DNA
atcaaggaatattagtcagt

SEQ ID NO: 95581 - DNA, 20 bp, synthetic construct
  source 1..20: mol_type = other DNA
catcaaggaatattagtcag

SEQ ID NO: 95582 - DNA, 20 bp, synthetic construct
  source 1..20: mol_type = other DNA
acatcaaggaatattagtca

SEQ ID NO: 95583 - DNA, 20 bp, synthetic construct
  source 1..20: mol_type = other DNA
cacatcaaggaatattagtc

SEQ ID NO: 95584 - DNA, 20 bp, synthetic construct
  source 1..20: mol_type = other DNA
ccacatcaaggaatattagt

SEQ ID NO: 95585 - DNA, 20 bp, synthetic construct
  source 1..20: mol_type = other DNA
tccacatcaaggaatattag

SEQ ID NO: 95586 - DNA, 20 bp, synthetic construct
  source 1..20: mol_type = other DNA
atccacatcaaggaatatta

SEQ ID NO: 95587 - DNA, 20 bp, synthetic construct
  source 1..20: mol_type = other DNA
tatccacatcaaggaatatt

SEQ ID NO: 95588 - DNA, 20 bp, synthetic construct
  source 1..20: mol_type = other DNA
ttatccacatcaaggaatat

SEQ ID NO: 95589 - DNA, 20 bp, synthetic construct
  source 1..20: mol_type = other DNA
attatccacatcaaggaata

SEQ ID NO: 95590 - DNA, 20 bp, synthetic construct
  source 1..20: mol_type = other DNA
tattatccacatcaaggaat

SEQ ID NO: 95591 - DNA, 20 bp, synthetic construct
  source 1..20: mol_type = other DNA
gtattatccacatcaaggaa

SEQ ID NO: 95592 - DNA, 20 bp, synthetic construct
  source 1..20: mol_type = other DNA
ggtattatccacatcaagga

SEQ ID NO: 95593 - DNA, 20 bp, synthetic construct
  source 1..20: mol_type = other DNA
tggtattatccacatcaagg

SEQ ID NO: 95594 - DNA, 20 bp, synthetic construct
  source 1..20: mol_type = other DNA
gtggtattatccacatcaag

SEQ ID NO: 95595 - DNA, 20 bp, synthetic construct
  source 1..20: mol_type = other DNA
tgtggtattatccacatcaa

SEQ ID NO: 95596 - DNA, 20 bp, synthetic construct
  source 1..20: mol_type = other DNA
atgtggtattatccacatca

SEQ ID NO: 95597 - DNA, 20 bp, synthetic construct
  source 1..20: mol_type = other DNA
aatgtggtattatccacatc

SEQ ID NO: 95598 - DNA, 20 bp, synthetic construct
  source 1..20: mol_type = other DNA
aaatgtggtattatccacat

SEQ ID NO: 95599 - DNA, 20 bp, synthetic construct
  source 1..20: mol_type = other DNA
aaaatgtggtattatccaca

SEQ ID NO: 95600 - DNA, 20 bp, synthetic construct
  source 1..20: mol_type = other DNA
caaaatgtggtattatccac

SEQ ID NO: 95601 - DNA, 20 bp, synthetic construct
  source 1..20: mol_type = other DNA
acaaaatgtggtattatcca

SEQ ID NO: 95602 - DNA, 20 bp, synthetic construct
  source 1..20: mol_type = other DNA
aacaaaatgtggtattatcc

SEQ ID NO: 95603 - DNA, 20 bp, synthetic construct
  source 1..20: mol_type = other DNA
aaacaaaatgtggtattatc

SEQ ID NO: 95604 - DNA, 20 bp, synthetic construct
  source 1..20: mol_type = other DNA
taaacaaaatgtggtattat

SEQ ID NO: 95605 - DNA, 20 bp, synthetic construct
  source 1..20: mol_type = other DNA
ataaacaaaatgtggtatta

SEQ ID NO: 95606 - DNA, 20 bp, synthetic construct
  source 1..20: mol_type = other DNA
gataaacaaaatgtggtatt

SEQ ID NO: 95607 - DNA, 20 bp, synthetic construct
  source 1..20: mol_type = other DNA
ggataaacaaaatgtggtat

SEQ ID NO: 95608 - DNA, 20 bp, synthetic construct
  source 1..20: mol_type = other DNA
tggataaacaaaatgtggta

SEQ ID NO: 95609 - DNA, 20 bp, synthetic construct
  source 1..20: mol_type = other DNA
atggataaacaaaatgtggt

SEQ ID NO: 95610 - DNA, 20 bp, synthetic construct
  source 1..20: mol_type = other DNA
aatggataaacaaaatgtgg

SEQ ID NO: 95611 - DNA, 20 bp, synthetic construct
  source 1..20: mol_type = other DNA
taatggataaacaaaatgtg

SEQ ID NO: 95612 - DNA, 20 bp, synthetic construct
  source 1..20: mol_type = other DNA
ttaatggataaacaaaatgt

SEQ ID NO: 95613 - DNA, 20 bp, synthetic construct
  source 1..20: mol_type = other DNA
attaatggataaacaaaatg

SEQ ID NO: 95614 - DNA, 20 bp, synthetic construct
  source 1..20: mol_type = other DNA
gattaatggataaacaaaat

SEQ ID NO: 95615 - DNA, 20 bp, synthetic construct
  source 1..20: mol_type = other DNA
tgattaatggataaacaaaa

SEQ ID NO: 95616 - DNA, 20 bp, synthetic construct
  source 1..20: mol_type = other DNA
ctgattaatggataaacaaa

SEQ ID NO: 95617 - DNA, 20 bp, synthetic construct
  source 1..20: mol_type = other DNA
actgattaatggataaacaa

SEQ ID NO: 95618 - DNA, 20 bp, synthetic construct
  source 1..20: mol_type = other DNA
aactgattaatggataaaca

SEQ ID NO: 95619 - DNA, 20 bp, synthetic construct
  source 1..20: mol_type = other DNA
aaactgattaatggataaac

SEQ ID NO: 95620 - DNA, 20 bp, synthetic construct
  source 1..20: mol_type = other DNA
caaactgattaatggataaa

SEQ ID NO: 95621 - DNA, 20 bp, synthetic construct
  source 1..20: mol_type = other DNA
acaaactgattaatggataa

SEQ ID NO: 95622 - DNA, 20 bp, synthetic construct
  source 1..20: mol_type = other DNA
tacaaactgattaatggata

SEQ ID NO: 95623 - DNA, 20 bp, synthetic construct
  source 1..20: mol_type = other DNA
ctacaaactgattaatggat

SEQ ID NO: 95624 - DNA, 20 bp, synthetic construct
  source 1..20: mol_type = other DNA
gctacaaactgattaatgga

SEQ ID NO: 95625 - DNA, 20 bp, synthetic construct
  source 1..20: mol_type = other DNA
agctacaaactgattaatgg

SEQ ID NO: 95626 - DNA, 20 bp, synthetic construct
  source 1..20: mol_type = other DNA
tagctacaaactgattaatg

SEQ ID NO: 95627 - DNA, 20 bp, synthetic construct
  source 1..20: mol_type = other DNA
atagctacaaactgattaat

SEQ ID NO: 95628 - DNA, 20 bp, synthetic construct
  source 1..20: mol_type = other DNA
aatagctacaaactgattaa

SEQ ID NO: 95629 - DNA, 20 bp, synthetic construct
  source 1..20: mol_type = other DNA
aaatagctacaaactgatta

SEQ ID NO: 95630 - DNA, 20 bp, synthetic construct
  source 1..20: mol_type = other DNA
caaatagctacaaactgatt

SEQ ID NO: 95631 - DNA, 20 bp, synthetic construct
  source 1..20: mol_type = other DNA
acaaatagctacaaactgat

SEQ ID NO: 95632 - DNA, 20 bp, synthetic construct
  source 1..20: mol_type = other DNA
cacaaatagctacaaactga

SEQ ID NO: 95633 - DNA, 20 bp, synthetic construct
  source 1..20: mol_type = other DNA
ccacaaatagctacaaactg

SEQ ID NO: 95634 - DNA, 20 bp, synthetic construct
  source 1..20: mol_type = other DNA
accacaaatagctacaaact

SEQ ID NO: 95635 - DNA, 20 bp, synthetic construct
  source 1..20: mol_type = other DNA
caccacaaatagctacaaac

SEQ ID NO: 95636 - DNA, 20 bp, synthetic construct
  source 1..20: mol_type = other DNA
acaccacaaatagctacaaa

SEQ ID NO: 95637 - DNA, 20 bp, synthetic construct
  source 1..20: mol_type = other DNA
aacaccacaaatagctacaa

SEQ ID NO: 95638 - DNA, 20 bp, synthetic construct
  source 1..20: mol_type = other DNA
gaacaccacaaatagctaca

SEQ ID NO: 95639 - DNA, 20 bp, synthetic construct
  source 1..20: mol_type = other DNA
agaacaccacaaatagctac

SEQ ID NO: 95640 - DNA, 20 bp, synthetic construct
  source 1..20: mol_type = other DNA
gagaacaccacaaatagcta

SEQ ID NO: 95641 - DNA, 20 bp, synthetic construct
  source 1..20: mol_type = other DNA
tgagaacaccacaaatagct

SEQ ID NO: 95642 - DNA, 20 bp, synthetic construct
  source 1..20: mol_type = other DNA
gtgagaacaccacaaatagc

SEQ ID NO: 95643 - DNA, 20 bp, synthetic construct
  source 1..20: mol_type = other DNA
agtgagaacaccacaaatag

SEQ ID NO: 95644 - DNA, 20 bp, synthetic construct
  source 1..20: mol_type = other DNA
cagtgagaacaccacaaata

SEQ ID NO: 95645 - DNA, 20 bp, synthetic construct
  source 1..20: mol_type = other DNA
acagtgagaacaccacaaat

SEQ ID NO: 95646 - DNA, 20 bp, synthetic construct
  source 1..20: mol_type = other DNA
aacagtgagaacaccacaaa

SEQ ID NO: 95647 - DNA, 20 bp, synthetic construct
  source 1..20: mol_type = other DNA
aaacagtgagaacaccacaa

SEQ ID NO: 95648 - DNA, 20 bp, synthetic construct
  source 1..20: mol_type = other DNA
caaacagtgagaacaccaca

SEQ ID NO: 95649 - DNA, 20 bp, synthetic construct
  source 1..20: mol_type = other DNA
tcaaacagtgagaacaccac

SEQ ID NO: 95650 - DNA, 20 bp, synthetic construct
  source 1..20: mol_type = other DNA
gtcaaacagtgagaacacca

SEQ ID NO: 95651 - DNA, 20 bp, synthetic construct
  source 1..20: mol_type = other DNA
agtcaaacagtgagaacacc

SEQ ID NO: 95652 - DNA, 20 bp, synthetic construct
  source 1..20: mol_type = other DNA
tagtcaaacagtgagaacac

SEQ ID NO: 95653 - DNA, 20 bp, synthetic construct
  source 1..20: mol_type = other DNA
atagtcaaacagtgagaaca

SEQ ID NO: 95654 - DNA, 20 bp, synthetic construct
  source 1..20: mol_type = other DNA
aatagtcaaacagtgagaac

SEQ ID NO: 95655 - DNA, 20 bp, synthetic construct
  source 1..20: mol_type = other DNA
gaatagtcaaacagtgagaa

SEQ ID NO: 95656 - DNA, 20 bp, synthetic construct
  source 1..20: mol_type = other DNA
agaatagtcaaacagtgaga

SEQ ID NO: 95657 - DNA, 20 bp, synthetic construct
  source 1..20: mol_type = other DNA
cagaatagtcaaacagtgag

SEQ ID NO: 95658 - DNA, 20 bp, synthetic construct
  source 1..20: mol_type = other DNA
tcagaatagtcaaacagtga

SEQ ID NO: 95659 - DNA, 20 bp, synthetic construct
  source 1..20: mol_type = other DNA
ttcagaatagtcaaacagtg

SEQ ID NO: 95660 - DNA, 20 bp, synthetic construct
  source 1..20: mol_type = other DNA
attcagaatagtcaaacagt

SEQ ID NO: 95661 - DNA, 20 bp, synthetic construct
  source 1..20: mol_type = other DNA
tattcagaatagtcaaacag

SEQ ID NO: 95662 - DNA, 20 bp, synthetic construct
  source 1..20: mol_type = other DNA
ttattcagaatagtcaaaca

SEQ ID NO: 95663 - DNA, 20 bp, synthetic construct
  source 1..20: mol_type = other DNA
gttattcagaatagtcaaac

SEQ ID NO: 95664 - DNA, 20 bp, synthetic construct
  source 1..20: mol_type = other DNA
tgttattcagaatagtcaaa

SEQ ID NO: 95665 - DNA, 20 bp, synthetic construct
  source 1..20: mol_type = other DNA
gtgttattcagaatagtcaa

SEQ ID NO: 95666 - DNA, 20 bp, synthetic construct
  source 1..20: mol_type = other DNA
agtgttattcagaatagtca

SEQ ID NO: 95667 - DNA, 20 bp, synthetic construct
  source 1..20: mol_type = other DNA
cagtgttattcagaatagtc

SEQ ID NO: 95668 - DNA, 20 bp, synthetic construct
  source 1..20: mol_type = other DNA
gcagtgttattcagaatagt

SEQ ID NO: 95669 - DNA, 20 bp, synthetic construct
  source 1..20: mol_type = other DNA
ggcagtgttattcagaatag

SEQ ID NO: 95670 - DNA, 20 bp, synthetic construct
  source 1..20: mol_type = other DNA
tggcagtgttattcagaata

SEQ ID NO: 95671 - DNA, 20 bp, synthetic construct
  source 1..20: mol_type = other DNA
gtggcagtgttattcagaat

SEQ ID NO: 95672 - DNA, 20 bp, synthetic construct
  source 1..20: mol_type = other DNA
tgtggcagtgttattcagaa

SEQ ID NO: 95673 - DNA, 20 bp, synthetic construct
  source 1..20: mol_type = other DNA
ttgtggcagtgttattcaga

SEQ ID NO: 95674 - DNA, 20 bp, synthetic construct
  source 1..20: mol_type = other DNA
tttgtggcagtgttattcag

SEQ ID NO: 95675 - DNA, 20 bp, synthetic construct
  source 1..20: mol_type = other DNA
gtttgtggcagtgttattca

SEQ ID NO: 95676 - DNA, 20 bp, synthetic construct
  source 1..20: mol_type = other DNA
tgtttgtggcagtgttattc

SEQ ID NO: 95677 - DNA, 20 bp, synthetic construct
  source 1..20: mol_type = other DNA
atgtttgtggcagtgttatt

SEQ ID NO: 95678 - DNA, 20 bp, synthetic construct
  source 1..20: mol_type = other DNA
catgtttgtggcagtgttat

SEQ ID NO: 95679 - DNA, 20 bp, synthetic construct
  source 1..20: mol_type = other DNA
tcatgtttgtggcagtgtta

SEQ ID NO: 95680 - DNA, 20 bp, synthetic construct
  source 1..20: mol_type = other DNA
ctcatgtttgtggcagtgtt

SEQ ID NO: 95681 - DNA, 20 bp, synthetic construct
  source 1..20: mol_type = other DNA
actcatgtttgtggcagtgt

SEQ ID NO: 95682 - DNA, 20 bp, synthetic construct
  source 1..20: mol_type = other DNA
cactcatgtttgtggcagtg

SEQ ID NO: 95683 - DNA, 20 bp, synthetic construct
  source 1..20: mol_type = other DNA
acactcatgtttgtggcagt

SEQ ID NO: 95684 - DNA, 20 bp, synthetic construct
  source 1..20: mol_type = other DNA
cacactcatgtttgtggcag

SEQ ID NO: 95685 - DNA, 20 bp, synthetic construct
  source 1..20: mol_type = other DNA
gcacactcatgtttgtggca

SEQ ID NO: 95686 - DNA, 20 bp, synthetic construct
  source 1..20: mol_type = other DNA
tgcacactcatgtttgtggc

SEQ ID NO: 95687 - DNA, 20 bp, synthetic construct
  source 1..20: mol_type = other DNA
ctgcacactcatgtttgtgg

SEQ ID NO: 95688 - DNA, 20 bp, synthetic construct
  source 1..20: mol_type = other DNA
actgcacactcatgtttgtg

SEQ ID NO: 95689 - DNA, 20 bp, synthetic construct
  source 1..20: mol_type = other DNA
aactgcacactcatgtttgt

SEQ ID NO: 95690 - DNA, 20 bp, synthetic construct
  source 1..20: mol_type = other DNA
aaactgcacactcatgtttg

SEQ ID NO: 95691 - DNA, 20 bp, synthetic construct
  source 1..20: mol_type = other DNA
aaaactgcacactcatgttt

SEQ ID NO: 95692 - DNA, 20 bp, synthetic construct
  source 1..20: mol_type = other DNA
aaaaactgcacactcatgtt

SEQ ID NO: 95693 - DNA, 20 bp, synthetic construct
  source 1..20: mol_type = other DNA
aaaaaactgcacactcatgt

SEQ ID NO: 95694 - DNA, 20 bp, synthetic construct
  source 1..20: mol_type = other DNA
aaaaaaactgcacactcatg

SEQ ID NO: 95695 - DNA, 20 bp, synthetic construct
  source 1..20: mol_type = other DNA
gaaaaaaactgcacactcat

SEQ ID NO: 95696 - DNA, 20 bp, synthetic construct
  source 1..20: mol_type = other DNA
agaaaaaaactgcacactca

SEQ ID NO: 95697 - DNA, 20 bp, synthetic construct
  source 1..20: mol_type = other DNA
gagaaaaaaactgcacactc

SEQ ID NO: 95698 - DNA, 20 bp, synthetic construct
  source 1..20: mol_type = other DNA
cgagaaaaaaactgcacact

SEQ ID NO: 95699 - DNA, 20 bp, synthetic construct
  source 1..20: mol_type = other DNA
acgagaaaaaaactgcacac

SEQ ID NO: 95700 - DNA, 20 bp, synthetic construct
  source 1..20: mol_type = other DNA
gacgagaaaaaaactgcaca

SEQ ID NO: 95701 - DNA, 20 bp, synthetic construct
  source 1..20: mol_type = other DNA
ggacgagaaaaaaactgcac

SEQ ID NO: 95702 - DNA, 20 bp, synthetic construct
  source 1..20: mol_type = other DNA
aggacgagaaaaaaactgca

SEQ ID NO: 95703 - DNA, 20 bp, synthetic construct
  source 1..20: mol_type = other DNA
taggacgagaaaaaaactgc

SEQ ID NO: 95704 - DNA, 20 bp, synthetic construct
  source 1..20: mol_type = other DNA
ataggacgagaaaaaaactg

SEQ ID NO: 95705 - DNA, 20 bp, synthetic construct
  source 1..20: mol_type = other DNA
gataggacgagaaaaaaact

SEQ ID NO: 95706 - DNA, 20 bp, synthetic construct
  source 1..20: mol_type = other DNA
agataggacgagaaaaaaac

SEQ ID NO: 95707 - DNA, 20 bp, synthetic construct
  source 1..20: mol_type = other DNA
aagataggacgagaaaaaaa

SEQ ID NO: 95708 - DNA, 20 bp, synthetic construct
  source 1..20: mol_type = other DNA
aaagataggacgagaaaaaa

SEQ ID NO: 95709 - DNA, 20 bp, synthetic construct
  source 1..20: mol_type = other DNA
aaaagataggacgagaaaaa

SEQ ID NO: 95710 - DNA, 20 bp, synthetic construct
  source 1..20: mol_type = other DNA
gaaaagataggacgagaaaa

SEQ ID NO: 95711 - DNA, 20 bp, synthetic construct
  source 1..20: mol_type = other DNA
tgaaaagataggacgagaaa

SEQ ID NO: 95712 - DNA, 20 bp, synthetic construct
  source 1..20: mol_type = other DNA
atgaaaagataggacgagaa

SEQ ID NO: 95713 - DNA, 20 bp, synthetic construct
  source 1..20: mol_type = other DNA
aatgaaaagataggacgaga

SEQ ID NO: 95714 - DNA, 20 bp, synthetic construct
  source 1..20: mol_type = other DNA
aaatgaaaagataggacgag

SEQ ID NO: 95715 - DNA, 20 bp, synthetic construct
  source 1..20: mol_type = other DNA
gaaatgaaaagataggacga

SEQ ID NO: 95716 - DNA, 20 bp, synthetic construct
  source 1..20: mol_type = other DNA
agaaatgaaaagataggacg

SEQ ID NO: 95717 - DNA, 20 bp, synthetic construct
  source 1..20: mol_type = other DNA
aagaaatgaaaagataggac

SEQ ID NO: 95718 - DNA, 20 bp, synthetic construct
  source 1..20: mol_type = other DNA
aaagaaatgaaaagatagga

SEQ ID NO: 95719 - DNA, 20 bp, synthetic construct
  source 1..20: mol_type = other DNA
aaaagaaatgaaaagatagg

SEQ ID NO: 95720 - DNA, 20 bp, synthetic construct
  source 1..20: mol_type = other DNA
caaaagaaatgaaaagatag

SEQ ID NO: 95721 - DNA, 20 bp, synthetic construct
  source 1..20: mol_type = other DNA
acaaaagaaatgaaaagata

SEQ ID NO: 95722 - DNA, 20 bp, synthetic construct
  source 1..20: mol_type = other DNA
cacaaaagaaatgaaaagat

SEQ ID NO: 95723 - DNA, 20 bp, synthetic construct
  source 1..20: mol_type = other DNA
acacaaaagaaatgaaaaga

SEQ ID NO: 95724 - DNA, 20 bp, synthetic construct
  source 1..20: mol_type = other DNA
tacacaaaagaaatgaaaag

SEQ ID NO: 95725 - DNA, 20 bp, synthetic construct
  source 1..20: mol_type = other DNA
gtacacaaaagaaatgaaaa

SEQ ID NO: 95726 - DNA, 20 bp, synthetic construct
  source 1..20: mol_type = other DNA
ggtacacaaaagaaatgaaa

SEQ ID NO: 95727 - DNA, 20 bp, synthetic construct
  source 1..20: mol_type = other DNA
aggtacacaaaagaaatgaa

SEQ ID NO: 95728 - DNA, 20 bp, synthetic construct
  source 1..20: mol_type = other DNA
taggtacacaaaagaaatga

SEQ ID NO: 95729 - DNA, 20 bp, synthetic construct
  source 1..20: mol_type = other DNA
gtaggtacacaaaagaaatg

SEQ ID NO: 95730 - DNA, 20 bp, synthetic construct
  source 1..20: mol_type = other DNA
ggtaggtacacaaaagaaat

SEQ ID NO: 95731 - DNA, 20 bp, synthetic construct
  source 1..20: mol_type = other DNA
aggtaggtacacaaaagaaa

SEQ ID NO: 95732 - DNA, 20 bp, synthetic construct
  source 1..20: mol_type = other DNA
taggtaggtacacaaaagaa

SEQ ID NO: 95733 - DNA, 20 bp, synthetic construct
  source 1..20: mol_type = other DNA
ctaggtaggtacacaaaaga

SEQ ID NO: 95734 - DNA, 20 bp, synthetic construct
  source 1..20: mol_type = other DNA
cctaggtaggtacacaaaag

SEQ ID NO: 95735 - DNA, 20 bp, synthetic construct
  source 1..20: mol_type = other DNA
tcctaggtaggtacacaaaa

SEQ ID NO: 95736 - DNA, 20 bp, synthetic construct
  source 1..20: mol_type = other DNA
ctcctaggtaggtacacaaa

SEQ ID NO: 95737 - DNA, 20 bp, synthetic construct
  source 1..20: mol_type = other DNA
actcctaggtaggtacacaa

SEQ ID NO: 95738 - DNA, 20 bp, synthetic construct
  source 1..20: mol_type = other DNA
aactcctaggtaggtacaca

SEQ ID NO: 95739 - DNA, 20 bp, synthetic construct
  source 1..20: mol_type = other DNA
caactcctaggtaggtacac

SEQ ID NO: 95740 - DNA, 20 bp, synthetic construct
  source 1..20: mol_type = other DNA
tcaactcctaggtaggtaca

SEQ ID NO: 95741 - DNA, 20 bp, synthetic construct
  source 1..20: mol_type = other DNA
ttcaactcctaggtaggtac

SEQ ID NO: 95742 - DNA, 20 bp, synthetic construct
  source 1..20: mol_type = other DNA
attcaactcctaggtaggta

SEQ ID NO: 95743 - DNA, 20 bp, synthetic construct
  source 1..20: mol_type = other DNA
aattcaactcctaggtaggt

SEQ ID NO: 95744 - DNA, 20 bp, synthetic construct
  source 1..20: mol_type = other DNA
caattcaactcctaggtagg

SEQ ID NO: 95745 - DNA, 20 bp, synthetic construct
  source 1..20: mol_type = other DNA
gcaattcaactcctaggtag

SEQ ID NO: 95746 - DNA, 20 bp, synthetic construct
  source 1..20: mol_type = other DNA
agcaattcaactcctaggta

SEQ ID NO: 95747 - DNA, 20 bp, synthetic construct
  source 1..20: mol_type = other DNA
cagcaattcaactcctaggt

SEQ ID NO: 95748 - DNA, 20 bp, synthetic construct
  source 1..20: mol_type = other DNA
ccagcaattcaactcctagg

SEQ ID NO: 95749 - DNA, 20 bp, synthetic construct
  source 1..20: mol_type = other DNA
cccagcaattcaactcctag

SEQ ID NO: 95750 - DNA, 20 bp, synthetic construct
  source 1..20: mol_type = other DNA
acccagcaattcaactccta

SEQ ID NO: 95751 - DNA, 20 bp, synthetic construct
  source 1..20: mol_type = other DNA
gacccagcaattcaactcct

SEQ ID NO: 95752 - DNA, 20 bp, synthetic construct
  source 1..20: mol_type = other DNA
tgacccagcaattcaactcc

SEQ ID NO: 95753 - DNA, 20 bp, synthetic construct
  source 1..20: mol_type = other DNA
atgacccagcaattcaactc

SEQ ID NO: 95754 - DNA, 20 bp, synthetic construct
  source 1..20: mol_type = other DNA
tatgacccagcaattcaact

SEQ ID NO: 95755 - DNA, 20 bp, synthetic construct
  source 1..20: mol_type = other DNA
atatgacccagcaattcaac

SEQ ID NO: 95756 - DNA, 20 bp, synthetic construct
  source 1..20: mol_type = other DNA
catatgacccagcaattcaa

SEQ ID NO: 95757 - DNA, 20 bp, synthetic construct
  source 1..20: mol_type = other DNA
ccatatgacccagcaattca

SEQ ID NO: 95758 - DNA, 20 bp, synthetic construct
  source 1..20: mol_type = other DNA
gccatatgacccagcaattc

SEQ ID NO: 95759 - DNA, 20 bp, synthetic construct
  source 1..20: mol_type = other DNA
tgccatatgacccagcaatt

SEQ ID NO: 95760 - DNA, 20 bp, synthetic construct
  source 1..20: mol_type = other DNA
ttgccatatgacccagcaat

SEQ ID NO: 95761 - DNA, 20 bp, synthetic construct
  source 1..20: mol_type = other DNA
gttgccatatgacccagcaa

SEQ ID NO: 95762 - DNA, 20 bp, synthetic construct
  source 1..20: mol_type = other DNA
agttgccatatgacccagca

SEQ ID NO: 95763 - DNA, 20 bp, synthetic construct
  source 1..20: mol_type = other DNA
cagttgccatatgacccagc

SEQ ID NO: 95764 - DNA, 20 bp, synthetic construct
  source 1..20: mol_type = other DNA
acagttgccatatgacccag

SEQ ID NO: 95765 - DNA, 20 bp, synthetic construct
  source 1..20: mol_type = other DNA
cacagttgccatatgaccca

SEQ ID NO: 95766 - DNA, 20 bp, synthetic construct
  source 1..20: mol_type = other DNA
acacagttgccatatgaccc

SEQ ID NO: 95767 - DNA, 20 bp, synthetic construct
  source 1..20: mol_type = other DNA
aacacagttgccatatgacc

SEQ ID NO: 95768 - DNA, 20 bp, synthetic construct
  source 1..20: mol_type = other DNA
aaacacagttgccatatgac

SEQ ID NO: 95769 - DNA, 20 bp, synthetic construct
  source 1..20: mol_type = other DNA
taaacacagttgccatatga

SEQ ID NO: 95770 - DNA, 20 bp, synthetic construct
  source 1..20: mol_type = other DNA
ttaaacacagttgccatatg

SEQ ID NO: 95771 - DNA, 20 bp, synthetic construct
  source 1..20: mol_type = other DNA
gttaaacacagttgccatat

SEQ ID NO: 95772 - DNA, 20 bp, synthetic construct
  source 1..20: mol_type = other DNA
ggttaaacacagttgccata

SEQ ID NO: 95773 - DNA, 20 bp, synthetic construct
  source 1..20: mol_type = other DNA
aggttaaacacagttgccat

SEQ ID NO: 95774 - DNA, 20 bp, synthetic construct
  source 1..20: mol_type = other DNA
aaggttaaacacagttgcca

SEQ ID NO: 95775 - DNA, 20 bp, synthetic construct
  source 1..20: mol_type = other DNA
aaaggttaaacacagttgcc

SEQ ID NO: 95776 - DNA, 20 bp, synthetic construct
  source 1..20: mol_type = other DNA
aaaaggttaaacacagttgc

SEQ ID NO: 95777 - DNA, 20 bp, synthetic construct
  source 1..20: mol_type = other DNA
caaaaggttaaacacagttg

SEQ ID NO: 95778 - DNA, 20 bp, synthetic construct
  source 1..20: mol_type = other DNA
tcaaaaggttaaacacagtt

SEQ ID NO: 95779 - DNA, 20 bp, synthetic construct
  source 1..20: mol_type = other DNA
ctcaaaaggttaaacacagt

SEQ ID NO: 95780 - DNA, 20 bp, synthetic construct
  source 1..20: mol_type = other DNA
cctcaaaaggttaaacacag

SEQ ID NO: 95781 - DNA, 20 bp, synthetic construct
  source 1..20: mol_type = other DNA
tcctcaaaaggttaaacaca

SEQ ID NO: 95782 - DNA, 20 bp, synthetic construct
  source 1..20: mol_type = other DNA
ttcctcaaaaggttaaacac

SEQ ID NO: 95783 - DNA, 20 bp, synthetic construct
  source 1..20: mol_type = other DNA
gttcctcaaaaggttaaaca

SEQ ID NO: 95784 - DNA, 20 bp, synthetic construct
  source 1..20: mol_type = other DNA
agttcctcaaaaggttaaac

SEQ ID NO: 95785 - DNA, 20 bp, synthetic construct
  source 1..20: mol_type = other DNA
tagttcctcaaaaggttaaa

SEQ ID NO: 95786 - DNA, 20 bp, synthetic construct
  source 1..20: mol_type = other DNA
gtagttcctcaaaaggttaa

SEQ ID NO: 95787 - DNA, 20 bp, synthetic construct
  source 1..20: mol_type = other DNA
ggtagttcctcaaaaggtta

SEQ ID NO: 95788 - DNA, 20 bp, synthetic construct
  source 1..20: mol_type = other DNA
tggtagttcctcaaaaggtt

SEQ ID NO: 95789 - DNA, 20 bp, synthetic construct
  source 1..20: mol_type = other DNA
ttggtagttcctcaaaaggt

SEQ ID NO: 95790 - DNA, 20 bp, synthetic construct
  source 1..20: mol_type = other DNA
cttggtagttcctcaaaagg

SEQ ID NO: 95791 - DNA, 20 bp, synthetic construct
  source 1..20: mol_type = other DNA
gcttggtagttcctcaaaag

SEQ ID NO: 95792 - DNA, 20 bp, synthetic construct
  source 1..20: mol_type = other DNA
agcttggtagttcctcaaaa

SEQ ID NO: 95793 - DNA, 20 bp, synthetic construct
  source 1..20: mol_type = other DNA
tagcttggtagttcctcaaa

SEQ ID NO: 95794 - DNA, 20 bp, synthetic construct
  source 1..20: mol_type = other DNA
atagcttggtagttcctcaa

SEQ ID NO: 95795 - DNA, 20 bp, synthetic construct
  source 1..20: mol_type = other DNA
aatagcttggtagttcctca

SEQ ID NO: 95796 - DNA, 20 bp, synthetic construct
  source 1..20: mol_type = other DNA
aaatagcttggtagttcctc

SEQ ID NO: 95797 - DNA, 20 bp, synthetic construct
  source 1..20: mol_type = other DNA
caaatagcttggtagttcct

SEQ ID NO: 95798 - DNA, 20 bp, synthetic construct
  source 1..20: mol_type = other DNA
gcaaatagcttggtagttcc

SEQ ID NO: 95799 - DNA, 20 bp, synthetic construct
  source 1..20: mol_type = other DNA
ggcaaatagcttggtagttc

SEQ ID NO: 95800 - DNA, 20 bp, synthetic construct
  source 1..20: mol_type = other DNA
tggcaaatagcttggtagtt

SEQ ID NO: 95801 - DNA, 20 bp, synthetic construct
  source 1..20: mol_type = other DNA
ttggcaaatagcttggtagt

SEQ ID NO: 95802 - DNA, 20 bp, synthetic construct
  source 1..20: mol_type = other DNA
cttggcaaatagcttggtag

SEQ ID NO: 95803 - DNA, 20 bp, synthetic construct
  source 1..20: mol_type = other DNA
tcttggcaaatagcttggta

SEQ ID NO: 95804 - DNA, 20 bp, synthetic construct
  source 1..20: mol_type = other DNA
atcttggcaaatagcttggt

SEQ ID NO: 95805 - DNA, 20 bp, synthetic construct
  source 1..20: mol_type = other DNA
tatcttggcaaatagcttgg

SEQ ID NO: 95806 - DNA, 20 bp, synthetic construct
  source 1..20: mol_type = other DNA
atatcttggcaaatagcttg

SEQ ID NO: 95807 - DNA, 20 bp, synthetic construct
  source 1..20: mol_type = other DNA
gatatcttggcaaatagctt

SEQ ID NO: 95808 - DNA, 20 bp, synthetic construct
  source 1..20: mol_type = other DNA
agatatcttggcaaatagct

SEQ ID NO: 95809 - DNA, 20 bp, synthetic construct
  source 1..20: mol_type = other DNA
tagatatcttggcaaatagc

SEQ ID NO: 95810 - DNA, 20 bp, synthetic construct
  source 1..20: mol_type = other DNA
gtagatatcttggcaaatag

SEQ ID NO: 95811 - DNA, 20 bp, synthetic construct
  source 1..20: mol_type = other DNA
tgtagatatcttggcaaata

SEQ ID NO: 95812 - DNA, 20 bp, synthetic construct
  source 1..20: mol_type = other DNA
gtgtagatatcttggcaaat

SEQ ID NO: 95813 - DNA, 20 bp, synthetic construct
  source 1..20: mol_type = other DNA
agtgtagatatcttggcaaa

SEQ ID NO: 95814 - DNA, 20 bp, synthetic construct
  source 1..20: mol_type = other DNA
tagtgtagatatcttggcaa

SEQ ID NO: 95815 - DNA, 20 bp, synthetic construct
  source 1..20: mol_type = other DNA
atagtgtagatatcttggca

SEQ ID NO: 95816 - DNA, 20 bp, synthetic construct
  source 1..20: mol_type = other DNA
aatagtgtagatatcttggc

SEQ ID NO: 95817 - DNA, 20 bp, synthetic construct
  source 1..20: mol_type = other DNA
aaatagtgtagatatcttgg

SEQ ID NO: 95818 - DNA, 20 bp, synthetic construct
  source 1..20: mol_type = other DNA
aaaatagtgtagatatcttg

SEQ ID NO: 95819 - DNA, 20 bp, synthetic construct
  source 1..20: mol_type = other DNA
taaaatagtgtagatatctt

SEQ ID NO: 95820 - DNA, 20 bp, synthetic construct
  source 1..20: mol_type = other DNA
gtaaaatagtgtagatatct

SEQ ID NO: 95821 - DNA, 20 bp, synthetic construct
  source 1..20: mol_type = other DNA
tgtaaaatagtgtagatatc

SEQ ID NO: 95822 - DNA, 20 bp, synthetic construct
  source 1..20: mol_type = other DNA
atgtaaaatagtgtagatat

SEQ ID NO: 95823 - DNA, 20 bp, synthetic construct
  source 1..20: mol_type = other DNA
aatgtaaaatagtgtagata

SEQ ID NO: 95824 - DNA, 20 bp, synthetic construct
  source 1..20: mol_type = other DNA
gaatgtaaaatagtgtagat

SEQ ID NO: 95825 - DNA, 20 bp, synthetic construct
  source 1..20: mol_type = other DNA
ggaatgtaaaatagtgtaga

SEQ ID NO: 95826 - DNA, 20 bp, synthetic construct
  source 1..20: mol_type = other DNA
gggaatgtaaaatagtgtag

SEQ ID NO: 95827 - DNA, 20 bp, synthetic construct
  source 1..20: mol_type = other DNA
tgggaatgtaaaatagtgta

SEQ ID NO: 95828 - DNA, 20 bp, synthetic construct
  source 1..20: mol_type = other DNA
gtgggaatgtaaaatagtgt

SEQ ID NO: 95829 - DNA, 20 bp, synthetic construct
  source 1..20: mol_type = other DNA
ggtgggaatgtaaaatagtg

SEQ ID NO: 95830 - DNA, 20 bp, synthetic construct
  source 1..20: mol_type = other DNA
tggtgggaatgtaaaatagt

SEQ ID NO: 95831 - DNA, 20 bp, synthetic construct
  source 1..20: mol_type = other DNA
ctggtgggaatgtaaaatag

SEQ ID NO: 95832 - DNA, 20 bp, synthetic construct
  source 1..20: mol_type = other DNA
gctggtgggaatgtaaaata

SEQ ID NO: 95833 - DNA, 20 bp, synthetic construct
  source 1..20: mol_type = other DNA
tgctggtgggaatgtaaaat

SEQ ID NO: 95834 - DNA, 20 bp, synthetic construct
  source 1..20: mol_type = other DNA
ctgctggtgggaatgtaaaa

SEQ ID NO: 95835 - DNA, 20 bp, synthetic construct
  source 1..20: mol_type = other DNA
cctgctggtgggaatgtaaa

SEQ ID NO: 95836 - DNA, 20 bp, synthetic construct
  source 1..20: mol_type = other DNA
ccctgctggtgggaatgtaa

SEQ ID NO: 95837 - DNA, 20 bp, synthetic construct
  source 1..20: mol_type = other DNA
accctgctggtgggaatgta

SEQ ID NO: 95838 - DNA, 20 bp, synthetic construct
  source 1..20: mol_type = other DNA
taccctgctggtgggaatgt

SEQ ID NO: 95839 - DNA, 20 bp, synthetic construct
  source 1..20: mol_type = other DNA
ataccctgctggtgggaatg

SEQ ID NO: 95840 - DNA, 20 bp, synthetic construct
  source 1..20: mol_type = other DNA
cataccctgctggtgggaat

SEQ ID NO: 95841 - DNA, 20 bp, synthetic construct
  source 1..20: mol_type = other DNA
tcataccctgctggtgggaa

SEQ ID NO: 95842 - DNA, 20 bp, synthetic construct
  source 1..20: mol_type = other DNA
ctcataccctgctggtggga

SEQ ID NO: 95843 - DNA, 20 bp, synthetic construct
  source 1..20: mol_type = other DNA
cctcataccctgctggtggg

SEQ ID NO: 95844 - DNA, 20 bp, synthetic construct
  source 1..20: mol_type = other DNA
ccctcataccctgctggtgg

SEQ ID NO: 95845 - DNA, 20 bp, synthetic construct
  source 1..20: mol_type = other DNA
accctcataccctgctggtg

SEQ ID NO: 95846 - DNA, 20 bp, synthetic construct
  source 1..20: mol_type = other DNA
aaccctcataccctgctggt

SEQ ID NO: 95847 - DNA, 20 bp, synthetic construct
  source 1..20: mol_type = other DNA
aaaccctcataccctgctgg

SEQ ID NO: 95848 - DNA, 20 bp, synthetic construct
  source 1..20: mol_type = other DNA
gaaaccctcataccctgctg

SEQ ID NO: 95849 - DNA, 20 bp, synthetic construct
  source 1..20: mol_type = other DNA
agaaaccctcataccctgct

SEQ ID NO: 95850 - DNA, 20 bp, synthetic construct
  source 1..20: mol_type = other DNA
cagaaaccctcataccctgc

SEQ ID NO: 95851 - DNA, 20 bp, synthetic construct
  source 1..20: mol_type = other DNA
acagaaaccctcataccctg

SEQ ID NO: 95852 - DNA, 20 bp, synthetic construct
  source 1..20: mol_type = other DNA
aacagaaaccctcataccct

SEQ ID NO: 95853 - DNA, 20 bp, synthetic construct
  source 1..20: mol_type = other DNA
aaacagaaaccctcataccc

SEQ ID NO: 95854 - DNA, 20 bp, synthetic construct
  source 1..20: mol_type = other DNA
gaaacagaaaccctcatacc

SEQ ID NO: 95855 - DNA, 20 bp, synthetic construct
  source 1..20: mol_type = other DNA
agaaacagaaaccctcatac

SEQ ID NO: 95856 - DNA, 20 bp, synthetic construct
  source 1..20: mol_type = other DNA
gagaaacagaaaccctcata

SEQ ID NO: 95857 - DNA, 20 bp, synthetic construct
  source 1..20: mol_type = other DNA
ggagaaacagaaaccctcat

SEQ ID NO: 95858 - DNA, 20 bp, synthetic construct
  source 1..20: mol_type = other DNA
tggagaaacagaaaccctca

SEQ ID NO: 95859 - DNA, 20 bp, synthetic construct
  source 1..20: mol_type = other DNA
gtggagaaacagaaaccctc

SEQ ID NO: 95860 - DNA, 20 bp, synthetic construct
  source 1..20: mol_type = other DNA
tgtggagaaacagaaaccct

SEQ ID NO: 95861 - DNA, 20 bp, synthetic construct
  source 1..20: mol_type = other DNA
atgtggagaaacagaaaccc

SEQ ID NO: 95862 - DNA, 20 bp, synthetic construct
  source 1..20: mol_type = other DNA
gatgtggagaaacagaaacc

SEQ ID NO: 95863 - DNA, 20 bp, synthetic construct
  source 1..20: mol_type = other DNA
ggatgtggagaaacagaaac

SEQ ID NO: 95864 - DNA, 20 bp, synthetic construct
  source 1..20: mol_type = other DNA
aggatgtggagaaacagaaa

SEQ ID NO: 95865 - DNA, 20 bp, synthetic construct
  source 1..20: mol_type = other DNA
aaggatgtggagaaacagaa

SEQ ID NO: 95866 - DNA, 20 bp, synthetic construct
  source 1..20: mol_type = other DNA
caaggatgtggagaaacaga

SEQ ID NO: 95867 - DNA, 20 bp, synthetic construct
  source 1..20: mol_type = other DNA
gcaaggatgtggagaaacag

SEQ ID NO: 95868 - DNA, 20 bp, synthetic construct
  source 1..20: mol_type = other DNA
agcaaggatgtggagaaaca

SEQ ID NO: 95869 - DNA, 20 bp, synthetic construct
  source 1..20: mol_type = other DNA
tagcaaggatgtggagaaac

SEQ ID NO: 95870 - DNA, 20 bp, synthetic construct
  source 1..20: mol_type = other DNA
ttagcaaggatgtggagaaa

SEQ ID NO: 95871 - DNA, 20 bp, synthetic construct
  source 1..20: mol_type = other DNA
gttagcaaggatgtggagaa

SEQ ID NO: 95872 - DNA, 20 bp, synthetic construct
  source 1..20: mol_type = other DNA
tgttagcaaggatgtggaga

SEQ ID NO: 95873 - DNA, 20 bp, synthetic construct
  source 1..20: mol_type = other DNA
gtgttagcaaggatgtggag

SEQ ID NO: 95874 - DNA, 20 bp, synthetic construct
  source 1..20: mol_type = other DNA
agtgttagcaaggatgtgga

SEQ ID NO: 95875 - DNA, 20 bp, synthetic construct
  source 1..20: mol_type = other DNA
aagtgttagcaaggatgtgg

SEQ ID NO: 95876 - DNA, 20 bp, synthetic construct
  source 1..20: mol_type = other DNA
taagtgttagcaaggatgtg

SEQ ID NO: 95877 - DNA, 20 bp, synthetic construct
  source 1..20: mol_type = other DNA
ataagtgttagcaaggatgt

SEQ ID NO: 95878 - DNA, 20 bp, synthetic construct
  source 1..20: mol_type = other DNA
aataagtgttagcaaggatg

SEQ ID NO: 95879 - DNA, 20 bp, synthetic construct
  source 1..20: mol_type = other DNA
caataagtgttagcaaggat

SEQ ID NO: 95880 - DNA, 20 bp, synthetic construct
  source 1..20: mol_type = other DNA
acaataagtgttagcaagga

SEQ ID NO: 95881 - DNA, 20 bp, synthetic construct
  source 1..20: mol_type = other DNA
gacaataagtgttagcaagg

SEQ ID NO: 95882 - DNA, 20 bp, synthetic construct
  source 1..20: mol_type = other DNA
agacaataagtgttagcaag

SEQ ID NO: 95883 - DNA, 20 bp, synthetic construct
  source 1..20: mol_type = other DNA
aagacaataagtgttagcaa

SEQ ID NO: 95884 - DNA, 20 bp, synthetic construct
  source 1..20: mol_type = other DNA
caagacaataagtgttagca

SEQ ID NO: 95885 - DNA, 20 bp, synthetic construct
  source 1..20: mol_type = other DNA
acaagacaataagtgttagc

SEQ ID NO: 95886 - DNA, 20 bp, synthetic construct
  source 1..20: mol_type = other DNA
gacaagacaataagtgttag

SEQ ID NO: 95887 - DNA, 20 bp, synthetic construct
  source 1..20: mol_type = other DNA
agacaagacaataagtgtta

SEQ ID NO: 95888 - DNA, 20 bp, synthetic construct
  source 1..20: mol_type = other DNA
aagacaagacaataagtgtt

SEQ ID NO: 95889 - DNA, 20 bp, synthetic construct
  source 1..20: mol_type = other DNA
aaagacaagacaataagtgt

SEQ ID NO: 95890 - DNA, 20 bp, synthetic construct
  source 1..20: mol_type = other DNA
aaaagacaagacaataagtg

SEQ ID NO: 95891 - DNA, 20 bp, synthetic construct
  source 1..20: mol_type = other DNA
aaaaagacaagacaataagt

SEQ ID NO: 95892 - DNA, 20 bp, synthetic construct
  source 1..20: mol_type = other DNA
aaaaaagacaagacaataag

SEQ ID NO: 95893 - DNA, 20 bp, synthetic construct
  source 1..20: mol_type = other DNA
caaaaaagacaagacaataa

SEQ ID NO: 95894 - DNA, 20 bp, synthetic construct
  source 1..20: mol_type = other DNA
tcaaaaaagacaagacaata

SEQ ID NO: 95895 - DNA, 20 bp, synthetic construct
  source 1..20: mol_type = other DNA
atcaaaaaagacaagacaat

SEQ ID NO: 95896 - DNA, 20 bp, synthetic construct
  source 1..20: mol_type = other DNA
aatcaaaaaagacaagacaa

SEQ ID NO: 95897 - DNA, 20 bp, synthetic construct
  source 1..20: mol_type = other DNA
taatcaaaaaagacaagaca

SEQ ID NO: 95898 - DNA, 20 bp, synthetic construct
  source 1..20: mol_type = other DNA
ataatcaaaaaagacaagac

SEQ ID NO: 95899 - DNA, 20 bp, synthetic construct
  source 1..20: mol_type = other DNA
tataatcaaaaaagacaaga

SEQ ID NO: 95900 - DNA, 20 bp, synthetic construct
  source 1..20: mol_type = other DNA
ctataatcaaaaaagacaag

SEQ ID NO: 95901 - DNA, 20 bp, synthetic construct
  source 1..20: mol_type = other DNA
actataatcaaaaaagacaa

SEQ ID NO: 95902 - DNA, 20 bp, synthetic construct
  source 1..20: mol_type = other DNA
gactataatcaaaaaagaca

SEQ ID NO: 95903 - DNA, 20 bp, synthetic construct
  source 1..20: mol_type = other DNA
tgactataatcaaaaaagac

SEQ ID NO: 95904 - DNA, 20 bp, synthetic construct
  source 1..20: mol_type = other DNA
atgactataatcaaaaaaga

SEQ ID NO: 95905 - DNA, 20 bp, synthetic construct
  source 1..20: mol_type = other DNA
gatgactataatcaaaaaag

SEQ ID NO: 95906 - DNA, 20 bp, synthetic construct
  source 1..20: mol_type = other DNA
ggatgactataatcaaaaaa

SEQ ID NO: 95907 - DNA, 20 bp, synthetic construct
  source 1..20: mol_type = other DNA
aggatgactataatcaaaaa

SEQ ID NO: 95908 - DNA, 20 bp, synthetic construct
  source 1..20: mol_type = other DNA
aaggatgactataatcaaaa

SEQ ID NO: 95909 - DNA, 20 bp, synthetic construct
  source 1..20: mol_type = other DNA
caaggatgactataatcaaa

SEQ ID NO: 95910 - DNA, 20 bp, synthetic construct
  source 1..20: mol_type = other DNA
acaaggatgactataatcaa

SEQ ID NO: 95911 - DNA, 20 bp, synthetic construct
  source 1..20: mol_type = other DNA
cacaaggatgactataatca

SEQ ID NO: 95912 - DNA, 20 bp, synthetic construct
  source 1..20: mol_type = other DNA
ccacaaggatgactataatc

SEQ ID NO: 95913 - DNA, 20 bp, synthetic construct
  source 1..20: mol_type = other DNA
cccacaaggatgactataat

SEQ ID NO: 95914 - DNA, 20 bp, synthetic construct
  source 1..20: mol_type = other DNA
acccacaaggatgactataa

SEQ ID NO: 95915 - DNA, 20 bp, synthetic construct
  source 1..20: mol_type = other DNA
cacccacaaggatgactata

SEQ ID NO: 95916 - DNA, 20 bp, synthetic construct
  source 1..20: mol_type = other DNA
acacccacaaggatgactat

SEQ ID NO: 95917 - DNA, 20 bp, synthetic construct
  source 1..20: mol_type = other DNA
cacacccacaaggatgacta

SEQ ID NO: 95918 - DNA, 20 bp, synthetic construct
  source 1..20: mol_type = other DNA
tcacacccacaaggatgact

SEQ ID NO: 95919 - DNA, 20 bp, synthetic construct
  source 1..20: mol_type = other DNA
ttcacacccacaaggatgac

SEQ ID NO: 95920 - DNA, 20 bp, synthetic construct
  source 1..20: mol_type = other DNA
cttcacacccacaaggatga

SEQ ID NO: 95921 - DNA, 20 bp, synthetic construct
  source 1..20: mol_type = other DNA
acttcacacccacaaggatg

SEQ ID NO: 95922 - DNA, 20 bp, synthetic construct
  source 1..20: mol_type = other DNA
cacttcacacccacaaggat

SEQ ID NO: 95923 - DNA, 20 bp, synthetic construct
  source 1..20: mol_type = other DNA
acacttcacacccacaagga

SEQ ID NO: 95924 - DNA, 20 bp, synthetic construct
  source 1..20: mol_type = other DNA
aacacttcacacccacaagg

SEQ ID NO: 95925 - DNA, 20 bp, synthetic construct
  source 1..20: mol_type = other DNA
taacacttcacacccacaag

SEQ ID NO: 95926 - DNA, 20 bp, synthetic construct
  source 1..20: mol_type = other DNA
ttaacacttcacacccacaa

SEQ ID NO: 95927 - DNA, 20 bp, synthetic construct
  source 1..20: mol_type = other DNA
gttaacacttcacacccaca

SEQ ID NO: 95928 - DNA, 20 bp, synthetic construct
  source 1..20: mol_type = other DNA
ggttaacacttcacacccac

SEQ ID NO: 95929 - DNA, 20 bp, synthetic construct
  source 1..20: mol_type = other DNA
aggttaacacttcacaccca

SEQ ID NO: 95930 - DNA, 20 bp, synthetic construct
  source 1..20: mol_type = other DNA
gaggttaacacttcacaccc

SEQ ID NO: 95931 - DNA, 20 bp, synthetic construct
  source 1..20: mol_type = other DNA
tgaggttaacacttcacacc

SEQ ID NO: 95932 - DNA, 20 bp, synthetic construct
  source 1..20: mol_type = other DNA
atgaggttaacacttcacac

SEQ ID NO: 95933 - DNA, 20 bp, synthetic construct
  source 1..20: mol_type = other DNA
aatgaggttaacacttcaca

SEQ ID NO: 95934 - DNA, 20 bp, synthetic construct
  source 1..20: mol_type = other DNA
caatgaggttaacacttcac

SEQ ID NO: 95935 - DNA, 20 bp, synthetic construct
  source 1..20: mol_type = other DNA
acaatgaggttaacacttca

SEQ ID NO: 95936 - DNA, 20 bp, synthetic construct
  source 1..20: mol_type = other DNA
cacaatgaggttaacacttc

SEQ ID NO: 95937 - DNA, 20 bp, synthetic construct
  source 1..20: mol_type = other DNA
ccacaatgaggttaacactt

SEQ ID NO: 95938 - DNA, 20 bp, synthetic construct
  source 1..20: mol_type = other DNA
gccacaatgaggttaacact

SEQ ID NO: 95939 - DNA, 20 bp, synthetic construct
  source 1..20: mol_type = other DNA
agccacaatgaggttaacac

SEQ ID NO: 95940 - DNA, 20 bp, synthetic construct
  source 1..20: mol_type = other DNA
aagccacaatgaggttaaca

SEQ ID NO: 95941 - DNA, 20 bp, synthetic construct
  source 1..20: mol_type = other DNA
aaagccacaatgaggttaac

SEQ ID NO: 95942 - DNA, 20 bp, synthetic construct
  source 1..20: mol_type = other DNA
taaagccacaatgaggttaa

SEQ ID NO: 95943 - DNA, 20 bp, synthetic construct
  source 1..20: mol_type = other DNA
ttaaagccacaatgaggtta

SEQ ID NO: 95944 - DNA, 20 bp, synthetic construct
  source 1..20: mol_type = other DNA
attaaagccacaatgaggtt

SEQ ID NO: 95945 - DNA, 20 bp, synthetic construct
  source 1..20: mol_type = other DNA
cattaaagccacaatgaggt

SEQ ID NO: 95946 - DNA, 20 bp, synthetic construct
  source 1..20: mol_type = other DNA
acattaaagccacaatgagg

SEQ ID NO: 95947 - DNA, 20 bp, synthetic construct
  source 1..20: mol_type = other DNA
cacattaaagccacaatgag

SEQ ID NO: 95948 - DNA, 20 bp, synthetic construct
  source 1..20: mol_type = other DNA
gcacattaaagccacaatga

SEQ ID NO: 95949 - DNA, 20 bp, synthetic construct
  source 1..20: mol_type = other DNA
tgcacattaaagccacaatg

SEQ ID NO: 95950 - DNA, 20 bp, synthetic construct
  source 1..20: mol_type = other DNA
ctgcacattaaagccacaat

SEQ ID NO: 95951 - DNA, 20 bp, synthetic construct
  source 1..20: mol_type = other DNA
actgcacattaaagccacaa

SEQ ID NO: 95952 - DNA, 20 bp, synthetic construct
  source 1..20: mol_type = other DNA
aactgcacattaaagccaca

SEQ ID NO: 95953 - DNA, 20 bp, synthetic construct
  source 1..20: mol_type = other DNA
gaactgcacattaaagccac

SEQ ID NO: 95954 - DNA, 20 bp, synthetic construct
  source 1..20: mol_type = other DNA
agaactgcacattaaagcca

SEQ ID NO: 95955 - DNA, 20 bp, synthetic construct
  source 1..20: mol_type = other DNA
aagaactgcacattaaagcc

SEQ ID NO: 95956 - DNA, 20 bp, synthetic construct
  source 1..20: mol_type = other DNA
aaagaactgcacattaaagc

SEQ ID NO: 95957 - DNA, 20 bp, synthetic construct
  source 1..20: mol_type = other DNA
gaaagaactgcacattaaag

SEQ ID NO: 95958 - DNA, 20 bp, synthetic construct
  source 1..20: mol_type = other DNA
tgaaagaactgcacattaaa

SEQ ID NO: 95959 - DNA, 20 bp, synthetic construct
  source 1..20: mol_type = other DNA
atgaaagaactgcacattaa

SEQ ID NO: 95960 - DNA, 20 bp, synthetic construct
  source 1..20: mol_type = other DNA
catgaaagaactgcacatta

SEQ ID NO: 95961 - DNA, 20 bp, synthetic construct
  source 1..20: mol_type = other DNA
ccatgaaagaactgcacatt

SEQ ID NO: 95962 - DNA, 20 bp, synthetic construct
  source 1..20: mol_type = other DNA
gccatgaaagaactgcacat

SEQ ID NO: 95963 - DNA, 20 bp, synthetic construct
  source 1..20: mol_type = other DNA
agccatgaaagaactgcaca

SEQ ID NO: 95964 - DNA, 20 bp, synthetic construct
  source 1..20: mol_type = other DNA
tagccatgaaagaactgcac

SEQ ID NO: 95965 - DNA, 20 bp, synthetic construct
  source 1..20: mol_type = other DNA
ttagccatgaaagaactgca

SEQ ID NO: 95966 - DNA, 20 bp, synthetic construct
  source 1..20: mol_type = other DNA
attagccatgaaagaactgc

SEQ ID NO: 95967 - DNA, 20 bp, synthetic construct
  source 1..20: mol_type = other DNA
cattagccatgaaagaactg

SEQ ID NO: 95968 - DNA, 20 bp, synthetic construct
  source 1..20: mol_type = other DNA
tcattagccatgaaagaact

SEQ ID NO: 95969 - DNA, 20 bp, synthetic construct
  source 1..20: mol_type = other DNA
atcattagccatgaaagaac

SEQ ID NO: 95970 - DNA, 20 bp, synthetic construct
  source 1..20: mol_type = other DNA
catcattagccatgaaagaa

SEQ ID NO: 95971 - DNA, 20 bp, synthetic construct
  source 1..20: mol_type = other DNA
acatcattagccatgaaaga

SEQ ID NO: 95972 - DNA, 20 bp, synthetic construct
  source 1..20: mol_type = other DNA
aacatcattagccatgaaag

SEQ ID NO: 95973 - DNA, 20 bp, synthetic construct
  source 1..20: mol_type = other DNA
caacatcattagccatgaaa

SEQ ID NO: 95974 - DNA, 20 bp, synthetic construct
  source 1..20: mol_type = other DNA
tcaacatcattagccatgaa

SEQ ID NO: 95975 - DNA, 20 bp, synthetic construct
  source 1..20: mol_type = other DNA
ttcaacatcattagccatga

SEQ ID NO: 95976 - DNA, 20 bp, synthetic construct
  source 1..20: mol_type = other DNA
gttcaacatcattagccatg

SEQ ID NO: 95977 - DNA, 20 bp, synthetic construct
  source 1..20: mol_type = other DNA
tgttcaacatcattagccat

SEQ ID NO: 95978 - DNA, 20 bp, synthetic construct
  source 1..20: mol_type = other DNA
atgttcaacatcattagcca

SEQ ID NO: 95979 - DNA, 20 bp, synthetic construct
  source 1..20: mol_type = other DNA
gatgttcaacatcattagcc

SEQ ID NO: 95980 - DNA, 20 bp, synthetic construct
  source 1..20: mol_type = other DNA
agatgttcaacatcattagc

SEQ ID NO: 95981 - DNA, 20 bp, synthetic construct
  source 1..20: mol_type = other DNA
aagatgttcaacatcattag

SEQ ID NO: 95982 - DNA, 20 bp, synthetic construct
  source 1..20: mol_type = other DNA
aaagatgttcaacatcatta

SEQ ID NO: 95983 - DNA, 20 bp, synthetic construct
  source 1..20: mol_type = other DNA
aaaagatgttcaacatcatt

SEQ ID NO: 95984 - DNA, 20 bp, synthetic construct
  source 1..20: mol_type = other DNA
caaaagatgttcaacatcat

SEQ ID NO: 95985 - DNA, 20 bp, synthetic construct
  source 1..20: mol_type = other DNA
acaaaagatgttcaacatca

SEQ ID NO: 95986 - DNA, 20 bp, synthetic construct
  source 1..20: mol_type = other DNA
cacaaaagatgttcaacatc

SEQ ID NO: 95987 - DNA, 20 bp, synthetic construct
  source 1..20: mol_type = other DNA
acacaaaagatgttcaacat

SEQ ID NO: 95988 - DNA, 20 bp, synthetic construct
  source 1..20: mol_type = other DNA
aacacaaaagatgttcaaca

SEQ ID NO: 95989 - DNA, 20 bp, synthetic construct
  source 1..20: mol_type = other DNA
aaacacaaaagatgttcaac

SEQ ID NO: 95990 - DNA, 20 bp, synthetic construct
  source 1..20: mol_type = other DNA
taaacacaaaagatgttcaa

SEQ ID NO: 95991 - DNA, 20 bp, synthetic construct
  source 1..20: mol_type = other DNA
ataaacacaaaagatgttca

SEQ ID NO: 95992 - DNA, 20 bp, synthetic construct
  source 1..20: mol_type = other DNA
aataaacacaaaagatgttc

SEQ ID NO: 95993 - DNA, 20 bp, synthetic construct
  source 1..20: mol_type = other DNA
caataaacacaaaagatgtt

SEQ ID NO: 95994 - DNA, 20 bp, synthetic construct
  source 1..20: mol_type = other DNA
ccaataaacacaaaagatgt

SEQ ID NO: 95995 - DNA, 20 bp, synthetic construct
  source 1..20: mol_type = other DNA
gccaataaacacaaaagatg

SEQ ID NO: 95996 - DNA, 20 bp, synthetic construct
  source 1..20: mol_type = other DNA
ggccaataaacacaaaagat

SEQ ID NO: 95997 - DNA, 20 bp, synthetic construct
  source 1..20: mol_type = other DNA
tggccaataaacacaaaaga

SEQ ID NO: 95998 - DNA, 20 bp, synthetic construct
  source 1..20: mol_type = other DNA
atggccaataaacacaaaag

SEQ ID NO: 95999 - DNA, 20 bp, synthetic construct
  source 1..20: mol_type = other DNA
aatggccaataaacacaaaa

SEQ ID NO: 96000 - DNA, 20 bp, synthetic construct
  source 1..20: mol_type = other DNA
aaatggccaataaacacaaa

SEQ ID NO: 96001 - DNA, 20 bp, synthetic construct
  source 1..20: mol_type = other DNA
taaatggccaataaacacaa

SEQ ID NO: 96002 - DNA, 20 bp, synthetic construct
  source 1..20: mol_type = other DNA
ataaatggccaataaacaca

SEQ ID NO: 96003 - DNA, 20 bp, synthetic construct
  source 1..20: mol_type = other DNA
tataaatggccaataaacac

SEQ ID NO: 96004 - DNA, 20 bp, synthetic construct
  source 1..20: mol_type = other DNA
atataaatggccaataaaca

SEQ ID NO: 96005 - DNA, 20 bp, synthetic construct
  source 1..20: mol_type = other DNA
tatataaatggccaataaac

SEQ ID NO: 96006 - DNA, 20 bp, synthetic construct
  source 1..20: mol_type = other DNA
atatataaatggccaataaa

SEQ ID NO: 96007 - DNA, 20 bp, synthetic construct
  source 1..20: mol_type = other DNA
gatatataaatggccaataa

SEQ ID NO: 96008 - DNA, 20 bp, synthetic construct
  source 1..20: mol_type = other DNA
agatatataaatggccaata

SEQ ID NO: 96009 - DNA, 20 bp, synthetic construct
  source 1..20: mol_type = other DNA
aagatatataaatggccaat

SEQ ID NO: 96010 - DNA, 20 bp, synthetic construct
  source 1..20: mol_type = other DNA
gaagatatataaatggccaa

SEQ ID NO: 96011 - DNA, 20 bp, synthetic construct
  source 1..20: mol_type = other DNA
agaagatatataaatggcca

SEQ ID NO: 96012 - DNA, 20 bp, synthetic construct
  source 1..20: mol_type = other DNA
aagaagatatataaatggcc

SEQ ID NO: 96013 - DNA, 20 bp, synthetic construct
  source 1..20: mol_type = other DNA
aaagaagatatataaatggc

SEQ ID NO: 96014 - DNA, 20 bp, synthetic construct
  source 1..20: mol_type = other DNA
caaagaagatatataaatgg

SEQ ID NO: 96015 - DNA, 20 bp, synthetic construct
  source 1..20: mol_type = other DNA
ccaaagaagatatataaatg

SEQ ID NO: 96016 - DNA, 20 bp, synthetic construct
  source 1..20: mol_type = other DNA
tccaaagaagatatataaat

SEQ ID NO: 96017 - DNA, 20 bp, synthetic construct
  source 1..20: mol_type = other DNA
atccaaagaagatatataaa

SEQ ID NO: 96018 - DNA, 20 bp, synthetic construct
  source 1..20: mol_type = other DNA
aatccaaagaagatatataa

SEQ ID NO: 96019 - DNA, 20 bp, synthetic construct
  source 1..20: mol_type = other DNA
caatccaaagaagatatata

SEQ ID NO: 96020 - DNA, 20 bp, synthetic construct
  source 1..20: mol_type = other DNA
tcaatccaaagaagatatat

SEQ ID NO: 96021 - DNA, 20 bp, synthetic construct
  source 1..20: mol_type = other DNA
atcaatccaaagaagatata

SEQ ID NO: 96022 - DNA, 20 bp, synthetic construct
  source 1..20: mol_type = other DNA
catcaatccaaagaagatat

SEQ ID NO: 96023 - DNA, 20 bp, synthetic construct
  source 1..20: mol_type = other DNA
acatcaatccaaagaagata

SEQ ID NO: 96024 - DNA, 20 bp, synthetic construct
  source 1..20: mol_type = other DNA
gacatcaatccaaagaagat

SEQ ID NO: 96025 - DNA, 20 bp, synthetic construct
  source 1..20: mol_type = other DNA
agacatcaatccaaagaaga

SEQ ID NO: 96026 - DNA, 20 bp, synthetic construct
  source 1..20: mol_type = other DNA
cagacatcaatccaaagaag

SEQ ID NO: 96027 - DNA, 20 bp, synthetic construct
  source 1..20: mol_type = other DNA
acagacatcaatccaaagaa

SEQ ID NO: 96028 - DNA, 20 bp, synthetic construct
  source 1..20: mol_type = other DNA
aacagacatcaatccaaaga

SEQ ID NO: 96029 - DNA, 20 bp, synthetic construct
  source 1..20: mol_type = other DNA
gaacagacatcaatccaaag

SEQ ID NO: 96030 - DNA, 20 bp, synthetic construct
  source 1..20: mol_type = other DNA
tgaacagacatcaatccaaa

SEQ ID NO: 96031 - DNA, 20 bp, synthetic construct
  source 1..20: mol_type = other DNA
ttgaacagacatcaatccaa

SEQ ID NO: 96032 - DNA, 20 bp, synthetic construct
  source 1..20: mol_type = other DNA
tttgaacagacatcaatcca

SEQ ID NO: 96033 - DNA, 20 bp, synthetic construct
  source 1..20: mol_type = other DNA
atttgaacagacatcaatcc

SEQ ID NO: 96034 - DNA, 20 bp, synthetic construct
  source 1..20: mol_type = other DNA
gatttgaacagacatcaatc

SEQ ID NO: 96035 - DNA, 20 bp, synthetic construct
  source 1..20: mol_type = other DNA
agatttgaacagacatcaat

SEQ ID NO: 96036 - DNA, 20 bp, synthetic construct
  source 1..20: mol_type = other DNA
aagatttgaacagacatcaa

SEQ ID NO: 96037 - DNA, 20 bp, synthetic construct
  source 1..20: mol_type = other DNA
aaagatttgaacagacatca

SEQ ID NO: 96038 - DNA, 20 bp, synthetic construct
  source 1..20: mol_type = other DNA
taaagatttgaacagacatc

SEQ ID NO: 96039 - DNA, 20 bp, synthetic construct
  source 1..20: mol_type = other DNA
gtaaagatttgaacagacat

SEQ ID NO: 96040 - DNA, 20 bp, synthetic construct
  source 1..20: mol_type = other DNA
ggtaaagatttgaacagaca

SEQ ID NO: 96041 - DNA, 20 bp, synthetic construct
  source 1..20: mol_type = other DNA
gggtaaagatttgaacagac

SEQ ID NO: 96042 - DNA, 20 bp, synthetic construct
  source 1..20: mol_type = other DNA
tgggtaaagatttgaacaga

SEQ ID NO: 96043 - DNA, 20 bp, synthetic construct
  source 1..20: mol_type = other DNA
atgggtaaagatttgaacag

SEQ ID NO: 96044 - DNA, 20 bp, synthetic construct
  source 1..20: mol_type = other DNA
aatgggtaaagatttgaaca

SEQ ID NO: 96045 - DNA, 20 bp, synthetic construct
  source 1..20: mol_type = other DNA
aaatgggtaaagatttgaac

SEQ ID NO: 96046 - DNA, 20 bp, synthetic construct
  source 1..20: mol_type = other DNA
aaaatgggtaaagatttgaa

SEQ ID NO: 96047 - DNA, 20 bp, synthetic construct
  source 1..20: mol_type = other DNA
taaaatgggtaaagatttga

SEQ ID NO: 96048 - DNA, 20 bp, synthetic construct
  source 1..20: mol_type = other DNA
ttaaaatgggtaaagatttg

SEQ ID NO: 96049 - DNA, 20 bp, synthetic construct
  source 1..20: mol_type = other DNA
tttaaaatgggtaaagattt

SEQ ID NO: 96050 - DNA, 20 bp, synthetic construct
  source 1..20: mol_type = other DNA
ttttaaaatgggtaaagatt

SEQ ID NO: 96051 - DNA, 20 bp, synthetic construct
  source 1..20: mol_type = other DNA
tttttaaaatgggtaaagat

SEQ ID NO: 96052 - DNA, 20 bp, synthetic construct
  source 1..20: mol_type = other DNA
atttttaaaatgggtaaaga

SEQ ID NO: 96053 - DNA, 20 bp, synthetic construct
  source 1..20: mol_type = other DNA
aatttttaaaatgggtaaag

SEQ ID NO: 96054 - DNA, 20 bp, synthetic construct
  source 1..20: mol_type = other DNA
caatttttaaaatgggtaaa

SEQ ID NO: 96055 - DNA, 20 bp, synthetic construct
  source 1..20: mol_type = other DNA
tcaatttttaaaatgggtaa

SEQ ID NO: 96056 - DNA, 20 bp, synthetic construct
  source 1..20: mol_type = other DNA
ctcaatttttaaaatgggta

SEQ ID NO: 96057 - DNA, 20 bp, synthetic construct
  source 1..20: mol_type = other DNA
actcaatttttaaaatgggt

SEQ ID NO: 96058 - DNA, 20 bp, synthetic construct
  source 1..20: mol_type = other DNA
aactcaatttttaaaatggg

SEQ ID NO: 96059 - DNA, 20 bp, synthetic construct
  source 1..20: mol_type = other DNA
caactcaatttttaaaatgg

SEQ ID NO: 96060 - DNA, 20 bp, synthetic construct
  source 1..20: mol_type = other DNA
acaactcaatttttaaaatg

SEQ ID NO: 96061 - DNA, 20 bp, synthetic construct
  source 1..20: mol_type = other DNA
gacaactcaatttttaaaat

SEQ ID NO: 96062 - DNA, 20 bp, synthetic construct
  source 1..20: mol_type = other DNA
agacaactcaatttttaaaa

SEQ ID NO: 96063 - DNA, 20 bp, synthetic construct
  source 1..20: mol_type = other DNA
aagacaactcaatttttaaa

SEQ ID NO: 96064 - DNA, 20 bp, synthetic construct
  source 1..20: mol_type = other DNA
aaagacaactcaatttttaa

SEQ ID NO: 96065 - DNA, 20 bp, synthetic construct
  source 1..20: mol_type = other DNA
aaaagacaactcaattttta

SEQ ID NO: 96066 - DNA, 20 bp, synthetic construct
  source 1..20: mol_type = other DNA
aaaaagacaactcaattttt

SEQ ID NO: 96067 - DNA, 20 bp, synthetic construct
  source 1..20: mol_type = other DNA
taaaaagacaactcaatttt

SEQ ID NO: 96068 - DNA, 20 bp, synthetic construct
  source 1..20: mol_type = other DNA
ataaaaagacaactcaattt

SEQ ID NO: 96069 - DNA, 20 bp, synthetic construct
  source 1..20: mol_type = other DNA
aataaaaagacaactcaatt

SEQ ID NO: 96070 - DNA, 20 bp, synthetic construct
  source 1..20: mol_type = other DNA
taataaaaagacaactcaat

SEQ ID NO: 96071 - DNA, 20 bp, synthetic construct
  source 1..20: mol_type = other DNA
ataataaaaagacaactcaa

SEQ ID NO: 96072 - DNA, 20 bp, synthetic construct
  source 1..20: mol_type = other DNA
aataataaaaagacaactca

SEQ ID NO: 96073 - DNA, 20 bp, synthetic construct
  source 1..20: mol_type = other DNA
caataataaaaagacaactc

SEQ ID NO: 96074 - DNA, 20 bp, synthetic construct
  source 1..20: mol_type = other DNA
ccaataataaaaagacaact

SEQ ID NO: 96075 - DNA, 20 bp, synthetic construct
  source 1..20: mol_type = other DNA
cccaataataaaaagacaac

SEQ ID NO: 96076 - DNA, 20 bp, synthetic construct
  source 1..20: mol_type = other DNA
acccaataataaaaagacaa

SEQ ID NO: 96077 - DNA, 20 bp, synthetic construct
  source 1..20: mol_type = other DNA
aacccaataataaaaagaca

SEQ ID NO: 96078 - DNA, 20 bp, synthetic construct
  source 1..20: mol_type = other DNA
caacccaataataaaaagac

SEQ ID NO: 96079 - DNA, 20 bp, synthetic construct
  source 1..20: mol_type = other DNA
acaacccaataataaaaaga

SEQ ID NO: 96080 - DNA, 20 bp, synthetic construct
  source 1..20: mol_type = other DNA
cacaacccaataataaaaag

SEQ ID NO: 96081 - DNA, 20 bp, synthetic construct
  source 1..20: mol_type = other DNA
ccacaacccaataataaaaa

SEQ ID NO: 96082 - DNA, 20 bp, synthetic construct
  source 1..20: mol_type = other DNA
cccacaacccaataataaaa

SEQ ID NO: 96083 - DNA, 20 bp, synthetic construct
  source 1..20: mol_type = other DNA
tcccacaacccaataataaa

SEQ ID NO: 96084 - DNA, 20 bp, synthetic construct
  source 1..20: mol_type = other DNA
ctcccacaacccaataataa

SEQ ID NO: 96085 - DNA, 20 bp, synthetic construct
  source 1..20: mol_type = other DNA
actcccacaacccaataata

SEQ ID NO: 96086 - DNA, 20 bp, synthetic construct
  source 1..20: mol_type = other DNA
aactcccacaacccaataat

SEQ ID NO: 96087 - DNA, 20 bp, synthetic construct
  source 1..20: mol_type = other DNA
gaactcccacaacccaataa

SEQ ID NO: 96088 - DNA, 20 bp, synthetic construct
  source 1..20: mol_type = other DNA
agaactcccacaacccaata

SEQ ID NO: 96089 - DNA, 20 bp, synthetic construct
  source 1..20: mol_type = other DNA
aagaactcccacaacccaat

SEQ ID NO: 96090 - DNA, 20 bp, synthetic construct
  source 1..20: mol_type = other DNA
aaagaactcccacaacccaa

SEQ ID NO: 96091 - DNA, 20 bp, synthetic construct
  source 1..20: mol_type = other DNA
taaagaactcccacaaccca

SEQ ID NO: 96092 - DNA, 20 bp, synthetic construct
  source 1..20: mol_type = other DNA
ataaagaactcccacaaccc

SEQ ID NO: 96093 - DNA, 20 bp, synthetic construct
  source 1..20: mol_type = other DNA
tataaagaactcccacaacc

SEQ ID NO: 96094 - DNA, 20 bp, synthetic construct
  source 1..20: mol_type = other DNA
atataaagaactcccacaac

SEQ ID NO: 96095 - DNA, 20 bp, synthetic construct
  source 1..20: mol_type = other DNA
tatataaagaactcccacaa

SEQ ID NO: 96096 - DNA, 20 bp, synthetic construct
  source 1..20: mol_type = other DNA
atatataaagaactcccaca

SEQ ID NO: 96097 - DNA, 20 bp, synthetic construct
  source 1..20: mol_type = other DNA
aatatataaagaactcccac

SEQ ID NO: 96098 - DNA, 20 bp, synthetic construct
  source 1..20: mol_type = other DNA
caatatataaagaactccca

SEQ ID NO: 96099 - DNA, 20 bp, synthetic construct
  source 1..20: mol_type = other DNA
acaatatataaagaactccc

SEQ ID NO: 96100 - DNA, 20 bp, synthetic construct
  source 1..20: mol_type = other DNA
cacaatatataaagaactcc

SEQ ID NO: 96101 - DNA, 20 bp, synthetic construct
  source 1..20: mol_type = other DNA
acacaatatataaagaactc

SEQ ID NO: 96102 - DNA, 20 bp, synthetic construct
  source 1..20: mol_type = other DNA
cacacaatatataaagaact

SEQ ID NO: 96103 - DNA, 20 bp, synthetic construct
  source 1..20: mol_type = other DNA
acacacaatatataaagaac

SEQ ID NO: 96104 - DNA, 20 bp, synthetic construct
  source 1..20: mol_type = other DNA
tacacacaatatataaagaa

SEQ ID NO: 96105 - DNA, 20 bp, synthetic construct
  source 1..20: mol_type = other DNA
gtacacacaatatataaaga

SEQ ID NO: 96106 - DNA, 20 bp, synthetic construct
  source 1..20: mol_type = other DNA
tgtacacacaatatataaag

SEQ ID NO: 96107 - DNA, 20 bp, synthetic construct
  source 1..20: mol_type = other DNA
ttgtacacacaatatataaa

SEQ ID NO: 96108 - DNA, 20 bp, synthetic construct
  source 1..20: mol_type = other DNA
cttgtacacacaatatataa

SEQ ID NO: 96109 - DNA, 20 bp, synthetic construct
  source 1..20: mol_type = other DNA
acttgtacacacaatatata

SEQ ID NO: 96110 - DNA, 20 bp, synthetic construct
  source 1..20: mol_type = other DNA
gacttgtacacacaatatat

SEQ ID NO: 96111 - DNA, 20 bp, synthetic construct
  source 1..20: mol_type = other DNA
ggacttgtacacacaatata

SEQ ID NO: 96112 - DNA, 20 bp, synthetic construct
  source 1..20: mol_type = other DNA
gggacttgtacacacaatat

SEQ ID NO: 96113 - DNA, 20 bp, synthetic construct
  source 1..20: mol_type = other DNA
agggacttgtacacacaata

SEQ ID NO: 96114 - DNA, 20 bp, synthetic construct
  source 1..20: mol_type = other DNA
cagggacttgtacacacaat

SEQ ID NO: 96115 - DNA, 20 bp, synthetic construct
  source 1..20: mol_type = other DNA
acagggacttgtacacacaa

SEQ ID NO: 96116 - DNA, 20 bp, synthetic construct
  source 1..20: mol_type = other DNA
aacagggacttgtacacaca

SEQ ID NO: 96117 - DNA, 20 bp, synthetic construct
  source 1..20: mol_type = other DNA
taacagggacttgtacacac

SEQ ID NO: 96118 - DNA, 20 bp, synthetic construct
  source 1..20: mol_type = other DNA
ctaacagggacttgtacaca

SEQ ID NO: 96119 - DNA, 20 bp, synthetic construct
  source 1..20: mol_type = other DNA
tctaacagggacttgtacac

SEQ ID NO: 96120 - DNA, 20 bp, synthetic construct
  source 1..20: mol_type = other DNA
atctaacagggacttgtaca

SEQ ID NO: 96121 - DNA, 20 bp, synthetic construct
  source 1..20: mol_type = other DNA
tatctaacagggacttgtac

SEQ ID NO: 96122 - DNA, 20 bp, synthetic construct
  source 1..20: mol_type = other DNA
gtatctaacagggacttgta

SEQ ID NO: 96123 - DNA, 20 bp, synthetic construct
  source 1..20: mol_type = other DNA
tgtatctaacagggacttgt

SEQ ID NO: 96124 - DNA, 20 bp, synthetic construct
  source 1..20: mol_type = other DNA
atgtatctaacagggacttg

SEQ ID NO: 96125 - DNA, 20 bp, synthetic construct
  source 1..20: mol_type = other DNA
catgtatctaacagggactt

SEQ ID NO: 96126 - DNA, 20 bp, synthetic construct
  source 1..20: mol_type = other DNA
ccatgtatctaacagggact

SEQ ID NO: 96127 - DNA, 20 bp, synthetic construct
  source 1..20: mol_type = other DNA
accatgtatctaacagggac

SEQ ID NO: 96128 - DNA, 20 bp, synthetic construct
  source 1..20: mol_type = other DNA
aaccatgtatctaacaggga

SEQ ID NO: 96129 - DNA, 20 bp, synthetic construct
  source 1..20: mol_type = other DNA
aaaccatgtatctaacaggg

SEQ ID NO: 96130 - DNA, 20 bp, synthetic construct
  source 1..20: mol_type = other DNA
caaaccatgtatctaacagg

SEQ ID NO: 96131 - DNA, 20 bp, synthetic construct
  source 1..20: mol_type = other DNA
gcaaaccatgtatctaacag

SEQ ID NO: 96132 - DNA, 20 bp, synthetic construct
  source 1..20: mol_type = other DNA
tgcaaaccatgtatctaaca

SEQ ID NO: 96133 - DNA, 20 bp, synthetic construct
  source 1..20: mol_type = other DNA
ttgcaaaccatgtatctaac

SEQ ID NO: 96134 - DNA, 20 bp, synthetic construct
  source 1..20: mol_type = other DNA
tttgcaaaccatgtatctaa

SEQ ID NO: 96135 - DNA, 20 bp, synthetic construct
  source 1..20: mol_type = other DNA
atttgcaaaccatgtatcta

SEQ ID NO: 96136 - DNA, 20 bp, synthetic construct
  source 1..20: mol_type = other DNA
catttgcaaaccatgtatct

SEQ ID NO: 96137 - DNA, 20 bp, synthetic construct
  source 1..20: mol_type = other DNA
acatttgcaaaccatgtatc

SEQ ID NO: 96138 - DNA, 20 bp, synthetic construct
  source 1..20: mol_type = other DNA
aacatttgcaaaccatgtat

SEQ ID NO: 96139 - DNA, 20 bp, synthetic construct
  source 1..20: mol_type = other DNA
aaacatttgcaaaccatgta

SEQ ID NO: 96140 - DNA, 20 bp, synthetic construct
  source 1..20: mol_type = other DNA
aaaacatttgcaaaccatgt

SEQ ID NO: 96141 - DNA, 20 bp, synthetic construct
  source 1..20: mol_type = other DNA
gaaaacatttgcaaaccatg

SEQ ID NO: 96142 - DNA, 20 bp, synthetic construct
  source 1..20: mol_type = other DNA
agaaaacatttgcaaaccat

SEQ ID NO: 96143 - DNA, 20 bp, synthetic construct
  source 1..20: mol_type = other DNA
gagaaaacatttgcaaacca

SEQ ID NO: 96144 - DNA, 20 bp, synthetic construct
  source 1..20: mol_type = other DNA
ggagaaaacatttgcaaacc

SEQ ID NO: 96145 - DNA, 20 bp, synthetic construct
  source 1..20: mol_type = other DNA
aggagaaaacatttgcaaac

SEQ ID NO: 96146 - DNA, 20 bp, synthetic construct
  source 1..20: mol_type = other DNA
caggagaaaacatttgcaaa

SEQ ID NO: 96147 - DNA, 20 bp, synthetic construct
  source 1..20: mol_type = other DNA
acaggagaaaacatttgcaa

SEQ ID NO: 96148 - DNA, 20 bp, synthetic construct
  source 1..20: mol_type = other DNA
aacaggagaaaacatttgca

SEQ ID NO: 96149 - DNA, 20 bp, synthetic construct
  source 1..20: mol_type = other DNA
gaacaggagaaaacatttgc

SEQ ID NO: 96150 - DNA, 20 bp, synthetic construct
  source 1..20: mol_type = other DNA
agaacaggagaaaacatttg

SEQ ID NO: 96151 - DNA, 20 bp, synthetic construct
  source 1..20: mol_type = other DNA
cagaacaggagaaaacattt

SEQ ID NO: 96152 - DNA, 20 bp, synthetic construct
  source 1..20: mol_type = other DNA
acagaacaggagaaaacatt

SEQ ID NO: 96153 - DNA, 20 bp, synthetic construct
  source 1..20: mol_type = other DNA
aacagaacaggagaaaacat

SEQ ID NO: 96154 - DNA, 20 bp, synthetic construct
  source 1..20: mol_type = other DNA
caacagaacaggagaaaaca

SEQ ID NO: 96155 - DNA, 20 bp, synthetic construct
  source 1..20: mol_type = other DNA
ccaacagaacaggagaaaac

SEQ ID NO: 96156 - DNA, 20 bp, synthetic construct
  source 1..20: mol_type = other DNA
accaacagaacaggagaaaa

SEQ ID NO: 96157 - DNA, 20 bp, synthetic construct
  source 1..20: mol_type = other DNA
aaccaacagaacaggagaaa

SEQ ID NO: 96158 - DNA, 20 bp, synthetic construct
  source 1..20: mol_type = other DNA
caaccaacagaacaggagaa

SEQ ID NO: 96159 - DNA, 20 bp, synthetic construct
  source 1..20: mol_type = other DNA
acaaccaacagaacaggaga

SEQ ID NO: 96160 - DNA, 20 bp, synthetic construct
  source 1..20: mol_type = other DNA
gacaaccaacagaacaggag

SEQ ID NO: 96161 - DNA, 20 bp, synthetic construct
  source 1..20: mol_type = other DNA
agacaaccaacagaacagga

SEQ ID NO: 96162 - DNA, 20 bp, synthetic construct
  source 1..20: mol_type = other DNA
aagacaaccaacagaacagg

SEQ ID NO: 96163 - DNA, 20 bp, synthetic construct
  source 1..20: mol_type = other DNA
aaagacaaccaacagaacag

SEQ ID NO: 96164 - DNA, 20 bp, synthetic construct
  source 1..20: mol_type = other DNA
aaaagacaaccaacagaaca

SEQ ID NO: 96165 - DNA, 20 bp, synthetic construct
  source 1..20: mol_type = other DNA
aaaaagacaaccaacagaac

SEQ ID NO: 96166 - DNA, 20 bp, synthetic construct
  source 1..20: mol_type = other DNA
taaaaagacaaccaacagaa

SEQ ID NO: 96167 - DNA, 20 bp, synthetic construct
  source 1..20: mol_type = other DNA
gtaaaaagacaaccaacaga

SEQ ID NO: 96168 - DNA, 20 bp, synthetic construct
  source 1..20: mol_type = other DNA
agtaaaaagacaaccaacag

SEQ ID NO: 96169 - DNA, 20 bp, synthetic construct
  source 1..20: mol_type = other DNA
aagtaaaaagacaaccaaca

SEQ ID NO: 96170 - DNA, 20 bp, synthetic construct
  source 1..20: mol_type = other DNA
aaagtaaaaagacaaccaac

SEQ ID NO: 96171 - DNA, 20 bp, synthetic construct
  source 1..20: mol_type = other DNA
aaaagtaaaaagacaaccaa

SEQ ID NO: 96172 - DNA, 20 bp, synthetic construct
  source 1..20: mol_type = other DNA
aaaaagtaaaaagacaacca

SEQ ID NO: 96173 - DNA, 20 bp, synthetic construct
  source 1..20: mol_type = other DNA
gaaaaagtaaaaagacaacc

SEQ ID NO: 96174 - DNA, 20 bp, synthetic construct
  source 1..20: mol_type = other DNA
tgaaaaagtaaaaagacaac

SEQ ID NO: 96175 - DNA, 20 bp, synthetic construct
  source 1..20: mol_type = other DNA
atgaaaaagtaaaaagacaa

SEQ ID NO: 96176 - DNA, 20 bp, synthetic construct
  source 1..20: mol_type = other DNA
gatgaaaaagtaaaaagaca

SEQ ID NO: 96177 - DNA, 20 bp, synthetic construct
  source 1..20: mol_type = other DNA
ggatgaaaaagtaaaaagac

SEQ ID NO: 96178 - DNA, 20 bp, synthetic construct
  source 1..20: mol_type = other DNA
gggatgaaaaagtaaaaaga

SEQ ID NO: 96179 - DNA, 20 bp, synthetic construct
  source 1..20: mol_type = other DNA
agggatgaaaaagtaaaaag

SEQ ID NO: 96180 - DNA, 20 bp, synthetic construct
  source 1..20: mol_type = other DNA
aagggatgaaaaagtaaaaa

SEQ ID NO: 96181 - DNA, 20 bp, synthetic construct
  source 1..20: mol_type = other DNA
caagggatgaaaaagtaaaa

SEQ ID NO: 96182 - DNA, 20 bp, synthetic construct
  source 1..20: mol_type = other DNA
tcaagggatgaaaaagtaaa

SEQ ID NO: 96183 - DNA, 20 bp, synthetic construct
  source 1..20: mol_type = other DNA
ttcaagggatgaaaaagtaa

SEQ ID NO: 96184 - DNA, 20 bp, synthetic construct
  source 1..20: mol_type = other DNA
cttcaagggatgaaaaagta

SEQ ID NO: 96185 - DNA, 20 bp, synthetic construct
  source 1..20: mol_type = other DNA
gcttcaagggatgaaaaagt

SEQ ID NO: 96186 - DNA, 20 bp, synthetic construct
  source 1..20: mol_type = other DNA
tgcttcaagggatgaaaaag

SEQ ID NO: 96187 - DNA, 20 bp, synthetic construct
  source 1..20: mol_type = other DNA
gtgcttcaagggatgaaaaa

SEQ ID NO: 96188 - DNA, 20 bp, synthetic construct
  source 1..20: mol_type = other DNA
tgtgcttcaagggatgaaaa

SEQ ID NO: 96189 - DNA, 20 bp, synthetic construct
  source 1..20: mol_type = other DNA
ttgtgcttcaagggatgaaa

SEQ ID NO: 96190 - DNA, 20 bp, synthetic construct
  source 1..20: mol_type = other DNA
tttgtgcttcaagggatgaa

SEQ ID NO: 96191 - DNA, 20 bp, synthetic construct
  source 1..20: mol_type = other DNA
ttttgtgcttcaagggatga

SEQ ID NO: 96192 - DNA, 20 bp, synthetic construct
  source 1..20: mol_type = other DNA
tttttgtgcttcaagggatg

SEQ ID NO: 96193 - DNA, 20 bp, synthetic construct
  source 1..20: mol_type = other DNA
atttttgtgcttcaagggat

SEQ ID NO: 96194 - DNA, 20 bp, synthetic construct
  source 1..20: mol_type = other DNA
aatttttgtgcttcaaggga

SEQ ID NO: 96195 - DNA, 20 bp, synthetic construct
  source 1..20: mol_type = other DNA
aaatttttgtgcttcaaggg

SEQ ID NO: 96196 - DNA, 20 bp, synthetic construct
  source 1..20: mol_type = other DNA
aaaatttttgtgcttcaagg

SEQ ID NO: 96197 - DNA, 20 bp, synthetic construct
  source 1..20: mol_type = other DNA
aaaaatttttgtgcttcaag

SEQ ID NO: 96198 - DNA, 20 bp, synthetic construct
  source 1..20: mol_type = other DNA
taaaaatttttgtgcttcaa

SEQ ID NO: 96199 - DNA, 20 bp, synthetic construct
  source 1..20: mol_type = other DNA
ttaaaaatttttgtgcttca

SEQ ID NO: 96200 - DNA, 20 bp, synthetic construct
  source 1..20: mol_type = other DNA
attaaaaatttttgtgcttc

SEQ ID NO: 96201 - DNA, 20 bp, synthetic construct
  source 1..20: mol_type = other DNA
aattaaaaatttttgtgctt

SEQ ID NO: 96202 - DNA, 20 bp, synthetic construct
  source 1..20: mol_type = other DNA
aaattaaaaatttttgtgct

SEQ ID NO: 96203 - DNA, 20 bp, synthetic construct
  source 1..20: mol_type = other DNA
aaaattaaaaatttttgtgc

SEQ ID NO: 96204 - DNA, 20 bp, synthetic construct
  source 1..20: mol_type = other DNA
caaaattaaaaatttttgtg

SEQ ID NO: 96205 - DNA, 20 bp, synthetic construct
  source 1..20: mol_type = other DNA
tcaaaattaaaaatttttgt

SEQ ID NO: 96206 - DNA, 20 bp, synthetic construct
  source 1..20: mol_type = other DNA
atcaaaattaaaaatttttg

SEQ ID NO: 96207 - DNA, 20 bp, synthetic construct
  source 1..20: mol_type = other DNA
catcaaaattaaaaattttt

SEQ ID NO: 96208 - DNA, 20 bp, synthetic construct
  source 1..20: mol_type = other DNA
tcatcaaaattaaaaatttt

SEQ ID NO: 96209 - DNA, 20 bp, synthetic construct
  source 1..20: mol_type = other DNA
ttcatcaaaattaaaaattt

SEQ ID NO: 96210 - DNA, 20 bp, synthetic construct
  source 1..20: mol_type = other DNA
cttcatcaaaattaaaaatt

SEQ ID NO: 96211 - DNA, 20 bp, synthetic construct
  source 1..20: mol_type = other DNA
acttcatcaaaattaaaaat

SEQ ID NO: 96212 - DNA, 20 bp, synthetic construct
  source 1..20: mol_type = other DNA
gacttcatcaaaattaaaaa

SEQ ID NO: 96213 - DNA, 20 bp, synthetic construct
  source 1..20: mol_type = other DNA
ggacttcatcaaaattaaaa

SEQ ID NO: 96214 - DNA, 20 bp, synthetic construct
  source 1..20: mol_type = other DNA
tggacttcatcaaaattaaa

SEQ ID NO: 96215 - DNA, 20 bp, synthetic construct
  source 1..20: mol_type = other DNA
ttggacttcatcaaaattaa

SEQ ID NO: 96216 - DNA, 20 bp, synthetic construct
  source 1..20: mol_type = other DNA
attggacttcatcaaaatta

SEQ ID NO: 96217 - DNA, 20 bp, synthetic construct
  source 1..20: mol_type = other DNA
aattggacttcatcaaaatt

SEQ ID NO: 96218 - DNA, 20 bp, synthetic construct
  source 1..20: mol_type = other DNA
aaattggacttcatcaaaat

SEQ ID NO: 96219 - DNA, 20 bp, synthetic construct
  source 1..20: mol_type = other DNA
taaattggacttcatcaaaa

SEQ ID NO: 96220 - DNA, 20 bp, synthetic construct
  source 1..20: mol_type = other DNA
ataaattggacttcatcaaa

SEQ ID NO: 96221 - DNA, 20 bp, synthetic construct
  source 1..20: mol_type = other DNA
gataaattggacttcatcaa

SEQ ID NO: 96222 - DNA, 20 bp, synthetic construct
  source 1..20: mol_type = other DNA
agataaattggacttcatca

SEQ ID NO: 96223 - DNA, 20 bp, synthetic construct
  source 1..20: mol_type = other DNA
cagataaattggacttcatc

SEQ ID NO: 96224 - DNA, 20 bp, synthetic construct
  source 1..20: mol_type = other DNA
tcagataaattggacttcat

SEQ ID NO: 96225 - DNA, 20 bp, synthetic construct
  source 1..20: mol_type = other DNA
atcagataaattggacttca

SEQ ID NO: 96226 - DNA, 20 bp, synthetic construct
  source 1..20: mol_type = other DNA
aatcagataaattggacttc

SEQ ID NO: 96227 - DNA, 20 bp, synthetic construct
  source 1..20: mol_type = other DNA
aaatcagataaattggactt

SEQ ID NO: 96228 - DNA, 20 bp, synthetic construct
  source 1..20: mol_type = other DNA
aaaatcagataaattggact

SEQ ID NO: 96229 - DNA, 20 bp, synthetic construct
  source 1..20: mol_type = other DNA
caaaatcagataaattggac

SEQ ID NO: 96230 - DNA, 20 bp, synthetic construct
  source 1..20: mol_type = other DNA
tcaaaatcagataaattgga

SEQ ID NO: 96231 - DNA, 20 bp, synthetic construct
  source 1..20: mol_type = other DNA
ttcaaaatcagataaattgg

SEQ ID NO: 96232 - DNA, 20 bp, synthetic construct
  source 1..20: mol_type = other DNA
cttcaaaatcagataaattg

SEQ ID NO: 96233 - DNA, 20 bp, synthetic construct
  source 1..20: mol_type = other DNA
acttcaaaatcagataaatt

SEQ ID NO: 96234 - DNA, 20 bp, synthetic construct
  source 1..20: mol_type = other DNA
tacttcaaaatcagataaat

SEQ ID NO: 96235 - DNA, 20 bp, synthetic construct
  source 1..20: mol_type = other DNA
ttacttcaaaatcagataaa

SEQ ID NO: 96236 - DNA, 20 bp, synthetic construct
  source 1..20: mol_type = other DNA
cttacttcaaaatcagataa

SEQ ID NO: 96237 - DNA, 20 bp, synthetic construct
  source 1..20: mol_type = other DNA
gcttacttcaaaatcagata

SEQ ID NO: 96238 - DNA, 20 bp, synthetic construct
  source 1..20: mol_type = other DNA
agcttacttcaaaatcagat

SEQ ID NO: 96239 - DNA, 20 bp, synthetic construct
  source 1..20: mol_type = other DNA
aagcttacttcaaaatcaga

SEQ ID NO: 96240 - DNA, 20 bp, synthetic construct
  source 1..20: mol_type = other DNA
aaagcttacttcaaaatcag

SEQ ID NO: 96241 - DNA, 20 bp, synthetic construct
  source 1..20: mol_type = other DNA
aaaagcttacttcaaaatca

SEQ ID NO: 96242 - DNA, 20 bp, synthetic construct
  source 1..20: mol_type = other DNA
caaaagcttacttcaaaatc

SEQ ID NO: 96243 - DNA, 20 bp, synthetic construct
  source 1..20: mol_type = other DNA
ccaaaagcttacttcaaaat

SEQ ID NO: 96244 - DNA, 20 bp, synthetic construct
  source 1..20: mol_type = other DNA
accaaaagcttacttcaaaa

SEQ ID NO: 96245 - DNA, 20 bp, synthetic construct
  source 1..20: mol_type = other DNA
caccaaaagcttacttcaaa

SEQ ID NO: 96246 - DNA, 20 bp, synthetic construct
  source 1..20: mol_type = other DNA
acaccaaaagcttacttcaa

SEQ ID NO: 96247 - DNA, 20 bp, synthetic construct
  source 1..20: mol_type = other DNA
gacaccaaaagcttacttca

SEQ ID NO: 96248 - DNA, 20 bp, synthetic construct
  source 1..20: mol_type = other DNA
cgacaccaaaagcttacttc

SEQ ID NO: 96249 - DNA, 20 bp, synthetic construct
  source 1..20: mol_type = other DNA
acgacaccaaaagcttactt

SEQ ID NO: 96250 - DNA, 20 bp, synthetic construct
  source 1..20: mol_type = other DNA
tacgacaccaaaagcttact

SEQ ID NO: 96251 - DNA, 20 bp, synthetic construct
  source 1..20: mol_type = other DNA
atacgacaccaaaagcttac

SEQ ID NO: 96252 - DNA, 20 bp, synthetic construct
  source 1..20: mol_type = other DNA
gatacgacaccaaaagctta

SEQ ID NO: 96253 - DNA, 20 bp, synthetic construct
  source 1..20: mol_type = other DNA
agatacgacaccaaaagctt

SEQ ID NO: 96254 - DNA, 20 bp, synthetic construct
  source 1..20: mol_type = other DNA
tagatacgacaccaaaagct

SEQ ID NO: 96255 - DNA, 20 bp, synthetic construct
  source 1..20: mol_type = other DNA
ttagatacgacaccaaaagc

SEQ ID NO: 96256 - DNA, 20 bp, synthetic construct
  source 1..20: mol_type = other DNA
cttagatacgacaccaaaag

SEQ ID NO: 96257 - DNA, 20 bp, synthetic construct
  source 1..20: mol_type = other DNA
tcttagatacgacaccaaaa

SEQ ID NO: 96258 - DNA, 20 bp, synthetic construct
  source 1..20: mol_type = other DNA
ttcttagatacgacaccaaa

SEQ ID NO: 96259 - DNA, 20 bp, synthetic construct
  source 1..20: mol_type = other DNA
tttcttagatacgacaccaa

SEQ ID NO: 96260 - DNA, 20 bp, synthetic construct
  source 1..20: mol_type = other DNA
ttttcttagatacgacacca

SEQ ID NO: 96261 - DNA, 20 bp, synthetic construct
  source 1..20: mol_type = other DNA
attttcttagatacgacacc

SEQ ID NO: 96262 - DNA, 20 bp, synthetic construct
  source 1..20: mol_type = other DNA
tattttcttagatacgacac

SEQ ID NO: 96263 - DNA, 20 bp, synthetic construct
  source 1..20: mol_type = other DNA
gtattttcttagatacgaca

SEQ ID NO: 96264 - DNA, 20 bp, synthetic construct
  source 1..20: mol_type = other DNA
agtattttcttagatacgac

SEQ ID NO: 96265 - DNA, 20 bp, synthetic construct
  source 1..20: mol_type = other DNA
cagtattttcttagatacga

SEQ ID NO: 96266 - DNA, 20 bp, synthetic construct
  source 1..20: mol_type = other DNA
acagtattttcttagatacg

SEQ ID NO: 96267 - DNA, 20 bp, synthetic construct
  source 1..20: mol_type = other DNA
aacagtattttcttagatac

SEQ ID NO: 96268 - DNA, 20 bp, synthetic construct
  source 1..20: mol_type = other DNA
aaacagtattttcttagata

SEQ ID NO: 96269 - DNA, 20 bp, synthetic construct
  source 1..20: mol_type = other DNA
gaaacagtattttcttagat

SEQ ID NO: 96270 - DNA, 20 bp, synthetic construct
  source 1..20: mol_type = other DNA
tgaaacagtattttcttaga

SEQ ID NO: 96271 - DNA, 20 bp, synthetic construct
  source 1..20: mol_type = other DNA
atgaaacagtattttcttag

SEQ ID NO: 96272 - DNA, 20 bp, synthetic construct
  source 1..20: mol_type = other DNA
gatgaaacagtattttctta

SEQ ID NO: 96273 - DNA, 20 bp, synthetic construct
  source 1..20: mol_type = other DNA
tgatgaaacagtattttctt

SEQ ID NO: 96274 - DNA, 20 bp, synthetic construct
  source 1..20: mol_type = other DNA
ttgatgaaacagtattttct

SEQ ID NO: 96275 - DNA, 20 bp, synthetic construct
  source 1..20: mol_type = other DNA
attgatgaaacagtattttc

SEQ ID NO: 96276 - DNA, 20 bp, synthetic construct
  source 1..20: mol_type = other DNA
gattgatgaaacagtatttt

SEQ ID NO: 96277 - DNA, 20 bp, synthetic construct
  source 1..20: mol_type = other DNA
tgattgatgaaacagtattt

SEQ ID NO: 96278 - DNA, 20 bp, synthetic construct
  source 1..20: mol_type = other DNA
atgattgatgaaacagtatt

SEQ ID NO: 96279 - DNA, 20 bp, synthetic construct
  source 1..20: mol_type = other DNA
aatgattgatgaaacagtat

SEQ ID NO: 96280 - DNA, 20 bp, synthetic construct
  source 1..20: mol_type = other DNA
taatgattgatgaaacagta

SEQ ID NO: 96281 - DNA, 20 bp, synthetic construct
  source 1..20: mol_type = other DNA
ttaatgattgatgaaacagt

SEQ ID NO: 96282 - DNA, 20 bp, synthetic construct
  source 1..20: mol_type = other DNA
cttaatgattgatgaaacag

SEQ ID NO: 96283 - DNA, 20 bp, synthetic construct
  source 1..20: mol_type = other DNA
ccttaatgattgatgaaaca

SEQ ID NO: 96284 - DNA, 20 bp, synthetic construct
  source 1..20: mol_type = other DNA
accttaatgattgatgaaac

SEQ ID NO: 96285 - DNA, 20 bp, synthetic construct
  source 1..20: mol_type = other DNA
aaccttaatgattgatgaaa

SEQ ID NO: 96286 - DNA, 20 bp, synthetic construct
  source 1..20: mol_type = other DNA
aaaccttaatgattgatgaa

SEQ ID NO: 96287 - DNA, 20 bp, synthetic construct
  source 1..20: mol_type = other DNA
taaaccttaatgattgatga

SEQ ID NO: 96288 - DNA, 20 bp, synthetic construct
  source 1..20: mol_type = other DNA
ataaaccttaatgattgatg

SEQ ID NO: 96289 - DNA, 20 bp, synthetic construct
  source 1..20: mol_type = other DNA
aataaaccttaatgattgat

SEQ ID NO: 96290 - DNA, 20 bp, synthetic construct
  source 1..20: mol_type = other DNA
taataaaccttaatgattga

SEQ ID NO: 96291 - DNA, 20 bp, synthetic construct
  source 1..20: mol_type = other DNA
gtaataaaccttaatgattg

SEQ ID NO: 96292 - DNA, 20 bp, synthetic construct
  source 1..20: mol_type = other DNA
agtaataaaccttaatgatt

SEQ ID NO: 96293 - DNA, 20 bp, synthetic construct
  source 1..20: mol_type = other DNA
gagtaataaaccttaatgat

SEQ ID NO: 96294 - DNA, 20 bp, synthetic construct
  source 1..20: mol_type = other DNA
agagtaataaaccttaatga

SEQ ID NO: 96295 - DNA, 20 bp, synthetic construct
  source 1..20: mol_type = other DNA
aagagtaataaaccttaatg

SEQ ID NO: 96296 - DNA, 20 bp, synthetic construct
  source 1..20: mol_type = other DNA
gaagagtaataaaccttaat

SEQ ID NO: 96297 - DNA, 20 bp, synthetic construct
  source 1..20: mol_type = other DNA
agaagagtaataaaccttaa

SEQ ID NO: 96298 - DNA, 20 bp, synthetic construct
  source 1..20: mol_type = other DNA
cagaagagtaataaacctta

SEQ ID NO: 96299 - DNA, 20 bp, synthetic construct
  source 1..20: mol_type = other DNA
ccagaagagtaataaacctt

SEQ ID NO: 96300 - DNA, 20 bp, synthetic construct
  source 1..20: mol_type = other DNA
cccagaagagtaataaacct

SEQ ID NO: 96301 - DNA, 20 bp, synthetic construct
  source 1..20: mol_type = other DNA
acccagaagagtaataaacc

SEQ ID NO: 96302 - DNA, 20 bp, synthetic construct
  source 1..20: mol_type = other DNA
aacccagaagagtaataaac

SEQ ID NO: 96303 - DNA, 20 bp, synthetic construct
  source 1..20: mol_type = other DNA
aaacccagaagagtaataaa

SEQ ID NO: 96304 - DNA, 20 bp, synthetic construct
  source 1..20: mol_type = other DNA
aaaacccagaagagtaataa

SEQ ID NO: 96305 - DNA, 20 bp, synthetic construct
  source 1..20: mol_type = other DNA
aaaaacccagaagagtaata

SEQ ID NO: 96306 - DNA, 20 bp, synthetic construct
  source 1..20: mol_type = other DNA
aaaaaacccagaagagtaat

SEQ ID NO: 96307 - DNA, 20 bp, synthetic construct
  source 1..20: mol_type = other DNA
aaaaaaacccagaagagtaa

SEQ ID NO: 96308 - DNA, 20 bp, synthetic construct
  source 1..20: mol_type = other DNA
taaaaaaacccagaagagta

SEQ ID NO: 96309 - DNA, 20 bp, synthetic construct
  source 1..20: mol_type = other DNA
ttaaaaaaacccagaagagt

SEQ ID NO: 96310 - DNA, 20 bp, synthetic construct
  source 1..20: mol_type = other DNA
cttaaaaaaacccagaagag

SEQ ID NO: 96311 - DNA, 20 bp, synthetic construct
  source 1..20: mol_type = other DNA
tcttaaaaaaacccagaaga

SEQ ID NO: 96312 - DNA, 20 bp, synthetic construct
  source 1..20: mol_type = other DNA
ttcttaaaaaaacccagaag

SEQ ID NO: 96313 - DNA, 20 bp, synthetic construct
  source 1..20: mol_type = other DNA
attcttaaaaaaacccagaa

SEQ ID NO: 96314 - DNA, 20 bp, synthetic construct
  source 1..20: mol_type = other DNA
aattcttaaaaaaacccaga

SEQ ID NO: 96315 - DNA, 20 bp, synthetic construct
  source 1..20: mol_type = other DNA
taattcttaaaaaaacccag

SEQ ID NO: 96316 - DNA, 20 bp, synthetic construct
  source 1..20: mol_type = other DNA
gtaattcttaaaaaaaccca

SEQ ID NO: 96317 - DNA, 20 bp, synthetic construct
  source 1..20: mol_type = other DNA
tgtaattcttaaaaaaaccc

SEQ ID NO: 96318 - DNA, 20 bp, synthetic construct
  source 1..20: mol_type = other DNA
atgtaattcttaaaaaaacc

SEQ ID NO: 96319 - DNA, 20 bp, synthetic construct
  source 1..20: mol_type = other DNA
aatgtaattcttaaaaaaac

SEQ ID NO: 96320 - DNA, 20 bp, synthetic construct
  source 1..20: mol_type = other DNA
aaatgtaattcttaaaaaaa

SEQ ID NO: 96321 - DNA, 20 bp, synthetic construct
  source 1..20: mol_type = other DNA
taaatgtaattcttaaaaaa

SEQ ID NO: 96322 - DNA, 20 bp, synthetic construct
  source 1..20: mol_type = other DNA
ctaaatgtaattcttaaaaa

SEQ ID NO: 96323 - DNA, 20 bp, synthetic construct
  source 1..20: mol_type = other DNA
tctaaatgtaattcttaaaa

SEQ ID NO: 96324 - DNA, 20 bp, synthetic construct
  source 1..20: mol_type = other DNA
ctctaaatgtaattcttaaa

SEQ ID NO: 96325 - DNA, 20 bp, synthetic construct
  source 1..20: mol_type = other DNA
cctctaaatgtaattcttaa

SEQ ID NO: 96326 - DNA, 20 bp, synthetic construct
  source 1..20: mol_type = other DNA
acctctaaatgtaattctta

SEQ ID NO: 96327 - DNA, 20 bp, synthetic construct
  source 1..20: mol_type = other DNA
cacctctaaatgtaattctt

SEQ ID NO: 96328 - DNA, 20 bp, synthetic construct
  source 1..20: mol_type = other DNA
acacctctaaatgtaattct

SEQ ID NO: 96329 - DNA, 20 bp, synthetic construct
  source 1..20: mol_type = other DNA
cacacctctaaatgtaattc

SEQ ID NO: 96330 - DNA, 20 bp, synthetic construct
  source 1..20: mol_type = other DNA
tcacacctctaaatgtaatt

SEQ ID NO: 96331 - DNA, 20 bp, synthetic construct
  source 1..20: mol_type = other DNA
atcacacctctaaatgtaat

SEQ ID NO: 96332 - DNA, 20 bp, synthetic construct
  source 1..20: mol_type = other DNA
gatcacacctctaaatgtaa

SEQ ID NO: 96333 - DNA, 20 bp, synthetic construct
  source 1..20: mol_type = other DNA
ggatcacacctctaaatgta

SEQ ID NO: 96334 - DNA, 20 bp, synthetic construct
  source 1..20: mol_type = other DNA
tggatcacacctctaaatgt

SEQ ID NO: 96335 - DNA, 20 bp, synthetic construct
  source 1..20: mol_type = other DNA
atggatcacacctctaaatg

SEQ ID NO: 96336 - DNA, 20 bp, synthetic construct
  source 1..20: mol_type = other DNA
aatggatcacacctctaaat

SEQ ID NO: 96337 - DNA, 20 bp, synthetic construct
  source 1..20: mol_type = other DNA
aaatggatcacacctctaaa

SEQ ID NO: 96338 - DNA, 20 bp, synthetic construct
  source 1..20: mol_type = other DNA
caaatggatcacacctctaa

SEQ ID NO: 96339 - DNA, 20 bp, synthetic construct
  source 1..20: mol_type = other DNA
ccaaatggatcacacctcta

SEQ ID NO: 96340 - DNA, 20 bp, synthetic construct
  source 1..20: mol_type = other DNA
tccaaatggatcacacctct

SEQ ID NO: 96341 - DNA, 20 bp, synthetic construct
  source 1..20: mol_type = other DNA
ctccaaatggatcacacctc

SEQ ID NO: 96342 - DNA, 20 bp, synthetic construct
  source 1..20: mol_type = other DNA
gctccaaatggatcacacct

SEQ ID NO: 96343 - DNA, 20 bp, synthetic construct
  source 1..20: mol_type = other DNA
tgctccaaatggatcacacc

SEQ ID NO: 96344 - DNA, 20 bp, synthetic construct
  source 1..20: mol_type = other DNA
ttgctccaaatggatcacac

SEQ ID NO: 96345 - DNA, 20 bp, synthetic construct
  source 1..20: mol_type = other DNA
gttgctccaaatggatcaca

SEQ ID NO: 96346 - DNA, 20 bp, synthetic construct
  source 1..20: mol_type = other DNA
agttgctccaaatggatcac

SEQ ID NO: 96347 - DNA, 20 bp, synthetic construct
  source 1..20: mol_type = other DNA
aagttgctccaaatggatca

SEQ ID NO: 96348 - DNA, 20 bp, synthetic construct
  source 1..20: mol_type = other DNA
aaagttgctccaaatggatc

SEQ ID NO: 96349 - DNA, 20 bp, synthetic construct
  source 1..20: mol_type = other DNA
aaaagttgctccaaatggat

SEQ ID NO: 96350 - DNA, 20 bp, synthetic construct
  source 1..20: mol_type = other DNA
aaaaagttgctccaaatgga

SEQ ID NO: 96351 - DNA, 20 bp, synthetic construct
  source 1..20: mol_type = other DNA
aaaaaagttgctccaaatgg

SEQ ID NO: 96352 - DNA, 20 bp, synthetic construct
  source 1..20: mol_type = other DNA
aaaaaaagttgctccaaatg

SEQ ID NO: 96353 - DNA, 20 bp, synthetic construct
  source 1..20: mol_type = other DNA
aaaaaaaagttgctccaaat

SEQ ID NO: 96354 - DNA, 20 bp, synthetic construct
  source 1..20: mol_type = other DNA
aaaaaaaaagttgctccaaa

SEQ ID NO: 96355 - DNA, 20 bp, synthetic construct
  source 1..20: mol_type = other DNA
gaaaaaaaaagttgctccaa

SEQ ID NO: 96356 - DNA, 20 bp, synthetic construct
  source 1..20: mol_type = other DNA
agaaaaaaaaagttgctcca

SEQ ID NO: 96357 - DNA, 20 bp, synthetic construct
  source 1..20: mol_type = other DNA
aagaaaaaaaaagttgctcc

SEQ ID NO: 96358 - DNA, 20 bp, synthetic construct
  source 1..20: mol_type = other DNA
aaagaaaaaaaaagttgctc

SEQ ID NO: 96359 - DNA, 20 bp, synthetic construct
  source 1..20: mol_type = other DNA
aaaagaaaaaaaaagttgct

SEQ ID NO: 96360 - DNA, 20 bp, synthetic construct
  source 1..20: mol_type = other DNA
caaaagaaaaaaaaagttgc

SEQ ID NO: 96361 - DNA, 20 bp, synthetic construct
  source 1..20: mol_type = other DNA
tcaaaagaaaaaaaaagttg

SEQ ID NO: 96362 - DNA, 20 bp, synthetic construct
  source 1..20: mol_type = other DNA
gtcaaaagaaaaaaaaagtt

SEQ ID NO: 96363 - DNA, 20 bp, synthetic construct
  source 1..20: mol_type = other DNA
tgtcaaaagaaaaaaaaagt

SEQ ID NO: 96364 - DNA, 20 bp, synthetic construct
  source 1..20: mol_type = other DNA
gtgtcaaaagaaaaaaaaag

SEQ ID NO: 96365 - DNA, 20 bp, synthetic construct
  source 1..20: mol_type = other DNA
tgtgtcaaaagaaaaaaaaa

SEQ ID NO: 96366 - DNA, 20 bp, synthetic construct
  source 1..20: mol_type = other DNA
ctgtgtcaaaagaaaaaaaa

SEQ ID NO: 96367 - DNA, 20 bp, synthetic construct
  source 1..20: mol_type = other DNA
tctgtgtcaaaagaaaaaaa

SEQ ID NO: 96368 - DNA, 20 bp, synthetic construct
  source 1..20: mol_type = other DNA
ttctgtgtcaaaagaaaaaa

SEQ ID NO: 96369 - DNA, 20 bp, synthetic construct
  source 1..20: mol_type = other DNA
attctgtgtcaaaagaaaaa

SEQ ID NO: 96370 - DNA, 20 bp, synthetic construct
  source 1..20: mol_type = other DNA
gattctgtgtcaaaagaaaa

SEQ ID NO: 96371 - DNA, 20 bp, synthetic construct
  source 1..20: mol_type = other DNA
agattctgtgtcaaaagaaa

SEQ ID NO: 96372 - DNA, 20 bp, synthetic construct
  source 1..20: mol_type = other DNA
gagattctgtgtcaaaagaa

SEQ ID NO: 96373 - DNA, 20 bp, synthetic construct
  source 1..20: mol_type = other DNA
cgagattctgtgtcaaaaga

SEQ ID NO: 96374 - DNA, 20 bp, synthetic construct
  source 1..20: mol_type = other DNA
gcgagattctgtgtcaaaag

SEQ ID NO: 96375 - DNA, 20 bp, synthetic construct
  source 1..20: mol_type = other DNA
agcgagattctgtgtcaaaa

SEQ ID NO: 96376 - DNA, 20 bp, synthetic construct
  source 1..20: mol_type = other DNA
gagcgagattctgtgtcaaa

SEQ ID NO: 96377 - DNA, 20 bp, synthetic construct
  source 1..20: mol_type = other DNA
agagcgagattctgtgtcaa

SEQ ID NO: 96378 - DNA, 20 bp, synthetic construct
  source 1..20: mol_type = other DNA
aagagcgagattctgtgtca

SEQ ID NO: 96379 - DNA, 20 bp, synthetic construct
  source 1..20: mol_type = other DNA
aaagagcgagattctgtgtc

SEQ ID NO: 96380 - DNA, 20 bp, synthetic construct
  source 1..20: mol_type = other DNA
aaaagagcgagattctgtgt

SEQ ID NO: 96381 - DNA, 20 bp, synthetic construct
  source 1..20: mol_type = other DNA
caaaagagcgagattctgtg

SEQ ID NO: 96382 - DNA, 20 bp, synthetic construct
  source 1..20: mol_type = other DNA
gcaaaagagcgagattctgt

SEQ ID NO: 96383 - DNA, 20 bp, synthetic construct
  source 1..20: mol_type = other DNA
agcaaaagagcgagattctg

SEQ ID NO: 96384 - DNA, 20 bp, synthetic construct
  source 1..20: mol_type = other DNA
aagcaaaagagcgagattct

SEQ ID NO: 96385 - DNA, 20 bp, synthetic construct
  source 1..20: mol_type = other DNA
taagcaaaagagcgagattc

SEQ ID NO: 96386 - DNA, 20 bp, synthetic construct
  source 1..20: mol_type = other DNA
ctaagcaaaagagcgagatt

SEQ ID NO: 96387 - DNA, 20 bp, synthetic construct
  source 1..20: mol_type = other DNA
cctaagcaaaagagcgagat

SEQ ID NO: 96388 - DNA, 20 bp, synthetic construct
  source 1..20: mol_type = other DNA
gcctaagcaaaagagcgaga

SEQ ID NO: 96389 - DNA, 20 bp, synthetic construct
  source 1..20: mol_type = other DNA
agcctaagcaaaagagcgag

SEQ ID NO: 96390 - DNA, 20 bp, synthetic construct
  source 1..20: mol_type = other DNA
cagcctaagcaaaagagcga

SEQ ID NO: 96391 - DNA, 20 bp, synthetic construct
  source 1..20: mol_type = other DNA
ccagcctaagcaaaagagcg

SEQ ID NO: 96392 - DNA, 20 bp, synthetic construct
  source 1..20: mol_type = other DNA
tccagcctaagcaaaagagc

SEQ ID NO: 96393 - DNA, 20 bp, synthetic construct
  source 1..20: mol_type = other DNA
ctccagcctaagcaaaagag

SEQ ID NO: 96394 - DNA, 20 bp, synthetic construct
  source 1..20: mol_type = other DNA
cctccagcctaagcaaaaga

SEQ ID NO: 96395 - DNA, 20 bp, synthetic construct
  source 1..20: mol_type = other DNA
ccctccagcctaagcaaaag

SEQ ID NO: 96396 - DNA, 20 bp, synthetic construct
  source 1..20: mol_type = other DNA
gccctccagcctaagcaaaa

SEQ ID NO: 96397 - DNA, 20 bp, synthetic construct
  source 1..20: mol_type = other DNA
tgccctccagcctaagcaaa

SEQ ID NO: 96398 - DNA, 20 bp, synthetic construct
  source 1..20: mol_type = other DNA
ctgccctccagcctaagcaa

SEQ ID NO: 96399 - DNA, 20 bp, synthetic construct
  source 1..20: mol_type = other DNA
actgccctccagcctaagca

SEQ ID NO: 96400 - DNA, 20 bp, synthetic construct
  source 1..20: mol_type = other DNA
cactgccctccagcctaagc

SEQ ID NO: 96401 - DNA, 20 bp, synthetic construct
  source 1..20: mol_type = other DNA
ccactgccctccagcctaag

SEQ ID NO: 96402 - DNA, 20 bp, synthetic construct
  source 1..20: mol_type = other DNA
accactgccctccagcctaa

SEQ ID NO: 96403 - DNA, 20 bp, synthetic construct
  source 1..20: mol_type = other DNA
caccactgccctccagccta

SEQ ID NO: 96404 - DNA, 20 bp, synthetic construct
  source 1..20: mol_type = other DNA
gcaccactgccctccagcct

SEQ ID NO: 96405 - DNA, 20 bp, synthetic construct
  source 1..20: mol_type = other DNA
tgcaccactgccctccagcc

SEQ ID NO: 96406 - DNA, 20 bp, synthetic construct
  source 1..20: mol_type = other DNA
ttgcaccactgccctccagc

SEQ ID NO: 96407 - DNA, 20 bp, synthetic construct
  source 1..20: mol_type = other DNA
attgcaccactgccctccag

SEQ ID NO: 96408 - DNA, 20 bp, synthetic construct
  source 1..20: mol_type = other DNA
gattgcaccactgccctcca

SEQ ID NO: 96409 - DNA, 20 bp, synthetic construct
  source 1..20: mol_type = other DNA
agattgcaccactgccctcc

SEQ ID NO: 96410 - DNA, 20 bp, synthetic construct
  source 1..20: mol_type = other DNA
aagattgcaccactgccctc

SEQ ID NO: 96411 - DNA, 20 bp, synthetic construct
  source 1..20: mol_type = other DNA
caagattgcaccactgccct

SEQ ID NO: 96412 - DNA, 20 bp, synthetic construct
  source 1..20: mol_type = other DNA
ccaagattgcaccactgccc

SEQ ID NO: 96413 - DNA, 20 bp, synthetic construct
  source 1..20: mol_type = other DNA
gccaagattgcaccactgcc

SEQ ID NO: 96414 - DNA, 20 bp, synthetic construct
  source 1..20: mol_type = other DNA
agccaagattgcaccactgc

SEQ ID NO: 96415 - DNA, 20 bp, synthetic construct
  source 1..20: mol_type = other DNA
gagccaagattgcaccactg

SEQ ID NO: 96416 - DNA, 20 bp, synthetic construct
  source 1..20: mol_type = other DNA
tgagccaagattgcaccact

SEQ ID NO: 96417 - DNA, 20 bp, synthetic construct
  source 1..20: mol_type = other DNA
gtgagccaagattgcaccac

SEQ ID NO: 96418 - DNA, 20 bp, synthetic construct
  source 1..20: mol_type = other DNA
tgtgagccaagattgcacca

SEQ ID NO: 96419 - DNA, 20 bp, synthetic construct
  source 1..20: mol_type = other DNA
ctgtgagccaagattgcacc

SEQ ID NO: 96420 - DNA, 20 bp, synthetic construct
  source 1..20: mol_type = other DNA
gctgtgagccaagattgcac

SEQ ID NO: 96421 - DNA, 20 bp, synthetic construct
  source 1..20: mol_type = other DNA
tgctgtgagccaagattgca

SEQ ID NO: 96422 - DNA, 20 bp, synthetic construct
  source 1..20: mol_type = other DNA
ctgctgtgagccaagattgc

SEQ ID NO: 96423 - DNA, 20 bp, synthetic construct
  source 1..20: mol_type = other DNA
gctgctgtgagccaagattg

SEQ ID NO: 96424 - DNA, 20 bp, synthetic construct
  source 1..20: mol_type = other DNA
ggctgctgtgagccaagatt

SEQ ID NO: 96425 - DNA, 20 bp, synthetic construct
  source 1..20: mol_type = other DNA
aggctgctgtgagccaagat

SEQ ID NO: 96426 - DNA, 20 bp, synthetic construct
  source 1..20: mol_type = other DNA
gaggctgctgtgagccaaga

SEQ ID NO: 96427 - DNA, 20 bp, synthetic construct
  source 1..20: mol_type = other DNA
tgaggctgctgtgagccaag

SEQ ID NO: 96428 - DNA, 20 bp, synthetic construct
  source 1..20: mol_type = other DNA
ctgaggctgctgtgagccaa

SEQ ID NO: 96429 - DNA, 20 bp, synthetic construct
  source 1..20: mol_type = other DNA
gctgaggctgctgtgagcca

SEQ ID NO: 96430 - DNA, 20 bp, synthetic construct
  source 1..20: mol_type = other DNA
ggctgaggctgctgtgagcc

SEQ ID NO: 96431 - DNA, 20 bp, synthetic construct
  source 1..20: mol_type = other DNA
aggctgaggctgctgtgagc

SEQ ID NO: 96432 - DNA, 20 bp, synthetic construct
  source 1..20: mol_type = other DNA
gaggctgaggctgctgtgag

SEQ ID NO: 96433 - DNA, 20 bp, synthetic construct
  source 1..20: mol_type = other DNA
ggaggctgaggctgctgtga

SEQ ID NO: 96434 - DNA, 20 bp, synthetic construct
  source 1..20: mol_type = other DNA
aggaggctgaggctgctgtg

SEQ ID NO: 96435 - DNA, 20 bp, synthetic construct
  source 1..20: mol_type = other DNA
caggaggctgaggctgctgt

SEQ ID NO: 96436 - DNA, 20 bp, synthetic construct
  source 1..20: mol_type = other DNA
ccaggaggctgaggctgctg

SEQ ID NO: 96437 - DNA, 20 bp, synthetic construct
  source 1..20: mol_type = other DNA
cccaggaggctgaggctgct

SEQ ID NO: 96438 - DNA, 20 bp, synthetic construct
  source 1..20: mol_type = other DNA
gcccaggaggctgaggctgc

SEQ ID NO: 96439 - DNA, 20 bp, synthetic construct
  source 1..20: mol_type = other DNA
agcccaggaggctgaggctg

SEQ ID NO: 96440 - DNA, 20 bp, synthetic construct
  source 1..20: mol_type = other DNA
gagcccaggaggctgaggct

SEQ ID NO: 96441 - DNA, 20 bp, synthetic construct
  source 1..20: mol_type = other DNA
tgagcccaggaggctgaggc

SEQ ID NO: 96442 - DNA, 20 bp, synthetic construct
  source 1..20: mol_type = other DNA
ttgagcccaggaggctgagg

SEQ ID NO: 96443 - DNA, 20 bp, synthetic construct
  source 1..20: mol_type = other DNA
tttgagcccaggaggctgag

SEQ ID NO: 96444 - DNA, 20 bp, synthetic construct
  source 1..20: mol_type = other DNA
atttgagcccaggaggctga

SEQ ID NO: 96445 - DNA, 20 bp, synthetic construct
  source 1..20: mol_type = other DNA
catttgagcccaggaggctg

SEQ ID NO: 96446 - DNA, 20 bp, synthetic construct
  source 1..20: mol_type = other DNA
tcatttgagcccaggaggct

SEQ ID NO: 96447 - DNA, 20 bp, synthetic construct
  source 1..20: mol_type = other DNA
ctcatttgagcccaggaggc

SEQ ID NO: 96448 - DNA, 20 bp, synthetic construct
  source 1..20: mol_type = other DNA
actcatttgagcccaggagg

SEQ ID NO: 96449 - DNA, 20 bp, synthetic construct
  source 1..20: mol_type = other DNA
tactcatttgagcccaggag

SEQ ID NO: 96450 - DNA, 20 bp, synthetic construct
  source 1..20: mol_type = other DNA
ctactcatttgagcccagga

SEQ ID NO: 96451 - DNA, 20 bp, synthetic construct
  source 1..20: mol_type = other DNA
gctactcatttgagcccagg

SEQ ID NO: 96452 - DNA, 20 bp, synthetic construct
  source 1..20: mol_type = other DNA
agctactcatttgagcccag

SEQ ID NO: 96453 - DNA, 20 bp, synthetic construct
  source 1..20: mol_type = other DNA
cagctactcatttgagccca

SEQ ID NO: 96454 - DNA, 20 bp, synthetic construct
  source 1..20: mol_type = other DNA
ccagctactcatttgagccc

SEQ ID NO: 96455 - DNA, 20 bp, synthetic construct
  source 1..20: mol_type = other DNA
accagctactcatttgagcc

SEQ ID NO: 96456 - DNA, 20 bp, synthetic construct
  source 1..20: mol_type = other DNA
taccagctactcatttgagc

SEQ ID NO: 96457 - DNA, 20 bp, synthetic construct
  source 1..20: mol_type = other DNA
gtaccagctactcatttgag

SEQ ID NO: 96458 - DNA, 20 bp, synthetic construct
  source 1..20: mol_type = other DNA
agtaccagctactcatttga

SEQ ID NO: 96459 - DNA, 20 bp, synthetic construct
  source 1..20: mol_type = other DNA
tagtaccagctactcatttg

SEQ ID NO: 96460 - DNA, 20 bp, synthetic construct
  source 1..20: mol_type = other DNA
gtagtaccagctactcattt

SEQ ID NO: 96461 - DNA, 20 bp, synthetic construct
  source 1..20: mol_type = other DNA
tgtagtaccagctactcatt

SEQ ID NO: 96462 - DNA, 20 bp, synthetic construct
  source 1..20: mol_type = other DNA
ctgtagtaccagctactcat

SEQ ID NO: 96463 - DNA, 20 bp, synthetic construct
  source 1..20: mol_type = other DNA
cctgtagtaccagctactca

SEQ ID NO: 96464 - DNA, 20 bp, synthetic construct
  source 1..20: mol_type = other DNA
acctgtagtaccagctactc

SEQ ID NO: 96465 - DNA, 20 bp, synthetic construct
  source 1..20: mol_type = other DNA
cacctgtagtaccagctact

SEQ ID NO: 96466 - DNA, 20 bp, synthetic construct
  source 1..20: mol_type = other DNA
acacctgtagtaccagctac

SEQ ID NO: 96467 - DNA, 20 bp, synthetic construct
  source 1..20: mol_type = other DNA
cacacctgtagtaccagcta

SEQ ID NO: 96468 - DNA, 20 bp, synthetic construct
  source 1..20: mol_type = other DNA
gcacacctgtagtaccagct

SEQ ID NO: 96469 - DNA, 20 bp, synthetic construct
  source 1..20: mol_type = other DNA
tgcacacctgtagtaccagc

SEQ ID NO: 96470 - DNA, 20 bp, synthetic construct
  source 1..20: mol_type = other DNA
gtgcacacctgtagtaccag

SEQ ID NO: 96471 - DNA, 20 bp, synthetic construct
  source 1..20: mol_type = other DNA
ggtgcacacctgtagtacca

SEQ ID NO: 96472 - DNA, 20 bp, synthetic construct
  source 1..20: mol_type = other DNA
tggtgcacacctgtagtacc

SEQ ID NO: 96473 - DNA, 20 bp, synthetic construct
  source 1..20: mol_type = other DNA
gtggtgcacacctgtagtac

SEQ ID NO: 96474 - DNA, 20 bp, synthetic construct
  source 1..20: mol_type = other DNA
ggtggtgcacacctgtagta

SEQ ID NO: 96475 - DNA, 20 bp, synthetic construct
  source 1..20: mol_type = other DNA
tggtggtgcacacctgtagt

SEQ ID NO: 96476 - DNA, 20 bp, synthetic construct
  source 1..20: mol_type = other DNA
gtggtggtgcacacctgtag

SEQ ID NO: 96477 - DNA, 20 bp, synthetic construct
  source 1..20: mol_type = other DNA
tgtggtggtgcacacctgta

SEQ ID NO: 96478 - DNA, 20 bp, synthetic construct
  source 1..20: mol_type = other DNA
gtgtggtggtgcacacctgt

SEQ ID NO: 96479 - DNA, 20 bp, synthetic construct
  source 1..20: mol_type = other DNA
ggtgtggtggtgcacacctg

SEQ ID NO: 96480 - DNA, 20 bp, synthetic construct
  source 1..20: mol_type = other DNA
aggtgtggtggtgcacacct

SEQ ID NO: 96481 - DNA, 20 bp, synthetic construct
  source 1..20: mol_type = other DNA
aaggtgtggtggtgcacacc

SEQ ID NO: 96482 - DNA, 20 bp, synthetic construct
  source 1..20: mol_type = other DNA
caaggtgtggtggtgcacac

SEQ ID NO: 96483 - DNA, 20 bp, synthetic construct
  source 1..20: mol_type = other DNA
gcaaggtgtggtggtgcaca

SEQ ID NO: 96484 - DNA, 20 bp, synthetic construct
  source 1..20: mol_type = other DNA
agcaaggtgtggtggtgcac

SEQ ID NO: 96485 - DNA, 20 bp, synthetic construct
  source 1..20: mol_type = other DNA
tagcaaggtgtggtggtgca

SEQ ID NO: 96486 - DNA, 20 bp, synthetic construct
  source 1..20: mol_type = other DNA
atagcaaggtgtggtggtgc

SEQ ID NO: 96487 - DNA, 20 bp, synthetic construct
  source 1..20: mol_type = other DNA
aatagcaaggtgtggtggtg

SEQ ID NO: 96488 - DNA, 20 bp, synthetic construct
  source 1..20: mol_type = other DNA
taatagcaaggtgtggtggt

SEQ ID NO: 96489 - DNA, 20 bp, synthetic construct
  source 1..20: mol_type = other DNA
ttaatagcaaggtgtggtgg

SEQ ID NO: 96490 - DNA, 20 bp, synthetic construct
  source 1..20: mol_type = other DNA
attaatagcaaggtgtggtg

SEQ ID NO: 96491 - DNA, 20 bp, synthetic construct
  source 1..20: mol_type = other DNA
tattaatagcaaggtgtggt

SEQ ID NO: 96492 - DNA, 20 bp, synthetic construct
  source 1..20: mol_type = other DNA
ttattaatagcaaggtgtgg

SEQ ID NO: 96493 - DNA, 20 bp, synthetic construct
  source 1..20: mol_type = other DNA
gttattaatagcaaggtgtg

SEQ ID NO: 96494 - DNA, 20 bp, synthetic construct
  source 1..20: mol_type = other DNA
agttattaatagcaaggtgt

SEQ ID NO: 96495 - DNA, 20 bp, synthetic construct
  source 1..20: mol_type = other DNA
aagttattaatagcaaggtg

SEQ ID NO: 96496 - DNA, 20 bp, synthetic construct
  source 1..20: mol_type = other DNA
aaagttattaatagcaaggt

SEQ ID NO: 96497 - DNA, 20 bp, synthetic construct
  source 1..20: mol_type = other DNA
aaaagttattaatagcaagg

SEQ ID NO: 96498 - DNA, 20 bp, synthetic construct
  source 1..20: mol_type = other DNA
caaaagttattaatagcaag

SEQ ID NO: 96499 - DNA, 20 bp, synthetic construct
  source 1..20: mol_type = other DNA
acaaaagttattaatagcaa

SEQ ID NO: 96500 - DNA, 20 bp, synthetic construct
  source 1..20: mol_type = other DNA
tacaaaagttattaatagca

SEQ ID NO: 96501 - DNA, 20 bp, synthetic construct
  source 1..20: mol_type = other DNA
atacaaaagttattaatagc

SEQ ID NO: 96502 - DNA, 20 bp, synthetic construct
  source 1..20: mol_type = other DNA
aatacaaaagttattaatag

SEQ ID NO: 96503 - DNA, 20 bp, synthetic construct
  source 1..20: mol_type = other DNA
aaatacaaaagttattaata

SEQ ID NO: 96504 - DNA, 20 bp, synthetic construct
  source 1..20: mol_type = other DNA
aaaatacaaaagttattaat

SEQ ID NO: 96505 - DNA, 20 bp, synthetic construct
  source 1..20: mol_type = other DNA
aaaaatacaaaagttattaa

SEQ ID NO: 96506 - DNA, 20 bp, synthetic construct
  source 1..20: mol_type = other DNA
aaaaaatacaaaagttatta

SEQ ID NO: 96507 - DNA, 20 bp, synthetic construct
  source 1..20: mol_type = other DNA
aaaaaaatacaaaagttatt

SEQ ID NO: 96508 - DNA, 20 bp, synthetic construct
  source 1..20: mol_type = other DNA
caaaaaaatacaaaagttat

SEQ ID NO: 96509 - DNA, 20 bp, synthetic construct
  source 1..20: mol_type = other DNA
acaaaaaaatacaaaagtta

SEQ ID NO: 96510 - DNA, 20 bp, synthetic construct
  source 1..20: mol_type = other DNA
tacaaaaaaatacaaaagtt

SEQ ID NO: 96511 - DNA, 20 bp, synthetic construct
  source 1..20: mol_type = other DNA
ctacaaaaaaatacaaaagt

SEQ ID NO: 96512 - DNA, 20 bp, synthetic construct
  source 1..20: mol_type = other DNA
tctacaaaaaaatacaaaag

SEQ ID NO: 96513 - DNA, 20 bp, synthetic construct
  source 1..20: mol_type = other DNA
ctctacaaaaaaatacaaaa

SEQ ID NO: 96514 - DNA, 20 bp, synthetic construct
  source 1..20: mol_type = other DNA
tctctacaaaaaaatacaaa

SEQ ID NO: 96515 - DNA, 20 bp, synthetic construct
  source 1..20: mol_type = other DNA
gtctctacaaaaaaatacaa

SEQ ID NO: 96516 - DNA, 20 bp, synthetic construct
  source 1..20: mol_type = other DNA
tgtctctacaaaaaaataca

SEQ ID NO: 96517 - DNA, 20 bp, synthetic construct
  source 1..20: mol_type = other DNA
ctgtctctacaaaaaaatac

SEQ ID NO: 96518 - DNA, 20 bp, synthetic construct
  source 1..20: mol_type = other DNA
tctgtctctacaaaaaaata

SEQ ID NO: 96519 - DNA, 20 bp, synthetic construct
  source 1..20: mol_type = other DNA
ttctgtctctacaaaaaaat

SEQ ID NO: 96520 - DNA, 20 bp, synthetic construct
  source 1..20: mol_type = other DNA
attctgtctctacaaaaaaa

SEQ ID NO: 96521 - DNA, 20 bp, synthetic construct
  source 1..20: mol_type = other DNA
aattctgtctctacaaaaaa

SEQ ID NO: 96522 - DNA, 20 bp, synthetic construct
  source 1..20: mol_type = other DNA
aaattctgtctctacaaaaa

SEQ ID NO: 96523 - DNA, 20 bp, synthetic construct
  source 1..20: mol_type = other DNA
gaaattctgtctctacaaaa

SEQ ID NO: 96524 - DNA, 20 bp, synthetic construct
  source 1..20: mol_type = other DNA
cgaaattctgtctctacaaa

SEQ ID NO: 96525 - DNA, 20 bp, synthetic construct
  source 1..20: mol_type = other DNA
gcgaaattctgtctctacaa

SEQ ID NO: 96526 - DNA, 20 bp, synthetic construct
  source 1..20: mol_type = other DNA
ggcgaaattctgtctctaca

SEQ ID NO: 96527 - DNA, 20 bp, synthetic construct
  source 1..20: mol_type = other DNA
tggcgaaattctgtctctac

SEQ ID NO: 96528 - DNA, 20 bp, synthetic construct
  source 1..20: mol_type = other DNA
atggcgaaattctgtctcta

SEQ ID NO: 96529 - DNA, 20 bp, synthetic construct
  source 1..20: mol_type = other DNA
catggcgaaattctgtctct

SEQ ID NO: 96530 - DNA, 20 bp, synthetic construct
  source 1..20: mol_type = other DNA
acatggcgaaattctgtctc

SEQ ID NO: 96531 - DNA, 20 bp, synthetic construct
  source 1..20: mol_type = other DNA
aacatggcgaaattctgtct

SEQ ID NO: 96532 - DNA, 20 bp, synthetic construct
  source 1..20: mol_type = other DNA
caacatggcgaaattctgtc

SEQ ID NO: 96533 - DNA, 20 bp, synthetic construct
  source 1..20: mol_type = other DNA
gcaacatggcgaaattctgt

SEQ ID NO: 96534 - DNA, 20 bp, synthetic construct
  source 1..20: mol_type = other DNA
ggcaacatggcgaaattctg

SEQ ID NO: 96535 - DNA, 20 bp, synthetic construct
  source 1..20: mol_type = other DNA
gggcaacatggcgaaattct

SEQ ID NO: 96536 - DNA, 20 bp, synthetic construct
  source 1..20: mol_type = other DNA
tgggcaacatggcgaaattc

SEQ ID NO: 96537 - DNA, 20 bp, synthetic construct
  source 1..20: mol_type = other DNA
ctgggcaacatggcgaaatt

SEQ ID NO: 96538 - DNA, 20 bp, synthetic construct
  source 1..20: mol_type = other DNA
cctgggcaacatggcgaaat

SEQ ID NO: 96539 - DNA, 20 bp, synthetic construct
  source 1..20: mol_type = other DNA
gcctgggcaacatggcgaaa

SEQ ID NO: 96540 - DNA, 20 bp, synthetic construct
  source 1..20: mol_type = other DNA
agcctgggcaacatggcgaa

SEQ ID NO: 96541 - DNA, 20 bp, synthetic construct
  source 1..20: mol_type = other DNA
cagcctgggcaacatggcga

SEQ ID NO: 96542 - DNA, 20 bp, synthetic construct
  source 1..20: mol_type = other DNA
ccagcctgggcaacatggcg

SEQ ID NO: 96543 - DNA, 20 bp, synthetic construct
  source 1..20: mol_type = other DNA
accagcctgggcaacatggc

SEQ ID NO: 96544 - DNA, 20 bp, synthetic construct
  source 1..20: mol_type = other DNA
gaccagcctgggcaacatgg

SEQ ID NO: 96545 - DNA, 20 bp, synthetic construct
  source 1..20: mol_type = other DNA
agaccagcctgggcaacatg

SEQ ID NO: 96546 - DNA, 20 bp, synthetic construct
  source 1..20: mol_type = other DNA
gagaccagcctgggcaacat

SEQ ID NO: 96547 - DNA, 20 bp, synthetic construct
  source 1..20: mol_type = other DNA
tgagaccagcctgggcaaca

SEQ ID NO: 96548 - DNA, 20 bp, synthetic construct
  source 1..20: mol_type = other DNA
ttgagaccagcctgggcaac

SEQ ID NO: 96549 - DNA, 20 bp, synthetic construct
  source 1..20: mol_type = other DNA
tttgagaccagcctgggcaa

SEQ ID NO: 96550 - DNA, 20 bp, synthetic construct
  source 1..20: mol_type = other DNA
gtttgagaccagcctgggca

SEQ ID NO: 96551 - DNA, 20 bp, synthetic construct
  source 1..20: mol_type = other DNA
tgtttgagaccagcctgggc

SEQ ID NO: 96552 - DNA, 20 bp, synthetic construct
  source 1..20: mol_type = other DNA
gtgtttgagaccagcctggg

SEQ ID NO: 96553 - DNA, 20 bp, synthetic construct
  source 1..20: mol_type = other DNA
agtgtttgagaccagcctgg

SEQ ID NO: 96554 - DNA, 20 bp, synthetic construct
  source 1..20: mol_type = other DNA
aagtgtttgagaccagcctg

SEQ ID NO: 96555 - DNA, 20 bp, synthetic construct
  source 1..20: mol_type = other DNA
caagtgtttgagaccagcct

SEQ ID NO: 96556 - DNA, 20 bp, synthetic construct
  source 1..20: mol_type = other DNA
ccaagtgtttgagaccagcc

SEQ ID NO: 96557 - DNA, 20 bp, synthetic construct
  source 1..20: mol_type = other DNA
tccaagtgtttgagaccagc

SEQ ID NO: 96558 - DNA, 20 bp, synthetic construct
  source 1..20: mol_type = other DNA
gtccaagtgtttgagaccag

SEQ ID NO: 96559 - DNA, 20 bp, synthetic construct
  source 1..20: mol_type = other DNA
agtccaagtgtttgagacca

SEQ ID NO: 96560 - DNA, 20 bp, synthetic construct
  source 1..20: mol_type = other DNA
gagtccaagtgtttgagacc

SEQ ID NO: 96561 - DNA, 20 bp, synthetic construct
  source 1..20: mol_type = other DNA
tgagtccaagtgtttgagac

SEQ ID NO: 96562 - DNA, 20 bp, synthetic construct
  source 1..20: mol_type = other DNA
ttgagtccaagtgtttgaga

SEQ ID NO: 96563 - DNA, 20 bp, synthetic construct
  source 1..20: mol_type = other DNA
cttgagtccaagtgtttgag

SEQ ID NO: 96564 - DNA, 20 bp, synthetic construct
  source 1..20: mol_type = other DNA
acttgagtccaagtgtttga

SEQ ID NO: 96565 - DNA, 20 bp, synthetic construct
  source 1..20: mol_type = other DNA
cacttgagtccaagtgtttg

SEQ ID NO: 96566 - DNA, 20 bp, synthetic construct
  source 1..20: mol_type = other DNA
tcacttgagtccaagtgttt

SEQ ID NO: 96567 - DNA, 20 bp, synthetic construct
  source 1..20: mol_type = other DNA
gtcacttgagtccaagtgtt

SEQ ID NO: 96568 - DNA, 20 bp, synthetic construct
  source 1..20: mol_type = other DNA
tgtcacttgagtccaagtgt

SEQ ID NO: 96569 - DNA, 20 bp, synthetic construct
  source 1..20: mol_type = other DNA
gtgtcacttgagtccaagtg

SEQ ID NO: 96570 - DNA, 20 bp, synthetic construct
  source 1..20: mol_type = other DNA
cgtgtcacttgagtccaagt

SEQ ID NO: 96571 - DNA, 20 bp, synthetic construct
  source 1..20: mol_type = other DNA
gcgtgtcacttgagtccaag

SEQ ID NO: 96572 - DNA, 20 bp, synthetic construct
  source 1..20: mol_type = other DNA
ggcgtgtcacttgagtccaa

SEQ ID NO: 96573 - DNA, 20 bp, synthetic construct
  source 1..20: mol_type = other DNA
gggcgtgtcacttgagtcca

SEQ ID NO: 96574 - DNA, 20 bp, synthetic construct
  source 1..20: mol_type = other DNA
tgggcgtgtcacttgagtcc

SEQ ID NO: 96575 - DNA, 20 bp, synthetic construct
  source 1..20: mol_type = other DNA
gtgggcgtgtcacttgagtc

SEQ ID NO: 96576 - DNA, 20 bp, synthetic construct
  source 1..20: mol_type = other DNA
ggtgggcgtgtcacttgagt

SEQ ID NO: 96577 - DNA, 20 bp, synthetic construct
  source 1..20: mol_type = other DNA
aggtgggcgtgtcacttgag

SEQ ID NO: 96578 - DNA, 20 bp, synthetic construct
  source 1..20: mol_type = other DNA
gaggtgggcgtgtcacttga

SEQ ID NO: 96579 - DNA, 20 bp, synthetic construct
  source 1..20: mol_type = other DNA
tgaggtgggcgtgtcacttg

SEQ ID NO: 96580 - DNA, 20 bp, synthetic construct
  source 1..20: mol_type = other DNA
ctgaggtgggcgtgtcactt

SEQ ID NO: 96581 - DNA, 20 bp, synthetic construct
  source 1..20: mol_type = other DNA
gctgaggtgggcgtgtcact

SEQ ID NO: 96582 - DNA, 20 bp, synthetic construct
  source 1..20: mol_type = other DNA
ggctgaggtgggcgtgtcac

SEQ ID NO: 96583 - DNA, 20 bp, synthetic construct
  source 1..20: mol_type = other DNA
aggctgaggtgggcgtgtca

SEQ ID NO: 96584 - DNA, 20 bp, synthetic construct
  source 1..20: mol_type = other DNA
gaggctgaggtgggcgtgtc

SEQ ID NO: 96585 - DNA, 20 bp, synthetic construct
  source 1..20: mol_type = other DNA
ggaggctgaggtgggcgtgt

SEQ ID NO: 96586 - DNA, 20 bp, synthetic construct
  source 1..20: mol_type = other DNA
gggaggctgaggtgggcgtg

SEQ ID NO: 96587 - DNA, 20 bp, synthetic construct
  source 1..20: mol_type = other DNA
tgggaggctgaggtgggcgt

SEQ ID NO: 96588 - DNA, 20 bp, synthetic construct
  source 1..20: mol_type = other DNA
ttgggaggctgaggtgggcg

SEQ ID NO: 96589 - DNA, 20 bp, synthetic construct
  source 1..20: mol_type = other DNA
tttgggaggctgaggtgggc

SEQ ID NO: 96590 - DNA, 20 bp, synthetic construct
  source 1..20: mol_type = other DNA
ctttgggaggctgaggtggg

SEQ ID NO: 96591 - DNA, 20 bp, synthetic construct
  source 1..20: mol_type = other DNA
actttgggaggctgaggtgg

SEQ ID NO: 96592 - DNA, 20 bp, synthetic construct
  source 1..20: mol_type = other DNA
cactttgggaggctgaggtg

SEQ ID NO: 96593 - DNA, 20 bp, synthetic construct
  source 1..20: mol_type = other DNA
tcactttgggaggctgaggt

SEQ ID NO: 96594 - DNA, 20 bp, synthetic construct
  source 1..20: mol_type = other DNA
ttcactttgggaggctgagg

SEQ ID NO: 96595 - DNA, 20 bp, synthetic construct
  source 1..20: mol_type = other DNA
tttcactttgggaggctgag

SEQ ID NO: 96596 - DNA, 20 bp, synthetic construct
  source 1..20: mol_type = other DNA
ttttcactttgggaggctga

SEQ ID NO: 96597 - DNA, 20 bp, synthetic construct
  source 1..20: mol_type = other DNA
tttttcactttgggaggctg

SEQ ID NO: 96598 - DNA, 20 bp, synthetic construct
  source 1..20: mol_type = other DNA
atttttcactttgggaggct

SEQ ID NO: 96599 - DNA, 20 bp, synthetic construct
  source 1..20: mol_type = other DNA
aatttttcactttgggaggc

SEQ ID NO: 96600 - DNA, 20 bp, synthetic construct
  source 1..20: mol_type = other DNA
caatttttcactttgggagg

SEQ ID NO: 96601 - DNA, 20 bp, synthetic construct
  source 1..20: mol_type = other DNA
gcaatttttcactttgggag

SEQ ID NO: 96602 - DNA, 20 bp, synthetic construct
  source 1..20: mol_type = other DNA
agcaatttttcactttggga

SEQ ID NO: 96603 - DNA, 20 bp, synthetic construct
  source 1..20: mol_type = other DNA
aagcaatttttcactttggg

SEQ ID NO: 96604 - DNA, 20 bp, synthetic construct
  source 1..20: mol_type = other DNA
aaagcaatttttcactttgg

SEQ ID NO: 96605 - DNA, 20 bp, synthetic construct
  source 1..20: mol_type = other DNA
gaaagcaatttttcactttg

SEQ ID NO: 96606 - DNA, 20 bp, synthetic construct
  source 1..20: mol_type = other DNA
tgaaagcaatttttcacttt

SEQ ID NO: 96607 - DNA, 20 bp, synthetic construct
  source 1..20: mol_type = other DNA
gtgaaagcaatttttcactt

SEQ ID NO: 96608 - DNA, 20 bp, synthetic construct
  source 1..20: mol_type = other DNA
ggtgaaagcaatttttcact

SEQ ID NO: 96609 - DNA, 20 bp, synthetic construct
  source 1..20: mol_type = other DNA
aggtgaaagcaatttttcac

SEQ ID NO: 96610 - DNA, 20 bp, synthetic construct
  source 1..20: mol_type = other DNA
aaggtgaaagcaatttttca

SEQ ID NO: 96611 - DNA, 20 bp, synthetic construct
  source 1..20: mol_type = other DNA
caaggtgaaagcaatttttc

SEQ ID NO: 96612 - DNA, 20 bp, synthetic construct
  source 1..20: mol_type = other DNA
gcaaggtgaaagcaattttt

SEQ ID NO: 96613 - DNA, 20 bp, synthetic construct
  source 1..20: mol_type = other DNA
tgcaaggtgaaagcaatttt

SEQ ID NO: 96614 - DNA, 20 bp, synthetic construct
  source 1..20: mol_type = other DNA
gtgcaaggtgaaagcaattt

SEQ ID NO: 96615 - DNA, 20 bp, synthetic construct
  source 1..20: mol_type = other DNA
agtgcaaggtgaaagcaatt

SEQ ID NO: 96616 - DNA, 20 bp, synthetic construct
  source 1..20: mol_type = other DNA
cagtgcaaggtgaaagcaat

SEQ ID NO: 96617 - DNA, 20 bp, synthetic construct
  source 1..20: mol_type = other DNA
gcagtgcaaggtgaaagcaa

SEQ ID NO: 96618 - DNA, 20 bp, synthetic construct
  source 1..20: mol_type = other DNA
cgcagtgcaaggtgaaagca

SEQ ID NO: 96619 - DNA, 20 bp, synthetic construct
  source 1..20: mol_type = other DNA
ccgcagtgcaaggtgaaagc

SEQ ID NO: 96620 - DNA, 20 bp, synthetic construct
  source 1..20: mol_type = other DNA
tccgcagtgcaaggtgaaag

SEQ ID NO: 96621 - DNA, 20 bp, synthetic construct
  source 1..20: mol_type = other DNA
gtccgcagtgcaaggtgaaa

SEQ ID NO: 96622 - DNA, 20 bp, synthetic construct
  source 1..20: mol_type = other DNA
agtccgcagtgcaaggtgaa

SEQ ID NO: 96623 - DNA, 20 bp, synthetic construct
  source 1..20: mol_type = other DNA
gagtccgcagtgcaaggtga

SEQ ID NO: 96624 - DNA, 20 bp, synthetic construct
  source 1..20: mol_type = other DNA
cgagtccgcagtgcaaggtg

SEQ ID NO: 96625 - DNA, 20 bp, synthetic construct
  source 1..20: mol_type = other DNA
gcgagtccgcagtgcaaggt

SEQ ID NO: 96626 - DNA, 20 bp, synthetic construct
  source 1..20: mol_type = other DNA
ggcgagtccgcagtgcaagg

SEQ ID NO: 96627 - DNA, 20 bp, synthetic construct
  source 1..20: mol_type = other DNA
gggcgagtccgcagtgcaag

SEQ ID NO: 96628 - DNA, 20 bp, synthetic construct
  source 1..20: mol_type = other DNA
agggcgagtccgcagtgcaa

SEQ ID NO: 96629 - DNA, 20 bp, synthetic construct
  source 1..20: mol_type = other DNA
cagggcgagtccgcagtgca

SEQ ID NO: 96630 - DNA, 20 bp, synthetic construct
  source 1..20: mol_type = other DNA
tcagggcgagtccgcagtgc

SEQ ID NO: 96631 - DNA, 20 bp, synthetic construct
  source 1..20: mol_type = other DNA
ttcagggcgagtccgcagtg

SEQ ID NO: 96632 - DNA, 20 bp, synthetic construct
  source 1..20: mol_type = other DNA
attcagggcgagtccgcagt

SEQ ID NO: 96633 - DNA, 20 bp, synthetic construct
  source 1..20: mol_type = other DNA
aattcagggcgagtccgcag

SEQ ID NO: 96634 - DNA, 20 bp, synthetic construct
  source 1..20: mol_type = other DNA
gaattcagggcgagtccgca

SEQ ID NO: 96635 - DNA, 20 bp, synthetic construct
  source 1..20: mol_type = other DNA
agaattcagggcgagtccgc

SEQ ID NO: 96636 - DNA, 20 bp, synthetic construct
  source 1..20: mol_type = other DNA
aagaattcagggcgagtccg

SEQ ID NO: 96637 - DNA, 20 bp, synthetic construct
  source 1..20: mol_type = other DNA
aaagaattcagggcgagtcc

SEQ ID NO: 96638 - DNA, 20 bp, synthetic construct
  source 1..20: mol_type = other DNA
gaaagaattcagggcgagtc

SEQ ID NO: 96639 - DNA, 20 bp, synthetic construct
  source 1..20: mol_type = other DNA
agaaagaattcagggcgagt

SEQ ID NO: 96640 - DNA, 20 bp, synthetic construct
  source 1..20: mol_type = other DNA
aagaaagaattcagggcgag

SEQ ID NO: 96641 - DNA, 20 bp, synthetic construct
  source 1..20: mol_type = other DNA
caagaaagaattcagggcga

SEQ ID NO: 96642 - DNA, 20 bp, synthetic construct
  source 1..20: mol_type = other DNA
acaagaaagaattcagggcg

SEQ ID NO: 96643 - DNA, 20 bp, synthetic construct
  source 1..20: mol_type = other DNA
cacaagaaagaattcagggc

SEQ ID NO: 96644 - DNA, 20 bp, synthetic construct
  source 1..20: mol_type = other DNA
gcacaagaaagaattcaggg

SEQ ID NO: 96645 - DNA, 20 bp, synthetic construct
  source 1..20: mol_type = other DNA
tgcacaagaaagaattcagg

SEQ ID NO: 96646 - DNA, 20 bp, synthetic construct
  source 1..20: mol_type = other DNA
ttgcacaagaaagaattcag

SEQ ID NO: 96647 - DNA, 20 bp, synthetic construct
  source 1..20: mol_type = other DNA
cttgcacaagaaagaattca

SEQ ID NO: 96648 - DNA, 20 bp, synthetic construct
  source 1..20: mol_type = other DNA
tcttgcacaagaaagaattc

SEQ ID NO: 96649 - DNA, 20 bp, synthetic construct
  source 1..20: mol_type = other DNA
atcttgcacaagaaagaatt

SEQ ID NO: 96650 - DNA, 20 bp, synthetic construct
  source 1..20: mol_type = other DNA
gatcttgcacaagaaagaat

SEQ ID NO: 96651 - DNA, 20 bp, synthetic construct
  source 1..20: mol_type = other DNA
ggatcttgcacaagaaagaa

SEQ ID NO: 96652 - DNA, 20 bp, synthetic construct
  source 1..20: mol_type = other DNA
tggatcttgcacaagaaaga

SEQ ID NO: 96653 - DNA, 20 bp, synthetic construct
  source 1..20: mol_type = other DNA
ttggatcttgcacaagaaag

SEQ ID NO: 96654 - DNA, 20 bp, synthetic construct
  source 1..20: mol_type = other DNA
cttggatcttgcacaagaaa

SEQ ID NO: 96655 - DNA, 20 bp, synthetic construct
  source 1..20: mol_type = other DNA
tcttggatcttgcacaagaa

SEQ ID NO: 96656 - DNA, 20 bp, synthetic construct
  source 1..20: mol_type = other DNA
ctcttggatcttgcacaaga

SEQ ID NO: 96657 - DNA, 20 bp, synthetic construct
  source 1..20: mol_type = other DNA
gctcttggatcttgcacaag

SEQ ID NO: 96658 - DNA, 20 bp, synthetic construct
  source 1..20: mol_type = other DNA
ggctcttggatcttgcacaa

SEQ ID NO: 96659 - DNA, 20 bp, synthetic construct
  source 1..20: mol_type = other DNA
gggctcttggatcttgcaca

SEQ ID NO: 96660 - DNA, 20 bp, synthetic construct
  source 1..20: mol_type = other DNA
agggctcttggatcttgcac

SEQ ID NO: 96661 - DNA, 20 bp, synthetic construct
  source 1..20: mol_type = other DNA
gagggctcttggatcttgca

SEQ ID NO: 96662 - DNA, 20 bp, synthetic construct
  source 1..20: mol_type = other DNA
agagggctcttggatcttgc

SEQ ID NO: 96663 - DNA, 20 bp, synthetic construct
  source 1..20: mol_type = other DNA
gagagggctcttggatcttg

SEQ ID NO: 96664 - DNA, 20 bp, synthetic construct
  source 1..20: mol_type = other DNA
agagagggctcttggatctt

SEQ ID NO: 96665 - DNA, 20 bp, synthetic construct
  source 1..20: mol_type = other DNA
cagagagggctcttggatct

SEQ ID NO: 96666 - DNA, 20 bp, synthetic construct
  source 1..20: mol_type = other DNA
ccagagagggctcttggatc

SEQ ID NO: 96667 - DNA, 20 bp, synthetic construct
  source 1..20: mol_type = other DNA
cccagagagggctcttggat

SEQ ID NO: 96668 - DNA, 20 bp, synthetic construct
  source 1..20: mol_type = other DNA
ccccagagagggctcttgga

SEQ ID NO: 96669 - DNA, 20 bp, synthetic construct
  source 1..20: mol_type = other DNA
cccccagagagggctcttgg

SEQ ID NO: 96670 - DNA, 20 bp, synthetic construct
  source 1..20: mol_type = other DNA
acccccagagagggctcttg

SEQ ID NO: 96671 - DNA, 20 bp, synthetic construct
  source 1..20: mol_type = other DNA
gacccccagagagggctctt

SEQ ID NO: 96672 - DNA, 20 bp, synthetic construct
  source 1..20: mol_type = other DNA
agacccccagagagggctct

SEQ ID NO: 96673 - DNA, 20 bp, synthetic construct
  source 1..20: mol_type = other DNA
cagacccccagagagggctc

SEQ ID NO: 96674 - DNA, 20 bp, synthetic construct
  source 1..20: mol_type = other DNA
ccagacccccagagagggct

SEQ ID NO: 96675 - DNA, 20 bp, synthetic construct
  source 1..20: mol_type = other DNA
tccagacccccagagagggc

SEQ ID NO: 96676 - DNA, 20 bp, synthetic construct
  source 1..20: mol_type = other DNA
atccagacccccagagaggg

SEQ ID NO: 96677 - DNA, 20 bp, synthetic construct
  source 1..20: mol_type = other DNA
gatccagacccccagagagg

SEQ ID NO: 96678 - DNA, 20 bp, synthetic construct
  source 1..20: mol_type = other DNA
cgatccagacccccagagag

SEQ ID NO: 96679 - DNA, 20 bp, synthetic construct
  source 1..20: mol_type = other DNA
ccgatccagacccccagaga

SEQ ID NO: 96680 - DNA, 20 bp, synthetic construct
  source 1..20: mol_type = other DNA
cccgatccagacccccagag

SEQ ID NO: 96681 - DNA, 20 bp, synthetic construct
  source 1..20: mol_type = other DNA
tcccgatccagacccccaga

SEQ ID NO: 96682 - DNA, 20 bp, synthetic construct
  source 1..20: mol_type = other DNA
gtcccgatccagacccccag

SEQ ID NO: 96683 - DNA, 20 bp, synthetic construct
  source 1..20: mol_type = other DNA
ggtcccgatccagaccccca

SEQ ID NO: 96684 - DNA, 20 bp, synthetic construct
  source 1..20: mol_type = other DNA
gggtcccgatccagaccccc

SEQ ID NO: 96685 - DNA, 20 bp, synthetic construct
  source 1..20: mol_type = other DNA
ggggtcccgatccagacccc

SEQ ID NO: 96686 - DNA, 20 bp, synthetic construct
  source 1..20: mol_type = other DNA
aggggtcccgatccagaccc

SEQ ID NO: 96687 - DNA, 20 bp, synthetic construct
  source 1..20: mol_type = other DNA
aaggggtcccgatccagacc

SEQ ID NO: 96688 - DNA, 20 bp, synthetic construct
  source 1..20: mol_type = other DNA
aaaggggtcccgatccagac

SEQ ID NO: 96689 - DNA, 20 bp, synthetic construct
  source 1..20: mol_type = other DNA
gaaaggggtcccgatccaga

SEQ ID NO: 96690 - DNA, 20 bp, synthetic construct
  source 1..20: mol_type = other DNA
ggaaaggggtcccgatccag

SEQ ID NO: 96691 - DNA, 20 bp, synthetic construct
  source 1..20: mol_type = other DNA
aggaaaggggtcccgatcca

SEQ ID NO: 96692 - DNA, 20 bp, synthetic construct
  source 1..20: mol_type = other DNA
taggaaaggggtcccgatcc

SEQ ID NO: 96693 - DNA, 20 bp, synthetic construct
  source 1..20: mol_type = other DNA
ataggaaaggggtcccgatc

SEQ ID NO: 96694 - DNA, 20 bp, synthetic construct
  source 1..20: mol_type = other DNA
tataggaaaggggtcccgat

SEQ ID NO: 96695 - DNA, 20 bp, synthetic construct
  source 1..20: mol_type = other DNA
ttataggaaaggggtcccga

SEQ ID NO: 96696 - DNA, 20 bp, synthetic construct
  source 1..20: mol_type = other DNA
gttataggaaaggggtcccg

SEQ ID NO: 96697 - DNA, 20 bp, synthetic construct
  source 1..20: mol_type = other DNA
tgttataggaaaggggtccc

SEQ ID NO: 96698 - DNA, 20 bp, synthetic construct
  source 1..20: mol_type = other DNA
ttgttataggaaaggggtcc

SEQ ID NO: 96699 - DNA, 20 bp, synthetic construct
  source 1..20: mol_type = other DNA
attgttataggaaaggggtc

SEQ ID NO: 96700 - DNA, 20 bp, synthetic construct
  source 1..20: mol_type = other DNA
tattgttataggaaaggggt

SEQ ID NO: 96701 - DNA, 20 bp, synthetic construct
  source 1..20: mol_type = other DNA
atattgttataggaaagggg

SEQ ID NO: 96702 - DNA, 20 bp, synthetic construct
  source 1..20: mol_type = other DNA
aatattgttataggaaaggg

SEQ ID NO: 96703 - DNA, 20 bp, synthetic construct
  source 1..20: mol_type = other DNA
taatattgttataggaaagg

SEQ ID NO: 96704 - DNA, 20 bp, synthetic construct
  source 1..20: mol_type = other DNA
ataatattgttataggaaag

SEQ ID NO: 96705 - DNA, 20 bp, synthetic construct
  source 1..20: mol_type = other DNA
cataatattgttataggaaa

SEQ ID NO: 96706 - DNA, 20 bp, synthetic construct
  source 1..20: mol_type = other DNA
tcataatattgttataggaa

SEQ ID NO: 96707 - DNA, 20 bp, synthetic construct
  source 1..20: mol_type = other DNA
ctcataatattgttatagga

SEQ ID NO: 96708 - DNA, 20 bp, synthetic construct
  source 1..20: mol_type = other DNA
tctcataatattgttatagg

SEQ ID NO: 96709 - DNA, 20 bp, synthetic construct
  source 1..20: mol_type = other DNA
ttctcataatattgttatag

SEQ ID NO: 96710 - DNA, 20 bp, synthetic construct
  source 1..20: mol_type = other DNA
attctcataatattgttata

SEQ ID NO: 96711 - DNA, 20 bp, synthetic construct
  source 1..20: mol_type = other DNA
tattctcataatattgttat

SEQ ID NO: 96712 - DNA, 20 bp, synthetic construct
  source 1..20: mol_type = other DNA
ttattctcataatattgtta

SEQ ID NO: 96713 - DNA, 20 bp, synthetic construct
  source 1..20: mol_type = other DNA
gttattctcataatattgtt

SEQ ID NO: 96714 - DNA, 20 bp, synthetic construct
  source 1..20: mol_type = other DNA
tgttattctcataatattgt

SEQ ID NO: 96715 - DNA, 20 bp, synthetic construct
  source 1..20: mol_type = other DNA
atgttattctcataatattg

SEQ ID NO: 96716 - DNA, 20 bp, synthetic construct
  source 1..20: mol_type = other DNA
aatgttattctcataatatt

SEQ ID NO: 96717 - DNA, 20 bp, synthetic construct
  source 1..20: mol_type = other DNA
aaatgttattctcataatat

SEQ ID NO: 96718 - DNA, 20 bp, synthetic construct
  source 1..20: mol_type = other DNA
caaatgttattctcataata

SEQ ID NO: 96719 - DNA, 20 bp, synthetic construct
  source 1..20: mol_type = other DNA
tcaaatgttattctcataat

SEQ ID NO: 96720 - DNA, 20 bp, synthetic construct
  source 1..20: mol_type = other DNA
atcaaatgttattctcataa

SEQ ID NO: 96721 - DNA, 20 bp, synthetic construct
  source 1..20: mol_type = other DNA
aatcaaatgttattctcata

SEQ ID NO: 96722 - DNA, 20 bp, synthetic construct
  source 1..20: mol_type = other DNA
aaatcaaatgttattctcat

SEQ ID NO: 96723 - DNA, 20 bp, synthetic construct
  source 1..20: mol_type = other DNA
aaaatcaaatgttattctca

SEQ ID NO: 96724 - DNA, 20 bp, synthetic construct
  source 1..20: mol_type = other DNA
aaaaatcaaatgttattctc

SEQ ID NO: 96725 - DNA, 20 bp, synthetic construct
  source 1..20: mol_type = other DNA
aaaaaatcaaatgttattct

SEQ ID NO: 96726 - DNA, 20 bp, synthetic construct
  source 1..20: mol_type = other DNA
aaaaaaatcaaatgttattc

SEQ ID NO: 96727 - DNA, 20 bp, synthetic construct
  source 1..20: mol_type = other DNA
aaaaaaaatcaaatgttatt

SEQ ID NO: 96728 - DNA, 20 bp, synthetic construct
  source 1..20: mol_type = other DNA
taaaaaaaatcaaatgttat

SEQ ID NO: 96729 - DNA, 20 bp, synthetic construct
  source 1..20: mol_type = other DNA
ttaaaaaaaatcaaatgtta

SEQ ID NO: 96730 - DNA, 20 bp, synthetic construct
  source 1..20: mol_type = other DNA
cttaaaaaaaatcaaatgtt

SEQ ID NO: 96731 - DNA, 20 bp, synthetic construct
  source 1..20: mol_type = other DNA
acttaaaaaaaatcaaatgt

SEQ ID NO: 96732 - DNA, 20 bp, synthetic construct
  source 1..20: mol_type = other DNA
cacttaaaaaaaatcaaatg

SEQ ID NO: 96733 - DNA, 20 bp, synthetic construct
  source 1..20: mol_type = other DNA
tcacttaaaaaaaatcaaat

SEQ ID NO: 96734 - DNA, 20 bp, synthetic construct
  source 1..20: mol_type = other DNA
ttcacttaaaaaaaatcaaa

SEQ ID NO: 96735 - DNA, 20 bp, synthetic construct
  source 1..20: mol_type = other DNA
tttcacttaaaaaaaatcaa

SEQ ID NO: 96736 - DNA, 20 bp, synthetic construct
  source 1..20: mol_type = other DNA
gtttcacttaaaaaaaatca

SEQ ID NO: 96737 - DNA, 20 bp, synthetic construct
  source 1..20: mol_type = other DNA
tgtttcacttaaaaaaaatc

SEQ ID NO: 96738 - DNA, 20 bp, synthetic construct
  source 1..20: mol_type = other DNA
ttgtttcacttaaaaaaaat

SEQ ID NO: 96739 - DNA, 20 bp, synthetic construct
  source 1..20: mol_type = other DNA
tttgtttcacttaaaaaaaa

SEQ ID NO: 96740 - DNA, 20 bp, synthetic construct
  source 1..20: mol_type = other DNA
atttgtttcacttaaaaaaa

SEQ ID NO: 96741 - DNA, 20 bp, synthetic construct
  source 1..20: mol_type = other DNA
aatttgtttcacttaaaaaa

SEQ ID NO: 96742 - DNA, 20 bp, synthetic construct
  source 1..20: mol_type = other DNA
caatttgtttcacttaaaaa

SEQ ID NO: 96743 - DNA, 20 bp, synthetic construct
  source 1..20: mol_type = other DNA
acaatttgtttcacttaaaa

SEQ ID NO: 96744 - DNA, 20 bp, synthetic construct
  source 1..20: mol_type = other DNA
aacaatttgtttcacttaaa

SEQ ID NO: 96745 - DNA, 20 bp, synthetic construct
  source 1..20: mol_type = other DNA
taacaatttgtttcacttaa

SEQ ID NO: 96746 - DNA, 20 bp, synthetic construct
  source 1..20: mol_type = other DNA
ataacaatttgtttcactta

SEQ ID NO: 96747 - DNA, 20 bp, synthetic construct
  source 1..20: mol_type = other DNA
aataacaatttgtttcactt

SEQ ID NO: 96748 - DNA, 20 bp, synthetic construct
  source 1..20: mol_type = other DNA
taataacaatttgtttcact

SEQ ID NO: 96749 - DNA, 20 bp, synthetic construct
  source 1..20: mol_type = other DNA
ttaataacaatttgtttcac

SEQ ID NO: 96750 - DNA, 20 bp, synthetic construct
  source 1..20: mol_type = other DNA
tttaataacaatttgtttca

SEQ ID NO: 96751 - DNA, 20 bp, synthetic construct
  source 1..20: mol_type = other DNA
ttttaataacaatttgtttc

SEQ ID NO: 96752 - DNA, 20 bp, synthetic construct
  source 1..20: mol_type = other DNA
tttttaataacaatttgttt

SEQ ID NO: 96753 - DNA, 20 bp, synthetic construct
  source 1..20: mol_type = other DNA
ttttttaataacaatttgtt

SEQ ID NO: 96754 - DNA, 20 bp, synthetic construct
  source 1..20: mol_type = other DNA
attttttaataacaatttgt

SEQ ID NO: 96755 - DNA, 20 bp, synthetic construct
  source 1..20: mol_type = other DNA
aattttttaataacaatttg

SEQ ID NO: 96756 - DNA, 20 bp, synthetic construct
  source 1..20: mol_type = other DNA
taattttttaataacaattt

SEQ ID NO: 96757 - DNA, 20 bp, synthetic construct
  source 1..20: mol_type = other DNA
ttaattttttaataacaatt

SEQ ID NO: 96758 - DNA, 20 bp, synthetic construct
  source 1..20: mol_type = other DNA
tttaattttttaataacaat

SEQ ID NO: 96759 - DNA, 20 bp, synthetic construct
  source 1..20: mol_type = other DNA
ttttaattttttaataacaa

SEQ ID NO: 96760 - DNA, 20 bp, synthetic construct
  source 1..20: mol_type = other DNA
tttttaattttttaataaca

SEQ ID NO: 96761 - DNA, 20 bp, synthetic construct
  source 1..20: mol_type = other DNA
ttttttaattttttaataac

SEQ ID NO: 96762 - DNA, 20 bp, synthetic construct
  source 1..20: mol_type = other DNA
cttttttaattttttaataa

SEQ ID NO: 96763 - DNA, 20 bp, synthetic construct
  source 1..20: mol_type = other DNA
ccttttttaattttttaata

SEQ ID NO: 96764 - DNA, 20 bp, synthetic construct
  source 1..20: mol_type = other DNA
accttttttaattttttaat

SEQ ID NO: 96765 - DNA, 20 bp, synthetic construct
  source 1..20: mol_type = other DNA
gaccttttttaattttttaa

SEQ ID NO: 96766 - DNA, 20 bp, synthetic construct
  source 1..20: mol_type = other DNA
tgaccttttttaatttttta

SEQ ID NO: 96767 - DNA, 20 bp, synthetic construct
  source 1..20: mol_type = other DNA
atgaccttttttaatttttt

SEQ ID NO: 96768 - DNA, 20 bp, synthetic construct
  source 1..20: mol_type = other DNA
tatgaccttttttaattttt

SEQ ID NO: 96769 - DNA, 20 bp, synthetic construct
  source 1..20: mol_type = other DNA
ctatgaccttttttaatttt

SEQ ID NO: 96770 - DNA, 20 bp, synthetic construct
  source 1..20: mol_type = other DNA
cctatgaccttttttaattt

SEQ ID NO: 96771 - DNA, 20 bp, synthetic construct
  source 1..20: mol_type = other DNA
tcctatgaccttttttaatt

SEQ ID NO: 96772 - DNA, 20 bp, synthetic construct
  source 1..20: mol_type = other DNA
ctcctatgaccttttttaat

SEQ ID NO: 96773 - DNA, 20 bp, synthetic construct
  source 1..20: mol_type = other DNA
tctcctatgaccttttttaa

SEQ ID NO: 96774 - DNA, 20 bp, synthetic construct
  source 1..20: mol_type = other DNA
ctctcctatgacctttttta

SEQ ID NO: 96775 - DNA, 20 bp, synthetic construct
  source 1..20: mol_type = other DNA
actctcctatgacctttttt

SEQ ID NO: 96776 - DNA, 20 bp, synthetic construct
  source 1..20: mol_type = other DNA
cactctcctatgaccttttt

SEQ ID NO: 96777 - DNA, 20 bp, synthetic construct
  source 1..20: mol_type = other DNA
tcactctcctatgacctttt

SEQ ID NO: 96778 - DNA, 20 bp, synthetic construct
  source 1..20: mol_type = other DNA
gtcactctcctatgaccttt

SEQ ID NO: 96779 - DNA, 20 bp, synthetic construct
  source 1..20: mol_type = other DNA
agtcactctcctatgacctt

SEQ ID NO: 96780 - DNA, 20 bp, synthetic construct
  source 1..20: mol_type = other DNA
aagtcactctcctatgacct

SEQ ID NO: 96781 - DNA, 20 bp, synthetic construct
  source 1..20: mol_type = other DNA
caagtcactctcctatgacc

SEQ ID NO: 96782 - DNA, 20 bp, synthetic construct
  source 1..20: mol_type = other DNA
ccaagtcactctcctatgac

SEQ ID NO: 96783 - DNA, 20 bp, synthetic construct
  source 1..20: mol_type = other DNA
accaagtcactctcctatga

SEQ ID NO: 96784 - DNA, 20 bp, synthetic construct
  source 1..20: mol_type = other DNA
caccaagtcactctcctatg

SEQ ID NO: 96785 - DNA, 20 bp, synthetic construct
  source 1..20: mol_type = other DNA
gcaccaagtcactctcctat

SEQ ID NO: 96786 - DNA, 20 bp, synthetic construct
  source 1..20: mol_type = other DNA
agcaccaagtcactctccta

SEQ ID NO: 96787 - DNA, 20 bp, synthetic construct
  source 1..20: mol_type = other DNA
gagcaccaagtcactctcct

SEQ ID NO: 96788 - DNA, 20 bp, synthetic construct
  source 1..20: mol_type = other DNA
tgagcaccaagtcactctcc

SEQ ID NO: 96789 - DNA, 20 bp, synthetic construct
  source 1..20: mol_type = other DNA
ctgagcaccaagtcactctc

SEQ ID NO: 96790 - DNA, 20 bp, synthetic construct
  source 1..20: mol_type = other DNA
gctgagcaccaagtcactct

SEQ ID NO: 96791 - DNA, 20 bp, synthetic construct
  source 1..20: mol_type = other DNA
ggctgagcaccaagtcactc

SEQ ID NO: 96792 - DNA, 20 bp, synthetic construct
  source 1..20: mol_type = other DNA
gggctgagcaccaagtcact

SEQ ID NO: 96793 - DNA, 20 bp, synthetic construct
  source 1..20: mol_type = other DNA
tgggctgagcaccaagtcac

SEQ ID NO: 96794 - DNA, 20 bp, synthetic construct
  source 1..20: mol_type = other DNA
atgggctgagcaccaagtca

SEQ ID NO: 96795 - DNA, 20 bp, synthetic construct
  source 1..20: mol_type = other DNA
aatgggctgagcaccaagtc

SEQ ID NO: 96796 - DNA, 20 bp, synthetic construct
  source 1..20: mol_type = other DNA
aaatgggctgagcaccaagt

SEQ ID NO: 96797 - DNA, 20 bp, synthetic construct
  source 1..20: mol_type = other DNA
aaaatgggctgagcaccaag

SEQ ID NO: 96798 - DNA, 20 bp, synthetic construct
  source 1..20: mol_type = other DNA
caaaatgggctgagcaccaa

SEQ ID NO: 96799 - DNA, 20 bp, synthetic construct
  source 1..20: mol_type = other DNA
tcaaaatgggctgagcacca

SEQ ID NO: 96800 - DNA, 20 bp, synthetic construct
  source 1..20: mol_type = other DNA
ctcaaaatgggctgagcacc

SEQ ID NO: 96801 - DNA, 20 bp, synthetic construct
  source 1..20: mol_type = other DNA
gctcaaaatgggctgagcac

SEQ ID NO: 96802 - DNA, 20 bp, synthetic construct
  source 1..20: mol_type = other DNA
tgctcaaaatgggctgagca

SEQ ID NO: 96803 - DNA, 20 bp, synthetic construct
  source 1..20: mol_type = other DNA
ctgctcaaaatgggctgagc

SEQ ID NO: 96804 - DNA, 20 bp, synthetic construct
  source 1..20: mol_type = other DNA
actgctcaaaatgggctgag

SEQ ID NO: 96805 - DNA, 20 bp, synthetic construct
  source 1..20: mol_type = other DNA
aactgctcaaaatgggctga

SEQ ID NO: 96806 - DNA, 20 bp, synthetic construct
  source 1..20: mol_type = other DNA
taactgctcaaaatgggctg

SEQ ID NO: 96807 - DNA, 20 bp, synthetic construct
  source 1..20: mol_type = other DNA
ataactgctcaaaatgggct

SEQ ID NO: 96808 - DNA, 20 bp, synthetic construct
  source 1..20: mol_type = other DNA
aataactgctcaaaatgggc

SEQ ID NO: 96809 - DNA, 20 bp, synthetic construct
  source 1..20: mol_type = other DNA
aaataactgctcaaaatggg

SEQ ID NO: 96810 - DNA, 20 bp, synthetic construct
  source 1..20: mol_type = other DNA
taaataactgctcaaaatgg

SEQ ID NO: 96811 - DNA, 20 bp, synthetic construct
  source 1..20: mol_type = other DNA
ttaaataactgctcaaaatg

SEQ ID NO: 96812 - DNA, 20 bp, synthetic construct
  source 1..20: mol_type = other DNA
attaaataactgctcaaaat

SEQ ID NO: 96813 - DNA, 20 bp, synthetic construct
  source 1..20: mol_type = other DNA
tattaaataactgctcaaaa

SEQ ID NO: 96814 - DNA, 20 bp, synthetic construct
  source 1..20: mol_type = other DNA
atattaaataactgctcaaa

SEQ ID NO: 96815 - DNA, 20 bp, synthetic construct
  source 1..20: mol_type = other DNA
tatattaaataactgctcaa

SEQ ID NO: 96816 - DNA, 20 bp, synthetic construct
  source 1..20: mol_type = other DNA
ctatattaaataactgctca

SEQ ID NO: 96817 - DNA, 20 bp, synthetic construct
  source 1..20: mol_type = other DNA
gctatattaaataactgctc

SEQ ID NO: 96818 - DNA, 20 bp, synthetic construct
  source 1..20: mol_type = other DNA
tgctatattaaataactgct

SEQ ID NO: 96819 - DNA, 20 bp, synthetic construct
  source 1..20: mol_type = other DNA
atgctatattaaataactgc

SEQ ID NO: 96820 - DNA, 20 bp, synthetic construct
  source 1..20: mol_type = other DNA
tatgctatattaaataactg

SEQ ID NO: 96821 - DNA, 20 bp, synthetic construct
  source 1..20: mol_type = other DNA
ttatgctatattaaataact

SEQ ID NO: 96822 - DNA, 20 bp, synthetic construct
  source 1..20: mol_type = other DNA
cttatgctatattaaataac

SEQ ID NO: 96823 - DNA, 20 bp, synthetic construct
  source 1..20: mol_type = other DNA
ccttatgctatattaaataa

SEQ ID NO: 96824 - DNA, 20 bp, synthetic construct
  source 1..20: mol_type = other DNA
accttatgctatattaaata

SEQ ID NO: 96825 - DNA, 20 bp, synthetic construct
  source 1..20: mol_type = other DNA
caccttatgctatattaaat

SEQ ID NO: 96826 - DNA, 20 bp, synthetic construct
  source 1..20: mol_type = other DNA
ccaccttatgctatattaaa

SEQ ID NO: 96827 - DNA, 20 bp, synthetic construct
  source 1..20: mol_type = other DNA
cccaccttatgctatattaa

SEQ ID NO: 96828 - DNA, 20 bp, synthetic construct
  source 1..20: mol_type = other DNA
ccccaccttatgctatatta

SEQ ID NO: 96829 - DNA, 20 bp, synthetic construct
  source 1..20: mol_type = other DNA
accccaccttatgctatatt

SEQ ID NO: 96830 - DNA, 20 bp, synthetic construct
  source 1..20: mol_type = other DNA
aaccccaccttatgctatat

SEQ ID NO: 96831 - DNA, 20 bp, synthetic construct
  source 1..20: mol_type = other DNA
gaaccccaccttatgctata

SEQ ID NO: 96832 - DNA, 20 bp, synthetic construct
  source 1..20: mol_type = other DNA
tgaaccccaccttatgctat

SEQ ID NO: 96833 - DNA, 20 bp, synthetic construct
  source 1..20: mol_type = other DNA
ttgaaccccaccttatgcta

SEQ ID NO: 96834 - DNA, 20 bp, synthetic construct
  source 1..20: mol_type = other DNA
tttgaaccccaccttatgct

SEQ ID NO: 96835 - DNA, 20 bp, synthetic construct
  source 1..20: mol_type = other DNA
atttgaaccccaccttatgc

SEQ ID NO: 96836 - DNA, 20 bp, synthetic construct
  source 1..20: mol_type = other DNA
aatttgaaccccaccttatg

SEQ ID NO: 96837 - DNA, 20 bp, synthetic construct
  source 1..20: mol_type = other DNA
gaatttgaaccccaccttat

SEQ ID NO: 96838 - DNA, 20 bp, synthetic construct
  source 1..20: mol_type = other DNA
tgaatttgaaccccacctta

SEQ ID NO: 96839 - DNA, 20 bp, synthetic construct
  source 1..20: mol_type = other DNA
atgaatttgaaccccacctt

SEQ ID NO: 96840 - DNA, 20 bp, synthetic construct
  source 1..20: mol_type = other DNA
aatgaatttgaaccccacct

SEQ ID NO: 96841 - DNA, 20 bp, synthetic construct
  source 1..20: mol_type = other DNA
gaatgaatttgaaccccacc

SEQ ID NO: 96842 - DNA, 20 bp, synthetic construct
  source 1..20: mol_type = other DNA
agaatgaatttgaaccccac

SEQ ID NO: 96843 - DNA, 20 bp, synthetic construct
  source 1..20: mol_type = other DNA
aagaatgaatttgaacccca

SEQ ID NO: 96844 - DNA, 20 bp, synthetic construct
  source 1..20: mol_type = other DNA
aaagaatgaatttgaacccc

SEQ ID NO: 96845 - DNA, 20 bp, synthetic construct
  source 1..20: mol_type = other DNA
taaagaatgaatttgaaccc

SEQ ID NO: 96846 - DNA, 20 bp, synthetic construct
  source 1..20: mol_type = other DNA
ataaagaatgaatttgaacc

SEQ ID NO: 96847 - DNA, 20 bp, synthetic construct
  source 1..20: mol_type = other DNA
tataaagaatgaatttgaac

SEQ ID NO: 96848 - DNA, 20 bp, synthetic construct
  source 1..20: mol_type = other DNA
atataaagaatgaatttgaa

SEQ ID NO: 96849 - DNA, 20 bp, synthetic construct
  source 1..20: mol_type = other DNA
aatataaagaatgaatttga

SEQ ID NO: 96850 - DNA, 20 bp, synthetic construct
  source 1..20: mol_type = other DNA
taatataaagaatgaatttg

SEQ ID NO: 96851 - DNA, 20 bp, synthetic construct
  source 1..20: mol_type = other DNA
ttaatataaagaatgaattt

SEQ ID NO: 96852 - DNA, 20 bp, synthetic construct
  source 1..20: mol_type = other DNA
attaatataaagaatgaatt

SEQ ID NO: 96853 - DNA, 20 bp, synthetic construct
  source 1..20: mol_type = other DNA
aattaatataaagaatgaat

SEQ ID NO: 96854 - DNA, 20 bp, synthetic construct
  source 1..20: mol_type = other DNA
aaattaatataaagaatgaa

SEQ ID NO: 96855 - DNA, 20 bp, synthetic construct
  source 1..20: mol_type = other DNA
aaaattaatataaagaatga

SEQ ID NO: 96856 - DNA, 20 bp, synthetic construct
  source 1..20: mol_type = other DNA
aaaaattaatataaagaatg

SEQ ID NO: 96857 - DNA, 20 bp, synthetic construct
  source 1..20: mol_type = other DNA
aaaaaattaatataaagaat

SEQ ID NO: 96858 - DNA, 20 bp, synthetic construct
  source 1..20: mol_type = other DNA
taaaaaattaatataaagaa

SEQ ID NO: 96859 - DNA, 20 bp, synthetic construct
  source 1..20: mol_type = other DNA
ataaaaaattaatataaaga

SEQ ID NO: 96860 - DNA, 20 bp, synthetic construct
  source 1..20: mol_type = other DNA
aataaaaaattaatataaag

SEQ ID NO: 96861 - DNA, 20 bp, synthetic construct
  source 1..20: mol_type = other DNA
aaataaaaaattaatataaa

SEQ ID NO: 96862 - DNA, 20 bp, synthetic construct
  source 1..20: mol_type = other DNA
gaaataaaaaattaatataa

SEQ ID NO: 96863 - DNA, 20 bp, synthetic construct
  source 1..20: mol_type = other DNA
agaaataaaaaattaatata

SEQ ID NO: 96864 - DNA, 20 bp, synthetic construct
  source 1..20: mol_type = other DNA
tagaaataaaaaattaatat

SEQ ID NO: 96865 - DNA, 20 bp, synthetic construct
  source 1..20: mol_type = other DNA
ttagaaataaaaaattaata

SEQ ID NO: 96866 - DNA, 20 bp, synthetic construct
  source 1..20: mol_type = other DNA
attagaaataaaaaattaat

SEQ ID NO: 96867 - DNA, 20 bp, synthetic construct
  source 1..20: mol_type = other DNA
aattagaaataaaaaattaa

SEQ ID NO: 96868 - DNA, 20 bp, synthetic construct
  source 1..20: mol_type = other DNA
caattagaaataaaaaatta

SEQ ID NO: 96869 - DNA, 20 bp, synthetic construct
  source 1..20: mol_type = other DNA
tcaattagaaataaaaaatt

SEQ ID NO: 96870 - DNA, 20 bp, synthetic construct
  source 1..20: mol_type = other DNA
gtcaattagaaataaaaaat

SEQ ID NO: 96871 - DNA, 20 bp, synthetic construct
  source 1..20: mol_type = other DNA
tgtcaattagaaataaaaaa

SEQ ID NO: 96872 - DNA, 20 bp, synthetic construct
  source 1..20: mol_type = other DNA
gtgtcaattagaaataaaaa

SEQ ID NO: 96873 - DNA, 20 bp, synthetic construct
  source 1..20: mol_type = other DNA
tgtgtcaattagaaataaaa

SEQ ID NO: 96874 - DNA, 20 bp, synthetic construct
  source 1..20: mol_type = other DNA
atgtgtcaattagaaataaa

SEQ ID NO: 96875 - DNA, 20 bp, synthetic construct
  source 1..20: mol_type = other DNA
tatgtgtcaattagaaataa

SEQ ID NO: 96876 - DNA, 20 bp, synthetic construct
  source 1..20: mol_type = other DNA
ttatgtgtcaattagaaata

SEQ ID NO: 96877 - DNA, 20 bp, synthetic construct
  source 1..20: mol_type = other DNA
gttatgtgtcaattagaaat

SEQ ID NO: 96878 - DNA, 20 bp, synthetic construct
  source 1..20: mol_type = other DNA
ggttatgtgtcaattagaaa

SEQ ID NO: 96879 - DNA, 20 bp, synthetic construct
  source 1..20: mol_type = other DNA
tggttatgtgtcaattagaa

SEQ ID NO: 96880 - DNA, 20 bp, synthetic construct
  source 1..20: mol_type = other DNA
atggttatgtgtcaattaga

SEQ ID NO: 96881 - DNA, 20 bp, synthetic construct
  source 1..20: mol_type = other DNA
tatggttatgtgtcaattag

SEQ ID NO: 96882 - DNA, 20 bp, synthetic construct
  source 1..20: mol_type = other DNA
gtatggttatgtgtcaatta

SEQ ID NO: 96883 - DNA, 20 bp, synthetic construct
  source 1..20: mol_type = other DNA
tgtatggttatgtgtcaatt

SEQ ID NO: 96884 - DNA, 20 bp, synthetic construct
  source 1..20: mol_type = other DNA
gtgtatggttatgtgtcaat

SEQ ID NO: 96885 - DNA, 20 bp, synthetic construct
  source 1..20: mol_type = other DNA
agtgtatggttatgtgtcaa

SEQ ID NO: 96886 - DNA, 20 bp, synthetic construct
  source 1..20: mol_type = other DNA
aagtgtatggttatgtgtca

SEQ ID NO: 96887 - DNA, 20 bp, synthetic construct
  source 1..20: mol_type = other DNA
taagtgtatggttatgtgtc

SEQ ID NO: 96888 - DNA, 20 bp, synthetic construct
  source 1..20: mol_type = other DNA
ataagtgtatggttatgtgt

SEQ ID NO: 96889 - DNA, 20 bp, synthetic construct
  source 1..20: mol_type = other DNA
tataagtgtatggttatgtg

SEQ ID NO: 96890 - DNA, 20 bp, synthetic construct
  source 1..20: mol_type = other DNA
ttataagtgtatggttatgt

SEQ ID NO: 96891 - DNA, 20 bp, synthetic construct
  source 1..20: mol_type = other DNA
gttataagtgtatggttatg

SEQ ID NO: 96892 - DNA, 20 bp, synthetic construct
  source 1..20: mol_type = other DNA
ggttataagtgtatggttat

SEQ ID NO: 96893 - DNA, 20 bp, synthetic construct
  source 1..20: mol_type = other DNA
tggttataagtgtatggtta

SEQ ID NO: 96894 - DNA, 20 bp, synthetic construct
  source 1..20: mol_type = other DNA
atggttataagtgtatggtt

SEQ ID NO: 96895 - DNA, 20 bp, synthetic construct
  source 1..20: mol_type = other DNA
aatggttataagtgtatggt

SEQ ID NO: 96896 - DNA, 20 bp, synthetic construct
  source 1..20: mol_type = other DNA
aaatggttataagtgtatgg

SEQ ID NO: 96897 - DNA, 20 bp, synthetic construct
  source 1..20: mol_type = other DNA
aaaatggttataagtgtatg

SEQ ID NO: 96898 - DNA, 20 bp, synthetic construct
  source 1..20: mol_type = other DNA
aaaaatggttataagtgtat

SEQ ID NO: 96899 - DNA, 20 bp, synthetic construct
  source 1..20: mol_type = other DNA
taaaaatggttataagtgta

SEQ ID NO: 96900 - DNA, 20 bp, synthetic construct
  source 1..20: mol_type = other DNA
gtaaaaatggttataagtgt

SEQ ID NO: 96901 - DNA, 20 bp, synthetic construct
  source 1..20: mol_type = other DNA
agtaaaaatggttataagtg

SEQ ID NO: 96902 - DNA, 20 bp, synthetic construct
  source 1..20: mol_type = other DNA
cagtaaaaatggttataagt

SEQ ID NO: 96903 - DNA, 20 bp, synthetic construct
  source 1..20: mol_type = other DNA
acagtaaaaatggttataag

SEQ ID NO: 96904 - DNA, 20 bp, synthetic construct
  source 1..20: mol_type = other DNA
cacagtaaaaatggttataa

SEQ ID NO: 96905 - DNA, 20 bp, synthetic construct
  source 1..20: mol_type = other DNA
acacagtaaaaatggttata

SEQ ID NO: 96906 - DNA, 20 bp, synthetic construct
  source 1..20: mol_type = other DNA
tacacagtaaaaatggttat

SEQ ID NO: 96907 - DNA, 20 bp, synthetic construct
  source 1..20: mol_type = other DNA
ttacacagtaaaaatggtta

SEQ ID NO: 96908 - DNA, 20 bp, synthetic construct
  source 1..20: mol_type = other DNA
cttacacagtaaaaatggtt

SEQ ID NO: 96909 - DNA, 20 bp, synthetic construct
  source 1..20: mol_type = other DNA
acttacacagtaaaaatggt

SEQ ID NO: 96910 - DNA, 20 bp, synthetic construct
  source 1..20: mol_type = other DNA
aacttacacagtaaaaatgg

SEQ ID NO: 96911 - DNA, 20 bp, synthetic construct
  source 1..20: mol_type = other DNA
gaacttacacagtaaaaatg

SEQ ID NO: 96912 - DNA, 20 bp, synthetic construct
  source 1..20: mol_type = other DNA
tgaacttacacagtaaaaat

SEQ ID NO: 96913 - DNA, 20 bp, synthetic construct
  source 1..20: mol_type = other DNA
ctgaacttacacagtaaaaa

SEQ ID NO: 96914 - DNA, 20 bp, synthetic construct
  source 1..20: mol_type = other DNA
tctgaacttacacagtaaaa

SEQ ID NO: 96915 - DNA, 20 bp, synthetic construct
  source 1..20: mol_type = other DNA
atctgaacttacacagtaaa

SEQ ID NO: 96916 - DNA, 20 bp, synthetic construct
  source 1..20: mol_type = other DNA
aatctgaacttacacagtaa

SEQ ID NO: 96917 - DNA, 20 bp, synthetic construct
  source 1..20: mol_type = other DNA
gaatctgaacttacacagta

SEQ ID NO: 96918 - DNA, 20 bp, synthetic construct
  source 1..20: mol_type = other DNA
tgaatctgaacttacacagt

SEQ ID NO: 96919 - DNA, 20 bp, synthetic construct
  source 1..20: mol_type = other DNA
atgaatctgaacttacacag

SEQ ID NO: 96920 - DNA, 20 bp, synthetic construct
  source 1..20: mol_type = other DNA
aatgaatctgaacttacaca

SEQ ID NO: 96921 - DNA, 20 bp, synthetic construct
  source 1..20: mol_type = other DNA
gaatgaatctgaacttacac

SEQ ID NO: 96922 - DNA, 20 bp, synthetic construct
  source 1..20: mol_type = other DNA
agaatgaatctgaacttaca

SEQ ID NO: 96923 - DNA, 20 bp, synthetic construct
  source 1..20: mol_type = other DNA
aagaatgaatctgaacttac

SEQ ID NO: 96924 - DNA, 20 bp, synthetic construct
  source 1..20: mol_type = other DNA
gaagaatgaatctgaactta

SEQ ID NO: 96925 - DNA, 20 bp, synthetic construct
  source 1..20: mol_type = other DNA
ggaagaatgaatctgaactt

SEQ ID NO: 96926 - DNA, 20 bp, synthetic construct
  source 1..20: mol_type = other DNA
cggaagaatgaatctgaact

SEQ ID NO: 96927 - DNA, 20 bp, synthetic construct
  source 1..20: mol_type = other DNA
acggaagaatgaatctgaac

SEQ ID NO: 96928 - DNA, 20 bp, synthetic construct
  source 1..20: mol_type = other DNA
tacggaagaatgaatctgaa

SEQ ID NO: 96929 - DNA, 20 bp, synthetic construct
  source 1..20: mol_type = other DNA
atacggaagaatgaatctga

SEQ ID NO: 96930 - DNA, 20 bp, synthetic construct
  source 1..20: mol_type = other DNA
catacggaagaatgaatctg

SEQ ID NO: 96931 - DNA, 20 bp, synthetic construct
  source 1..20: mol_type = other DNA
acatacggaagaatgaatct

SEQ ID NO: 96932 - DNA, 20 bp, synthetic construct
  source 1..20: mol_type = other DNA
tacatacggaagaatgaatc

SEQ ID NO: 96933 - DNA, 20 bp, synthetic construct
  source 1..20: mol_type = other DNA
ctacatacggaagaatgaat

SEQ ID NO: 96934 - DNA, 20 bp, synthetic construct
  source 1..20: mol_type = other DNA
cctacatacggaagaatgaa

SEQ ID NO: 96935 - DNA, 20 bp, synthetic construct
  source 1..20: mol_type = other DNA
acctacatacggaagaatga

SEQ ID NO: 96936 - DNA, 20 bp, synthetic construct
  source 1..20: mol_type = other DNA
tacctacatacggaagaatg

SEQ ID NO: 96937 - DNA, 20 bp, synthetic construct
  source 1..20: mol_type = other DNA
atacctacatacggaagaat

SEQ ID NO: 96938 - DNA, 20 bp, synthetic construct
  source 1..20: mol_type = other DNA
aatacctacatacggaagaa

SEQ ID NO: 96939 - DNA, 20 bp, synthetic construct
  source 1..20: mol_type = other DNA
taatacctacatacggaaga

SEQ ID NO: 96940 - DNA, 20 bp, synthetic construct
  source 1..20: mol_type = other DNA
ctaatacctacatacggaag

SEQ ID NO: 96941 - DNA, 20 bp, synthetic construct
  source 1..20: mol_type = other DNA
actaatacctacatacggaa

SEQ ID NO: 96942 - DNA, 20 bp, synthetic construct
  source 1..20: mol_type = other DNA
aactaatacctacatacgga

SEQ ID NO: 96943 - DNA, 20 bp, synthetic construct
  source 1..20: mol_type = other DNA
caactaatacctacatacgg

SEQ ID NO: 96944 - DNA, 20 bp, synthetic construct
  source 1..20: mol_type = other DNA
acaactaatacctacatacg

SEQ ID NO: 96945 - DNA, 20 bp, synthetic construct
  source 1..20: mol_type = other DNA
gacaactaatacctacatac

SEQ ID NO: 96946 - DNA, 20 bp, synthetic construct
  source 1..20: mol_type = other DNA
ggacaactaatacctacata

SEQ ID NO: 96947 - DNA, 20 bp, synthetic construct
  source 1..20: mol_type = other DNA
gggacaactaatacctacat

SEQ ID NO: 96948 - DNA, 20 bp, synthetic construct
  source 1..20: mol_type = other DNA
tgggacaactaatacctaca

SEQ ID NO: 96949 - DNA, 20 bp, synthetic construct
  source 1..20: mol_type = other DNA
ctgggacaactaatacctac

SEQ ID NO: 96950 - DNA, 20 bp, synthetic construct
  source 1..20: mol_type = other DNA
gctgggacaactaataccta

SEQ ID NO: 96951 - DNA, 20 bp, synthetic construct
  source 1..20: mol_type = other DNA
tgctgggacaactaatacct

SEQ ID NO: 96952 - DNA, 20 bp, synthetic construct
  source 1..20: mol_type = other DNA
gtgctgggacaactaatacc

SEQ ID NO: 96953 - DNA, 20 bp, synthetic construct
  source 1..20: mol_type = other DNA
ggtgctgggacaactaatac

SEQ ID NO: 96954 - DNA, 20 bp, synthetic construct
  source 1..20: mol_type = other DNA
tggtgctgggacaactaata

SEQ ID NO: 96955 - DNA, 20 bp, synthetic construct
  source 1..20: mol_type = other DNA
atggtgctgggacaactaat

SEQ ID NO: 96956 - DNA, 20 bp, synthetic construct
  source 1..20: mol_type = other DNA
gatggtgctgggacaactaa

SEQ ID NO: 96957 - DNA, 20 bp, synthetic construct
  source 1..20: mol_type = other DNA
agatggtgctgggacaacta

SEQ ID NO: 96958 - DNA, 20 bp, synthetic construct
  source 1..20: mol_type = other DNA
cagatggtgctgggacaact

SEQ ID NO: 96959 - DNA, 20 bp, synthetic construct
  source 1..20: mol_type = other DNA
acagatggtgctgggacaac

SEQ ID NO: 96960 - DNA, 20 bp, synthetic construct
  source 1..20: mol_type = other DNA
aacagatggtgctgggacaa

SEQ ID NO: 96961 - DNA, 20 bp, synthetic construct
  source 1..20: mol_type = other DNA
taacagatggtgctgggaca

SEQ ID NO: 96962 - DNA, 20 bp, synthetic construct
  source 1..20: mol_type = other DNA
ttaacagatggtgctgggac

SEQ ID NO: 96963 - DNA, 20 bp, synthetic construct
  source 1..20: mol_type = other DNA
tttaacagatggtgctggga

SEQ ID NO: 96964 - DNA, 20 bp, synthetic construct
  source 1..20: mol_type = other DNA
ttttaacagatggtgctggg

SEQ ID NO: 96965 - DNA, 20 bp, synthetic construct
  source 1..20: mol_type = other DNA
tttttaacagatggtgctgg

SEQ ID NO: 96966 - DNA, 20 bp, synthetic construct
  source 1..20: mol_type = other DNA
ctttttaacagatggtgctg

SEQ ID NO: 96967 - DNA, 20 bp, synthetic construct
  source 1..20: mol_type = other DNA
tctttttaacagatggtgct

SEQ ID NO: 96968 - DNA, 20 bp, synthetic construct
  source 1..20: mol_type = other DNA
gtctttttaacagatggtgc

SEQ ID NO: 96969 - DNA, 20 bp, synthetic construct
  source 1..20: mol_type = other DNA
agtctttttaacagatggtg

SEQ ID NO: 96970 - DNA, 20 bp, synthetic construct
  source 1..20: mol_type = other DNA
tagtctttttaacagatggt

SEQ ID NO: 96971 - DNA, 20 bp, synthetic construct
  source 1..20: mol_type = other DNA
atagtctttttaacagatgg

SEQ ID NO: 96972 - DNA, 20 bp, synthetic construct
  source 1..20: mol_type = other DNA
aatagtctttttaacagatg

SEQ ID NO: 96973 - DNA, 20 bp, synthetic construct
  source 1..20: mol_type = other DNA
gaatagtctttttaacagat

SEQ ID NO: 96974 - DNA, 20 bp, synthetic construct
  source 1..20: mol_type = other DNA
agaatagtctttttaacaga

SEQ ID NO: 96975 - DNA, 20 bp, synthetic construct
  source 1..20: mol_type = other DNA
aagaatagtctttttaacag

SEQ ID NO: 96976 - DNA, 20 bp, synthetic construct
  source 1..20: mol_type = other DNA
caagaatagtctttttaaca

SEQ ID NO: 96977 - DNA, 20 bp, synthetic construct
  source 1..20: mol_type = other DNA
ccaagaatagtctttttaac

SEQ ID NO: 96978 - DNA, 20 bp, synthetic construct
  source 1..20: mol_type = other DNA
gccaagaatagtctttttaa

SEQ ID NO: 96979 - DNA, 20 bp, synthetic construct
  source 1..20: mol_type = other DNA
ggccaagaatagtcttttta

SEQ ID NO: 96980 - DNA, 20 bp, synthetic construct
  source 1..20: mol_type = other DNA
tggccaagaatagtcttttt

SEQ ID NO: 96981 - DNA, 20 bp, synthetic construct
  source 1..20: mol_type = other DNA
ctggccaagaatagtctttt

SEQ ID NO: 96982 - DNA, 20 bp, synthetic construct
  source 1..20: mol_type = other DNA
cctggccaagaatagtcttt

SEQ ID NO: 96983 - DNA, 20 bp, synthetic construct
  source 1..20: mol_type = other DNA
gcctggccaagaatagtctt

SEQ ID NO: 96984 - DNA, 20 bp, synthetic construct
  source 1..20: mol_type = other DNA
tgcctggccaagaatagtct

SEQ ID NO: 96985 - DNA, 20 bp, synthetic construct
  source 1..20: mol_type = other DNA
gtgcctggccaagaatagtc

SEQ ID NO: 96986 - DNA, 20 bp, synthetic construct
  source 1..20: mol_type = other DNA
tgtgcctggccaagaatagt

SEQ ID NO: 96987 - DNA, 20 bp, synthetic construct
  source 1..20: mol_type = other DNA
ctgtgcctggccaagaatag

SEQ ID NO: 96988 - DNA, 20 bp, synthetic construct
  source 1..20: mol_type = other DNA
actgtgcctggccaagaata

SEQ ID NO: 96989 - DNA, 20 bp, synthetic construct
  source 1..20: mol_type = other DNA
cactgtgcctggccaagaat

SEQ ID NO: 96990 - DNA, 20 bp, synthetic construct
  source 1..20: mol_type = other DNA
ccactgtgcctggccaagaa

SEQ ID NO: 96991 - DNA, 20 bp, synthetic construct
  source 1..20: mol_type = other DNA
gccactgtgcctggccaaga

SEQ ID NO: 96992 - DNA, 20 bp, synthetic construct
  source 1..20: mol_type = other DNA
agccactgtgcctggccaag

SEQ ID NO: 96993 - DNA, 20 bp, synthetic construct
  source 1..20: mol_type = other DNA
gagccactgtgcctggccaa

SEQ ID NO: 96994 - DNA, 20 bp, synthetic construct
  source 1..20: mol_type = other DNA
agagccactgtgcctggcca

SEQ ID NO: 96995 - DNA, 20 bp, synthetic construct
  source 1..20: mol_type = other DNA
gagagccactgtgcctggcc

SEQ ID NO: 96996 - DNA, 20 bp, synthetic construct
  source 1..20: mol_type = other DNA
tgagagccactgtgcctggc

SEQ ID NO: 96997 - DNA, 20 bp, synthetic construct
  source 1..20: mol_type = other DNA
ttgagagccactgtgcctgg

SEQ ID NO: 96998 - DNA, 20 bp, synthetic construct
  source 1..20: mol_type = other DNA
gttgagagccactgtgcctg

SEQ ID NO: 96999 - DNA, 20 bp, synthetic construct
  source 1..20: mol_type = other DNA
cgttgagagccactgtgcct

SEQ ID NO: 97000 - DNA, 20 bp, synthetic construct
  source 1..20: mol_type = other DNA
gcgttgagagccactgtgcc

SEQ ID NO: 97001 - DNA, 20 bp, synthetic construct
  source 1..20: mol_type = other DNA
ggcgttgagagccactgtgc

SEQ ID NO: 97002 - DNA, 20 bp, synthetic construct
  source 1..20: mol_type = other DNA
aggcgttgagagccactgtg

SEQ ID NO: 97003 - DNA, 20 bp, synthetic construct
  source 1..20: mol_type = other DNA
caggcgttgagagccactgt

SEQ ID NO: 97004 - DNA, 20 bp, synthetic construct
  source 1..20: mol_type = other DNA
acaggcgttgagagccactg

SEQ ID NO: 97005 - DNA, 20 bp, synthetic construct
  source 1..20: mol_type = other DNA
tacaggcgttgagagccact

SEQ ID NO: 97006 - DNA, 20 bp, synthetic construct
  source 1..20: mol_type = other DNA
ttacaggcgttgagagccac

SEQ ID NO: 97007 - DNA, 20 bp, synthetic construct
  source 1..20: mol_type = other DNA
attacaggcgttgagagcca

SEQ ID NO: 97008 - DNA, 20 bp, synthetic construct
  source 1..20: mol_type = other DNA
gattacaggcgttgagagcc

SEQ ID NO: 97009 - DNA, 20 bp, synthetic construct
  source 1..20: mol_type = other DNA
ggattacaggcgttgagagc

SEQ ID NO: 97010 - DNA, 20 bp, synthetic construct
  source 1..20: mol_type = other DNA
gggattacaggcgttgagag

SEQ ID NO: 97011 - DNA, 20 bp, synthetic construct
  source 1..20: mol_type = other DNA
tgggattacaggcgttgaga

SEQ ID NO: 97012 - DNA, 20 bp, synthetic construct
  source 1..20: mol_type = other DNA
ctgggattacaggcgttgag

SEQ ID NO: 97013 - DNA, 20 bp, synthetic construct
  source 1..20: mol_type = other DNA
gctgggattacaggcgttga

SEQ ID NO: 97014 - DNA, 20 bp, synthetic construct
  source 1..20: mol_type = other DNA
tgctgggattacaggcgttg

SEQ ID NO: 97015 - DNA, 20 bp, synthetic construct
  source 1..20: mol_type = other DNA
gtgctgggattacaggcgtt

SEQ ID NO: 97016 - DNA, 20 bp, synthetic construct
  source 1..20: mol_type = other DNA
agtgctgggattacaggcgt

SEQ ID NO: 97017 - DNA, 20 bp, synthetic construct
  source 1..20: mol_type = other DNA
aagtgctgggattacaggcg

SEQ ID NO: 97018 - DNA, 20 bp, synthetic construct
  source 1..20: mol_type = other DNA
aaagtgctgggattacaggc

SEQ ID NO: 97019 - DNA, 20 bp, synthetic construct
  source 1..20: mol_type = other DNA
caaagtgctgggattacagg

SEQ ID NO: 97020 - DNA, 20 bp, synthetic construct
  source 1..20: mol_type = other DNA
ccaaagtgctgggattacag

SEQ ID NO: 97021 - DNA, 20 bp, synthetic construct
  source 1..20: mol_type = other DNA
cccaaagtgctgggattaca

SEQ ID NO: 97022 - DNA, 20 bp, synthetic construct
  source 1..20: mol_type = other DNA
tcccaaagtgctgggattac

SEQ ID NO: 97023 - DNA, 20 bp, synthetic construct
  source 1..20: mol_type = other DNA
ctcccaaagtgctgggatta

SEQ ID NO: 97024 - DNA, 20 bp, synthetic construct
  source 1..20: mol_type = other DNA
actcccaaagtgctgggatt

SEQ ID NO: 97025 - DNA, 20 bp, synthetic construct
  source 1..20: mol_type = other DNA
gactcccaaagtgctgggat

SEQ ID NO: 97026 - DNA, 20 bp, synthetic construct
  source 1..20: mol_type = other DNA
ggactcccaaagtgctggga

SEQ ID NO: 97027 - DNA, 20 bp, synthetic construct
  source 1..20: mol_type = other DNA
gggactcccaaagtgctggg

SEQ ID NO: 97028 - DNA, 20 bp, synthetic construct
  source 1..20: mol_type = other DNA
tgggactcccaaagtgctgg

SEQ ID NO: 97029 - DNA, 20 bp, synthetic construct
  source 1..20: mol_type = other DNA
ttgggactcccaaagtgctg

SEQ ID NO: 97030 - DNA, 20 bp, synthetic construct
  source 1..20: mol_type = other DNA
cttgggactcccaaagtgct

SEQ ID NO: 97031 - DNA, 20 bp, synthetic construct
  source 1..20: mol_type = other DNA
gcttgggactcccaaagtgc

SEQ ID NO: 97032 - DNA, 20 bp, synthetic construct
  source 1..20: mol_type = other DNA
tgcttgggactcccaaagtg

SEQ ID NO: 97033 - DNA, 20 bp, synthetic construct
  source 1..20: mol_type = other DNA
ctgcttgggactcccaaagt

SEQ ID NO: 97034 - DNA, 20 bp, synthetic construct
  source 1..20: mol_type = other DNA
cctgcttgggactcccaaag

SEQ ID NO: 97035 - DNA, 20 bp, synthetic construct
  source 1..20: mol_type = other DNA
gcctgcttgggactcccaaa

SEQ ID NO: 97036 - DNA, 20 bp, synthetic construct
  source 1..20: mol_type = other DNA
tgcctgcttgggactcccaa

SEQ ID NO: 97037 - DNA, 20 bp, synthetic construct
  source 1..20: mol_type = other DNA
ctgcctgcttgggactccca

SEQ ID NO: 97038 - DNA, 20 bp, synthetic construct
  source 1..20: mol_type = other DNA
tctgcctgcttgggactccc

SEQ ID NO: 97039 - DNA, 20 bp, synthetic construct
  source 1..20: mol_type = other DNA
atctgcctgcttgggactcc

SEQ ID NO: 97040 - DNA, 20 bp, synthetic construct
  source 1..20: mol_type = other DNA
gatctgcctgcttgggactc

SEQ ID NO: 97041 - DNA, 20 bp, synthetic construct
  source 1..20: mol_type = other DNA
tgatctgcctgcttgggact

SEQ ID NO: 97042 - DNA, 20 bp, synthetic construct
  source 1..20: mol_type = other DNA
gtgatctgcctgcttgggac

SEQ ID NO: 97043 - DNA, 20 bp, synthetic construct
  source 1..20: mol_type = other DNA
tgtgatctgcctgcttggga

SEQ ID NO: 97044 - DNA, 20 bp, synthetic construct
  source 1..20: mol_type = other DNA
atgtgatctgcctgcttggg

SEQ ID NO: 97045 - DNA, 20 bp, synthetic construct
  source 1..20: mol_type = other DNA
catgtgatctgcctgcttgg

SEQ ID NO: 97046 - DNA, 20 bp, synthetic construct
  source 1..20: mol_type = other DNA
tcatgtgatctgcctgcttg

SEQ ID NO: 97047 - DNA, 20 bp, synthetic construct
  source 1..20: mol_type = other DNA
ctcatgtgatctgcctgctt

SEQ ID NO: 97048 - DNA, 20 bp, synthetic construct
  source 1..20: mol_type = other DNA
cctcatgtgatctgcctgct

SEQ ID NO: 97049 - DNA, 20 bp, synthetic construct
  source 1..20: mol_type = other DNA
acctcatgtgatctgcctgc

SEQ ID NO: 97050 - DNA, 20 bp, synthetic construct
  source 1..20: mol_type = other DNA
gacctcatgtgatctgcctg

SEQ ID NO: 97051 - DNA, 20 bp, synthetic construct
  source 1..20: mol_type = other DNA
tgacctcatgtgatctgcct

SEQ ID NO: 97052 - DNA, 20 bp, synthetic construct
  source 1..20: mol_type = other DNA
ctgacctcatgtgatctgcc

SEQ ID NO: 97053 - DNA, 20 bp, synthetic construct
  source 1..20: mol_type = other DNA
cctgacctcatgtgatctgc

SEQ ID NO: 97054 - DNA, 20 bp, synthetic construct
  source 1..20: mol_type = other DNA
tcctgacctcatgtgatctg

SEQ ID NO: 97055 - DNA, 20 bp, synthetic construct
  source 1..20: mol_type = other DNA
ctcctgacctcatgtgatct

SEQ ID NO: 97056 - DNA, 20 bp, synthetic construct
  source 1..20: mol_type = other DNA
actcctgacctcatgtgatc

SEQ ID NO: 97057 - DNA, 20 bp, synthetic construct
  source 1..20: mol_type = other DNA
aactcctgacctcatgtgat

SEQ ID NO: 97058 - DNA, 20 bp, synthetic construct
  source 1..20: mol_type = other DNA
gaactcctgacctcatgtga

SEQ ID NO: 97059 - DNA, 20 bp, synthetic construct
  source 1..20: mol_type = other DNA
cgaactcctgacctcatgtg

SEQ ID NO: 97060 - DNA, 20 bp, synthetic construct
  source 1..20: mol_type = other DNA
tcgaactcctgacctcatgt

SEQ ID NO: 97061 - DNA, 20 bp, synthetic construct
  source 1..20: mol_type = other DNA
ttcgaactcctgacctcatg

SEQ ID NO: 97062 - DNA, 20 bp, synthetic construct
  source 1..20: mol_type = other DNA
tttcgaactcctgacctcat

SEQ ID NO: 97063 - DNA, 20 bp, synthetic construct
  source 1..20: mol_type = other DNA
gtttcgaactcctgacctca

SEQ ID NO: 97064 - DNA, 20 bp, synthetic construct
  source 1..20: mol_type = other DNA
ggtttcgaactcctgacctc

SEQ ID NO: 97065 - DNA, 20 bp, synthetic construct
  source 1..20: mol_type = other DNA
tggtttcgaactcctgacct

SEQ ID NO: 97066 - DNA, 20 bp, synthetic construct
  source 1..20: mol_type = other DNA
ctggtttcgaactcctgacc

SEQ ID NO: 97067 - DNA, 20 bp, synthetic construct
  source 1..20: mol_type = other DNA
actggtttcgaactcctgac

SEQ ID NO: 97068 - DNA, 20 bp, synthetic construct
  source 1..20: mol_type = other DNA
gactggtttcgaactcctga

SEQ ID NO: 97069 - DNA, 20 bp, synthetic construct
  source 1..20: mol_type = other DNA
agactggtttcgaactcctg

SEQ ID NO: 97070 - DNA, 20 bp, synthetic construct
  source 1..20: mol_type = other DNA
cagactggtttcgaactcct

SEQ ID NO: 97071 - DNA, 20 bp, synthetic construct
  source 1..20: mol_type = other DNA
tcagactggtttcgaactcc

SEQ ID NO: 97072 - DNA, 20 bp, synthetic construct
  source 1..20: mol_type = other DNA
gtcagactggtttcgaactc

SEQ ID NO: 97073 - DNA, 20 bp, synthetic construct
  source 1..20: mol_type = other DNA
ggtcagactggtttcgaact

SEQ ID NO: 97074 - DNA, 20 bp, synthetic construct
  source 1..20: mol_type = other DNA
tggtcagactggtttcgaac

SEQ ID NO: 97075 - DNA, 20 bp, synthetic construct
  source 1..20: mol_type = other DNA
ttggtcagactggtttcgaa

SEQ ID NO: 97076 - DNA, 20 bp, synthetic construct
  source 1..20: mol_type = other DNA
tttggtcagactggtttcga

SEQ ID NO: 97077 - DNA, 20 bp, synthetic construct
  source 1..20: mol_type = other DNA
atttggtcagactggtttcg

SEQ ID NO: 97078 - DNA, 20 bp, synthetic construct
  source 1..20: mol_type = other DNA
catttggtcagactggtttc

SEQ ID NO: 97079 - DNA, 20 bp, synthetic construct
  source 1..20: mol_type = other DNA
ccatttggtcagactggttt

SEQ ID NO: 97080 - DNA, 20 bp, synthetic construct
  source 1..20: mol_type = other DNA
accatttggtcagactggtt

SEQ ID NO: 97081 - DNA, 20 bp, synthetic construct
  source 1..20: mol_type = other DNA
caccatttggtcagactggt

SEQ ID NO: 97082 - DNA, 20 bp, synthetic construct
  source 1..20: mol_type = other DNA
tcaccatttggtcagactgg

SEQ ID NO: 97083 - DNA, 20 bp, synthetic construct
  source 1..20: mol_type = other DNA
ttcaccatttggtcagactg

SEQ ID NO: 97084 - DNA, 20 bp, synthetic construct
  source 1..20: mol_type = other DNA
tttcaccatttggtcagact

SEQ ID NO: 97085 - DNA, 20 bp, synthetic construct
  source 1..20: mol_type = other DNA
gtttcaccatttggtcagac

SEQ ID NO: 97086 - DNA, 20 bp, synthetic construct
  source 1..20: mol_type = other DNA
ggtttcaccatttggtcaga

SEQ ID NO: 97087 - DNA, 20 bp, synthetic construct
  source 1..20: mol_type = other DNA
cggtttcaccatttggtcag

SEQ ID NO: 97088 - DNA, 20 bp, synthetic construct
  source 1..20: mol_type = other DNA
gcggtttcaccatttggtca

SEQ ID NO: 97089 - DNA, 20 bp, synthetic construct
  source 1..20: mol_type = other DNA
tgcggtttcaccatttggtc

SEQ ID NO: 97090 - DNA, 20 bp, synthetic construct
  source 1..20: mol_type = other DNA
atgcggtttcaccatttggt

SEQ ID NO: 97091 - DNA, 20 bp, synthetic construct
  source 1..20: mol_type = other DNA
catgcggtttcaccatttgg

SEQ ID NO: 97092 - DNA, 20 bp, synthetic construct
  source 1..20: mol_type = other DNA
acatgcggtttcaccatttg

SEQ ID NO: 97093 - DNA, 20 bp, synthetic construct
  source 1..20: mol_type = other DNA
gacatgcggtttcaccattt

SEQ ID NO: 97094 - DNA, 20 bp, synthetic construct
  source 1..20: mol_type = other DNA
agacatgcggtttcaccatt

SEQ ID NO: 97095 - DNA, 20 bp, synthetic construct
  source 1..20: mol_type = other DNA
tagacatgcggtttcaccat

SEQ ID NO: 97096 - DNA, 20 bp, synthetic construct
  source 1..20: mol_type = other DNA
gtagacatgcggtttcacca

SEQ ID NO: 97097 - DNA, 20 bp, synthetic construct
  source 1..20: mol_type = other DNA
agtagacatgcggtttcacc

SEQ ID NO: 97098 - DNA, 20 bp, synthetic construct
  source 1..20: mol_type = other DNA
tagtagacatgcggtttcac

SEQ ID NO: 97099 - DNA, 20 bp, synthetic construct
  source 1..20: mol_type = other DNA
ttagtagacatgcggtttca

SEQ ID NO: 97100 - DNA, 20 bp, synthetic construct
  source 1..20: mol_type = other DNA
tttagtagacatgcggtttc

SEQ ID NO: 97101 - DNA, 20 bp, synthetic construct
  source 1..20: mol_type = other DNA
ttttagtagacatgcggttt

SEQ ID NO: 97102 - DNA, 20 bp, synthetic construct
  source 1..20: mol_type = other DNA
tttttagtagacatgcggtt

SEQ ID NO: 97103 - DNA, 20 bp, synthetic construct
  source 1..20: mol_type = other DNA
atttttagtagacatgcggt

SEQ ID NO: 97104 - DNA, 20 bp, synthetic construct
  source 1..20: mol_type = other DNA
tatttttagtagacatgcgg

SEQ ID NO: 97105 - DNA, 20 bp, synthetic construct
  source 1..20: mol_type = other DNA
gtatttttagtagacatgcg

SEQ ID NO: 97106 - DNA, 20 bp, synthetic construct
  source 1..20: mol_type = other DNA
tgtatttttagtagacatgc

SEQ ID NO: 97107 - DNA, 20 bp, synthetic construct
  source 1..20: mol_type = other DNA
ttgtatttttagtagacatg

SEQ ID NO: 97108 - DNA, 20 bp, synthetic construct
  source 1..20: mol_type = other DNA
tttgtatttttagtagacat

SEQ ID NO: 97109 - DNA, 20 bp, synthetic construct
  source 1..20: mol_type = other DNA
ttttgtatttttagtagaca

SEQ ID NO: 97110 - DNA, 20 bp, synthetic construct
  source 1..20: mol_type = other DNA
tttttgtatttttagtagac

SEQ ID NO: 97111 - DNA, 20 bp, synthetic construct
  source 1..20: mol_type = other DNA
atttttgtatttttagtaga

SEQ ID NO: 97112 - DNA, 20 bp, synthetic construct
  source 1..20: mol_type = other DNA
aatttttgtatttttagtag

SEQ ID NO: 97113 - DNA, 20 bp, synthetic construct
  source 1..20: mol_type = other DNA
taatttttgtatttttagta

SEQ ID NO: 97114 - DNA, 20 bp, synthetic construct
  source 1..20: mol_type = other DNA
gtaatttttgtatttttagt

SEQ ID NO: 97115 - DNA, 20 bp, synthetic construct
  source 1..20: mol_type = other DNA
ggtaatttttgtatttttag

SEQ ID NO: 97116 - DNA, 20 bp, synthetic construct
  source 1..20: mol_type = other DNA
aggtaatttttgtattttta

SEQ ID NO: 97117 - DNA, 20 bp, synthetic construct
  source 1..20: mol_type = other DNA
caggtaatttttgtattttt

SEQ ID NO: 97118 - DNA, 20 bp, synthetic construct
  source 1..20: mol_type = other DNA
ccaggtaatttttgtatttt

SEQ ID NO: 97119 - DNA, 20 bp, synthetic construct
  source 1..20: mol_type = other DNA
cccaggtaatttttgtattt

SEQ ID NO: 97120 - DNA, 20 bp, synthetic construct
  source 1..20: mol_type = other DNA
acccaggtaatttttgtatt

SEQ ID NO: 97121 - DNA, 20 bp, synthetic construct
  source 1..20: mol_type = other DNA
cacccaggtaatttttgtat

SEQ ID NO: 97122 - DNA, 20 bp, synthetic construct
  source 1..20: mol_type = other DNA
acacccaggtaatttttgta

SEQ ID NO: 97123 - DNA, 20 bp, synthetic construct
  source 1..20: mol_type = other DNA
cacacccaggtaatttttgt

SEQ ID NO: 97124 - DNA, 20 bp, synthetic construct
  source 1..20: mol_type = other DNA
ccacacccaggtaatttttg

SEQ ID NO: 97125 - DNA, 20 bp, synthetic construct
  source 1..20: mol_type = other DNA
accacacccaggtaattttt

SEQ ID NO: 97126 - DNA, 20 bp, synthetic construct
  source 1..20: mol_type = other DNA
caccacacccaggtaatttt

SEQ ID NO: 97127 - DNA, 20 bp, synthetic construct
  source 1..20: mol_type = other DNA
ccaccacacccaggtaattt

SEQ ID NO: 97128 - DNA, 20 bp, synthetic construct
  source 1..20: mol_type = other DNA
gccaccacacccaggtaatt

SEQ ID NO: 97129 - DNA, 20 bp, synthetic construct
  source 1..20: mol_type = other DNA
cgccaccacacccaggtaat

SEQ ID NO: 97130 - DNA, 20 bp, synthetic construct
  source 1..20: mol_type = other DNA
gcgccaccacacccaggtaa

SEQ ID NO: 97131 - DNA, 20 bp, synthetic construct
  source 1..20: mol_type = other DNA
tgcgccaccacacccaggta

SEQ ID NO: 97132 - DNA, 20 bp, synthetic construct
  source 1..20: mol_type = other DNA
gtgcgccaccacacccaggt

SEQ ID NO: 97133 - DNA, 20 bp, synthetic construct
  source 1..20: mol_type = other DNA
tgtgcgccaccacacccagg

SEQ ID NO: 97134 - DNA, 20 bp, synthetic construct
  source 1..20: mol_type = other DNA
gtgtgcgccaccacacccag

SEQ ID NO: 97135 - DNA, 20 bp, synthetic construct
  source 1..20: mol_type = other DNA
ggtgtgcgccaccacaccca

SEQ ID NO: 97136 - DNA, 20 bp, synthetic construct
  source 1..20: mol_type = other DNA
aggtgtgcgccaccacaccc

SEQ ID NO: 97137 - DNA, 20 bp, synthetic construct
  source 1..20: mol_type = other DNA
caggtgtgcgccaccacacc

SEQ ID NO: 97138 - DNA, 20 bp, synthetic construct
  source 1..20: mol_type = other DNA
acaggtgtgcgccaccacac

SEQ ID NO: 97139 - DNA, 20 bp, synthetic construct
  source 1..20: mol_type = other DNA
tacaggtgtgcgccaccaca

SEQ ID NO: 97140 - DNA, 20 bp, synthetic construct
  source 1..20: mol_type = other DNA
ctacaggtgtgcgccaccac

SEQ ID NO: 97141 - DNA, 20 bp, synthetic construct
  source 1..20: mol_type = other DNA
actacaggtgtgcgccacca

SEQ ID NO: 97142 - DNA, 20 bp, synthetic construct
  source 1..20: mol_type = other DNA
gactacaggtgtgcgccacc

SEQ ID NO: 97143 - DNA, 20 bp, synthetic construct
  source 1..20: mol_type = other DNA
agactacaggtgtgcgccac

SEQ ID NO: 97144 - DNA, 20 bp, synthetic construct
  source 1..20: mol_type = other DNA
tagactacaggtgtgcgcca

SEQ ID NO: 97145 - DNA, 20 bp, synthetic construct
  source 1..20: mol_type = other DNA
ctagactacaggtgtgcgcc

SEQ ID NO: 97146 - DNA, 20 bp, synthetic construct
  source 1..20: mol_type = other DNA
actagactacaggtgtgcgc

SEQ ID NO: 97147 - DNA, 20 bp, synthetic construct
  source 1..20: mol_type = other DNA
gactagactacaggtgtgcg

SEQ ID NO: 97148 - DNA, 20 bp, synthetic construct
  source 1..20: mol_type = other DNA
ggactagactacaggtgtgc

SEQ ID NO: 97149 - DNA, 20 bp, synthetic construct
  source 1..20: mol_type = other DNA
gggactagactacaggtgtg

SEQ ID NO: 97150 - DNA, 20 bp, synthetic construct
  source 1..20: mol_type = other DNA
tgggactagactacaggtgt

SEQ ID NO: 97151 - DNA, 20 bp, synthetic construct
  source 1..20: mol_type = other DNA
gtgggactagactacaggtg

SEQ ID NO: 97152 - DNA, 20 bp, synthetic construct
  source 1..20: mol_type = other DNA
agtgggactagactacaggt

SEQ ID NO: 97153 - DNA, 20 bp, synthetic construct
  source 1..20: mol_type = other DNA
tagtgggactagactacagg

SEQ ID NO: 97154 - DNA, 20 bp, synthetic construct
  source 1..20: mol_type = other DNA
gtagtgggactagactacag

SEQ ID NO: 97155 - DNA, 20 bp, synthetic construct
  source 1..20: mol_type = other DNA
agtagtgggactagactaca

SEQ ID NO: 97156 - DNA, 20 bp, synthetic construct
  source 1..20: mol_type = other DNA
cagtagtgggactagactac

SEQ ID NO: 97157 - DNA, 20 bp, synthetic construct
  source 1..20: mol_type = other DNA
acagtagtgggactagacta

SEQ ID NO: 97158 - DNA, 20 bp, synthetic construct
  source 1..20: mol_type = other DNA
tacagtagtgggactagact

SEQ ID NO: 97159 - DNA, 20 bp, synthetic construct
  source 1..20: mol_type = other DNA
ctacagtagtgggactagac

SEQ ID NO: 97160 - DNA, 20 bp, synthetic construct
  source 1..20: mol_type = other DNA
actacagtagtgggactaga

SEQ ID NO: 97161 - DNA, 20 bp, synthetic construct
  source 1..20: mol_type = other DNA
cactacagtagtgggactag

SEQ ID NO: 97162 - DNA, 20 bp, synthetic construct
  source 1..20: mol_type = other DNA
ccactacagtagtgggacta

SEQ ID NO: 97163 - DNA, 20 bp, synthetic construct
  source 1..20: mol_type = other DNA
gccactacagtagtgggact

SEQ ID NO: 97164 - DNA, 20 bp, synthetic construct
  source 1..20: mol_type = other DNA
agccactacagtagtgggac

SEQ ID NO: 97165 - DNA, 20 bp, synthetic construct
  source 1..20: mol_type = other DNA
cagccactacagtagtggga

SEQ ID NO: 97166 - DNA, 20 bp, synthetic construct
  source 1..20: mol_type = other DNA
tcagccactacagtagtggg

SEQ ID NO: 97167 - DNA, 20 bp, synthetic construct
  source 1..20: mol_type = other DNA
ctcagccactacagtagtgg

SEQ ID NO: 97168 - DNA, 20 bp, synthetic construct
  source 1..20: mol_type = other DNA
cctcagccactacagtagtg

SEQ ID NO: 97169 - DNA, 20 bp, synthetic construct
  source 1..20: mol_type = other DNA
gcctcagccactacagtagt

SEQ ID NO: 97170 - DNA, 20 bp, synthetic construct
  source 1..20: mol_type = other DNA
tgcctcagccactacagtag

SEQ ID NO: 97171 - DNA, 20 bp, synthetic construct
  source 1..20: mol_type = other DNA
ctgcctcagccactacagta

SEQ ID NO: 97172 - DNA, 20 bp, synthetic construct
  source 1..20: mol_type = other DNA
cctgcctcagccactacagt

SEQ ID NO: 97173 - DNA, 20 bp, synthetic construct
  source 1..20: mol_type = other DNA
tcctgcctcagccactacag

SEQ ID NO: 97174 - DNA, 20 bp, synthetic construct
  source 1..20: mol_type = other DNA
ctcctgcctcagccactaca

SEQ ID NO: 97175 - DNA, 20 bp, synthetic construct
  source 1..20: mol_type = other DNA
tctcctgcctcagccactac

SEQ ID NO: 97176 - DNA, 20 bp, synthetic construct
  source 1..20: mol_type = other DNA
atctcctgcctcagccacta

SEQ ID NO: 97177 - DNA, 20 bp, synthetic construct
  source 1..20: mol_type = other DNA
aatctcctgcctcagccact

SEQ ID NO: 97178 - DNA, 20 bp, synthetic construct
  source 1..20: mol_type = other DNA
gaatctcctgcctcagccac

SEQ ID NO: 97179 - DNA, 20 bp, synthetic construct
  source 1..20: mol_type = other DNA
cgaatctcctgcctcagcca

SEQ ID NO: 97180 - DNA, 20 bp, synthetic construct
  source 1..20: mol_type = other DNA
gcgaatctcctgcctcagcc

SEQ ID NO: 97181 - DNA, 20 bp, synthetic construct
  source 1..20: mol_type = other DNA
agcgaatctcctgcctcagc

SEQ ID NO: 97182 - DNA, 20 bp, synthetic construct
  source 1..20: mol_type = other DNA
aagcgaatctcctgcctcag

SEQ ID NO: 97183 - DNA, 20 bp, synthetic construct
  source 1..20: mol_type = other DNA
caagcgaatctcctgcctca

SEQ ID NO: 97184 - DNA, 20 bp, synthetic construct
  source 1..20: mol_type = other DNA
tcaagcgaatctcctgcctc

SEQ ID NO: 97185 - DNA, 20 bp, synthetic construct
  source 1..20: mol_type = other DNA
ttcaagcgaatctcctgcct

SEQ ID NO: 97186 - DNA, 20 bp, synthetic construct
  source 1..20: mol_type = other DNA
gttcaagcgaatctcctgcc

SEQ ID NO: 97187 - DNA, 20 bp, synthetic construct
  source 1..20: mol_type = other DNA
ggttcaagcgaatctcctgc

SEQ ID NO: 97188 - DNA, 20 bp, synthetic construct
  source 1..20: mol_type = other DNA
gggttcaagcgaatctcctg

SEQ ID NO: 97189 - DNA, 20 bp, synthetic construct
  source 1..20: mol_type = other DNA
tgggttcaagcgaatctcct

SEQ ID NO: 97190 - DNA, 20 bp, synthetic construct
  source 1..20: mol_type = other DNA
ctgggttcaagcgaatctcc

SEQ ID NO: 97191 - DNA, 20 bp, synthetic construct
  source 1..20: mol_type = other DNA
cctgggttcaagcgaatctc

SEQ ID NO: 97192 - DNA, 20 bp, synthetic construct
  source 1..20: mol_type = other DNA
tcctgggttcaagcgaatct

SEQ ID NO: 97193 - DNA, 20 bp, synthetic construct
  source 1..20: mol_type = other DNA
ctcctgggttcaagcgaatc

SEQ ID NO: 97194 - DNA, 20 bp, synthetic construct
  source 1..20: mol_type = other DNA
cctcctgggttcaagcgaat

SEQ ID NO: 97195 - DNA, 20 bp, synthetic construct
  source 1..20: mol_type = other DNA
acctcctgggttcaagcgaa

SEQ ID NO: 97196 - DNA, 20 bp, synthetic construct
  source 1..20: mol_type = other DNA
tacctcctgggttcaagcga

SEQ ID NO: 97197 - DNA, 20 bp, synthetic construct
  source 1..20: mol_type = other DNA
ctacctcctgggttcaagcg

SEQ ID NO: 97198 - DNA, 20 bp, synthetic construct
  source 1..20: mol_type = other DNA
tctacctcctgggttcaagc

SEQ ID NO: 97199 - DNA, 20 bp, synthetic construct
  source 1..20: mol_type = other DNA
ctctacctcctgggttcaag

SEQ ID NO: 97200 - DNA, 20 bp, synthetic construct
  source 1..20: mol_type = other DNA
cctctacctcctgggttcaa

SEQ ID NO: 97201 - DNA, 20 bp, synthetic construct
  source 1..20: mol_type = other DNA
acctctacctcctgggttca

SEQ ID NO: 97202 - DNA, 20 bp, synthetic construct
  source 1..20: mol_type = other DNA
aacctctacctcctgggttc

SEQ ID NO: 97203 - DNA, 20 bp, synthetic construct
  source 1..20: mol_type = other DNA
caacctctacctcctgggtt

SEQ ID NO: 97204 - DNA, 20 bp, synthetic construct
  source 1..20: mol_type = other DNA
gcaacctctacctcctgggt

SEQ ID NO: 97205 - DNA, 20 bp, synthetic construct
  source 1..20: mol_type = other DNA
tgcaacctctacctcctggg

SEQ ID NO: 97206 - DNA, 20 bp, synthetic construct
  source 1..20: mol_type = other DNA
ctgcaacctctacctcctgg

SEQ ID NO: 97207 - DNA, 20 bp, synthetic construct
  source 1..20: mol_type = other DNA
actgcaacctctacctcctg

SEQ ID NO: 97208 - DNA, 20 bp, synthetic construct
  source 1..20: mol_type = other DNA
cactgcaacctctacctcct

SEQ ID NO: 97209 - DNA, 20 bp, synthetic construct
  source 1..20: mol_type = other DNA
tcactgcaacctctacctcc

SEQ ID NO: 97210 - DNA, 20 bp, synthetic construct
  source 1..20: mol_type = other DNA
ctcactgcaacctctacctc

SEQ ID NO: 97211 - DNA, 20 bp, synthetic construct
  source 1..20: mol_type = other DNA
gctcactgcaacctctacct

SEQ ID NO: 97212 - DNA, 20 bp, synthetic construct
  source 1..20: mol_type = other DNA
agctcactgcaacctctacc

SEQ ID NO: 97213 - DNA, 20 bp, synthetic construct
  source 1..20: mol_type = other DNA
cagctcactgcaacctctac

SEQ ID NO: 97214 - DNA, 20 bp, synthetic construct
  source 1..20: mol_type = other DNA
tcagctcactgcaacctcta

SEQ ID NO: 97215 - DNA, 20 bp, synthetic construct
  source 1..20: mol_type = other DNA
ctcagctcactgcaacctct

SEQ ID NO: 97216 - DNA, 20 bp, synthetic construct
  source 1..20: mol_type = other DNA
tctcagctcactgcaacctc

SEQ ID NO: 97217 - DNA, 20 bp, synthetic construct
  source 1..20: mol_type = other DNA
atctcagctcactgcaacct

SEQ ID NO: 97218 - DNA, 20 bp, synthetic construct
  source 1..20: mol_type = other DNA
gatctcagctcactgcaacc

SEQ ID NO: 97219 - DNA, 20 bp, synthetic construct
  source 1..20: mol_type = other DNA
tgatctcagctcactgcaac

SEQ ID NO: 97220 - DNA, 20 bp, synthetic construct
  source 1..20: mol_type = other DNA
atgatctcagctcactgcaa

SEQ ID NO: 97221 - DNA, 20 bp, synthetic construct
  source 1..20: mol_type = other DNA
catgatctcagctcactgca

SEQ ID NO: 97222 - DNA, 20 bp, synthetic construct
  source 1..20: mol_type = other DNA
gcatgatctcagctcactgc

SEQ ID NO: 97223 - DNA, 20 bp, synthetic construct
  source 1..20: mol_type = other DNA
tgcatgatctcagctcactg

SEQ ID NO: 97224 - DNA, 20 bp, synthetic construct
  source 1..20: mol_type = other DNA
gtgcatgatctcagctcact

SEQ ID NO: 97225 - DNA, 20 bp, synthetic construct
  source 1..20: mol_type = other DNA
agtgcatgatctcagctcac

SEQ ID NO: 97226 - DNA, 20 bp, synthetic construct
  source 1..20: mol_type = other DNA
gagtgcatgatctcagctca

SEQ ID NO: 97227 - DNA, 20 bp, synthetic construct
  source 1..20: mol_type = other DNA
ggagtgcatgatctcagctc

SEQ ID NO: 97228 - DNA, 20 bp, synthetic construct
  source 1..20: mol_type = other DNA
tggagtgcatgatctcagct

SEQ ID NO: 97229 - DNA, 20 bp, synthetic construct
  source 1..20: mol_type = other DNA
ctggagtgcatgatctcagc

SEQ ID NO: 97230 - DNA, 20 bp, synthetic construct
  source 1..20: mol_type = other DNA
actggagtgcatgatctcag

SEQ ID NO: 97231 - DNA, 20 bp, synthetic construct
  source 1..20: mol_type = other DNA
cactggagtgcatgatctca

SEQ ID NO: 97232 - DNA, 20 bp, synthetic construct
  source 1..20: mol_type = other DNA
acactggagtgcatgatctc

SEQ ID NO: 97233 - DNA, 20 bp, synthetic construct
  source 1..20: mol_type = other DNA
cacactggagtgcatgatct

SEQ ID NO: 97234 - DNA, 20 bp, synthetic construct
  source 1..20: mol_type = other DNA
ccacactggagtgcatgatc

SEQ ID NO: 97235 - DNA, 20 bp, synthetic construct
  source 1..20: mol_type = other DNA
cccacactggagtgcatgat

SEQ ID NO: 97236 - DNA, 20 bp, synthetic construct
  source 1..20: mol_type = other DNA
gcccacactggagtgcatga

SEQ ID NO: 97237 - DNA, 20 bp, synthetic construct
  source 1..20: mol_type = other DNA
cgcccacactggagtgcatg

SEQ ID NO: 97238 - DNA, 20 bp, synthetic construct
  source 1..20: mol_type = other DNA
tcgcccacactggagtgcat

SEQ ID NO: 97239 - DNA, 20 bp, synthetic construct
  source 1..20: mol_type = other DNA
gtcgcccacactggagtgca

SEQ ID NO: 97240 - DNA, 20 bp, synthetic construct
  source 1..20: mol_type = other DNA
tgtcgcccacactggagtgc

SEQ ID NO: 97241 - DNA, 20 bp, synthetic construct
  source 1..20: mol_type = other DNA
ctgtcgcccacactggagtg

SEQ ID NO: 97242 - DNA, 20 bp, synthetic construct
  source 1..20: mol_type = other DNA
tctgtcgcccacactggagt

SEQ ID NO: 97243 - DNA, 20 bp, synthetic construct
  source 1..20: mol_type = other DNA
ctctgtcgcccacactggag

SEQ ID NO: 97244 - DNA, 20 bp, synthetic construct
  source 1..20: mol_type = other DNA
actctgtcgcccacactgga

SEQ ID NO: 97245 - DNA, 20 bp, synthetic construct
  source 1..20: mol_type = other DNA
cactctgtcgcccacactgg

SEQ ID NO: 97246 - DNA, 20 bp, synthetic construct
  source 1..20: mol_type = other DNA
tcactctgtcgcccacactg

SEQ ID NO: 97247 - DNA, 20 bp, synthetic construct
  source 1..20: mol_type = other DNA
ctcactctgtcgcccacact

SEQ ID NO: 97248 - DNA, 20 bp, synthetic construct
  source 1..20: mol_type = other DNA
tctcactctgtcgcccacac

SEQ ID NO: 97249 - DNA, 20 bp, synthetic construct
  source 1..20: mol_type = other DNA
gtctcactctgtcgcccaca

SEQ ID NO: 97250 - DNA, 20 bp, synthetic construct
  source 1..20: mol_type = other DNA
agtctcactctgtcgcccac

SEQ ID NO: 97251 - DNA, 20 bp, synthetic construct
  source 1..20: mol_type = other DNA
gagtctcactctgtcgccca

SEQ ID NO: 97252 - DNA, 20 bp, synthetic construct
  source 1..20: mol_type = other DNA
ggagtctcactctgtcgccc

SEQ ID NO: 97253 - DNA, 20 bp, synthetic construct
  source 1..20: mol_type = other DNA
tggagtctcactctgtcgcc

SEQ ID NO: 97254 - DNA, 20 bp, synthetic construct
  source 1..20: mol_type = other DNA
atggagtctcactctgtcgc

SEQ ID NO: 97255 - DNA, 20 bp, synthetic construct
  source 1..20: mol_type = other DNA
gatggagtctcactctgtcg

SEQ ID NO: 97256 - DNA, 20 bp, synthetic construct
  source 1..20: mol_type = other DNA
agatggagtctcactctgtc

SEQ ID NO: 97257 - DNA, 20 bp, synthetic construct
  source 1..20: mol_type = other DNA
gagatggagtctcactctgt

SEQ ID NO: 97258 - DNA, 20 bp, synthetic construct
  source 1..20: mol_type = other DNA
tgagatggagtctcactctg

SEQ ID NO: 97259 - DNA, 20 bp, synthetic construct
  source 1..20: mol_type = other DNA
ttgagatggagtctcactct

SEQ ID NO: 97260 - DNA, 20 bp, synthetic construct
  source 1..20: mol_type = other DNA
tttgagatggagtctcactc

SEQ ID NO: 97261 - DNA, 20 bp, synthetic construct
  source 1..20: mol_type = other DNA
ttttgagatggagtctcact

SEQ ID NO: 97262 - DNA, 20 bp, synthetic construct
  source 1..20: mol_type = other DNA
tttttgagatggagtctcac

SEQ ID NO: 97263 - DNA, 20 bp, synthetic construct
  source 1..20: mol_type = other DNA
ttttttgagatggagtctca

SEQ ID NO: 97264 - DNA, 20 bp, synthetic construct
  source 1..20: mol_type = other DNA
tttttttgagatggagtctc

SEQ ID NO: 97265 - DNA, 20 bp, synthetic construct
  source 1..20: mol_type = other DNA
ttttttttgagatggagtct

SEQ ID NO: 97266 - DNA, 20 bp, synthetic construct
  source 1..20: mol_type = other DNA
cttttttttgagatggagtc

SEQ ID NO: 97267 - DNA, 20 bp, synthetic construct
  source 1..20: mol_type = other DNA
tcttttttttgagatggagt

SEQ ID NO: 97268 - DNA, 20 bp, synthetic construct
  source 1..20: mol_type = other DNA
gtcttttttttgagatggag

SEQ ID NO: 97269 - DNA, 20 bp, synthetic construct
  source 1..20: mol_type = other DNA
agtcttttttttgagatgga

SEQ ID NO: 97270 - DNA, 20 bp, synthetic construct
  source 1..20: mol_type = other DNA
tagtcttttttttgagatgg

SEQ ID NO: 97271 - DNA, 20 bp, synthetic construct
  source 1..20: mol_type = other DNA
atagtcttttttttgagatg

SEQ ID NO: 97272 - DNA, 20 bp, synthetic construct
  source 1..20: mol_type = other DNA
aatagtcttttttttgagat

SEQ ID NO: 97273 - DNA, 20 bp, synthetic construct
  source 1..20: mol_type = other DNA
gaatagtcttttttttgaga

SEQ ID NO: 97274 - DNA, 20 bp, synthetic construct
  source 1..20: mol_type = other DNA
agaatagtcttttttttgag

SEQ ID NO: 97275 - DNA, 20 bp, synthetic construct
  source 1..20: mol_type = other DNA
aagaatagtcttttttttga

SEQ ID NO: 97276 - DNA, 20 bp, synthetic construct
  source 1..20: mol_type = other DNA
aaagaatagtcttttttttg

SEQ ID NO: 97277 - DNA, 20 bp, synthetic construct
  source 1..20: mol_type = other DNA
gaaagaatagtctttttttt

SEQ ID NO: 97278 - DNA, 20 bp, synthetic construct
  source 1..20: mol_type = other DNA
ggaaagaatagtcttttttt

SEQ ID NO: 97279 - DNA, 20 bp, synthetic construct
  source 1..20: mol_type = other DNA
aggaaagaatagtctttttt

SEQ ID NO: 97280 - DNA, 20 bp, synthetic construct
  source 1..20: mol_type = other DNA
gaggaaagaatagtcttttt

SEQ ID NO: 97281 - DNA, 20 bp, synthetic construct
  source 1..20: mol_type = other DNA
ggaggaaagaatagtctttt

SEQ ID NO: 97282 - DNA, 20 bp, synthetic construct
  source 1..20: mol_type = other DNA
tggaggaaagaatagtcttt

SEQ ID NO: 97283 - DNA, 20 bp, synthetic construct
  source 1..20: mol_type = other DNA
atggaggaaagaatagtctt

SEQ ID NO: 97284 - DNA, 20 bp, synthetic construct
  source 1..20: mol_type = other DNA
aatggaggaaagaatagtct

SEQ ID NO: 97285 - DNA, 20 bp, synthetic construct
  source 1..20: mol_type = other DNA
caatggaggaaagaatagtc

SEQ ID NO: 97286 - DNA, 20 bp, synthetic construct
  source 1..20: mol_type = other DNA
tcaatggaggaaagaatagt

SEQ ID NO: 97287 - DNA, 20 bp, synthetic construct
  source 1..20: mol_type = other DNA
ttcaatggaggaaagaatag

SEQ ID NO: 97288 - DNA, 20 bp, synthetic construct
  source 1..20: mol_type = other DNA
attcaatggaggaaagaata

SEQ ID NO: 97289 - DNA, 20 bp, synthetic construct
  source 1..20: mol_type = other DNA
aattcaatggaggaaagaat

SEQ ID NO: 97290 - DNA, 20 bp, synthetic construct
  source 1..20: mol_type = other DNA
taattcaatggaggaaagaa

SEQ ID NO: 97291 - DNA, 20 bp, synthetic construct
  source 1..20: mol_type = other DNA
ataattcaatggaggaaaga

SEQ ID NO: 97292 - DNA, 20 bp, synthetic construct
  source 1..20: mol_type = other DNA
gataattcaatggaggaaag

SEQ ID NO: 97293 - DNA, 20 bp, synthetic construct
  source 1..20: mol_type = other DNA
agataattcaatggaggaaa

SEQ ID NO: 97294 - DNA, 20 bp, synthetic construct
  source 1..20: mol_type = other DNA
aagataattcaatggaggaa

SEQ ID NO: 97295 - DNA, 20 bp, synthetic construct
  source 1..20: mol_type = other DNA
gaagataattcaatggagga

SEQ ID NO: 97296 - DNA, 20 bp, synthetic construct
  source 1..20: mol_type = other DNA
tgaagataattcaatggagg

SEQ ID NO: 97297 - DNA, 20 bp, synthetic construct
  source 1..20: mol_type = other DNA
gtgaagataattcaatggag

SEQ ID NO: 97298 - DNA, 20 bp, synthetic construct
  source 1..20: mol_type = other DNA
tgtgaagataattcaatgga

SEQ ID NO: 97299 - DNA, 20 bp, synthetic construct
  source 1..20: mol_type = other DNA
atgtgaagataattcaatgg

SEQ ID NO: 97300 - DNA, 20 bp, synthetic construct
  source 1..20: mol_type = other DNA
catgtgaagataattcaatg

SEQ ID NO: 97301 - DNA, 20 bp, synthetic construct
  source 1..20: mol_type = other DNA
gcatgtgaagataattcaat

SEQ ID NO: 97302 - DNA, 20 bp, synthetic construct
  source 1..20: mol_type = other DNA
agcatgtgaagataattcaa

SEQ ID NO: 97303 - DNA, 20 bp, synthetic construct
  source 1..20: mol_type = other DNA
aagcatgtgaagataattca

SEQ ID NO: 97304 - DNA, 20 bp, synthetic construct
  source 1..20: mol_type = other DNA
caagcatgtgaagataattc

SEQ ID NO: 97305 - DNA, 20 bp, synthetic construct
  source 1..20: mol_type = other DNA
acaagcatgtgaagataatt

SEQ ID NO: 97306 - DNA, 20 bp, synthetic construct
  source 1..20: mol_type = other DNA
aacaagcatgtgaagataat

SEQ ID NO: 97307 - DNA, 20 bp, synthetic construct
  source 1..20: mol_type = other DNA
caacaagcatgtgaagataa

SEQ ID NO: 97308 - DNA, 20 bp, synthetic construct
  source 1..20: mol_type = other DNA
ccaacaagcatgtgaagata

SEQ ID NO: 97309 - DNA, 20 bp, synthetic construct
  source 1..20: mol_type = other DNA
tccaacaagcatgtgaagat

SEQ ID NO: 97310 - DNA, 20 bp, synthetic construct
  source 1..20: mol_type = other DNA
ttccaacaagcatgtgaaga

SEQ ID NO: 97311 - DNA, 20 bp, synthetic construct
  source 1..20: mol_type = other DNA
cttccaacaagcatgtgaag

SEQ ID NO: 97312 - DNA, 20 bp, synthetic construct
  source 1..20: mol_type = other DNA
acttccaacaagcatgtgaa

SEQ ID NO: 97313 - DNA, 20 bp, synthetic construct
  source 1..20: mol_type = other DNA
gacttccaacaagcatgtga

SEQ ID NO: 97314 - DNA, 20 bp, synthetic construct
  source 1..20: mol_type = other DNA
agacttccaacaagcatgtg

SEQ ID NO: 97315 - DNA, 20 bp, synthetic construct
  source 1..20: mol_type = other DNA
cagacttccaacaagcatgt

SEQ ID NO: 97316 - DNA, 20 bp, synthetic construct
  source 1..20: mol_type = other DNA
acagacttccaacaagcatg

SEQ ID NO: 97317 - DNA, 20 bp, synthetic construct
  source 1..20: mol_type = other DNA
aacagacttccaacaagcat

SEQ ID NO: 97318 - DNA, 20 bp, synthetic construct
  source 1..20: mol_type = other DNA
caacagacttccaacaagca

SEQ ID NO: 97319 - DNA, 20 bp, synthetic construct
  source 1..20: mol_type = other DNA
tcaacagacttccaacaagc

SEQ ID NO: 97320 - DNA, 20 bp, synthetic construct
  source 1..20: mol_type = other DNA
gtcaacagacttccaacaag

SEQ ID NO: 97321 - DNA, 20 bp, synthetic construct
  source 1..20: mol_type = other DNA
agtcaacagacttccaacaa

SEQ ID NO: 97322 - DNA, 20 bp, synthetic construct
  source 1..20: mol_type = other DNA
tagtcaacagacttccaaca

SEQ ID NO: 97323 - DNA, 20 bp, synthetic construct
  source 1..20: mol_type = other DNA
gtagtcaacagacttccaac

SEQ ID NO: 97324 - DNA, 20 bp, synthetic construct
  source 1..20: mol_type = other DNA
tgtagtcaacagacttccaa

SEQ ID NO: 97325 - DNA, 20 bp, synthetic construct
  source 1..20: mol_type = other DNA
ttgtagtcaacagacttcca

SEQ ID NO: 97326 - DNA, 20 bp, synthetic construct
  source 1..20: mol_type = other DNA
tttgtagtcaacagacttcc

SEQ ID NO: 97327 - DNA, 20 bp, synthetic construct
  source 1..20: mol_type = other DNA
atttgtagtcaacagacttc

SEQ ID NO: 97328 - DNA, 20 bp, synthetic construct
  source 1..20: mol_type = other DNA
catttgtagtcaacagactt

SEQ ID NO: 97329 - DNA, 20 bp, synthetic construct
  source 1..20: mol_type = other DNA
acatttgtagtcaacagact

SEQ ID NO: 97330 - DNA, 20 bp, synthetic construct
  source 1..20: mol_type = other DNA
cacatttgtagtcaacagac

SEQ ID NO: 97331 - DNA, 20 bp, synthetic construct
  source 1..20: mol_type = other DNA
tcacatttgtagtcaacaga

SEQ ID NO: 97332 - DNA, 20 bp, synthetic construct
  source 1..20: mol_type = other DNA
ttcacatttgtagtcaacag

SEQ ID NO: 97333 - DNA, 20 bp, synthetic construct
  source 1..20: mol_type = other DNA
tttcacatttgtagtcaaca

SEQ ID NO: 97334 - DNA, 20 bp, synthetic construct
  source 1..20: mol_type = other DNA
ctttcacatttgtagtcaac

SEQ ID NO: 97335 - DNA, 20 bp, synthetic construct
  source 1..20: mol_type = other DNA
actttcacatttgtagtcaa

SEQ ID NO: 97336 - DNA, 20 bp, synthetic construct
  source 1..20: mol_type = other DNA
aactttcacatttgtagtca

SEQ ID NO: 97337 - DNA, 20 bp, synthetic construct
  source 1..20: mol_type = other DNA
aaactttcacatttgtagtc

SEQ ID NO: 97338 - DNA, 20 bp, synthetic construct
  source 1..20: mol_type = other DNA
taaactttcacatttgtagt

SEQ ID NO: 97339 - DNA, 20 bp, synthetic construct
  source 1..20: mol_type = other DNA
ataaactttcacatttgtag

SEQ ID NO: 97340 - DNA, 20 bp, synthetic construct
  source 1..20: mol_type = other DNA
aataaactttcacatttgta

SEQ ID NO: 97341 - DNA, 20 bp, synthetic construct
  source 1..20: mol_type = other DNA
taataaactttcacatttgt

SEQ ID NO: 97342 - DNA, 20 bp, synthetic construct
  source 1..20: mol_type = other DNA
gtaataaactttcacatttg

SEQ ID NO: 97343 - DNA, 20 bp, synthetic construct
  source 1..20: mol_type = other DNA
agtaataaactttcacattt

SEQ ID NO: 97344 - DNA, 20 bp, synthetic construct
  source 1..20: mol_type = other DNA
cagtaataaactttcacatt

SEQ ID NO: 97345 - DNA, 20 bp, synthetic construct
  source 1..20: mol_type = other DNA
ccagtaataaactttcacat

SEQ ID NO: 97346 - DNA, 20 bp, synthetic construct
  source 1..20: mol_type = other DNA
tccagtaataaactttcaca

SEQ ID NO: 97347 - DNA, 20 bp, synthetic construct
  source 1..20: mol_type = other DNA
gtccagtaataaactttcac

SEQ ID NO: 97348 - DNA, 20 bp, synthetic construct
  source 1..20: mol_type = other DNA
agtccagtaataaactttca

SEQ ID NO: 97349 - DNA, 20 bp, synthetic construct
  source 1..20: mol_type = other DNA
gagtccagtaataaactttc

SEQ ID NO: 97350 - DNA, 20 bp, synthetic construct
  source 1..20: mol_type = other DNA
agagtccagtaataaacttt

SEQ ID NO: 97351 - DNA, 20 bp, synthetic construct
  source 1..20: mol_type = other DNA
cagagtccagtaataaactt

SEQ ID NO: 97352 - DNA, 20 bp, synthetic construct
  source 1..20: mol_type = other DNA
tcagagtccagtaataaact

SEQ ID NO: 97353 - DNA, 20 bp, synthetic construct
  source 1..20: mol_type = other DNA
ttcagagtccagtaataaac

SEQ ID NO: 97354 - DNA, 20 bp, synthetic construct
  source 1..20: mol_type = other DNA
attcagagtccagtaataaa

SEQ ID NO: 97355 - DNA, 20 bp, synthetic construct
  source 1..20: mol_type = other DNA
aattcagagtccagtaataa

SEQ ID NO: 97356 - DNA, 20 bp, synthetic construct
  source 1..20: mol_type = other DNA
caattcagagtccagtaata

SEQ ID NO: 97357 - DNA, 20 bp, synthetic construct
  source 1..20: mol_type = other DNA
acaattcagagtccagtaat

SEQ ID NO: 97358 - DNA, 20 bp, synthetic construct
  source 1..20: mol_type = other DNA
gacaattcagagtccagtaa

SEQ ID NO: 97359 - DNA, 20 bp, synthetic construct
  source 1..20: mol_type = other DNA
ggacaattcagagtccagta

SEQ ID NO: 97360 - DNA, 20 bp, synthetic construct
  source 1..20: mol_type = other DNA
aggacaattcagagtccagt

SEQ ID NO: 97361 - DNA, 20 bp, synthetic construct
  source 1..20: mol_type = other DNA
gaggacaattcagagtccag

SEQ ID NO: 97362 - DNA, 20 bp, synthetic construct
  source 1..20: mol_type = other DNA
ggaggacaattcagagtcca

SEQ ID NO: 97363 - DNA, 20 bp, synthetic construct
  source 1..20: mol_type = other DNA
tggaggacaattcagagtcc

SEQ ID NO: 97364 - DNA, 20 bp, synthetic construct
  source 1..20: mol_type = other DNA
gtggaggacaattcagagtc

SEQ ID NO: 97365 - DNA, 20 bp, synthetic construct
  source 1..20: mol_type = other DNA
agtggaggacaattcagagt

SEQ ID NO: 97366 - DNA, 20 bp, synthetic construct
  source 1..20: mol_type = other DNA
cagtggaggacaattcagag

SEQ ID NO: 97367 - DNA, 20 bp, synthetic construct
  source 1..20: mol_type = other DNA
tcagtggaggacaattcaga

SEQ ID NO: 97368 - DNA, 20 bp, synthetic construct
  source 1..20: mol_type = other DNA
ttcagtggaggacaattcag

SEQ ID NO: 97369 - DNA, 20 bp, synthetic construct
  source 1..20: mol_type = other DNA
attcagtggaggacaattca

SEQ ID NO: 97370 - DNA, 20 bp, synthetic construct
  source 1..20: mol_type = other DNA
gattcagtggaggacaattc

SEQ ID NO: 97371 - DNA, 20 bp, synthetic construct
  source 1..20: mol_type = other DNA
agattcagtggaggacaatt

SEQ ID NO: 97372 - DNA, 20 bp, synthetic construct
  source 1..20: mol_type = other DNA
gagattcagtggaggacaat

SEQ ID NO: 97373 - DNA, 20 bp, synthetic construct
  source 1..20: mol_type = other DNA
agagattcagtggaggacaa

SEQ ID NO: 97374 - DNA, 20 bp, synthetic construct
  source 1..20: mol_type = other DNA
tagagattcagtggaggaca

SEQ ID NO: 97375 - DNA, 20 bp, synthetic construct
  source 1..20: mol_type = other DNA
atagagattcagtggaggac

SEQ ID NO: 97376 - DNA, 20 bp, synthetic construct
  source 1..20: mol_type = other DNA
catagagattcagtggagga

SEQ ID NO: 97377 - DNA, 20 bp, synthetic construct
  source 1..20: mol_type = other DNA
acatagagattcagtggagg

SEQ ID NO: 97378 - DNA, 20 bp, synthetic construct
  source 1..20: mol_type = other DNA
gacatagagattcagtggag

SEQ ID NO: 97379 - DNA, 20 bp, synthetic construct
  source 1..20: mol_type = other DNA
agacatagagattcagtgga

SEQ ID NO: 97380 - DNA, 20 bp, synthetic construct
  source 1..20: mol_type = other DNA
aagacatagagattcagtgg

SEQ ID NO: 97381 - DNA, 20 bp, synthetic construct
  source 1..20: mol_type = other DNA
taagacatagagattcagtg

SEQ ID NO: 97382 - DNA, 20 bp, synthetic construct
  source 1..20: mol_type = other DNA
ataagacatagagattcagt

SEQ ID NO: 97383 - DNA, 20 bp, synthetic construct
  source 1..20: mol_type = other DNA
gataagacatagagattcag

SEQ ID NO: 97384 - DNA, 20 bp, synthetic construct
  source 1..20: mol_type = other DNA
ggataagacatagagattca

SEQ ID NO: 97385 - DNA, 20 bp, synthetic construct
  source 1..20: mol_type = other DNA
aggataagacatagagattc

SEQ ID NO: 97386 - DNA, 20 bp, synthetic construct
  source 1..20: mol_type = other DNA
aaggataagacatagagatt

SEQ ID NO: 97387 - DNA, 20 bp, synthetic construct
  source 1..20: mol_type = other DNA
taaggataagacatagagat

SEQ ID NO: 97388 - DNA, 20 bp, synthetic construct
  source 1..20: mol_type = other DNA
ataaggataagacatagaga

SEQ ID NO: 97389 - DNA, 20 bp, synthetic construct
  source 1..20: mol_type = other DNA
cataaggataagacatagag

SEQ ID NO: 97390 - DNA, 20 bp, synthetic construct
  source 1..20: mol_type = other DNA
ccataaggataagacataga

SEQ ID NO: 97391 - DNA, 20 bp, synthetic construct
  source 1..20: mol_type = other DNA
gccataaggataagacatag

SEQ ID NO: 97392 - DNA, 20 bp, synthetic construct
  source 1..20: mol_type = other DNA
tgccataaggataagacata

SEQ ID NO: 97393 - DNA, 20 bp, synthetic construct
  source 1..20: mol_type = other DNA
ctgccataaggataagacat

SEQ ID NO: 97394 - DNA, 20 bp, synthetic construct
  source 1..20: mol_type = other DNA
actgccataaggataagaca

SEQ ID NO: 97395 - DNA, 20 bp, synthetic construct
  source 1..20: mol_type = other DNA
tactgccataaggataagac

SEQ ID NO: 97396 - DNA, 20 bp, synthetic construct
  source 1..20: mol_type = other DNA
gtactgccataaggataaga

SEQ ID NO: 97397 - DNA, 20 bp, synthetic construct
  source 1..20: mol_type = other DNA
ggtactgccataaggataag

SEQ ID NO: 97398 - DNA, 20 bp, synthetic construct
  source 1..20: mol_type = other DNA
tggtactgccataaggataa

SEQ ID NO: 97399 - DNA, 20 bp, synthetic construct
  source 1..20: mol_type = other DNA
atggtactgccataaggata

SEQ ID NO: 97400 - DNA, 20 bp, synthetic construct
  source 1..20: mol_type = other DNA
tatggtactgccataaggat

SEQ ID NO: 97401 - DNA, 20 bp, synthetic construct
  source 1..20: mol_type = other DNA
gtatggtactgccataagga

SEQ ID NO: 97402 - DNA, 20 bp, synthetic construct
  source 1..20: mol_type = other DNA
agtatggtactgccataagg

SEQ ID NO: 97403 - DNA, 20 bp, synthetic construct
  source 1..20: mol_type = other DNA
cagtatggtactgccataag

SEQ ID NO: 97404 - DNA, 20 bp, synthetic construct
  source 1..20: mol_type = other DNA
acagtatggtactgccataa

SEQ ID NO: 97405 - DNA, 20 bp, synthetic construct
  source 1..20: mol_type = other DNA
gacagtatggtactgccata

SEQ ID NO: 97406 - DNA, 20 bp, synthetic construct
  source 1..20: mol_type = other DNA
agacagtatggtactgccat

SEQ ID NO: 97407 - DNA, 20 bp, synthetic construct
  source 1..20: mol_type = other DNA
aagacagtatggtactgcca

SEQ ID NO: 97408 - DNA, 20 bp, synthetic construct
  source 1..20: mol_type = other DNA
caagacagtatggtactgcc

SEQ ID NO: 97409 - DNA, 20 bp, synthetic construct
  source 1..20: mol_type = other DNA
tcaagacagtatggtactgc

SEQ ID NO: 97410 - DNA, 20 bp, synthetic construct
  source 1..20: mol_type = other DNA
atcaagacagtatggtactg

SEQ ID NO: 97411 - DNA, 20 bp, synthetic construct
  source 1..20: mol_type = other DNA
aatcaagacagtatggtact

SEQ ID NO: 97412 - DNA, 20 bp, synthetic construct
  source 1..20: mol_type = other DNA
taatcaagacagtatggtac

SEQ ID NO: 97413 - DNA, 20 bp, synthetic construct
  source 1..20: mol_type = other DNA
ctaatcaagacagtatggta

SEQ ID NO: 97414 - DNA, 20 bp, synthetic construct
  source 1..20: mol_type = other DNA
tctaatcaagacagtatggt

SEQ ID NO: 97415 - DNA, 20 bp, synthetic construct
  source 1..20: mol_type = other DNA
ctctaatcaagacagtatgg

SEQ ID NO: 97416 - DNA, 20 bp, synthetic construct
  source 1..20: mol_type = other DNA
actctaatcaagacagtatg

SEQ ID NO: 97417 - DNA, 20 bp, synthetic construct
  source 1..20: mol_type = other DNA
aactctaatcaagacagtat

SEQ ID NO: 97418 - DNA, 20 bp, synthetic construct
  source 1..20: mol_type = other DNA
taactctaatcaagacagta

SEQ ID NO: 97419 - DNA, 20 bp, synthetic construct
  source 1..20: mol_type = other DNA
gtaactctaatcaagacagt

SEQ ID NO: 97420 - DNA, 20 bp, synthetic construct
  source 1..20: mol_type = other DNA
agtaactctaatcaagacag

SEQ ID NO: 97421 - DNA, 20 bp, synthetic construct
  source 1..20: mol_type = other DNA
cagtaactctaatcaagaca

SEQ ID NO: 97422 - DNA, 20 bp, synthetic construct
  source 1..20: mol_type = other DNA
acagtaactctaatcaagac

SEQ ID NO: 97423 - DNA, 20 bp, synthetic construct
  source 1..20: mol_type = other DNA
tacagtaactctaatcaaga

SEQ ID NO: 97424 - DNA, 20 bp, synthetic construct
  source 1..20: mol_type = other DNA
atacagtaactctaatcaag

SEQ ID NO: 97425 - DNA, 20 bp, synthetic construct
  source 1..20: mol_type = other DNA
aatacagtaactctaatcaa

SEQ ID NO: 97426 - DNA, 20 bp, synthetic construct
  source 1..20: mol_type = other DNA
aaatacagtaactctaatca

SEQ ID NO: 97427 - DNA, 20 bp, synthetic construct
  source 1..20: mol_type = other DNA
aaaatacagtaactctaatc

SEQ ID NO: 97428 - DNA, 20 bp, synthetic construct
  source 1..20: mol_type = other DNA
taaaatacagtaactctaat

SEQ ID NO: 97429 - DNA, 20 bp, synthetic construct
  source 1..20: mol_type = other DNA
ttaaaatacagtaactctaa

SEQ ID NO: 97430 - DNA, 20 bp, synthetic construct
  source 1..20: mol_type = other DNA
tttaaaatacagtaactcta

SEQ ID NO: 97431 - DNA, 20 bp, synthetic construct
  source 1..20: mol_type = other DNA
ttttaaaatacagtaactct

SEQ ID NO: 97432 - DNA, 20 bp, synthetic construct
  source 1..20: mol_type = other DNA
cttttaaaatacagtaactc

SEQ ID NO: 97433 - DNA, 20 bp, synthetic construct
  source 1..20: mol_type = other DNA
ccttttaaaatacagtaact

SEQ ID NO: 97434 - DNA, 20 bp, synthetic construct
  source 1..20: mol_type = other DNA
gccttttaaaatacagtaac

SEQ ID NO: 97435 - DNA, 20 bp, synthetic construct
  source 1..20: mol_type = other DNA
agccttttaaaatacagtaa

SEQ ID NO: 97436 - DNA, 20 bp, synthetic construct
  source 1..20: mol_type = other DNA
cagccttttaaaatacagta

SEQ ID NO: 97437 - DNA, 20 bp, synthetic construct
  source 1..20: mol_type = other DNA
acagccttttaaaatacagt

SEQ ID NO: 97438 - DNA, 20 bp, synthetic construct
  source 1..20: mol_type = other DNA
tacagccttttaaaatacag

SEQ ID NO: 97439 - DNA, 20 bp, synthetic construct
  source 1..20: mol_type = other DNA
gtacagccttttaaaataca

SEQ ID NO: 97440 - DNA, 20 bp, synthetic construct
  source 1..20: mol_type = other DNA
agtacagccttttaaaatac

SEQ ID NO: 97441 - DNA, 20 bp, synthetic construct
  source 1..20: mol_type = other DNA
aagtacagccttttaaaata

SEQ ID NO: 97442 - DNA, 20 bp, synthetic construct
  source 1..20: mol_type = other DNA
aaagtacagccttttaaaat

SEQ ID NO: 97443 - DNA, 20 bp, synthetic construct
  source 1..20: mol_type = other DNA
aaaagtacagccttttaaaa

SEQ ID NO: 97444 - DNA, 20 bp, synthetic construct
  source 1..20: mol_type = other DNA
aaaaagtacagccttttaaa

SEQ ID NO: 97445 - DNA, 20 bp, synthetic construct
  source 1..20: mol_type = other DNA
gaaaaagtacagccttttaa

SEQ ID NO: 97446 - DNA, 20 bp, synthetic construct
  source 1..20: mol_type = other DNA
tgaaaaagtacagcctttta

SEQ ID NO: 97447 - DNA, 20 bp, synthetic construct
  source 1..20: mol_type = other DNA
ctgaaaaagtacagcctttt

SEQ ID NO: 97448 - DNA, 20 bp, synthetic construct
  source 1..20: mol_type = other DNA
actgaaaaagtacagccttt

SEQ ID NO: 97449 - DNA, 20 bp, synthetic construct
  source 1..20: mol_type = other DNA
aactgaaaaagtacagcctt

SEQ ID NO: 97450 - DNA, 20 bp, synthetic construct
  source 1..20: mol_type = other DNA
taactgaaaaagtacagcct

SEQ ID NO: 97451 - DNA, 20 bp, synthetic construct
  source 1..20: mol_type = other DNA
ctaactgaaaaagtacagcc

SEQ ID NO: 97452 - DNA, 20 bp, synthetic construct
  source 1..20: mol_type = other DNA
gctaactgaaaaagtacagc

SEQ ID NO: 97453 - DNA, 20 bp, synthetic construct
  source 1..20: mol_type = other DNA
tgctaactgaaaaagtacag

SEQ ID NO: 97454 - DNA, 20 bp, synthetic construct
  source 1..20: mol_type = other DNA
ctgctaactgaaaaagtaca

SEQ ID NO: 97455 - DNA, 20 bp, synthetic construct
  source 1..20: mol_type = other DNA
tctgctaactgaaaaagtac

SEQ ID NO: 97456 - DNA, 20 bp, synthetic construct
  source 1..20: mol_type = other DNA
ttctgctaactgaaaaagta

SEQ ID NO: 97457 - DNA, 20 bp, synthetic construct
  source 1..20: mol_type = other DNA
tttctgctaactgaaaaagt

SEQ ID NO: 97458 - DNA, 20 bp, synthetic construct
  source 1..20: mol_type = other DNA
ttttctgctaactgaaaaag

SEQ ID NO: 97459 - DNA, 20 bp, synthetic construct
  source 1..20: mol_type = other DNA
gttttctgctaactgaaaaa

SEQ ID NO: 97460 - DNA, 20 bp, synthetic construct
  source 1..20: mol_type = other DNA
tgttttctgctaactgaaaa

SEQ ID NO: 97461 - DNA, 20 bp, synthetic construct
  source 1..20: mol_type = other DNA
atgttttctgctaactgaaa

SEQ ID NO: 97462 - DNA, 20 bp, synthetic construct
  source 1..20: mol_type = other DNA
aatgttttctgctaactgaa

SEQ ID NO: 97463 - DNA, 20 bp, synthetic construct
  source 1..20: mol_type = other DNA
aaatgttttctgctaactga

SEQ ID NO: 97464 - DNA, 20 bp, synthetic construct
  source 1..20: mol_type = other DNA
aaaatgttttctgctaactg

SEQ ID NO: 97465 - DNA, 20 bp, synthetic construct
  source 1..20: mol_type = other DNA
taaaatgttttctgctaact

SEQ ID NO: 97466 - DNA, 20 bp, synthetic construct
  source 1..20: mol_type = other DNA
ctaaaatgttttctgctaac

SEQ ID NO: 97467 - DNA, 20 bp, synthetic construct
  source 1..20: mol_type = other DNA
gctaaaatgttttctgctaa

SEQ ID NO: 97468 - DNA, 20 bp, synthetic construct
  source 1..20: mol_type = other DNA
agctaaaatgttttctgcta

SEQ ID NO: 97469 - DNA, 20 bp, synthetic construct
  source 1..20: mol_type = other DNA
tagctaaaatgttttctgct

SEQ ID NO: 97470 - DNA, 20 bp, synthetic construct
  source 1..20: mol_type = other DNA
atagctaaaatgttttctgc

SEQ ID NO: 97471 - DNA, 20 bp, synthetic construct
  source 1..20: mol_type = other DNA
gatagctaaaatgttttctg

SEQ ID NO: 97472 - DNA, 20 bp, synthetic construct
  source 1..20: mol_type = other DNA
tgatagctaaaatgttttct

SEQ ID NO: 97473 - DNA, 20 bp, synthetic construct
  source 1..20: mol_type = other DNA
ctgatagctaaaatgttttc

SEQ ID NO: 97474 - DNA, 20 bp, synthetic construct
  source 1..20: mol_type = other DNA
gctgatagctaaaatgtttt

SEQ ID NO: 97475 - DNA, 20 bp, synthetic construct
  source 1..20: mol_type = other DNA
tgctgatagctaaaatgttt

SEQ ID NO: 97476 - DNA, 20 bp, synthetic construct
  source 1..20: mol_type = other DNA
gtgctgatagctaaaatgtt

SEQ ID NO: 97477 - DNA, 20 bp, synthetic construct
  source 1..20: mol_type = other DNA
tgtgctgatagctaaaatgt

SEQ ID NO: 97478 - DNA, 20 bp, synthetic construct
  source 1..20: mol_type = other DNA
ttgtgctgatagctaaaatg

SEQ ID NO: 97479 - DNA, 20 bp, synthetic construct
  source 1..20: mol_type = other DNA
gttgtgctgatagctaaaat

SEQ ID NO: 97480 - DNA, 20 bp, synthetic construct
  source 1..20: mol_type = other DNA
agttgtgctgatagctaaaa

SEQ ID NO: 97481 - DNA, 20 bp, synthetic construct
  source 1..20: mol_type = other DNA
aagttgtgctgatagctaaa

SEQ ID NO: 97482 - DNA, 20 bp, synthetic construct
  source 1..20: mol_type = other DNA
aaagttgtgctgatagctaa

SEQ ID NO: 97483 - DNA, 20 bp, synthetic construct
  source 1..20: mol_type = other DNA
gaaagttgtgctgatagcta

SEQ ID NO: 97484 - DNA, 20 bp, synthetic construct
  source 1..20: mol_type = other DNA
agaaagttgtgctgatagct

SEQ ID NO: 97485 - DNA, 20 bp, synthetic construct
  source 1..20: mol_type = other DNA
cagaaagttgtgctgatagc

SEQ ID NO: 97486 - DNA, 20 bp, synthetic construct
  source 1..20: mol_type = other DNA
acagaaagttgtgctgatag

SEQ ID NO: 97487 - DNA, 20 bp, synthetic construct
  source 1..20: mol_type = other DNA
tacagaaagttgtgctgata

SEQ ID NO: 97488 - DNA, 20 bp, synthetic construct
  source 1..20: mol_type = other DNA
ttacagaaagttgtgctgat

SEQ ID NO: 97489 - DNA, 20 bp, synthetic construct
  source 1..20: mol_type = other DNA
tttacagaaagttgtgctga

SEQ ID NO: 97490 - DNA, 20 bp, synthetic construct
  source 1..20: mol_type = other DNA
gtttacagaaagttgtgctg

SEQ ID NO: 97491 - DNA, 20 bp, synthetic construct
  source 1..20: mol_type = other DNA
ggtttacagaaagttgtgct

SEQ ID NO: 97492 - DNA, 20 bp, synthetic construct
  source 1..20: mol_type = other DNA
aggtttacagaaagttgtgc

SEQ ID NO: 97493 - DNA, 20 bp, synthetic construct
  source 1..20: mol_type = other DNA
aaggtttacagaaagttgtg

SEQ ID NO: 97494 - DNA, 20 bp, synthetic construct
  source 1..20: mol_type = other DNA
gaaggtttacagaaagttgt

SEQ ID NO: 97495 - DNA, 20 bp, synthetic construct
  source 1..20: mol_type = other DNA
tgaaggtttacagaaagttg

SEQ ID NO: 97496 - DNA, 20 bp, synthetic construct
  source 1..20: mol_type = other DNA
atgaaggtttacagaaagtt

SEQ ID NO: 97497 - DNA, 20 bp, synthetic construct
  source 1..20: mol_type = other DNA
aatgaaggtttacagaaagt

SEQ ID NO: 97498 - DNA, 20 bp, synthetic construct
  source 1..20: mol_type = other DNA
taatgaaggtttacagaaag

SEQ ID NO: 97499 - DNA, 20 bp, synthetic construct
  source 1..20: mol_type = other DNA
ttaatgaaggtttacagaaa

SEQ ID NO: 97500 - DNA, 20 bp, synthetic construct
  source 1..20: mol_type = other DNA
attaatgaaggtttacagaa

SEQ ID NO: 97501 - DNA, 20 bp, synthetic construct
  source 1..20: mol_type = other DNA
cattaatgaaggtttacaga

SEQ ID NO: 97502 - DNA, 20 bp, synthetic construct
  source 1..20: mol_type = other DNA
gcattaatgaaggtttacag

SEQ ID NO: 97503 - DNA, 20 bp, synthetic construct
  source 1..20: mol_type = other DNA
agcattaatgaaggtttaca

SEQ ID NO: 97504 - DNA, 20 bp, synthetic construct
  source 1..20: mol_type = other DNA
aagcattaatgaaggtttac

SEQ ID NO: 97505 - DNA, 20 bp, synthetic construct
  source 1..20: mol_type = other DNA
caagcattaatgaaggttta

SEQ ID NO: 97506 - DNA, 20 bp, synthetic construct
  source 1..20: mol_type = other DNA
tcaagcattaatgaaggttt

SEQ ID NO: 97507 - DNA, 20 bp, synthetic construct
  source 1..20: mol_type = other DNA
gtcaagcattaatgaaggtt

SEQ ID NO: 97508 - DNA, 20 bp, synthetic construct
  source 1..20: mol_type = other DNA
agtcaagcattaatgaaggt

SEQ ID NO: 97509 - DNA, 20 bp, synthetic construct
  source 1..20: mol_type = other DNA
aagtcaagcattaatgaagg

SEQ ID NO: 97510 - DNA, 20 bp, synthetic construct
  source 1..20: mol_type = other DNA
taagtcaagcattaatgaag

SEQ ID NO: 97511 - DNA, 20 bp, synthetic construct
  source 1..20: mol_type = other DNA
ttaagtcaagcattaatgaa

SEQ ID NO: 97512 - DNA, 20 bp, synthetic construct
  source 1..20: mol_type = other DNA
tttaagtcaagcattaatga

SEQ ID NO: 97513 - DNA, 20 bp, synthetic construct
  source 1..20: mol_type = other DNA
atttaagtcaagcattaatg

SEQ ID NO: 97514 - DNA, 20 bp, synthetic construct
  source 1..20: mol_type = other DNA
aatttaagtcaagcattaat

SEQ ID NO: 97515 - DNA, 20 bp, synthetic construct
  source 1..20: mol_type = other DNA
gaatttaagtcaagcattaa

SEQ ID NO: 97516 - DNA, 20 bp, synthetic construct
  source 1..20: mol_type = other DNA
ggaatttaagtcaagcatta

SEQ ID NO: 97517 - DNA, 20 bp, synthetic construct
  source 1..20: mol_type = other DNA
tggaatttaagtcaagcatt

SEQ ID NO: 97518 - DNA, 20 bp, synthetic construct
  source 1..20: mol_type = other DNA
ttggaatttaagtcaagcat

SEQ ID NO: 97519 - DNA, 20 bp, synthetic construct
  source 1..20: mol_type = other DNA
cttggaatttaagtcaagca

SEQ ID NO: 97520 - DNA, 20 bp, synthetic construct
  source 1..20: mol_type = other DNA
tcttggaatttaagtcaagc

SEQ ID NO: 97521 - DNA, 20 bp, synthetic construct
  source 1..20: mol_type = other DNA
ttcttggaatttaagtcaag

SEQ ID NO: 97522 - DNA, 20 bp, synthetic construct
  source 1..20: mol_type = other DNA
cttcttggaatttaagtcaa

SEQ ID NO: 97523 - DNA, 20 bp, synthetic construct
  source 1..20: mol_type = other DNA
ccttcttggaatttaagtca

SEQ ID NO: 97524 - DNA, 20 bp, synthetic construct
  source 1..20: mol_type = other DNA
tccttcttggaatttaagtc

SEQ ID NO: 97525 - DNA, 20 bp, synthetic construct
  source 1..20: mol_type = other DNA
ctccttcttggaatttaagt

SEQ ID NO: 97526 - DNA, 20 bp, synthetic construct
  source 1..20: mol_type = other DNA
gctccttcttggaatttaag

SEQ ID NO: 97527 - DNA, 20 bp, synthetic construct
  source 1..20: mol_type = other DNA
tgctccttcttggaatttaa

SEQ ID NO: 97528 - DNA, 20 bp, synthetic construct
  source 1..20: mol_type = other DNA
ttgctccttcttggaattta

SEQ ID NO: 97529 - DNA, 20 bp, synthetic construct
  source 1..20: mol_type = other DNA
gttgctccttcttggaattt

SEQ ID NO: 97530 - DNA, 20 bp, synthetic construct
  source 1..20: mol_type = other DNA
tgttgctccttcttggaatt

SEQ ID NO: 97531 - DNA, 20 bp, synthetic construct
  source 1..20: mol_type = other DNA
atgttgctccttcttggaat

SEQ ID NO: 97532 - DNA, 20 bp, synthetic construct
  source 1..20: mol_type = other DNA
tatgttgctccttcttggaa

SEQ ID NO: 97533 - DNA, 20 bp, synthetic construct
  source 1..20: mol_type = other DNA
ttatgttgctccttcttgga

SEQ ID NO: 97534 - DNA, 20 bp, synthetic construct
  source 1..20: mol_type = other DNA
tttatgttgctccttcttgg

SEQ ID NO: 97535 - DNA, 20 bp, synthetic construct
  source 1..20: mol_type = other DNA
ttttatgttgctccttcttg

SEQ ID NO: 97536 - DNA, 20 bp, synthetic construct
  source 1..20: mol_type = other DNA
tttttatgttgctccttctt

SEQ ID NO: 97537 - DNA, 20 bp, synthetic construct
  source 1..20: mol_type = other DNA
ctttttatgttgctccttct

SEQ ID NO: 97538 - DNA, 20 bp, synthetic construct
  source 1..20: mol_type = other DNA
actttttatgttgctccttc

SEQ ID NO: 97539 - DNA, 20 bp, synthetic construct
  source 1..20: mol_type = other DNA
gactttttatgttgctcctt

SEQ ID NO: 97540 - DNA, 20 bp, synthetic construct
  source 1..20: mol_type = other DNA
agactttttatgttgctcct

SEQ ID NO: 97541 - DNA, 20 bp, synthetic construct
  source 1..20: mol_type = other DNA
aagactttttatgttgctcc

SEQ ID NO: 97542 - DNA, 20 bp, synthetic construct
  source 1..20: mol_type = other DNA
taagactttttatgttgctc

SEQ ID NO: 97543 - DNA, 20 bp, synthetic construct
  source 1..20: mol_type = other DNA
ataagactttttatgttgct

SEQ ID NO: 97544 - DNA, 20 bp, synthetic construct
  source 1..20: mol_type = other DNA
gataagactttttatgttgc

SEQ ID NO: 97545 - DNA, 20 bp, synthetic construct
  source 1..20: mol_type = other DNA
agataagactttttatgttg

SEQ ID NO: 97546 - DNA, 20 bp, synthetic construct
  source 1..20: mol_type = other DNA
gagataagactttttatgtt

SEQ ID NO: 97547 - DNA, 20 bp, synthetic construct
  source 1..20: mol_type = other DNA
agagataagactttttatgt

SEQ ID NO: 97548 - DNA, 20 bp, synthetic construct
  source 1..20: mol_type = other DNA
aagagataagactttttatg

SEQ ID NO: 97549 - DNA, 20 bp, synthetic construct
  source 1..20: mol_type = other DNA
aaagagataagactttttat

SEQ ID NO: 97550 - DNA, 20 bp, synthetic construct
  source 1..20: mol_type = other DNA
taaagagataagacttttta

SEQ ID NO: 97551 - DNA, 20 bp, synthetic construct
  source 1..20: mol_type = other DNA
ctaaagagataagacttttt

SEQ ID NO: 97552 - DNA, 20 bp, synthetic construct
  source 1..20: mol_type = other DNA
cctaaagagataagactttt

SEQ ID NO: 97553 - DNA, 20 bp, synthetic construct
  source 1..20: mol_type = other DNA
tcctaaagagataagacttt

SEQ ID NO: 97554 - DNA, 20 bp, synthetic construct
  source 1..20: mol_type = other DNA
ctcctaaagagataagactt

SEQ ID NO: 97555 - DNA, 20 bp, synthetic construct
  source 1..20: mol_type = other DNA
actcctaaagagataagact

SEQ ID NO: 97556 - DNA, 20 bp, synthetic construct
  source 1..20: mol_type = other DNA
aactcctaaagagataagac

SEQ ID NO: 97557 - DNA, 20 bp, synthetic construct
  source 1..20: mol_type = other DNA
aaactcctaaagagataaga

SEQ ID NO: 97558 - DNA, 20 bp, synthetic construct
  source 1..20: mol_type = other DNA
aaaactcctaaagagataag

SEQ ID NO: 97559 - DNA, 20 bp, synthetic construct
  source 1..20: mol_type = other DNA
taaaactcctaaagagataa

SEQ ID NO: 97560 - DNA, 20 bp, synthetic construct
  source 1..20: mol_type = other DNA
ctaaaactcctaaagagata

SEQ ID NO: 97561 - DNA, 20 bp, synthetic construct
  source 1..20: mol_type = other DNA
actaaaactcctaaagagat

SEQ ID NO: 97562 - DNA, 20 bp, synthetic construct
  source 1..20: mol_type = other DNA
gactaaaactcctaaagaga

SEQ ID NO: 97563 - DNA, 20 bp, synthetic construct
  source 1..20: mol_type = other DNA
agactaaaactcctaaagag

SEQ ID NO: 97564 - DNA, 20 bp, synthetic construct
  source 1..20: mol_type = other DNA
aagactaaaactcctaaaga

SEQ ID NO: 97565 - DNA, 20 bp, synthetic construct
  source 1..20: mol_type = other DNA
taagactaaaactcctaaag

SEQ ID NO: 97566 - DNA, 20 bp, synthetic construct
  source 1..20: mol_type = other DNA
gtaagactaaaactcctaaa

SEQ ID NO: 97567 - DNA, 20 bp, synthetic construct
  source 1..20: mol_type = other DNA
agtaagactaaaactcctaa

SEQ ID NO: 97568 - DNA, 20 bp, synthetic construct
  source 1..20: mol_type = other DNA
tagtaagactaaaactccta

SEQ ID NO: 97569 - DNA, 20 bp, synthetic construct
  source 1..20: mol_type = other DNA
gtagtaagactaaaactcct

SEQ ID NO: 97570 - DNA, 20 bp, synthetic construct
  source 1..20: mol_type = other DNA
agtagtaagactaaaactcc

SEQ ID NO: 97571 - DNA, 20 bp, synthetic construct
  source 1..20: mol_type = other DNA
aagtagtaagactaaaactc

SEQ ID NO: 97572 - DNA, 20 bp, synthetic construct
  source 1..20: mol_type = other DNA
aaagtagtaagactaaaact

SEQ ID NO: 97573 - DNA, 20 bp, synthetic construct
  source 1..20: mol_type = other DNA
aaaagtagtaagactaaaac

SEQ ID NO: 97574 - DNA, 20 bp, synthetic construct
  source 1..20: mol_type = other DNA
taaaagtagtaagactaaaa

SEQ ID NO: 97575 - DNA, 20 bp, synthetic construct
  source 1..20: mol_type = other DNA
ctaaaagtagtaagactaaa

SEQ ID NO: 97576 - DNA, 20 bp, synthetic construct
  source 1..20: mol_type = other DNA
cctaaaagtagtaagactaa

SEQ ID NO: 97577 - DNA, 20 bp, synthetic construct
  source 1..20: mol_type = other DNA
acctaaaagtagtaagacta

SEQ ID NO: 97578 - DNA, 20 bp, synthetic construct
  source 1..20: mol_type = other DNA
cacctaaaagtagtaagact

SEQ ID NO: 97579 - DNA, 20 bp, synthetic construct
  source 1..20: mol_type = other DNA
gcacctaaaagtagtaagac

SEQ ID NO: 97580 - DNA, 20 bp, synthetic construct
  source 1..20: mol_type = other DNA
ggcacctaaaagtagtaaga

SEQ ID NO: 97581 - DNA, 20 bp, synthetic construct
  source 1..20: mol_type = other DNA
aggcacctaaaagtagtaag

SEQ ID NO: 97582 - DNA, 20 bp, synthetic construct
  source 1..20: mol_type = other DNA
caggcacctaaaagtagtaa

SEQ ID NO: 97583 - DNA, 20 bp, synthetic construct
  source 1..20: mol_type = other DNA
tcaggcacctaaaagtagta

SEQ ID NO: 97584 - DNA, 20 bp, synthetic construct
  source 1..20: mol_type = other DNA
ttcaggcacctaaaagtagt

SEQ ID NO: 97585 - DNA, 20 bp, synthetic construct
  source 1..20: mol_type = other DNA
attcaggcacctaaaagtag

SEQ ID NO: 97586 - DNA, 20 bp, synthetic construct
  source 1..20: mol_type = other DNA
tattcaggcacctaaaagta

SEQ ID NO: 97587 - DNA, 20 bp, synthetic construct
  source 1..20: mol_type = other DNA
ttattcaggcacctaaaagt

SEQ ID NO: 97588 - DNA, 20 bp, synthetic construct
  source 1..20: mol_type = other DNA
gttattcaggcacctaaaag

SEQ ID NO: 97589 - DNA, 20 bp, synthetic construct
  source 1..20: mol_type = other DNA
ggttattcaggcacctaaaa

SEQ ID NO: 97590 - DNA, 20 bp, synthetic construct
  source 1..20: mol_type = other DNA
tggttattcaggcacctaaa

SEQ ID NO: 97591 - DNA, 20 bp, synthetic construct
  source 1..20: mol_type = other DNA
ttggttattcaggcacctaa

SEQ ID NO: 97592 - DNA, 20 bp, synthetic construct
  source 1..20: mol_type = other DNA
tttggttattcaggcaccta

SEQ ID NO: 97593 - DNA, 20 bp, synthetic construct
  source 1..20: mol_type = other DNA
atttggttattcaggcacct

SEQ ID NO: 97594 - DNA, 20 bp, synthetic construct
  source 1..20: mol_type = other DNA
catttggttattcaggcacc

SEQ ID NO: 97595 - DNA, 20 bp, synthetic construct
  source 1..20: mol_type = other DNA
acatttggttattcaggcac

SEQ ID NO: 97596 - DNA, 20 bp, synthetic construct
  source 1..20: mol_type = other DNA
tacatttggttattcaggca

SEQ ID NO: 97597 - DNA, 20 bp, synthetic construct
  source 1..20: mol_type = other DNA
atacatttggttattcaggc

SEQ ID NO: 97598 - DNA, 20 bp, synthetic construct
  source 1..20: mol_type = other DNA
aatacatttggttattcagg

SEQ ID NO: 97599 - DNA, 20 bp, synthetic construct
  source 1..20: mol_type = other DNA
taatacatttggttattcag

SEQ ID NO: 97600 - DNA, 20 bp, synthetic construct
  source 1..20: mol_type = other DNA
ataatacatttggttattca

SEQ ID NO: 97601 - DNA, 20 bp, synthetic construct
  source 1..20: mol_type = other DNA
aataatacatttggttattc

SEQ ID NO: 97602 - DNA, 20 bp, synthetic construct
  source 1..20: mol_type = other DNA
aaataatacatttggttatt

SEQ ID NO: 97603 - DNA, 20 bp, synthetic construct
  source 1..20: mol_type = other DNA
taaataatacatttggttat

SEQ ID NO: 97604 - DNA, 20 bp, synthetic construct
  source 1..20: mol_type = other DNA
ctaaataatacatttggtta

SEQ ID NO: 97605 - DNA, 20 bp, synthetic construct
  source 1..20: mol_type = other DNA
gctaaataatacatttggtt

SEQ ID NO: 97606 - DNA, 20 bp, synthetic construct
  source 1..20: mol_type = other DNA
ggctaaataatacatttggt

SEQ ID NO: 97607 - DNA, 20 bp, synthetic construct
  source 1..20: mol_type = other DNA
aggctaaataatacatttgg

SEQ ID NO: 97608 - DNA, 20 bp, synthetic construct
  source 1..20: mol_type = other DNA
gaggctaaataatacatttg

SEQ ID NO: 97609 - DNA, 20 bp, synthetic construct
  source 1..20: mol_type = other DNA
agaggctaaataatacattt

SEQ ID NO: 97610 - DNA, 20 bp, synthetic construct
  source 1..20: mol_type = other DNA
aagaggctaaataatacatt

SEQ ID NO: 97611 - DNA, 20 bp, synthetic construct
  source 1..20: mol_type = other DNA
taagaggctaaataatacat

SEQ ID NO: 97612 - DNA, 20 bp, synthetic construct
  source 1..20: mol_type = other DNA
gtaagaggctaaataataca

SEQ ID NO: 97613 - DNA, 20 bp, synthetic construct
  source 1..20: mol_type = other DNA
agtaagaggctaaataatac

SEQ ID NO: 97614 - DNA, 20 bp, synthetic construct
  source 1..20: mol_type = other DNA
tagtaagaggctaaataata

SEQ ID NO: 97615 - DNA, 20 bp, synthetic construct
  source 1..20: mol_type = other DNA
ttagtaagaggctaaataat

SEQ ID NO: 97616 - DNA, 20 bp, synthetic construct
  source 1..20: mol_type = other DNA
attagtaagaggctaaataa

SEQ ID NO: 97617 - DNA, 20 bp, synthetic construct
  source 1..20: mol_type = other DNA
tattagtaagaggctaaata

SEQ ID NO: 97618 - DNA, 20 bp, synthetic construct
  source 1..20: mol_type = other DNA
ttattagtaagaggctaaat

SEQ ID NO: 97619 - DNA, 20 bp, synthetic construct
  source 1..20: mol_type = other DNA
gttattagtaagaggctaaa

SEQ ID NO: 97620 - DNA, 20 bp, synthetic construct
  source 1..20: mol_type = other DNA
agttattagtaagaggctaa

SEQ ID NO: 97621 - DNA, 20 bp, synthetic construct
  source 1..20: mol_type = other DNA
gagttattagtaagaggcta

SEQ ID NO: 97622 - DNA, 20 bp, synthetic construct
  source 1..20: mol_type = other DNA
ggagttattagtaagaggct

SEQ ID NO: 97623 - DNA, 20 bp, synthetic construct
  source 1..20: mol_type = other DNA
aggagttattagtaagaggc

SEQ ID NO: 97624 - DNA, 20 bp, synthetic construct
  source 1..20: mol_type = other DNA
aaggagttattagtaagagg

SEQ ID NO: 97625 - DNA, 20 bp, synthetic construct
  source 1..20: mol_type = other DNA
caaggagttattagtaagag

SEQ ID NO: 97626 - DNA, 20 bp, synthetic construct
  source 1..20: mol_type = other DNA
tcaaggagttattagtaaga

SEQ ID NO: 97627 - DNA, 20 bp, synthetic construct
  source 1..20: mol_type = other DNA
atcaaggagttattagtaag

SEQ ID NO: 97628 - DNA, 20 bp, synthetic construct
  source 1..20: mol_type = other DNA
gatcaaggagttattagtaa

SEQ ID NO: 97629 - DNA, 20 bp, synthetic construct
  source 1..20: mol_type = other DNA
ggatcaaggagttattagta

SEQ ID NO: 97630 - DNA, 20 bp, synthetic construct
  source 1..20: mol_type = other DNA
tggatcaaggagttattagt

SEQ ID NO: 97631 - DNA, 20 bp, synthetic construct
  source 1..20: mol_type = other DNA
atggatcaaggagttattag

SEQ ID NO: 97632 - DNA, 20 bp, synthetic construct
  source 1..20: mol_type = other DNA
tatggatcaaggagttatta

SEQ ID NO: 97633 - DNA, 20 bp, synthetic construct
  source 1..20: mol_type = other DNA
ctatggatcaaggagttatt

SEQ ID NO: 97634 - DNA, 20 bp, synthetic construct
  source 1..20: mol_type = other DNA
cctatggatcaaggagttat

SEQ ID NO: 97635 - DNA, 20 bp, synthetic construct
  source 1..20: mol_type = other DNA
ccctatggatcaaggagtta

SEQ ID NO: 97636 - DNA, 20 bp, synthetic construct
  source 1..20: mol_type = other DNA
cccctatggatcaaggagtt

SEQ ID NO: 97637 - DNA, 20 bp, synthetic construct
  source 1..20: mol_type = other DNA
gcccctatggatcaaggagt

SEQ ID NO: 97638 - DNA, 20 bp, synthetic construct
  source 1..20: mol_type = other DNA
tgcccctatggatcaaggag

SEQ ID NO: 97639 - DNA, 20 bp, synthetic construct
  source 1..20: mol_type = other DNA
atgcccctatggatcaagga

SEQ ID NO: 97640 - DNA, 20 bp, synthetic construct
  source 1..20: mol_type = other DNA
tatgcccctatggatcaagg

SEQ ID NO: 97641 - DNA, 20 bp, synthetic construct
  source 1..20: mol_type = other DNA
gtatgcccctatggatcaag

SEQ ID NO: 97642 - DNA, 20 bp, synthetic construct
  source 1..20: mol_type = other DNA
ggtatgcccctatggatcaa

SEQ ID NO: 97643 - DNA, 20 bp, synthetic construct
  source 1..20: mol_type = other DNA
tggtatgcccctatggatca

SEQ ID NO: 97644 - DNA, 20 bp, synthetic construct
  source 1..20: mol_type = other DNA
ctggtatgcccctatggatc

SEQ ID NO: 97645 - DNA, 20 bp, synthetic construct
  source 1..20: mol_type = other DNA
cctggtatgcccctatggat

SEQ ID NO: 97646 - DNA, 20 bp, synthetic construct
  source 1..20: mol_type = other DNA
tcctggtatgcccctatgga

SEQ ID NO: 97647 - DNA, 20 bp, synthetic construct
  source 1..20: mol_type = other DNA
ttcctggtatgcccctatgg

SEQ ID NO: 97648 - DNA, 20 bp, synthetic construct
  source 1..20: mol_type = other DNA
cttcctggtatgcccctatg

SEQ ID NO: 97649 - DNA, 20 bp, synthetic construct
  source 1..20: mol_type = other DNA
tcttcctggtatgcccctat

SEQ ID NO: 97650 - DNA, 20 bp, synthetic construct
  source 1..20: mol_type = other DNA
ttcttcctggtatgccccta

SEQ ID NO: 97651 - DNA, 20 bp, synthetic construct
  source 1..20: mol_type = other DNA
tttcttcctggtatgcccct

SEQ ID NO: 97652 - DNA, 20 bp, synthetic construct
  source 1..20: mol_type = other DNA
ttttcttcctggtatgcccc

SEQ ID NO: 97653 - DNA, 20 bp, synthetic construct
  source 1..20: mol_type = other DNA
cttttcttcctggtatgccc

SEQ ID NO: 97654 - DNA, 20 bp, synthetic construct
  source 1..20: mol_type = other DNA
tcttttcttcctggtatgcc

SEQ ID NO: 97655 - DNA, 20 bp, synthetic construct
  source 1..20: mol_type = other DNA
ttcttttcttcctggtatgc

SEQ ID NO: 97656 - DNA, 20 bp, synthetic construct
  source 1..20: mol_type = other DNA
cttcttttcttcctggtatg

SEQ ID NO: 97657 - DNA, 20 bp, synthetic construct
  source 1..20: mol_type = other DNA
acttcttttcttcctggtat

SEQ ID NO: 97658 - DNA, 20 bp, synthetic construct
  source 1..20: mol_type = other DNA
cacttcttttcttcctggta

SEQ ID NO: 97659 - DNA, 20 bp, synthetic construct
  source 1..20: mol_type = other DNA
ccacttcttttcttcctggt

SEQ ID NO: 97660 - DNA, 20 bp, synthetic construct
  source 1..20: mol_type = other DNA
accacttcttttcttcctgg

SEQ ID NO: 97661 - DNA, 20 bp, synthetic construct
  source 1..20: mol_type = other DNA
aaccacttcttttcttcctg

SEQ ID NO: 97662 - DNA, 20 bp, synthetic construct
  source 1..20: mol_type = other DNA
aaaccacttcttttcttcct

SEQ ID NO: 97663 - DNA, 20 bp, synthetic construct
  source 1..20: mol_type = other DNA
aaaaccacttcttttcttcc

SEQ ID NO: 97664 - DNA, 20 bp, synthetic construct
  source 1..20: mol_type = other DNA
aaaaaccacttcttttcttc

SEQ ID NO: 97665 - DNA, 20 bp, synthetic construct
  source 1..20: mol_type = other DNA
taaaaaccacttcttttctt

SEQ ID NO: 97666 - DNA, 20 bp, synthetic construct
  source 1..20: mol_type = other DNA
ttaaaaaccacttcttttct

SEQ ID NO: 97667 - DNA, 20 bp, synthetic construct
  source 1..20: mol_type = other DNA
tttaaaaaccacttcttttc

SEQ ID NO: 97668 - DNA, 20 bp, synthetic construct
  source 1..20: mol_type = other DNA
ttttaaaaaccacttctttt

SEQ ID NO: 97669 - DNA, 20 bp, synthetic construct
  source 1..20: mol_type = other DNA
tttttaaaaaccacttcttt

SEQ ID NO: 97670 - DNA, 20 bp, synthetic construct
  source 1..20: mol_type = other DNA
ttttttaaaaaccacttctt

SEQ ID NO: 97671 - DNA, 20 bp, synthetic construct
  source 1..20: mol_type = other DNA
attttttaaaaaccacttct

SEQ ID NO: 97672 - DNA, 20 bp, synthetic construct
  source 1..20: mol_type = other DNA
cattttttaaaaaccacttc

SEQ ID NO: 97673 - DNA, 20 bp, synthetic construct
  source 1..20: mol_type = other DNA
tcattttttaaaaaccactt

SEQ ID NO: 97674 - DNA, 20 bp, synthetic construct
  source 1..20: mol_type = other DNA
ctcattttttaaaaaccact

SEQ ID NO: 97675 - DNA, 20 bp, synthetic construct
  source 1..20: mol_type = other DNA
tctcattttttaaaaaccac

SEQ ID NO: 97676 - DNA, 20 bp, synthetic construct
  source 1..20: mol_type = other DNA
ctctcattttttaaaaacca

SEQ ID NO: 97677 - DNA, 20 bp, synthetic construct
  source 1..20: mol_type = other DNA
actctcattttttaaaaacc

SEQ ID NO: 97678 - DNA, 20 bp, synthetic construct
  source 1..20: mol_type = other DNA
cactctcattttttaaaaac

SEQ ID NO: 97679 - DNA, 20 bp, synthetic construct
  source 1..20: mol_type = other DNA
ccactctcattttttaaaaa

SEQ ID NO: 97680 - DNA, 20 bp, synthetic construct
  source 1..20: mol_type = other DNA
cccactctcattttttaaaa

SEQ ID NO: 97681 - DNA, 20 bp, synthetic construct
  source 1..20: mol_type = other DNA
gcccactctcattttttaaa

SEQ ID NO: 97682 - DNA, 20 bp, synthetic construct
  source 1..20: mol_type = other DNA
ggcccactctcattttttaa

SEQ ID NO: 97683 - DNA, 20 bp, synthetic construct
  source 1..20: mol_type = other DNA
cggcccactctcatttttta

SEQ ID NO: 97684 - DNA, 20 bp, synthetic construct
  source 1..20: mol_type = other DNA
ccggcccactctcatttttt

SEQ ID NO: 97685 - DNA, 20 bp, synthetic construct
  source 1..20: mol_type = other DNA
cccggcccactctcattttt

SEQ ID NO: 97686 - DNA, 20 bp, synthetic construct
  source 1..20: mol_type = other DNA
gcccggcccactctcatttt

SEQ ID NO: 97687 - DNA, 20 bp, synthetic construct
  source 1..20: mol_type = other DNA
tgcccggcccactctcattt

SEQ ID NO: 97688 - DNA, 20 bp, synthetic construct
  source 1..20: mol_type = other DNA
gtgcccggcccactctcatt

SEQ ID NO: 97689 - DNA, 20 bp, synthetic construct
  source 1..20: mol_type = other DNA
cgtgcccggcccactctcat

SEQ ID NO: 97690 - DNA, 20 bp, synthetic construct
  source 1..20: mol_type = other DNA
ccgtgcccggcccactctca

SEQ ID NO: 97691 - DNA, 20 bp, synthetic construct
  source 1..20: mol_type = other DNA
accgtgcccggcccactctc

SEQ ID NO: 97692 - DNA, 20 bp, synthetic construct
  source 1..20: mol_type = other DNA
caccgtgcccggcccactct

SEQ ID NO: 97693 - DNA, 20 bp, synthetic construct
  source 1..20: mol_type = other DNA
ccaccgtgcccggcccactc

SEQ ID NO: 97694 - DNA, 20 bp, synthetic construct
  source 1..20: mol_type = other DNA
gccaccgtgcccggcccact

SEQ ID NO: 97695 - DNA, 20 bp, synthetic construct
  source 1..20: mol_type = other DNA
agccaccgtgcccggcccac

SEQ ID NO: 97696 - DNA, 20 bp, synthetic construct
  source 1..20: mol_type = other DNA
cagccaccgtgcccggccca

SEQ ID NO: 97697 - DNA, 20 bp, synthetic construct
  source 1..20: mol_type = other DNA
tcagccaccgtgcccggccc

SEQ ID NO: 97698 - DNA, 20 bp, synthetic construct
  source 1..20: mol_type = other DNA
atcagccaccgtgcccggcc

SEQ ID NO: 97699 - DNA, 20 bp, synthetic construct
  source 1..20: mol_type = other DNA
tatcagccaccgtgcccggc

SEQ ID NO: 97700 - DNA, 20 bp, synthetic construct
  source 1..20: mol_type = other DNA
gtatcagccaccgtgcccgg

SEQ ID NO: 97701 - DNA, 20 bp, synthetic construct
  source 1..20: mol_type = other DNA
ggtatcagccaccgtgcccg

SEQ ID NO: 97702 - DNA, 20 bp, synthetic construct
  source 1..20: mol_type = other DNA
aggtatcagccaccgtgccc

SEQ ID NO: 97703 - DNA, 20 bp, synthetic construct
  source 1..20: mol_type = other DNA
taggtatcagccaccgtgcc

SEQ ID NO: 97704 - DNA, 20 bp, synthetic construct
  source 1..20: mol_type = other DNA
ataggtatcagccaccgtgc

SEQ ID NO: 97705 - DNA, 20 bp, synthetic construct
  source 1..20: mol_type = other DNA
tataggtatcagccaccgtg

SEQ ID NO: 97706 - DNA, 20 bp, synthetic construct
  source 1..20: mol_type = other DNA
ttataggtatcagccaccgt

SEQ ID NO: 97707 - DNA, 20 bp, synthetic construct
  source 1..20: mol_type = other DNA
attataggtatcagccaccg

SEQ ID NO: 97708 - DNA, 20 bp, synthetic construct
  source 1..20: mol_type = other DNA
gattataggtatcagccacc

SEQ ID NO: 97709 - DNA, 20 bp, synthetic construct
  source 1..20: mol_type = other DNA
ggattataggtatcagccac

SEQ ID NO: 97710 - DNA, 20 bp, synthetic construct
  source 1..20: mol_type = other DNA
aggattataggtatcagcca

SEQ ID NO: 97711 - DNA, 20 bp, synthetic construct
  source 1..20: mol_type = other DNA
taggattataggtatcagcc

SEQ ID NO: 97712 - DNA, 20 bp, synthetic construct
  source 1..20: mol_type = other DNA
ttaggattataggtatcagc

SEQ ID NO: 97713 - DNA, 20 bp, synthetic construct
  source 1..20: mol_type = other DNA
gttaggattataggtatcag

SEQ ID NO: 97714 - DNA, 20 bp, synthetic construct
  source 1..20: mol_type = other DNA
tgttaggattataggtatca

SEQ ID NO: 97715 - DNA, 20 bp, synthetic construct
  source 1..20: mol_type = other DNA
gtgttaggattataggtatc

SEQ ID NO: 97716 - DNA, 20 bp, synthetic construct
  source 1..20: mol_type = other DNA
agtgttaggattataggtat

SEQ ID NO: 97717 - DNA, 20 bp, synthetic construct
  source 1..20: mol_type = other DNA
aagtgttaggattataggta

SEQ ID NO: 97718 - DNA, 20 bp, synthetic construct
  source 1..20: mol_type = other DNA
aaagtgttaggattataggt

SEQ ID NO: 97719 - DNA, 20 bp, synthetic construct
  source 1..20: mol_type = other DNA
caaagtgttaggattatagg

SEQ ID NO: 97720 - DNA, 20 bp, synthetic construct
  source 1..20: mol_type = other DNA
ccaaagtgttaggattatag

SEQ ID NO: 97721 - DNA, 20 bp, synthetic construct
  source 1..20: mol_type = other DNA
cccaaagtgttaggattata

SEQ ID NO: 97722 - DNA, 20 bp, synthetic construct
  source 1..20: mol_type = other DNA
tcccaaagtgttaggattat

SEQ ID NO: 97723 - DNA, 20 bp, synthetic construct
  source 1..20: mol_type = other DNA
ctcccaaagtgttaggatta

SEQ ID NO: 97724 - DNA, 20 bp, synthetic construct
  source 1..20: mol_type = other DNA
cctcccaaagtgttaggatt

SEQ ID NO: 97725 - DNA, 20 bp, synthetic construct
  source 1..20: mol_type = other DNA
gcctcccaaagtgttaggat

SEQ ID NO: 97726 - DNA, 20 bp, synthetic construct
  source 1..20: mol_type = other DNA
agcctcccaaagtgttagga

SEQ ID NO: 97727 - DNA, 20 bp, synthetic construct
  source 1..20: mol_type = other DNA
cagcctcccaaagtgttagg

SEQ ID NO: 97728 - DNA, 20 bp, synthetic construct
  source 1..20: mol_type = other DNA
tcagcctcccaaagtgttag

SEQ ID NO: 97729 - DNA, 20 bp, synthetic construct
  source 1..20: mol_type = other DNA
ctcagcctcccaaagtgtta

SEQ ID NO: 97730 - DNA, 20 bp, synthetic construct
  source 1..20: mol_type = other DNA
cctcagcctcccaaagtgtt

SEQ ID NO: 97731 - DNA, 20 bp, synthetic construct
  source 1..20: mol_type = other DNA
gcctcagcctcccaaagtgt

SEQ ID NO: 97732 - DNA, 20 bp, synthetic construct
  source 1..20: mol_type = other DNA
cgcctcagcctcccaaagtg

SEQ ID NO: 97733 - DNA, 20 bp, synthetic construct
  source 1..20: mol_type = other DNA
ccgcctcagcctcccaaagt

SEQ ID NO: 97734 - DNA, 20 bp, synthetic construct
  source 1..20: mol_type = other DNA
cccgcctcagcctcccaaag

SEQ ID NO: 97735 - DNA, 20 bp, synthetic construct
  source 1..20: mol_type = other DNA
acccgcctcagcctcccaaa

SEQ ID NO: 97736 - DNA, 20 bp, synthetic construct
  source 1..20: mol_type = other DNA
cacccgcctcagcctcccaa

SEQ ID NO: 97737 - DNA, 20 bp, synthetic construct
  source 1..20: mol_type = other DNA
ccacccgcctcagcctccca

SEQ ID NO: 97738 - DNA, 20 bp, synthetic construct
  source 1..20: mol_type = other DNA
tccacccgcctcagcctccc

SEQ ID NO: 97739 - DNA, 20 bp, synthetic construct
  source 1..20: mol_type = other DNA
atccacccgcctcagcctcc

SEQ ID NO: 97740 - DNA, 20 bp, synthetic construct
  source 1..20: mol_type = other DNA
gatccacccgcctcagcctc

SEQ ID NO: 97741 - DNA, 20 bp, synthetic construct
  source 1..20: mol_type = other DNA
tgatccacccgcctcagcct

SEQ ID NO: 97742 - DNA, 20 bp, synthetic construct
  source 1..20: mol_type = other DNA
gtgatccacccgcctcagcc

SEQ ID NO: 97743 - DNA, 20 bp, synthetic construct
  source 1..20: mol_type = other DNA
agtgatccacccgcctcagc

SEQ ID NO: 97744 - DNA, 20 bp, synthetic construct
  source 1..20: mol_type = other DNA
aagtgatccacccgcctcag

SEQ ID NO: 97745 - DNA, 20 bp, synthetic construct
  source 1..20: mol_type = other DNA
caagtgatccacccgcctca

SEQ ID NO: 97746 - DNA, 20 bp, synthetic construct
  source 1..20: mol_type = other DNA
tcaagtgatccacccgcctc

SEQ ID NO: 97747 - DNA, 20 bp, synthetic construct
  source 1..20: mol_type = other DNA
ctcaagtgatccacccgcct

SEQ ID NO: 97748 - DNA, 20 bp, synthetic construct
  source 1..20: mol_type = other DNA
cctcaagtgatccacccgcc

SEQ ID NO: 97749 - DNA, 20 bp, synthetic construct
  source 1..20: mol_type = other DNA
acctcaagtgatccacccgc

SEQ ID NO: 97750 - DNA, 20 bp, synthetic construct
  source 1..20: mol_type = other DNA
gacctcaagtgatccacccg

SEQ ID NO: 97751 - DNA, 20 bp, synthetic construct
  source 1..20: mol_type = other DNA
tgacctcaagtgatccaccc

SEQ ID NO: 97752 - DNA, 20 bp, synthetic construct
  source 1..20: mol_type = other DNA
ctgacctcaagtgatccacc

SEQ ID NO: 97753 - DNA, 20 bp, synthetic construct
  source 1..20: mol_type = other DNA
cctgacctcaagtgatccac

SEQ ID NO: 97754 - DNA, 20 bp, synthetic construct
  source 1..20: mol_type = other DNA
tcctgacctcaagtgatcca

SEQ ID NO: 97755 - DNA, 20 bp, synthetic construct
  source 1..20: mol_type = other DNA
ctcctgacctcaagtgatcc

SEQ ID NO: 97756 - DNA, 20 bp, synthetic construct
  source 1..20: mol_type = other DNA
actcctgacctcaagtgatc

SEQ ID NO: 97757 - DNA, 20 bp, synthetic construct
  source 1..20: mol_type = other DNA
aactcctgacctcaagtgat

SEQ ID NO: 97758 - DNA, 20 bp, synthetic construct
  source 1..20: mol_type = other DNA
aaactcctgacctcaagtga

SEQ ID NO: 97759 - DNA, 20 bp, synthetic construct
  source 1..20: mol_type = other DNA
caaactcctgacctcaagtg

SEQ ID NO: 97760 - DNA, 20 bp, synthetic construct
  source 1..20: mol_type = other DNA
tcaaactcctgacctcaagt

SEQ ID NO: 97761 - DNA, 20 bp, synthetic construct
  source 1..20: mol_type = other DNA
ctcaaactcctgacctcaag

SEQ ID NO: 97762 - DNA, 20 bp, synthetic construct
  source 1..20: mol_type = other DNA
tctcaaactcctgacctcaa

SEQ ID NO: 97763 - DNA, 20 bp, synthetic construct
  source 1..20: mol_type = other DNA
gtctcaaactcctgacctca

SEQ ID NO: 97764 - DNA, 20 bp, synthetic construct
  source 1..20: mol_type = other DNA
ggtctcaaactcctgacctc

SEQ ID NO: 97765 - DNA, 20 bp, synthetic construct
  source 1..20: mol_type = other DNA
tggtctcaaactcctgacct

SEQ ID NO: 97766 - DNA, 20 bp, synthetic construct
  source 1..20: mol_type = other DNA
ctggtctcaaactcctgacc

SEQ ID NO: 97767 - DNA, 20 bp, synthetic construct
  source 1..20: mol_type = other DNA
gctggtctcaaactcctgac

SEQ ID NO: 97768 - DNA, 20 bp, synthetic construct
  source 1..20: mol_type = other DNA
ggctggtctcaaactcctga

SEQ ID NO: 97769 - DNA, 20 bp, synthetic construct
  source 1..20: mol_type = other DNA
aggctggtctcaaactcctg

SEQ ID NO: 97770 - DNA, 20 bp, synthetic construct
  source 1..20: mol_type = other DNA
caggctggtctcaaactcct

SEQ ID NO: 97771 - DNA, 20 bp, synthetic construct
  source 1..20: mol_type = other DNA
ccaggctggtctcaaactcc

SEQ ID NO: 97772 - DNA, 20 bp, synthetic construct
  source 1..20: mol_type = other DNA
tccaggctggtctcaaactc

SEQ ID NO: 97773 - DNA, 20 bp, synthetic construct
  source 1..20: mol_type = other DNA
atccaggctggtctcaaact

SEQ ID NO: 97774 - DNA, 20 bp, synthetic construct
  source 1..20: mol_type = other DNA
tatccaggctggtctcaaac

SEQ ID NO: 97775 - DNA, 20 bp, synthetic construct
  source 1..20: mol_type = other DNA
ttatccaggctggtctcaaa

SEQ ID NO: 97776 - DNA, 20 bp, synthetic construct
  source 1..20: mol_type = other DNA
gttatccaggctggtctcaa

SEQ ID NO: 97777 - DNA, 20 bp, synthetic construct
  source 1..20: mol_type = other DNA
tgttatccaggctggtctca

SEQ ID NO: 97778 - DNA, 20 bp, synthetic construct
  source 1..20: mol_type = other DNA
atgttatccaggctggtctc

SEQ ID NO: 97779 - DNA, 20 bp, synthetic construct
  source 1..20: mol_type = other DNA
catgttatccaggctggtct

SEQ ID NO: 97780 - DNA, 20 bp, synthetic construct
  source 1..20: mol_type = other DNA
ccatgttatccaggctggtc

SEQ ID NO: 97781 - DNA, 20 bp, synthetic construct
  source 1..20: mol_type = other DNA
gccatgttatccaggctggt

SEQ ID NO: 97782 - DNA, 20 bp, synthetic construct
  source 1..20: mol_type = other DNA
cgccatgttatccaggctgg

SEQ ID NO: 97783 - DNA, 20 bp, synthetic construct
  source 1..20: mol_type = other DNA
tcgccatgttatccaggctg

SEQ ID NO: 97784 - DNA, 20 bp, synthetic construct
  source 1..20: mol_type = other DNA
ttcgccatgttatccaggct

SEQ ID NO: 97785 - DNA, 20 bp, synthetic construct
  source 1..20: mol_type = other DNA
tttcgccatgttatccaggc

SEQ ID NO: 97786 - DNA, 20 bp, synthetic construct
  source 1..20: mol_type = other DNA
gtttcgccatgttatccagg

SEQ ID NO: 97787 - DNA, 20 bp, synthetic construct
  source 1..20: mol_type = other DNA
ggtttcgccatgttatccag

SEQ ID NO: 97788 - DNA, 20 bp, synthetic construct
  source 1..20: mol_type = other DNA
gggtttcgccatgttatcca

SEQ ID NO: 97789 - DNA, 20 bp, synthetic construct
  source 1..20: mol_type = other DNA
agggtttcgccatgttatcc

SEQ ID NO: 97790 - DNA, 20 bp, synthetic construct
  source 1..20: mol_type = other DNA
tagggtttcgccatgttatc

SEQ ID NO: 97791 - DNA, 20 bp, synthetic construct
  source 1..20: mol_type = other DNA
atagggtttcgccatgttat

SEQ ID NO: 97792 - DNA, 20 bp, synthetic construct
  source 1..20: mol_type = other DNA
gatagggtttcgccatgtta

SEQ ID NO: 97793 - DNA, 20 bp, synthetic construct
  source 1..20: mol_type = other DNA
agatagggtttcgccatgtt

SEQ ID NO: 97794 - DNA, 20 bp, synthetic construct
  source 1..20: mol_type = other DNA
aagatagggtttcgccatgt

SEQ ID NO: 97795 - DNA, 20 bp, synthetic construct
  source 1..20: mol_type = other DNA
aaagatagggtttcgccatg

SEQ ID NO: 97796 - DNA, 20 bp, synthetic construct
  source 1..20: mol_type = other DNA
taaagatagggtttcgccat

SEQ ID NO: 97797 - DNA, 20 bp, synthetic construct
  source 1..20: mol_type = other DNA
ataaagatagggtttcgcca

SEQ ID NO: 97798 - DNA, 20 bp, synthetic construct
  source 1..20: mol_type = other DNA
aataaagatagggtttcgcc

SEQ ID NO: 97799 - DNA, 20 bp, synthetic construct
  source 1..20: mol_type = other DNA
taataaagatagggtttcgc

SEQ ID NO: 97800 - DNA, 20 bp, synthetic construct
  source 1..20: mol_type = other DNA
ttaataaagatagggtttcg

SEQ ID NO: 97801 - DNA, 20 bp, synthetic construct
  source 1..20: mol_type = other DNA
tttaataaagatagggtttc

SEQ ID NO: 97802 - DNA, 20 bp, synthetic construct
  source 1..20: mol_type = other DNA
ttttaataaagatagggttt

SEQ ID NO: 97803 - DNA, 20 bp, synthetic construct
  source 1..20: mol_type = other DNA
tttttaataaagatagggtt

SEQ ID NO: 97804 - DNA, 20 bp, synthetic construct
  source 1..20: mol_type = other DNA
atttttaataaagatagggt

SEQ ID NO: 97805 - DNA, 20 bp, synthetic construct
  source 1..20: mol_type = other DNA
tatttttaataaagataggg

SEQ ID NO: 97806 - DNA, 20 bp, synthetic construct
  source 1..20: mol_type = other DNA
atatttttaataaagatagg

SEQ ID NO: 97807 - DNA, 20 bp, synthetic construct
  source 1..20: mol_type = other DNA
tatatttttaataaagatag

SEQ ID NO: 97808 - DNA, 20 bp, synthetic construct
  source 1..20: mol_type = other DNA
atatatttttaataaagata

SEQ ID NO: 97809 - DNA, 20 bp, synthetic construct
  source 1..20: mol_type = other DNA
tatatatttttaataaagat

SEQ ID NO: 97810 - DNA, 20 bp, synthetic construct
  source 1..20: mol_type = other DNA
ttatatatttttaataaaga

SEQ ID NO: 97811 - DNA, 20 bp, synthetic construct
  source 1..20: mol_type = other DNA
tttatatatttttaataaag

SEQ ID NO: 97812 - DNA, 20 bp, synthetic construct
  source 1..20: mol_type = other DNA
atttatatatttttaataaa

SEQ ID NO: 97813 - DNA, 20 bp, synthetic construct
  source 1..20: mol_type = other DNA
aatttatatatttttaataa

SEQ ID NO: 97814 - DNA, 20 bp, synthetic construct
  source 1..20: mol_type = other DNA
taatttatatatttttaata

SEQ ID NO: 97815 - DNA, 20 bp, synthetic construct
  source 1..20: mol_type = other DNA
ctaatttatatatttttaat

SEQ ID NO: 97816 - DNA, 20 bp, synthetic construct
  source 1..20: mol_type = other DNA
gctaatttatatatttttaa

SEQ ID NO: 97817 - DNA, 20 bp, synthetic construct
  source 1..20: mol_type = other DNA
ggctaatttatatattttta

SEQ ID NO: 97818 - DNA, 20 bp, synthetic construct
  source 1..20: mol_type = other DNA
cggctaatttatatattttt

SEQ ID NO: 97819 - DNA, 20 bp, synthetic construct
  source 1..20: mol_type = other DNA
ccggctaatttatatatttt

SEQ ID NO: 97820 - DNA, 20 bp, synthetic construct
  source 1..20: mol_type = other DNA
cccggctaatttatatattt

SEQ ID NO: 97821 - DNA, 20 bp, synthetic construct
  source 1..20: mol_type = other DNA
gcccggctaatttatatatt

SEQ ID NO: 97822 - DNA, 20 bp, synthetic construct
  source 1..20: mol_type = other DNA
tgcccggctaatttatatat

SEQ ID NO: 97823 - DNA, 20 bp, synthetic construct
  source 1..20: mol_type = other DNA
atgcccggctaatttatata

SEQ ID NO: 97824 - DNA, 20 bp, synthetic construct
  source 1..20: mol_type = other DNA
catgcccggctaatttatat

SEQ ID NO: 97825 - DNA, 20 bp, synthetic construct
  source 1..20: mol_type = other DNA
ccatgcccggctaatttata

SEQ ID NO: 97826 - DNA, 20 bp, synthetic construct
  source 1..20: mol_type = other DNA
accatgcccggctaatttat

SEQ ID NO: 97827 - DNA, 20 bp, synthetic construct
  source 1..20: mol_type = other DNA
caccatgcccggctaattta

SEQ ID NO: 97828 - DNA, 20 bp, synthetic construct
  source 1..20: mol_type = other DNA
ccaccatgcccggctaattt

SEQ ID NO: 97829 - DNA, 20 bp, synthetic construct
  source 1..20: mol_type = other DNA
gccaccatgcccggctaatt

SEQ ID NO: 97830 - DNA, 20 bp, synthetic construct
  source 1..20: mol_type = other DNA
tgccaccatgcccggctaat

SEQ ID NO: 97831 - DNA, 20 bp, synthetic construct
  source 1..20: mol_type = other DNA
gtgccaccatgcccggctaa

SEQ ID NO: 97832 - DNA, 20 bp, synthetic construct
  source 1..20: mol_type = other DNA
tgtgccaccatgcccggcta

SEQ ID NO: 97833 - DNA, 20 bp, synthetic construct
  source 1..20: mol_type = other DNA
atgtgccaccatgcccggct

SEQ ID NO: 97834 - DNA, 20 bp, synthetic construct
  source 1..20: mol_type = other DNA
catgtgccaccatgcccggc

SEQ ID NO: 97835 - DNA, 20 bp, synthetic construct
  source 1..20: mol_type = other DNA
gcatgtgccaccatgcccgg

SEQ ID NO: 97836 - DNA, 20 bp, synthetic construct
  source 1..20: mol_type = other DNA
ggcatgtgccaccatgcccg

SEQ ID NO: 97837 - DNA, 20 bp, synthetic construct
  source 1..20: mol_type = other DNA
aggcatgtgccaccatgccc

SEQ ID NO: 97838 - DNA, 20 bp, synthetic construct
  source 1..20: mol_type = other DNA
caggcatgtgccaccatgcc

SEQ ID NO: 97839 - DNA, 20 bp, synthetic construct
  source 1..20: mol_type = other DNA
acaggcatgtgccaccatgc

SEQ ID NO: 97840 - DNA, 20 bp, synthetic construct
  source 1..20: mol_type = other DNA
tacaggcatgtgccaccatg

SEQ ID NO: 97841 - DNA, 20 bp, synthetic construct
  source 1..20: mol_type = other DNA
ttacaggcatgtgccaccat

SEQ ID NO: 97842 - DNA, 20 bp, synthetic construct
  source 1..20: mol_type = other DNA
attacaggcatgtgccacca

SEQ ID NO: 97843 - DNA, 20 bp, synthetic construct
  source 1..20: mol_type = other DNA
gattacaggcatgtgccacc

SEQ ID NO: 97844 - DNA, 20 bp, synthetic construct
  source 1..20: mol_type = other DNA
ggattacaggcatgtgccac

SEQ ID NO: 97845 - DNA, 20 bp, synthetic construct
  source 1..20: mol_type = other DNA
gggattacaggcatgtgcca

SEQ ID NO: 97846 - DNA, 20 bp, synthetic construct
  source 1..20: mol_type = other DNA
tgggattacaggcatgtgcc

SEQ ID NO: 97847 - DNA, 20 bp, synthetic construct
  source 1..20: mol_type = other DNA
ctgggattacaggcatgtgc

SEQ ID NO: 97848 - DNA, 20 bp, synthetic construct
  source 1..20: mol_type = other DNA
gctgggattacaggcatgtg

SEQ ID NO: 97849 - DNA, 20 bp, synthetic construct
  source 1..20: mol_type = other DNA
agctgggattacaggcatgt

SEQ ID NO: 97850 - DNA, 20 bp, synthetic construct
  source 1..20: mol_type = other DNA
tagctgggattacaggcatg

SEQ ID NO: 97851 - DNA, 20 bp, synthetic construct
  source 1..20: mol_type = other DNA
gtagctgggattacaggcat

SEQ ID NO: 97852 - DNA, 20 bp, synthetic construct
  source 1..20: mol_type = other DNA
agtagctgggattacaggca

SEQ ID NO: 97853 - DNA, 20 bp, synthetic construct
  source 1..20: mol_type = other DNA
gagtagctgggattacaggc

SEQ ID NO: 97854 - DNA, 20 bp, synthetic construct
  source 1..20: mol_type = other DNA
tgagtagctgggattacagg

SEQ ID NO: 97855 - DNA, 20 bp, synthetic construct
  source 1..20: mol_type = other DNA
ctgagtagctgggattacag

SEQ ID NO: 97856 - DNA, 20 bp, synthetic construct
  source 1..20: mol_type = other DNA
cctgagtagctgggattaca

SEQ ID NO: 97857 - DNA, 20 bp, synthetic construct
  source 1..20: mol_type = other DNA
tcctgagtagctgggattac

SEQ ID NO: 97858 - DNA, 20 bp, synthetic construct
  source 1..20: mol_type = other DNA
ctcctgagtagctgggatta

SEQ ID NO: 97859 - DNA, 20 bp, synthetic construct
  source 1..20: mol_type = other DNA
cctcctgagtagctgggatt

SEQ ID NO: 97860 - DNA, 20 bp, synthetic construct
  source 1..20: mol_type = other DNA
gcctcctgagtagctgggat

SEQ ID NO: 97861 - DNA, 20 bp, synthetic construct
  source 1..20: mol_type = other DNA
agcctcctgagtagctggga

SEQ ID NO: 97862 - DNA, 20 bp, synthetic construct
  source 1..20: mol_type = other DNA
cagcctcctgagtagctggg

SEQ ID NO: 97863 - DNA, 20 bp, synthetic construct
  source 1..20: mol_type = other DNA
tcagcctcctgagtagctgg

SEQ ID NO: 97864 - DNA, 20 bp, synthetic construct
  source 1..20: mol_type = other DNA
ctcagcctcctgagtagctg

SEQ ID NO: 97865 - DNA, 20 bp, synthetic construct
  source 1..20: mol_type = other DNA
cctcagcctcctgagtagct

SEQ ID NO: 97866 - DNA, 20 bp, synthetic construct
  source 1..20: mol_type = other DNA
gcctcagcctcctgagtagc

SEQ ID NO: 97867 - DNA, 20 bp, synthetic construct
  source 1..20: mol_type = other DNA
tgcctcagcctcctgagtag

SEQ ID NO: 97868 - DNA, 20 bp, synthetic construct
  source 1..20: mol_type = other DNA
ctgcctcagcctcctgagta

SEQ ID NO: 97869 - DNA, 20 bp, synthetic construct
  source 1..20: mol_type = other DNA
cctgcctcagcctcctgagt

SEQ ID NO: 97870 - DNA, 20 bp, synthetic construct
  source 1..20: mol_type = other DNA
tcctgcctcagcctcctgag

SEQ ID NO: 97871 - DNA, 20 bp, synthetic construct
  source 1..20: mol_type = other DNA
ctcctgcctcagcctcctga

SEQ ID NO: 97872 - DNA, 20 bp, synthetic construct
  source 1..20: mol_type = other DNA
tctcctgcctcagcctcctg

SEQ ID NO: 97873 - DNA, 20 bp, synthetic construct
  source 1..20: mol_type = other DNA
ttctcctgcctcagcctcct

SEQ ID NO: 97874 - DNA, 20 bp, synthetic construct
  source 1..20: mol_type = other DNA
attctcctgcctcagcctcc

SEQ ID NO: 97875 - DNA, 20 bp, synthetic construct
  source 1..20: mol_type = other DNA
gattctcctgcctcagcctc

SEQ ID NO: 97876 - DNA, 20 bp, synthetic construct
  source 1..20: mol_type = other DNA
tgattctcctgcctcagcct

SEQ ID NO: 97877 - DNA, 20 bp, synthetic construct
  source 1..20: mol_type = other DNA
gtgattctcctgcctcagcc

SEQ ID NO: 97878 - DNA, 20 bp, synthetic construct
  source 1..20: mol_type = other DNA
agtgattctcctgcctcagc

SEQ ID NO: 97879 - DNA, 20 bp, synthetic construct
  source 1..20: mol_type = other DNA
aagtgattctcctgcctcag

SEQ ID NO: 97880 - DNA, 20 bp, synthetic construct
  source 1..20: mol_type = other DNA
caagtgattctcctgcctca

SEQ ID NO: 97881 - DNA, 20 bp, synthetic construct
  source 1..20: mol_type = other DNA
tcaagtgattctcctgcctc

SEQ ID NO: 97882 - DNA, 20 bp, synthetic construct
  source 1..20: mol_type = other DNA
ttcaagtgattctcctgcct

SEQ ID NO: 97883 - DNA, 20 bp, synthetic construct
  source 1..20: mol_type = other DNA
attcaagtgattctcctgcc

SEQ ID NO: 97884 - DNA, 20 bp, synthetic construct
  source 1..20: mol_type = other DNA
gattcaagtgattctcctgc

SEQ ID NO: 97885 - DNA, 20 bp, synthetic construct
  source 1..20: mol_type = other DNA
ggattcaagtgattctcctg

SEQ ID NO: 97886 - DNA, 20 bp, synthetic construct
  source 1..20: mol_type = other DNA
tggattcaagtgattctcct

SEQ ID NO: 97887 - DNA, 20 bp, synthetic construct
  source 1..20: mol_type = other DNA
ctggattcaagtgattctcc

SEQ ID NO: 97888 - DNA, 20 bp, synthetic construct
  source 1..20: mol_type = other DNA
cctggattcaagtgattctc

SEQ ID NO: 97889 - DNA, 20 bp, synthetic construct
  source 1..20: mol_type = other DNA
tcctggattcaagtgattct

SEQ ID NO: 97890 - DNA, 20 bp, synthetic construct
  source 1..20: mol_type = other DNA
ctcctggattcaagtgattc

SEQ ID NO: 97891 - DNA, 20 bp, synthetic construct
  source 1..20: mol_type = other DNA
cctcctggattcaagtgatt

SEQ ID NO: 97892 - DNA, 20 bp, synthetic construct
  source 1..20: mol_type = other DNA
acctcctggattcaagtgat

SEQ ID NO: 97893 - DNA, 20 bp, synthetic construct
  source 1..20: mol_type = other DNA
cacctcctggattcaagtga

SEQ ID NO: 97894 - DNA, 20 bp, synthetic construct
  source 1..20: mol_type = other DNA
ccacctcctggattcaagtg

SEQ ID NO: 97895 - DNA, 20 bp, synthetic construct
  source 1..20: mol_type = other DNA
tccacctcctggattcaagt

SEQ ID NO: 97896 - DNA, 20 bp, synthetic construct
  source 1..20: mol_type = other DNA
ctccacctcctggattcaag

SEQ ID NO: 97897 - DNA, 20 bp, synthetic construct
  source 1..20: mol_type = other DNA
cctccacctcctggattcaa

SEQ ID NO: 97898 - DNA, 20 bp, synthetic construct
  source 1..20: mol_type = other DNA
acctccacctcctggattca

SEQ ID NO: 97899 - DNA, 20 bp, synthetic construct
  source 1..20: mol_type = other DNA
aacctccacctcctggattc

SEQ ID NO: 97900 - DNA, 20 bp, synthetic construct
  source 1..20: mol_type = other DNA
caacctccacctcctggatt

SEQ ID NO: 97901 - DNA, 20 bp, synthetic construct
  source 1..20: mol_type = other DNA
gcaacctccacctcctggat

SEQ ID NO: 97902 - DNA, 20 bp, synthetic construct
  source 1..20: mol_type = other DNA
tgcaacctccacctcctgga

SEQ ID NO: 97903 - DNA, 20 bp, synthetic construct
  source 1..20: mol_type = other DNA
ctgcaacctccacctcctgg

SEQ ID NO: 97904 - DNA, 20 bp, synthetic construct
  source 1..20: mol_type = other DNA
actgcaacctccacctcctg

SEQ ID NO: 97905 - DNA, 20 bp, synthetic construct
  source 1..20: mol_type = other DNA
cactgcaacctccacctcct

SEQ ID NO: 97906 - DNA, 20 bp, synthetic construct
  source 1..20: mol_type = other DNA
tcactgcaacctccacctcc

SEQ ID NO: 97907 - DNA, 20 bp, synthetic construct
  source 1..20: mol_type = other DNA
atcactgcaacctccacctc

SEQ ID NO: 97908 - DNA, 20 bp, synthetic construct
  source 1..20: mol_type = other DNA
gatcactgcaacctccacct

SEQ ID NO: 97909 - DNA, 20 bp, synthetic construct
  source 1..20: mol_type = other DNA
ggatcactgcaacctccacc

SEQ ID NO: 97910 - DNA, 20 bp, synthetic construct
  source 1..20: mol_type = other DNA
cggatcactgcaacctccac

SEQ ID NO: 97911 - DNA, 20 bp, synthetic construct
  source 1..20: mol_type = other DNA
tcggatcactgcaacctcca

SEQ ID NO: 97912 - DNA, 20 bp, synthetic construct
  source 1..20: mol_type = other DNA
ctcggatcactgcaacctcc

SEQ ID NO: 97913 - DNA, 20 bp, synthetic construct
  source 1..20: mol_type = other DNA
tctcggatcactgcaacctc

SEQ ID NO: 97914 - DNA, 20 bp, synthetic construct
  source 1..20: mol_type = other DNA
atctcggatcactgcaacct

SEQ ID NO: 97915 - DNA, 20 bp, synthetic construct
  source 1..20: mol_type = other DNA
aatctcggatcactgcaacc

SEQ ID NO: 97916 - DNA, 20 bp, synthetic construct
  source 1..20: mol_type = other DNA
caatctcggatcactgcaac

SEQ ID NO: 97917 - DNA, 20 bp, synthetic construct
  source 1..20: mol_type = other DNA
gcaatctcggatcactgcaa

SEQ ID NO: 97918 - DNA, 20 bp, synthetic construct
  source 1..20: mol_type = other DNA
tgcaatctcggatcactgca

SEQ ID NO: 97919 - DNA, 20 bp, synthetic construct
  source 1..20: mol_type = other DNA
atgcaatctcggatcactgc

SEQ ID NO: 97920 - DNA, 20 bp, synthetic construct
  source 1..20: mol_type = other DNA
gatgcaatctcggatcactg

SEQ ID NO: 97921 - DNA, 20 bp, synthetic construct
  source 1..20: mol_type = other DNA
tgatgcaatctcggatcact

SEQ ID NO: 97922 - DNA, 20 bp, synthetic construct
  source 1..20: mol_type = other DNA
ctgatgcaatctcggatcac

SEQ ID NO: 97923 - DNA, 20 bp, synthetic construct
  source 1..20: mol_type = other DNA
actgatgcaatctcggatca

SEQ ID NO: 97924 - DNA, 20 bp, synthetic construct
  source 1..20: mol_type = other DNA
cactgatgcaatctcggatc

SEQ ID NO: 97925 - DNA, 20 bp, synthetic construct
  source 1..20: mol_type = other DNA
ccactgatgcaatctcggat

SEQ ID NO: 97926 - DNA, 20 bp, synthetic construct
  source 1..20: mol_type = other DNA
cccactgatgcaatctcgga

SEQ ID NO: 97927 - DNA, 20 bp, synthetic construct
  source 1..20: mol_type = other DNA
gcccactgatgcaatctcgg

SEQ ID NO: 97928 - DNA, 20 bp, synthetic construct
  source 1..20: mol_type = other DNA
cgcccactgatgcaatctcg

SEQ ID NO: 97929 - DNA, 20 bp, synthetic construct
  source 1..20: mol_type = other DNA
tcgcccactgatgcaatctc

SEQ ID NO: 97930 - DNA, 20 bp, synthetic construct
  source 1..20: mol_type = other DNA
gtcgcccactgatgcaatct

SEQ ID NO: 97931 - DNA, 20 bp, synthetic construct
  source 1..20: mol_type = other DNA
tgtcgcccactgatgcaatc

SEQ ID NO: 97932 - DNA, 20 bp, synthetic construct
  source 1..20: mol_type = other DNA
ctgtcgcccactgatgcaat

SEQ ID NO: 97933 - DNA, 20 bp, synthetic construct
  source 1..20: mol_type = other DNA
tctgtcgcccactgatgcaa

SEQ ID NO: 97934 - DNA, 20 bp, synthetic construct
  source 1..20: mol_type = other DNA
ctctgtcgcccactgatgca

SEQ ID NO: 97935 - DNA, 20 bp, synthetic construct
  source 1..20: mol_type = other DNA
gctctgtcgcccactgatgc

SEQ ID NO: 97936 - DNA, 20 bp, synthetic construct
  source 1..20: mol_type = other DNA
cgctctgtcgcccactgatg

SEQ ID NO: 97937 - DNA, 20 bp, synthetic construct
  source 1..20: mol_type = other DNA
tcgctctgtcgcccactgat

SEQ ID NO: 97938 - DNA, 20 bp, synthetic construct
  source 1..20: mol_type = other DNA
ctcgctctgtcgcccactga

SEQ ID NO: 97939 - DNA, 20 bp, synthetic construct
  source 1..20: mol_type = other DNA
tctcgctctgtcgcccactg

SEQ ID NO: 97940 - DNA, 20 bp, synthetic construct
  source 1..20: mol_type = other DNA
ttctcgctctgtcgcccact

SEQ ID NO: 97941 - DNA, 20 bp, synthetic construct
  source 1..20: mol_type = other DNA
attctcgctctgtcgcccac

SEQ ID NO: 97942 - DNA, 20 bp, synthetic construct
  source 1..20: mol_type = other DNA
gattctcgctctgtcgccca

SEQ ID NO: 97943 - DNA, 20 bp, synthetic construct
  source 1..20: mol_type = other DNA
agattctcgctctgtcgccc

SEQ ID NO: 97944 - DNA, 20 bp, synthetic construct
  source 1..20: mol_type = other DNA
cagattctcgctctgtcgcc

SEQ ID NO: 97945 - DNA, 20 bp, synthetic construct
  source 1..20: mol_type = other DNA
acagattctcgctctgtcgc

SEQ ID NO: 97946 - DNA, 20 bp, synthetic construct
  source 1..20: mol_type = other DNA
gacagattctcgctctgtcg

SEQ ID NO: 97947 - DNA, 20 bp, synthetic construct
  source 1..20: mol_type = other DNA
agacagattctcgctctgtc

SEQ ID NO: 97948 - DNA, 20 bp, synthetic construct
  source 1..20: mol_type = other DNA
gagacagattctcgctctgt

SEQ ID NO: 97949 - DNA, 20 bp, synthetic construct
  source 1..20: mol_type = other DNA
tgagacagattctcgctctg

SEQ ID NO: 97950 - DNA, 20 bp, synthetic construct
  source 1..20: mol_type = other DNA
ttgagacagattctcgctct

SEQ ID NO: 97951 - DNA, 20 bp, synthetic construct
  source 1..20: mol_type = other DNA
tttgagacagattctcgctc

SEQ ID NO: 97952 - DNA, 20 bp, synthetic construct
  source 1..20: mol_type = other DNA
ctttgagacagattctcgct

SEQ ID NO: 97953 - DNA, 20 bp, synthetic construct
  source 1..20: mol_type = other DNA
tctttgagacagattctcgc

SEQ ID NO: 97954 - DNA, 20 bp, synthetic construct
  source 1..20: mol_type = other DNA
ttctttgagacagattctcg

SEQ ID NO: 97955 - DNA, 20 bp, synthetic construct
  source 1..20: mol_type = other DNA
tttctttgagacagattctc

SEQ ID NO: 97956 - DNA, 20 bp, synthetic construct
  source 1..20: mol_type = other DNA
ttttctttgagacagattct

SEQ ID NO: 97957 - DNA, 20 bp, synthetic construct
  source 1..20: mol_type = other DNA
tttttctttgagacagattc

SEQ ID NO: 97958 - DNA, 20 bp, synthetic construct
  source 1..20: mol_type = other DNA
ttttttctttgagacagatt

SEQ ID NO: 97959 - DNA, 20 bp, synthetic construct
  source 1..20: mol_type = other DNA
tttttttctttgagacagat

SEQ ID NO: 97960 - DNA, 20 bp, synthetic construct
  source 1..20: mol_type = other DNA
ttttttttctttgagacaga

SEQ ID NO: 97961 - DNA, 20 bp, synthetic construct
  source 1..20: mol_type = other DNA
tttttttttctttgagacag

SEQ ID NO: 97962 - DNA, 20 bp, synthetic construct
  source 1..20: mol_type = other DNA
ctttttttttctttgagaca

SEQ ID NO: 97963 - DNA, 20 bp, synthetic construct
  source 1..20: mol_type = other DNA
tctttttttttctttgagac

SEQ ID NO: 97964 - DNA, 20 bp, synthetic construct
  source 1..20: mol_type = other DNA
ctctttttttttctttgaga

SEQ ID NO: 97965 - DNA, 20 bp, synthetic construct
  source 1..20: mol_type = other DNA
tctctttttttttctttgag

SEQ ID NO: 97966 - DNA, 20 bp, synthetic construct
  source 1..20: mol_type = other DNA
ctctctttttttttctttga

SEQ ID NO: 97967 - DNA, 20 bp, synthetic construct
  source 1..20: mol_type = other DNA
actctctttttttttctttg

SEQ ID NO: 97968 - DNA, 20 bp, synthetic construct
  source 1..20: mol_type = other DNA
cactctctttttttttcttt

SEQ ID NO: 97969 - DNA, 20 bp, synthetic construct
  source 1..20: mol_type = other DNA
ccactctctttttttttctt

SEQ ID NO: 97970 - DNA, 20 bp, synthetic construct
  source 1..20: mol_type = other DNA
tccactctctttttttttct

SEQ ID NO: 97971 - DNA, 20 bp, synthetic construct
  source 1..20: mol_type = other DNA
ttccactctctttttttttc

SEQ ID NO: 97972 - DNA, 20 bp, synthetic construct
  source 1..20: mol_type = other DNA
tttccactctcttttttttt

SEQ ID NO: 97973 - DNA, 20 bp, synthetic construct
  source 1..20: mol_type = other DNA
ttttccactctctttttttt

SEQ ID NO: 97974 - DNA, 20 bp, synthetic construct
  source 1..20: mol_type = other DNA
tttttccactctcttttttt

SEQ ID NO: 97975 - DNA, 20 bp, synthetic construct
  source 1..20: mol_type = other DNA
ttttttccactctctttttt

SEQ ID NO: 97976 - DNA, 20 bp, synthetic construct
  source 1..20: mol_type = other DNA
tttttttccactctcttttt

SEQ ID NO: 97977 - DNA, 20 bp, synthetic construct
  source 1..20: mol_type = other DNA
ttttttttccactctctttt

SEQ ID NO: 97978 - DNA, 20 bp, synthetic construct
  source 1..20: mol_type = other DNA
tttttttttccactctcttt

SEQ ID NO: 97979 - DNA, 20 bp, synthetic construct
  source 1..20: mol_type = other DNA
ttttttttttccactctctt

SEQ ID NO: 97980 - DNA, 20 bp, synthetic construct
  source 1..20: mol_type = other DNA
attttttttttccactctct

SEQ ID NO: 97981 - DNA, 20 bp, synthetic construct
  source 1..20: mol_type = other DNA
tattttttttttccactctc

SEQ ID NO: 97982 - DNA, 20 bp, synthetic construct
  source 1..20: mol_type = other DNA
atattttttttttccactct

SEQ ID NO: 97983 - DNA, 20 bp, synthetic construct
  source 1..20: mol_type = other DNA
catattttttttttccactc

SEQ ID NO: 97984 - DNA, 20 bp, synthetic construct
  source 1..20: mol_type = other DNA
acatattttttttttccact

SEQ ID NO: 97985 - DNA, 20 bp, synthetic construct
  source 1..20: mol_type = other DNA
cacatattttttttttccac

SEQ ID NO: 97986 - DNA, 20 bp, synthetic construct
  source 1..20: mol_type = other DNA
acacatattttttttttcca

SEQ ID NO: 97987 - DNA, 20 bp, synthetic construct
  source 1..20: mol_type = other DNA
gacacatattttttttttcc

SEQ ID NO: 97988 - DNA, 20 bp, synthetic construct
  source 1..20: mol_type = other DNA
ggacacatattttttttttc

SEQ ID NO: 97989 - DNA, 20 bp, synthetic construct
  source 1..20: mol_type = other DNA
gggacacatatttttttttt

SEQ ID NO: 97990 - DNA, 20 bp, synthetic construct
  source 1..20: mol_type = other DNA
tgggacacatattttttttt

SEQ ID NO: 97991 - DNA, 20 bp, synthetic construct
  source 1..20: mol_type = other DNA
ctgggacacatatttttttt

SEQ ID NO: 97992 - DNA, 20 bp, synthetic construct
  source 1..20: mol_type = other DNA
tctgggacacatattttttt

SEQ ID NO: 97993 - DNA, 20 bp, synthetic construct
  source 1..20: mol_type = other DNA
ttctgggacacatatttttt

SEQ ID NO: 97994 - DNA, 20 bp, synthetic construct
  source 1..20: mol_type = other DNA
gttctgggacacatattttt

SEQ ID NO: 97995 - DNA, 20 bp, synthetic construct
  source 1..20: mol_type = other DNA
agttctgggacacatatttt

SEQ ID NO: 97996 - DNA, 20 bp, synthetic construct
  source 1..20: mol_type = other DNA
aagttctgggacacatattt

SEQ ID NO: 97997 - DNA, 20 bp, synthetic construct
  source 1..20: mol_type = other DNA
taagttctgggacacatatt

SEQ ID NO: 97998 - DNA, 20 bp, synthetic construct
  source 1..20: mol_type = other DNA
ttaagttctgggacacatat

SEQ ID NO: 97999 - DNA, 20 bp, synthetic construct
  source 1..20: mol_type = other DNA
tttaagttctgggacacata

SEQ ID NO: 98000 - DNA, 20 bp, synthetic construct
  source 1..20: mol_type = other DNA
atttaagttctgggacacat

SEQ ID NO: 98001 - DNA, 20 bp, synthetic construct
  source 1..20: mol_type = other DNA
aatttaagttctgggacaca

SEQ ID NO: 98002 - DNA, 20 bp, synthetic construct
  source 1..20: mol_type = other DNA
aaatttaagttctgggacac

SEQ ID NO: 98003 - DNA, 20 bp, synthetic construct
  source 1..20: mol_type = other DNA
aaaatttaagttctgggaca

SEQ ID NO: 98004 - DNA, 20 bp, synthetic construct
  source 1..20: mol_type = other DNA
taaaatttaagttctgggac

SEQ ID NO: 98005 - DNA, 20 bp, synthetic construct
  source 1..20: mol_type = other DNA
ttaaaatttaagttctggga

SEQ ID NO: 98006 - DNA, 20 bp, synthetic construct
  source 1..20: mol_type = other DNA
attaaaatttaagttctggg

SEQ ID NO: 98007 - DNA, 20 bp, synthetic construct
  source 1..20: mol_type = other DNA
aattaaaatttaagttctgg

SEQ ID NO: 98008 - DNA, 20 bp, synthetic construct
  source 1..20: mol_type = other DNA
taattaaaatttaagttctg

SEQ ID NO: 98009 - DNA, 20 bp, synthetic construct
  source 1..20: mol_type = other DNA
ttaattaaaatttaagttct

SEQ ID NO: 98010 - DNA, 20 bp, synthetic construct
  source 1..20: mol_type = other DNA
tttaattaaaatttaagttc

SEQ ID NO: 98011 - DNA, 20 bp, synthetic construct
  source 1..20: mol_type = other DNA
ttttaattaaaatttaagtt

SEQ ID NO: 98012 - DNA, 20 bp, synthetic construct
  source 1..20: mol_type = other DNA
tttttaattaaaatttaagt

SEQ ID NO: 98013 - DNA, 20 bp, synthetic construct
  source 1..20: mol_type = other DNA
ttttttaattaaaatttaag

SEQ ID NO: 98014 - DNA, 20 bp, synthetic construct
  source 1..20: mol_type = other DNA
tttttttaattaaaatttaa

SEQ ID NO: 98015 - DNA, 20 bp, synthetic construct
  source 1..20: mol_type = other DNA
ttttttttaattaaaattta

SEQ ID NO: 98016 - DNA, 20 bp, synthetic construct
  source 1..20: mol_type = other DNA
tttttttttaattaaaattt

SEQ ID NO: 98017 - DNA, 20 bp, synthetic construct
  source 1..20: mol_type = other DNA
atttttttttaattaaaatt

SEQ ID NO: 98018 - DNA, 20 bp, synthetic construct
  source 1..20: mol_type = other DNA
tatttttttttaattaaaat

SEQ ID NO: 98019 - DNA, 20 bp, synthetic construct
  source 1..20: mol_type = other DNA
ttatttttttttaattaaaa

SEQ ID NO: 98020 - DNA, 20 bp, synthetic construct
  source 1..20: mol_type = other DNA
tttatttttttttaattaaa

SEQ ID NO: 98021 - DNA, 20 bp, synthetic construct
  source 1..20: mol_type = other DNA
ttttatttttttttaattaa

SEQ ID NO: 98022 - DNA, 20 bp, synthetic construct
  source 1..20: mol_type = other DNA
cttttatttttttttaatta

SEQ ID NO: 98023 - DNA, 20 bp, synthetic construct
  source 1..20: mol_type = other DNA
tcttttatttttttttaatt

SEQ ID NO: 98024 - DNA, 20 bp, synthetic construct
  source 1..20: mol_type = other DNA
ctcttttatttttttttaat

SEQ ID NO: 98025 - DNA, 20 bp, synthetic construct
  source 1..20: mol_type = other DNA
actcttttatttttttttaa

SEQ ID NO: 98026 - DNA, 20 bp, synthetic construct
  source 1..20: mol_type = other DNA
cactcttttattttttttta

SEQ ID NO: 98027 - DNA, 20 bp, synthetic construct
  source 1..20: mol_type = other DNA
tcactcttttattttttttt

SEQ ID NO: 98028 - DNA, 20 bp, synthetic construct
  source 1..20: mol_type = other DNA
ttcactcttttatttttttt

SEQ ID NO: 98029 - DNA, 20 bp, synthetic construct
  source 1..20: mol_type = other DNA
gttcactcttttattttttt

SEQ ID NO: 98030 - DNA, 20 bp, synthetic construct
  source 1..20: mol_type = other DNA
agttcactcttttatttttt

SEQ ID NO: 98031 - DNA, 20 bp, synthetic construct
  source 1..20: mol_type = other DNA
aagttcactcttttattttt

SEQ ID NO: 98032 - DNA, 20 bp, synthetic construct
  source 1..20: mol_type = other DNA
aaagttcactcttttatttt

SEQ ID NO: 98033 - DNA, 20 bp, synthetic construct
  source 1..20: mol_type = other DNA
gaaagttcactcttttattt

SEQ ID NO: 98034 - DNA, 20 bp, synthetic construct
  source 1..20: mol_type = other DNA
agaaagttcactcttttatt

SEQ ID NO: 98035 - DNA, 20 bp, synthetic construct
  source 1..20: mol_type = other DNA
tagaaagttcactcttttat

SEQ ID NO: 98036 - DNA, 20 bp, synthetic construct
  source 1..20: mol_type = other DNA
ttagaaagttcactctttta

SEQ ID NO: 98037 - DNA, 20 bp, synthetic construct
  source 1..20: mol_type = other DNA
attagaaagttcactctttt

SEQ ID NO: 98038 - DNA, 20 bp, synthetic construct
  source 1..20: mol_type = other DNA
aattagaaagttcactcttt

SEQ ID NO: 98039 - DNA, 20 bp, synthetic construct
  source 1..20: mol_type = other DNA
caattagaaagttcactctt

SEQ ID NO: 98040 - DNA, 20 bp, synthetic construct
  source 1..20: mol_type = other DNA
acaattagaaagttcactct

SEQ ID NO: 98041 - DNA, 20 bp, synthetic construct
  source 1..20: mol_type = other DNA
aacaattagaaagttcactc

SEQ ID NO: 98042 - DNA, 20 bp, synthetic construct
  source 1..20: mol_type = other DNA
gaacaattagaaagttcact

SEQ ID NO: 98043 - DNA, 20 bp, synthetic construct
  source 1..20: mol_type = other DNA
agaacaattagaaagttcac

SEQ ID NO: 98044 - DNA, 20 bp, synthetic construct
  source 1..20: mol_type = other DNA
gagaacaattagaaagttca

SEQ ID NO: 98045 - DNA, 20 bp, synthetic construct
  source 1..20: mol_type = other DNA
agagaacaattagaaagttc

SEQ ID NO: 98046 - DNA, 20 bp, synthetic construct
  source 1..20: mol_type = other DNA
aagagaacaattagaaagtt

SEQ ID NO: 98047 - DNA, 20 bp, synthetic construct
  source 1..20: mol_type = other DNA
gaagagaacaattagaaagt

SEQ ID NO: 98048 - DNA, 20 bp, synthetic construct
  source 1..20: mol_type = other DNA
tgaagagaacaattagaaag

SEQ ID NO: 98049 - DNA, 20 bp, synthetic construct
  source 1..20: mol_type = other DNA
ctgaagagaacaattagaaa

SEQ ID NO: 98050 - DNA, 20 bp, synthetic construct
  source 1..20: mol_type = other DNA
tctgaagagaacaattagaa

SEQ ID NO: 98051 - DNA, 20 bp, synthetic construct
  source 1..20: mol_type = other DNA
atctgaagagaacaattaga

SEQ ID NO: 98052 - DNA, 20 bp, synthetic construct
  source 1..20: mol_type = other DNA
tatctgaagagaacaattag

SEQ ID NO: 98053 - DNA, 20 bp, synthetic construct
  source 1..20: mol_type = other DNA
ttatctgaagagaacaatta

SEQ ID NO: 98054 - DNA, 20 bp, synthetic construct
  source 1..20: mol_type = other DNA
attatctgaagagaacaatt

SEQ ID NO: 98055 - DNA, 20 bp, synthetic construct
  source 1..20: mol_type = other DNA
tattatctgaagagaacaat

SEQ ID NO: 98056 - DNA, 20 bp, synthetic construct
  source 1..20: mol_type = other DNA
atattatctgaagagaacaa

SEQ ID NO: 98057 - DNA, 20 bp, synthetic construct
  source 1..20: mol_type = other DNA
tatattatctgaagagaaca

SEQ ID NO: 98058 - DNA, 20 bp, synthetic construct
  source 1..20: mol_type = other DNA
ttatattatctgaagagaac

SEQ ID NO: 98059 - DNA, 20 bp, synthetic construct
  source 1..20: mol_type = other DNA
attatattatctgaagagaa

SEQ ID NO: 98060 - DNA, 20 bp, synthetic construct
  source 1..20: mol_type = other DNA
cattatattatctgaagaga

SEQ ID NO: 98061 - DNA, 20 bp, synthetic construct
  source 1..20: mol_type = other DNA
acattatattatctgaagag

SEQ ID NO: 98062 - DNA, 20 bp, synthetic construct
  source 1..20: mol_type = other DNA
aacattatattatctgaaga

SEQ ID NO: 98063 - DNA, 20 bp, synthetic construct
  source 1..20: mol_type = other DNA
taacattatattatctgaag

SEQ ID NO: 98064 - DNA, 20 bp, synthetic construct
  source 1..20: mol_type = other DNA
ataacattatattatctgaa

SEQ ID NO: 98065 - DNA, 20 bp, synthetic construct
  source 1..20: mol_type = other DNA
aataacattatattatctga

SEQ ID NO: 98066 - DNA, 20 bp, synthetic construct
  source 1..20: mol_type = other DNA
gaataacattatattatctg

SEQ ID NO: 98067 - DNA, 20 bp, synthetic construct
  source 1..20: mol_type = other DNA
agaataacattatattatct

SEQ ID NO: 98068 - DNA, 20 bp, synthetic construct
  source 1..20: mol_type = other DNA
gagaataacattatattatc

SEQ ID NO: 98069 - DNA, 20 bp, synthetic construct
  source 1..20: mol_type = other DNA
agagaataacattatattat

SEQ ID NO: 98070 - DNA, 20 bp, synthetic construct
  source 1..20: mol_type = other DNA
aagagaataacattatatta

SEQ ID NO: 98071 - DNA, 20 bp, synthetic construct
  source 1..20: mol_type = other DNA
taagagaataacattatatt

SEQ ID NO: 98072 - DNA, 20 bp, synthetic construct
  source 1..20: mol_type = other DNA
ataagagaataacattatat

SEQ ID NO: 98073 - DNA, 20 bp, synthetic construct
  source 1..20: mol_type = other DNA
cataagagaataacattata

SEQ ID NO: 98074 - DNA, 20 bp, synthetic construct
  source 1..20: mol_type = other DNA
acataagagaataacattat

SEQ ID NO: 98075 - DNA, 20 bp, synthetic construct
  source 1..20: mol_type = other DNA
aacataagagaataacatta

SEQ ID NO: 98076 - DNA, 20 bp, synthetic construct
  source 1..20: mol_type = other DNA
aaacataagagaataacatt

SEQ ID NO: 98077 - DNA, 20 bp, synthetic construct
  source 1..20: mol_type = other DNA
aaaacataagagaataacat

SEQ ID NO: 98078 - DNA, 20 bp, synthetic construct
  source 1..20: mol_type = other DNA
taaaacataagagaataaca

SEQ ID NO: 98079 - DNA, 20 bp, synthetic construct
  source 1..20: mol_type = other DNA
ataaaacataagagaataac

SEQ ID NO: 98080 - DNA, 20 bp, synthetic construct
  source 1..20: mol_type = other DNA
aataaaacataagagaataa

SEQ ID NO: 98081 - DNA, 20 bp, synthetic construct
  source 1..20: mol_type = other DNA
caataaaacataagagaata

SEQ ID NO: 98082 - DNA, 20 bp, synthetic construct
  source 1..20: mol_type = other DNA
gcaataaaacataagagaat

SEQ ID NO: 98083 - DNA, 20 bp, synthetic construct
  source 1..20: mol_type = other DNA
cgcaataaaacataagagaa

SEQ ID NO: 98084 - DNA, 20 bp, synthetic construct
  source 1..20: mol_type = other DNA
acgcaataaaacataagaga

SEQ ID NO: 98085 - DNA, 20 bp, synthetic construct
  source 1..20: mol_type = other DNA
tacgcaataaaacataagag

SEQ ID NO: 98086 - DNA, 20 bp, synthetic construct
  source 1..20: mol_type = other DNA
atacgcaataaaacataaga

SEQ ID NO: 98087 - DNA, 20 bp, synthetic construct
  source 1..20: mol_type = other DNA
aatacgcaataaaacataag

SEQ ID NO: 98088 - DNA, 20 bp, synthetic construct
  source 1..20: mol_type = other DNA
aaatacgcaataaaacataa

SEQ ID NO: 98089 - DNA, 20 bp, synthetic construct
  source 1..20: mol_type = other DNA
gaaatacgcaataaaacata

SEQ ID NO: 98090 - DNA, 20 bp, synthetic construct
  source 1..20: mol_type = other DNA
ggaaatacgcaataaaacat

SEQ ID NO: 98091 - DNA, 20 bp, synthetic construct
  source 1..20: mol_type = other DNA
aggaaatacgcaataaaaca

SEQ ID NO: 98092 - DNA, 20 bp, synthetic construct
  source 1..20: mol_type = other DNA
caggaaatacgcaataaaac

SEQ ID NO: 98093 - DNA, 20 bp, synthetic construct
  source 1..20: mol_type = other DNA
acaggaaatacgcaataaaa

SEQ ID NO: 98094 - DNA, 20 bp, synthetic construct
  source 1..20: mol_type = other DNA
cacaggaaatacgcaataaa

SEQ ID NO: 98095 - DNA, 20 bp, synthetic construct
  source 1..20: mol_type = other DNA
acacaggaaatacgcaataa

SEQ ID NO: 98096 - DNA, 20 bp, synthetic construct
  source 1..20: mol_type = other DNA
tacacaggaaatacgcaata

SEQ ID NO: 98097 - DNA, 20 bp, synthetic construct
  source 1..20: mol_type = other DNA
gtacacaggaaatacgcaat

SEQ ID NO: 98098 - DNA, 20 bp, synthetic construct
  source 1..20: mol_type = other DNA
ggtacacaggaaatacgcaa

SEQ ID NO: 98099 - DNA, 20 bp, synthetic construct
  source 1..20: mol_type = other DNA
tggtacacaggaaatacgca

SEQ ID NO: 98100 - DNA, 20 bp, synthetic construct
  source 1..20: mol_type = other DNA
ctggtacacaggaaatacgc

SEQ ID NO: 98101 - DNA, 20 bp, synthetic construct
  source 1..20: mol_type = other DNA
tctggtacacaggaaatacg

SEQ ID NO: 98102 - DNA, 20 bp, synthetic construct
  source 1..20: mol_type = other DNA
atctggtacacaggaaatac

SEQ ID NO: 98103 - DNA, 20 bp, synthetic construct
  source 1..20: mol_type = other DNA
catctggtacacaggaaata

SEQ ID NO: 98104 - DNA, 20 bp, synthetic construct
  source 1..20: mol_type = other DNA
gcatctggtacacaggaaat

SEQ ID NO: 98105 - DNA, 20 bp, synthetic construct
  source 1..20: mol_type = other DNA
agcatctggtacacaggaaa

SEQ ID NO: 98106 - DNA, 20 bp, synthetic construct
  source 1..20: mol_type = other DNA
cagcatctggtacacaggaa

SEQ ID NO: 98107 - DNA, 20 bp, synthetic construct
  source 1..20: mol_type = other DNA
acagcatctggtacacagga

SEQ ID NO: 98108 - DNA, 20 bp, synthetic construct
  source 1..20: mol_type = other DNA
aacagcatctggtacacagg

SEQ ID NO: 98109 - DNA, 20 bp, synthetic construct
  source 1..20: mol_type = other DNA
gaacagcatctggtacacag

SEQ ID NO: 98110 - DNA, 20 bp, synthetic construct
  source 1..20: mol_type = other DNA
agaacagcatctggtacaca

SEQ ID NO: 98111 - DNA, 20 bp, synthetic construct
  source 1..20: mol_type = other DNA
aagaacagcatctggtacac

SEQ ID NO: 98112 - DNA, 20 bp, synthetic construct
  source 1..20: mol_type = other DNA
gaagaacagcatctggtaca

SEQ ID NO: 98113 - DNA, 20 bp, synthetic construct
  source 1..20: mol_type = other DNA
tgaagaacagcatctggtac

SEQ ID NO: 98114 - DNA, 20 bp, synthetic construct
  source 1..20: mol_type = other DNA
atgaagaacagcatctggta

SEQ ID NO: 98115 - DNA, 20 bp, synthetic construct
  source 1..20: mol_type = other DNA
catgaagaacagcatctggt

SEQ ID NO: 98116 - DNA, 20 bp, synthetic construct
  source 1..20: mol_type = other DNA
gcatgaagaacagcatctgg

SEQ ID NO: 98117 - DNA, 20 bp, synthetic construct
  source 1..20: mol_type = other DNA
agcatgaagaacagcatctg

SEQ ID NO: 98118 - DNA, 20 bp, synthetic construct
  source 1..20: mol_type = other DNA
aagcatgaagaacagcatct

SEQ ID NO: 98119 - DNA, 20 bp, synthetic construct
  source 1..20: mol_type = other DNA
caagcatgaagaacagcatc

SEQ ID NO: 98120 - DNA, 20 bp, synthetic construct
  source 1..20: mol_type = other DNA
acaagcatgaagaacagcat

SEQ ID NO: 98121 - DNA, 20 bp, synthetic construct
  source 1..20: mol_type = other DNA
tacaagcatgaagaacagca

SEQ ID NO: 98122 - DNA, 20 bp, synthetic construct
  source 1..20: mol_type = other DNA
atacaagcatgaagaacagc

SEQ ID NO: 98123 - DNA, 20 bp, synthetic construct
  source 1..20: mol_type = other DNA
catacaagcatgaagaacag

SEQ ID NO: 98124 - DNA, 20 bp, synthetic construct
  source 1..20: mol_type = other DNA
acatacaagcatgaagaaca

SEQ ID NO: 98125 - DNA, 20 bp, synthetic construct
  source 1..20: mol_type = other DNA
aacatacaagcatgaagaac

SEQ ID NO: 98126 - DNA, 20 bp, synthetic construct
  source 1..20: mol_type = other DNA
taacatacaagcatgaagaa

SEQ ID NO: 98127 - DNA, 20 bp, synthetic construct
  source 1..20: mol_type = other DNA
ttaacatacaagcatgaaga

SEQ ID NO: 98128 - DNA, 20 bp, synthetic construct
  source 1..20: mol_type = other DNA
tttaacatacaagcatgaag

SEQ ID NO: 98129 - DNA, 20 bp, synthetic construct
  source 1..20: mol_type = other DNA
atttaacatacaagcatgaa

SEQ ID NO: 98130 - DNA, 20 bp, synthetic construct
  source 1..20: mol_type = other DNA
gatttaacatacaagcatga

SEQ ID NO: 98131 - DNA, 20 bp, synthetic construct
  source 1..20: mol_type = other DNA
agatttaacatacaagcatg

SEQ ID NO: 98132 - DNA, 20 bp, synthetic construct
  source 1..20: mol_type = other DNA
aagatttaacatacaagcat

SEQ ID NO: 98133 - DNA, 20 bp, synthetic construct
  source 1..20: mol_type = other DNA
caagatttaacatacaagca

SEQ ID NO: 98134 - DNA, 20 bp, synthetic construct
  source 1..20: mol_type = other DNA
acaagatttaacatacaagc

SEQ ID NO: 98135 - DNA, 20 bp, synthetic construct
  source 1..20: mol_type = other DNA
gacaagatttaacatacaag

SEQ ID NO: 98136 - DNA, 20 bp, synthetic construct
  source 1..20: mol_type = other DNA
agacaagatttaacatacaa

SEQ ID NO: 98137 - DNA, 20 bp, synthetic construct
  source 1..20: mol_type = other DNA
tagacaagatttaacataca

SEQ ID NO: 98138 - DNA, 20 bp, synthetic construct
  source 1..20: mol_type = other DNA
ttagacaagatttaacatac

SEQ ID NO: 98139 - DNA, 20 bp, synthetic construct
  source 1..20: mol_type = other DNA
gttagacaagatttaacata

SEQ ID NO: 98140 - DNA, 20 bp, synthetic construct
  source 1..20: mol_type = other DNA
tgttagacaagatttaacat

SEQ ID NO: 98141 - DNA, 20 bp, synthetic construct
  source 1..20: mol_type = other DNA
atgttagacaagatttaaca

SEQ ID NO: 98142 - DNA, 20 bp, synthetic construct
  source 1..20: mol_type = other DNA
gatgttagacaagatttaac

SEQ ID NO: 98143 - DNA, 20 bp, synthetic construct
  source 1..20: mol_type = other DNA
agatgttagacaagatttaa

SEQ ID NO: 98144 - DNA, 20 bp, synthetic construct
  source 1..20: mol_type = other DNA
gagatgttagacaagattta

SEQ ID NO: 98145 - DNA, 20 bp, synthetic construct
  source 1..20: mol_type = other DNA
agagatgttagacaagattt

SEQ ID NO: 98146 - DNA, 20 bp, synthetic construct
  source 1..20: mol_type = other DNA
cagagatgttagacaagatt

SEQ ID NO: 98147 - DNA, 20 bp, synthetic construct
  source 1..20: mol_type = other DNA
acagagatgttagacaagat

SEQ ID NO: 98148 - DNA, 20 bp, synthetic construct
  source 1..20: mol_type = other DNA
gacagagatgttagacaaga

SEQ ID NO: 98149 - DNA, 20 bp, synthetic construct
  source 1..20: mol_type = other DNA
tgacagagatgttagacaag

SEQ ID NO: 98150 - DNA, 20 bp, synthetic construct
  source 1..20: mol_type = other DNA
ttgacagagatgttagacaa

SEQ ID NO: 98151 - DNA, 20 bp, synthetic construct
  source 1..20: mol_type = other DNA
cttgacagagatgttagaca

SEQ ID NO: 98152 - DNA, 20 bp, synthetic construct
  source 1..20: mol_type = other DNA
gcttgacagagatgttagac

SEQ ID NO: 98153 - DNA, 20 bp, synthetic construct
  source 1..20: mol_type = other DNA
tgcttgacagagatgttaga

SEQ ID NO: 98154 - DNA, 20 bp, synthetic construct
  source 1..20: mol_type = other DNA
ttgcttgacagagatgttag

SEQ ID NO: 98155 - DNA, 20 bp, synthetic construct
  source 1..20: mol_type = other DNA
cttgcttgacagagatgtta

SEQ ID NO: 98156 - DNA, 20 bp, synthetic construct
  source 1..20: mol_type = other DNA
acttgcttgacagagatgtt

SEQ ID NO: 98157 - DNA, 20 bp, synthetic construct
  source 1..20: mol_type = other DNA
aacttgcttgacagagatgt

SEQ ID NO: 98158 - DNA, 20 bp, synthetic construct
  source 1..20: mol_type = other DNA
gaacttgcttgacagagatg

SEQ ID NO: 98159 - DNA, 20 bp, synthetic construct
  source 1..20: mol_type = other DNA
agaacttgcttgacagagat

SEQ ID NO: 98160 - DNA, 20 bp, synthetic construct
  source 1..20: mol_type = other DNA
cagaacttgcttgacagaga

SEQ ID NO: 98161 - DNA, 20 bp, synthetic construct
  source 1..20: mol_type = other DNA
acagaacttgcttgacagag

SEQ ID NO: 98162 - DNA, 20 bp, synthetic construct
  source 1..20: mol_type = other DNA
aacagaacttgcttgacaga

SEQ ID NO: 98163 - DNA, 20 bp, synthetic construct
  source 1..20: mol_type = other DNA
aaacagaacttgcttgacag

SEQ ID NO: 98164 - DNA, 20 bp, synthetic construct
  source 1..20: mol_type = other DNA
caaacagaacttgcttgaca

SEQ ID NO: 98165 - DNA, 20 bp, synthetic construct
  source 1..20: mol_type = other DNA
acaaacagaacttgcttgac

SEQ ID NO: 98166 - DNA, 20 bp, synthetic construct
  source 1..20: mol_type = other DNA
tacaaacagaacttgcttga

SEQ ID NO: 98167 - DNA, 20 bp, synthetic construct
  source 1..20: mol_type = other DNA
atacaaacagaacttgcttg

SEQ ID NO: 98168 - DNA, 20 bp, synthetic construct
  source 1..20: mol_type = other DNA
gatacaaacagaacttgctt

SEQ ID NO: 98169 - DNA, 20 bp, synthetic construct
  source 1..20: mol_type = other DNA
agatacaaacagaacttgct

SEQ ID NO: 98170 - DNA, 20 bp, synthetic construct
  source 1..20: mol_type = other DNA
cagatacaaacagaacttgc

SEQ ID NO: 98171 - DNA, 20 bp, synthetic construct
  source 1..20: mol_type = other DNA
gcagatacaaacagaacttg

SEQ ID NO: 98172 - DNA, 20 bp, synthetic construct
  source 1..20: mol_type = other DNA
tgcagatacaaacagaactt

SEQ ID NO: 98173 - DNA, 20 bp, synthetic construct
  source 1..20: mol_type = other DNA
gtgcagatacaaacagaact

SEQ ID NO: 98174 - DNA, 20 bp, synthetic construct
  source 1..20: mol_type = other DNA
agtgcagatacaaacagaac

SEQ ID NO: 98175 - DNA, 20 bp, synthetic construct
  source 1..20: mol_type = other DNA
cagtgcagatacaaacagaa

SEQ ID NO: 98176 - DNA, 20 bp, synthetic construct
  source 1..20: mol_type = other DNA
acagtgcagatacaaacaga

SEQ ID NO: 98177 - DNA, 20 bp, synthetic construct
  source 1..20: mol_type = other DNA
cacagtgcagatacaaacag

SEQ ID NO: 98178 - DNA, 20 bp, synthetic construct
  source 1..20: mol_type = other DNA
acacagtgcagatacaaaca

SEQ ID NO: 98179 - DNA, 20 bp, synthetic construct
  source 1..20: mol_type = other DNA
tacacagtgcagatacaaac

SEQ ID NO: 98180 - DNA, 20 bp, synthetic construct
  source 1..20: mol_type = other DNA
atacacagtgcagatacaaa

SEQ ID NO: 98181 - DNA, 20 bp, synthetic construct
  source 1..20: mol_type = other DNA
tatacacagtgcagatacaa

SEQ ID NO: 98182 - DNA, 20 bp, synthetic construct
  source 1..20: mol_type = other DNA
atatacacagtgcagataca

SEQ ID NO: 98183 - DNA, 20 bp, synthetic construct
  source 1..20: mol_type = other DNA
aatatacacagtgcagatac

SEQ ID NO: 98184 - DNA, 20 bp, synthetic construct
  source 1..20: mol_type = other DNA
taatatacacagtgcagata

SEQ ID NO: 98185 - DNA, 20 bp, synthetic construct
  source 1..20: mol_type = other DNA
ctaatatacacagtgcagat

SEQ ID NO: 98186 - DNA, 20 bp, synthetic construct
  source 1..20: mol_type = other DNA
cctaatatacacagtgcaga

SEQ ID NO: 98187 - DNA, 20 bp, synthetic construct
  source 1..20: mol_type = other DNA
gcctaatatacacagtgcag

SEQ ID NO: 98188 - DNA, 20 bp, synthetic construct
  source 1..20: mol_type = other DNA
tgcctaatatacacagtgca

SEQ ID NO: 98189 - DNA, 20 bp, synthetic construct
  source 1..20: mol_type = other DNA
ctgcctaatatacacagtgc

SEQ ID NO: 98190 - DNA, 20 bp, synthetic construct
  source 1..20: mol_type = other DNA
gctgcctaatatacacagtg

SEQ ID NO: 98191 - DNA, 20 bp, synthetic construct
  source 1..20: mol_type = other DNA
agctgcctaatatacacagt

SEQ ID NO: 98192 - DNA, 20 bp, synthetic construct
  source 1..20: mol_type = other DNA
aagctgcctaatatacacag

SEQ ID NO: 98193 - DNA, 20 bp, synthetic construct
  source 1..20: mol_type = other DNA
caagctgcctaatatacaca

SEQ ID NO: 98194 - DNA, 20 bp, synthetic construct
  source 1..20: mol_type = other DNA
ccaagctgcctaatatacac

SEQ ID NO: 98195 - DNA, 20 bp, synthetic construct
  source 1..20: mol_type = other DNA
cccaagctgcctaatataca

SEQ ID NO: 98196 - DNA, 20 bp, synthetic construct
  source 1..20: mol_type = other DNA
gcccaagctgcctaatatac

SEQ ID NO: 98197 - DNA, 20 bp, synthetic construct
  source 1..20: mol_type = other DNA
tgcccaagctgcctaatata

SEQ ID NO: 98198 - DNA, 20 bp, synthetic construct
  source 1..20: mol_type = other DNA
ttgcccaagctgcctaatat

SEQ ID NO: 98199 - DNA, 20 bp, synthetic construct
  source 1..20: mol_type = other DNA
tttgcccaagctgcctaata

SEQ ID NO: 98200 - DNA, 20 bp, synthetic construct
  source 1..20: mol_type = other DNA
ctttgcccaagctgcctaat

SEQ ID NO: 98201 - DNA, 20 bp, synthetic construct
  source 1..20: mol_type = other DNA
tctttgcccaagctgcctaa

SEQ ID NO: 98202 - DNA, 20 bp, synthetic construct
  source 1..20: mol_type = other DNA
ctctttgcccaagctgccta

SEQ ID NO: 98203 - DNA, 20 bp, synthetic construct
  source 1..20: mol_type = other DNA
tctctttgcccaagctgcct

SEQ ID NO: 98204 - DNA, 20 bp, synthetic construct
  source 1..20: mol_type = other DNA
ttctctttgcccaagctgcc

SEQ ID NO: 98205 - DNA, 20 bp, synthetic construct
  source 1..20: mol_type = other DNA
cttctctttgcccaagctgc

SEQ ID NO: 98206 - DNA, 20 bp, synthetic construct
  source 1..20: mol_type = other DNA
acttctctttgcccaagctg

SEQ ID NO: 98207 - DNA, 20 bp, synthetic construct
  source 1..20: mol_type = other DNA
aacttctctttgcccaagct

SEQ ID NO: 98208 - DNA, 20 bp, synthetic construct
  source 1..20: mol_type = other DNA
taacttctctttgcccaagc

SEQ ID NO: 98209 - DNA, 20 bp, synthetic construct
  source 1..20: mol_type = other DNA
ttaacttctctttgcccaag

SEQ ID NO: 98210 - DNA, 20 bp, synthetic construct
  source 1..20: mol_type = other DNA
cttaacttctctttgcccaa

SEQ ID NO: 98211 - DNA, 20 bp, synthetic construct
  source 1..20: mol_type = other DNA
acttaacttctctttgccca

SEQ ID NO: 98212 - DNA, 20 bp, synthetic construct
  source 1..20: mol_type = other DNA
tacttaacttctctttgccc

SEQ ID NO: 98213 - DNA, 20 bp, synthetic construct
  source 1..20: mol_type = other DNA
ttacttaacttctctttgcc

SEQ ID NO: 98214 - DNA, 20 bp, synthetic construct
  source 1..20: mol_type = other DNA
attacttaacttctctttgc

SEQ ID NO: 98215 - DNA, 20 bp, synthetic construct
  source 1..20: mol_type = other DNA
gattacttaacttctctttg

SEQ ID NO: 98216 - DNA, 20 bp, synthetic construct
  source 1..20: mol_type = other DNA
agattacttaacttctcttt

SEQ ID NO: 98217 - DNA, 20 bp, synthetic construct
  source 1..20: mol_type = other DNA
cagattacttaacttctctt

SEQ ID NO: 98218 - DNA, 20 bp, synthetic construct
  source 1..20: mol_type = other DNA
gcagattacttaacttctct

SEQ ID NO: 98219 - DNA, 20 bp, synthetic construct
  source 1..20: mol_type = other DNA
ggcagattacttaacttctc

SEQ ID NO: 98220 - DNA, 20 bp, synthetic construct
  source 1..20: mol_type = other DNA
gggcagattacttaacttct

SEQ ID NO: 98221 - DNA, 20 bp, synthetic construct
  source 1..20: mol_type = other DNA
tgggcagattacttaacttc

SEQ ID NO: 98222 - DNA, 20 bp, synthetic construct
  source 1..20: mol_type = other DNA
ttgggcagattacttaactt

SEQ ID NO: 98223 - DNA, 20 bp, synthetic construct
  source 1..20: mol_type = other DNA
tttgggcagattacttaact

SEQ ID NO: 98224 - DNA, 20 bp, synthetic construct
  source 1..20: mol_type = other DNA
gtttgggcagattacttaac

SEQ ID NO: 98225 - DNA, 20 bp, synthetic construct
  source 1..20: mol_type = other DNA
agtttgggcagattacttaa

SEQ ID NO: 98226 - DNA, 20 bp, synthetic construct
  source 1..20: mol_type = other DNA
gagtttgggcagattactta

SEQ ID NO: 98227 - DNA, 20 bp, synthetic construct
  source 1..20: mol_type = other DNA
tgagtttgggcagattactt

SEQ ID NO: 98228 - DNA, 20 bp, synthetic construct
  source 1..20: mol_type = other DNA
gtgagtttgggcagattact

SEQ ID NO: 98229 - DNA, 20 bp, synthetic construct
  source 1..20: mol_type = other DNA
tgtgagtttgggcagattac

SEQ ID NO: 98230 - DNA, 20 bp, synthetic construct
  source 1..20: mol_type = other DNA
atgtgagtttgggcagatta

SEQ ID NO: 98231 - DNA, 20 bp, synthetic construct
  source 1..20: mol_type = other DNA
catgtgagtttgggcagatt

SEQ ID NO: 98232 - DNA, 20 bp, synthetic construct
  source 1..20: mol_type = other DNA
ccatgtgagtttgggcagat

SEQ ID NO: 98233 - DNA, 20 bp, synthetic construct
  source 1..20: mol_type = other DNA
gccatgtgagtttgggcaga

SEQ ID NO: 98234 - DNA, 20 bp, synthetic construct
  source 1..20: mol_type = other DNA
agccatgtgagtttgggcag

SEQ ID NO: 98235 - DNA, 20 bp, synthetic construct
  source 1..20: mol_type = other DNA
tagccatgtgagtttgggca

SEQ ID NO: 98236 - DNA, 20 bp, synthetic construct
  source 1..20: mol_type = other DNA
ctagccatgtgagtttgggc

SEQ ID NO: 98237 - DNA, 20 bp, synthetic construct
  source 1..20: mol_type = other DNA
actagccatgtgagtttggg

SEQ ID NO: 98238 - DNA, 20 bp, synthetic construct
  source 1..20: mol_type = other DNA
tactagccatgtgagtttgg

SEQ ID NO: 98239 - DNA, 20 bp, synthetic construct
  source 1..20: mol_type = other DNA
ttactagccatgtgagtttg

SEQ ID NO: 98240 - DNA, 20 bp, synthetic construct
  source 1..20: mol_type = other DNA
cttactagccatgtgagttt

SEQ ID NO: 98241 - DNA, 20 bp, synthetic construct
  source 1..20: mol_type = other DNA
acttactagccatgtgagtt

SEQ ID NO: 98242 - DNA, 20 bp, synthetic construct
  source 1..20: mol_type = other DNA
tacttactagccatgtgagt

SEQ ID NO: 98243 - DNA, 20 bp, synthetic construct
  source 1..20: mol_type = other DNA
ttacttactagccatgtgag

SEQ ID NO: 98244 - DNA, 20 bp, synthetic construct
  source 1..20: mol_type = other DNA
cttacttactagccatgtga

SEQ ID NO: 98245 - DNA, 20 bp, synthetic construct
  source 1..20: mol_type = other DNA
tcttacttactagccatgtg

SEQ ID NO: 98246 - DNA, 20 bp, synthetic construct
  source 1..20: mol_type = other DNA
ctcttacttactagccatgt

SEQ ID NO: 98247 - DNA, 20 bp, synthetic construct
  source 1..20: mol_type = other DNA
cctcttacttactagccatg

SEQ ID NO: 98248 - DNA, 20 bp, synthetic construct
  source 1..20: mol_type = other DNA
ccctcttacttactagccat

SEQ ID NO: 98249 - DNA, 20 bp, synthetic construct
  source 1..20: mol_type = other DNA
gccctcttacttactagcca

SEQ ID NO: 98250 - DNA, 20 bp, synthetic construct
  source 1..20: mol_type = other DNA
agccctcttacttactagcc

SEQ ID NO: 98251 - DNA, 20 bp, synthetic construct
  source 1..20: mol_type = other DNA
cagccctcttacttactagc

SEQ ID NO: 98252 - DNA, 20 bp, synthetic construct
  source 1..20: mol_type = other DNA
tcagccctcttacttactag

SEQ ID NO: 98253 - DNA, 20 bp, synthetic construct
  source 1..20: mol_type = other DNA
gtcagccctcttacttacta

SEQ ID NO: 98254 - DNA, 20 bp, synthetic construct
  source 1..20: mol_type = other DNA
ggtcagccctcttacttact

SEQ ID NO: 98255 - DNA, 20 bp, synthetic construct
  source 1..20: mol_type = other DNA
tggtcagccctcttacttac

SEQ ID NO: 98256 - DNA, 20 bp, synthetic construct
  source 1..20: mol_type = other DNA
atggtcagccctcttactta

SEQ ID NO: 98257 - DNA, 20 bp, synthetic construct
  source 1..20: mol_type = other DNA
gatggtcagccctcttactt

SEQ ID NO: 98258 - DNA, 20 bp, synthetic construct
  source 1..20: mol_type = other DNA
agatggtcagccctcttact

SEQ ID NO: 98259 - DNA, 20 bp, synthetic construct
  source 1..20: mol_type = other DNA
cagatggtcagccctcttac

SEQ ID NO: 98260 - DNA, 20 bp, synthetic construct
  source 1..20: mol_type = other DNA
ccagatggtcagccctctta

SEQ ID NO: 98261 - DNA, 20 bp, synthetic construct
  source 1..20: mol_type = other DNA
accagatggtcagccctctt

SEQ ID NO: 98262 - DNA, 20 bp, synthetic construct
  source 1..20: mol_type = other DNA
caccagatggtcagccctct

SEQ ID NO: 98263 - DNA, 20 bp, synthetic construct
  source 1..20: mol_type = other DNA
acaccagatggtcagccctc

SEQ ID NO: 98264 - DNA, 20 bp, synthetic construct
  source 1..20: mol_type = other DNA
aacaccagatggtcagccct

SEQ ID NO: 98265 - DNA, 20 bp, synthetic construct
  source 1..20: mol_type = other DNA
aaacaccagatggtcagccc

SEQ ID NO: 98266 - DNA, 20 bp, synthetic construct
  source 1..20: mol_type = other DNA
taaacaccagatggtcagcc

SEQ ID NO: 98267 - DNA, 20 bp, synthetic construct
  source 1..20: mol_type = other DNA
ttaaacaccagatggtcagc

SEQ ID NO: 98268 - DNA, 20 bp, synthetic construct
  source 1..20: mol_type = other DNA
cttaaacaccagatggtcag

SEQ ID NO: 98269 - DNA, 20 bp, synthetic construct
  source 1..20: mol_type = other DNA
gcttaaacaccagatggtca

SEQ ID NO: 98270 - DNA, 20 bp, synthetic construct
  source 1..20: mol_type = other DNA
agcttaaacaccagatggtc

SEQ ID NO: 98271 - DNA, 20 bp, synthetic construct
  source 1..20: mol_type = other DNA
aagcttaaacaccagatggt

SEQ ID NO: 98272 - DNA, 20 bp, synthetic construct
  source 1..20: mol_type = other DNA
gaagcttaaacaccagatgg

SEQ ID NO: 98273 - DNA, 20 bp, synthetic construct
  source 1..20: mol_type = other DNA
agaagcttaaacaccagatg

SEQ ID NO: 98274 - DNA, 20 bp, synthetic construct
  source 1..20: mol_type = other DNA
tagaagcttaaacaccagat

SEQ ID NO: 98275 - DNA, 20 bp, synthetic construct
  source 1..20: mol_type = other DNA
ctagaagcttaaacaccaga

SEQ ID NO: 98276 - DNA, 20 bp, synthetic construct
  source 1..20: mol_type = other DNA
gctagaagcttaaacaccag

SEQ ID NO: 98277 - DNA, 20 bp, synthetic construct
  source 1..20: mol_type = other DNA
tgctagaagcttaaacacca

SEQ ID NO: 98278 - DNA, 20 bp, synthetic construct
  source 1..20: mol_type = other DNA
ctgctagaagcttaaacacc

SEQ ID NO: 98279 - DNA, 20 bp, synthetic construct
  source 1..20: mol_type = other DNA
actgctagaagcttaaacac

SEQ ID NO: 98280 - DNA, 20 bp, synthetic construct
  source 1..20: mol_type = other DNA
cactgctagaagcttaaaca

SEQ ID NO: 98281 - DNA, 20 bp, synthetic construct
  source 1..20: mol_type = other DNA
gcactgctagaagcttaaac

SEQ ID NO: 98282 - DNA, 20 bp, synthetic construct
  source 1..20: mol_type = other DNA
agcactgctagaagcttaaa

SEQ ID NO: 98283 - DNA, 20 bp, synthetic construct
  source 1..20: mol_type = other DNA
aagcactgctagaagcttaa

SEQ ID NO: 98284 - DNA, 20 bp, synthetic construct
  source 1..20: mol_type = other DNA
aaagcactgctagaagctta

SEQ ID NO: 98285 - DNA, 20 bp, synthetic construct
  source 1..20: mol_type = other DNA
caaagcactgctagaagctt

SEQ ID NO: 98286 - DNA, 20 bp, synthetic construct
  source 1..20: mol_type = other DNA
tcaaagcactgctagaagct

SEQ ID NO: 98287 - DNA, 20 bp, synthetic construct
  source 1..20: mol_type = other DNA
ttcaaagcactgctagaagc

SEQ ID NO: 98288 - DNA, 20 bp, synthetic construct
  source 1..20: mol_type = other DNA
attcaaagcactgctagaag

SEQ ID NO: 98289 - DNA, 20 bp, synthetic construct
  source 1..20: mol_type = other DNA
tattcaaagcactgctagaa

SEQ ID NO: 98290 - DNA, 20 bp, synthetic construct
  source 1..20: mol_type = other DNA
ctattcaaagcactgctaga

SEQ ID NO: 98291 - DNA, 20 bp, synthetic construct
  source 1..20: mol_type = other DNA
actattcaaagcactgctag

SEQ ID NO: 98292 - DNA, 20 bp, synthetic construct
  source 1..20: mol_type = other DNA
tactattcaaagcactgcta

SEQ ID NO: 98293 - DNA, 20 bp, synthetic construct
  source 1..20: mol_type = other DNA
ttactattcaaagcactgct

SEQ ID NO: 98294 - DNA, 20 bp, synthetic construct
  source 1..20: mol_type = other DNA
gttactattcaaagcactgc

SEQ ID NO: 98295 - DNA, 20 bp, synthetic construct
  source 1..20: mol_type = other DNA
agttactattcaaagcactg

SEQ ID NO: 98296 - DNA, 20 bp, synthetic construct
  source 1..20: mol_type = other DNA
tagttactattcaaagcact

SEQ ID NO: 98297 - DNA, 20 bp, synthetic construct
  source 1..20: mol_type = other DNA
ttagttactattcaaagcac

SEQ ID NO: 98298 - DNA, 20 bp, synthetic construct
  source 1..20: mol_type = other DNA
attagttactattcaaagca

SEQ ID NO: 98299 - DNA, 20 bp, synthetic construct
  source 1..20: mol_type = other DNA
cattagttactattcaaagc

SEQ ID NO: 98300 - DNA, 20 bp, synthetic construct
  source 1..20: mol_type = other DNA
gcattagttactattcaaag

SEQ ID NO: 98301 - DNA, 20 bp, synthetic construct
  source 1..20: mol_type = other DNA
tgcattagttactattcaaa

SEQ ID NO: 98302 - DNA, 20 bp, synthetic construct
  source 1..20: mol_type = other DNA
atgcattagttactattcaa

SEQ ID NO: 98303 - DNA, 20 bp, synthetic construct
  source 1..20: mol_type = other DNA
tatgcattagttactattca

SEQ ID NO: 98304 - DNA, 20 bp, synthetic construct
  source 1..20: mol_type = other DNA
ctatgcattagttactattc

SEQ ID NO: 98305 - DNA, 20 bp, synthetic construct
  source 1..20: mol_type = other DNA
actatgcattagttactatt

SEQ ID NO: 98306 - DNA, 20 bp, synthetic construct
  source 1..20: mol_type = other DNA
cactatgcattagttactat

SEQ ID NO: 98307 - DNA, 20 bp, synthetic construct
  source 1..20: mol_type = other DNA
gcactatgcattagttacta

SEQ ID NO: 98308 - DNA, 20 bp, synthetic construct
  source 1..20: mol_type = other DNA
tgcactatgcattagttact

SEQ ID NO: 98309 - DNA, 20 bp, synthetic construct
  source 1..20: mol_type = other DNA
atgcactatgcattagttac

SEQ ID NO: 98310 - DNA, 20 bp, synthetic construct
  source 1..20: mol_type = other DNA
catgcactatgcattagtta

SEQ ID NO: 98311 - DNA, 20 bp, synthetic construct
  source 1..20: mol_type = other DNA
gcatgcactatgcattagtt

SEQ ID NO: 98312 - DNA, 20 bp, synthetic construct
  source 1..20: mol_type = other DNA
agcatgcactatgcattagt

SEQ ID NO: 98313 - DNA, 20 bp, synthetic construct
  source 1..20: mol_type = other DNA
cagcatgcactatgcattag

SEQ ID NO: 98314 - DNA, 20 bp, synthetic construct
  source 1..20: mol_type = other DNA
gcagcatgcactatgcatta

SEQ ID NO: 98315 - DNA, 20 bp, synthetic construct
  source 1..20: mol_type = other DNA
tgcagcatgcactatgcatt

SEQ ID NO: 98316 - DNA, 20 bp, synthetic construct
  source 1..20: mol_type = other DNA
gtgcagcatgcactatgcat

SEQ ID NO: 98317 - DNA, 20 bp, synthetic construct
  source 1..20: mol_type = other DNA
agtgcagcatgcactatgca

SEQ ID NO: 98318 - DNA, 20 bp, synthetic construct
  source 1..20: mol_type = other DNA
cagtgcagcatgcactatgc

SEQ ID NO: 98319 - DNA, 20 bp, synthetic construct
  source 1..20: mol_type = other DNA
acagtgcagcatgcactatg

SEQ ID NO: 98320 - DNA, 20 bp, synthetic construct
  source 1..20: mol_type = other DNA
gacagtgcagcatgcactat

SEQ ID NO: 98321 - DNA, 20 bp, synthetic construct
  source 1..20: mol_type = other DNA
tgacagtgcagcatgcacta

SEQ ID NO: 98322 - DNA, 20 bp, synthetic construct
  source 1..20: mol_type = other DNA
ctgacagtgcagcatgcact

SEQ ID NO: 98323 - DNA, 20 bp, synthetic construct
  source 1..20: mol_type = other DNA
actgacagtgcagcatgcac

SEQ ID NO: 98324 - DNA, 20 bp, synthetic construct
  source 1..20: mol_type = other DNA
gactgacagtgcagcatgca

SEQ ID NO: 98325 - DNA, 20 bp, synthetic construct
  source 1..20: mol_type = other DNA
tgactgacagtgcagcatgc

SEQ ID NO: 98326 - DNA, 20 bp, synthetic construct
  source 1..20: mol_type = other DNA
ctgactgacagtgcagcatg

SEQ ID NO: 98327 - DNA, 20 bp, synthetic construct
  source 1..20: mol_type = other DNA
actgactgacagtgcagcat

SEQ ID NO: 98328 - DNA, 20 bp, synthetic construct
  source 1..20: mol_type = other DNA
cactgactgacagtgcagca

SEQ ID NO: 98329 - DNA, 20 bp, synthetic construct
  source 1..20: mol_type = other DNA
tcactgactgacagtgcagc

SEQ ID NO: 98330 - DNA, 20 bp, synthetic construct
  source 1..20: mol_type = other DNA
atcactgactgacagtgcag

SEQ ID NO: 98331 - DNA, 20 bp, synthetic construct
  source 1..20: mol_type = other DNA
aatcactgactgacagtgca

SEQ ID NO: 98332 - DNA, 20 bp, synthetic construct
  source 1..20: mol_type = other DNA
gaatcactgactgacagtgc

SEQ ID NO: 98333 - DNA, 20 bp, synthetic construct
  source 1..20: mol_type = other DNA
tgaatcactgactgacagtg

SEQ ID NO: 98334 - DNA, 20 bp, synthetic construct
  source 1..20: mol_type = other DNA
atgaatcactgactgacagt

SEQ ID NO: 98335 - DNA, 20 bp, synthetic construct
  source 1..20: mol_type = other DNA
aatgaatcactgactgacag

SEQ ID NO: 98336 - DNA, 20 bp, synthetic construct
  source 1..20: mol_type = other DNA
taatgaatcactgactgaca

SEQ ID NO: 98337 - DNA, 20 bp, synthetic construct
  source 1..20: mol_type = other DNA
ctaatgaatcactgactgac

SEQ ID NO: 98338 - DNA, 20 bp, synthetic construct
  source 1..20: mol_type = other DNA
tctaatgaatcactgactga

SEQ ID NO: 98339 - DNA, 20 bp, synthetic construct
  source 1..20: mol_type = other DNA
ctctaatgaatcactgactg

SEQ ID NO: 98340 - DNA, 20 bp, synthetic construct
  source 1..20: mol_type = other DNA
gctctaatgaatcactgact

SEQ ID NO: 98341 - DNA, 20 bp, synthetic construct
  source 1..20: mol_type = other DNA
agctctaatgaatcactgac

SEQ ID NO: 98342 - DNA, 20 bp, synthetic construct
  source 1..20: mol_type = other DNA
tagctctaatgaatcactga

SEQ ID NO: 98343 - DNA, 20 bp, synthetic construct
  source 1..20: mol_type = other DNA
ttagctctaatgaatcactg

SEQ ID NO: 98344 - DNA, 20 bp, synthetic construct
  source 1..20: mol_type = other DNA
gttagctctaatgaatcact

SEQ ID NO: 98345 - DNA, 20 bp, synthetic construct
  source 1..20: mol_type = other DNA
agttagctctaatgaatcac

SEQ ID NO: 98346 - DNA, 20 bp, synthetic construct
  source 1..20: mol_type = other DNA
aagttagctctaatgaatca

SEQ ID NO: 98347 - DNA, 20 bp, synthetic construct
  source 1..20: mol_type = other DNA
gaagttagctctaatgaatc

SEQ ID NO: 98348 - DNA, 20 bp, synthetic construct
  source 1..20: mol_type = other DNA
tgaagttagctctaatgaat

SEQ ID NO: 98349 - DNA, 20 bp, synthetic construct
  source 1..20: mol_type = other DNA
atgaagttagctctaatgaa

SEQ ID NO: 98350 - DNA, 20 bp, synthetic construct
  source 1..20: mol_type = other DNA
catgaagttagctctaatga

SEQ ID NO: 98351 - DNA, 20 bp, synthetic construct
  source 1..20: mol_type = other DNA
tcatgaagttagctctaatg

SEQ ID NO: 98352 - DNA, 20 bp, synthetic construct
  source 1..20: mol_type = other DNA
gtcatgaagttagctctaat

SEQ ID NO: 98353 - DNA, 20 bp, synthetic construct
  source 1..20: mol_type = other DNA
tgtcatgaagttagctctaa

SEQ ID NO: 98354 - DNA, 20 bp, synthetic construct
  source 1..20: mol_type = other DNA
atgtcatgaagttagctcta

SEQ ID NO: 98355 - DNA, 20 bp, synthetic construct
  source 1..20: mol_type = other DNA
catgtcatgaagttagctct

SEQ ID NO: 98356 - DNA, 20 bp, synthetic construct
  source 1..20: mol_type = other DNA
gcatgtcatgaagttagctc

SEQ ID NO: 98357 - DNA, 20 bp, synthetic construct
  source 1..20: mol_type = other DNA
agcatgtcatgaagttagct

SEQ ID NO: 98358 - DNA, 20 bp, synthetic construct
  source 1..20: mol_type = other DNA
gagcatgtcatgaagttagc

SEQ ID NO: 98359 - DNA, 20 bp, synthetic construct
  source 1..20: mol_type = other DNA
tgagcatgtcatgaagttag

SEQ ID NO: 98360 - DNA, 20 bp, synthetic construct
  source 1..20: mol_type = other DNA
atgagcatgtcatgaagtta

SEQ ID NO: 98361 - DNA, 20 bp, synthetic construct
  source 1..20: mol_type = other DNA
tatgagcatgtcatgaagtt

SEQ ID NO: 98362 - DNA, 20 bp, synthetic construct
  source 1..20: mol_type = other DNA
ctatgagcatgtcatgaagt

SEQ ID NO: 98363 - DNA, 20 bp, synthetic construct
  source 1..20: mol_type = other DNA
gctatgagcatgtcatgaag

SEQ ID NO: 98364 - DNA, 20 bp, synthetic construct
  source 1..20: mol_type = other DNA
ggctatgagcatgtcatgaa

SEQ ID NO: 98365 - DNA, 20 bp, synthetic construct
  source 1..20: mol_type = other DNA
gggctatgagcatgtcatga

SEQ ID NO: 98366 - DNA, 20 bp, synthetic construct
  source 1..20: mol_type = other DNA
ggggctatgagcatgtcatg

SEQ ID NO: 98367 - DNA, 20 bp, synthetic construct
  source 1..20: mol_type = other DNA
tggggctatgagcatgtcat

SEQ ID NO: 98368 - DNA, 20 bp, synthetic construct
  source 1..20: mol_type = other DNA
ttggggctatgagcatgtca

SEQ ID NO: 98369 - DNA, 20 bp, synthetic construct
  source 1..20: mol_type = other DNA
tttggggctatgagcatgtc

SEQ ID NO: 98370 - DNA, 20 bp, synthetic construct
  source 1..20: mol_type = other DNA
gtttggggctatgagcatgt

SEQ ID NO: 98371 - DNA, 20 bp, synthetic construct
  source 1..20: mol_type = other DNA
agtttggggctatgagcatg

SEQ ID NO: 98372 - DNA, 20 bp, synthetic construct
  source 1..20: mol_type = other DNA
cagtttggggctatgagcat

SEQ ID NO: 98373 - DNA, 20 bp, synthetic construct
  source 1..20: mol_type = other DNA
gcagtttggggctatgagca

SEQ ID NO: 98374 - DNA, 20 bp, synthetic construct
  source 1..20: mol_type = other DNA
tgcagtttggggctatgagc

SEQ ID NO: 98375 - DNA, 20 bp, synthetic construct
  source 1..20: mol_type = other DNA
atgcagtttggggctatgag

SEQ ID NO: 98376 - DNA, 20 bp, synthetic construct
  source 1..20: mol_type = other DNA
aatgcagtttggggctatga

SEQ ID NO: 98377 - DNA, 20 bp, synthetic construct
  source 1..20: mol_type = other DNA
aaatgcagtttggggctatg

SEQ ID NO: 98378 - DNA, 20 bp, synthetic construct
  source 1..20: mol_type = other DNA
caaatgcagtttggggctat

SEQ ID NO: 98379 - DNA, 20 bp, synthetic construct
  source 1..20: mol_type = other DNA
acaaatgcagtttggggcta

SEQ ID NO: 98380 - DNA, 20 bp, synthetic construct
  source 1..20: mol_type = other DNA
aacaaatgcagtttggggct

SEQ ID NO: 98381 - DNA, 20 bp, synthetic construct
  source 1..20: mol_type = other DNA
gaacaaatgcagtttggggc

SEQ ID NO: 98382 - DNA, 20 bp, synthetic construct
  source 1..20: mol_type = other DNA
tgaacaaatgcagtttgggg

SEQ ID NO: 98383 - DNA, 20 bp, synthetic construct
  source 1..20: mol_type = other DNA
gtgaacaaatgcagtttggg

SEQ ID NO: 98384 - DNA, 20 bp, synthetic construct
  source 1..20: mol_type = other DNA
tgtgaacaaatgcagtttgg

SEQ ID NO: 98385 - DNA, 20 bp, synthetic construct
  source 1..20: mol_type = other DNA
ttgtgaacaaatgcagtttg

SEQ ID NO: 98386 - DNA, 20 bp, synthetic construct
  source 1..20: mol_type = other DNA
tttgtgaacaaatgcagttt

SEQ ID NO: 98387 - DNA, 20 bp, synthetic construct
  source 1..20: mol_type = other DNA
atttgtgaacaaatgcagtt

SEQ ID NO: 98388 - DNA, 20 bp, synthetic construct
  source 1..20: mol_type = other DNA
tatttgtgaacaaatgcagt

SEQ ID NO: 98389 - DNA, 20 bp, synthetic construct
  source 1..20: mol_type = other DNA
atatttgtgaacaaatgcag

SEQ ID NO: 98390 - DNA, 20 bp, synthetic construct
  source 1..20: mol_type = other DNA
gatatttgtgaacaaatgca

SEQ ID NO: 98391 - DNA, 20 bp, synthetic construct
  source 1..20: mol_type = other DNA
agatatttgtgaacaaatgc

SEQ ID NO: 98392 - DNA, 20 bp, synthetic construct
  source 1..20: mol_type = other DNA
cagatatttgtgaacaaatg

SEQ ID NO: 98393 - DNA, 20 bp, synthetic construct
  source 1..20: mol_type = other DNA
acagatatttgtgaacaaat

SEQ ID NO: 98394 - DNA, 20 bp, synthetic construct
  source 1..20: mol_type = other DNA
tacagatatttgtgaacaaa

SEQ ID NO: 98395 - DNA, 20 bp, synthetic construct
  source 1..20: mol_type = other DNA
ctacagatatttgtgaacaa

SEQ ID NO: 98396 - DNA, 20 bp, synthetic construct
  source 1..20: mol_type = other DNA
actacagatatttgtgaaca

SEQ ID NO: 98397 - DNA, 20 bp, synthetic construct
  source 1..20: mol_type = other DNA
gactacagatatttgtgaac

SEQ ID NO: 98398 - DNA, 20 bp, synthetic construct
  source 1..20: mol_type = other DNA
ggactacagatatttgtgaa

SEQ ID NO: 98399 - DNA, 20 bp, synthetic construct
  source 1..20: mol_type = other DNA
aggactacagatatttgtga

SEQ ID NO: 98400 - DNA, 20 bp, synthetic construct
  source 1..20: mol_type = other DNA
aaggactacagatatttgtg

SEQ ID NO: 98401 - DNA, 20 bp, synthetic construct
  source 1..20: mol_type = other DNA
gaaggactacagatatttgt

SEQ ID NO: 98402 - DNA, 20 bp, synthetic construct
  source 1..20: mol_type = other DNA
tgaaggactacagatatttg

SEQ ID NO: 98403 - DNA, 20 bp, synthetic construct
  source 1..20: mol_type = other DNA
atgaaggactacagatattt

SEQ ID NO: 98404 - DNA, 20 bp, synthetic construct
  source 1..20: mol_type = other DNA
aatgaaggactacagatatt

SEQ ID NO: 98405 - DNA, 20 bp, synthetic construct
  source 1..20: mol_type = other DNA
aaatgaaggactacagatat

SEQ ID NO: 98406 - DNA, 20 bp, synthetic construct
  source 1..20: mol_type = other DNA
taaatgaaggactacagata

SEQ ID NO: 98407 - DNA, 20 bp, synthetic construct
  source 1..20: mol_type = other DNA
ctaaatgaaggactacagat

SEQ ID NO: 98408 - DNA, 20 bp, synthetic construct
  source 1..20: mol_type = other DNA
cctaaatgaaggactacaga

SEQ ID NO: 98409 - DNA, 20 bp, synthetic construct
  source 1..20: mol_type = other DNA
gcctaaatgaaggactacag

SEQ ID NO: 98410 - DNA, 20 bp, synthetic construct
  source 1..20: mol_type = other DNA
tgcctaaatgaaggactaca

SEQ ID NO: 98411 - DNA, 20 bp, synthetic construct
  source 1..20: mol_type = other DNA
ctgcctaaatgaaggactac

SEQ ID NO: 98412 - DNA, 20 bp, synthetic construct
  source 1..20: mol_type = other DNA
tctgcctaaatgaaggacta

SEQ ID NO: 98413 - DNA, 20 bp, synthetic construct
  source 1..20: mol_type = other DNA
ttctgcctaaatgaaggact

SEQ ID NO: 98414 - DNA, 20 bp, synthetic construct
  source 1..20: mol_type = other DNA
tttctgcctaaatgaaggac

SEQ ID NO: 98415 - DNA, 20 bp, synthetic construct
  source 1..20: mol_type = other DNA
atttctgcctaaatgaagga

SEQ ID NO: 98416 - DNA, 20 bp, synthetic construct
  source 1..20: mol_type = other DNA
tatttctgcctaaatgaagg

SEQ ID NO: 98417 - DNA, 20 bp, synthetic construct
  source 1..20: mol_type = other DNA
ctatttctgcctaaatgaag

SEQ ID NO: 98418 - DNA, 20 bp, synthetic construct
  source 1..20: mol_type = other DNA
tctatttctgcctaaatgaa

SEQ ID NO: 98419 - DNA, 20 bp, synthetic construct
  source 1..20: mol_type = other DNA
ttctatttctgcctaaatga

SEQ ID NO: 98420 - DNA, 20 bp, synthetic construct
  source 1..20: mol_type = other DNA
tttctatttctgcctaaatg

SEQ ID NO: 98421 - DNA, 20 bp, synthetic construct
  source 1..20: mol_type = other DNA
atttctatttctgcctaaat

SEQ ID NO: 98422 - DNA, 20 bp, synthetic construct
  source 1..20: mol_type = other DNA
tatttctatttctgcctaaa

SEQ ID NO: 98423 - DNA, 20 bp, synthetic construct
  source 1..20: mol_type = other DNA
gtatttctatttctgcctaa

SEQ ID NO: 98424 - DNA, 20 bp, synthetic construct
  source 1..20: mol_type = other DNA
ggtatttctatttctgccta

SEQ ID NO: 98425 - DNA, 20 bp, synthetic construct
  source 1..20: mol_type = other DNA
aggtatttctatttctgcct

SEQ ID NO: 98426 - DNA, 20 bp, synthetic construct
  source 1..20: mol_type = other DNA
aaggtatttctatttctgcc

SEQ ID NO: 98427 - DNA, 20 bp, synthetic construct
  source 1..20: mol_type = other DNA
caaggtatttctatttctgc

SEQ ID NO: 98428 - DNA, 20 bp, synthetic construct
  source 1..20: mol_type = other DNA
acaaggtatttctatttctg

SEQ ID NO: 98429 - DNA, 20 bp, synthetic construct
  source 1..20: mol_type = other DNA
cacaaggtatttctatttct

SEQ ID NO: 98430 - DNA, 20 bp, synthetic construct
  source 1..20: mol_type = other DNA
acacaaggtatttctatttc

SEQ ID NO: 98431 - DNA, 20 bp, synthetic construct
  source 1..20: mol_type = other DNA
cacacaaggtatttctattt

SEQ ID NO: 98432 - DNA, 20 bp, synthetic construct
  source 1..20: mol_type = other DNA
acacacaaggtatttctatt

SEQ ID NO: 98433 - DNA, 20 bp, synthetic construct
  source 1..20: mol_type = other DNA
aacacacaaggtatttctat

SEQ ID NO: 98434 - DNA, 20 bp, synthetic construct
  source 1..20: mol_type = other DNA
aaacacacaaggtatttcta

SEQ ID NO: 98435 - DNA, 20 bp, synthetic construct
  source 1..20: mol_type = other DNA
caaacacacaaggtatttct

SEQ ID NO: 98436 - DNA, 20 bp, synthetic construct
  source 1..20: mol_type = other DNA
acaaacacacaaggtatttc

SEQ ID NO: 98437 - DNA, 20 bp, synthetic construct
  source 1..20: mol_type = other DNA
aacaaacacacaaggtattt

SEQ ID NO: 98438 - DNA, 20 bp, synthetic construct
  source 1..20: mol_type = other DNA
caacaaacacacaaggtatt

SEQ ID NO: 98439 - DNA, 20 bp, synthetic construct
  source 1..20: mol_type = other DNA
acaacaaacacacaaggtat

SEQ ID NO: 98440 - DNA, 20 bp, synthetic construct
  source 1..20: mol_type = other DNA
aacaacaaacacacaaggta

SEQ ID NO: 98441 - DNA, 20 bp, synthetic construct
  source 1..20: mol_type = other DNA
gaacaacaaacacacaaggt

SEQ ID NO: 98442 - DNA, 20 bp, synthetic construct
  source 1..20: mol_type = other DNA
ggaacaacaaacacacaagg

SEQ ID NO: 98443 - DNA, 20 bp, synthetic construct
  source 1..20: mol_type = other DNA
aggaacaacaaacacacaag

SEQ ID NO: 98444 - DNA, 20 bp, synthetic construct
  source 1..20: mol_type = other DNA
aaggaacaacaaacacacaa

SEQ ID NO: 98445 - DNA, 20 bp, synthetic construct
  source 1..20: mol_type = other DNA
gaaggaacaacaaacacaca

SEQ ID NO: 98446 - DNA, 20 bp, synthetic construct
  source 1..20: mol_type = other DNA
ggaaggaacaacaaacacac

SEQ ID NO: 98447 - DNA, 20 bp, synthetic construct
  source 1..20: mol_type = other DNA
gggaaggaacaacaaacaca

SEQ ID NO: 98448 - DNA, 20 bp, synthetic construct
  source 1..20: mol_type = other DNA
agggaaggaacaacaaacac

SEQ ID NO: 98449 - DNA, 20 bp, synthetic construct
  source 1..20: mol_type = other DNA
aagggaaggaacaacaaaca

SEQ ID NO: 98450 - DNA, 20 bp, synthetic construct
  source 1..20: mol_type = other DNA
aaagggaaggaacaacaaac

SEQ ID NO: 98451 - DNA, 20 bp, synthetic construct
  source 1..20: mol_type = other DNA
aaaagggaaggaacaacaaa

SEQ ID NO: 98452 - DNA, 20 bp, synthetic construct
  source 1..20: mol_type = other DNA
caaaagggaaggaacaacaa

SEQ ID NO: 98453 - DNA, 20 bp, synthetic construct
  source 1..20: mol_type = other DNA
tcaaaagggaaggaacaaca

SEQ ID NO: 98454 - DNA, 20 bp, synthetic construct
  source 1..20: mol_type = other DNA
ctcaaaagggaaggaacaac

SEQ ID NO: 98455 - DNA, 20 bp, synthetic construct
  source 1..20: mol_type = other DNA
gctcaaaagggaaggaacaa

SEQ ID NO: 98456 - DNA, 20 bp, synthetic construct
  source 1..20: mol_type = other DNA
ggctcaaaagggaaggaaca

SEQ ID NO: 98457 - DNA, 20 bp, synthetic construct
  source 1..20: mol_type = other DNA
tggctcaaaagggaaggaac

SEQ ID NO: 98458 - DNA, 20 bp, synthetic construct
  source 1..20: mol_type = other DNA
atggctcaaaagggaaggaa

SEQ ID NO: 98459 - DNA, 20 bp, synthetic construct
  source 1..20: mol_type = other DNA
tatggctcaaaagggaagga

SEQ ID NO: 98460 - DNA, 20 bp, synthetic construct
  source 1..20: mol_type = other DNA
atatggctcaaaagggaagg

SEQ ID NO: 98461 - DNA, 20 bp, synthetic construct
  source 1..20: mol_type = other DNA
catatggctcaaaagggaag

SEQ ID NO: 98462 - DNA, 20 bp, synthetic construct
  source 1..20: mol_type = other DNA
gcatatggctcaaaagggaa

SEQ ID NO: 98463 - DNA, 20 bp, synthetic construct
  source 1..20: mol_type = other DNA
tgcatatggctcaaaaggga

SEQ ID NO: 98464 - DNA, 20 bp, synthetic construct
  source 1..20: mol_type = other DNA
ctgcatatggctcaaaaggg

SEQ ID NO: 98465 - DNA, 20 bp, synthetic construct
  source 1..20: mol_type = other DNA
tctgcatatggctcaaaagg

SEQ ID NO: 98466 - DNA, 20 bp, synthetic construct
  source 1..20: mol_type = other DNA
ctctgcatatggctcaaaag

SEQ ID NO: 98467 - DNA, 20 bp, synthetic construct
  source 1..20: mol_type = other DNA
actctgcatatggctcaaaa

SEQ ID NO: 98468 - DNA, 20 bp, synthetic construct
  source 1..20: mol_type = other DNA
cactctgcatatggctcaaa

SEQ ID NO: 98469 - DNA, 20 bp, synthetic construct
  source 1..20: mol_type = other DNA
gcactctgcatatggctcaa

SEQ ID NO: 98470 - DNA, 20 bp, synthetic construct
  source 1..20: mol_type = other DNA
agcactctgcatatggctca

SEQ ID NO: 98471 - DNA, 20 bp, synthetic construct
  source 1..20: mol_type = other DNA
cagcactctgcatatggctc

SEQ ID NO: 98472 - DNA, 20 bp, synthetic construct
  source 1..20: mol_type = other DNA
tcagcactctgcatatggct

SEQ ID NO: 98473 - DNA, 20 bp, synthetic construct
  source 1..20: mol_type = other DNA
atcagcactctgcatatggc

SEQ ID NO: 98474 - DNA, 20 bp, synthetic construct
  source 1..20: mol_type = other DNA
tatcagcactctgcatatgg

SEQ ID NO: 98475 - DNA, 20 bp, synthetic construct
  source 1..20: mol_type = other DNA
ctatcagcactctgcatatg

SEQ ID NO: 98476 - DNA, 20 bp, synthetic construct
  source 1..20: mol_type = other DNA
gctatcagcactctgcatat

SEQ ID NO: 98477 - DNA, 20 bp, synthetic construct
  source 1..20: mol_type = other DNA
agctatcagcactctgcata

SEQ ID NO: 98478 - DNA, 20 bp, synthetic construct
  source 1..20: mol_type = other DNA
aagctatcagcactctgcat

SEQ ID NO: 98479 - DNA, 20 bp, synthetic construct
  source 1..20: mol_type = other DNA
aaagctatcagcactctgca

SEQ ID NO: 98480 - DNA, 20 bp, synthetic construct
  source 1..20: mol_type = other DNA
taaagctatcagcactctgc

SEQ ID NO: 98481 - DNA, 20 bp, synthetic construct
  source 1..20: mol_type = other DNA
ataaagctatcagcactctg

SEQ ID NO: 98482 - DNA, 20 bp, synthetic construct
  source 1..20: mol_type = other DNA
aataaagctatcagcactct

SEQ ID NO: 98483 - DNA, 20 bp, synthetic construct
  source 1..20: mol_type = other DNA
aaataaagctatcagcactc

SEQ ID NO: 98484 - DNA, 20 bp, synthetic construct
  source 1..20: mol_type = other DNA
caaataaagctatcagcact

SEQ ID NO: 98485 - DNA, 20 bp, synthetic construct
  source 1..20: mol_type = other DNA
acaaataaagctatcagcac

SEQ ID NO: 98486 - DNA, 20 bp, synthetic construct
  source 1..20: mol_type = other DNA
cacaaataaagctatcagca

SEQ ID NO: 98487 - DNA, 20 bp, synthetic construct
  source 1..20: mol_type = other DNA
acacaaataaagctatcagc

SEQ ID NO: 98488 - DNA, 20 bp, synthetic construct
  source 1..20: mol_type = other DNA
tacacaaataaagctatcag

SEQ ID NO: 98489 - DNA, 20 bp, synthetic construct
  source 1..20: mol_type = other DNA
ttacacaaataaagctatca

SEQ ID NO: 98490 - DNA, 20 bp, synthetic construct
  source 1..20: mol_type = other DNA
cttacacaaataaagctatc

SEQ ID NO: 98491 - DNA, 20 bp, synthetic construct
  source 1..20: mol_type = other DNA
tcttacacaaataaagctat

SEQ ID NO: 98492 - DNA, 20 bp, synthetic construct
  source 1..20: mol_type = other DNA
ttcttacacaaataaagcta

SEQ ID NO: 98493 - DNA, 20 bp, synthetic construct
  source 1..20: mol_type = other DNA
attcttacacaaataaagct

SEQ ID NO: 98494 - DNA, 20 bp, synthetic construct
  source 1..20: mol_type = other DNA
aattcttacacaaataaagc

SEQ ID NO: 98495 - DNA, 20 bp, synthetic construct
  source 1..20: mol_type = other DNA
caattcttacacaaataaag

SEQ ID NO: 98496 - DNA, 20 bp, synthetic construct
  source 1..20: mol_type = other DNA
gcaattcttacacaaataaa

SEQ ID NO: 98497 - DNA, 20 bp, synthetic construct
  source 1..20: mol_type = other DNA
agcaattcttacacaaataa

SEQ ID NO: 98498 - DNA, 20 bp, synthetic construct
  source 1..20: mol_type = other DNA
tagcaattcttacacaaata

SEQ ID NO: 98499 - DNA, 20 bp, synthetic construct
  source 1..20: mol_type = other DNA
ctagcaattcttacacaaat

SEQ ID NO: 98500 - DNA, 20 bp, synthetic construct
  source 1..20: mol_type = other DNA
actagcaattcttacacaaa

SEQ ID NO: 98501 - DNA, 20 bp, synthetic construct
  source 1..20: mol_type = other DNA
tactagcaattcttacacaa

SEQ ID NO: 98502 - DNA, 20 bp, synthetic construct
  source 1..20: mol_type = other DNA
ttactagcaattcttacaca

SEQ ID NO: 98503 - DNA, 20 bp, synthetic construct
  source 1..20: mol_type = other DNA
attactagcaattcttacac

SEQ ID NO: 98504 - DNA, 20 bp, synthetic construct
  source 1..20: mol_type = other DNA
aattactagcaattcttaca

SEQ ID NO: 98505 - DNA, 20 bp, synthetic construct
  source 1..20: mol_type = other DNA
aaattactagcaattcttac

SEQ ID NO: 98506 - DNA, 20 bp, synthetic construct
  source 1..20: mol_type = other DNA
caaattactagcaattctta

SEQ ID NO: 98507 - DNA, 20 bp, synthetic construct
  source 1..20: mol_type = other DNA
tcaaattactagcaattctt

SEQ ID NO: 98508 - DNA, 20 bp, synthetic construct
  source 1..20: mol_type = other DNA
atcaaattactagcaattct

SEQ ID NO: 98509 - DNA, 20 bp, synthetic construct
  source 1..20: mol_type = other DNA
gatcaaattactagcaattc

SEQ ID NO: 98510 - DNA, 20 bp, synthetic construct
  source 1..20: mol_type = other DNA
agatcaaattactagcaatt

SEQ ID NO: 98511 - DNA, 20 bp, synthetic construct
  source 1..20: mol_type = other DNA
cagatcaaattactagcaat

SEQ ID NO: 98512 - DNA, 20 bp, synthetic construct
  source 1..20: mol_type = other DNA
acagatcaaattactagcaa

SEQ ID NO: 98513 - DNA, 20 bp, synthetic construct
  source 1..20: mol_type = other DNA
aacagatcaaattactagca

SEQ ID NO: 98514 - DNA, 20 bp, synthetic construct
  source 1..20: mol_type = other DNA
aaacagatcaaattactagc

SEQ ID NO: 98515 - DNA, 20 bp, synthetic construct
  source 1..20: mol_type = other DNA
aaaacagatcaaattactag

SEQ ID NO: 98516 - DNA, 20 bp, synthetic construct
  source 1..20: mol_type = other DNA
caaaacagatcaaattacta

SEQ ID NO: 98517 - DNA, 20 bp, synthetic construct
  source 1..20: mol_type = other DNA
ccaaaacagatcaaattact

SEQ ID NO: 98518 - DNA, 20 bp, synthetic construct
  source 1..20: mol_type = other DNA
cccaaaacagatcaaattac

SEQ ID NO: 98519 - DNA, 20 bp, synthetic construct
  source 1..20: mol_type = other DNA
acccaaaacagatcaaatta

SEQ ID NO: 98520 - DNA, 20 bp, synthetic construct
  source 1..20: mol_type = other DNA
aacccaaaacagatcaaatt

SEQ ID NO: 98521 - DNA, 20 bp, synthetic construct
  source 1..20: mol_type = other DNA
taacccaaaacagatcaaat

SEQ ID NO: 98522 - DNA, 20 bp, synthetic construct
  source 1..20: mol_type = other DNA
ttaacccaaaacagatcaaa

SEQ ID NO: 98523 - DNA, 20 bp, synthetic construct
  source 1..20: mol_type = other DNA
attaacccaaaacagatcaa

SEQ ID NO: 98524 - DNA, 20 bp, synthetic construct
  source 1..20: mol_type = other DNA
tattaacccaaaacagatca

SEQ ID NO: 98525 - DNA, 20 bp, synthetic construct
  source 1..20: mol_type = other DNA
ttattaacccaaaacagatc

SEQ ID NO: 98526 - DNA, 20 bp, synthetic construct
  source 1..20: mol_type = other DNA
attattaacccaaaacagat

SEQ ID NO: 98527 - DNA, 20 bp, synthetic construct
  source 1..20: mol_type = other DNA
cattattaacccaaaacaga

SEQ ID NO: 98528 - DNA, 20 bp, synthetic construct
  source 1..20: mol_type = other DNA
acattattaacccaaaacag

SEQ ID NO: 98529 - DNA, 20 bp, synthetic construct
  source 1..20: mol_type = other DNA
cacattattaacccaaaaca

SEQ ID NO: 98530 - DNA, 20 bp, synthetic construct
  source 1..20: mol_type = other DNA
ccacattattaacccaaaac

SEQ ID NO: 98531 - DNA, 20 bp, synthetic construct
  source 1..20: mol_type = other DNA
cccacattattaacccaaaa

SEQ ID NO: 98532 - DNA, 20 bp, synthetic construct
  source 1..20: mol_type = other DNA
acccacattattaacccaaa

SEQ ID NO: 98533 - DNA, 20 bp, synthetic construct
  source 1..20: mol_type = other DNA
aacccacattattaacccaa

SEQ ID NO: 98534 - DNA, 20 bp, synthetic construct
  source 1..20: mol_type = other DNA
aaacccacattattaaccca

SEQ ID NO: 98535 - DNA, 20 bp, synthetic construct
  source 1..20: mol_type = other DNA
aaaacccacattattaaccc

SEQ ID NO: 98536 - DNA, 20 bp, synthetic construct
  source 1..20: mol_type = other DNA
taaaacccacattattaacc

SEQ ID NO: 98537 - DNA, 20 bp, synthetic construct
  source 1..20: mol_type = other DNA
ctaaaacccacattattaac

SEQ ID NO: 98538 - DNA, 20 bp, synthetic construct
  source 1..20: mol_type = other DNA
tctaaaacccacattattaa

SEQ ID NO: 98539 - DNA, 20 bp, synthetic construct
  source 1..20: mol_type = other DNA
ctctaaaacccacattatta

SEQ ID NO: 98540 - DNA, 20 bp, synthetic construct
  source 1..20: mol_type = other DNA
cctctaaaacccacattatt

SEQ ID NO: 98541 - DNA, 20 bp, synthetic construct
  source 1..20: mol_type = other DNA
acctctaaaacccacattat

SEQ ID NO: 98542 - DNA, 20 bp, synthetic construct
  source 1..20: mol_type = other DNA
tacctctaaaacccacatta

SEQ ID NO: 98543 - DNA, 20 bp, synthetic construct
  source 1..20: mol_type = other DNA
ttacctctaaaacccacatt

SEQ ID NO: 98544 - DNA, 20 bp, synthetic construct
  source 1..20: mol_type = other DNA
tttacctctaaaacccacat

SEQ ID NO: 98545 - DNA, 20 bp, synthetic construct
  source 1..20: mol_type = other DNA
atttacctctaaaacccaca

SEQ ID NO: 98546 - DNA, 20 bp, synthetic construct
  source 1..20: mol_type = other DNA
catttacctctaaaacccac

SEQ ID NO: 98547 - DNA, 20 bp, synthetic construct
  source 1..20: mol_type = other DNA
ccatttacctctaaaaccca

SEQ ID NO: 98548 - DNA, 20 bp, synthetic construct
  source 1..20: mol_type = other DNA
tccatttacctctaaaaccc

SEQ ID NO: 98549 - DNA, 20 bp, synthetic construct
  source 1..20: mol_type = other DNA
gtccatttacctctaaaacc

SEQ ID NO: 98550 - DNA, 20 bp, synthetic construct
  source 1..20: mol_type = other DNA
ggtccatttacctctaaaac

SEQ ID NO: 98551 - DNA, 20 bp, synthetic construct
  source 1..20: mol_type = other DNA
aggtccatttacctctaaaa

SEQ ID NO: 98552 - DNA, 20 bp, synthetic construct
  source 1..20: mol_type = other DNA
taggtccatttacctctaaa

SEQ ID NO: 98553 - DNA, 20 bp, synthetic construct
  source 1..20: mol_type = other DNA
ctaggtccatttacctctaa

SEQ ID NO: 98554 - DNA, 20 bp, synthetic construct
  source 1..20: mol_type = other DNA
cctaggtccatttacctcta

SEQ ID NO: 98555 - DNA, 20 bp, synthetic construct
  source 1..20: mol_type = other DNA
acctaggtccatttacctct

SEQ ID NO: 98556 - DNA, 20 bp, synthetic construct
  source 1..20: mol_type = other DNA
aacctaggtccatttacctc

SEQ ID NO: 98557 - DNA, 20 bp, synthetic construct
  source 1..20: mol_type = other DNA
aaacctaggtccatttacct

SEQ ID NO: 98558 - DNA, 20 bp, synthetic construct
  source 1..20: mol_type = other DNA
caaacctaggtccatttacc

SEQ ID NO: 98559 - DNA, 20 bp, synthetic construct
  source 1..20: mol_type = other DNA
tcaaacctaggtccatttac

SEQ ID NO: 98560 - DNA, 20 bp, synthetic construct
  source 1..20: mol_type = other DNA
ttcaaacctaggtccattta

SEQ ID NO: 98561 - DNA, 20 bp, synthetic construct
  source 1..20: mol_type = other DNA
attcaaacctaggtccattt

SEQ ID NO: 98562 - DNA, 20 bp, synthetic construct
  source 1..20: mol_type = other DNA
cattcaaacctaggtccatt

SEQ ID NO: 98563 - DNA, 20 bp, synthetic construct
  source 1..20: mol_type = other DNA
acattcaaacctaggtccat

SEQ ID NO: 98564 - DNA, 20 bp, synthetic construct
  source 1..20: mol_type = other DNA
aacattcaaacctaggtcca

SEQ ID NO: 98565 - DNA, 20 bp, synthetic construct
  source 1..20: mol_type = other DNA
caacattcaaacctaggtcc

SEQ ID NO: 98566 - DNA, 20 bp, synthetic construct
  source 1..20: mol_type = other DNA
ccaacattcaaacctaggtc

SEQ ID NO: 98567 - DNA, 20 bp, synthetic construct
  source 1..20: mol_type = other DNA
gccaacattcaaacctaggt

SEQ ID NO: 98568 - DNA, 20 bp, synthetic construct
  source 1..20: mol_type = other DNA
ggccaacattcaaacctagg

SEQ ID NO: 98569 - DNA, 20 bp, synthetic construct
  source 1..20: mol_type = other DNA
aggccaacattcaaacctag

SEQ ID NO: 98570 - DNA, 20 bp, synthetic construct
  source 1..20: mol_type = other DNA
gaggccaacattcaaaccta

SEQ ID NO: 98571 - DNA, 20 bp, synthetic construct
  source 1..20: mol_type = other DNA
agaggccaacattcaaacct

SEQ ID NO: 98572 - DNA, 20 bp, synthetic construct
  source 1..20: mol_type = other DNA
tagaggccaacattcaaacc

SEQ ID NO: 98573 - DNA, 20 bp, synthetic construct
  source 1..20: mol_type = other DNA
atagaggccaacattcaaac

SEQ ID NO: 98574 - DNA, 20 bp, synthetic construct
  source 1..20: mol_type = other DNA
tatagaggccaacattcaaa

SEQ ID NO: 98575 - DNA, 20 bp, synthetic construct
  source 1..20: mol_type = other DNA
gtatagaggccaacattcaa

SEQ ID NO: 98576 - DNA, 20 bp, synthetic construct
  source 1..20: mol_type = other DNA
tgtatagaggccaacattca

SEQ ID NO: 98577 - DNA, 20 bp, synthetic construct
  source 1..20: mol_type = other DNA
atgtatagaggccaacattc

SEQ ID NO: 98578 - DNA, 20 bp, synthetic construct
  source 1..20: mol_type = other DNA
gatgtatagaggccaacatt

SEQ ID NO: 98579 - DNA, 20 bp, synthetic construct
  source 1..20: mol_type = other DNA
tgatgtatagaggccaacat

SEQ ID NO: 98580 - DNA, 20 bp, synthetic construct
  source 1..20: mol_type = other DNA
atgatgtatagaggccaaca

SEQ ID NO: 98581 - DNA, 20 bp, synthetic construct
  source 1..20: mol_type = other DNA
catgatgtatagaggccaac

SEQ ID NO: 98582 - DNA, 20 bp, synthetic construct
  source 1..20: mol_type = other DNA
acatgatgtatagaggccaa

SEQ ID NO: 98583 - DNA, 20 bp, synthetic construct
  source 1..20: mol_type = other DNA
cacatgatgtatagaggcca

SEQ ID NO: 98584 - DNA, 20 bp, synthetic construct
  source 1..20: mol_type = other DNA
gcacatgatgtatagaggcc

SEQ ID NO: 98585 - DNA, 20 bp, synthetic construct
  source 1..20: mol_type = other DNA
cgcacatgatgtatagaggc

SEQ ID NO: 98586 - DNA, 20 bp, synthetic construct
  source 1..20: mol_type = other DNA
acgcacatgatgtatagagg

SEQ ID NO: 98587 - DNA, 20 bp, synthetic construct
  source 1..20: mol_type = other DNA
tacgcacatgatgtatagag

SEQ ID NO: 98588 - DNA, 20 bp, synthetic construct
  source 1..20: mol_type = other DNA
ttacgcacatgatgtataga

SEQ ID NO: 98589 - DNA, 20 bp, synthetic construct
  source 1..20: mol_type = other DNA
gttacgcacatgatgtatag

SEQ ID NO: 98590 - DNA, 20 bp, synthetic construct
  source 1..20: mol_type = other DNA
tgttacgcacatgatgtata

SEQ ID NO: 98591 - DNA, 20 bp, synthetic construct
  source 1..20: mol_type = other DNA
atgttacgcacatgatgtat

SEQ ID NO: 98592 - DNA, 20 bp, synthetic construct
  source 1..20: mol_type = other DNA
aatgttacgcacatgatgta

SEQ ID NO: 98593 - DNA, 20 bp, synthetic construct
  source 1..20: mol_type = other DNA
caatgttacgcacatgatgt

SEQ ID NO: 98594 - DNA, 20 bp, synthetic construct
  source 1..20: mol_type = other DNA
acaatgttacgcacatgatg

SEQ ID NO: 98595 - DNA, 20 bp, synthetic construct
  source 1..20: mol_type = other DNA
cacaatgttacgcacatgat

SEQ ID NO: 98596 - DNA, 20 bp, synthetic construct
  source 1..20: mol_type = other DNA
ccacaatgttacgcacatga

SEQ ID NO: 98597 - DNA, 20 bp, synthetic construct
  source 1..20: mol_type = other DNA
gccacaatgttacgcacatg

SEQ ID NO: 98598 - DNA, 20 bp, synthetic construct
  source 1..20: mol_type = other DNA
tgccacaatgttacgcacat

SEQ ID NO: 98599 - DNA, 20 bp, synthetic construct
  source 1..20: mol_type = other DNA
atgccacaatgttacgcaca

SEQ ID NO: 98600 - DNA, 20 bp, synthetic construct
  source 1..20: mol_type = other DNA
catgccacaatgttacgcac

SEQ ID NO: 98601 - DNA, 20 bp, synthetic construct
  source 1..20: mol_type = other DNA
gcatgccacaatgttacgca

SEQ ID NO: 98602 - DNA, 20 bp, synthetic construct
  source 1..20: mol_type = other DNA
agcatgccacaatgttacgc

SEQ ID NO: 98603 - DNA, 20 bp, synthetic construct
  source 1..20: mol_type = other DNA
tagcatgccacaatgttacg

SEQ ID NO: 98604 - DNA, 20 bp, synthetic construct
  source 1..20: mol_type = other DNA
atagcatgccacaatgttac

SEQ ID NO: 98605 - DNA, 20 bp, synthetic construct
  source 1..20: mol_type = other DNA
gatagcatgccacaatgtta

SEQ ID NO: 98606 - DNA, 20 bp, synthetic construct
  source 1..20: mol_type = other DNA
agatagcatgccacaatgtt

SEQ ID NO: 98607 - DNA, 20 bp, synthetic construct
  source 1..20: mol_type = other DNA
tagatagcatgccacaatgt

SEQ ID NO: 98608 - DNA, 20 bp, synthetic construct
  source 1..20: mol_type = other DNA
gtagatagcatgccacaatg

SEQ ID NO: 98609 - DNA, 20 bp, synthetic construct
  source 1..20: mol_type = other DNA
agtagatagcatgccacaat

SEQ ID NO: 98610 - DNA, 20 bp, synthetic construct
  source 1..20: mol_type = other DNA
aagtagatagcatgccacaa

SEQ ID NO: 98611 - DNA, 20 bp, synthetic construct
  source 1..20: mol_type = other DNA
gaagtagatagcatgccaca

SEQ ID NO: 98612 - DNA, 20 bp, synthetic construct
  source 1..20: mol_type = other DNA
ggaagtagatagcatgccac

SEQ ID NO: 98613 - DNA, 20 bp, synthetic construct
  source 1..20: mol_type = other DNA
gggaagtagatagcatgcca

SEQ ID NO: 98614 - DNA, 20 bp, synthetic construct
  source 1..20: mol_type = other DNA
ggggaagtagatagcatgcc

SEQ ID NO: 98615 - DNA, 20 bp, synthetic construct
  source 1..20: mol_type = other DNA
gggggaagtagatagcatgc

SEQ ID NO: 98616 - DNA, 20 bp, synthetic construct
  source 1..20: mol_type = other DNA
tgggggaagtagatagcatg

SEQ ID NO: 98617 - DNA, 20 bp, synthetic construct
  source 1..20: mol_type = other DNA
ttgggggaagtagatagcat

SEQ ID NO: 98618 - DNA, 20 bp, synthetic construct
  source 1..20: mol_type = other DNA
cttgggggaagtagatagca

SEQ ID NO: 98619 - DNA, 20 bp, synthetic construct
  source 1..20: mol_type = other DNA
gcttgggggaagtagatagc

SEQ ID NO: 98620 - DNA, 20 bp, synthetic construct
  source 1..20: mol_type = other DNA
ggcttgggggaagtagatag

SEQ ID NO: 98621 - DNA, 20 bp, synthetic construct
  source 1..20: mol_type = other DNA
tggcttgggggaagtagata

SEQ ID NO: 98622 - DNA, 20 bp, synthetic construct
  source 1..20: mol_type = other DNA
ttggcttgggggaagtagat

SEQ ID NO: 98623 - DNA, 20 bp, synthetic construct
  source 1..20: mol_type = other DNA
tttggcttgggggaagtaga

SEQ ID NO: 98624 - DNA, 20 bp, synthetic construct
  source 1..20: mol_type = other DNA
ttttggcttgggggaagtag

SEQ ID NO: 98625 - DNA, 20 bp, synthetic construct
  source 1..20: mol_type = other DNA
attttggcttgggggaagta

SEQ ID NO: 98626 - DNA, 20 bp, synthetic construct
  source 1..20: mol_type = other DNA
cattttggcttgggggaagt

SEQ ID NO: 98627 - DNA, 20 bp, synthetic construct
  source 1..20: mol_type = other DNA
ccattttggcttgggggaag

SEQ ID NO: 98628 - DNA, 20 bp, synthetic construct
  source 1..20: mol_type = other DNA
cccattttggcttgggggaa

SEQ ID NO: 98629 - DNA, 20 bp, synthetic construct
  source 1..20: mol_type = other DNA
acccattttggcttggggga

SEQ ID NO: 98630 - DNA, 20 bp, synthetic construct
  source 1..20: mol_type = other DNA
aacccattttggcttggggg

SEQ ID NO: 98631 - DNA, 20 bp, synthetic construct
  source 1..20: mol_type = other DNA
taacccattttggcttgggg

SEQ ID NO: 98632 - DNA, 20 bp, synthetic construct
  source 1..20: mol_type = other DNA
ttaacccattttggcttggg

SEQ ID NO: 98633 - DNA, 20 bp, synthetic construct
  source 1..20: mol_type = other DNA
attaacccattttggcttgg

SEQ ID NO: 98634 - DNA, 20 bp, synthetic construct
  source 1..20: mol_type = other DNA
aattaacccattttggcttg

SEQ ID NO: 98635 - DNA, 20 bp, synthetic construct
  source 1..20: mol_type = other DNA
aaattaacccattttggctt

SEQ ID NO: 98636 - DNA, 20 bp, synthetic construct
  source 1..20: mol_type = other DNA
aaaattaacccattttggct

SEQ ID NO: 98637 - DNA, 20 bp, synthetic construct
  source 1..20: mol_type = other DNA
taaaattaacccattttggc

SEQ ID NO: 98638 - DNA, 20 bp, synthetic construct
  source 1..20: mol_type = other DNA
ctaaaattaacccattttgg

SEQ ID NO: 98639 - DNA, 20 bp, synthetic construct
  source 1..20: mol_type = other DNA
tctaaaattaacccattttg

SEQ ID NO: 98640 - DNA, 20 bp, synthetic construct
  source 1..20: mol_type = other DNA
ttctaaaattaacccatttt

SEQ ID NO: 98641 - DNA, 20 bp, synthetic construct
  source 1..20: mol_type = other DNA
gttctaaaattaacccattt

SEQ ID NO: 98642 - DNA, 20 bp, synthetic construct
  source 1..20: mol_type = other DNA
ggttctaaaattaacccatt

SEQ ID NO: 98643 - DNA, 20 bp, synthetic construct
  source 1..20: mol_type = other DNA
aggttctaaaattaacccat

SEQ ID NO: 98644 - DNA, 20 bp, synthetic construct
  source 1..20: mol_type = other DNA
caggttctaaaattaaccca

SEQ ID NO: 98645 - DNA, 20 bp, synthetic construct
  source 1..20: mol_type = other DNA
gcaggttctaaaattaaccc

SEQ ID NO: 98646 - DNA, 20 bp, synthetic construct
  source 1..20: mol_type = other DNA
agcaggttctaaaattaacc

SEQ ID NO: 98647 - DNA, 20 bp, synthetic construct
  source 1..20: mol_type = other DNA
aagcaggttctaaaattaac

SEQ ID NO: 98648 - DNA, 20 bp, synthetic construct
  source 1..20: mol_type = other DNA
gaagcaggttctaaaattaa

SEQ ID NO: 98649 - DNA, 20 bp, synthetic construct
  source 1..20: mol_type = other DNA
tgaagcaggttctaaaatta

SEQ ID NO: 98650 - DNA, 20 bp, synthetic construct
  source 1..20: mol_type = other DNA
atgaagcaggttctaaaatt

SEQ ID NO: 98651 - DNA, 20 bp, synthetic construct
  source 1..20: mol_type = other DNA
tatgaagcaggttctaaaat

SEQ ID NO: 98652 - DNA, 20 bp, synthetic construct
  source 1..20: mol_type = other DNA
ctatgaagcaggttctaaaa

SEQ ID NO: 98653 - DNA, 20 bp, synthetic construct
  source 1..20: mol_type = other DNA
actatgaagcaggttctaaa

SEQ ID NO: 98654 - DNA, 20 bp, synthetic construct
  source 1..20: mol_type = other DNA
cactatgaagcaggttctaa

SEQ ID NO: 98655 - DNA, 20 bp, synthetic construct
  source 1..20: mol_type = other DNA
acactatgaagcaggttcta

SEQ ID NO: 98656 - DNA, 20 bp, synthetic construct
  source 1..20: mol_type = other DNA
aacactatgaagcaggttct

SEQ ID NO: 98657 - DNA, 20 bp, synthetic construct
  source 1..20: mol_type = other DNA
gaacactatgaagcaggttc

SEQ ID NO: 98658 - DNA, 20 bp, synthetic construct
  source 1..20: mol_type = other DNA
ggaacactatgaagcaggtt

SEQ ID NO: 98659 - DNA, 20 bp, synthetic construct
  source 1..20: mol_type = other DNA
aggaacactatgaagcaggt

SEQ ID NO: 98660 - DNA, 20 bp, synthetic construct
  source 1..20: mol_type = other DNA
caggaacactatgaagcagg

SEQ ID NO: 98661 - DNA, 20 bp, synthetic construct
  source 1..20: mol_type = other DNA
acaggaacactatgaagcag

SEQ ID NO: 98662 - DNA, 20 bp, synthetic construct
  source 1..20: mol_type = other DNA
cacaggaacactatgaagca

SEQ ID NO: 98663 - DNA, 20 bp, synthetic construct
  source 1..20: mol_type = other DNA
tcacaggaacactatgaagc

SEQ ID NO: 98664 - DNA, 20 bp, synthetic construct
  source 1..20: mol_type = other DNA
ctcacaggaacactatgaag

SEQ ID NO: 98665 - DNA, 20 bp, synthetic construct
  source 1..20: mol_type = other DNA
tctcacaggaacactatgaa

SEQ ID NO: 98666 - DNA, 20 bp, synthetic construct
  source 1..20: mol_type = other DNA
ctctcacaggaacactatga

SEQ ID NO: 98667 - DNA, 20 bp, synthetic construct
  source 1..20: mol_type = other DNA
gctctcacaggaacactatg

SEQ ID NO: 98668 - DNA, 20 bp, synthetic construct
  source 1..20: mol_type = other DNA
agctctcacaggaacactat

SEQ ID NO: 98669 - DNA, 20 bp, synthetic construct
  source 1..20: mol_type = other DNA
gagctctcacaggaacacta

SEQ ID NO: 98670 - DNA, 20 bp, synthetic construct
  source 1..20: mol_type = other DNA
cgagctctcacaggaacact

SEQ ID NO: 98671 - DNA, 20 bp, synthetic construct
  source 1..20: mol_type = other DNA
tcgagctctcacaggaacac

SEQ ID NO: 98672 - DNA, 20 bp, synthetic construct
  source 1..20: mol_type = other DNA
atcgagctctcacaggaaca

SEQ ID NO: 98673 - DNA, 20 bp, synthetic construct
  source 1..20: mol_type = other DNA
catcgagctctcacaggaac

SEQ ID NO: 98674 - DNA, 20 bp, synthetic construct
  source 1..20: mol_type = other DNA
tcatcgagctctcacaggaa

SEQ ID NO: 98675 - DNA, 20 bp, synthetic construct
  source 1..20: mol_type = other DNA
ctcatcgagctctcacagga

SEQ ID NO: 98676 - DNA, 20 bp, synthetic construct
  source 1..20: mol_type = other DNA
tctcatcgagctctcacagg

SEQ ID NO: 98677 - DNA, 20 bp, synthetic construct
  source 1..20: mol_type = other DNA
atctcatcgagctctcacag

SEQ ID NO: 98678 - DNA, 20 bp, synthetic construct
  source 1..20: mol_type = other DNA
tatctcatcgagctctcaca

SEQ ID NO: 98679 - DNA, 20 bp, synthetic construct
  source 1..20: mol_type = other DNA
atatctcatcgagctctcac

SEQ ID NO: 98680 - DNA, 20 bp, synthetic construct
  source 1..20: mol_type = other DNA
aatatctcatcgagctctca

SEQ ID NO: 98681 - DNA, 20 bp, synthetic construct
  source 1..20: mol_type = other DNA
caatatctcatcgagctctc

SEQ ID NO: 98682 - DNA, 20 bp, synthetic construct
  source 1..20: mol_type = other DNA
gcaatatctcatcgagctct

SEQ ID NO: 98683 - DNA, 20 bp, synthetic construct
  source 1..20: mol_type = other DNA
ggcaatatctcatcgagctc

SEQ ID NO: 98684 - DNA, 20 bp, synthetic construct
  source 1..20: mol_type = other DNA
aggcaatatctcatcgagct

SEQ ID NO: 98685 - DNA, 20 bp, synthetic construct
  source 1..20: mol_type = other DNA
taggcaatatctcatcgagc

SEQ ID NO: 98686 - DNA, 20 bp, synthetic construct
  source 1..20: mol_type = other DNA
ataggcaatatctcatcgag

SEQ ID NO: 98687 - DNA, 20 bp, synthetic construct
  source 1..20: mol_type = other DNA
tataggcaatatctcatcga

SEQ ID NO: 98688 - DNA, 20 bp, synthetic construct
  source 1..20: mol_type = other DNA
ttataggcaatatctcatcg

SEQ ID NO: 98689 - DNA, 20 bp, synthetic construct
  source 1..20: mol_type = other DNA
tttataggcaatatctcatc

SEQ ID NO: 98690 - DNA, 20 bp, synthetic construct
  source 1..20: mol_type = other DNA
ctttataggcaatatctcat

SEQ ID NO: 98691 - DNA, 20 bp, synthetic construct
  source 1..20: mol_type = other DNA
actttataggcaatatctca

SEQ ID NO: 98692 - DNA, 20 bp, synthetic construct
  source 1..20: mol_type = other DNA
cactttataggcaatatctc

SEQ ID NO: 98693 - DNA, 20 bp, synthetic construct
  source 1..20: mol_type = other DNA
acactttataggcaatatct

SEQ ID NO: 98694 - DNA, 20 bp, synthetic construct
  source 1..20: mol_type = other DNA
aacactttataggcaatatc

SEQ ID NO: 98695 - DNA, 20 bp, synthetic construct
  source 1..20: mol_type = other DNA
aaacactttataggcaatat

SEQ ID NO: 98696 - DNA, 20 bp, synthetic construct
  source 1..20: mol_type = other DNA
taaacactttataggcaata

SEQ ID NO: 98697 - DNA, 20 bp, synthetic construct
  source 1..20: mol_type = other DNA
ctaaacactttataggcaat

SEQ ID NO: 98698 - DNA, 20 bp, synthetic construct
  source 1..20: mol_type = other DNA
gctaaacactttataggcaa

SEQ ID NO: 98699 - DNA, 20 bp, synthetic construct
  source 1..20: mol_type = other DNA
tgctaaacactttataggca

SEQ ID NO: 98700 - DNA, 20 bp, synthetic construct
  source 1..20: mol_type = other DNA
atgctaaacactttataggc

SEQ ID NO: 98701 - DNA, 20 bp, synthetic construct
  source 1..20: mol_type = other DNA
tatgctaaacactttatagg

SEQ ID NO: 98702 - DNA, 20 bp, synthetic construct
  source 1..20: mol_type = other DNA
ctatgctaaacactttatag

SEQ ID NO: 98703 - DNA, 20 bp, synthetic construct
  source 1..20: mol_type = other DNA
actatgctaaacactttata

SEQ ID NO: 98704 - DNA, 20 bp, synthetic construct
  source 1..20: mol_type = other DNA
cactatgctaaacactttat

SEQ ID NO: 98705 - DNA, 20 bp, synthetic construct
  source 1..20: mol_type = other DNA
gcactatgctaaacacttta

SEQ ID NO: 98706 - DNA, 20 bp, synthetic construct
  source 1..20: mol_type = other DNA
ggcactatgctaaacacttt

SEQ ID NO: 98707 - DNA, 20 bp, synthetic construct
  source 1..20: mol_type = other DNA
aggcactatgctaaacactt

SEQ ID NO: 98708 - DNA, 20 bp, synthetic construct
  source 1..20: mol_type = other DNA
taggcactatgctaaacact

SEQ ID NO: 98709 - DNA, 20 bp, synthetic construct
  source 1..20: mol_type = other DNA
ctaggcactatgctaaacac

SEQ ID NO: 98710 - DNA, 20 bp, synthetic construct
  source 1..20: mol_type = other DNA
gctaggcactatgctaaaca

SEQ ID NO: 98711 - DNA, 20 bp, synthetic construct
  source 1..20: mol_type = other DNA
tgctaggcactatgctaaac

SEQ ID NO: 98712 - DNA, 20 bp, synthetic construct
  source 1..20: mol_type = other DNA
gtgctaggcactatgctaaa

SEQ ID NO: 98713 - DNA, 20 bp, synthetic construct
  source 1..20: mol_type = other DNA
tgtgctaggcactatgctaa

SEQ ID NO: 98714 - DNA, 20 bp, synthetic construct
  source 1..20: mol_type = other DNA
atgtgctaggcactatgcta

SEQ ID NO: 98715 - DNA, 20 bp, synthetic construct
  source 1..20: mol_type = other DNA
catgtgctaggcactatgct

SEQ ID NO: 98716 - DNA, 20 bp, synthetic construct
  source 1..20: mol_type = other DNA
ccatgtgctaggcactatgc

SEQ ID NO: 98717 - DNA, 20 bp, synthetic construct
  source 1..20: mol_type = other DNA
accatgtgctaggcactatg

SEQ ID NO: 98718 - DNA, 20 bp, synthetic construct
  source 1..20: mol_type = other DNA
taccatgtgctaggcactat

SEQ ID NO: 98719 - DNA, 20 bp, synthetic construct
  source 1..20: mol_type = other DNA
ataccatgtgctaggcacta

SEQ ID NO: 98720 - DNA, 20 bp, synthetic construct
  source 1..20: mol_type = other DNA
cataccatgtgctaggcact

SEQ ID NO: 98721 - DNA, 20 bp, synthetic construct
  source 1..20: mol_type = other DNA
acataccatgtgctaggcac

SEQ ID NO: 98722 - DNA, 20 bp, synthetic construct
  source 1..20: mol_type = other DNA
tacataccatgtgctaggca

SEQ ID NO: 98723 - DNA, 20 bp, synthetic construct
  source 1..20: mol_type = other DNA
atacataccatgtgctaggc

SEQ ID NO: 98724 - DNA, 20 bp, synthetic construct
  source 1..20: mol_type = other DNA
aatacataccatgtgctagg

SEQ ID NO: 98725 - DNA, 20 bp, synthetic construct
  source 1..20: mol_type = other DNA
gaatacataccatgtgctag

SEQ ID NO: 98726 - DNA, 20 bp, synthetic construct
  source 1..20: mol_type = other DNA
tgaatacataccatgtgcta

SEQ ID NO: 98727 - DNA, 20 bp, synthetic construct
  source 1..20: mol_type = other DNA
ttgaatacataccatgtgct

SEQ ID NO: 98728 - DNA, 20 bp, synthetic construct
  source 1..20: mol_type = other DNA
attgaatacataccatgtgc

SEQ ID NO: 98729 - DNA, 20 bp, synthetic construct
  source 1..20: mol_type = other DNA
tattgaatacataccatgtg

SEQ ID NO: 98730 - DNA, 20 bp, synthetic construct
  source 1..20: mol_type = other DNA
gtattgaatacataccatgt

SEQ ID NO: 98731 - DNA, 20 bp, synthetic construct
  source 1..20: mol_type = other DNA
tgtattgaatacataccatg

SEQ ID NO: 98732 - DNA, 20 bp, synthetic construct
  source 1..20: mol_type = other DNA
atgtattgaatacataccat

SEQ ID NO: 98733 - DNA, 20 bp, synthetic construct
  source 1..20: mol_type = other DNA
catgtattgaatacatacca

SEQ ID NO: 98734 - DNA, 20 bp, synthetic construct
  source 1..20: mol_type = other DNA
acatgtattgaatacatacc

SEQ ID NO: 98735 - DNA, 20 bp, synthetic construct
  source 1..20: mol_type = other DNA
aacatgtattgaatacatac

SEQ ID NO: 98736 - DNA, 20 bp, synthetic construct
  source 1..20: mol_type = other DNA
gaacatgtattgaatacata

SEQ ID NO: 98737 - DNA, 20 bp, synthetic construct
  source 1..20: mol_type = other DNA
tgaacatgtattgaatacat

SEQ ID NO: 98738 - DNA, 20 bp, synthetic construct
  source 1..20: mol_type = other DNA
atgaacatgtattgaataca

SEQ ID NO: 98739 - DNA, 20 bp, synthetic construct
  source 1..20: mol_type = other DNA
aatgaacatgtattgaatac

SEQ ID NO: 98740 - DNA, 20 bp, synthetic construct
  source 1..20: mol_type = other DNA
gaatgaacatgtattgaata

SEQ ID NO: 98741 - DNA, 20 bp, synthetic construct
  source 1..20: mol_type = other DNA
agaatgaacatgtattgaat

SEQ ID NO: 98742 - DNA, 20 bp, synthetic construct
  source 1..20: mol_type = other DNA
aagaatgaacatgtattgaa

SEQ ID NO: 98743 - DNA, 20 bp, synthetic construct
  source 1..20: mol_type = other DNA
taagaatgaacatgtattga

SEQ ID NO: 98744 - DNA, 20 bp, synthetic construct
  source 1..20: mol_type = other DNA
gtaagaatgaacatgtattg

SEQ ID NO: 98745 - DNA, 20 bp, synthetic construct
  source 1..20: mol_type = other DNA
agtaagaatgaacatgtatt

SEQ ID NO: 98746 - DNA, 20 bp, synthetic construct
  source 1..20: mol_type = other DNA
tagtaagaatgaacatgtat

SEQ ID NO: 98747 - DNA, 20 bp, synthetic construct
  source 1..20: mol_type = other DNA
ctagtaagaatgaacatgta

SEQ ID NO: 98748 - DNA, 20 bp, synthetic construct
  source 1..20: mol_type = other DNA
gctagtaagaatgaacatgt

SEQ ID NO: 98749 - DNA, 20 bp, synthetic construct
  source 1..20: mol_type = other DNA
tgctagtaagaatgaacatg

SEQ ID NO: 98750 - DNA, 20 bp, synthetic construct
  source 1..20: mol_type = other DNA
ttgctagtaagaatgaacat

SEQ ID NO: 98751 - DNA, 20 bp, synthetic construct
  source 1..20: mol_type = other DNA
tttgctagtaagaatgaaca

SEQ ID NO: 98752 - DNA, 20 bp, synthetic construct
  source 1..20: mol_type = other DNA
ttttgctagtaagaatgaac

SEQ ID NO: 98753 - DNA, 20 bp, synthetic construct
  source 1..20: mol_type = other DNA
attttgctagtaagaatgaa

SEQ ID NO: 98754 - DNA, 20 bp, synthetic construct
  source 1..20: mol_type = other DNA
tattttgctagtaagaatga

SEQ ID NO: 98755 - DNA, 20 bp, synthetic construct
  source 1..20: mol_type = other DNA
atattttgctagtaagaatg

SEQ ID NO: 98756 - DNA, 20 bp, synthetic construct
  source 1..20: mol_type = other DNA
tatattttgctagtaagaat

SEQ ID NO: 98757 - DNA, 20 bp, synthetic construct
  source 1..20: mol_type = other DNA
ctatattttgctagtaagaa

SEQ ID NO: 98758 - DNA, 20 bp, synthetic construct
  source 1..20: mol_type = other DNA
tctatattttgctagtaaga

SEQ ID NO: 98759 - DNA, 20 bp, synthetic construct
  source 1..20: mol_type = other DNA
atctatattttgctagtaag

SEQ ID NO: 98760 - DNA, 20 bp, synthetic construct
  source 1..20: mol_type = other DNA
catctatattttgctagtaa

SEQ ID NO: 98761 - DNA, 20 bp, synthetic construct
  source 1..20: mol_type = other DNA
tcatctatattttgctagta

SEQ ID NO: 98762 - DNA, 20 bp, synthetic construct
  source 1..20: mol_type = other DNA
gtcatctatattttgctagt

SEQ ID NO: 98763 - DNA, 20 bp, synthetic construct
  source 1..20: mol_type = other DNA
ggtcatctatattttgctag

SEQ ID NO: 98764 - DNA, 20 bp, synthetic construct
  source 1..20: mol_type = other DNA
gggtcatctatattttgcta

SEQ ID NO: 98765 - DNA, 20 bp, synthetic construct
  source 1..20: mol_type = other DNA
tgggtcatctatattttgct

SEQ ID NO: 98766 - DNA, 20 bp, synthetic construct
  source 1..20: mol_type = other DNA
ctgggtcatctatattttgc

SEQ ID NO: 98767 - DNA, 20 bp, synthetic construct
  source 1..20: mol_type = other DNA
actgggtcatctatattttg

SEQ ID NO: 98768 - DNA, 20 bp, synthetic construct
  source 1..20: mol_type = other DNA
tactgggtcatctatatttt

SEQ ID NO: 98769 - DNA, 20 bp, synthetic construct
  source 1..20: mol_type = other DNA
atactgggtcatctatattt

SEQ ID NO: 98770 - DNA, 20 bp, synthetic construct
  source 1..20: mol_type = other DNA
aatactgggtcatctatatt

SEQ ID NO: 98771 - DNA, 20 bp, synthetic construct
  source 1..20: mol_type = other DNA
caatactgggtcatctatat

SEQ ID NO: 98772 - DNA, 20 bp, synthetic construct
  source 1..20: mol_type = other DNA
acaatactgggtcatctata

SEQ ID NO: 98773 - DNA, 20 bp, synthetic construct
  source 1..20: mol_type = other DNA
tacaatactgggtcatctat

SEQ ID NO: 98774 - DNA, 20 bp, synthetic construct
  source 1..20: mol_type = other DNA
gtacaatactgggtcatcta

SEQ ID NO: 98775 - DNA, 20 bp, synthetic construct
  source 1..20: mol_type = other DNA
tgtacaatactgggtcatct

SEQ ID NO: 98776 - DNA, 20 bp, synthetic construct
  source 1..20: mol_type = other DNA
ctgtacaatactgggtcatc

SEQ ID NO: 98777 - DNA, 20 bp, synthetic construct
  source 1..20: mol_type = other DNA
tctgtacaatactgggtcat

SEQ ID NO: 98778 - DNA, 20 bp, synthetic construct
  source 1..20: mol_type = other DNA
ctctgtacaatactgggtca

SEQ ID NO: 98779 - DNA, 20 bp, synthetic construct
  source 1..20: mol_type = other DNA
actctgtacaatactgggtc

SEQ ID NO: 98780 - DNA, 20 bp, synthetic construct
  source 1..20: mol_type = other DNA
tactctgtacaatactgggt

SEQ ID NO: 98781 - DNA, 20 bp, synthetic construct
  source 1..20: mol_type = other DNA
atactctgtacaatactggg

SEQ ID NO: 98782 - DNA, 20 bp, synthetic construct
  source 1..20: mol_type = other DNA
catactctgtacaatactgg

SEQ ID NO: 98783 - DNA, 20 bp, synthetic construct
  source 1..20: mol_type = other DNA
acatactctgtacaatactg

SEQ ID NO: 98784 - DNA, 20 bp, synthetic construct
  source 1..20: mol_type = other DNA
tacatactctgtacaatact

SEQ ID NO: 98785 - DNA, 20 bp, synthetic construct
  source 1..20: mol_type = other DNA
gtacatactctgtacaatac

SEQ ID NO: 98786 - DNA, 20 bp, synthetic construct
  source 1..20: mol_type = other DNA
tgtacatactctgtacaata

SEQ ID NO: 98787 - DNA, 20 bp, synthetic construct
  source 1..20: mol_type = other DNA
ttgtacatactctgtacaat

SEQ ID NO: 98788 - DNA, 20 bp, synthetic construct
  source 1..20: mol_type = other DNA
attgtacatactctgtacaa

SEQ ID NO: 98789 - DNA, 20 bp, synthetic construct
  source 1..20: mol_type = other DNA
cattgtacatactctgtaca

SEQ ID NO: 98790 - DNA, 20 bp, synthetic construct
  source 1..20: mol_type = other DNA
ccattgtacatactctgtac

SEQ ID NO: 98791 - DNA, 20 bp, synthetic construct
  source 1..20: mol_type = other DNA
accattgtacatactctgta

SEQ ID NO: 98792 - DNA, 20 bp, synthetic construct
  source 1..20: mol_type = other DNA
caccattgtacatactctgt

SEQ ID NO: 98793 - DNA, 20 bp, synthetic construct
  source 1..20: mol_type = other DNA
acaccattgtacatactctg

SEQ ID NO: 98794 - DNA, 20 bp, synthetic construct
  source 1..20: mol_type = other DNA
gacaccattgtacatactct

SEQ ID NO: 98795 - DNA, 20 bp, synthetic construct
  source 1..20: mol_type = other DNA
tgacaccattgtacatactc

SEQ ID NO: 98796 - DNA, 20 bp, synthetic construct
  source 1..20: mol_type = other DNA
atgacaccattgtacatact

SEQ ID NO: 98797 - DNA, 20 bp, synthetic construct
  source 1..20: mol_type = other DNA
aatgacaccattgtacatac

SEQ ID NO: 98798 - DNA, 20 bp, synthetic construct
  source 1..20: mol_type = other DNA
caatgacaccattgtacata

SEQ ID NO: 98799 - DNA, 20 bp, synthetic construct
  source 1..20: mol_type = other DNA
acaatgacaccattgtacat

SEQ ID NO: 98800 - DNA, 20 bp, synthetic construct
  source 1..20: mol_type = other DNA
tacaatgacaccattgtaca

SEQ ID NO: 98801 - DNA, 20 bp, synthetic construct
  source 1..20: mol_type = other DNA
gtacaatgacaccattgtac

SEQ ID NO: 98802 - DNA, 20 bp, synthetic construct
  source 1..20: mol_type = other DNA
ggtacaatgacaccattgta

SEQ ID NO: 98803 - DNA, 20 bp, synthetic construct
  source 1..20: mol_type = other DNA
tggtacaatgacaccattgt

SEQ ID NO: 98804 - DNA, 20 bp, synthetic construct
  source 1..20: mol_type = other DNA
atggtacaatgacaccattg

SEQ ID NO: 98805 - DNA, 20 bp, synthetic construct
  source 1..20: mol_type = other DNA
aatggtacaatgacaccatt

SEQ ID NO: 98806 - DNA, 20 bp, synthetic construct
  source 1..20: mol_type = other DNA
aaatggtacaatgacaccat

SEQ ID NO: 98807 - DNA, 20 bp, synthetic construct
  source 1..20: mol_type = other DNA
gaaatggtacaatgacacca

SEQ ID NO: 98808 - DNA, 20 bp, synthetic construct
  source 1..20: mol_type = other DNA
tgaaatggtacaatgacacc

SEQ ID NO: 98809 - DNA, 20 bp, synthetic construct
  source 1..20: mol_type = other DNA
atgaaatggtacaatgacac

SEQ ID NO: 98810 - DNA, 20 bp, synthetic construct
  source 1..20: mol_type = other DNA
catgaaatggtacaatgaca

SEQ ID NO: 98811 - DNA, 20 bp, synthetic construct
  source 1..20: mol_type = other DNA
acatgaaatggtacaatgac

SEQ ID NO: 98812 - DNA, 20 bp, synthetic construct
  source 1..20: mol_type = other DNA
cacatgaaatggtacaatga

SEQ ID NO: 98813 - DNA, 20 bp, synthetic construct
  source 1..20: mol_type = other DNA
ccacatgaaatggtacaatg

SEQ ID NO: 98814 - DNA, 20 bp, synthetic construct
  source 1..20: mol_type = other DNA
tccacatgaaatggtacaat

SEQ ID NO: 98815 - DNA, 20 bp, synthetic construct
  source 1..20: mol_type = other DNA
ctccacatgaaatggtacaa

SEQ ID NO: 98816 - DNA, 20 bp, synthetic construct
  source 1..20: mol_type = other DNA
actccacatgaaatggtaca

SEQ ID NO: 98817 - DNA, 20 bp, synthetic construct
  source 1..20: mol_type = other DNA
gactccacatgaaatggtac

SEQ ID NO: 98818 - DNA, 20 bp, synthetic construct
  source 1..20: mol_type = other DNA
tgactccacatgaaatggta

SEQ ID NO: 98819 - DNA, 20 bp, synthetic construct
  source 1..20: mol_type = other DNA
gtgactccacatgaaatggt

SEQ ID NO: 98820 - DNA, 20 bp, synthetic construct
  source 1..20: mol_type = other DNA
tgtgactccacatgaaatgg

SEQ ID NO: 98821 - DNA, 20 bp, synthetic construct
  source 1..20: mol_type = other DNA
atgtgactccacatgaaatg

SEQ ID NO: 98822 - DNA, 20 bp, synthetic construct
  source 1..20: mol_type = other DNA
tatgtgactccacatgaaat

SEQ ID NO: 98823 - DNA, 20 bp, synthetic construct
  source 1..20: mol_type = other DNA
ttatgtgactccacatgaaa

SEQ ID NO: 98824 - DNA, 20 bp, synthetic construct
  source 1..20: mol_type = other DNA
cttatgtgactccacatgaa

SEQ ID NO: 98825 - DNA, 20 bp, synthetic construct
  source 1..20: mol_type = other DNA
tcttatgtgactccacatga

SEQ ID NO: 98826 - DNA, 20 bp, synthetic construct
  source 1..20: mol_type = other DNA
ttcttatgtgactccacatg

SEQ ID NO: 98827 - DNA, 20 bp, synthetic construct
  source 1..20: mol_type = other DNA
attcttatgtgactccacat

SEQ ID NO: 98828 - DNA, 20 bp, synthetic construct
  source 1..20: mol_type = other DNA
aattcttatgtgactccaca

SEQ ID NO: 98829 - DNA, 20 bp, synthetic construct
  source 1..20: mol_type = other DNA
aaattcttatgtgactccac

SEQ ID NO: 98830 - DNA, 20 bp, synthetic construct
  source 1..20: mol_type = other DNA
gaaattcttatgtgactcca

SEQ ID NO: 98831 - DNA, 20 bp, synthetic construct
  source 1..20: mol_type = other DNA
tgaaattcttatgtgactcc

SEQ ID NO: 98832 - DNA, 20 bp, synthetic construct
  source 1..20: mol_type = other DNA
ctgaaattcttatgtgactc

SEQ ID NO: 98833 - DNA, 20 bp, synthetic construct
  source 1..20: mol_type = other DNA
actgaaattcttatgtgact

SEQ ID NO: 98834 - DNA, 20 bp, synthetic construct
  source 1..20: mol_type = other DNA
aactgaaattcttatgtgac

SEQ ID NO: 98835 - DNA, 20 bp, synthetic construct
  source 1..20: mol_type = other DNA
aaactgaaattcttatgtga

SEQ ID NO: 98836 - DNA, 20 bp, synthetic construct
  source 1..20: mol_type = other DNA
aaaactgaaattcttatgtg

SEQ ID NO: 98837 - DNA, 20 bp, synthetic construct
  source 1..20: mol_type = other DNA
gaaaactgaaattcttatgt

SEQ ID NO: 98838 - DNA, 20 bp, synthetic construct
  source 1..20: mol_type = other DNA
agaaaactgaaattcttatg

SEQ ID NO: 98839 - DNA, 20 bp, synthetic construct
  source 1..20: mol_type = other DNA
cagaaaactgaaattcttat

SEQ ID NO: 98840 - DNA, 20 bp, synthetic construct
  source 1..20: mol_type = other DNA
gcagaaaactgaaattctta

SEQ ID NO: 98841 - DNA, 20 bp, synthetic construct
  source 1..20: mol_type = other DNA
agcagaaaactgaaattctt

SEQ ID NO: 98842 - DNA, 20 bp, synthetic construct
  source 1..20: mol_type = other DNA
cagcagaaaactgaaattct

SEQ ID NO: 98843 - DNA, 20 bp, synthetic construct
  source 1..20: mol_type = other DNA
ccagcagaaaactgaaattc

SEQ ID NO: 98844 - DNA, 20 bp, synthetic construct
  source 1..20: mol_type = other DNA
cccagcagaaaactgaaatt

SEQ ID NO: 98845 - DNA, 20 bp, synthetic construct
  source 1..20: mol_type = other DNA
gcccagcagaaaactgaaat

SEQ ID NO: 98846 - DNA, 20 bp, synthetic construct
  source 1..20: mol_type = other DNA
tgcccagcagaaaactgaaa

SEQ ID NO: 98847 - DNA, 20 bp, synthetic construct
  source 1..20: mol_type = other DNA
atgcccagcagaaaactgaa

SEQ ID NO: 98848 - DNA, 20 bp, synthetic construct
  source 1..20: mol_type = other DNA
catgcccagcagaaaactga

SEQ ID NO: 98849 - DNA, 20 bp, synthetic construct
  source 1..20: mol_type = other DNA
tcatgcccagcagaaaactg

SEQ ID NO: 98850 - DNA, 20 bp, synthetic construct
  source 1..20: mol_type = other DNA
atcatgcccagcagaaaact

SEQ ID NO: 98851 - DNA, 20 bp, synthetic construct
  source 1..20: mol_type = other DNA
catcatgcccagcagaaaac

SEQ ID NO: 98852 - DNA, 20 bp, synthetic construct
  source 1..20: mol_type = other DNA
ccatcatgcccagcagaaaa

SEQ ID NO: 98853 - DNA, 20 bp, synthetic construct
  source 1..20: mol_type = other DNA
gccatcatgcccagcagaaa

SEQ ID NO: 98854 - DNA, 20 bp, synthetic construct
  source 1..20: mol_type = other DNA
agccatcatgcccagcagaa

SEQ ID NO: 98855 - DNA, 20 bp, synthetic construct
  source 1..20: mol_type = other DNA
gagccatcatgcccagcaga

SEQ ID NO: 98856 - DNA, 20 bp, synthetic construct
  source 1..20: mol_type = other DNA
tgagccatcatgcccagcag

SEQ ID NO: 98857 - DNA, 20 bp, synthetic construct
  source 1..20: mol_type = other DNA
gtgagccatcatgcccagca

SEQ ID NO: 98858 - DNA, 20 bp, synthetic construct
  source 1..20: mol_type = other DNA
agtgagccatcatgcccagc

SEQ ID NO: 98859 - DNA, 20 bp, synthetic construct
  source 1..20: mol_type = other DNA
gagtgagccatcatgcccag

SEQ ID NO: 98860 - DNA, 20 bp, synthetic construct
  source 1..20: mol_type = other DNA
ggagtgagccatcatgccca

SEQ ID NO: 98861 - DNA, 20 bp, synthetic construct
  source 1..20: mol_type = other DNA
aggagtgagccatcatgccc

SEQ ID NO: 98862 - DNA, 20 bp, synthetic construct
  source 1..20: mol_type = other DNA
caggagtgagccatcatgcc

SEQ ID NO: 98863 - DNA, 20 bp, synthetic construct
  source 1..20: mol_type = other DNA
acaggagtgagccatcatgc

SEQ ID NO: 98864 - DNA, 20 bp, synthetic construct
  source 1..20: mol_type = other DNA
tacaggagtgagccatcatg

SEQ ID NO: 98865 - DNA, 20 bp, synthetic construct
  source 1..20: mol_type = other DNA
ttacaggagtgagccatcat

SEQ ID NO: 98866 - DNA, 20 bp, synthetic construct
  source 1..20: mol_type = other DNA
attacaggagtgagccatca

SEQ ID NO: 98867 - DNA, 20 bp, synthetic construct
  source 1..20: mol_type = other DNA
gattacaggagtgagccatc

SEQ ID NO: 98868 - DNA, 20 bp, synthetic construct
  source 1..20: mol_type = other DNA
ggattacaggagtgagccat

SEQ ID NO: 98869 - DNA, 20 bp, synthetic construct
  source 1..20: mol_type = other DNA
gggattacaggagtgagcca

SEQ ID NO: 98870 - DNA, 20 bp, synthetic construct
  source 1..20: mol_type = other DNA
tgggattacaggagtgagcc

SEQ ID NO: 98871 - DNA, 20 bp, synthetic construct
  source 1..20: mol_type = other DNA
ctgggattacaggagtgagc

SEQ ID NO: 98872 - DNA, 20 bp, synthetic construct
  source 1..20: mol_type = other DNA
gctgggattacaggagtgag

SEQ ID NO: 98873 - DNA, 20 bp, synthetic construct
  source 1..20: mol_type = other DNA
tgctgggattacaggagtga

SEQ ID NO: 98874 - DNA, 20 bp, synthetic construct
  source 1..20: mol_type = other DNA
gtgctgggattacaggagtg

SEQ ID NO: 98875 - DNA, 20 bp, synthetic construct
  source 1..20: mol_type = other DNA
agtgctgggattacaggagt

SEQ ID NO: 98876 - DNA, 20 bp, synthetic construct
  source 1..20: mol_type = other DNA
aagtgctgggattacaggag

SEQ ID NO: 98877 - DNA, 20 bp, synthetic construct
  source 1..20: mol_type = other DNA
aaagtgctgggattacagga

SEQ ID NO: 98878 - DNA, 20 bp, synthetic construct
  source 1..20: mol_type = other DNA
caaagtgctgggattacagg

SEQ ID NO: 98879 - DNA, 20 bp, synthetic construct
  source 1..20: mol_type = other DNA
ccaaagtgctgggattacag

SEQ ID NO: 98880 - DNA, 20 bp, synthetic construct
  source 1..20: mol_type = other DNA
cccaaagtgctgggattaca

SEQ ID NO: 98881 - DNA, 20 bp, synthetic construct
  source 1..20: mol_type = other DNA
tcccaaagtgctgggattac

SEQ ID NO: 98882 - DNA, 20 bp, synthetic construct
  source 1..20: mol_type = other DNA
ctcccaaagtgctgggatta

SEQ ID NO: 98883 - DNA, 20 bp, synthetic construct
  source 1..20: mol_type = other DNA
cctcccaaagtgctgggatt

SEQ ID NO: 98884 - DNA, 20 bp, synthetic construct
  source 1..20: mol_type = other DNA
gcctcccaaagtgctgggat

SEQ ID NO: 98885 - DNA, 20 bp, synthetic construct
  source 1..20: mol_type = other DNA
agcctcccaaagtgctggga

SEQ ID NO: 98886 - DNA, 20 bp, synthetic construct
  source 1..20: mol_type = other DNA
cagcctcccaaagtgctggg

SEQ ID NO: 98887 - DNA, 20 bp, synthetic construct
  source 1..20: mol_type = other DNA
tcagcctcccaaagtgctgg

SEQ ID NO: 98888 - DNA, 20 bp, synthetic construct
  source 1..20: mol_type = other DNA
ctcagcctcccaaagtgctg

SEQ ID NO: 98889 - DNA, 20 bp, synthetic construct
  source 1..20: mol_type = other DNA
cctcagcctcccaaagtgct

SEQ ID NO: 98890 - DNA, 20 bp, synthetic construct
  source 1..20: mol_type = other DNA
acctcagcctcccaaagtgc

SEQ ID NO: 98891 - DNA, 20 bp, synthetic construct
  source 1..20: mol_type = other DNA
cacctcagcctcccaaagtg

SEQ ID NO: 98892 - DNA, 20 bp, synthetic construct
  source 1..20: mol_type = other DNA
ccacctcagcctcccaaagt

SEQ ID NO: 98893 - DNA, 20 bp, synthetic construct
  source 1..20: mol_type = other DNA
tccacctcagcctcccaaag

SEQ ID NO: 98894 - DNA, 20 bp, synthetic construct
  source 1..20: mol_type = other DNA
atccacctcagcctcccaaa

SEQ ID NO: 98895 - DNA, 20 bp, synthetic construct
  source 1..20: mol_type = other DNA
catccacctcagcctcccaa

SEQ ID NO: 98896 - DNA, 20 bp, synthetic construct
  source 1..20: mol_type = other DNA
ccatccacctcagcctccca

SEQ ID NO: 98897 - DNA, 20 bp, synthetic construct
  source 1..20: mol_type = other DNA
tccatccacctcagcctccc

SEQ ID NO: 98898 - DNA, 20 bp, synthetic construct
  source 1..20: mol_type = other DNA
atccatccacctcagcctcc

SEQ ID NO: 98899 - DNA, 20 bp, synthetic construct
  source 1..20: mol_type = other DNA
gatccatccacctcagcctc

SEQ ID NO: 98900 - DNA, 20 bp, synthetic construct
  source 1..20: mol_type = other DNA
tgatccatccacctcagcct

SEQ ID NO: 98901 - DNA, 20 bp, synthetic construct
  source 1..20: mol_type = other DNA
ctgatccatccacctcagcc

SEQ ID NO: 98902 - DNA, 20 bp, synthetic construct
  source 1..20: mol_type = other DNA
gctgatccatccacctcagc

SEQ ID NO: 98903 - DNA, 20 bp, synthetic construct
  source 1..20: mol_type = other DNA
agctgatccatccacctcag

SEQ ID NO: 98904 - DNA, 20 bp, synthetic construct
  source 1..20: mol_type = other DNA
cagctgatccatccacctca

SEQ ID NO: 98905 - DNA, 20 bp, synthetic construct
  source 1..20: mol_type = other DNA
tcagctgatccatccacctc

SEQ ID NO: 98906 - DNA, 20 bp, synthetic construct
  source 1..20: mol_type = other DNA
ctcagctgatccatccacct

SEQ ID NO: 98907 - DNA, 20 bp, synthetic construct
  source 1..20: mol_type = other DNA
cctcagctgatccatccacc

SEQ ID NO: 98908 - DNA, 20 bp, synthetic construct
  source 1..20: mol_type = other DNA
acctcagctgatccatccac

SEQ ID NO: 98909 - DNA, 20 bp, synthetic construct
  source 1..20: mol_type = other DNA
gacctcagctgatccatcca

SEQ ID NO: 98910 - DNA, 20 bp, synthetic construct
  source 1..20: mol_type = other DNA
tgacctcagctgatccatcc

SEQ ID NO: 98911 - DNA, 20 bp, synthetic construct
  source 1..20: mol_type = other DNA
ctgacctcagctgatccatc

SEQ ID NO: 98912 - DNA, 20 bp, synthetic construct
  source 1..20: mol_type = other DNA
cctgacctcagctgatccat

SEQ ID NO: 98913 - DNA, 20 bp, synthetic construct
  source 1..20: mol_type = other DNA
tcctgacctcagctgatcca

SEQ ID NO: 98914 - DNA, 20 bp, synthetic construct
  source 1..20: mol_type = other DNA
ctcctgacctcagctgatcc

SEQ ID NO: 98915 - DNA, 20 bp, synthetic construct
  source 1..20: mol_type = other DNA
actcctgacctcagctgatc

SEQ ID NO: 98916 - DNA, 20 bp, synthetic construct
  source 1..20: mol_type = other DNA
aactcctgacctcagctgat

SEQ ID NO: 98917 - DNA, 20 bp, synthetic construct
  source 1..20: mol_type = other DNA
gaactcctgacctcagctga

SEQ ID NO: 98918 - DNA, 20 bp, synthetic construct
  source 1..20: mol_type = other DNA
ggaactcctgacctcagctg

SEQ ID NO: 98919 - DNA, 20 bp, synthetic construct
  source 1..20: mol_type = other DNA
tggaactcctgacctcagct

SEQ ID NO: 98920 - DNA, 20 bp, synthetic construct
  source 1..20: mol_type = other DNA
ctggaactcctgacctcagc

SEQ ID NO: 98921 - DNA, 20 bp, synthetic construct
  source 1..20: mol_type = other DNA
tctggaactcctgacctcag

SEQ ID NO: 98922 - DNA, 20 bp, synthetic construct
  source 1..20: mol_type = other DNA
gtctggaactcctgacctca

SEQ ID NO: 98923 - DNA, 20 bp, synthetic construct
  source 1..20: mol_type = other DNA
ggtctggaactcctgacctc

SEQ ID NO: 98924 - DNA, 20 bp, synthetic construct
  source 1..20: mol_type = other DNA
tggtctggaactcctgacct

SEQ ID NO: 98925 - DNA, 20 bp, synthetic construct
  source 1..20: mol_type = other DNA
ctggtctggaactcctgacc

SEQ ID NO: 98926 - DNA, 20 bp, synthetic construct
  source 1..20: mol_type = other DNA
gctggtctggaactcctgac

SEQ ID NO: 98927 - DNA, 20 bp, synthetic construct
  source 1..20: mol_type = other DNA
ggctggtctggaactcctga

SEQ ID NO: 98928 - DNA, 20 bp, synthetic construct
  source 1..20: mol_type = other DNA
aggctggtctggaactcctg

SEQ ID NO: 98929 - DNA, 20 bp, synthetic construct
  source 1..20: mol_type = other DNA
caggctggtctggaactcct

SEQ ID NO: 98930 - DNA, 20 bp, synthetic construct
  source 1..20: mol_type = other DNA
ccaggctggtctggaactcc

SEQ ID NO: 98931 - DNA, 20 bp, synthetic construct
  source 1..20: mol_type = other DNA
gccaggctggtctggaactc

SEQ ID NO: 98932 - DNA, 20 bp, synthetic construct
  source 1..20: mol_type = other DNA
ggccaggctggtctggaact

SEQ ID NO: 98933 - DNA, 20 bp, synthetic construct
  source 1..20: mol_type = other DNA
cggccaggctggtctggaac

SEQ ID NO: 98934 - DNA, 20 bp, synthetic construct
  source 1..20: mol_type = other DNA
tcggccaggctggtctggaa

SEQ ID NO: 98935 - DNA, 20 bp, synthetic construct
  source 1..20: mol_type = other DNA
gtcggccaggctggtctgga

SEQ ID NO: 98936 - DNA, 20 bp, synthetic construct
  source 1..20: mol_type = other DNA
tgtcggccaggctggtctgg

SEQ ID NO: 98937 - DNA, 20 bp, synthetic construct
  source 1..20: mol_type = other DNA
atgtcggccaggctggtctg

SEQ ID NO: 98938 - DNA, 20 bp, synthetic construct
  source 1..20: mol_type = other DNA
catgtcggccaggctggtct

SEQ ID NO: 98939 - DNA, 20 bp, synthetic construct
  source 1..20: mol_type = other DNA
tcatgtcggccaggctggtc

SEQ ID NO: 98940 - DNA, 20 bp, synthetic construct
  source 1..20: mol_type = other DNA
atcatgtcggccaggctggt

SEQ ID NO: 98941 - DNA, 20 bp, synthetic construct
  source 1..20: mol_type = other DNA
catcatgtcggccaggctgg

SEQ ID NO: 98942 - DNA, 20 bp, synthetic construct
  source 1..20: mol_type = other DNA
tcatcatgtcggccaggctg

SEQ ID NO: 98943 - DNA, 20 bp, synthetic construct
  source 1..20: mol_type = other DNA
ttcatcatgtcggccaggct

SEQ ID NO: 98944 - DNA, 20 bp, synthetic construct
  source 1..20: mol_type = other DNA
tttcatcatgtcggccaggc

SEQ ID NO: 98945 - DNA, 20 bp, synthetic construct
  source 1..20: mol_type = other DNA
gtttcatcatgtcggccagg

SEQ ID NO: 98946 - DNA, 20 bp, synthetic construct
  source 1..20: mol_type = other DNA
ggtttcatcatgtcggccag

SEQ ID NO: 98947 - DNA, 20 bp, synthetic construct
  source 1..20: mol_type = other DNA
gggtttcatcatgtcggcca

SEQ ID NO: 98948 - DNA, 20 bp, synthetic construct
  source 1..20: mol_type = other DNA
ggggtttcatcatgtcggcc

SEQ ID NO: 98949 - DNA, 20 bp, synthetic construct
  source 1..20: mol_type = other DNA
tggggtttcatcatgtcggc

SEQ ID NO: 98950 - DNA, 20 bp, synthetic construct
  source 1..20: mol_type = other DNA
atggggtttcatcatgtcgg

SEQ ID NO: 98951 - DNA, 20 bp, synthetic construct
  source 1..20: mol_type = other DNA
gatggggtttcatcatgtcg

SEQ ID NO: 98952 - DNA, 20 bp, synthetic construct
  source 1..20: mol_type = other DNA
agatggggtttcatcatgtc

SEQ ID NO: 98953 - DNA, 20 bp, synthetic construct
  source 1..20: mol_type = other DNA
gagatggggtttcatcatgt

SEQ ID NO: 98954 - DNA, 20 bp, synthetic construct
  source 1..20: mol_type = other DNA
agagatggggtttcatcatg

SEQ ID NO: 98955 - DNA, 20 bp, synthetic construct
  source 1..20: mol_type = other DNA
tagagatggggtttcatcat

SEQ ID NO: 98956 - DNA, 20 bp, synthetic construct
  source 1..20: mol_type = other DNA
gtagagatggggtttcatca

SEQ ID NO: 98957 - DNA, 20 bp, synthetic construct
  source 1..20: mol_type = other DNA
agtagagatggggtttcatc

SEQ ID NO: 98958 - DNA, 20 bp, synthetic construct
  source 1..20: mol_type = other DNA
tagtagagatggggtttcat

SEQ ID NO: 98959 - DNA, 20 bp, synthetic construct
  source 1..20: mol_type = other DNA
ttagtagagatggggtttca

SEQ ID NO: 98960 - DNA, 20 bp, synthetic construct
  source 1..20: mol_type = other DNA
tttagtagagatggggtttc

SEQ ID NO: 98961 - DNA, 20 bp, synthetic construct
  source 1..20: mol_type = other DNA
ttttagtagagatggggttt

SEQ ID NO: 98962 - DNA, 20 bp, synthetic construct
  source 1..20: mol_type = other DNA
tttttagtagagatggggtt

SEQ ID NO: 98963 - DNA, 20 bp, synthetic construct
  source 1..20: mol_type = other DNA
atttttagtagagatggggt

SEQ ID NO: 98964 - DNA, 20 bp, synthetic construct
  source 1..20: mol_type = other DNA
tatttttagtagagatgggg

SEQ ID NO: 98965 - DNA, 20 bp, synthetic construct
  source 1..20: mol_type = other DNA
gtatttttagtagagatggg

SEQ ID NO: 98966 - DNA, 20 bp, synthetic construct
  source 1..20: mol_type = other DNA
tgtatttttagtagagatgg

SEQ ID NO: 98967 - DNA, 20 bp, synthetic construct
  source 1..20: mol_type = other DNA
ttgtatttttagtagagatg

SEQ ID NO: 98968 - DNA, 20 bp, synthetic construct
  source 1..20: mol_type = other DNA
tttgtatttttagtagagat

SEQ ID NO: 98969 - DNA, 20 bp, synthetic construct
  source 1..20: mol_type = other DNA
ttttgtatttttagtagaga

SEQ ID NO: 98970 - DNA, 20 bp, synthetic construct
  source 1..20: mol_type = other DNA
tttttgtatttttagtagag

SEQ ID NO: 98971 - DNA, 20 bp, synthetic construct
  source 1..20: mol_type = other DNA
ttttttgtatttttagtaga

SEQ ID NO: 98972 - DNA, 20 bp, synthetic construct
  source 1..20: mol_type = other DNA
attttttgtatttttagtag

SEQ ID NO: 98973 - DNA, 20 bp, synthetic construct
  source 1..20: mol_type = other DNA
aattttttgtatttttagta

SEQ ID NO: 98974 - DNA, 20 bp, synthetic construct
  source 1..20: mol_type = other DNA
taattttttgtatttttagt

SEQ ID NO: 98975 - DNA, 20 bp, synthetic construct
  source 1..20: mol_type = other DNA
ctaattttttgtatttttag

SEQ ID NO: 98976 - DNA, 20 bp, synthetic construct
  source 1..20: mol_type = other DNA
gctaattttttgtattttta

SEQ ID NO: 98977 - DNA, 20 bp, synthetic construct
  source 1..20: mol_type = other DNA
ggctaattttttgtattttt

SEQ ID NO: 98978 - DNA, 20 bp, synthetic construct
  source 1..20: mol_type = other DNA
tggctaattttttgtatttt

SEQ ID NO: 98979 - DNA, 20 bp, synthetic construct
  source 1..20: mol_type = other DNA
ctggctaattttttgtattt

SEQ ID NO: 98980 - DNA, 20 bp, synthetic construct
  source 1..20: mol_type = other DNA
cctggctaattttttgtatt

SEQ ID NO: 98981 - DNA, 20 bp, synthetic construct
  source 1..20: mol_type = other DNA
gcctggctaattttttgtat

SEQ ID NO: 98982 - DNA, 20 bp, synthetic construct
  source 1..20: mol_type = other DNA
cgcctggctaattttttgta

SEQ ID NO: 98983 - DNA, 20 bp, synthetic construct
  source 1..20: mol_type = other DNA
acgcctggctaattttttgt

SEQ ID NO: 98984 - DNA, 20 bp, synthetic construct
  source 1..20: mol_type = other DNA
cacgcctggctaattttttg

SEQ ID NO: 98985 - DNA, 20 bp, synthetic construct
  source 1..20: mol_type = other DNA
ccacgcctggctaatttttt

SEQ ID NO: 98986 - DNA, 20 bp, synthetic construct
  source 1..20: mol_type = other DNA
accacgcctggctaattttt

SEQ ID NO: 98987 - DNA, 20 bp, synthetic construct
  source 1..20: mol_type = other DNA
caccacgcctggctaatttt

SEQ ID NO: 98988 - DNA, 20 bp, synthetic construct
  source 1..20: mol_type = other DNA
ccaccacgcctggctaattt

SEQ ID NO: 98989 - DNA, 20 bp, synthetic construct
  source 1..20: mol_type = other DNA
gccaccacgcctggctaatt

SEQ ID NO: 98990 - DNA, 20 bp, synthetic construct
  source 1..20: mol_type = other DNA
tgccaccacgcctggctaat

SEQ ID NO: 98991 - DNA, 20 bp, synthetic construct
  source 1..20: mol_type = other DNA
ctgccaccacgcctggctaa

SEQ ID NO: 98992 - DNA, 20 bp, synthetic construct
  source 1..20: mol_type = other DNA
cctgccaccacgcctggcta

SEQ ID NO: 98993 - DNA, 20 bp, synthetic construct
  source 1..20: mol_type = other DNA
acctgccaccacgcctggct

SEQ ID NO: 98994 - DNA, 20 bp, synthetic construct
  source 1..20: mol_type = other DNA
cacctgccaccacgcctggc

SEQ ID NO: 98995 - DNA, 20 bp, synthetic construct
  source 1..20: mol_type = other DNA
gcacctgccaccacgcctgg

SEQ ID NO: 98996 - DNA, 20 bp, synthetic construct
  source 1..20: mol_type = other DNA
ggcacctgccaccacgcctg

SEQ ID NO: 98997 - DNA, 20 bp, synthetic construct
  source 1..20: mol_type = other DNA
aggcacctgccaccacgcct

SEQ ID NO: 98998 - DNA, 20 bp, synthetic construct
  source 1..20: mol_type = other DNA
caggcacctgccaccacgcc

SEQ ID NO: 98999 - DNA, 20 bp, synthetic construct
  source 1..20: mol_type = other DNA
acaggcacctgccaccacgc

SEQ ID NO: 99000 - DNA, 20 bp, synthetic construct
  source 1..20: mol_type = other DNA
tacaggcacctgccaccacg

SEQ ID NO: 99001 - DNA, 20 bp, synthetic construct
  source 1..20: mol_type = other DNA
ttacaggcacctgccaccac

SEQ ID NO: 99002 - DNA, 20 bp, synthetic construct
  source 1..20: mol_type = other DNA
attacaggcacctgccacca

SEQ ID NO: 99003 - DNA, 20 bp, synthetic construct
  source 1..20: mol_type = other DNA
gattacaggcacctgccacc

SEQ ID NO: 99004 - DNA, 20 bp, synthetic construct
  source 1..20: mol_type = other DNA
ggattacaggcacctgccac

SEQ ID NO: 99005 - DNA, 20 bp, synthetic construct
  source 1..20: mol_type = other DNA
gggattacaggcacctgcca

SEQ ID NO: 99006 - DNA, 20 bp, synthetic construct
  source 1..20: mol_type = other DNA
tgggattacaggcacctgcc

SEQ ID NO: 99007 - DNA, 20 bp, synthetic construct
  source 1..20: mol_type = other DNA
ctgggattacaggcacctgc

SEQ ID NO: 99008 - DNA, 20 bp, synthetic construct
  source 1..20: mol_type = other DNA
gctgggattacaggcacctg

SEQ ID NO: 99009 - DNA, 20 bp, synthetic construct
  source 1..20: mol_type = other DNA
agctgggattacaggcacct

SEQ ID NO: 99010 - DNA, 20 bp, synthetic construct
  source 1..20: mol_type = other DNA
tagctgggattacaggcacc

SEQ ID NO: 99011 - DNA, 20 bp, synthetic construct
  source 1..20: mol_type = other DNA
gtagctgggattacaggcac

SEQ ID NO: 99012 - DNA, 20 bp, synthetic construct
  source 1..20: mol_type = other DNA
agtagctgggattacaggca

SEQ ID NO: 99013 - DNA, 20 bp, synthetic construct
  source 1..20: mol_type = other DNA
gagtagctgggattacaggc

SEQ ID NO: 99014 - DNA, 20 bp, synthetic construct
  source 1..20: mol_type = other DNA
cgagtagctgggattacagg

SEQ ID NO: 99015 - DNA, 20 bp, synthetic construct
  source 1..20: mol_type = other DNA
gcgagtagctgggattacag

SEQ ID NO: 99016 - DNA, 20 bp, synthetic construct
  source 1..20: mol_type = other DNA
tgcgagtagctgggattaca

SEQ ID NO: 99017 - DNA, 20 bp, synthetic construct
  source 1..20: mol_type = other DNA
ttgcgagtagctgggattac

SEQ ID NO: 99018 - DNA, 20 bp, synthetic construct
  source 1..20: mol_type = other DNA
cttgcgagtagctgggatta

SEQ ID NO: 99019 - DNA, 20 bp, synthetic construct
  source 1..20: mol_type = other DNA
tcttgcgagtagctgggatt

SEQ ID NO: 99020 - DNA, 20 bp, synthetic construct
  source 1..20: mol_type = other DNA
gtcttgcgagtagctgggat

SEQ ID NO: 99021 - DNA, 20 bp, synthetic construct
  source 1..20: mol_type = other DNA
agtcttgcgagtagctggga

SEQ ID NO: 99022 - DNA, 20 bp, synthetic construct
  source 1..20: mol_type = other DNA
cagtcttgcgagtagctggg

SEQ ID NO: 99023 - DNA, 20 bp, synthetic construct
  source 1..20: mol_type = other DNA
tcagtcttgcgagtagctgg

SEQ ID NO: 99024 - DNA, 20 bp, synthetic construct
  source 1..20: mol_type = other DNA
ctcagtcttgcgagtagctg

SEQ ID NO: 99025 - DNA, 20 bp, synthetic construct
  source 1..20: mol_type = other DNA
cctcagtcttgcgagtagct

SEQ ID NO: 99026 - DNA, 20 bp, synthetic construct
  source 1..20: mol_type = other DNA
gcctcagtcttgcgagtagc

SEQ ID NO: 99027 - DNA, 20 bp, synthetic construct
  source 1..20: mol_type = other DNA
tgcctcagtcttgcgagtag

SEQ ID NO: 99028 - DNA, 20 bp, synthetic construct
  source 1..20: mol_type = other DNA
ctgcctcagtcttgcgagta

SEQ ID NO: 99029 - DNA, 20 bp, synthetic construct
  source 1..20: mol_type = other DNA
cctgcctcagtcttgcgagt

SEQ ID NO: 99030 - DNA, 20 bp, synthetic construct
  source 1..20: mol_type = other DNA
tcctgcctcagtcttgcgag

SEQ ID NO: 99031 - DNA, 20 bp, synthetic construct
  source 1..20: mol_type = other DNA
ctcctgcctcagtcttgcga

SEQ ID NO: 99032 - DNA, 20 bp, synthetic construct
  source 1..20: mol_type = other DNA
tctcctgcctcagtcttgcg

SEQ ID NO: 99033 - DNA, 20 bp, synthetic construct
  source 1..20: mol_type = other DNA
ttctcctgcctcagtcttgc

SEQ ID NO: 99034 - DNA, 20 bp, synthetic construct
  source 1..20: mol_type = other DNA
tttctcctgcctcagtcttg

SEQ ID NO: 99035 - DNA, 20 bp, synthetic construct
  source 1..20: mol_type = other DNA
atttctcctgcctcagtctt

SEQ ID NO: 99036 - DNA, 20 bp, synthetic construct
  source 1..20: mol_type = other DNA
catttctcctgcctcagtct

SEQ ID NO: 99037 - DNA, 20 bp, synthetic construct
  source 1..20: mol_type = other DNA
gcatttctcctgcctcagtc

SEQ ID NO: 99038 - DNA, 20 bp, synthetic construct
  source 1..20: mol_type = other DNA
agcatttctcctgcctcagt

SEQ ID NO: 99039 - DNA, 20 bp, synthetic construct
  source 1..20: mol_type = other DNA
aagcatttctcctgcctcag

SEQ ID NO: 99040 - DNA, 20 bp, synthetic construct
  source 1..20: mol_type = other DNA
caagcatttctcctgcctca

SEQ ID NO: 99041 - DNA, 20 bp, synthetic construct
  source 1..20: mol_type = other DNA
tcaagcatttctcctgcctc

SEQ ID NO: 99042 - DNA, 20 bp, synthetic construct
  source 1..20: mol_type = other DNA
ttcaagcatttctcctgcct

SEQ ID NO: 99043 - DNA, 20 bp, synthetic construct
  source 1..20: mol_type = other DNA
gttcaagcatttctcctgcc

SEQ ID NO: 99044 - DNA, 20 bp, synthetic construct
  source 1..20: mol_type = other DNA
ggttcaagcatttctcctgc

SEQ ID NO: 99045 - DNA, 20 bp, synthetic construct
  source 1..20: mol_type = other DNA
gggttcaagcatttctcctg

SEQ ID NO: 99046 - DNA, 20 bp, synthetic construct
  source 1..20: mol_type = other DNA
cgggttcaagcatttctcct

SEQ ID NO: 99047 - DNA, 20 bp, synthetic construct
  source 1..20: mol_type = other DNA
ccgggttcaagcatttctcc

SEQ ID NO: 99048 - DNA, 20 bp, synthetic construct
  source 1..20: mol_type = other DNA
cccgggttcaagcatttctc

SEQ ID NO: 99049 - DNA, 20 bp, synthetic construct
  source 1..20: mol_type = other DNA
tcccgggttcaagcatttct

SEQ ID NO: 99050 - DNA, 20 bp, synthetic construct
  source 1..20: mol_type = other DNA
ctcccgggttcaagcatttc

SEQ ID NO: 99051 - DNA, 20 bp, synthetic construct
  source 1..20: mol_type = other DNA
cctcccgggttcaagcattt

SEQ ID NO: 99052 - DNA, 20 bp, synthetic construct
  source 1..20: mol_type = other DNA
gcctcccgggttcaagcatt

SEQ ID NO: 99053 - DNA, 20 bp, synthetic construct
  source 1..20: mol_type = other DNA
cgcctcccgggttcaagcat

SEQ ID NO: 99054 - DNA, 20 bp, synthetic construct
  source 1..20: mol_type = other DNA
ccgcctcccgggttcaagca

SEQ ID NO: 99055 - DNA, 20 bp, synthetic construct
  source 1..20: mol_type = other DNA
accgcctcccgggttcaagc

SEQ ID NO: 99056 - DNA, 20 bp, synthetic construct
  source 1..20: mol_type = other DNA
caccgcctcccgggttcaag

SEQ ID NO: 99057 - DNA, 20 bp, synthetic construct
  source 1..20: mol_type = other DNA
ccaccgcctcccgggttcaa

SEQ ID NO: 99058 - DNA, 20 bp, synthetic construct
  source 1..20: mol_type = other DNA
accaccgcctcccgggttca

SEQ ID NO: 99059 - DNA, 20 bp, synthetic construct
  source 1..20: mol_type = other DNA
aaccaccgcctcccgggttc

SEQ ID NO: 99060 - DNA, 20 bp, synthetic construct
  source 1..20: mol_type = other DNA
caaccaccgcctcccgggtt

SEQ ID NO: 99061 - DNA, 20 bp, synthetic construct
  source 1..20: mol_type = other DNA
gcaaccaccgcctcccgggt

SEQ ID NO: 99062 - DNA, 20 bp, synthetic construct
  source 1..20: mol_type = other DNA
ggcaaccaccgcctcccggg

SEQ ID NO: 99063 - DNA, 20 bp, synthetic construct
  source 1..20: mol_type = other DNA
tggcaaccaccgcctcccgg

SEQ ID NO: 99064 - DNA, 20 bp, synthetic construct
  source 1..20: mol_type = other DNA
atggcaaccaccgcctcccg

SEQ ID NO: 99065 - DNA, 20 bp, synthetic construct
  source 1..20: mol_type = other DNA
catggcaaccaccgcctccc

SEQ ID NO: 99066 - DNA, 20 bp, synthetic construct
  source 1..20: mol_type = other DNA
tcatggcaaccaccgcctcc

SEQ ID NO: 99067 - DNA, 20 bp, synthetic construct
  source 1..20: mol_type = other DNA
ctcatggcaaccaccgcctc

SEQ ID NO: 99068 - DNA, 20 bp, synthetic construct
  source 1..20: mol_type = other DNA
actcatggcaaccaccgcct

SEQ ID NO: 99069 - DNA, 20 bp, synthetic construct
  source 1..20: mol_type = other DNA
aactcatggcaaccaccgcc

SEQ ID NO: 99070 - DNA, 20 bp, synthetic construct
  source 1..20: mol_type = other DNA
taactcatggcaaccaccgc

SEQ ID NO: 99071 - DNA, 20 bp, synthetic construct
  source 1..20: mol_type = other DNA
ttaactcatggcaaccaccg

SEQ ID NO: 99072 - DNA, 20 bp, synthetic construct
  source 1..20: mol_type = other DNA
cttaactcatggcaaccacc

SEQ ID NO: 99073 - DNA, 20 bp, synthetic construct
  source 1..20: mol_type = other DNA
tcttaactcatggcaaccac

SEQ ID NO: 99074 - DNA, 20 bp, synthetic construct
  source 1..20: mol_type = other DNA
atcttaactcatggcaacca

SEQ ID NO: 99075 - DNA, 20 bp, synthetic construct
  source 1..20: mol_type = other DNA
gatcttaactcatggcaacc

SEQ ID NO: 99076 - DNA, 20 bp, synthetic construct
  source 1..20: mol_type = other DNA
cgatcttaactcatggcaac

SEQ ID NO: 99077 - DNA, 20 bp, synthetic construct
  source 1..20: mol_type = other DNA
acgatcttaactcatggcaa

SEQ ID NO: 99078 - DNA, 20 bp, synthetic construct
  source 1..20: mol_type = other DNA
cacgatcttaactcatggca

SEQ ID NO: 99079 - DNA, 20 bp, synthetic construct
  source 1..20: mol_type = other DNA
gcacgatcttaactcatggc

SEQ ID NO: 99080 - DNA, 20 bp, synthetic construct
  source 1..20: mol_type = other DNA
ggcacgatcttaactcatgg

SEQ ID NO: 99081 - DNA, 20 bp, synthetic construct
  source 1..20: mol_type = other DNA
cggcacgatcttaactcatg

SEQ ID NO: 99082 - DNA, 20 bp, synthetic construct
  source 1..20: mol_type = other DNA
gcggcacgatcttaactcat

SEQ ID NO: 99083 - DNA, 20 bp, synthetic construct
  source 1..20: mol_type = other DNA
agcggcacgatcttaactca

SEQ ID NO: 99084 - DNA, 20 bp, synthetic construct
  source 1..20: mol_type = other DNA
cagcggcacgatcttaactc

SEQ ID NO: 99085 - DNA, 20 bp, synthetic construct
  source 1..20: mol_type = other DNA
gcagcggcacgatcttaact

SEQ ID NO: 99086 - DNA, 20 bp, synthetic construct
  source 1..20: mol_type = other DNA
tgcagcggcacgatcttaac

SEQ ID NO: 99087 - DNA, 20 bp, synthetic construct
  source 1..20: mol_type = other DNA
gtgcagcggcacgatcttaa

SEQ ID NO: 99088 - DNA, 20 bp, synthetic construct
  source 1..20: mol_type = other DNA
agtgcagcggcacgatctta

SEQ ID NO: 99089 - DNA, 20 bp, synthetic construct
  source 1..20: mol_type = other DNA
gagtgcagcggcacgatctt

SEQ ID NO: 99090 - DNA, 20 bp, synthetic construct
  source 1..20: mol_type = other DNA
ggagtgcagcggcacgatct

SEQ ID NO: 99091 - DNA, 20 bp, synthetic construct
  source 1..20: mol_type = other DNA
tggagtgcagcggcacgatc

SEQ ID NO: 99092 - DNA, 20 bp, synthetic construct
  source 1..20: mol_type = other DNA
ctggagtgcagcggcacgat

SEQ ID NO: 99093 - DNA, 20 bp, synthetic construct
  source 1..20: mol_type = other DNA
gctggagtgcagcggcacga

SEQ ID NO: 99094 - DNA, 20 bp, synthetic construct
  source 1..20: mol_type = other DNA
ggctggagtgcagcggcacg

SEQ ID NO: 99095 - DNA, 20 bp, synthetic construct
  source 1..20: mol_type = other DNA
aggctggagtgcagcggcac

SEQ ID NO: 99096 - DNA, 20 bp, synthetic construct
  source 1..20: mol_type = other DNA
caggctggagtgcagcggca

SEQ ID NO: 99097 - DNA, 20 bp, synthetic construct
  source 1..20: mol_type = other DNA
ccaggctggagtgcagcggc

SEQ ID NO: 99098 - DNA, 20 bp, synthetic construct
  source 1..20: mol_type = other DNA
cccaggctggagtgcagcgg

SEQ ID NO: 99099 - DNA, 20 bp, synthetic construct
  source 1..20: mol_type = other DNA
gcccaggctggagtgcagcg

SEQ ID NO: 99100 - DNA, 20 bp, synthetic construct
  source 1..20: mol_type = other DNA
tgcccaggctggagtgcagc

SEQ ID NO: 99101 - DNA, 20 bp, synthetic construct
  source 1..20: mol_type = other DNA
ttgcccaggctggagtgcag

SEQ ID NO: 99102 - DNA, 20 bp, synthetic construct
  source 1..20: mol_type = other DNA
attgcccaggctggagtgca

SEQ ID NO: 99103 - DNA, 20 bp, synthetic construct
  source 1..20: mol_type = other DNA
tattgcccaggctggagtgc

SEQ ID NO: 99104 - DNA, 20 bp, synthetic construct
  source 1..20: mol_type = other DNA
ttattgcccaggctggagtg

SEQ ID NO: 99105 - DNA, 20 bp, synthetic construct
  source 1..20: mol_type = other DNA
cttattgcccaggctggagt

SEQ ID NO: 99106 - DNA, 20 bp, synthetic construct
  source 1..20: mol_type = other DNA
tcttattgcccaggctggag

SEQ ID NO: 99107 - DNA, 20 bp, synthetic construct
  source 1..20: mol_type = other DNA
ctcttattgcccaggctgga

SEQ ID NO: 99108 - DNA, 20 bp, synthetic construct
  source 1..20: mol_type = other DNA
gctcttattgcccaggctgg

SEQ ID NO: 99109 - DNA, 20 bp, synthetic construct
  source 1..20: mol_type = other DNA
cgctcttattgcccaggctg

SEQ ID NO: 99110 - DNA, 20 bp, synthetic construct
  source 1..20: mol_type = other DNA
tcgctcttattgcccaggct

SEQ ID NO: 99111 - DNA, 20 bp, synthetic construct
  source 1..20: mol_type = other DNA
ttcgctcttattgcccaggc

SEQ ID NO: 99112 - DNA, 20 bp, synthetic construct
  source 1..20: mol_type = other DNA
tttcgctcttattgcccagg

SEQ ID NO: 99113 - DNA, 20 bp, synthetic construct
  source 1..20: mol_type = other DNA
gtttcgctcttattgcccag

SEQ ID NO: 99114 - DNA, 20 bp, synthetic construct
  source 1..20: mol_type = other DNA
agtttcgctcttattgccca

SEQ ID NO: 99115 - DNA, 20 bp, synthetic construct
  source 1..20: mol_type = other DNA
gagtttcgctcttattgccc

SEQ ID NO: 99116 - DNA, 20 bp, synthetic construct
  source 1..20: mol_type = other DNA
ggagtttcgctcttattgcc

SEQ ID NO: 99117 - DNA, 20 bp, synthetic construct
  source 1..20: mol_type = other DNA
cggagtttcgctcttattgc

SEQ ID NO: 99118 - DNA, 20 bp, synthetic construct
  source 1..20: mol_type = other DNA
acggagtttcgctcttattg

SEQ ID NO: 99119 - DNA, 20 bp, synthetic construct
  source 1..20: mol_type = other DNA
gacggagtttcgctcttatt

SEQ ID NO: 99120 - DNA, 20 bp, synthetic construct
  source 1..20: mol_type = other DNA
agacggagtttcgctcttat

SEQ ID NO: 99121 - DNA, 20 bp, synthetic construct
  source 1..20: mol_type = other DNA
gagacggagtttcgctctta

SEQ ID NO: 99122 - DNA, 20 bp, synthetic construct
  source 1..20: mol_type = other DNA
ggagacggagtttcgctctt

SEQ ID NO: 99123 - DNA, 20 bp, synthetic construct
  source 1..20: mol_type = other DNA
tggagacggagtttcgctct

SEQ ID NO: 99124 - DNA, 20 bp, synthetic construct
  source 1..20: mol_type = other DNA
ttggagacggagtttcgctc

SEQ ID NO: 99125 - DNA, 20 bp, synthetic construct
  source 1..20: mol_type = other DNA
tttggagacggagtttcgct

SEQ ID NO: 99126 - DNA, 20 bp, synthetic construct
  source 1..20: mol_type = other DNA
ttttggagacggagtttcgc

SEQ ID NO: 99127 - DNA, 20 bp, synthetic construct
  source 1..20: mol_type = other DNA
tttttggagacggagtttcg

SEQ ID NO: 99128 - DNA, 20 bp, synthetic construct
  source 1..20: mol_type = other DNA
ttttttggagacggagtttc

SEQ ID NO: 99129 - DNA, 20 bp, synthetic construct
  source 1..20: mol_type = other DNA
tttttttggagacggagttt

SEQ ID NO: 99130 - DNA, 20 bp, synthetic construct
  source 1..20: mol_type = other DNA
ttttttttggagacggagtt

SEQ ID NO: 99131 - DNA, 20 bp, synthetic construct
  source 1..20: mol_type = other DNA
cttttttttggagacggagt

SEQ ID NO: 99132 - DNA, 20 bp, synthetic construct
  source 1..20: mol_type = other DNA
tcttttttttggagacggag

SEQ ID NO: 99133 - DNA, 20 bp, synthetic construct
  source 1..20: mol_type = other DNA
ttcttttttttggagacgga

SEQ ID NO: 99134 - DNA, 20 bp, synthetic construct
  source 1..20: mol_type = other DNA
tttcttttttttggagacgg

SEQ ID NO: 99135 - DNA, 20 bp, synthetic construct
  source 1..20: mol_type = other DNA
ttttcttttttttggagacg

SEQ ID NO: 99136 - DNA, 20 bp, synthetic construct
  source 1..20: mol_type = other DNA
tttttcttttttttggagac

SEQ ID NO: 99137 - DNA, 20 bp, synthetic construct
  source 1..20: mol_type = other DNA
ttttttcttttttttggaga

SEQ ID NO: 99138 - DNA, 20 bp, synthetic construct
  source 1..20: mol_type = other DNA
tttttttcttttttttggag

SEQ ID NO: 99139 - DNA, 20 bp, synthetic construct
  source 1..20: mol_type = other DNA
ttttttttcttttttttgga

SEQ ID NO: 99140 - DNA, 20 bp, synthetic construct
  source 1..20: mol_type = other DNA
tttttttttcttttttttgg

SEQ ID NO: 99141 - DNA, 20 bp, synthetic construct
  source 1..20: mol_type = other DNA
ctttttttttcttttttttg

SEQ ID NO: 99142 - DNA, 20 bp, synthetic construct
  source 1..20: mol_type = other DNA
tctttttttttctttttttt

SEQ ID NO: 99143 - DNA, 20 bp, synthetic construct
  source 1..20: mol_type = other DNA
ttctttttttttcttttttt

SEQ ID NO: 99144 - DNA, 20 bp, synthetic construct
  source 1..20: mol_type = other DNA
gttctttttttttctttttt

SEQ ID NO: 99145 - DNA, 20 bp, synthetic construct
  source 1..20: mol_type = other DNA
agttctttttttttcttttt

SEQ ID NO: 99146 - DNA, 20 bp, synthetic construct
  source 1..20: mol_type = other DNA
aagttctttttttttctttt

SEQ ID NO: 99147 - DNA, 20 bp, synthetic construct
  source 1..20: mol_type = other DNA
taagttctttttttttcttt

SEQ ID NO: 99148 - DNA, 20 bp, synthetic construct
  source 1..20: mol_type = other DNA
ttaagttctttttttttctt

SEQ ID NO: 99149 - DNA, 20 bp, synthetic construct
  source 1..20: mol_type = other DNA
cttaagttctttttttttct

SEQ ID NO: 99150 - DNA, 20 bp, synthetic construct
  source 1..20: mol_type = other DNA
acttaagttctttttttttc

SEQ ID NO: 99151 - DNA, 20 bp, synthetic construct
  source 1..20: mol_type = other DNA
aacttaagttcttttttttt

SEQ ID NO: 99152 - DNA, 20 bp, synthetic construct
  source 1..20: mol_type = other DNA
aaacttaagttctttttttt

SEQ ID NO: 99153 - DNA, 20 bp, synthetic construct
  source 1..20: mol_type = other DNA
aaaacttaagttcttttttt

SEQ ID NO: 99154 - DNA, 20 bp, synthetic construct
  source 1..20: mol_type = other DNA
gaaaacttaagttctttttt

SEQ ID NO: 99155 - DNA, 20 bp, synthetic construct
  source 1..20: mol_type = other DNA
ggaaaacttaagttcttttt

SEQ ID NO: 99156 - DNA, 20 bp, synthetic construct
  source 1..20: mol_type = other DNA
tggaaaacttaagttctttt

SEQ ID NO: 99157 - DNA, 20 bp, synthetic construct
  source 1..20: mol_type = other DNA
atggaaaacttaagttcttt

SEQ ID NO: 99158 - DNA, 20 bp, synthetic construct
  source 1..20: mol_type = other DNA
aatggaaaacttaagttctt

SEQ ID NO: 99159 - DNA, 20 bp, synthetic construct
  source 1..20: mol_type = other DNA
taatggaaaacttaagttct

SEQ ID NO: 99160 - DNA, 20 bp, synthetic construct
  source 1..20: mol_type = other DNA
ctaatggaaaacttaagttc

SEQ ID NO: 99161 - DNA, 20 bp, synthetic construct
  source 1..20: mol_type = other DNA
tctaatggaaaacttaagtt

SEQ ID NO: 99162 - DNA, 20 bp, synthetic construct
  source 1..20: mol_type = other DNA
atctaatggaaaacttaagt

SEQ ID NO: 99163 - DNA, 20 bp, synthetic construct
  source 1..20: mol_type = other DNA
aatctaatggaaaacttaag

SEQ ID NO: 99164 - DNA, 20 bp, synthetic construct
  source 1..20: mol_type = other DNA
aaatctaatggaaaacttaa

SEQ ID NO: 99165 - DNA, 20 bp, synthetic construct
  source 1..20: mol_type = other DNA
taaatctaatggaaaactta

SEQ ID NO: 99166 - DNA, 20 bp, synthetic construct
  source 1..20: mol_type = other DNA
ctaaatctaatggaaaactt

SEQ ID NO: 99167 - DNA, 20 bp, synthetic construct
  source 1..20: mol_type = other DNA
actaaatctaatggaaaact

SEQ ID NO: 99168 - DNA, 20 bp, synthetic construct
  source 1..20: mol_type = other DNA
tactaaatctaatggaaaac

SEQ ID NO: 99169 - DNA, 20 bp, synthetic construct
  source 1..20: mol_type = other DNA
atactaaatctaatggaaaa

SEQ ID NO: 99170 - DNA, 20 bp, synthetic construct
  source 1..20: mol_type = other DNA
tatactaaatctaatggaaa

SEQ ID NO: 99171 - DNA, 20 bp, synthetic construct
  source 1..20: mol_type = other DNA
ctatactaaatctaatggaa

SEQ ID NO: 99172 - DNA, 20 bp, synthetic construct
  source 1..20: mol_type = other DNA
actatactaaatctaatgga

SEQ ID NO: 99173 - DNA, 20 bp, synthetic construct
  source 1..20: mol_type = other DNA
cactatactaaatctaatgg

SEQ ID NO: 99174 - DNA, 20 bp, synthetic construct
  source 1..20: mol_type = other DNA
gcactatactaaatctaatg

SEQ ID NO: 99175 - DNA, 20 bp, synthetic construct
  source 1..20: mol_type = other DNA
tgcactatactaaatctaat

SEQ ID NO: 99176 - DNA, 20 bp, synthetic construct
  source 1..20: mol_type = other DNA
ctgcactatactaaatctaa

SEQ ID NO: 99177 - DNA, 20 bp, synthetic construct
  source 1..20: mol_type = other DNA
tctgcactatactaaatcta

SEQ ID NO: 99178 - DNA, 20 bp, synthetic construct
  source 1..20: mol_type = other DNA
ctctgcactatactaaatct

SEQ ID NO: 99179 - DNA, 20 bp, synthetic construct
  source 1..20: mol_type = other DNA
tctctgcactatactaaatc

SEQ ID NO: 99180 - DNA, 20 bp, synthetic construct
  source 1..20: mol_type = other DNA
ctctctgcactatactaaat

SEQ ID NO: 99181 - DNA, 20 bp, synthetic construct
  source 1..20: mol_type = other DNA
cctctctgcactatactaaa

SEQ ID NO: 99182 - DNA, 20 bp, synthetic construct
  source 1..20: mol_type = other DNA
tcctctctgcactatactaa

SEQ ID NO: 99183 - DNA, 20 bp, synthetic construct
  source 1..20: mol_type = other DNA
ttcctctctgcactatacta

SEQ ID NO: 99184 - DNA, 20 bp, synthetic construct
  source 1..20: mol_type = other DNA
tttcctctctgcactatact

SEQ ID NO: 99185 - DNA, 20 bp, synthetic construct
  source 1..20: mol_type = other DNA
atttcctctctgcactatac

SEQ ID NO: 99186 - DNA, 20 bp, synthetic construct
  source 1..20: mol_type = other DNA
tatttcctctctgcactata

SEQ ID NO: 99187 - DNA, 20 bp, synthetic construct
  source 1..20: mol_type = other DNA
gtatttcctctctgcactat

SEQ ID NO: 99188 - DNA, 20 bp, synthetic construct
  source 1..20: mol_type = other DNA
tgtatttcctctctgcacta

SEQ ID NO: 99189 - DNA, 20 bp, synthetic construct
  source 1..20: mol_type = other DNA
ctgtatttcctctctgcact

SEQ ID NO: 99190 - DNA, 20 bp, synthetic construct
  source 1..20: mol_type = other DNA
gctgtatttcctctctgcac

SEQ ID NO: 99191 - DNA, 20 bp, synthetic construct
  source 1..20: mol_type = other DNA
tgctgtatttcctctctgca

SEQ ID NO: 99192 - DNA, 20 bp, synthetic construct
  source 1..20: mol_type = other DNA
ctgctgtatttcctctctgc

SEQ ID NO: 99193 - DNA, 20 bp, synthetic construct
  source 1..20: mol_type = other DNA
tctgctgtatttcctctctg

SEQ ID NO: 99194 - DNA, 20 bp, synthetic construct
  source 1..20: mol_type = other DNA
ctctgctgtatttcctctct

SEQ ID NO: 99195 - DNA, 20 bp, synthetic construct
  source 1..20: mol_type = other DNA
actctgctgtatttcctctc

SEQ ID NO: 99196 - DNA, 20 bp, synthetic construct
  source 1..20: mol_type = other DNA
cactctgctgtatttcctct

SEQ ID NO: 99197 - DNA, 20 bp, synthetic construct
  source 1..20: mol_type = other DNA
gcactctgctgtatttcctc

SEQ ID NO: 99198 - DNA, 20 bp, synthetic construct
  source 1..20: mol_type = other DNA
agcactctgctgtatttcct

SEQ ID NO: 99199 - DNA, 20 bp, synthetic construct
  source 1..20: mol_type = other DNA
tagcactctgctgtatttcc

SEQ ID NO: 99200 - DNA, 20 bp, synthetic construct
  source 1..20: mol_type = other DNA
atagcactctgctgtatttc

SEQ ID NO: 99201 - DNA, 20 bp, synthetic construct
  source 1..20: mol_type = other DNA
tatagcactctgctgtattt

SEQ ID NO: 99202 - DNA, 20 bp, synthetic construct
  source 1..20: mol_type = other DNA
atatagcactctgctgtatt

SEQ ID NO: 99203 - DNA, 20 bp, synthetic construct
  source 1..20: mol_type = other DNA
aatatagcactctgctgtat

SEQ ID NO: 99204 - DNA, 20 bp, synthetic construct
  source 1..20: mol_type = other DNA
gaatatagcactctgctgta

SEQ ID NO: 99205 - DNA, 20 bp, synthetic construct
  source 1..20: mol_type = other DNA
ggaatatagcactctgctgt

SEQ ID NO: 99206 - DNA, 20 bp, synthetic construct
  source 1..20: mol_type = other DNA
tggaatatagcactctgctg

SEQ ID NO: 99207 - DNA, 20 bp, synthetic construct
  source 1..20: mol_type = other DNA
atggaatatagcactctgct

SEQ ID NO: 99208 - DNA, 20 bp, synthetic construct
  source 1..20: mol_type = other DNA
tatggaatatagcactctgc

SEQ ID NO: 99209 - DNA, 20 bp, synthetic construct
  source 1..20: mol_type = other DNA
atatggaatatagcactctg

SEQ ID NO: 99210 - DNA, 20 bp, synthetic construct
  source 1..20: mol_type = other DNA
tatatggaatatagcactct

SEQ ID NO: 99211 - DNA, 20 bp, synthetic construct
  source 1..20: mol_type = other DNA
atatatggaatatagcactc

SEQ ID NO: 99212 - DNA, 20 bp, synthetic construct
  source 1..20: mol_type = other DNA
tatatatggaatatagcact

SEQ ID NO: 99213 - DNA, 20 bp, synthetic construct
  source 1..20: mol_type = other DNA
ctatatatggaatatagcac

SEQ ID NO: 99214 - DNA, 20 bp, synthetic construct
  source 1..20: mol_type = other DNA
gctatatatggaatatagca

SEQ ID NO: 99215 - DNA, 20 bp, synthetic construct
  source 1..20: mol_type = other DNA
tgctatatatggaatatagc

SEQ ID NO: 99216 - DNA, 20 bp, synthetic construct
  source 1..20: mol_type = other DNA
ttgctatatatggaatatag

SEQ ID NO: 99217 - DNA, 20 bp, synthetic construct
  source 1..20: mol_type = other DNA
attgctatatatggaatata

SEQ ID NO: 99218 - DNA, 20 bp, synthetic construct
  source 1..20: mol_type = other DNA
tattgctatatatggaatat

SEQ ID NO: 99219 - DNA, 20 bp, synthetic construct
  source 1..20: mol_type = other DNA
atattgctatatatggaata

SEQ ID NO: 99220 - DNA, 20 bp, synthetic construct
  source 1..20: mol_type = other DNA
tatattgctatatatggaat

SEQ ID NO: 99221 - DNA, 20 bp, synthetic construct
  source 1..20: mol_type = other DNA
ctatattgctatatatggaa

SEQ ID NO: 99222 - DNA, 20 bp, synthetic construct
  source 1..20: mol_type = other DNA
gctatattgctatatatgga

SEQ ID NO: 99223 - DNA, 20 bp, synthetic construct
  source 1..20: mol_type = other DNA
tgctatattgctatatatgg

SEQ ID NO: 99224 - DNA, 20 bp, synthetic construct
  source 1..20: mol_type = other DNA
atgctatattgctatatatg

SEQ ID NO: 99225 - DNA, 20 bp, synthetic construct
  source 1..20: mol_type = other DNA
aatgctatattgctatatat

SEQ ID NO: 99226 - DNA, 20 bp, synthetic construct
  source 1..20: mol_type = other DNA
taatgctatattgctatata

SEQ ID NO: 99227 - DNA, 20 bp, synthetic construct
  source 1..20: mol_type = other DNA
ctaatgctatattgctatat

SEQ ID NO: 99228 - DNA, 20 bp, synthetic construct
  source 1..20: mol_type = other DNA
tctaatgctatattgctata

SEQ ID NO: 99229 - DNA, 20 bp, synthetic construct
  source 1..20: mol_type = other DNA
ttctaatgctatattgctat

SEQ ID NO: 99230 - DNA, 20 bp, synthetic construct
  source 1..20: mol_type = other DNA
gttctaatgctatattgcta

SEQ ID NO: 99231 - DNA, 20 bp, synthetic construct
  source 1..20: mol_type = other DNA
tgttctaatgctatattgct

SEQ ID NO: 99232 - DNA, 20 bp, synthetic construct
  source 1..20: mol_type = other DNA
ttgttctaatgctatattgc

SEQ ID NO: 99233 - DNA, 20 bp, synthetic construct
  source 1..20: mol_type = other DNA
attgttctaatgctatattg

SEQ ID NO: 99234 - DNA, 20 bp, synthetic construct
  source 1..20: mol_type = other DNA
tattgttctaatgctatatt

SEQ ID NO: 99235 - DNA, 20 bp, synthetic construct
  source 1..20: mol_type = other DNA
atattgttctaatgctatat

SEQ ID NO: 99236 - DNA, 20 bp, synthetic construct
  source 1..20: mol_type = other DNA
tatattgttctaatgctata

SEQ ID NO: 99237 - DNA, 20 bp, synthetic construct
  source 1..20: mol_type = other DNA
atatattgttctaatgctat

SEQ ID NO: 99238 - DNA, 20 bp, synthetic construct
  source 1..20: mol_type = other DNA
aatatattgttctaatgcta

SEQ ID NO: 99239 - DNA, 20 bp, synthetic construct
  source 1..20: mol_type = other DNA
gaatatattgttctaatgct

SEQ ID NO: 99240 - DNA, 20 bp, synthetic construct
  source 1..20: mol_type = other DNA
ggaatatattgttctaatgc

SEQ ID NO: 99241 - DNA, 20 bp, synthetic construct
  source 1..20: mol_type = other DNA
tggaatatattgttctaatg

SEQ ID NO: 99242 - DNA, 20 bp, synthetic construct
  source 1..20: mol_type = other DNA
ttggaatatattgttctaat

SEQ ID NO: 99243 - DNA, 20 bp, synthetic construct
  source 1..20: mol_type = other DNA
attggaatatattgttctaa

SEQ ID NO: 99244 - DNA, 20 bp, synthetic construct
  source 1..20: mol_type = other DNA
tattggaatatattgttcta

SEQ ID NO: 99245 - DNA, 20 bp, synthetic construct
  source 1..20: mol_type = other DNA
gtattggaatatattgttct

SEQ ID NO: 99246 - DNA, 20 bp, synthetic construct
  source 1..20: mol_type = other DNA
tgtattggaatatattgttc

SEQ ID NO: 99247 - DNA, 20 bp, synthetic construct
  source 1..20: mol_type = other DNA
ctgtattggaatatattgtt

SEQ ID NO: 99248 - DNA, 20 bp, synthetic construct
  source 1..20: mol_type = other DNA
gctgtattggaatatattgt

SEQ ID NO: 99249 - DNA, 20 bp, synthetic construct
  source 1..20: mol_type = other DNA
tgctgtattggaatatattg

SEQ ID NO: 99250 - DNA, 20 bp, synthetic construct
  source 1..20: mol_type = other DNA
ctgctgtattggaatatatt

SEQ ID NO: 99251 - DNA, 20 bp, synthetic construct
  source 1..20: mol_type = other DNA
tctgctgtattggaatatat

SEQ ID NO: 99252 - DNA, 20 bp, synthetic construct
  source 1..20: mol_type = other DNA
ctctgctgtattggaatata

SEQ ID NO: 99253 - DNA, 20 bp, synthetic construct
  source 1..20: mol_type = other DNA
actctgctgtattggaatat

SEQ ID NO: 99254 - DNA, 20 bp, synthetic construct
  source 1..20: mol_type = other DNA
cactctgctgtattggaata

SEQ ID NO: 99255 - DNA, 20 bp, synthetic construct
  source 1..20: mol_type = other DNA
gcactctgctgtattggaat

SEQ ID NO: 99256 - DNA, 20 bp, synthetic construct
  source 1..20: mol_type = other DNA
agcactctgctgtattggaa

SEQ ID NO: 99257 - DNA, 20 bp, synthetic construct
  source 1..20: mol_type = other DNA
tagcactctgctgtattgga

SEQ ID NO: 99258 - DNA, 20 bp, synthetic construct
  source 1..20: mol_type = other DNA
atagcactctgctgtattgg

SEQ ID NO: 99259 - DNA, 20 bp, synthetic construct
  source 1..20: mol_type = other DNA
tatagcactctgctgtattg

SEQ ID NO: 99260 - DNA, 20 bp, synthetic construct
  source 1..20: mol_type = other DNA
atatagcactctgctgtatt

SEQ ID NO: 99261 - DNA, 20 bp, synthetic construct
  source 1..20: mol_type = other DNA
aatatagcactctgctgtat

SEQ ID NO: 99262 - DNA, 20 bp, synthetic construct
  source 1..20: mol_type = other DNA
gaatatagcactctgctgta

SEQ ID NO: 99263 - DNA, 20 bp, synthetic construct
  source 1..20: mol_type = other DNA
tgaatatagcactctgctgt

SEQ ID NO: 99264 - DNA, 20 bp, synthetic construct
  source 1..20: mol_type = other DNA
ctgaatatagcactctgctg

SEQ ID NO: 99265 - DNA, 20 bp, synthetic construct
  source 1..20: mol_type = other DNA
tctgaatatagcactctgct

SEQ ID NO: 99266 - DNA, 20 bp, synthetic construct
  source 1..20: mol_type = other DNA
atctgaatatagcactctgc

SEQ ID NO: 99267 - DNA, 20 bp, synthetic construct
  source 1..20: mol_type = other DNA
tatctgaatatagcactctg

SEQ ID NO: 99268 - DNA, 20 bp, synthetic construct
  source 1..20: mol_type = other DNA
gtatctgaatatagcactct

SEQ ID NO: 99269 - DNA, 20 bp, synthetic construct
  source 1..20: mol_type = other DNA
ggtatctgaatatagcactc

SEQ ID NO: 99270 - DNA, 20 bp, synthetic construct
  source 1..20: mol_type = other DNA
tggtatctgaatatagcact

SEQ ID NO: 99271 - DNA, 20 bp, synthetic construct
  source 1..20: mol_type = other DNA
ttggtatctgaatatagcac

SEQ ID NO: 99272 - DNA, 20 bp, synthetic construct
  source 1..20: mol_type = other DNA
gttggtatctgaatatagca

SEQ ID NO: 99273 - DNA, 20 bp, synthetic construct
  source 1..20: mol_type = other DNA
agttggtatctgaatatagc

SEQ ID NO: 99274 - DNA, 20 bp, synthetic construct
  source 1..20: mol_type = other DNA
tagttggtatctgaatatag

SEQ ID NO: 99275 - DNA, 20 bp, synthetic construct
  source 1..20: mol_type = other DNA
ctagttggtatctgaatata

SEQ ID NO: 99276 - DNA, 20 bp, synthetic construct
  source 1..20: mol_type = other DNA
actagttggtatctgaatat

SEQ ID NO: 99277 - DNA, 20 bp, synthetic construct
  source 1..20: mol_type = other DNA
cactagttggtatctgaata

SEQ ID NO: 99278 - DNA, 20 bp, synthetic construct
  source 1..20: mol_type = other DNA
ccactagttggtatctgaat

SEQ ID NO: 99279 - DNA, 20 bp, synthetic construct
  source 1..20: mol_type = other DNA
tccactagttggtatctgaa

SEQ ID NO: 99280 - DNA, 20 bp, synthetic construct
  source 1..20: mol_type = other DNA
gtccactagttggtatctga

SEQ ID NO: 99281 - DNA, 20 bp, synthetic construct
  source 1..20: mol_type = other DNA
agtccactagttggtatctg

SEQ ID NO: 99282 - DNA, 20 bp, synthetic construct
  source 1..20: mol_type = other DNA
aagtccactagttggtatct

SEQ ID NO: 99283 - DNA, 20 bp, synthetic construct
  source 1..20: mol_type = other DNA
caagtccactagttggtatc

SEQ ID NO: 99284 - DNA, 20 bp, synthetic construct
  source 1..20: mol_type = other DNA
gcaagtccactagttggtat

SEQ ID NO: 99285 - DNA, 20 bp, synthetic construct
  source 1..20: mol_type = other DNA
agcaagtccactagttggta

SEQ ID NO: 99286 - DNA, 20 bp, synthetic construct
  source 1..20: mol_type = other DNA
tagcaagtccactagttggt

SEQ ID NO: 99287 - DNA, 20 bp, synthetic construct
  source 1..20: mol_type = other DNA
atagcaagtccactagttgg

SEQ ID NO: 99288 - DNA, 20 bp, synthetic construct
  source 1..20: mol_type = other DNA
aatagcaagtccactagttg

SEQ ID NO: 99289 - DNA, 20 bp, synthetic construct
  source 1..20: mol_type = other DNA
aaatagcaagtccactagtt

SEQ ID NO: 99290 - DNA, 20 bp, synthetic construct
  source 1..20: mol_type = other DNA
caaatagcaagtccactagt

SEQ ID NO: 99291 - DNA, 20 bp, synthetic construct
  source 1..20: mol_type = other DNA
acaaatagcaagtccactag

SEQ ID NO: 99292 - DNA, 20 bp, synthetic construct
  source 1..20: mol_type = other DNA
tacaaatagcaagtccacta

SEQ ID NO: 99293 - DNA, 20 bp, synthetic construct
  source 1..20: mol_type = other DNA
ttacaaatagcaagtccact

SEQ ID NO: 99294 - DNA, 20 bp, synthetic construct
  source 1..20: mol_type = other DNA
cttacaaatagcaagtccac

SEQ ID NO: 99295 - DNA, 20 bp, synthetic construct
  source 1..20: mol_type = other DNA
tcttacaaatagcaagtcca

SEQ ID NO: 99296 - DNA, 20 bp, synthetic construct
  source 1..20: mol_type = other DNA
atcttacaaatagcaagtcc

SEQ ID NO: 99297 - DNA, 20 bp, synthetic construct
  source 1..20: mol_type = other DNA
catcttacaaatagcaagtc

SEQ ID NO: 99298 - DNA, 20 bp, synthetic construct
  source 1..20: mol_type = other DNA
ccatcttacaaatagcaagt

SEQ ID NO: 99299 - DNA, 20 bp, synthetic construct
  source 1..20: mol_type = other DNA
gccatcttacaaatagcaag

SEQ ID NO: 99300 - DNA, 20 bp, synthetic construct
  source 1..20: mol_type = other DNA
tgccatcttacaaatagcaa

SEQ ID NO: 99301 - DNA, 20 bp, synthetic construct
  source 1..20: mol_type = other DNA
ttgccatcttacaaatagca

SEQ ID NO: 99302 - DNA, 20 bp, synthetic construct
  source 1..20: mol_type = other DNA
attgccatcttacaaatagc

SEQ ID NO: 99303 - DNA, 20 bp, synthetic construct
  source 1..20: mol_type = other DNA
tattgccatcttacaaatag

SEQ ID NO: 99304 - DNA, 20 bp, synthetic construct
  source 1..20: mol_type = other DNA
ttattgccatcttacaaata

SEQ ID NO: 99305 - DNA, 20 bp, synthetic construct
  source 1..20: mol_type = other DNA
attattgccatcttacaaat

SEQ ID NO: 99306 - DNA, 20 bp, synthetic construct
  source 1..20: mol_type = other DNA
tattattgccatcttacaaa

SEQ ID NO: 99307 - DNA, 20 bp, synthetic construct
  source 1..20: mol_type = other DNA
ctattattgccatcttacaa

SEQ ID NO: 99308 - DNA, 20 bp, synthetic construct
  source 1..20: mol_type = other DNA
actattattgccatcttaca

SEQ ID NO: 99309 - DNA, 20 bp, synthetic construct
  source 1..20: mol_type = other DNA
tactattattgccatcttac

SEQ ID NO: 99310 - DNA, 20 bp, synthetic construct
  source 1..20: mol_type = other DNA
atactattattgccatctta

SEQ ID NO: 99311 - DNA, 20 bp, synthetic construct
  source 1..20: mol_type = other DNA
gatactattattgccatctt

SEQ ID NO: 99312 - DNA, 20 bp, synthetic construct
  source 1..20: mol_type = other DNA
agatactattattgccatct

SEQ ID NO: 99313 - DNA, 20 bp, synthetic construct
  source 1..20: mol_type = other DNA
tagatactattattgccatc

SEQ ID NO: 99314 - DNA, 20 bp, synthetic construct
  source 1..20: mol_type = other DNA
gtagatactattattgccat

SEQ ID NO: 99315 - DNA, 20 bp, synthetic construct
  source 1..20: mol_type = other DNA
tgtagatactattattgcca

SEQ ID NO: 99316 - DNA, 20 bp, synthetic construct
  source 1..20: mol_type = other DNA
atgtagatactattattgcc

SEQ ID NO: 99317 - DNA, 20 bp, synthetic construct
  source 1..20: mol_type = other DNA
gatgtagatactattattgc

SEQ ID NO: 99318 - DNA, 20 bp, synthetic construct
  source 1..20: mol_type = other DNA
tgatgtagatactattattg

SEQ ID NO: 99319 - DNA, 20 bp, synthetic construct
  source 1..20: mol_type = other DNA
ttgatgtagatactattatt

SEQ ID NO: 99320 - DNA, 20 bp, synthetic construct
  source 1..20: mol_type = other DNA
tttgatgtagatactattat

SEQ ID NO: 99321 - DNA, 20 bp, synthetic construct
  source 1..20: mol_type = other DNA
atttgatgtagatactatta

SEQ ID NO: 99322 - DNA, 20 bp, synthetic construct
  source 1..20: mol_type = other DNA
tatttgatgtagatactatt

SEQ ID NO: 99323 - DNA, 20 bp, synthetic construct
  source 1..20: mol_type = other DNA
ctatttgatgtagatactat

SEQ ID NO: 99324 - DNA, 20 bp, synthetic construct
  source 1..20: mol_type = other DNA
cctatttgatgtagatacta

SEQ ID NO: 99325 - DNA, 20 bp, synthetic construct
  source 1..20: mol_type = other DNA
ccctatttgatgtagatact

SEQ ID NO: 99326 - DNA, 20 bp, synthetic construct
  source 1..20: mol_type = other DNA
gccctatttgatgtagatac

SEQ ID NO: 99327 - DNA, 20 bp, synthetic construct
  source 1..20: mol_type = other DNA
agccctatttgatgtagata

SEQ ID NO: 99328 - DNA, 20 bp, synthetic construct
  source 1..20: mol_type = other DNA
cagccctatttgatgtagat

SEQ ID NO: 99329 - DNA, 20 bp, synthetic construct
  source 1..20: mol_type = other DNA
acagccctatttgatgtaga

SEQ ID NO: 99330 - DNA, 20 bp, synthetic construct
  source 1..20: mol_type = other DNA
aacagccctatttgatgtag

SEQ ID NO: 99331 - DNA, 20 bp, synthetic construct
  source 1..20: mol_type = other DNA
caacagccctatttgatgta

SEQ ID NO: 99332 - DNA, 20 bp, synthetic construct
  source 1..20: mol_type = other DNA
acaacagccctatttgatgt

SEQ ID NO: 99333 - DNA, 20 bp, synthetic construct
  source 1..20: mol_type = other DNA
cacaacagccctatttgatg

SEQ ID NO: 99334 - DNA, 20 bp, synthetic construct
  source 1..20: mol_type = other DNA
tcacaacagccctatttgat

SEQ ID NO: 99335 - DNA, 20 bp, synthetic construct
  source 1..20: mol_type = other DNA
ttcacaacagccctatttga

SEQ ID NO: 99336 - DNA, 20 bp, synthetic construct
  source 1..20: mol_type = other DNA
cttcacaacagccctatttg

SEQ ID NO: 99337 - DNA, 20 bp, synthetic construct
  source 1..20: mol_type = other DNA
tcttcacaacagccctattt

SEQ ID NO: 99338 - DNA, 20 bp, synthetic construct
  source 1..20: mol_type = other DNA
gtcttcacaacagccctatt

SEQ ID NO: 99339 - DNA, 20 bp, synthetic construct
  source 1..20: mol_type = other DNA
agtcttcacaacagccctat

SEQ ID NO: 99340 - DNA, 20 bp, synthetic construct
  source 1..20: mol_type = other DNA
tagtcttcacaacagcccta

SEQ ID NO: 99341 - DNA, 20 bp, synthetic construct
  source 1..20: mol_type = other DNA
ttagtcttcacaacagccct

SEQ ID NO: 99342 - DNA, 20 bp, synthetic construct
  source 1..20: mol_type = other DNA
tttagtcttcacaacagccc

SEQ ID NO: 99343 - DNA, 20 bp, synthetic construct
  source 1..20: mol_type = other DNA
atttagtcttcacaacagcc

SEQ ID NO: 99344 - DNA, 20 bp, synthetic construct
  source 1..20: mol_type = other DNA
catttagtcttcacaacagc

SEQ ID NO: 99345 - DNA, 20 bp, synthetic construct
  source 1..20: mol_type = other DNA
tcatttagtcttcacaacag

SEQ ID NO: 99346 - DNA, 20 bp, synthetic construct
  source 1..20: mol_type = other DNA
ttcatttagtcttcacaaca

SEQ ID NO: 99347 - DNA, 20 bp, synthetic construct
  source 1..20: mol_type = other DNA
attcatttagtcttcacaac

SEQ ID NO: 99348 - DNA, 20 bp, synthetic construct
  source 1..20: mol_type = other DNA
tattcatttagtcttcacaa

SEQ ID NO: 99349 - DNA, 20 bp, synthetic construct
  source 1..20: mol_type = other DNA
ttattcatttagtcttcaca

SEQ ID NO: 99350 - DNA, 20 bp, synthetic construct
  source 1..20: mol_type = other DNA
cttattcatttagtcttcac

SEQ ID NO: 99351 - DNA, 20 bp, synthetic construct
  source 1..20: mol_type = other DNA
acttattcatttagtcttca

SEQ ID NO: 99352 - DNA, 20 bp, synthetic construct
  source 1..20: mol_type = other DNA
gacttattcatttagtcttc

SEQ ID NO: 99353 - DNA, 20 bp, synthetic construct
  source 1..20: mol_type = other DNA
agacttattcatttagtctt

SEQ ID NO: 99354 - DNA, 20 bp, synthetic construct
  source 1..20: mol_type = other DNA
tagacttattcatttagtct

SEQ ID NO: 99355 - DNA, 20 bp, synthetic construct
  source 1..20: mol_type = other DNA
atagacttattcatttagtc

SEQ ID NO: 99356 - DNA, 20 bp, synthetic construct
  source 1..20: mol_type = other DNA
tatagacttattcatttagt

SEQ ID NO: 99357 - DNA, 20 bp, synthetic construct
  source 1..20: mol_type = other DNA
ttatagacttattcatttag

SEQ ID NO: 99358 - DNA, 20 bp, synthetic construct
  source 1..20: mol_type = other DNA
tttatagacttattcattta

SEQ ID NO: 99359 - DNA, 20 bp, synthetic construct
  source 1..20: mol_type = other DNA
atttatagacttattcattt

SEQ ID NO: 99360 - DNA, 20 bp, synthetic construct
  source 1..20: mol_type = other DNA
tatttatagacttattcatt

SEQ ID NO: 99361 - DNA, 20 bp, synthetic construct
  source 1..20: mol_type = other DNA
ctatttatagacttattcat

SEQ ID NO: 99362 - DNA, 20 bp, synthetic construct
  source 1..20: mol_type = other DNA
actatttatagacttattca

SEQ ID NO: 99363 - DNA, 20 bp, synthetic construct
  source 1..20: mol_type = other DNA
aactatttatagacttattc

SEQ ID NO: 99364 - DNA, 20 bp, synthetic construct
  source 1..20: mol_type = other DNA
aaactatttatagacttatt

SEQ ID NO: 99365 - DNA, 20 bp, synthetic construct
  source 1..20: mol_type = other DNA
taaactatttatagacttat

SEQ ID NO: 99366 - DNA, 20 bp, synthetic construct
  source 1..20: mol_type = other DNA
ctaaactatttatagactta

SEQ ID NO: 99367 - DNA, 20 bp, synthetic construct
  source 1..20: mol_type = other DNA
tctaaactatttatagactt

SEQ ID NO: 99368 - DNA, 20 bp, synthetic construct
  source 1..20: mol_type = other DNA
ttctaaactatttatagact

SEQ ID NO: 99369 - DNA, 20 bp, synthetic construct
  source 1..20: mol_type = other DNA
gttctaaactatttatagac

SEQ ID NO: 99370 - DNA, 20 bp, synthetic construct
  source 1..20: mol_type = other DNA
tgttctaaactatttataga

SEQ ID NO: 99371 - DNA, 20 bp, synthetic construct
  source 1..20: mol_type = other DNA
ctgttctaaactatttatag

SEQ ID NO: 99372 - DNA, 20 bp, synthetic construct
  source 1..20: mol_type = other DNA
actgttctaaactatttata

SEQ ID NO: 99373 - DNA, 20 bp, synthetic construct
  source 1..20: mol_type = other DNA
cactgttctaaactatttat

SEQ ID NO: 99374 - DNA, 20 bp, synthetic construct
  source 1..20: mol_type = other DNA
acactgttctaaactattta

SEQ ID NO: 99375 - DNA, 20 bp, synthetic construct
  source 1..20: mol_type = other DNA
gacactgttctaaactattt

SEQ ID NO: 99376 - DNA, 20 bp, synthetic construct
  source 1..20: mol_type = other DNA
agacactgttctaaactatt

SEQ ID NO: 99377 - DNA, 20 bp, synthetic construct
  source 1..20: mol_type = other DNA
cagacactgttctaaactat

SEQ ID NO: 99378 - DNA, 20 bp, synthetic construct
  source 1..20: mol_type = other DNA
ccagacactgttctaaacta

SEQ ID NO: 99379 - DNA, 20 bp, synthetic construct
  source 1..20: mol_type = other DNA
tccagacactgttctaaact

SEQ ID NO: 99380 - DNA, 20 bp, synthetic construct
  source 1..20: mol_type = other DNA
gtccagacactgttctaaac

SEQ ID NO: 99381 - DNA, 20 bp, synthetic construct
  source 1..20: mol_type = other DNA
tgtccagacactgttctaaa

SEQ ID NO: 99382 - DNA, 20 bp, synthetic construct
  source 1..20: mol_type = other DNA
ctgtccagacactgttctaa

SEQ ID NO: 99383 - DNA, 20 bp, synthetic construct
  source 1..20: mol_type = other DNA
cctgtccagacactgttcta

SEQ ID NO: 99384 - DNA, 20 bp, synthetic construct
  source 1..20: mol_type = other DNA
acctgtccagacactgttct

SEQ ID NO: 99385 - DNA, 20 bp, synthetic construct
  source 1..20: mol_type = other DNA
tacctgtccagacactgttc

SEQ ID NO: 99386 - DNA, 20 bp, synthetic construct
  source 1..20: mol_type = other DNA
gtacctgtccagacactgtt

SEQ ID NO: 99387 - DNA, 20 bp, synthetic construct
  source 1..20: mol_type = other DNA
tgtacctgtccagacactgt

SEQ ID NO: 99388 - DNA, 20 bp, synthetic construct
  source 1..20: mol_type = other DNA
ctgtacctgtccagacactg

SEQ ID NO: 99389 - DNA, 20 bp, synthetic construct
  source 1..20: mol_type = other DNA
actgtacctgtccagacact

SEQ ID NO: 99390 - DNA, 20 bp, synthetic construct
  source 1..20: mol_type = other DNA
cactgtacctgtccagacac

SEQ ID NO: 99391 - DNA, 20 bp, synthetic construct
  source 1..20: mol_type = other DNA
ccactgtacctgtccagaca

SEQ ID NO: 99392 - DNA, 20 bp, synthetic construct
  source 1..20: mol_type = other DNA
gccactgtacctgtccagac

SEQ ID NO: 99393 - DNA, 20 bp, synthetic construct
  source 1..20: mol_type = other DNA
agccactgtacctgtccaga

SEQ ID NO: 99394 - DNA, 20 bp, synthetic construct
  source 1..20: mol_type = other DNA
gagccactgtacctgtccag

SEQ ID NO: 99395 - DNA, 20 bp, synthetic construct
  source 1..20: mol_type = other DNA
tgagccactgtacctgtcca

SEQ ID NO: 99396 - DNA, 20 bp, synthetic construct
  source 1..20: mol_type = other DNA
atgagccactgtacctgtcc

SEQ ID NO: 99397 - DNA, 20 bp, synthetic construct
  source 1..20: mol_type = other DNA
catgagccactgtacctgtc

SEQ ID NO: 99398 - DNA, 20 bp, synthetic construct
  source 1..20: mol_type = other DNA
gcatgagccactgtacctgt

SEQ ID NO: 99399 - DNA, 20 bp, synthetic construct
  source 1..20: mol_type = other DNA
ggcatgagccactgtacctg

SEQ ID NO: 99400 - DNA, 20 bp, synthetic construct
  source 1..20: mol_type = other DNA
aggcatgagccactgtacct

SEQ ID NO: 99401 - DNA, 20 bp, synthetic construct
  source 1..20: mol_type = other DNA
caggcatgagccactgtacc

SEQ ID NO: 99402 - DNA, 20 bp, synthetic construct
  source 1..20: mol_type = other DNA
tcaggcatgagccactgtac

SEQ ID NO: 99403 - DNA, 20 bp, synthetic construct
  source 1..20: mol_type = other DNA
ttcaggcatgagccactgta

SEQ ID NO: 99404 - DNA, 20 bp, synthetic construct
  source 1..20: mol_type = other DNA
attcaggcatgagccactgt

SEQ ID NO: 99405 - DNA, 20 bp, synthetic construct
  source 1..20: mol_type = other DNA
gattcaggcatgagccactg

SEQ ID NO: 99406 - DNA, 20 bp, synthetic construct
  source 1..20: mol_type = other DNA
agattcaggcatgagccact

SEQ ID NO: 99407 - DNA, 20 bp, synthetic construct
  source 1..20: mol_type = other DNA
aagattcaggcatgagccac

SEQ ID NO: 99408 - DNA, 20 bp, synthetic construct
  source 1..20: mol_type = other DNA
taagattcaggcatgagcca

SEQ ID NO: 99409 - DNA, 20 bp, synthetic construct
  source 1..20: mol_type = other DNA
ctaagattcaggcatgagcc

SEQ ID NO: 99410 - DNA, 20 bp, synthetic construct
  source 1..20: mol_type = other DNA
gctaagattcaggcatgagc

SEQ ID NO: 99411 - DNA, 20 bp, synthetic construct
  source 1..20: mol_type = other DNA
tgctaagattcaggcatgag

SEQ ID NO: 99412 - DNA, 20 bp, synthetic construct
  source 1..20: mol_type = other DNA
gtgctaagattcaggcatga

SEQ ID NO: 99413 - DNA, 20 bp, synthetic construct
  source 1..20: mol_type = other DNA
agtgctaagattcaggcatg

SEQ ID NO: 99414 - DNA, 20 bp, synthetic construct
  source 1..20: mol_type = other DNA
aagtgctaagattcaggcat

SEQ ID NO: 99415 - DNA, 20 bp, synthetic construct
  source 1..20: mol_type = other DNA
aaagtgctaagattcaggca

SEQ ID NO: 99416 - DNA, 20 bp, synthetic construct
  source 1..20: mol_type = other DNA
caaagtgctaagattcaggc

SEQ ID NO: 99417 - DNA, 20 bp, synthetic construct
  source 1..20: mol_type = other DNA
ccaaagtgctaagattcagg

SEQ ID NO: 99418 - DNA, 20 bp, synthetic construct
  source 1..20: mol_type = other DNA
cccaaagtgctaagattcag

SEQ ID NO: 99419 - DNA, 20 bp, synthetic construct
  source 1..20: mol_type = other DNA
tcccaaagtgctaagattca

SEQ ID NO: 99420 - DNA, 20 bp, synthetic construct
  source 1..20: mol_type = other DNA
ctcccaaagtgctaagattc

SEQ ID NO: 99421 - DNA, 20 bp, synthetic construct
  source 1..20: mol_type = other DNA
cctcccaaagtgctaagatt

SEQ ID NO: 99422 - DNA, 20 bp, synthetic construct
  source 1..20: mol_type = other DNA
gcctcccaaagtgctaagat

SEQ ID NO: 99423 - DNA, 20 bp, synthetic construct
  source 1..20: mol_type = other DNA
agcctcccaaagtgctaaga

SEQ ID NO: 99424 - DNA, 20 bp, synthetic construct
  source 1..20: mol_type = other DNA
cagcctcccaaagtgctaag

SEQ ID NO: 99425 - DNA, 20 bp, synthetic construct
  source 1..20: mol_type = other DNA
tcagcctcccaaagtgctaa

SEQ ID NO: 99426 - DNA, 20 bp, synthetic construct
  source 1..20: mol_type = other DNA
ctcagcctcccaaagtgcta

SEQ ID NO: 99427 - DNA, 20 bp, synthetic construct
  source 1..20: mol_type = other DNA
tctcagcctcccaaagtgct

SEQ ID NO: 99428 - DNA, 20 bp, synthetic construct
  source 1..20: mol_type = other DNA
gtctcagcctcccaaagtgc

SEQ ID NO: 99429 - DNA, 20 bp, synthetic construct
  source 1..20: mol_type = other DNA
tgtctcagcctcccaaagtg

SEQ ID NO: 99430 - DNA, 20 bp, synthetic construct
  source 1..20: mol_type = other DNA
ctgtctcagcctcccaaagt

SEQ ID NO: 99431 - DNA, 20 bp, synthetic construct
  source 1..20: mol_type = other DNA
cctgtctcagcctcccaaag

SEQ ID NO: 99432 - DNA, 20 bp, synthetic construct
  source 1..20: mol_type = other DNA
acctgtctcagcctcccaaa

SEQ ID NO: 99433 - DNA, 20 bp, synthetic construct
  source 1..20: mol_type = other DNA
cacctgtctcagcctcccaa

SEQ ID NO: 99434 - DNA, 20 bp, synthetic construct
  source 1..20: mol_type = other DNA
ccacctgtctcagcctccca

SEQ ID NO: 99435 - DNA, 20 bp, synthetic construct
  source 1..20: mol_type = other DNA
tccacctgtctcagcctccc

SEQ ID NO: 99436 - DNA, 20 bp, synthetic construct
  source 1..20: mol_type = other DNA
atccacctgtctcagcctcc

SEQ ID NO: 99437 - DNA, 20 bp, synthetic construct
  source 1..20: mol_type = other DNA
tatccacctgtctcagcctc

SEQ ID NO: 99438 - DNA, 20 bp, synthetic construct
  source 1..20: mol_type = other DNA
ctatccacctgtctcagcct

SEQ ID NO: 99439 - DNA, 20 bp, synthetic construct
  source 1..20: mol_type = other DNA
gctatccacctgtctcagcc

SEQ ID NO: 99440 - DNA, 20 bp, synthetic construct
  source 1..20: mol_type = other DNA
agctatccacctgtctcagc

SEQ ID NO: 99441 - DNA, 20 bp, synthetic construct
  source 1..20: mol_type = other DNA
aagctatccacctgtctcag

SEQ ID NO: 99442 - DNA, 20 bp, synthetic construct
  source 1..20: mol_type = other DNA
caagctatccacctgtctca

SEQ ID NO: 99443 - DNA, 20 bp, synthetic construct
  source 1..20: mol_type = other DNA
tcaagctatccacctgtctc

SEQ ID NO: 99444 - DNA, 20 bp, synthetic construct
  source 1..20: mol_type = other DNA
ctcaagctatccacctgtct

SEQ ID NO: 99445 - DNA, 20 bp, synthetic construct
  source 1..20: mol_type = other DNA
gctcaagctatccacctgtc

SEQ ID NO: 99446 - DNA, 20 bp, synthetic construct
  source 1..20: mol_type = other DNA
agctcaagctatccacctgt

SEQ ID NO: 99447 - DNA, 20 bp, synthetic construct
  source 1..20: mol_type = other DNA
gagctcaagctatccacctg

SEQ ID NO: 99448 - DNA, 20 bp, synthetic construct
  source 1..20: mol_type = other DNA
tgagctcaagctatccacct

SEQ ID NO: 99449 - DNA, 20 bp, synthetic construct
  source 1..20: mol_type = other DNA
ctgagctcaagctatccacc

SEQ ID NO: 99450 - DNA, 20 bp, synthetic construct
  source 1..20: mol_type = other DNA
cctgagctcaagctatccac

SEQ ID NO: 99451 - DNA, 20 bp, synthetic construct
  source 1..20: mol_type = other DNA
gcctgagctcaagctatcca

SEQ ID NO: 99452 - DNA, 20 bp, synthetic construct
  source 1..20: mol_type = other DNA
tgcctgagctcaagctatcc

SEQ ID NO: 99453 - DNA, 20 bp, synthetic construct
  source 1..20: mol_type = other DNA
atgcctgagctcaagctatc

SEQ ID NO: 99454 - DNA, 20 bp, synthetic construct
  source 1..20: mol_type = other DNA
aatgcctgagctcaagctat

SEQ ID NO: 99455 - DNA, 20 bp, synthetic construct
  source 1..20: mol_type = other DNA
taatgcctgagctcaagcta

SEQ ID NO: 99456 - DNA, 20 bp, synthetic construct
  source 1..20: mol_type = other DNA
ttaatgcctgagctcaagct

SEQ ID NO: 99457 - DNA, 20 bp, synthetic construct
  source 1..20: mol_type = other DNA
tttaatgcctgagctcaagc

SEQ ID NO: 99458 - DNA, 20 bp, synthetic construct
  source 1..20: mol_type = other DNA
ctttaatgcctgagctcaag

SEQ ID NO: 99459 - DNA, 20 bp, synthetic construct
  source 1..20: mol_type = other DNA
tctttaatgcctgagctcaa

SEQ ID NO: 99460 - DNA, 20 bp, synthetic construct
  source 1..20: mol_type = other DNA
gtctttaatgcctgagctca

SEQ ID NO: 99461 - DNA, 20 bp, synthetic construct
  source 1..20: mol_type = other DNA
ggtctttaatgcctgagctc

SEQ ID NO: 99462 - DNA, 20 bp, synthetic construct
  source 1..20: mol_type = other DNA
tggtctttaatgcctgagct

SEQ ID NO: 99463 - DNA, 20 bp, synthetic construct
  source 1..20: mol_type = other DNA
ttggtctttaatgcctgagc

SEQ ID NO: 99464 - DNA, 20 bp, synthetic construct
  source 1..20: mol_type = other DNA
gttggtctttaatgcctgag

SEQ ID NO: 99465 - DNA, 20 bp, synthetic construct
  source 1..20: mol_type = other DNA
ggttggtctttaatgcctga

SEQ ID NO: 99466 - DNA, 20 bp, synthetic construct
  source 1..20: mol_type = other DNA
aggttggtctttaatgcctg

SEQ ID NO: 99467 - DNA, 20 bp, synthetic construct
  source 1..20: mol_type = other DNA
caggttggtctttaatgcct

SEQ ID NO: 99468 - DNA, 20 bp, synthetic construct
  source 1..20: mol_type = other DNA
ccaggttggtctttaatgcc

SEQ ID NO: 99469 - DNA, 20 bp, synthetic construct
  source 1..20: mol_type = other DNA
cccaggttggtctttaatgc

SEQ ID NO: 99470 - DNA, 20 bp, synthetic construct
  source 1..20: mol_type = other DNA
acccaggttggtctttaatg

SEQ ID NO: 99471 - DNA, 20 bp, synthetic construct
  source 1..20: mol_type = other DNA
tacccaggttggtctttaat

SEQ ID NO: 99472 - DNA, 20 bp, synthetic construct
  source 1..20: mol_type = other DNA
ttacccaggttggtctttaa

SEQ ID NO: 99473 - DNA, 20 bp, synthetic construct
  source 1..20: mol_type = other DNA
gttacccaggttggtcttta

SEQ ID NO: 99474 - DNA, 20 bp, synthetic construct
  source 1..20: mol_type = other DNA
tgttacccaggttggtcttt

SEQ ID NO: 99475 - DNA, 20 bp, synthetic construct
  source 1..20: mol_type = other DNA
atgttacccaggttggtctt

SEQ ID NO: 99476 - DNA, 20 bp, synthetic construct
  source 1..20: mol_type = other DNA
catgttacccaggttggtct

SEQ ID NO: 99477 - DNA, 20 bp, synthetic construct
  source 1..20: mol_type = other DNA
ccatgttacccaggttggtc

SEQ ID NO: 99478 - DNA, 20 bp, synthetic construct
  source 1..20: mol_type = other DNA
accatgttacccaggttggt

SEQ ID NO: 99479 - DNA, 20 bp, synthetic construct
  source 1..20: mol_type = other DNA
taccatgttacccaggttgg

SEQ ID NO: 99480 - DNA, 20 bp, synthetic construct
  source 1..20: mol_type = other DNA
ttaccatgttacccaggttg

SEQ ID NO: 99481 - DNA, 20 bp, synthetic construct
  source 1..20: mol_type = other DNA
tttaccatgttacccaggtt

SEQ ID NO: 99482 - DNA, 20 bp, synthetic construct
  source 1..20: mol_type = other DNA
ttttaccatgttacccaggt

SEQ ID NO: 99483 - DNA, 20 bp, synthetic construct
  source 1..20: mol_type = other DNA
gttttaccatgttacccagg

SEQ ID NO: 99484 - DNA, 20 bp, synthetic construct
  source 1..20: mol_type = other DNA
ggttttaccatgttacccag

SEQ ID NO: 99485 - DNA, 20 bp, synthetic construct
  source 1..20: mol_type = other DNA
gggttttaccatgttaccca

SEQ ID NO: 99486 - DNA, 20 bp, synthetic construct
  source 1..20: mol_type = other DNA
agggttttaccatgttaccc

SEQ ID NO: 99487 - DNA, 20 bp, synthetic construct
  source 1..20: mol_type = other DNA
cagggttttaccatgttacc

SEQ ID NO: 99488 - DNA, 20 bp, synthetic construct
  source 1..20: mol_type = other DNA
acagggttttaccatgttac

SEQ ID NO: 99489 - DNA, 20 bp, synthetic construct
  source 1..20: mol_type = other DNA
aacagggttttaccatgtta

SEQ ID NO: 99490 - DNA, 20 bp, synthetic construct
  source 1..20: mol_type = other DNA
aaacagggttttaccatgtt

SEQ ID NO: 99491 - DNA, 20 bp, synthetic construct
  source 1..20: mol_type = other DNA
gaaacagggttttaccatgt

SEQ ID NO: 99492 - DNA, 20 bp, synthetic construct
  source 1..20: mol_type = other DNA
agaaacagggttttaccatg

SEQ ID NO: 99493 - DNA, 20 bp, synthetic construct
  source 1..20: mol_type = other DNA
tagaaacagggttttaccat

SEQ ID NO: 99494 - DNA, 20 bp, synthetic construct
  source 1..20: mol_type = other DNA
gtagaaacagggttttacca

SEQ ID NO: 99495 - DNA, 20 bp, synthetic construct
  source 1..20: mol_type = other DNA
tgtagaaacagggttttacc

SEQ ID NO: 99496 - DNA, 20 bp, synthetic construct
  source 1..20: mol_type = other DNA
ttgtagaaacagggttttac

SEQ ID NO: 99497 - DNA, 20 bp, synthetic construct
  source 1..20: mol_type = other DNA
tttgtagaaacagggtttta

SEQ ID NO: 99498 - DNA, 20 bp, synthetic construct
  source 1..20: mol_type = other DNA
ttttgtagaaacagggtttt

SEQ ID NO: 99499 - DNA, 20 bp, synthetic construct
  source 1..20: mol_type = other DNA
tttttgtagaaacagggttt

SEQ ID NO: 99500 - DNA, 20 bp, synthetic construct
  source 1..20: mol_type = other DNA
ttttttgtagaaacagggtt

SEQ ID NO: 99501 - DNA, 20 bp, synthetic construct
  source 1..20: mol_type = other DNA
tttttttgtagaaacagggt

SEQ ID NO: 99502 - DNA, 20 bp, synthetic construct
  source 1..20: mol_type = other DNA
atttttttgtagaaacaggg

SEQ ID NO: 99503 - DNA, 20 bp, synthetic construct
  source 1..20: mol_type = other DNA
tatttttttgtagaaacagg

SEQ ID NO: 99504 - DNA, 20 bp, synthetic construct
  source 1..20: mol_type = other DNA
gtatttttttgtagaaacag

SEQ ID NO: 99505 - DNA, 20 bp, synthetic construct
  source 1..20: mol_type = other DNA
tgtatttttttgtagaaaca

SEQ ID NO: 99506 - DNA, 20 bp, synthetic construct
  source 1..20: mol_type = other DNA
gtgtatttttttgtagaaac

SEQ ID NO: 99507 - DNA, 20 bp, synthetic construct
  source 1..20: mol_type = other DNA
tgtgtatttttttgtagaaa

SEQ ID NO: 99508 - DNA, 20 bp, synthetic construct
  source 1..20: mol_type = other DNA
gtgtgtatttttttgtagaa

SEQ ID NO: 99509 - DNA, 20 bp, synthetic construct
  source 1..20: mol_type = other DNA
tgtgtgtatttttttgtaga

SEQ ID NO: 99510 - DNA, 20 bp, synthetic construct
  source 1..20: mol_type = other DNA
atgtgtgtatttttttgtag

SEQ ID NO: 99511 - DNA, 20 bp, synthetic construct
  source 1..20: mol_type = other DNA
aatgtgtgtatttttttgta

SEQ ID NO: 99512 - DNA, 20 bp, synthetic construct
  source 1..20: mol_type = other DNA
taatgtgtgtatttttttgt

SEQ ID NO: 99513 - DNA, 20 bp, synthetic construct
  source 1..20: mol_type = other DNA
ctaatgtgtgtatttttttg

SEQ ID NO: 99514 - DNA, 20 bp, synthetic construct
  source 1..20: mol_type = other DNA
gctaatgtgtgtattttttt

SEQ ID NO: 99515 - DNA, 20 bp, synthetic construct
  source 1..20: mol_type = other DNA
ggctaatgtgtgtatttttt

SEQ ID NO: 99516 - DNA, 20 bp, synthetic construct
  source 1..20: mol_type = other DNA
tggctaatgtgtgtattttt

SEQ ID NO: 99517 - DNA, 20 bp, synthetic construct
  source 1..20: mol_type = other DNA
ctggctaatgtgtgtatttt

SEQ ID NO: 99518 - DNA, 20 bp, synthetic construct
  source 1..20: mol_type = other DNA
cctggctaatgtgtgtattt

SEQ ID NO: 99519 - DNA, 20 bp, synthetic construct
  source 1..20: mol_type = other DNA
acctggctaatgtgtgtatt

SEQ ID NO: 99520 - DNA, 20 bp, synthetic construct
  source 1..20: mol_type = other DNA
cacctggctaatgtgtgtat

SEQ ID NO: 99521 - DNA, 20 bp, synthetic construct
  source 1..20: mol_type = other DNA
acacctggctaatgtgtgta

SEQ ID NO: 99522 - DNA, 20 bp, synthetic construct
  source 1..20: mol_type = other DNA
cacacctggctaatgtgtgt

SEQ ID NO: 99523 - DNA, 20 bp, synthetic construct
  source 1..20: mol_type = other DNA
ccacacctggctaatgtgtg

SEQ ID NO: 99524 - DNA, 20 bp, synthetic construct
  source 1..20: mol_type = other DNA
accacacctggctaatgtgt

SEQ ID NO: 99525 - DNA, 20 bp, synthetic construct
  source 1..20: mol_type = other DNA
caccacacctggctaatgtg

SEQ ID NO: 99526 - DNA, 20 bp, synthetic construct
  source 1..20: mol_type = other DNA
ccaccacacctggctaatgt

SEQ ID NO: 99527 - DNA, 20 bp, synthetic construct
  source 1..20: mol_type = other DNA
gccaccacacctggctaatg

SEQ ID NO: 99528 - DNA, 20 bp, synthetic construct
  source 1..20: mol_type = other DNA
tgccaccacacctggctaat

SEQ ID NO: 99529 - DNA, 20 bp, synthetic construct
  source 1..20: mol_type = other DNA
gtgccaccacacctggctaa

SEQ ID NO: 99530 - DNA, 20 bp, synthetic construct
  source 1..20: mol_type = other DNA
tgtgccaccacacctggcta

SEQ ID NO: 99531 - DNA, 20 bp, synthetic construct
  source 1..20: mol_type = other DNA
atgtgccaccacacctggct

SEQ ID NO: 99532 - DNA, 20 bp, synthetic construct
  source 1..20: mol_type = other DNA
catgtgccaccacacctggc

SEQ ID NO: 99533 - DNA, 20 bp, synthetic construct
  source 1..20: mol_type = other DNA
gcatgtgccaccacacctgg

SEQ ID NO: 99534 - DNA, 20 bp, synthetic construct
  source 1..20: mol_type = other DNA
agcatgtgccaccacacctg

SEQ ID NO: 99535 - DNA, 20 bp, synthetic construct
  source 1..20: mol_type = other DNA
tagcatgtgccaccacacct

SEQ ID NO: 99536 - DNA, 20 bp, synthetic construct
  source 1..20: mol_type = other DNA
ttagcatgtgccaccacacc

SEQ ID NO: 99537 - DNA, 20 bp, synthetic construct
  source 1..20: mol_type = other DNA
attagcatgtgccaccacac

SEQ ID NO: 99538 - DNA, 20 bp, synthetic construct
  source 1..20: mol_type = other DNA
tattagcatgtgccaccaca

SEQ ID NO: 99539 - DNA, 20 bp, synthetic construct
  source 1..20: mol_type = other DNA
ctattagcatgtgccaccac

SEQ ID NO: 99540 - DNA, 20 bp, synthetic construct
  source 1..20: mol_type = other DNA
actattagcatgtgccacca

SEQ ID NO: 99541 - DNA, 20 bp, synthetic construct
  source 1..20: mol_type = other DNA
tactattagcatgtgccacc

SEQ ID NO: 99542 - DNA, 20 bp, synthetic construct
  source 1..20: mol_type = other DNA
gtactattagcatgtgccac

SEQ ID NO: 99543 - DNA, 20 bp, synthetic construct
  source 1..20: mol_type = other DNA
ggtactattagcatgtgcca

SEQ ID NO: 99544 - DNA, 20 bp, synthetic construct
  source 1..20: mol_type = other DNA
tggtactattagcatgtgcc

SEQ ID NO: 99545 - DNA, 20 bp, synthetic construct
  source 1..20: mol_type = other DNA
ctggtactattagcatgtgc

SEQ ID NO: 99546 - DNA, 20 bp, synthetic construct
  source 1..20: mol_type = other DNA
gctggtactattagcatgtg

SEQ ID NO: 99547 - DNA, 20 bp, synthetic construct
  source 1..20: mol_type = other DNA
agctggtactattagcatgt

SEQ ID NO: 99548 - DNA, 20 bp, synthetic construct
  source 1..20: mol_type = other DNA
tagctggtactattagcatg

SEQ ID NO: 99549 - DNA, 20 bp, synthetic construct
  source 1..20: mol_type = other DNA
gtagctggtactattagcat

SEQ ID NO: 99550 - DNA, 20 bp, synthetic construct
  source 1..20: mol_type = other DNA
agtagctggtactattagca

SEQ ID NO: 99551 - DNA, 20 bp, synthetic construct
  source 1..20: mol_type = other DNA
gagtagctggtactattagc

SEQ ID NO: 99552 - DNA, 20 bp, synthetic construct
  source 1..20: mol_type = other DNA
tgagtagctggtactattag

SEQ ID NO: 99553 - DNA, 20 bp, synthetic construct
  source 1..20: mol_type = other DNA
ctgagtagctggtactatta

SEQ ID NO: 99554 - DNA, 20 bp, synthetic construct
  source 1..20: mol_type = other DNA
cctgagtagctggtactatt

SEQ ID NO: 99555 - DNA, 20 bp, synthetic construct
  source 1..20: mol_type = other DNA
tcctgagtagctggtactat

SEQ ID NO: 99556 - DNA, 20 bp, synthetic construct
  source 1..20: mol_type = other DNA
ctcctgagtagctggtacta

SEQ ID NO: 99557 - DNA, 20 bp, synthetic construct
  source 1..20: mol_type = other DNA
cctcctgagtagctggtact

SEQ ID NO: 99558 - DNA, 20 bp, synthetic construct
  source 1..20: mol_type = other DNA
gcctcctgagtagctggtac

SEQ ID NO: 99559 - DNA, 20 bp, synthetic construct
  source 1..20: mol_type = other DNA
agcctcctgagtagctggta

SEQ ID NO: 99560 - DNA, 20 bp, synthetic construct
  source 1..20: mol_type = other DNA
cagcctcctgagtagctggt

SEQ ID NO: 99561 - DNA, 20 bp, synthetic construct
  source 1..20: mol_type = other DNA
tcagcctcctgagtagctgg

SEQ ID NO: 99562 - DNA, 20 bp, synthetic construct
  source 1..20: mol_type = other DNA
ctcagcctcctgagtagctg

SEQ ID NO: 99563 - DNA, 20 bp, synthetic construct
  source 1..20: mol_type = other DNA
cctcagcctcctgagtagct

SEQ ID NO: 99564 - DNA, 20 bp, synthetic construct
  source 1..20: mol_type = other DNA
acctcagcctcctgagtagc

SEQ ID NO: 99565 - DNA, 20 bp, synthetic construct
  source 1..20: mol_type = other DNA
cacctcagcctcctgagtag

SEQ ID NO: 99566 - DNA, 20 bp, synthetic construct
  source 1..20: mol_type = other DNA
ccacctcagcctcctgagta

SEQ ID NO: 99567 - DNA, 20 bp, synthetic construct
  source 1..20: mol_type = other DNA
cccacctcagcctcctgagt

SEQ ID NO: 99568 - DNA, 20 bp, synthetic construct
  source 1..20: mol_type = other DNA
tcccacctcagcctcctgag

SEQ ID NO: 99569 - DNA, 20 bp, synthetic construct
  source 1..20: mol_type = other DNA
ctcccacctcagcctcctga

SEQ ID NO: 99570 - DNA, 20 bp, synthetic construct
  source 1..20: mol_type = other DNA
tctcccacctcagcctcctg

SEQ ID NO: 99571 - DNA, 20 bp, synthetic construct
  source 1..20: mol_type = other DNA
ttctcccacctcagcctcct

SEQ ID NO: 99572 - DNA, 20 bp, synthetic construct
  source 1..20: mol_type = other DNA
attctcccacctcagcctcc

SEQ ID NO: 99573 - DNA, 20 bp, synthetic construct
  source 1..20: mol_type = other DNA
gattctcccacctcagcctc

SEQ ID NO: 99574 - DNA, 20 bp, synthetic construct
  source 1..20: mol_type = other DNA
tgattctcccacctcagcct

SEQ ID NO: 99575 - DNA, 20 bp, synthetic construct
  source 1..20: mol_type = other DNA
gtgattctcccacctcagcc

SEQ ID NO: 99576 - DNA, 20 bp, synthetic construct
  source 1..20: mol_type = other DNA
agtgattctcccacctcagc

SEQ ID NO: 99577 - DNA, 20 bp, synthetic construct
  source 1..20: mol_type = other DNA
aagtgattctcccacctcag

SEQ ID NO: 99578 - DNA, 20 bp, synthetic construct
  source 1..20: mol_type = other DNA
caagtgattctcccacctca

SEQ ID NO: 99579 - DNA, 20 bp, synthetic construct
  source 1..20: mol_type = other DNA
tcaagtgattctcccacctc

SEQ ID NO: 99580 - DNA, 20 bp, synthetic construct
  source 1..20: mol_type = other DNA
ctcaagtgattctcccacct

SEQ ID NO: 99581 - DNA, 20 bp, synthetic construct
  source 1..20: mol_type = other DNA
gctcaagtgattctcccacc

SEQ ID NO: 99582 - DNA, 20 bp, synthetic construct
  source 1..20: mol_type = other DNA
ggctcaagtgattctcccac

SEQ ID NO: 99583 - DNA, 20 bp, synthetic construct
  source 1..20: mol_type = other DNA
aggctcaagtgattctccca

SEQ ID NO: 99584 - DNA, 20 bp, synthetic construct
  source 1..20: mol_type = other DNA
caggctcaagtgattctccc

SEQ ID NO: 99585 - DNA, 20 bp, synthetic construct
  source 1..20: mol_type = other DNA
ccaggctcaagtgattctcc

SEQ ID NO: 99586 - DNA, 20 bp, synthetic construct
  source 1..20: mol_type = other DNA
cccaggctcaagtgattctc

SEQ ID NO: 99587 - DNA, 20 bp, synthetic construct
  source 1..20: mol_type = other DNA
tcccaggctcaagtgattct

SEQ ID NO: 99588 - DNA, 20 bp, synthetic construct
  source 1..20: mol_type = other DNA
ctcccaggctcaagtgattc

SEQ ID NO: 99589 - DNA, 20 bp, synthetic construct
  source 1..20: mol_type = other DNA
tctcccaggctcaagtgatt

SEQ ID NO: 99590 - DNA, 20 bp, synthetic construct
  source 1..20: mol_type = other DNA
atctcccaggctcaagtgat

SEQ ID NO: 99591 - DNA, 20 bp, synthetic construct
  source 1..20: mol_type = other DNA
catctcccaggctcaagtga

SEQ ID NO: 99592 - DNA, 20 bp, synthetic construct
  source 1..20: mol_type = other DNA
ccatctcccaggctcaagtg

SEQ ID NO: 99593 - DNA, 20 bp, synthetic construct
  source 1..20: mol_type = other DNA
tccatctcccaggctcaagt

SEQ ID NO: 99594 - DNA, 20 bp, synthetic construct
  source 1..20: mol_type = other DNA
ctccatctcccaggctcaag

SEQ ID NO: 99595 - DNA, 20 bp, synthetic construct
  source 1..20: mol_type = other DNA
cctccatctcccaggctcaa

SEQ ID NO: 99596 - DNA, 20 bp, synthetic construct
  source 1..20: mol_type = other DNA
acctccatctcccaggctca

SEQ ID NO: 99597 - DNA, 20 bp, synthetic construct
  source 1..20: mol_type = other DNA
aacctccatctcccaggctc

SEQ ID NO: 99598 - DNA, 20 bp, synthetic construct
  source 1..20: mol_type = other DNA
caacctccatctcccaggct

SEQ ID NO: 99599 - DNA, 20 bp, synthetic construct
  source 1..20: mol_type = other DNA
gcaacctccatctcccaggc

SEQ ID NO: 99600 - DNA, 20 bp, synthetic construct
  source 1..20: mol_type = other DNA
tgcaacctccatctcccagg

SEQ ID NO: 99601 - DNA, 20 bp, synthetic construct
  source 1..20: mol_type = other DNA
ctgcaacctccatctcccag

SEQ ID NO: 99602 - DNA, 20 bp, synthetic construct
  source 1..20: mol_type = other DNA
actgcaacctccatctccca

SEQ ID NO: 99603 - DNA, 20 bp, synthetic construct
  source 1..20: mol_type = other DNA
cactgcaacctccatctccc

SEQ ID NO: 99604 - DNA, 20 bp, synthetic construct
  source 1..20: mol_type = other DNA
tcactgcaacctccatctcc

SEQ ID NO: 99605 - DNA, 20 bp, synthetic construct
  source 1..20: mol_type = other DNA
ctcactgcaacctccatctc

SEQ ID NO: 99606 - DNA, 20 bp, synthetic construct
  source 1..20: mol_type = other DNA
cctcactgcaacctccatct

SEQ ID NO: 99607 - DNA, 20 bp, synthetic construct
  source 1..20: mol_type = other DNA
acctcactgcaacctccatc

SEQ ID NO: 99608 - DNA, 20 bp, synthetic construct
  source 1..20: mol_type = other DNA
cacctcactgcaacctccat

SEQ ID NO: 99609 - DNA, 20 bp, synthetic construct
  source 1..20: mol_type = other DNA
tcacctcactgcaacctcca

SEQ ID NO: 99610 - DNA, 20 bp, synthetic construct
  source 1..20: mol_type = other DNA
ctcacctcactgcaacctcc

SEQ ID NO: 99611 - DNA, 20 bp, synthetic construct
  source 1..20: mol_type = other DNA
gctcacctcactgcaacctc

SEQ ID NO: 99612 - DNA, 20 bp, synthetic construct
  source 1..20: mol_type = other DNA
agctcacctcactgcaacct

SEQ ID NO: 99613 - DNA, 20 bp, synthetic construct
  source 1..20: mol_type = other DNA
aagctcacctcactgcaacc

SEQ ID NO: 99614 - DNA, 20 bp, synthetic construct
  source 1..20: mol_type = other DNA
caagctcacctcactgcaac

SEQ ID NO: 99615 - DNA, 20 bp, synthetic construct
  source 1..20: mol_type = other DNA
gcaagctcacctcactgcaa

SEQ ID NO: 99616 - DNA, 20 bp, synthetic construct
  source 1..20: mol_type = other DNA
tgcaagctcacctcactgca

SEQ ID NO: 99617 - DNA, 20 bp, synthetic construct
  source 1..20: mol_type = other DNA
gtgcaagctcacctcactgc

SEQ ID NO: 99618 - DNA, 20 bp, synthetic construct
  source 1..20: mol_type = other DNA
ggtgcaagctcacctcactg

SEQ ID NO: 99619 - DNA, 20 bp, synthetic construct
  source 1..20: mol_type = other DNA
tggtgcaagctcacctcact

SEQ ID NO: 99620 - DNA, 20 bp, synthetic construct
  source 1..20: mol_type = other DNA
gtggtgcaagctcacctcac

SEQ ID NO: 99621 - DNA, 20 bp, synthetic construct
  source 1..20: mol_type = other DNA
agtggtgcaagctcacctca

SEQ ID NO: 99622 - DNA, 20 bp, synthetic construct
  source 1..20: mol_type = other DNA
cagtggtgcaagctcacctc

SEQ ID NO: 99623 - DNA, 20 bp, synthetic construct
  source 1..20: mol_type = other DNA
gcagtggtgcaagctcacct

SEQ ID NO: 99624 - DNA, 20 bp, synthetic construct
  source 1..20: mol_type = other DNA
cgcagtggtgcaagctcacc

SEQ ID NO: 99625 - DNA, 20 bp, synthetic construct
  source 1..20: mol_type = other DNA
gcgcagtggtgcaagctcac

SEQ ID NO: 99626 - DNA, 20 bp, synthetic construct
  source 1..20: mol_type = other DNA
agcgcagtggtgcaagctca

SEQ ID NO: 99627 - DNA, 20 bp, synthetic construct
  source 1..20: mol_type = other DNA
gagcgcagtggtgcaagctc

SEQ ID NO: 99628 - DNA, 20 bp, synthetic construct
  source 1..20: mol_type = other DNA
ggagcgcagtggtgcaagct

SEQ ID NO: 99629 - DNA, 20 bp, synthetic construct
  source 1..20: mol_type = other DNA
tggagcgcagtggtgcaagc

SEQ ID NO: 99630 - DNA, 20 bp, synthetic construct
  source 1..20: mol_type = other DNA
ctggagcgcagtggtgcaag

SEQ ID NO: 99631 - DNA, 20 bp, synthetic construct
  source 1..20: mol_type = other DNA
actggagcgcagtggtgcaa

SEQ ID NO: 99632 - DNA, 20 bp, synthetic construct
  source 1..20: mol_type = other DNA
gactggagcgcagtggtgca

SEQ ID NO: 99633 - DNA, 20 bp, synthetic construct
  source 1..20: mol_type = other DNA
agactggagcgcagtggtgc

SEQ ID NO: 99634 - DNA, 20 bp, synthetic construct
  source 1..20: mol_type = other DNA
cagactggagcgcagtggtg

SEQ ID NO: 99635 - DNA, 20 bp, synthetic construct
  source 1..20: mol_type = other DNA
ccagactggagcgcagtggt

SEQ ID NO: 99636 - DNA, 20 bp, synthetic construct
  source 1..20: mol_type = other DNA
cccagactggagcgcagtgg

SEQ ID NO: 99637 - DNA, 20 bp, synthetic construct
  source 1..20: mol_type = other DNA
gcccagactggagcgcagtg

SEQ ID NO: 99638 - DNA, 20 bp, synthetic construct
  source 1..20: mol_type = other DNA
tgcccagactggagcgcagt

SEQ ID NO: 99639 - DNA, 20 bp, synthetic construct
  source 1..20: mol_type = other DNA
ttgcccagactggagcgcag

SEQ ID NO: 99640 - DNA, 20 bp, synthetic construct
  source 1..20: mol_type = other DNA
gttgcccagactggagcgca

SEQ ID NO: 99641 - DNA, 20 bp, synthetic construct
  source 1..20: mol_type = other DNA
cgttgcccagactggagcgc

SEQ ID NO: 99642 - DNA, 20 bp, synthetic construct
  source 1..20: mol_type = other DNA
ccgttgcccagactggagcg

SEQ ID NO: 99643 - DNA, 20 bp, synthetic construct
  source 1..20: mol_type = other DNA
tccgttgcccagactggagc

SEQ ID NO: 99644 - DNA, 20 bp, synthetic construct
  source 1..20: mol_type = other DNA
ctccgttgcccagactggag

SEQ ID NO: 99645 - DNA, 20 bp, synthetic construct
  source 1..20: mol_type = other DNA
actccgttgcccagactgga

SEQ ID NO: 99646 - DNA, 20 bp, synthetic construct
  source 1..20: mol_type = other DNA
gactccgttgcccagactgg

SEQ ID NO: 99647 - DNA, 20 bp, synthetic construct
  source 1..20: mol_type = other DNA
tgactccgttgcccagactg

SEQ ID NO: 99648 - DNA, 20 bp, synthetic construct
  source 1..20: mol_type = other DNA
ctgactccgttgcccagact

SEQ ID NO: 99649 - DNA, 20 bp, synthetic construct
  source 1..20: mol_type = other DNA
tctgactccgttgcccagac

SEQ ID NO: 99650 - DNA, 20 bp, synthetic construct
  source 1..20: mol_type = other DNA
gtctgactccgttgcccaga

SEQ ID NO: 99651 - DNA, 20 bp, synthetic construct
  source 1..20: mol_type = other DNA
ggtctgactccgttgcccag

SEQ ID NO: 99652 - DNA, 20 bp, synthetic construct
  source 1..20: mol_type = other DNA
gggtctgactccgttgccca

SEQ ID NO: 99653 - DNA, 20 bp, synthetic construct
  source 1..20: mol_type = other DNA
agggtctgactccgttgccc

SEQ ID NO: 99654 - DNA, 20 bp, synthetic construct
  source 1..20: mol_type = other DNA
cagggtctgactccgttgcc

SEQ ID NO: 99655 - DNA, 20 bp, synthetic construct
  source 1..20: mol_type = other DNA
acagggtctgactccgttgc

SEQ ID NO: 99656 - DNA, 20 bp, synthetic construct
  source 1..20: mol_type = other DNA
aacagggtctgactccgttg

SEQ ID NO: 99657 - DNA, 20 bp, synthetic construct
  source 1..20: mol_type = other DNA
aaacagggtctgactccgtt

SEQ ID NO: 99658 - DNA, 20 bp, synthetic construct
  source 1..20: mol_type = other DNA
caaacagggtctgactccgt

SEQ ID NO: 99659 - DNA, 20 bp, synthetic construct
  source 1..20: mol_type = other DNA
ccaaacagggtctgactccg

SEQ ID NO: 99660 - DNA, 20 bp, synthetic construct
  source 1..20: mol_type = other DNA
tccaaacagggtctgactcc

SEQ ID NO: 99661 - DNA, 20 bp, synthetic construct
  source 1..20: mol_type = other DNA
ttccaaacagggtctgactc

SEQ ID NO: 99662 - DNA, 20 bp, synthetic construct
  source 1..20: mol_type = other DNA
tttccaaacagggtctgact

SEQ ID NO: 99663 - DNA, 20 bp, synthetic construct
  source 1..20: mol_type = other DNA
ttttccaaacagggtctgac

SEQ ID NO: 99664 - DNA, 20 bp, synthetic construct
  source 1..20: mol_type = other DNA
tttttccaaacagggtctga

SEQ ID NO: 99665 - DNA, 20 bp, synthetic construct
  source 1..20: mol_type = other DNA
ttttttccaaacagggtctg

SEQ ID NO: 99666 - DNA, 20 bp, synthetic construct
  source 1..20: mol_type = other DNA
tttttttccaaacagggtct

SEQ ID NO: 99667 - DNA, 20 bp, synthetic construct
  source 1..20: mol_type = other DNA
ttttttttccaaacagggtc

SEQ ID NO: 99668 - DNA, 20 bp, synthetic construct
  source 1..20: mol_type = other DNA
tttttttttccaaacagggt

SEQ ID NO: 99669 - DNA, 20 bp, synthetic construct
  source 1..20: mol_type = other DNA
ttttttttttccaaacaggg

SEQ ID NO: 99670 - DNA, 20 bp, synthetic construct
  source 1..20: mol_type = other DNA
tttttttttttccaaacagg

SEQ ID NO: 99671 - DNA, 20 bp, synthetic construct
  source 1..20: mol_type = other DNA
ttttttttttttccaaacag

SEQ ID NO: 99672 - DNA, 20 bp, synthetic construct
  source 1..20: mol_type = other DNA
tttttttttttttccaaaca

SEQ ID NO: 99673 - DNA, 20 bp, synthetic construct
  source 1..20: mol_type = other DNA
ttttttttttttttccaaac

SEQ ID NO: 99674 - DNA, 20 bp, synthetic construct
  source 1..20: mol_type = other DNA
cttttttttttttttccaaa

SEQ ID NO: 99675 - DNA, 20 bp, synthetic construct
  source 1..20: mol_type = other DNA
acttttttttttttttccaa

SEQ ID NO: 99676 - DNA, 20 bp, synthetic construct
  source 1..20: mol_type = other DNA
cacttttttttttttttcca

SEQ ID NO: 99677 - DNA, 20 bp, synthetic construct
  source 1..20: mol_type = other DNA
acacttttttttttttttcc

SEQ ID NO: 99678 - DNA, 20 bp, synthetic construct
  source 1..20: mol_type = other DNA
gacacttttttttttttttc

SEQ ID NO: 99679 - DNA, 20 bp, synthetic construct
  source 1..20: mol_type = other DNA
ggacactttttttttttttt

SEQ ID NO: 99680 - DNA, 20 bp, synthetic construct
  source 1..20: mol_type = other DNA
tggacacttttttttttttt

SEQ ID NO: 99681 - DNA, 20 bp, synthetic construct
  source 1..20: mol_type = other DNA
ttggacactttttttttttt

SEQ ID NO: 99682 - DNA, 20 bp, synthetic construct
  source 1..20: mol_type = other DNA
gttggacacttttttttttt

SEQ ID NO: 99683 - DNA, 20 bp, synthetic construct
  source 1..20: mol_type = other DNA
ggttggacactttttttttt

SEQ ID NO: 99684 - DNA, 20 bp, synthetic construct
  source 1..20: mol_type = other DNA
gggttggacacttttttttt

SEQ ID NO: 99685 - DNA, 20 bp, synthetic construct
  source 1..20: mol_type = other DNA
tgggttggacactttttttt

SEQ ID NO: 99686 - DNA, 20 bp, synthetic construct
  source 1..20: mol_type = other DNA
atgggttggacacttttttt

SEQ ID NO: 99687 - DNA, 20 bp, synthetic construct
  source 1..20: mol_type = other DNA
tatgggttggacactttttt

SEQ ID NO: 99688 - DNA, 20 bp, synthetic construct
  source 1..20: mol_type = other DNA
ctatgggttggacacttttt

SEQ ID NO: 99689 - DNA, 20 bp, synthetic construct
  source 1..20: mol_type = other DNA
actatgggttggacactttt

SEQ ID NO: 99690 - DNA, 20 bp, synthetic construct
  source 1..20: mol_type = other DNA
tactatgggttggacacttt

SEQ ID NO: 99691 - DNA, 20 bp, synthetic construct
  source 1..20: mol_type = other DNA
ttactatgggttggacactt

SEQ ID NO: 99692 - DNA, 20 bp, synthetic construct
  source 1..20: mol_type = other DNA
cttactatgggttggacact

SEQ ID NO: 99693 - DNA, 20 bp, synthetic construct
  source 1..20: mol_type = other DNA
tcttactatgggttggacac

SEQ ID NO: 99694 - DNA, 20 bp, synthetic construct
  source 1..20: mol_type = other DNA
ttcttactatgggttggaca

SEQ ID NO: 99695 - DNA, 20 bp, synthetic construct
  source 1..20: mol_type = other DNA
tttcttactatgggttggac

SEQ ID NO: 99696 - DNA, 20 bp, synthetic construct
  source 1..20: mol_type = other DNA
atttcttactatgggttgga

SEQ ID NO: 99697 - DNA, 20 bp, synthetic construct
  source 1..20: mol_type = other DNA
catttcttactatgggttgg

SEQ ID NO: 99698 - DNA, 20 bp, synthetic construct
  source 1..20: mol_type = other DNA
gcatttcttactatgggttg

SEQ ID NO: 99699 - DNA, 20 bp, synthetic construct
  source 1..20: mol_type = other DNA
tgcatttcttactatgggtt

SEQ ID NO: 99700 - DNA, 20 bp, synthetic construct
  source 1..20: mol_type = other DNA
ctgcatttcttactatgggt

SEQ ID NO: 99701 - DNA, 20 bp, synthetic construct
  source 1..20: mol_type = other DNA
tctgcatttcttactatggg

SEQ ID NO: 99702 - DNA, 20 bp, synthetic construct
  source 1..20: mol_type = other DNA
atctgcatttcttactatgg

SEQ ID NO: 99703 - DNA, 20 bp, synthetic construct
  source 1..20: mol_type = other DNA
catctgcatttcttactatg

SEQ ID NO: 99704 - DNA, 20 bp, synthetic construct
  source 1..20: mol_type = other DNA
acatctgcatttcttactat

SEQ ID NO: 99705 - DNA, 20 bp, synthetic construct
  source 1..20: mol_type = other DNA
cacatctgcatttcttacta

SEQ ID NO: 99706 - DNA, 20 bp, synthetic construct
  source 1..20: mol_type = other DNA
acacatctgcatttcttact

SEQ ID NO: 99707 - DNA, 20 bp, synthetic construct
  source 1..20: mol_type = other DNA
aacacatctgcatttcttac

SEQ ID NO: 99708 - DNA, 20 bp, synthetic construct
  source 1..20: mol_type = other DNA
aaacacatctgcatttctta

SEQ ID NO: 99709 - DNA, 20 bp, synthetic construct
  source 1..20: mol_type = other DNA
caaacacatctgcatttctt

SEQ ID NO: 99710 - DNA, 20 bp, synthetic construct
  source 1..20: mol_type = other DNA
tcaaacacatctgcatttct

SEQ ID NO: 99711 - DNA, 20 bp, synthetic construct
  source 1..20: mol_type = other DNA
gtcaaacacatctgcatttc

SEQ ID NO: 99712 - DNA, 20 bp, synthetic construct
  source 1..20: mol_type = other DNA
tgtcaaacacatctgcattt

SEQ ID NO: 99713 - DNA, 20 bp, synthetic construct
  source 1..20: mol_type = other DNA
atgtcaaacacatctgcatt

SEQ ID NO: 99714 - DNA, 20 bp, synthetic construct
  source 1..20: mol_type = other DNA
aatgtcaaacacatctgcat

SEQ ID NO: 99715 - DNA, 20 bp, synthetic construct
  source 1..20: mol_type = other DNA
caatgtcaaacacatctgca

SEQ ID NO: 99716 - DNA, 20 bp, synthetic construct
  source 1..20: mol_type = other DNA
acaatgtcaaacacatctgc

SEQ ID NO: 99717 - DNA, 20 bp, synthetic construct
  source 1..20: mol_type = other DNA
tacaatgtcaaacacatctg

SEQ ID NO: 99718 - DNA, 20 bp, synthetic construct
  source 1..20: mol_type = other DNA
ttacaatgtcaaacacatct

SEQ ID NO: 99719 - DNA, 20 bp, synthetic construct
  source 1..20: mol_type = other DNA
cttacaatgtcaaacacatc

SEQ ID NO: 99720 - DNA, 20 bp, synthetic construct
  source 1..20: mol_type = other DNA
tcttacaatgtcaaacacat

SEQ ID NO: 99721 - DNA, 20 bp, synthetic construct
  source 1..20: mol_type = other DNA
ttcttacaatgtcaaacaca

SEQ ID NO: 99722 - DNA, 20 bp, synthetic construct
  source 1..20: mol_type = other DNA
tttcttacaatgtcaaacac

SEQ ID NO: 99723 - DNA, 20 bp, synthetic construct
  source 1..20: mol_type = other DNA
ttttcttacaatgtcaaaca

SEQ ID NO: 99724 - DNA, 20 bp, synthetic construct
  source 1..20: mol_type = other DNA
tttttcttacaatgtcaaac

SEQ ID NO: 99725 - DNA, 20 bp, synthetic construct
  source 1..20: mol_type = other DNA
ctttttcttacaatgtcaaa

SEQ ID NO: 99726 - DNA, 20 bp, synthetic construct
  source 1..20: mol_type = other DNA
gctttttcttacaatgtcaa

SEQ ID NO: 99727 - DNA, 20 bp, synthetic construct
  source 1..20: mol_type = other DNA
tgctttttcttacaatgtca

SEQ ID NO: 99728 - DNA, 20 bp, synthetic construct
  source 1..20: mol_type = other DNA
ttgctttttcttacaatgtc

SEQ ID NO: 99729 - DNA, 20 bp, synthetic construct
  source 1..20: mol_type = other DNA
gttgctttttcttacaatgt

SEQ ID NO: 99730 - DNA, 20 bp, synthetic construct
  source 1..20: mol_type = other DNA
tgttgctttttcttacaatg

SEQ ID NO: 99731 - DNA, 20 bp, synthetic construct
  source 1..20: mol_type = other DNA
gtgttgctttttcttacaat

SEQ ID NO: 99732 - DNA, 20 bp, synthetic construct
  source 1..20: mol_type = other DNA
ggtgttgctttttcttacaa

SEQ ID NO: 99733 - DNA, 20 bp, synthetic construct
  source 1..20: mol_type = other DNA
tggtgttgctttttcttaca

SEQ ID NO: 99734 - DNA, 20 bp, synthetic construct
  source 1..20: mol_type = other DNA
ttggtgttgctttttcttac

SEQ ID NO: 99735 - DNA, 20 bp, synthetic construct
  source 1..20: mol_type = other DNA
tttggtgttgctttttctta

SEQ ID NO: 99736 - DNA, 20 bp, synthetic construct
  source 1..20: mol_type = other DNA
ttttggtgttgctttttctt

SEQ ID NO: 99737 - DNA, 20 bp, synthetic construct
  source 1..20: mol_type = other DNA
cttttggtgttgctttttct

SEQ ID NO: 99738 - DNA, 20 bp, synthetic construct
  source 1..20: mol_type = other DNA
acttttggtgttgctttttc

SEQ ID NO: 99739 - DNA, 20 bp, synthetic construct
  source 1..20: mol_type = other DNA
gacttttggtgttgcttttt

SEQ ID NO: 99740 - DNA, 20 bp, synthetic construct
  source 1..20: mol_type = other DNA
agacttttggtgttgctttt

SEQ ID NO: 99741 - DNA, 20 bp, synthetic construct
  source 1..20: mol_type = other DNA
cagacttttggtgttgcttt

SEQ ID NO: 99742 - DNA, 20 bp, synthetic construct
  source 1..20: mol_type = other DNA
tcagacttttggtgttgctt

SEQ ID NO: 99743 - DNA, 20 bp, synthetic construct
  source 1..20: mol_type = other DNA
atcagacttttggtgttgct

SEQ ID NO: 99744 - DNA, 20 bp, synthetic construct
  source 1..20: mol_type = other DNA
aatcagacttttggtgttgc

SEQ ID NO: 99745 - DNA, 20 bp, synthetic construct
  source 1..20: mol_type = other DNA
aaatcagacttttggtgttg

SEQ ID NO: 99746 - DNA, 20 bp, synthetic construct
  source 1..20: mol_type = other DNA
aaaatcagacttttggtgtt

SEQ ID NO: 99747 - DNA, 20 bp, synthetic construct
  source 1..20: mol_type = other DNA
aaaaatcagacttttggtgt

SEQ ID NO: 99748 - DNA, 20 bp, synthetic construct
  source 1..20: mol_type = other DNA
caaaaatcagacttttggtg

SEQ ID NO: 99749 - DNA, 20 bp, synthetic construct
  source 1..20: mol_type = other DNA
gcaaaaatcagacttttggt

SEQ ID NO: 99750 - DNA, 20 bp, synthetic construct
  source 1..20: mol_type = other DNA
ggcaaaaatcagacttttgg

SEQ ID NO: 99751 - DNA, 20 bp, synthetic construct
  source 1..20: mol_type = other DNA
aggcaaaaatcagacttttg

SEQ ID NO: 99752 - DNA, 20 bp, synthetic construct
  source 1..20: mol_type = other DNA
aaggcaaaaatcagactttt

SEQ ID NO: 99753 - DNA, 20 bp, synthetic construct
  source 1..20: mol_type = other DNA
gaaggcaaaaatcagacttt

SEQ ID NO: 99754 - DNA, 20 bp, synthetic construct
  source 1..20: mol_type = other DNA
tgaaggcaaaaatcagactt

SEQ ID NO: 99755 - DNA, 20 bp, synthetic construct
  source 1..20: mol_type = other DNA
gtgaaggcaaaaatcagact

SEQ ID NO: 99756 - DNA, 20 bp, synthetic construct
  source 1..20: mol_type = other DNA
agtgaaggcaaaaatcagac

SEQ ID NO: 99757 - DNA, 20 bp, synthetic construct
  source 1..20: mol_type = other DNA
gagtgaaggcaaaaatcaga

SEQ ID NO: 99758 - DNA, 20 bp, synthetic construct
  source 1..20: mol_type = other DNA
tgagtgaaggcaaaaatcag

SEQ ID NO: 99759 - DNA, 20 bp, synthetic construct
  source 1..20: mol_type = other DNA
ttgagtgaaggcaaaaatca

SEQ ID NO: 99760 - DNA, 20 bp, synthetic construct
  source 1..20: mol_type = other DNA
cttgagtgaaggcaaaaatc

SEQ ID NO: 99761 - DNA, 20 bp, synthetic construct
  source 1..20: mol_type = other DNA
tcttgagtgaaggcaaaaat

SEQ ID NO: 99762 - DNA, 20 bp, synthetic construct
  source 1..20: mol_type = other DNA
ttcttgagtgaaggcaaaaa

SEQ ID NO: 99763 - DNA, 20 bp, synthetic construct
  source 1..20: mol_type = other DNA
gttcttgagtgaaggcaaaa

SEQ ID NO: 99764 - DNA, 20 bp, synthetic construct
  source 1..20: mol_type = other DNA
agttcttgagtgaaggcaaa

SEQ ID NO: 99765 - DNA, 20 bp, synthetic construct
  source 1..20: mol_type = other DNA
gagttcttgagtgaaggcaa

SEQ ID NO: 99766 - DNA, 20 bp, synthetic construct
  source 1..20: mol_type = other DNA
agagttcttgagtgaaggca

SEQ ID NO: 99767 - DNA, 20 bp, synthetic construct
  source 1..20: mol_type = other DNA
aagagttcttgagtgaaggc

SEQ ID NO: 99768 - DNA, 20 bp, synthetic construct
  source 1..20: mol_type = other DNA
taagagttcttgagtgaagg

SEQ ID NO: 99769 - DNA, 20 bp, synthetic construct
  source 1..20: mol_type = other DNA
ataagagttcttgagtgaag

SEQ ID NO: 99770 - DNA, 20 bp, synthetic construct
  source 1..20: mol_type = other DNA
cataagagttcttgagtgaa

SEQ ID NO: 99771 - DNA, 20 bp, synthetic construct
  source 1..20: mol_type = other DNA
tcataagagttcttgagtga

SEQ ID NO: 99772 - DNA, 20 bp, synthetic construct
  source 1..20: mol_type = other DNA
atcataagagttcttgagtg

SEQ ID NO: 99773 - DNA, 20 bp, synthetic construct
  source 1..20: mol_type = other DNA
tatcataagagttcttgagt

SEQ ID NO: 99774 - DNA, 20 bp, synthetic construct
  source 1..20: mol_type = other DNA
ttatcataagagttcttgag

SEQ ID NO: 99775 - DNA, 20 bp, synthetic construct
  source 1..20: mol_type = other DNA
attatcataagagttcttga

SEQ ID NO: 99776 - DNA, 20 bp, synthetic construct
  source 1..20: mol_type = other DNA
aattatcataagagttcttg

SEQ ID NO: 99777 - DNA, 20 bp, synthetic construct
  source 1..20: mol_type = other DNA
taattatcataagagttctt

SEQ ID NO: 99778 - DNA, 20 bp, synthetic construct
  source 1..20: mol_type = other DNA
ttaattatcataagagttct

SEQ ID NO: 99779 - DNA, 20 bp, synthetic construct
  source 1..20: mol_type = other DNA
tttaattatcataagagttc

SEQ ID NO: 99780 - DNA, 20 bp, synthetic construct
  source 1..20: mol_type = other DNA
gtttaattatcataagagtt

SEQ ID NO: 99781 - DNA, 20 bp, synthetic construct
  source 1..20: mol_type = other DNA
agtttaattatcataagagt

SEQ ID NO: 99782 - DNA, 20 bp, synthetic construct
  source 1..20: mol_type = other DNA
gagtttaattatcataagag

SEQ ID NO: 99783 - DNA, 20 bp, synthetic construct
  source 1..20: mol_type = other DNA
ggagtttaattatcataaga

SEQ ID NO: 99784 - DNA, 20 bp, synthetic construct
  source 1..20: mol_type = other DNA
cggagtttaattatcataag

SEQ ID NO: 99785 - DNA, 20 bp, synthetic construct
  source 1..20: mol_type = other DNA
tcggagtttaattatcataa

SEQ ID NO: 99786 - DNA, 20 bp, synthetic construct
  source 1..20: mol_type = other DNA
ttcggagtttaattatcata

SEQ ID NO: 99787 - DNA, 20 bp, synthetic construct
  source 1..20: mol_type = other DNA
cttcggagtttaattatcat

SEQ ID NO: 99788 - DNA, 20 bp, synthetic construct
  source 1..20: mol_type = other DNA
acttcggagtttaattatca

SEQ ID NO: 99789 - DNA, 20 bp, synthetic construct
  source 1..20: mol_type = other DNA
gacttcggagtttaattatc

SEQ ID NO: 99790 - DNA, 20 bp, synthetic construct
  source 1..20: mol_type = other DNA
ggacttcggagtttaattat

SEQ ID NO: 99791 - DNA, 20 bp, synthetic construct
  source 1..20: mol_type = other DNA
aggacttcggagtttaatta

SEQ ID NO: 99792 - DNA, 20 bp, synthetic construct
  source 1..20: mol_type = other DNA
aaggacttcggagtttaatt

SEQ ID NO: 99793 - DNA, 20 bp, synthetic construct
  source 1..20: mol_type = other DNA
caaggacttcggagtttaat

SEQ ID NO: 99794 - DNA, 20 bp, synthetic construct
  source 1..20: mol_type = other DNA
ccaaggacttcggagtttaa

SEQ ID NO: 99795 - DNA, 20 bp, synthetic construct
  source 1..20: mol_type = other DNA
gccaaggacttcggagttta

SEQ ID NO: 99796 - DNA, 20 bp, synthetic construct
  source 1..20: mol_type = other DNA
tgccaaggacttcggagttt

SEQ ID NO: 99797 - DNA, 20 bp, synthetic construct
  source 1..20: mol_type = other DNA
ttgccaaggacttcggagtt

SEQ ID NO: 99798 - DNA, 20 bp, synthetic construct
  source 1..20: mol_type = other DNA
attgccaaggacttcggagt

SEQ ID NO: 99799 - DNA, 20 bp, synthetic construct
  source 1..20: mol_type = other DNA
tattgccaaggacttcggag

SEQ ID NO: 99800 - DNA, 20 bp, synthetic construct
  source 1..20: mol_type = other DNA
atattgccaaggacttcgga

SEQ ID NO: 99801 - DNA, 20 bp, synthetic construct
  source 1..20: mol_type = other DNA
tatattgccaaggacttcgg

SEQ ID NO: 99802 - DNA, 20 bp, synthetic construct
  source 1..20: mol_type = other DNA
atatattgccaaggacttcg

SEQ ID NO: 99803 - DNA, 20 bp, synthetic construct
  source 1..20: mol_type = other DNA
tatatattgccaaggacttc

SEQ ID NO: 99804 - DNA, 20 bp, synthetic construct
  source 1..20: mol_type = other DNA
atatatattgccaaggactt

SEQ ID NO: 99805 - DNA, 20 bp, synthetic construct
  source 1..20: mol_type = other DNA
tatatatattgccaaggact

SEQ ID NO: 99806 - DNA, 20 bp, synthetic construct
  source 1..20: mol_type = other DNA
ctatatatattgccaaggac

SEQ ID NO: 99807 - DNA, 20 bp, synthetic construct
  source 1..20: mol_type = other DNA
actatatatattgccaagga

SEQ ID NO: 99808 - DNA, 20 bp, synthetic construct
  source 1..20: mol_type = other DNA
aactatatatattgccaagg

SEQ ID NO: 99809 - DNA, 20 bp, synthetic construct
  source 1..20: mol_type = other DNA
caactatatatattgccaag

SEQ ID NO: 99810 - DNA, 20 bp, synthetic construct
  source 1..20: mol_type = other DNA
ccaactatatatattgccaa

SEQ ID NO: 99811 - DNA, 20 bp, synthetic construct
  source 1..20: mol_type = other DNA
accaactatatatattgcca

SEQ ID NO: 99812 - DNA, 20 bp, synthetic construct
  source 1..20: mol_type = other DNA
gaccaactatatatattgcc

SEQ ID NO: 99813 - DNA, 20 bp, synthetic construct
  source 1..20: mol_type = other DNA
agaccaactatatatattgc

SEQ ID NO: 99814 - DNA, 20 bp, synthetic construct
  source 1..20: mol_type = other DNA
cagaccaactatatatattg

SEQ ID NO: 99815 - DNA, 20 bp, synthetic construct
  source 1..20: mol_type = other DNA
acagaccaactatatatatt

SEQ ID NO: 99816 - DNA, 20 bp, synthetic construct
  source 1..20: mol_type = other DNA
aacagaccaactatatatat

SEQ ID NO: 99817 - DNA, 20 bp, synthetic construct
  source 1..20: mol_type = other DNA
taacagaccaactatatata

SEQ ID NO: 99818 - DNA, 20 bp, synthetic construct
  source 1..20: mol_type = other DNA
ataacagaccaactatatat

SEQ ID NO: 99819 - DNA, 20 bp, synthetic construct
  source 1..20: mol_type = other DNA
cataacagaccaactatata

SEQ ID NO: 99820 - DNA, 20 bp, synthetic construct
  source 1..20: mol_type = other DNA
acataacagaccaactatat

SEQ ID NO: 99821 - DNA, 20 bp, synthetic construct
  source 1..20: mol_type = other DNA
cacataacagaccaactata

SEQ ID NO: 99822 - DNA, 20 bp, synthetic construct
  source 1..20: mol_type = other DNA
ccacataacagaccaactat

SEQ ID NO: 99823 - DNA, 20 bp, synthetic construct
  source 1..20: mol_type = other DNA
tccacataacagaccaacta

SEQ ID NO: 99824 - DNA, 20 bp, synthetic construct
  source 1..20: mol_type = other DNA
atccacataacagaccaact

SEQ ID NO: 99825 - DNA, 20 bp, synthetic construct
  source 1..20: mol_type = other DNA
gatccacataacagaccaac

SEQ ID NO: 99826 - DNA, 20 bp, synthetic construct
  source 1..20: mol_type = other DNA
cgatccacataacagaccaa

SEQ ID NO: 99827 - DNA, 20 bp, synthetic construct
  source 1..20: mol_type = other DNA
gcgatccacataacagacca

SEQ ID NO: 99828 - DNA, 20 bp, synthetic construct
  source 1..20: mol_type = other DNA
ggcgatccacataacagacc

SEQ ID NO: 99829 - DNA, 20 bp, synthetic construct
  source 1..20: mol_type = other DNA
aggcgatccacataacagac

SEQ ID NO: 99830 - DNA, 20 bp, synthetic construct
  source 1..20: mol_type = other DNA
gaggcgatccacataacaga

SEQ ID NO: 99831 - DNA, 20 bp, synthetic construct
  source 1..20: mol_type = other DNA
agaggcgatccacataacag

SEQ ID NO: 99832 - DNA, 20 bp, synthetic construct
  source 1..20: mol_type = other DNA
tagaggcgatccacataaca

SEQ ID NO: 99833 - DNA, 20 bp, synthetic construct
  source 1..20: mol_type = other DNA
gtagaggcgatccacataac

SEQ ID NO: 99834 - DNA, 20 bp, synthetic construct
  source 1..20: mol_type = other DNA
agtagaggcgatccacataa

SEQ ID NO: 99835 - DNA, 20 bp, synthetic construct
  source 1..20: mol_type = other DNA
tagtagaggcgatccacata

SEQ ID NO: 99836 - DNA, 20 bp, synthetic construct
  source 1..20: mol_type = other DNA
ttagtagaggcgatccacat

SEQ ID NO: 99837 - DNA, 20 bp, synthetic construct
  source 1..20: mol_type = other DNA
tttagtagaggcgatccaca

SEQ ID NO: 99838 - DNA, 20 bp, synthetic construct
  source 1..20: mol_type = other DNA
ctttagtagaggcgatccac

SEQ ID NO: 99839 - DNA, 20 bp, synthetic construct
  source 1..20: mol_type = other DNA
tctttagtagaggcgatcca

SEQ ID NO: 99840 - DNA, 20 bp, synthetic construct
  source 1..20: mol_type = other DNA
atctttagtagaggcgatcc

SEQ ID NO: 99841 - DNA, 20 bp, synthetic construct
  source 1..20: mol_type = other DNA
aatctttagtagaggcgatc

SEQ ID NO: 99842 - DNA, 20 bp, synthetic construct
  source 1..20: mol_type = other DNA
aaatctttagtagaggcgat

SEQ ID NO: 99843 - DNA, 20 bp, synthetic construct
  source 1..20: mol_type = other DNA
aaaatctttagtagaggcga

SEQ ID NO: 99844 - DNA, 20 bp, synthetic construct
  source 1..20: mol_type = other DNA
aaaaatctttagtagaggcg

SEQ ID NO: 99845 - DNA, 20 bp, synthetic construct
  source 1..20: mol_type = other DNA
caaaaatctttagtagaggc

SEQ ID NO: 99846 - DNA, 20 bp, synthetic construct
  source 1..20: mol_type = other DNA
acaaaaatctttagtagagg

SEQ ID NO: 99847 - DNA, 20 bp, synthetic construct
  source 1..20: mol_type = other DNA
cacaaaaatctttagtagag

SEQ ID NO: 99848 - DNA, 20 bp, synthetic construct
  source 1..20: mol_type = other DNA
tcacaaaaatctttagtaga

SEQ ID NO: 99849 - DNA, 20 bp, synthetic construct
  source 1..20: mol_type = other DNA
ttcacaaaaatctttagtag

SEQ ID NO: 99850 - DNA, 20 bp, synthetic construct
  source 1..20: mol_type = other DNA
gttcacaaaaatctttagta

SEQ ID NO: 99851 - DNA, 20 bp, synthetic construct
  source 1..20: mol_type = other DNA
tgttcacaaaaatctttagt

SEQ ID NO: 99852 - DNA, 20 bp, synthetic construct
  source 1..20: mol_type = other DNA
ttgttcacaaaaatctttag

SEQ ID NO: 99853 - DNA, 20 bp, synthetic construct
  source 1..20: mol_type = other DNA
tttgttcacaaaaatcttta

SEQ ID NO: 99854 - DNA, 20 bp, synthetic construct
  source 1..20: mol_type = other DNA
atttgttcacaaaaatcttt

SEQ ID NO: 99855 - DNA, 20 bp, synthetic construct
  source 1..20: mol_type = other DNA
catttgttcacaaaaatctt

SEQ ID NO: 99856 - DNA, 20 bp, synthetic construct
  source 1..20: mol_type = other DNA
tcatttgttcacaaaaatct

SEQ ID NO: 99857 - DNA, 20 bp, synthetic construct
  source 1..20: mol_type = other DNA
ttcatttgttcacaaaaatc

SEQ ID NO: 99858 - DNA, 20 bp, synthetic construct
  source 1..20: mol_type = other DNA
tttcatttgttcacaaaaat

SEQ ID NO: 99859 - DNA, 20 bp, synthetic construct
  source 1..20: mol_type = other DNA
ctttcatttgttcacaaaaa

SEQ ID NO: 99860 - DNA, 20 bp, synthetic construct
  source 1..20: mol_type = other DNA
actttcatttgttcacaaaa

SEQ ID NO: 99861 - DNA, 20 bp, synthetic construct
  source 1..20: mol_type = other DNA
aactttcatttgttcacaaa

SEQ ID NO: 99862 - DNA, 20 bp, synthetic construct
  source 1..20: mol_type = other DNA
aaactttcatttgttcacaa

SEQ ID NO: 99863 - DNA, 20 bp, synthetic construct
  source 1..20: mol_type = other DNA
taaactttcatttgttcaca

SEQ ID NO: 99864 - DNA, 20 bp, synthetic construct
  source 1..20: mol_type = other DNA
ttaaactttcatttgttcac

SEQ ID NO: 99865 - DNA, 20 bp, synthetic construct
  source 1..20: mol_type = other DNA
cttaaactttcatttgttca

SEQ ID NO: 99866 - DNA, 20 bp, synthetic construct
  source 1..20: mol_type = other DNA
acttaaactttcatttgttc

SEQ ID NO: 99867 - DNA, 20 bp, synthetic construct
  source 1..20: mol_type = other DNA
tacttaaactttcatttgtt

SEQ ID NO: 99868 - DNA, 20 bp, synthetic construct
  source 1..20: mol_type = other DNA
ctacttaaactttcatttgt

SEQ ID NO: 99869 - DNA, 20 bp, synthetic construct
  source 1..20: mol_type = other DNA
actacttaaactttcatttg

SEQ ID NO: 99870 - DNA, 20 bp, synthetic construct
  source 1..20: mol_type = other DNA
tactacttaaactttcattt

SEQ ID NO: 99871 - DNA, 20 bp, synthetic construct
  source 1..20: mol_type = other DNA
ttactacttaaactttcatt

SEQ ID NO: 99872 - DNA, 20 bp, synthetic construct
  source 1..20: mol_type = other DNA
cttactacttaaactttcat

SEQ ID NO: 99873 - DNA, 20 bp, synthetic construct
  source 1..20: mol_type = other DNA
acttactacttaaactttca

SEQ ID NO: 99874 - DNA, 20 bp, synthetic construct
  source 1..20: mol_type = other DNA
aacttactacttaaactttc

SEQ ID NO: 99875 - DNA, 20 bp, synthetic construct
  source 1..20: mol_type = other DNA
gaacttactacttaaacttt

SEQ ID NO: 99876 - DNA, 20 bp, synthetic construct
  source 1..20: mol_type = other DNA
ggaacttactacttaaactt

SEQ ID NO: 99877 - DNA, 20 bp, synthetic construct
  source 1..20: mol_type = other DNA
aggaacttactacttaaact

SEQ ID NO: 99878 - DNA, 20 bp, synthetic construct
  source 1..20: mol_type = other DNA
taggaacttactacttaaac

SEQ ID NO: 99879 - DNA, 20 bp, synthetic construct
  source 1..20: mol_type = other DNA
gtaggaacttactacttaaa

SEQ ID NO: 99880 - DNA, 20 bp, synthetic construct
  source 1..20: mol_type = other DNA
tgtaggaacttactacttaa

SEQ ID NO: 99881 - DNA, 20 bp, synthetic construct
  source 1..20: mol_type = other DNA
atgtaggaacttactactta

SEQ ID NO: 99882 - DNA, 20 bp, synthetic construct
  source 1..20: mol_type = other DNA
gatgtaggaacttactactt

SEQ ID NO: 99883 - DNA, 20 bp, synthetic construct
  source 1..20: mol_type = other DNA
cgatgtaggaacttactact

SEQ ID NO: 99884 - DNA, 20 bp, synthetic construct
  source 1..20: mol_type = other DNA
acgatgtaggaacttactac

SEQ ID NO: 99885 - DNA, 20 bp, synthetic construct
  source 1..20: mol_type = other DNA
cacgatgtaggaacttacta

SEQ ID NO: 99886 - DNA, 20 bp, synthetic construct
  source 1..20: mol_type = other DNA
tcacgatgtaggaacttact

SEQ ID NO: 99887 - DNA, 20 bp, synthetic construct
  source 1..20: mol_type = other DNA
gtcacgatgtaggaacttac

SEQ ID NO: 99888 - DNA, 20 bp, synthetic construct
  source 1..20: mol_type = other DNA
agtcacgatgtaggaactta

SEQ ID NO: 99889 - DNA, 20 bp, synthetic construct
  source 1..20: mol_type = other DNA
aagtcacgatgtaggaactt

SEQ ID NO: 99890 - DNA, 20 bp, synthetic construct
  source 1..20: mol_type = other DNA
taagtcacgatgtaggaact

SEQ ID NO: 99891 - DNA, 20 bp, synthetic construct
  source 1..20: mol_type = other DNA
ttaagtcacgatgtaggaac

SEQ ID NO: 99892 - DNA, 20 bp, synthetic construct
  source 1..20: mol_type = other DNA
tttaagtcacgatgtaggaa

SEQ ID NO: 99893 - DNA, 20 bp, synthetic construct
  source 1..20: mol_type = other DNA
atttaagtcacgatgtagga

SEQ ID NO: 99894 - DNA, 20 bp, synthetic construct
  source 1..20: mol_type = other DNA
aatttaagtcacgatgtagg

SEQ ID NO: 99895 - DNA, 20 bp, synthetic construct
  source 1..20: mol_type = other DNA
caatttaagtcacgatgtag

SEQ ID NO: 99896 - DNA, 20 bp, synthetic construct
  source 1..20: mol_type = other DNA
gcaatttaagtcacgatgta

SEQ ID NO: 99897 - DNA, 20 bp, synthetic construct
  source 1..20: mol_type = other DNA
ggcaatttaagtcacgatgt

SEQ ID NO: 99898 - DNA, 20 bp, synthetic construct
  source 1..20: mol_type = other DNA
tggcaatttaagtcacgatg

SEQ ID NO: 99899 - DNA, 20 bp, synthetic construct
  source 1..20: mol_type = other DNA
ctggcaatttaagtcacgat

SEQ ID NO: 99900 - DNA, 20 bp, synthetic construct
  source 1..20: mol_type = other DNA
actggcaatttaagtcacga

SEQ ID NO: 99901 - DNA, 20 bp, synthetic construct
  source 1..20: mol_type = other DNA
cactggcaatttaagtcacg

SEQ ID NO: 99902 - DNA, 20 bp, synthetic construct
  source 1..20: mol_type = other DNA
acactggcaatttaagtcac

SEQ ID NO: 99903 - DNA, 20 bp, synthetic construct
  source 1..20: mol_type = other DNA
cacactggcaatttaagtca

SEQ ID NO: 99904 - DNA, 20 bp, synthetic construct
  source 1..20: mol_type = other DNA
gcacactggcaatttaagtc

SEQ ID NO: 99905 - DNA, 20 bp, synthetic construct
  source 1..20: mol_type = other DNA
ggcacactggcaatttaagt

SEQ ID NO: 99906 - DNA, 20 bp, synthetic construct
  source 1..20: mol_type = other DNA
gggcacactggcaatttaag

SEQ ID NO: 99907 - DNA, 20 bp, synthetic construct
  source 1..20: mol_type = other DNA
tgggcacactggcaatttaa

SEQ ID NO: 99908 - DNA, 20 bp, synthetic construct
  source 1..20: mol_type = other DNA
gtgggcacactggcaattta

SEQ ID NO: 99909 - DNA, 20 bp, synthetic construct
  source 1..20: mol_type = other DNA
tgtgggcacactggcaattt

SEQ ID NO: 99910 - DNA, 20 bp, synthetic construct
  source 1..20: mol_type = other DNA
atgtgggcacactggcaatt

SEQ ID NO: 99911 - DNA, 20 bp, synthetic construct
  source 1..20: mol_type = other DNA
tatgtgggcacactggcaat

SEQ ID NO: 99912 - DNA, 20 bp, synthetic construct
  source 1..20: mol_type = other DNA
ttatgtgggcacactggcaa

SEQ ID NO: 99913 - DNA, 20 bp, synthetic construct
  source 1..20: mol_type = other DNA
tttatgtgggcacactggca

SEQ ID NO: 99914 - DNA, 20 bp, synthetic construct
  source 1..20: mol_type = other DNA
atttatgtgggcacactggc

SEQ ID NO: 99915 - DNA, 20 bp, synthetic construct
  source 1..20: mol_type = other DNA
tatttatgtgggcacactgg

SEQ ID NO: 99916 - DNA, 20 bp, synthetic construct
  source 1..20: mol_type = other DNA
gtatttatgtgggcacactg

SEQ ID NO: 99917 - DNA, 20 bp, synthetic construct
  source 1..20: mol_type = other DNA
ggtatttatgtgggcacact

SEQ ID NO: 99918 - DNA, 20 bp, synthetic construct
  source 1..20: mol_type = other DNA
gggtatttatgtgggcacac

SEQ ID NO: 99919 - DNA, 20 bp, synthetic construct
  source 1..20: mol_type = other DNA
agggtatttatgtgggcaca

SEQ ID NO: 99920 - DNA, 20 bp, synthetic construct
  source 1..20: mol_type = other DNA
cagggtatttatgtgggcac

SEQ ID NO: 99921 - DNA, 20 bp, synthetic construct
  source 1..20: mol_type = other DNA
acagggtatttatgtgggca

SEQ ID NO: 99922 - DNA, 20 bp, synthetic construct
  source 1..20: mol_type = other DNA
gacagggtatttatgtgggc

SEQ ID NO: 99923 - DNA, 20 bp, synthetic construct
  source 1..20: mol_type = other DNA
tgacagggtatttatgtggg

SEQ ID NO: 99924 - DNA, 20 bp, synthetic construct
  source 1..20: mol_type = other DNA
ttgacagggtatttatgtgg

SEQ ID NO: 99925 - DNA, 20 bp, synthetic construct
  source 1..20: mol_type = other DNA
gttgacagggtatttatgtg

SEQ ID NO: 99926 - DNA, 20 bp, synthetic construct
  source 1..20: mol_type = other DNA
tgttgacagggtatttatgt

SEQ ID NO: 99927 - DNA, 20 bp, synthetic construct
  source 1..20: mol_type = other DNA
atgttgacagggtatttatg

SEQ ID NO: 99928 - DNA, 20 bp, synthetic construct
  source 1..20: mol_type = other DNA
aatgttgacagggtatttat

SEQ ID NO: 99929 - DNA, 20 bp, synthetic construct
  source 1..20: mol_type = other DNA
aaatgttgacagggtattta

SEQ ID NO: 99930 - DNA, 20 bp, synthetic construct
  source 1..20: mol_type = other DNA
caaatgttgacagggtattt

SEQ ID NO: 99931 - DNA, 20 bp, synthetic construct
  source 1..20: mol_type = other DNA
gcaaatgttgacagggtatt

SEQ ID NO: 99932 - DNA, 20 bp, synthetic construct
  source 1..20: mol_type = other DNA
ggcaaatgttgacagggtat

SEQ ID NO: 99933 - DNA, 20 bp, synthetic construct
  source 1..20: mol_type = other DNA
gggcaaatgttgacagggta

SEQ ID NO: 99934 - DNA, 20 bp, synthetic construct
  source 1..20: mol_type = other DNA
agggcaaatgttgacagggt

SEQ ID NO: 99935 - DNA, 20 bp, synthetic construct
  source 1..20: mol_type = other DNA
aagggcaaatgttgacaggg

SEQ ID NO: 99936 - DNA, 20 bp, synthetic construct
  source 1..20: mol_type = other DNA
taagggcaaatgttgacagg

SEQ ID NO: 99937 - DNA, 20 bp, synthetic construct
  source 1..20: mol_type = other DNA
ctaagggcaaatgttgacag

SEQ ID NO: 99938 - DNA, 20 bp, synthetic construct
  source 1..20: mol_type = other DNA
gctaagggcaaatgttgaca

SEQ ID NO: 99939 - DNA, 20 bp, synthetic construct
  source 1..20: mol_type = other DNA
ggctaagggcaaatgttgac

SEQ ID NO: 99940 - DNA, 20 bp, synthetic construct
  source 1..20: mol_type = other DNA
tggctaagggcaaatgttga

SEQ ID NO: 99941 - DNA, 20 bp, synthetic construct
  source 1..20: mol_type = other DNA
gtggctaagggcaaatgttg

SEQ ID NO: 99942 - DNA, 20 bp, synthetic construct
  source 1..20: mol_type = other DNA
agtggctaagggcaaatgtt

SEQ ID NO: 99943 - DNA, 20 bp, synthetic construct
  source 1..20: mol_type = other DNA
aagtggctaagggcaaatgt

SEQ ID NO: 99944 - DNA, 20 bp, synthetic construct
  source 1..20: mol_type = other DNA
caagtggctaagggcaaatg

SEQ ID NO: 99945 - DNA, 20 bp, synthetic construct
  source 1..20: mol_type = other DNA
tcaagtggctaagggcaaat

SEQ ID NO: 99946 - DNA, 20 bp, synthetic construct
  source 1..20: mol_type = other DNA
gtcaagtggctaagggcaaa

SEQ ID NO: 99947 - DNA, 20 bp, synthetic construct
  source 1..20: mol_type = other DNA
agtcaagtggctaagggcaa

SEQ ID NO: 99948 - DNA, 20 bp, synthetic construct
  source 1..20: mol_type = other DNA
gagtcaagtggctaagggca

SEQ ID NO: 99949 - DNA, 20 bp, synthetic construct
  source 1..20: mol_type = other DNA
agagtcaagtggctaagggc

SEQ ID NO: 99950 - DNA, 20 bp, synthetic construct
  source 1..20: mol_type = other DNA
aagagtcaagtggctaaggg

SEQ ID NO: 99951 - DNA, 20 bp, synthetic construct
  source 1..20: mol_type = other DNA
aaagagtcaagtggctaagg

SEQ ID NO: 99952 - DNA, 20 bp, synthetic construct
  source 1..20: mol_type = other DNA
taaagagtcaagtggctaag

SEQ ID NO: 99953 - DNA, 20 bp, synthetic construct
  source 1..20: mol_type = other DNA
ctaaagagtcaagtggctaa

SEQ ID NO: 99954 - DNA, 20 bp, synthetic construct
  source 1..20: mol_type = other DNA
gctaaagagtcaagtggcta

SEQ ID NO: 99955 - DNA, 20 bp, synthetic construct
  source 1..20: mol_type = other DNA
agctaaagagtcaagtggct

SEQ ID NO: 99956 - DNA, 20 bp, synthetic construct
  source 1..20: mol_type = other DNA
tagctaaagagtcaagtggc

SEQ ID NO: 99957 - DNA, 20 bp, synthetic construct
  source 1..20: mol_type = other DNA
atagctaaagagtcaagtgg

SEQ ID NO: 99958 - DNA, 20 bp, synthetic construct
  source 1..20: mol_type = other DNA
tatagctaaagagtcaagtg

SEQ ID NO: 99959 - DNA, 20 bp, synthetic construct
  source 1..20: mol_type = other DNA
atatagctaaagagtcaagt

SEQ ID NO: 99960 - DNA, 20 bp, synthetic construct
  source 1..20: mol_type = other DNA
aatatagctaaagagtcaag

SEQ ID NO: 99961 - DNA, 20 bp, synthetic construct
  source 1..20: mol_type = other DNA
caatatagctaaagagtcaa

SEQ ID NO: 99962 - DNA, 20 bp, synthetic construct
  source 1..20: mol_type = other DNA
ccaatatagctaaagagtca

SEQ ID NO: 99963 - DNA, 20 bp, synthetic construct
  source 1..20: mol_type = other DNA
accaatatagctaaagagtc

SEQ ID NO: 99964 - DNA, 20 bp, synthetic construct
  source 1..20: mol_type = other DNA
taccaatatagctaaagagt

SEQ ID NO: 99965 - DNA, 20 bp, synthetic construct
  source 1..20: mol_type = other DNA
ttaccaatatagctaaagag

SEQ ID NO: 99966 - DNA, 20 bp, synthetic construct
  source 1..20: mol_type = other DNA
attaccaatatagctaaaga

SEQ ID NO: 99967 - DNA, 20 bp, synthetic construct
  source 1..20: mol_type = other DNA
cattaccaatatagctaaag

SEQ ID NO: 99968 - DNA, 20 bp, synthetic construct
  source 1..20: mol_type = other DNA
gcattaccaatatagctaaa

SEQ ID NO: 99969 - DNA, 20 bp, synthetic construct
  source 1..20: mol_type = other DNA
tgcattaccaatatagctaa

SEQ ID NO: 99970 - DNA, 20 bp, synthetic construct
  source 1..20: mol_type = other DNA
ctgcattaccaatatagcta

SEQ ID NO: 99971 - DNA, 20 bp, synthetic construct
  source 1..20: mol_type = other DNA
actgcattaccaatatagct

SEQ ID NO: 99972 - DNA, 20 bp, synthetic construct
  source 1..20: mol_type = other DNA
tactgcattaccaatatagc

SEQ ID NO: 99973 - DNA, 20 bp, synthetic construct
  source 1..20: mol_type = other DNA
ttactgcattaccaatatag

SEQ ID NO: 99974 - DNA, 20 bp, synthetic construct
  source 1..20: mol_type = other DNA
tttactgcattaccaatata

SEQ ID NO: 99975 - DNA, 20 bp, synthetic construct
  source 1..20: mol_type = other DNA
ctttactgcattaccaatat

SEQ ID NO: 99976 - DNA, 20 bp, synthetic construct
  source 1..20: mol_type = other DNA
gctttactgcattaccaata

SEQ ID NO: 99977 - DNA, 20 bp, synthetic construct
  source 1..20: mol_type = other DNA
agctttactgcattaccaat

SEQ ID NO: 99978 - DNA, 20 bp, synthetic construct
  source 1..20: mol_type = other DNA
aagctttactgcattaccaa

SEQ ID NO: 99979 - DNA, 20 bp, synthetic construct
  source 1..20: mol_type = other DNA
caagctttactgcattacca

SEQ ID NO: 99980 - DNA, 20 bp, synthetic construct
  source 1..20: mol_type = other DNA
gcaagctttactgcattacc

SEQ ID NO: 99981 - DNA, 20 bp, synthetic construct
  source 1..20: mol_type = other DNA
cgcaagctttactgcattac

SEQ ID NO: 99982 - DNA, 20 bp, synthetic construct
  source 1..20: mol_type = other DNA
tcgcaagctttactgcatta

SEQ ID NO: 99983 - DNA, 20 bp, synthetic construct
  source 1..20: mol_type = other DNA
atcgcaagctttactgcatt

SEQ ID NO: 99984 - DNA, 20 bp, synthetic construct
  source 1..20: mol_type = other DNA
catcgcaagctttactgcat

SEQ ID NO: 99985 - DNA, 20 bp, synthetic construct
  source 1..20: mol_type = other DNA
gcatcgcaagctttactgca

SEQ ID NO: 99986 - DNA, 20 bp, synthetic construct
  source 1..20: mol_type = other DNA
cgcatcgcaagctttactgc

SEQ ID NO: 99987 - DNA, 20 bp, synthetic construct
  source 1..20: mol_type = other DNA
gcgcatcgcaagctttactg

SEQ ID NO: 99988 - DNA, 20 bp, synthetic construct
  source 1..20: mol_type = other DNA
ggcgcatcgcaagctttact

SEQ ID NO: 99989 - DNA, 20 bp, synthetic construct
  source 1..20: mol_type = other DNA
tggcgcatcgcaagctttac

SEQ ID NO: 99990 - DNA, 20 bp, synthetic construct
  source 1..20: mol_type = other DNA
ctggcgcatcgcaagcttta

SEQ ID NO: 99991 - DNA, 20 bp, synthetic construct
  source 1..20: mol_type = other DNA
tctggcgcatcgcaagcttt

SEQ ID NO: 99992 - DNA, 20 bp, synthetic construct
  source 1..20: mol_type = other DNA
ctctggcgcatcgcaagctt

SEQ ID NO: 99993 - DNA, 20 bp, synthetic construct
  source 1..20: mol_type = other DNA
actctggcgcatcgcaagct

SEQ ID NO: 99994 - DNA, 20 bp, synthetic construct
  source 1..20: mol_type = other DNA
aactctggcgcatcgcaagc

SEQ ID NO: 99995 - DNA, 20 bp, synthetic construct
  source 1..20: mol_type = other DNA
caactctggcgcatcgcaag

SEQ ID NO: 99996 - DNA, 20 bp, synthetic construct
  source 1..20: mol_type = other DNA
gcaactctggcgcatcgcaa

SEQ ID NO: 99997 - DNA, 20 bp, synthetic construct
  source 1..20: mol_type = other DNA
tgcaactctggcgcatcgca

SEQ ID NO: 99998 - DNA, 20 bp, synthetic construct
  source 1..20: mol_type = other DNA
atgcaactctggcgcatcgc

SEQ ID NO: 99999 - DNA, 20 bp, synthetic construct
  source 1..20: mol_type = other DNA
tatgcaactctggcgcatcg

SEQ ID NO: 100000 - DNA, 20 bp, synthetic construct
  source 1..20: mol_type = other DNA
ttatgcaactctggcgcatc

SEQ ID NO: 100001 - DNA, 20 bp, synthetic construct
  source 1..20: mol_type = other DNA
attatgcaactctggcgcat

SEQ ID NO: 100002 - DNA, 20 bp, synthetic construct
  source 1..20: mol_type = other DNA
cattatgcaactctggcgca

SEQ ID NO: 100003 - DNA, 20 bp, synthetic construct
  source 1..20: mol_type = other DNA
gcattatgcaactctggcgc

SEQ ID NO: 100004 - DNA, 20 bp, synthetic construct
  source 1..20: mol_type = other DNA
agcattatgcaactctggcg

SEQ ID NO: 100005 - DNA, 20 bp, synthetic construct
  source 1..20: mol_type = other DNA
cagcattatgcaactctggc

SEQ ID NO: 100006 - DNA, 20 bp, synthetic construct
  source 1..20: mol_type = other DNA
acagcattatgcaactctgg

SEQ ID NO: 100007 - DNA, 20 bp, synthetic construct
  source 1..20: mol_type = other DNA
aacagcattatgcaactctg

SEQ ID NO: 100008 - DNA, 20 bp, synthetic construct
  source 1..20: mol_type = other DNA
aaacagcattatgcaactct

SEQ ID NO: 100009 - DNA, 20 bp, synthetic construct
  source 1..20: mol_type = other DNA
caaacagcattatgcaactc

SEQ ID NO: 100010 - DNA, 20 bp, synthetic construct
  source 1..20: mol_type = other DNA
gcaaacagcattatgcaact

SEQ ID NO: 100011 - DNA, 20 bp, synthetic construct
  source 1..20: mol_type = other DNA
ggcaaacagcattatgcaac

SEQ ID NO: 100012 - DNA, 20 bp, synthetic construct
  source 1..20: mol_type = other DNA
tggcaaacagcattatgcaa

SEQ ID NO: 100013 - DNA, 20 bp, synthetic construct
  source 1..20: mol_type = other DNA
atggcaaacagcattatgca

SEQ ID NO: 100014 - DNA, 20 bp, synthetic construct
  source 1..20: mol_type = other DNA
catggcaaacagcattatgc

SEQ ID NO: 100015 - DNA, 20 bp, synthetic construct
  source 1..20: mol_type = other DNA
tcatggcaaacagcattatg

SEQ ID NO: 100016 - DNA, 20 bp, synthetic construct
  source 1..20: mol_type = other DNA
gtcatggcaaacagcattat

SEQ ID NO: 100017 - DNA, 20 bp, synthetic construct
  source 1..20: mol_type = other DNA
tgtcatggcaaacagcatta

SEQ ID NO: 100018 - DNA, 20 bp, synthetic construct
  source 1..20: mol_type = other DNA
gtgtcatggcaaacagcatt

SEQ ID NO: 100019 - DNA, 20 bp, synthetic construct
  source 1..20: mol_type = other DNA
ggtgtcatggcaaacagcat

SEQ ID NO: 100020 - DNA, 20 bp, synthetic construct
  source 1..20: mol_type = other DNA
tggtgtcatggcaaacagca

SEQ ID NO: 100021 - DNA, 20 bp, synthetic construct
  source 1..20: mol_type = other DNA
ttggtgtcatggcaaacagc

SEQ ID NO: 100022 - DNA, 20 bp, synthetic construct
  source 1..20: mol_type = other DNA
cttggtgtcatggcaaacag

SEQ ID NO: 100023 - DNA, 20 bp, synthetic construct
  source 1..20: mol_type = other DNA
tcttggtgtcatggcaaaca

SEQ ID NO: 100024 - DNA, 20 bp, synthetic construct
  source 1..20: mol_type = other DNA
ctcttggtgtcatggcaaac

SEQ ID NO: 100025 - DNA, 20 bp, synthetic construct
  source 1..20: mol_type = other DNA
gctcttggtgtcatggcaaa

SEQ ID NO: 100026 - DNA, 20 bp, synthetic construct
  source 1..20: mol_type = other DNA
ggctcttggtgtcatggcaa

SEQ ID NO: 100027 - DNA, 20 bp, synthetic construct
  source 1..20: mol_type = other DNA
aggctcttggtgtcatggca

SEQ ID NO: 100028 - DNA, 20 bp, synthetic construct
  source 1..20: mol_type = other DNA
aaggctcttggtgtcatggc

SEQ ID NO: 100029 - DNA, 20 bp, synthetic construct
  source 1..20: mol_type = other DNA
caaggctcttggtgtcatgg

SEQ ID NO: 100030 - DNA, 20 bp, synthetic construct
  source 1..20: mol_type = other DNA
ccaaggctcttggtgtcatg

SEQ ID NO: 100031 - DNA, 20 bp, synthetic construct
  source 1..20: mol_type = other DNA
accaaggctcttggtgtcat

SEQ ID NO: 100032 - DNA, 20 bp, synthetic construct
  source 1..20: mol_type = other DNA
taccaaggctcttggtgtca

SEQ ID NO: 100033 - DNA, 20 bp, synthetic construct
  source 1..20: mol_type = other DNA
ttaccaaggctcttggtgtc

SEQ ID NO: 100034 - DNA, 20 bp, synthetic construct
  source 1..20: mol_type = other DNA
attaccaaggctcttggtgt

SEQ ID NO: 100035 - DNA, 20 bp, synthetic construct
  source 1..20: mol_type = other DNA
cattaccaaggctcttggtg

SEQ ID NO: 100036 - DNA, 20 bp, synthetic construct
  source 1..20: mol_type = other DNA
tcattaccaaggctcttggt

SEQ ID NO: 100037 - DNA, 20 bp, synthetic construct
  source 1..20: mol_type = other DNA
ttcattaccaaggctcttgg

SEQ ID NO: 100038 - DNA, 20 bp, synthetic construct
  source 1..20: mol_type = other DNA
tttcattaccaaggctcttg

SEQ ID NO: 100039 - DNA, 20 bp, synthetic construct
  source 1..20: mol_type = other DNA
gtttcattaccaaggctctt

SEQ ID NO: 100040 - DNA, 20 bp, synthetic construct
  source 1..20: mol_type = other DNA
ggtttcattaccaaggctct

SEQ ID NO: 100041 - DNA, 20 bp, synthetic construct
  source 1..20: mol_type = other DNA
tggtttcattaccaaggctc

SEQ ID NO: 100042 - DNA, 20 bp, synthetic construct
  source 1..20: mol_type = other DNA
atggtttcattaccaaggct

SEQ ID NO: 100043 - DNA, 20 bp, synthetic construct
  source 1..20: mol_type = other DNA
aatggtttcattaccaaggc

SEQ ID NO: 100044 - DNA, 20 bp, synthetic construct
  source 1..20: mol_type = other DNA
caatggtttcattaccaagg

SEQ ID NO: 100045 - DNA, 20 bp, synthetic construct
  source 1..20: mol_type = other DNA
tcaatggtttcattaccaag

SEQ ID NO: 100046 - DNA, 20 bp, synthetic construct
  source 1..20: mol_type = other DNA
ttcaatggtttcattaccaa

SEQ ID NO: 100047 - DNA, 20 bp, synthetic construct
  source 1..20: mol_type = other DNA
tttcaatggtttcattacca

SEQ ID NO: 100048 - DNA, 20 bp, synthetic construct
  source 1..20: mol_type = other DNA
atttcaatggtttcattacc

SEQ ID NO: 100049 - DNA, 20 bp, synthetic construct
  source 1..20: mol_type = other DNA
aatttcaatggtttcattac

SEQ ID NO: 100050 - DNA, 20 bp, synthetic construct
  source 1..20: mol_type = other DNA
caatttcaatggtttcatta

SEQ ID NO: 100051 - DNA, 20 bp, synthetic construct
  source 1..20: mol_type = other DNA
ccaatttcaatggtttcatt

SEQ ID NO: 100052 - DNA, 20 bp, synthetic construct
  source 1..20: mol_type = other DNA
accaatttcaatggtttcat

SEQ ID NO: 100053 - DNA, 20 bp, synthetic construct
  source 1..20: mol_type = other DNA
aaccaatttcaatggtttca

SEQ ID NO: 100054 - DNA, 20 bp, synthetic construct
  source 1..20: mol_type = other DNA
aaaccaatttcaatggtttc

SEQ ID NO: 100055 - DNA, 20 bp, synthetic construct
  source 1..20: mol_type = other DNA
caaaccaatttcaatggttt

SEQ ID NO: 100056 - DNA, 20 bp, synthetic construct
  source 1..20: mol_type = other DNA
gcaaaccaatttcaatggtt

SEQ ID NO: 100057 - DNA, 20 bp, synthetic construct
  source 1..20: mol_type = other DNA
ggcaaaccaatttcaatggt

SEQ ID NO: 100058 - DNA, 20 bp, synthetic construct
  source 1..20: mol_type = other DNA
aggcaaaccaatttcaatgg

SEQ ID NO: 100059 - DNA, 20 bp, synthetic construct
  source 1..20: mol_type = other DNA
taggcaaaccaatttcaatg

SEQ ID NO: 100060 - DNA, 20 bp, synthetic construct
  source 1..20: mol_type = other DNA
ataggcaaaccaatttcaat

SEQ ID NO: 100061 - DNA, 20 bp, synthetic construct
  source 1..20: mol_type = other DNA
tataggcaaaccaatttcaa

SEQ ID NO: 100062 - DNA, 20 bp, synthetic construct
  source 1..20: mol_type = other DNA
gtataggcaaaccaatttca

SEQ ID NO: 100063 - DNA, 20 bp, synthetic construct
  source 1..20: mol_type = other DNA
agtataggcaaaccaatttc

SEQ ID NO: 100064 - DNA, 20 bp, synthetic construct
  source 1..20: mol_type = other DNA
cagtataggcaaaccaattt

SEQ ID NO: 100065 - DNA, 20 bp, synthetic construct
  source 1..20: mol_type = other DNA
tcagtataggcaaaccaatt

SEQ ID NO: 100066 - DNA, 20 bp, synthetic construct
  source 1..20: mol_type = other DNA
ctcagtataggcaaaccaat

SEQ ID NO: 100067 - DNA, 20 bp, synthetic construct
  source 1..20: mol_type = other DNA
cctcagtataggcaaaccaa

SEQ ID NO: 100068 - DNA, 20 bp, synthetic construct
  source 1..20: mol_type = other DNA
gcctcagtataggcaaacca

SEQ ID NO: 100069 - DNA, 20 bp, synthetic construct
  source 1..20: mol_type = other DNA
agcctcagtataggcaaacc

SEQ ID NO: 100070 - DNA, 20 bp, synthetic construct
  source 1..20: mol_type = other DNA
cagcctcagtataggcaaac

SEQ ID NO: 100071 - DNA, 20 bp, synthetic construct
  source 1..20: mol_type = other DNA
tcagcctcagtataggcaaa

SEQ ID NO: 100072 - DNA, 20 bp, synthetic construct
  source 1..20: mol_type = other DNA
ttcagcctcagtataggcaa

SEQ ID NO: 100073 - DNA, 20 bp, synthetic construct
  source 1..20: mol_type = other DNA
cttcagcctcagtataggca

SEQ ID NO: 100074 - DNA, 20 bp, synthetic construct
  source 1..20: mol_type = other DNA
tcttcagcctcagtataggc

SEQ ID NO: 100075 - DNA, 20 bp, synthetic construct
  source 1..20: mol_type = other DNA
ctcttcagcctcagtatagg

SEQ ID NO: 100076 - DNA, 20 bp, synthetic construct
  source 1..20: mol_type = other DNA
cctcttcagcctcagtatag

SEQ ID NO: 100077 - DNA, 20 bp, synthetic construct
  source 1..20: mol_type = other DNA
acctcttcagcctcagtata

SEQ ID NO: 100078 - DNA, 20 bp, synthetic construct
  source 1..20: mol_type = other DNA
tacctcttcagcctcagtat

SEQ ID NO: 100079 - DNA, 20 bp, synthetic construct
  source 1..20: mol_type = other DNA
atacctcttcagcctcagta

SEQ ID NO: 100080 - DNA, 20 bp, synthetic construct
  source 1..20: mol_type = other DNA
gatacctcttcagcctcagt

SEQ ID NO: 100081 - DNA, 20 bp, synthetic construct
  source 1..20: mol_type = other DNA
agatacctcttcagcctcag

SEQ ID NO: 100082 - DNA, 20 bp, synthetic construct
  source 1..20: mol_type = other DNA
aagatacctcttcagcctca

SEQ ID NO: 100083 - DNA, 20 bp, synthetic construct
  source 1..20: mol_type = other DNA
caagatacctcttcagcctc

SEQ ID NO: 100084 - DNA, 20 bp, synthetic construct
  source 1..20: mol_type = other DNA
ccaagatacctcttcagcct

SEQ ID NO: 100085 - DNA, 20 bp, synthetic construct
  source 1..20: mol_type = other DNA
gccaagatacctcttcagcc

SEQ ID NO: 100086 - DNA, 20 bp, synthetic construct
  source 1..20: mol_type = other DNA
agccaagatacctcttcagc

SEQ ID NO: 100087 - DNA, 20 bp, synthetic construct
  source 1..20: mol_type = other DNA
gagccaagatacctcttcag

SEQ ID NO: 100088 - DNA, 20 bp, synthetic construct
  source 1..20: mol_type = other DNA
agagccaagatacctcttca

SEQ ID NO: 100089 - DNA, 20 bp, synthetic construct
  source 1..20: mol_type = other DNA
gagagccaagatacctcttc

SEQ ID NO: 100090 - DNA, 20 bp, synthetic construct
  source 1..20: mol_type = other DNA
agagagccaagatacctctt

SEQ ID NO: 100091 - DNA, 20 bp, synthetic construct
  source 1..20: mol_type = other DNA
tagagagccaagatacctct

SEQ ID NO: 100092 - DNA, 20 bp, synthetic construct
  source 1..20: mol_type = other DNA
ttagagagccaagatacctc

SEQ ID NO: 100093 - DNA, 20 bp, synthetic construct
  source 1..20: mol_type = other DNA
attagagagccaagatacct

SEQ ID NO: 100094 - DNA, 20 bp, synthetic construct
  source 1..20: mol_type = other DNA
aattagagagccaagatacc

SEQ ID NO: 100095 - DNA, 20 bp, synthetic construct
  source 1..20: mol_type = other DNA
aaattagagagccaagatac

SEQ ID NO: 100096 - DNA, 20 bp, synthetic construct
  source 1..20: mol_type = other DNA
aaaattagagagccaagata

SEQ ID NO: 100097 - DNA, 20 bp, synthetic construct
  source 1..20: mol_type = other DNA
taaaattagagagccaagat

SEQ ID NO: 100098 - DNA, 20 bp, synthetic construct
  source 1..20: mol_type = other DNA
ttaaaattagagagccaaga

SEQ ID NO: 100099 - DNA, 20 bp, synthetic construct
  source 1..20: mol_type = other DNA
cttaaaattagagagccaag

SEQ ID NO: 100100 - DNA, 20 bp, synthetic construct
  source 1..20: mol_type = other DNA
ccttaaaattagagagccaa

SEQ ID NO: 100101 - DNA, 20 bp, synthetic construct
  source 1..20: mol_type = other DNA
gccttaaaattagagagcca

SEQ ID NO: 100102 - DNA, 20 bp, synthetic construct
  source 1..20: mol_type = other DNA
tgccttaaaattagagagcc

SEQ ID NO: 100103 - DNA, 20 bp, synthetic construct
  source 1..20: mol_type = other DNA
ttgccttaaaattagagagc

SEQ ID NO: 100104 - DNA, 20 bp, synthetic construct
  source 1..20: mol_type = other DNA
gttgccttaaaattagagag

SEQ ID NO: 100105 - DNA, 20 bp, synthetic construct
  source 1..20: mol_type = other DNA
ggttgccttaaaattagaga

SEQ ID NO: 100106 - DNA, 20 bp, synthetic construct
  source 1..20: mol_type = other DNA
aggttgccttaaaattagag

SEQ ID NO: 100107 - DNA, 20 bp, synthetic construct
  source 1..20: mol_type = other DNA
aaggttgccttaaaattaga

SEQ ID NO: 100108 - DNA, 20 bp, synthetic construct
  source 1..20: mol_type = other DNA
aaaggttgccttaaaattag

SEQ ID NO: 100109 - DNA, 20 bp, synthetic construct
  source 1..20: mol_type = other DNA
aaaaggttgccttaaaatta

SEQ ID NO: 100110 - DNA, 20 bp, synthetic construct
  source 1..20: mol_type = other DNA
aaaaaggttgccttaaaatt

SEQ ID NO: 100111 - DNA, 20 bp, synthetic construct
  source 1..20: mol_type = other DNA
caaaaaggttgccttaaaat

SEQ ID NO: 100112 - DNA, 20 bp, synthetic construct
  source 1..20: mol_type = other DNA
ccaaaaaggttgccttaaaa

SEQ ID NO: 100113 - DNA, 20 bp, synthetic construct
  source 1..20: mol_type = other DNA
gccaaaaaggttgccttaaa

SEQ ID NO: 100114 - DNA, 20 bp, synthetic construct
  source 1..20: mol_type = other DNA
agccaaaaaggttgccttaa

SEQ ID NO: 100115 - DNA, 20 bp, synthetic construct
  source 1..20: mol_type = other DNA
cagccaaaaaggttgcctta

SEQ ID NO: 100116 - DNA, 20 bp, synthetic construct
  source 1..20: mol_type = other DNA
acagccaaaaaggttgcctt

SEQ ID NO: 100117 - DNA, 20 bp, synthetic construct
  source 1..20: mol_type = other DNA
cacagccaaaaaggttgcct

SEQ ID NO: 100118 - DNA, 20 bp, synthetic construct
  source 1..20: mol_type = other DNA
acacagccaaaaaggttgcc

SEQ ID NO: 100119 - DNA, 20 bp, synthetic construct
  source 1..20: mol_type = other DNA
tacacagccaaaaaggttgc

SEQ ID NO: 100120 - DNA, 20 bp, synthetic construct
  source 1..20: mol_type = other DNA
ctacacagccaaaaaggttg

SEQ ID NO: 100121 - DNA, 20 bp, synthetic construct
  source 1..20: mol_type = other DNA
cctacacagccaaaaaggtt

SEQ ID NO: 100122 - DNA, 20 bp, synthetic construct
  source 1..20: mol_type = other DNA
acctacacagccaaaaaggt

SEQ ID NO: 100123 - DNA, 20 bp, synthetic construct
  source 1..20: mol_type = other DNA
aacctacacagccaaaaagg

SEQ ID NO: 100124 - DNA, 20 bp, synthetic construct
  source 1..20: mol_type = other DNA
aaacctacacagccaaaaag

SEQ ID NO: 100125 - DNA, 20 bp, synthetic construct
  source 1..20: mol_type = other DNA
gaaacctacacagccaaaaa

SEQ ID NO: 100126 - DNA, 20 bp, synthetic construct
  source 1..20: mol_type = other DNA
agaaacctacacagccaaaa

SEQ ID NO: 100127 - DNA, 20 bp, synthetic construct
  source 1..20: mol_type = other DNA
gagaaacctacacagccaaa

SEQ ID NO: 100128 - DNA, 20 bp, synthetic construct
  source 1..20: mol_type = other DNA
agagaaacctacacagccaa

SEQ ID NO: 100129 - DNA, 20 bp, synthetic construct
  source 1..20: mol_type = other DNA
aagagaaacctacacagcca

SEQ ID NO: 100130 - DNA, 20 bp, synthetic construct
  source 1..20: mol_type = other DNA
aaagagaaacctacacagcc

SEQ ID NO: 100131 - DNA, 20 bp, synthetic construct
  source 1..20: mol_type = other DNA
taaagagaaacctacacagc

SEQ ID NO: 100132 - DNA, 20 bp, synthetic construct
  source 1..20: mol_type = other DNA
ctaaagagaaacctacacag

SEQ ID NO: 100133 - DNA, 20 bp, synthetic construct
  source 1..20: mol_type = other DNA
gctaaagagaaacctacaca

SEQ ID NO: 100134 - DNA, 20 bp, synthetic construct
  source 1..20: mol_type = other DNA
agctaaagagaaacctacac

SEQ ID NO: 100135 - DNA, 20 bp, synthetic construct
  source 1..20: mol_type = other DNA
aagctaaagagaaacctaca

SEQ ID NO: 100136 - DNA, 20 bp, synthetic construct
  source 1..20: mol_type = other DNA
caagctaaagagaaacctac

SEQ ID NO: 100137 - DNA, 20 bp, synthetic construct
  source 1..20: mol_type = other DNA
acaagctaaagagaaaccta

SEQ ID NO: 100138 - DNA, 20 bp, synthetic construct
  source 1..20: mol_type = other DNA
aacaagctaaagagaaacct

SEQ ID NO: 100139 - DNA, 20 bp, synthetic construct
  source 1..20: mol_type = other DNA
aaacaagctaaagagaaacc

SEQ ID NO: 100140 - DNA, 20 bp, synthetic construct
  source 1..20: mol_type = other DNA
gaaacaagctaaagagaaac

SEQ ID NO: 100141 - DNA, 20 bp, synthetic construct
  source 1..20: mol_type = other DNA
agaaacaagctaaagagaaa

SEQ ID NO: 100142 - DNA, 20 bp, synthetic construct
  source 1..20: mol_type = other DNA
gagaaacaagctaaagagaa

SEQ ID NO: 100143 - DNA, 20 bp, synthetic construct
  source 1..20: mol_type = other DNA
tgagaaacaagctaaagaga

SEQ ID NO: 100144 - DNA, 20 bp, synthetic construct
  source 1..20: mol_type = other DNA
gtgagaaacaagctaaagag

SEQ ID NO: 100145 - DNA, 20 bp, synthetic construct
  source 1..20: mol_type = other DNA
ggtgagaaacaagctaaaga

SEQ ID NO: 100146 - DNA, 20 bp, synthetic construct
  source 1..20: mol_type = other DNA
tggtgagaaacaagctaaag

SEQ ID NO: 100147 - DNA, 20 bp, synthetic construct
  source 1..20: mol_type = other DNA
gtggtgagaaacaagctaaa

SEQ ID NO: 100148 - DNA, 20 bp, synthetic construct
  source 1..20: mol_type = other DNA
ggtggtgagaaacaagctaa

SEQ ID NO: 100149 - DNA, 20 bp, synthetic construct
  source 1..20: mol_type = other DNA
aggtggtgagaaacaagcta

SEQ ID NO: 100150 - DNA, 20 bp, synthetic construct
  source 1..20: mol_type = other DNA
caggtggtgagaaacaagct

SEQ ID NO: 100151 - DNA, 20 bp, synthetic construct
  source 1..20: mol_type = other DNA
ccaggtggtgagaaacaagc

SEQ ID NO: 100152 - DNA, 20 bp, synthetic construct
  source 1..20: mol_type = other DNA
cccaggtggtgagaaacaag

SEQ ID NO: 100153 - DNA, 20 bp, synthetic construct
  source 1..20: mol_type = other DNA
ccccaggtggtgagaaacaa

SEQ ID NO: 100154 - DNA, 20 bp, synthetic construct
  source 1..20: mol_type = other DNA
gccccaggtggtgagaaaca

SEQ ID NO: 100155 - DNA, 20 bp, synthetic construct
  source 1..20: mol_type = other DNA
agccccaggtggtgagaaac

SEQ ID NO: 100156 - DNA, 20 bp, synthetic construct
  source 1..20: mol_type = other DNA
cagccccaggtggtgagaaa

SEQ ID NO: 100157 - DNA, 20 bp, synthetic construct
  source 1..20: mol_type = other DNA
acagccccaggtggtgagaa

SEQ ID NO: 100158 - DNA, 20 bp, synthetic construct
  source 1..20: mol_type = other DNA
cacagccccaggtggtgaga

SEQ ID NO: 100159 - DNA, 20 bp, synthetic construct
  source 1..20: mol_type = other DNA
ccacagccccaggtggtgag

SEQ ID NO: 100160 - DNA, 20 bp, synthetic construct
  source 1..20: mol_type = other DNA
gccacagccccaggtggtga

SEQ ID NO: 100161 - DNA, 20 bp, synthetic construct
  source 1..20: mol_type = other DNA
agccacagccccaggtggtg

SEQ ID NO: 100162 - DNA, 20 bp, synthetic construct
  source 1..20: mol_type = other DNA
aagccacagccccaggtggt

SEQ ID NO: 100163 - DNA, 20 bp, synthetic construct
  source 1..20: mol_type = other DNA
taagccacagccccaggtgg

SEQ ID NO: 100164 - DNA, 20 bp, synthetic construct
  source 1..20: mol_type = other DNA
ctaagccacagccccaggtg

SEQ ID NO: 100165 - DNA, 20 bp, synthetic construct
  source 1..20: mol_type = other DNA
cctaagccacagccccaggt

SEQ ID NO: 100166 - DNA, 20 bp, synthetic construct
  source 1..20: mol_type = other DNA
acctaagccacagccccagg

SEQ ID NO: 100167 - DNA, 20 bp, synthetic construct
  source 1..20: mol_type = other DNA
gacctaagccacagccccag

SEQ ID NO: 100168 - DNA, 20 bp, synthetic construct
  source 1..20: mol_type = other DNA
ggacctaagccacagcccca

SEQ ID NO: 100169 - DNA, 20 bp, synthetic construct
  source 1..20: mol_type = other DNA
cggacctaagccacagcccc

SEQ ID NO: 100170 - DNA, 20 bp, synthetic construct
  source 1..20: mol_type = other DNA
acggacctaagccacagccc

SEQ ID NO: 100171 - DNA, 20 bp, synthetic construct
  source 1..20: mol_type = other DNA
aacggacctaagccacagcc

SEQ ID NO: 100172 - DNA, 20 bp, synthetic construct
  source 1..20: mol_type = other DNA
caacggacctaagccacagc

SEQ ID NO: 100173 - DNA, 20 bp, synthetic construct
  source 1..20: mol_type = other DNA
acaacggacctaagccacag

SEQ ID NO: 100174 - DNA, 20 bp, synthetic construct
  source 1..20: mol_type = other DNA
gacaacggacctaagccaca

SEQ ID NO: 100175 - DNA, 20 bp, synthetic construct
  source 1..20: mol_type = other DNA
ggacaacggacctaagccac

SEQ ID NO: 100176 - DNA, 20 bp, synthetic construct
  source 1..20: mol_type = other DNA
aggacaacggacctaagcca

SEQ ID NO: 100177 - DNA, 20 bp, synthetic construct
  source 1..20: mol_type = other DNA
taggacaacggacctaagcc

SEQ ID NO: 100178 - DNA, 20 bp, synthetic construct
  source 1..20: mol_type = other DNA
ttaggacaacggacctaagc

SEQ ID NO: 100179 - DNA, 20 bp, synthetic construct
  source 1..20: mol_type = other DNA
gttaggacaacggacctaag

SEQ ID NO: 100180 - DNA, 20 bp, synthetic construct
  source 1..20: mol_type = other DNA
ggttaggacaacggacctaa

SEQ ID NO: 100181 - DNA, 20 bp, synthetic construct
  source 1..20: mol_type = other DNA
aggttaggacaacggaccta

SEQ ID NO: 100182 - DNA, 20 bp, synthetic construct
  source 1..20: mol_type = other DNA
caggttaggacaacggacct

SEQ ID NO: 100183 - DNA, 20 bp, synthetic construct
  source 1..20: mol_type = other DNA
acaggttaggacaacggacc

SEQ ID NO: 100184 - DNA, 20 bp, synthetic construct
  source 1..20: mol_type = other DNA
cacaggttaggacaacggac

SEQ ID NO: 100185 - DNA, 20 bp, synthetic construct
  source 1..20: mol_type = other DNA
ccacaggttaggacaacgga

SEQ ID NO: 100186 - DNA, 20 bp, synthetic construct
  source 1..20: mol_type = other DNA
gccacaggttaggacaacgg

SEQ ID NO: 100187 - DNA, 20 bp, synthetic construct
  source 1..20: mol_type = other DNA
agccacaggttaggacaacg

SEQ ID NO: 100188 - DNA, 20 bp, synthetic construct
  source 1..20: mol_type = other DNA
aagccacaggttaggacaac

SEQ ID NO: 100189 - DNA, 20 bp, synthetic construct
  source 1..20: mol_type = other DNA
taagccacaggttaggacaa

SEQ ID NO: 100190 - DNA, 20 bp, synthetic construct
  source 1..20: mol_type = other DNA
ctaagccacaggttaggaca

SEQ ID NO: 100191 - DNA, 20 bp, synthetic construct
  source 1..20: mol_type = other DNA
cctaagccacaggttaggac

SEQ ID NO: 100192 - DNA, 20 bp, synthetic construct
  source 1..20: mol_type = other DNA
acctaagccacaggttagga

SEQ ID NO: 100193 - DNA, 20 bp, synthetic construct
  source 1..20: mol_type = other DNA
aacctaagccacaggttagg

SEQ ID NO: 100194 - DNA, 20 bp, synthetic construct
  source 1..20: mol_type = other DNA
gaacctaagccacaggttag

SEQ ID NO: 100195 - DNA, 20 bp, synthetic construct
  source 1..20: mol_type = other DNA
agaacctaagccacaggtta

SEQ ID NO: 100196 - DNA, 20 bp, synthetic construct
  source 1..20: mol_type = other DNA
cagaacctaagccacaggtt

SEQ ID NO: 100197 - DNA, 20 bp, synthetic construct
  source 1..20: mol_type = other DNA
acagaacctaagccacaggt

SEQ ID NO: 100198 - DNA, 20 bp, synthetic construct
  source 1..20: mol_type = other DNA
aacagaacctaagccacagg

SEQ ID NO: 100199 - DNA, 20 bp, synthetic construct
  source 1..20: mol_type = other DNA
aaacagaacctaagccacag

SEQ ID NO: 100200 - DNA, 20 bp, synthetic construct
  source 1..20: mol_type = other DNA
aaaacagaacctaagccaca

SEQ ID NO: 100201 - DNA, 20 bp, synthetic construct
  source 1..20: mol_type = other DNA
aaaaacagaacctaagccac

SEQ ID NO: 100202 - DNA, 20 bp, synthetic construct
  source 1..20: mol_type = other DNA
caaaaacagaacctaagcca

SEQ ID NO: 100203 - DNA, 20 bp, synthetic construct
  source 1..20: mol_type = other DNA
acaaaaacagaacctaagcc

SEQ ID NO: 100204 - DNA, 20 bp, synthetic construct
  source 1..20: mol_type = other DNA
aacaaaaacagaacctaagc

SEQ ID NO: 100205 - DNA, 20 bp, synthetic construct
  source 1..20: mol_type = other DNA
caacaaaaacagaacctaag

SEQ ID NO: 100206 - DNA, 20 bp, synthetic construct
  source 1..20: mol_type = other DNA
gcaacaaaaacagaacctaa

SEQ ID NO: 100207 - DNA, 20 bp, synthetic construct
  source 1..20: mol_type = other DNA
agcaacaaaaacagaaccta

SEQ ID NO: 100208 - DNA, 20 bp, synthetic construct
  source 1..20: mol_type = other DNA
aagcaacaaaaacagaacct

SEQ ID NO: 100209 - DNA, 20 bp, synthetic construct
  source 1..20: mol_type = other DNA
caagcaacaaaaacagaacc

SEQ ID NO: 100210 - DNA, 20 bp, synthetic construct
  source 1..20: mol_type = other DNA
acaagcaacaaaaacagaac

SEQ ID NO: 100211 - DNA, 20 bp, synthetic construct
  source 1..20: mol_type = other DNA
tacaagcaacaaaaacagaa

SEQ ID NO: 100212 - DNA, 20 bp, synthetic construct
  source 1..20: mol_type = other DNA
gtacaagcaacaaaaacaga

SEQ ID NO: 100213 - DNA, 20 bp, synthetic construct
  source 1..20: mol_type = other DNA
agtacaagcaacaaaaacag

SEQ ID NO: 100214 - DNA, 20 bp, synthetic construct
  source 1..20: mol_type = other DNA
aagtacaagcaacaaaaaca

SEQ ID NO: 100215 - DNA, 20 bp, synthetic construct
  source 1..20: mol_type = other DNA
caagtacaagcaacaaaaac

SEQ ID NO: 100216 - DNA, 20 bp, synthetic construct
  source 1..20: mol_type = other DNA
gcaagtacaagcaacaaaaa

SEQ ID NO: 100217 - DNA, 20 bp, synthetic construct
  source 1..20: mol_type = other DNA
agcaagtacaagcaacaaaa

SEQ ID NO: 100218 - DNA, 20 bp, synthetic construct
  source 1..20: mol_type = other DNA
gagcaagtacaagcaacaaa

SEQ ID NO: 100219 - DNA, 20 bp, synthetic construct
  source 1..20: mol_type = other DNA
ggagcaagtacaagcaacaa

SEQ ID NO: 100220 - DNA, 20 bp, synthetic construct
  source 1..20: mol_type = other DNA
gggagcaagtacaagcaaca

SEQ ID NO: 100221 - DNA, 20 bp, synthetic construct
  source 1..20: mol_type = other DNA
ggggagcaagtacaagcaac

SEQ ID NO: 100222 - DNA, 20 bp, synthetic construct
  source 1..20: mol_type = other DNA
gggggagcaagtacaagcaa

SEQ ID NO: 100223 - DNA, 20 bp, synthetic construct
  source 1..20: mol_type = other DNA
agggggagcaagtacaagca

SEQ ID NO: 100224 - DNA, 20 bp, synthetic construct
  source 1..20: mol_type = other DNA
aagggggagcaagtacaagc

SEQ ID NO: 100225 - DNA, 20 bp, synthetic construct
  source 1..20: mol_type = other DNA
aaagggggagcaagtacaag

SEQ ID NO: 100226 - DNA, 20 bp, synthetic construct
  source 1..20: mol_type = other DNA
aaaagggggagcaagtacaa

SEQ ID NO: 100227 - DNA, 20 bp, synthetic construct
  source 1..20: mol_type = other DNA
aaaaagggggagcaagtaca

SEQ ID NO: 100228 - DNA, 20 bp, synthetic construct
  source 1..20: mol_type = other DNA
aaaaaagggggagcaagtac

SEQ ID NO: 100229 - DNA, 20 bp, synthetic construct
  source 1..20: mol_type = other DNA
gaaaaaagggggagcaagta

SEQ ID NO: 100230 - DNA, 20 bp, synthetic construct
  source 1..20: mol_type = other DNA
tgaaaaaagggggagcaagt

SEQ ID NO: 100231 - DNA, 20 bp, synthetic construct
  source 1..20: mol_type = other DNA
ctgaaaaaagggggagcaag

SEQ ID NO: 100232 - DNA, 20 bp, synthetic construct
  source 1..20: mol_type = other DNA
gctgaaaaaagggggagcaa

SEQ ID NO: 100233 - DNA, 20 bp, synthetic construct
  source 1..20: mol_type = other DNA
ggctgaaaaaagggggagca

SEQ ID NO: 100234 - DNA, 20 bp, synthetic construct
  source 1..20: mol_type = other DNA
tggctgaaaaaagggggagc

SEQ ID NO: 100235 - DNA, 20 bp, synthetic construct
  source 1..20: mol_type = other DNA
atggctgaaaaaagggggag

SEQ ID NO: 100236 - DNA, 20 bp, synthetic construct
  source 1..20: mol_type = other DNA
aatggctgaaaaaaggggga

SEQ ID NO: 100237 - DNA, 20 bp, synthetic construct
  source 1..20: mol_type = other DNA
gaatggctgaaaaaaggggg

SEQ ID NO: 100238 - DNA, 20 bp, synthetic construct
  source 1..20: mol_type = other DNA
ggaatggctgaaaaaagggg

SEQ ID NO: 100239 - DNA, 20 bp, synthetic construct
  source 1..20: mol_type = other DNA
aggaatggctgaaaaaaggg

SEQ ID NO: 100240 - DNA, 20 bp, synthetic construct
  source 1..20: mol_type = other DNA
caggaatggctgaaaaaagg

SEQ ID NO: 100241 - DNA, 20 bp, synthetic construct
  source 1..20: mol_type = other DNA
acaggaatggctgaaaaaag

SEQ ID NO: 100242 - DNA, 20 bp, synthetic construct
  source 1..20: mol_type = other DNA
aacaggaatggctgaaaaaa

SEQ ID NO: 100243 - DNA, 20 bp, synthetic construct
  source 1..20: mol_type = other DNA
aaacaggaatggctgaaaaa

SEQ ID NO: 100244 - DNA, 20 bp, synthetic construct
  source 1..20: mol_type = other DNA
aaaacaggaatggctgaaaa

SEQ ID NO: 100245 - DNA, 20 bp, synthetic construct
  source 1..20: mol_type = other DNA
gaaaacaggaatggctgaaa

SEQ ID NO: 100246 - DNA, 20 bp, synthetic construct
  source 1..20: mol_type = other DNA
agaaaacaggaatggctgaa

SEQ ID NO: 100247 - DNA, 20 bp, synthetic construct
  source 1..20: mol_type = other DNA
aagaaaacaggaatggctga

SEQ ID NO: 100248 - DNA, 20 bp, synthetic construct
  source 1..20: mol_type = other DNA
aaagaaaacaggaatggctg

SEQ ID NO: 100249 - DNA, 20 bp, synthetic construct
  source 1..20: mol_type = other DNA
gaaagaaaacaggaatggct

SEQ ID NO: 100250 - DNA, 20 bp, synthetic construct
  source 1..20: mol_type = other DNA
agaaagaaaacaggaatggc

SEQ ID NO: 100251 - DNA, 20 bp, synthetic construct
  source 1..20: mol_type = other DNA
aagaaagaaaacaggaatgg

SEQ ID NO: 100252 - DNA, 20 bp, synthetic construct
  source 1..20: mol_type = other DNA
aaagaaagaaaacaggaatg

SEQ ID NO: 100253 - DNA, 20 bp, synthetic construct
  source 1..20: mol_type = other DNA
aaaagaaagaaaacaggaat

SEQ ID NO: 100254 - DNA, 20 bp, synthetic construct
  source 1..20: mol_type = other DNA
caaaagaaagaaaacaggaa

SEQ ID NO: 100255 - DNA, 20 bp, synthetic construct
  source 1..20: mol_type = other DNA
acaaaagaaagaaaacagga

SEQ ID NO: 100256 - DNA, 20 bp, synthetic construct
  source 1..20: mol_type = other DNA
tacaaaagaaagaaaacagg

SEQ ID NO: 100257 - DNA, 20 bp, synthetic construct
  source 1..20: mol_type = other DNA
ctacaaaagaaagaaaacag

SEQ ID NO: 100258 - DNA, 20 bp, synthetic construct
  source 1..20: mol_type = other DNA
tctacaaaagaaagaaaaca

SEQ ID NO: 100259 - DNA, 20 bp, synthetic construct
  source 1..20: mol_type = other DNA
ctctacaaaagaaagaaaac

SEQ ID NO: 100260 - DNA, 20 bp, synthetic construct
  source 1..20: mol_type = other DNA
cctctacaaaagaaagaaaa

SEQ ID NO: 100261 - DNA, 20 bp, synthetic construct
  source 1..20: mol_type = other DNA
tcctctacaaaagaaagaaa

SEQ ID NO: 100262 - DNA, 20 bp, synthetic construct
  source 1..20: mol_type = other DNA
atcctctacaaaagaaagaa

SEQ ID NO: 100263 - DNA, 20 bp, synthetic construct
  source 1..20: mol_type = other DNA
catcctctacaaaagaaaga

SEQ ID NO: 100264 - DNA, 20 bp, synthetic construct
  source 1..20: mol_type = other DNA
gcatcctctacaaaagaaag

SEQ ID NO: 100265 - DNA, 20 bp, synthetic construct
  source 1..20: mol_type = other DNA
ggcatcctctacaaaagaaa

SEQ ID NO: 100266 - DNA, 20 bp, synthetic construct
  source 1..20: mol_type = other DNA
tggcatcctctacaaaagaa

SEQ ID NO: 100267 - DNA, 20 bp, synthetic construct
  source 1..20: mol_type = other DNA
atggcatcctctacaaaaga

SEQ ID NO: 100268 - DNA, 20 bp, synthetic construct
  source 1..20: mol_type = other DNA
gatggcatcctctacaaaag

SEQ ID NO: 100269 - DNA, 20 bp, synthetic construct
  source 1..20: mol_type = other DNA
agatggcatcctctacaaaa

SEQ ID NO: 100270 - DNA, 20 bp, synthetic construct
  source 1..20: mol_type = other DNA
aagatggcatcctctacaaa

SEQ ID NO: 100271 - DNA, 20 bp, synthetic construct
  source 1..20: mol_type = other DNA
taagatggcatcctctacaa

SEQ ID NO: 100272 - DNA, 20 bp, synthetic construct
  source 1..20: mol_type = other DNA
ttaagatggcatcctctaca

SEQ ID NO: 100273 - DNA, 20 bp, synthetic construct
  source 1..20: mol_type = other DNA
tttaagatggcatcctctac

SEQ ID NO: 100274 - DNA, 20 bp, synthetic construct
  source 1..20: mol_type = other DNA
atttaagatggcatcctcta

SEQ ID NO: 100275 - DNA, 20 bp, synthetic construct
  source 1..20: mol_type = other DNA
gatttaagatggcatcctct

SEQ ID NO: 100276 - DNA, 20 bp, synthetic construct
  source 1..20: mol_type = other DNA
tgatttaagatggcatcctc

SEQ ID NO: 100277 - DNA, 20 bp, synthetic construct
  source 1..20: mol_type = other DNA
atgatttaagatggcatcct

SEQ ID NO: 100278 - DNA, 20 bp, synthetic construct
  source 1..20: mol_type = other DNA
gatgatttaagatggcatcc

SEQ ID NO: 100279 - DNA, 20 bp, synthetic construct
  source 1..20: mol_type = other DNA
agatgatttaagatggcatc

SEQ ID NO: 100280 - DNA, 20 bp, synthetic construct
  source 1..20: mol_type = other DNA
aagatgatttaagatggcat

SEQ ID NO: 100281 - DNA, 20 bp, synthetic construct
  source 1..20: mol_type = other DNA
gaagatgatttaagatggca

SEQ ID NO: 100282 - DNA, 20 bp, synthetic construct
  source 1..20: mol_type = other DNA
tgaagatgatttaagatggc

SEQ ID NO: 100283 - DNA, 20 bp, synthetic construct
  source 1..20: mol_type = other DNA
ctgaagatgatttaagatgg

SEQ ID NO: 100284 - DNA, 20 bp, synthetic construct
  source 1..20: mol_type = other DNA
gctgaagatgatttaagatg

SEQ ID NO: 100285 - DNA, 20 bp, synthetic construct
  source 1..20: mol_type = other DNA
ggctgaagatgatttaagat

SEQ ID NO: 100286 - DNA, 20 bp, synthetic construct
  source 1..20: mol_type = other DNA
tggctgaagatgatttaaga

SEQ ID NO: 100287 - DNA, 20 bp, synthetic construct
  source 1..20: mol_type = other DNA
ctggctgaagatgatttaag

SEQ ID NO: 100288 - DNA, 20 bp, synthetic construct
  source 1..20: mol_type = other DNA
actggctgaagatgatttaa

SEQ ID NO: 100289 - DNA, 20 bp, synthetic construct
  source 1..20: mol_type = other DNA
cactggctgaagatgattta

SEQ ID NO: 100290 - DNA, 20 bp, synthetic construct
  source 1..20: mol_type = other DNA
ccactggctgaagatgattt

SEQ ID NO: 100291 - DNA, 20 bp, synthetic construct
  source 1..20: mol_type = other DNA
accactggctgaagatgatt

SEQ ID NO: 100292 - DNA, 20 bp, synthetic construct
  source 1..20: mol_type = other DNA
taccactggctgaagatgat

SEQ ID NO: 100293 - DNA, 20 bp, synthetic construct
  source 1..20: mol_type = other DNA
ctaccactggctgaagatga

SEQ ID NO: 100294 - DNA, 20 bp, synthetic construct
  source 1..20: mol_type = other DNA
gctaccactggctgaagatg

SEQ ID NO: 100295 - DNA, 20 bp, synthetic construct
  source 1..20: mol_type = other DNA
tgctaccactggctgaagat

SEQ ID NO: 100296 - DNA, 20 bp, synthetic construct
  source 1..20: mol_type = other DNA
atgctaccactggctgaaga

SEQ ID NO: 100297 - DNA, 20 bp, synthetic construct
  source 1..20: mol_type = other DNA
aatgctaccactggctgaag

SEQ ID NO: 100298 - DNA, 20 bp, synthetic construct
  source 1..20: mol_type = other DNA
aaatgctaccactggctgaa

SEQ ID NO: 100299 - DNA, 20 bp, synthetic construct
  source 1..20: mol_type = other DNA
aaaatgctaccactggctga

SEQ ID NO: 100300 - DNA, 20 bp, synthetic construct
  source 1..20: mol_type = other DNA
taaaatgctaccactggctg

SEQ ID NO: 100301 - DNA, 20 bp, synthetic construct
  source 1..20: mol_type = other DNA
ataaaatgctaccactggct

SEQ ID NO: 100302 - DNA, 20 bp, synthetic construct
  source 1..20: mol_type = other DNA
aataaaatgctaccactggc

SEQ ID NO: 100303 - DNA, 20 bp, synthetic construct
  source 1..20: mol_type = other DNA
aaataaaatgctaccactgg

SEQ ID NO: 100304 - DNA, 20 bp, synthetic construct
  source 1..20: mol_type = other DNA
aaaataaaatgctaccactg

SEQ ID NO: 100305 - DNA, 20 bp, synthetic construct
  source 1..20: mol_type = other DNA
aaaaataaaatgctaccact

SEQ ID NO: 100306 - DNA, 20 bp, synthetic construct
  source 1..20: mol_type = other DNA
aaaaaataaaatgctaccac

SEQ ID NO: 100307 - DNA, 20 bp, synthetic construct
  source 1..20: mol_type = other DNA
gaaaaaataaaatgctacca

SEQ ID NO: 100308 - DNA, 20 bp, synthetic construct
  source 1..20: mol_type = other DNA
agaaaaaataaaatgctacc

SEQ ID NO: 100309 - DNA, 20 bp, synthetic construct
  source 1..20: mol_type = other DNA
cagaaaaaataaaatgctac

SEQ ID NO: 100310 - DNA, 20 bp, synthetic construct
  source 1..20: mol_type = other DNA
ccagaaaaaataaaatgcta

SEQ ID NO: 100311 - DNA, 20 bp, synthetic construct
  source 1..20: mol_type = other DNA
accagaaaaaataaaatgct

SEQ ID NO: 100312 - DNA, 20 bp, synthetic construct
  source 1..20: mol_type = other DNA
gaccagaaaaaataaaatgc

SEQ ID NO: 100313 - DNA, 20 bp, synthetic construct
  source 1..20: mol_type = other DNA
agaccagaaaaaataaaatg

SEQ ID NO: 100314 - DNA, 20 bp, synthetic construct
  source 1..20: mol_type = other DNA
cagaccagaaaaaataaaat

SEQ ID NO: 100315 - DNA, 20 bp, synthetic construct
  source 1..20: mol_type = other DNA
gcagaccagaaaaaataaaa

SEQ ID NO: 100316 - DNA, 20 bp, synthetic construct
  source 1..20: mol_type = other DNA
tgcagaccagaaaaaataaa

SEQ ID NO: 100317 - DNA, 20 bp, synthetic construct
  source 1..20: mol_type = other DNA
ttgcagaccagaaaaaataa

SEQ ID NO: 100318 - DNA, 20 bp, synthetic construct
  source 1..20: mol_type = other DNA
tttgcagaccagaaaaaata

SEQ ID NO: 100319 - DNA, 20 bp, synthetic construct
  source 1..20: mol_type = other DNA
gtttgcagaccagaaaaaat

SEQ ID NO: 100320 - DNA, 20 bp, synthetic construct
  source 1..20: mol_type = other DNA
agtttgcagaccagaaaaaa

SEQ ID NO: 100321 - DNA, 20 bp, synthetic construct
  source 1..20: mol_type = other DNA
aagtttgcagaccagaaaaa

SEQ ID NO: 100322 - DNA, 20 bp, synthetic construct
  source 1..20: mol_type = other DNA
taagtttgcagaccagaaaa

SEQ ID NO: 100323 - DNA, 20 bp, synthetic construct
  source 1..20: mol_type = other DNA
ttaagtttgcagaccagaaa

SEQ ID NO: 100324 - DNA, 20 bp, synthetic construct
  source 1..20: mol_type = other DNA
tttaagtttgcagaccagaa

SEQ ID NO: 100325 - DNA, 20 bp, synthetic construct
  source 1..20: mol_type = other DNA
ttttaagtttgcagaccaga

SEQ ID NO: 100326 - DNA, 20 bp, synthetic construct
  source 1..20: mol_type = other DNA
tttttaagtttgcagaccag

SEQ ID NO: 100327 - DNA, 20 bp, synthetic construct
  source 1..20: mol_type = other DNA
gtttttaagtttgcagacca

SEQ ID NO: 100328 - DNA, 20 bp, synthetic construct
  source 1..20: mol_type = other DNA
ggtttttaagtttgcagacc

SEQ ID NO: 100329 - DNA, 20 bp, synthetic construct
  source 1..20: mol_type = other DNA
aggtttttaagtttgcagac

SEQ ID NO: 100330 - DNA, 20 bp, synthetic construct
  source 1..20: mol_type = other DNA
gaggtttttaagtttgcaga

SEQ ID NO: 100331 - DNA, 20 bp, synthetic construct
  source 1..20: mol_type = other DNA
tgaggtttttaagtttgcag

SEQ ID NO: 100332 - DNA, 20 bp, synthetic construct
  source 1..20: mol_type = other DNA
atgaggtttttaagtttgca

SEQ ID NO: 100333 - DNA, 20 bp, synthetic construct
  source 1..20: mol_type = other DNA
gatgaggtttttaagtttgc

SEQ ID NO: 100334 - DNA, 20 bp, synthetic construct
  source 1..20: mol_type = other DNA
tgatgaggtttttaagtttg

SEQ ID NO: 100335 - DNA, 20 bp, synthetic construct
  source 1..20: mol_type = other DNA
gtgatgaggtttttaagttt

SEQ ID NO: 100336 - DNA, 20 bp, synthetic construct
  source 1..20: mol_type = other DNA
agtgatgaggtttttaagtt

SEQ ID NO: 100337 - DNA, 20 bp, synthetic construct
  source 1..20: mol_type = other DNA
aagtgatgaggtttttaagt

SEQ ID NO: 100338 - DNA, 20 bp, synthetic construct
  source 1..20: mol_type = other DNA
taagtgatgaggtttttaag

SEQ ID NO: 100339 - DNA, 20 bp, synthetic construct
  source 1..20: mol_type = other DNA
ataagtgatgaggtttttaa

SEQ ID NO: 100340 - DNA, 20 bp, synthetic construct
  source 1..20: mol_type = other DNA
aataagtgatgaggttttta

SEQ ID NO: 100341 - DNA, 20 bp, synthetic construct
  source 1..20: mol_type = other DNA
aaataagtgatgaggttttt

SEQ ID NO: 100342 - DNA, 20 bp, synthetic construct
  source 1..20: mol_type = other DNA
aaaataagtgatgaggtttt

SEQ ID NO: 100343 - DNA, 20 bp, synthetic construct
  source 1..20: mol_type = other DNA
caaaataagtgatgaggttt

SEQ ID NO: 100344 - DNA, 20 bp, synthetic construct
  source 1..20: mol_type = other DNA
gcaaaataagtgatgaggtt

SEQ ID NO: 100345 - DNA, 20 bp, synthetic construct
  source 1..20: mol_type = other DNA
agcaaaataagtgatgaggt

SEQ ID NO: 100346 - DNA, 20 bp, synthetic construct
  source 1..20: mol_type = other DNA
tagcaaaataagtgatgagg

SEQ ID NO: 100347 - DNA, 20 bp, synthetic construct
  source 1..20: mol_type = other DNA
ttagcaaaataagtgatgag

SEQ ID NO: 100348 - DNA, 20 bp, synthetic construct
  source 1..20: mol_type = other DNA
attagcaaaataagtgatga

SEQ ID NO: 100349 - DNA, 20 bp, synthetic construct
  source 1..20: mol_type = other DNA
tattagcaaaataagtgatg

SEQ ID NO: 100350 - DNA, 20 bp, synthetic construct
  source 1..20: mol_type = other DNA
atattagcaaaataagtgat

SEQ ID NO: 100351 - DNA, 20 bp, synthetic construct
  source 1..20: mol_type = other DNA
gatattagcaaaataagtga

SEQ ID NO: 100352 - DNA, 20 bp, synthetic construct
  source 1..20: mol_type = other DNA
agatattagcaaaataagtg

SEQ ID NO: 100353 - DNA, 20 bp, synthetic construct
  source 1..20: mol_type = other DNA
aagatattagcaaaataagt

SEQ ID NO: 100354 - DNA, 20 bp, synthetic construct
  source 1..20: mol_type = other DNA
aaagatattagcaaaataag

SEQ ID NO: 100355 - DNA, 20 bp, synthetic construct
  source 1..20: mol_type = other DNA
caaagatattagcaaaataa

SEQ ID NO: 100356 - DNA, 20 bp, synthetic construct
  source 1..20: mol_type = other DNA
acaaagatattagcaaaata

SEQ ID NO: 100357 - DNA, 20 bp, synthetic construct
  source 1..20: mol_type = other DNA
gacaaagatattagcaaaat

SEQ ID NO: 100358 - DNA, 20 bp, synthetic construct
  source 1..20: mol_type = other DNA
agacaaagatattagcaaaa

SEQ ID NO: 100359 - DNA, 20 bp, synthetic construct
  source 1..20: mol_type = other DNA
aagacaaagatattagcaaa

SEQ ID NO: 100360 - DNA, 20 bp, synthetic construct
  source 1..20: mol_type = other DNA
gaagacaaagatattagcaa

SEQ ID NO: 100361 - DNA, 20 bp, synthetic construct
  source 1..20: mol_type = other DNA
agaagacaaagatattagca

SEQ ID NO: 100362 - DNA, 20 bp, synthetic construct
  source 1..20: mol_type = other DNA
cagaagacaaagatattagc

SEQ ID NO: 100363 - DNA, 20 bp, synthetic construct
  source 1..20: mol_type = other DNA
acagaagacaaagatattag

SEQ ID NO: 100364 - DNA, 20 bp, synthetic construct
  source 1..20: mol_type = other DNA
aacagaagacaaagatatta

SEQ ID NO: 100365 - DNA, 20 bp, synthetic construct
  source 1..20: mol_type = other DNA
gaacagaagacaaagatatt

SEQ ID NO: 100366 - DNA, 20 bp, synthetic construct
  source 1..20: mol_type = other DNA
agaacagaagacaaagatat

SEQ ID NO: 100367 - DNA, 20 bp, synthetic construct
  source 1..20: mol_type = other DNA
aagaacagaagacaaagata

SEQ ID NO: 100368 - DNA, 20 bp, synthetic construct
  source 1..20: mol_type = other DNA
aaagaacagaagacaaagat

SEQ ID NO: 100369 - DNA, 20 bp, synthetic construct
  source 1..20: mol_type = other DNA
aaaagaacagaagacaaaga

SEQ ID NO: 100370 - DNA, 20 bp, synthetic construct
  source 1..20: mol_type = other DNA
aaaaagaacagaagacaaag

SEQ ID NO: 100371 - DNA, 20 bp, synthetic construct
  source 1..20: mol_type = other DNA
caaaaagaacagaagacaaa

SEQ ID NO: 100372 - DNA, 20 bp, synthetic construct
  source 1..20: mol_type = other DNA
tcaaaaagaacagaagacaa

SEQ ID NO: 100373 - DNA, 20 bp, synthetic construct
  source 1..20: mol_type = other DNA
atcaaaaagaacagaagaca

SEQ ID NO: 100374 - DNA, 20 bp, synthetic construct
  source 1..20: mol_type = other DNA
catcaaaaagaacagaagac

SEQ ID NO: 100375 - DNA, 20 bp, synthetic construct
  source 1..20: mol_type = other DNA
ccatcaaaaagaacagaaga

SEQ ID NO: 100376 - DNA, 20 bp, synthetic construct
  source 1..20: mol_type = other DNA
accatcaaaaagaacagaag

SEQ ID NO: 100377 - DNA, 20 bp, synthetic construct
  source 1..20: mol_type = other DNA
gaccatcaaaaagaacagaa

SEQ ID NO: 100378 - DNA, 20 bp, synthetic construct
  source 1..20: mol_type = other DNA
ggaccatcaaaaagaacaga

SEQ ID NO: 100379 - DNA, 20 bp, synthetic construct
  source 1..20: mol_type = other DNA
aggaccatcaaaaagaacag

SEQ ID NO: 100380 - DNA, 20 bp, synthetic construct
  source 1..20: mol_type = other DNA
aaggaccatcaaaaagaaca

SEQ ID NO: 100381 - DNA, 20 bp, synthetic construct
  source 1..20: mol_type = other DNA
caaggaccatcaaaaagaac

SEQ ID NO: 100382 - DNA, 20 bp, synthetic construct
  source 1..20: mol_type = other DNA
ccaaggaccatcaaaaagaa

SEQ ID NO: 100383 - DNA, 20 bp, synthetic construct
  source 1..20: mol_type = other DNA
accaaggaccatcaaaaaga

SEQ ID NO: 100384 - DNA, 20 bp, synthetic construct
  source 1..20: mol_type = other DNA
aaccaaggaccatcaaaaag

SEQ ID NO: 100385 - DNA, 20 bp, synthetic construct
  source 1..20: mol_type = other DNA
aaaccaaggaccatcaaaaa

SEQ ID NO: 100386 - DNA, 20 bp, synthetic construct
  source 1..20: mol_type = other DNA
aaaaccaaggaccatcaaaa

SEQ ID NO: 100387 - DNA, 20 bp, synthetic construct
  source 1..20: mol_type = other DNA
caaaaccaaggaccatcaaa

SEQ ID NO: 100388 - DNA, 20 bp, synthetic construct
  source 1..20: mol_type = other DNA
gcaaaaccaaggaccatcaa

SEQ ID NO: 100389 - DNA, 20 bp, synthetic construct
  source 1..20: mol_type = other DNA
tgcaaaaccaaggaccatca

SEQ ID NO: 100390 - DNA, 20 bp, synthetic construct
  source 1..20: mol_type = other DNA
ctgcaaaaccaaggaccatc

SEQ ID NO: 100391 - DNA, 20 bp, synthetic construct
  source 1..20: mol_type = other DNA
actgcaaaaccaaggaccat

SEQ ID NO: 100392 - DNA, 20 bp, synthetic construct
  source 1..20: mol_type = other DNA
gactgcaaaaccaaggacca

SEQ ID NO: 100393 - DNA, 20 bp, synthetic construct
  source 1..20: mol_type = other DNA
agactgcaaaaccaaggacc

SEQ ID NO: 100394 - DNA, 20 bp, synthetic construct
  source 1..20: mol_type = other DNA
tagactgcaaaaccaaggac

SEQ ID NO: 100395 - DNA, 20 bp, synthetic construct
  source 1..20: mol_type = other DNA
gtagactgcaaaaccaagga

SEQ ID NO: 100396 - DNA, 20 bp, synthetic construct
  source 1..20: mol_type = other DNA
agtagactgcaaaaccaagg

SEQ ID NO: 100397 - DNA, 20 bp, synthetic construct
  source 1..20: mol_type = other DNA
aagtagactgcaaaaccaag

SEQ ID NO: 100398 - DNA, 20 bp, synthetic construct
  source 1..20: mol_type = other DNA
aaagtagactgcaaaaccaa

SEQ ID NO: 100399 - DNA, 20 bp, synthetic construct
  source 1..20: mol_type = other DNA
taaagtagactgcaaaacca

SEQ ID NO: 100400 - DNA, 20 bp, synthetic construct
  source 1..20: mol_type = other DNA
ttaaagtagactgcaaaacc

SEQ ID NO: 100401 - DNA, 20 bp, synthetic construct
  source 1..20: mol_type = other DNA
tttaaagtagactgcaaaac

SEQ ID NO: 100402 - DNA, 20 bp, synthetic construct
  source 1..20: mol_type = other DNA
ctttaaagtagactgcaaaa

SEQ ID NO: 100403 - DNA, 20 bp, synthetic construct
  source 1..20: mol_type = other DNA
cctttaaagtagactgcaaa

SEQ ID NO: 100404 - DNA, 20 bp, synthetic construct
  source 1..20: mol_type = other DNA
acctttaaagtagactgcaa

SEQ ID NO: 100405 - DNA, 20 bp, synthetic construct
  source 1..20: mol_type = other DNA
aacctttaaagtagactgca

SEQ ID NO: 100406 - DNA, 20 bp, synthetic construct
  source 1..20: mol_type = other DNA
aaacctttaaagtagactgc

SEQ ID NO: 100407 - DNA, 20 bp, synthetic construct
  source 1..20: mol_type = other DNA
aaaacctttaaagtagactg

SEQ ID NO: 100408 - DNA, 20 bp, synthetic construct
  source 1..20: mol_type = other DNA
aaaaacctttaaagtagact

SEQ ID NO: 100409 - DNA, 20 bp, synthetic construct
  source 1..20: mol_type = other DNA
taaaaacctttaaagtagac

SEQ ID NO: 100410 - DNA, 20 bp, synthetic construct
  source 1..20: mol_type = other DNA
ataaaaacctttaaagtaga

SEQ ID NO: 100411 - DNA, 20 bp, synthetic construct
  source 1..20: mol_type = other DNA
aataaaaacctttaaagtag

SEQ ID NO: 100412 - DNA, 20 bp, synthetic construct
  source 1..20: mol_type = other DNA
aaataaaaacctttaaagta

SEQ ID NO: 100413 - DNA, 20 bp, synthetic construct
  source 1..20: mol_type = other DNA
aaaataaaaacctttaaagt

SEQ ID NO: 100414 - DNA, 20 bp, synthetic construct
  source 1..20: mol_type = other DNA
aaaaataaaaacctttaaag

SEQ ID NO: 100415 - DNA, 20 bp, synthetic construct
  source 1..20: mol_type = other DNA
aaaaaataaaaacctttaaa

SEQ ID NO: 100416 - DNA, 20 bp, synthetic construct
  source 1..20: mol_type = other DNA
aaaaaaataaaaacctttaa

SEQ ID NO: 100417 - DNA, 20 bp, synthetic construct
  source 1..20: mol_type = other DNA
taaaaaaataaaaaccttta

SEQ ID NO: 100418 - DNA, 20 bp, synthetic construct
  source 1..20: mol_type = other DNA
ataaaaaaataaaaaccttt

SEQ ID NO: 100419 - DNA, 20 bp, synthetic construct
  source 1..20: mol_type = other DNA
cataaaaaaataaaaacctt

SEQ ID NO: 100420 - DNA, 20 bp, synthetic construct
  source 1..20: mol_type = other DNA
ccataaaaaaataaaaacct

SEQ ID NO: 100421 - DNA, 20 bp, synthetic construct
  source 1..20: mol_type = other DNA
cccataaaaaaataaaaacc

SEQ ID NO: 100422 - DNA, 20 bp, synthetic construct
  source 1..20: mol_type = other DNA
acccataaaaaaataaaaac

SEQ ID NO: 100423 - DNA, 20 bp, synthetic construct
  source 1..20: mol_type = other DNA
tacccataaaaaaataaaaa

SEQ ID NO: 100424 - DNA, 20 bp, synthetic construct
  source 1..20: mol_type = other DNA
gtacccataaaaaaataaaa

SEQ ID NO: 100425 - DNA, 20 bp, synthetic construct
  source 1..20: mol_type = other DNA
tgtacccataaaaaaataaa

SEQ ID NO: 100426 - DNA, 20 bp, synthetic construct
  source 1..20: mol_type = other DNA
atgtacccataaaaaaataa

SEQ ID NO: 100427 - DNA, 20 bp, synthetic construct
  source 1..20: mol_type = other DNA
tatgtacccataaaaaaata

SEQ ID NO: 100428 - DNA, 20 bp, synthetic construct
  source 1..20: mol_type = other DNA
ctatgtacccataaaaaaat

SEQ ID NO: 100429 - DNA, 20 bp, synthetic construct
  source 1..20: mol_type = other DNA
actatgtacccataaaaaaa

SEQ ID NO: 100430 - DNA, 20 bp, synthetic construct
  source 1..20: mol_type = other DNA
tactatgtacccataaaaaa

SEQ ID NO: 100431 - DNA, 20 bp, synthetic construct
  source 1..20: mol_type = other DNA
ctactatgtacccataaaaa

SEQ ID NO: 100432 - DNA, 20 bp, synthetic construct
  source 1..20: mol_type = other DNA
tctactatgtacccataaaa

SEQ ID NO: 100433 - DNA, 20 bp, synthetic construct
  source 1..20: mol_type = other DNA
gtctactatgtacccataaa

SEQ ID NO: 100434 - DNA, 20 bp, synthetic construct
  source 1..20: mol_type = other DNA
cgtctactatgtacccataa

SEQ ID NO: 100435 - DNA, 20 bp, synthetic construct
  source 1..20: mol_type = other DNA
acgtctactatgtacccata

SEQ ID NO: 100436 - DNA, 20 bp, synthetic construct
  source 1..20: mol_type = other DNA
tacgtctactatgtacccat

SEQ ID NO: 100437 - DNA, 20 bp, synthetic construct
  source 1..20: mol_type = other DNA
atacgtctactatgtaccca

SEQ ID NO: 100438 - DNA, 20 bp, synthetic construct
  source 1..20: mol_type = other DNA
aatacgtctactatgtaccc

SEQ ID NO: 100439 - DNA, 20 bp, synthetic construct
  source 1..20: mol_type = other DNA
taatacgtctactatgtacc

SEQ ID NO: 100440 - DNA, 20 bp, synthetic construct
  source 1..20: mol_type = other DNA
ataatacgtctactatgtac

SEQ ID NO: 100441 - DNA, 20 bp, synthetic construct
  source 1..20: mol_type = other DNA
aataatacgtctactatgta

SEQ ID NO: 100442 - DNA, 20 bp, synthetic construct
  source 1..20: mol_type = other DNA
gaataatacgtctactatgt

SEQ ID NO: 100443 - DNA, 20 bp, synthetic construct
  source 1..20: mol_type = other DNA
tgaataatacgtctactatg

SEQ ID NO: 100444 - DNA, 20 bp, synthetic construct
  source 1..20: mol_type = other DNA
atgaataatacgtctactat

SEQ ID NO: 100445 - DNA, 20 bp, synthetic construct
  source 1..20: mol_type = other DNA
tatgaataatacgtctacta

SEQ ID NO: 100446 - DNA, 20 bp, synthetic construct
  source 1..20: mol_type = other DNA
ctatgaataatacgtctact

SEQ ID NO: 100447 - DNA, 20 bp, synthetic construct
  source 1..20: mol_type = other DNA
cctatgaataatacgtctac

SEQ ID NO: 100448 - DNA, 20 bp, synthetic construct
  source 1..20: mol_type = other DNA
ccctatgaataatacgtcta

SEQ ID NO: 100449 - DNA, 20 bp, synthetic construct
  source 1..20: mol_type = other DNA
accctatgaataatacgtct

SEQ ID NO: 100450 - DNA, 20 bp, synthetic construct
  source 1..20: mol_type = other DNA
gaccctatgaataatacgtc

SEQ ID NO: 100451 - DNA, 20 bp, synthetic construct
  source 1..20: mol_type = other DNA
agaccctatgaataatacgt

SEQ ID NO: 100452 - DNA, 20 bp, synthetic construct
  source 1..20: mol_type = other DNA
cagaccctatgaataatacg

SEQ ID NO: 100453 - DNA, 20 bp, synthetic construct
  source 1..20: mol_type = other DNA
acagaccctatgaataatac

SEQ ID NO: 100454 - DNA, 20 bp, synthetic construct
  source 1..20: mol_type = other DNA
cacagaccctatgaataata

SEQ ID NO: 100455 - DNA, 20 bp, synthetic construct
  source 1..20: mol_type = other DNA
tcacagaccctatgaataat

SEQ ID NO: 100456 - DNA, 20 bp, synthetic construct
  source 1..20: mol_type = other DNA
ctcacagaccctatgaataa

SEQ ID NO: 100457 - DNA, 20 bp, synthetic construct
  source 1..20: mol_type = other DNA
tctcacagaccctatgaata

SEQ ID NO: 100458 - DNA, 20 bp, synthetic construct
  source 1..20: mol_type = other DNA
atctcacagaccctatgaat

SEQ ID NO: 100459 - DNA, 20 bp, synthetic construct
  source 1..20: mol_type = other DNA
tatctcacagaccctatgaa

SEQ ID NO: 100460 - DNA, 20 bp, synthetic construct
  source 1..20: mol_type = other DNA
atatctcacagaccctatga

SEQ ID NO: 100461 - DNA, 20 bp, synthetic construct
  source 1..20: mol_type = other DNA
aatatctcacagaccctatg

SEQ ID NO: 100462 - DNA, 20 bp, synthetic construct
  source 1..20: mol_type = other DNA
aaatatctcacagaccctat

SEQ ID NO: 100463 - DNA, 20 bp, synthetic construct
  source 1..20: mol_type = other DNA
taaatatctcacagacccta

SEQ ID NO: 100464 - DNA, 20 bp, synthetic construct
  source 1..20: mol_type = other DNA
ctaaatatctcacagaccct

SEQ ID NO: 100465 - DNA, 20 bp, synthetic construct
  source 1..20: mol_type = other DNA
tctaaatatctcacagaccc

SEQ ID NO: 100466 - DNA, 20 bp, synthetic construct
  source 1..20: mol_type = other DNA
atctaaatatctcacagacc

SEQ ID NO: 100467 - DNA, 20 bp, synthetic construct
  source 1..20: mol_type = other DNA
tatctaaatatctcacagac

SEQ ID NO: 100468 - DNA, 20 bp, synthetic construct
  source 1..20: mol_type = other DNA
ttatctaaatatctcacaga

SEQ ID NO: 100469 - DNA, 20 bp, synthetic construct
  source 1..20: mol_type = other DNA
tttatctaaatatctcacag

SEQ ID NO: 100470 - DNA, 20 bp, synthetic construct
  source 1..20: mol_type = other DNA
ctttatctaaatatctcaca

SEQ ID NO: 100471 - DNA, 20 bp, synthetic construct
  source 1..20: mol_type = other DNA
cctttatctaaatatctcac

SEQ ID NO: 100472 - DNA, 20 bp, synthetic construct
  source 1..20: mol_type = other DNA
gcctttatctaaatatctca

SEQ ID NO: 100473 - DNA, 20 bp, synthetic construct
  source 1..20: mol_type = other DNA
tgcctttatctaaatatctc

SEQ ID NO: 100474 - DNA, 20 bp, synthetic construct
  source 1..20: mol_type = other DNA
atgcctttatctaaatatct

SEQ ID NO: 100475 - DNA, 20 bp, synthetic construct
  source 1..20: mol_type = other DNA
tatgcctttatctaaatatc

SEQ ID NO: 100476 - DNA, 20 bp, synthetic construct
  source 1..20: mol_type = other DNA
atatgcctttatctaaatat

SEQ ID NO: 100477 - DNA, 20 bp, synthetic construct
  source 1..20: mol_type = other DNA
tatatgcctttatctaaata

SEQ ID NO: 100478 - DNA, 20 bp, synthetic construct
  source 1..20: mol_type = other DNA
ttatatgcctttatctaaat

SEQ ID NO: 100479 - DNA, 20 bp, synthetic construct
  source 1..20: mol_type = other DNA
attatatgcctttatctaaa

SEQ ID NO: 100480 - DNA, 20 bp, synthetic construct
  source 1..20: mol_type = other DNA
cattatatgcctttatctaa

SEQ ID NO: 100481 - DNA, 20 bp, synthetic construct
  source 1..20: mol_type = other DNA
acattatatgcctttatcta

SEQ ID NO: 100482 - DNA, 20 bp, synthetic construct
  source 1..20: mol_type = other DNA
cacattatatgcctttatct

SEQ ID NO: 100483 - DNA, 20 bp, synthetic construct
  source 1..20: mol_type = other DNA
acacattatatgcctttatc

SEQ ID NO: 100484 - DNA, 20 bp, synthetic construct
  source 1..20: mol_type = other DNA
tacacattatatgcctttat

SEQ ID NO: 100485 - DNA, 20 bp, synthetic construct
  source 1..20: mol_type = other DNA
ttacacattatatgccttta

SEQ ID NO: 100486 - DNA, 20 bp, synthetic construct
  source 1..20: mol_type = other DNA
attacacattatatgccttt

SEQ ID NO: 100487 - DNA, 20 bp, synthetic construct
  source 1..20: mol_type = other DNA
tattacacattatatgcctt

SEQ ID NO: 100488 - DNA, 20 bp, synthetic construct
  source 1..20: mol_type = other DNA
ttattacacattatatgcct

SEQ ID NO: 100489 - DNA, 20 bp, synthetic construct
  source 1..20: mol_type = other DNA
attattacacattatatgcc

SEQ ID NO: 100490 - DNA, 20 bp, synthetic construct
  source 1..20: mol_type = other DNA
gattattacacattatatgc

SEQ ID NO: 100491 - DNA, 20 bp, synthetic construct
  source 1..20: mol_type = other DNA
tgattattacacattatatg

SEQ ID NO: 100492 - DNA, 20 bp, synthetic construct
  source 1..20: mol_type = other DNA
gtgattattacacattatat

SEQ ID NO: 100493 - DNA, 20 bp, synthetic construct
  source 1..20: mol_type = other DNA
tgtgattattacacattata

SEQ ID NO: 100494 - DNA, 20 bp, synthetic construct
  source 1..20: mol_type = other DNA
atgtgattattacacattat

SEQ ID NO: 100495 - DNA, 20 bp, synthetic construct
  source 1..20: mol_type = other DNA
aatgtgattattacacatta

SEQ ID NO: 100496 - DNA, 20 bp, synthetic construct
  source 1..20: mol_type = other DNA
taatgtgattattacacatt

SEQ ID NO: 100497 - DNA, 20 bp, synthetic construct
  source 1..20: mol_type = other DNA
ctaatgtgattattacacat

SEQ ID NO: 100498 - DNA, 20 bp, synthetic construct
  source 1..20: mol_type = other DNA
cctaatgtgattattacaca

SEQ ID NO: 100499 - DNA, 20 bp, synthetic construct
  source 1..20: mol_type = other DNA
ccctaatgtgattattacac

SEQ ID NO: 100500 - DNA, 20 bp, synthetic construct
  source 1..20: mol_type = other DNA
accctaatgtgattattaca

SEQ ID NO: 100501 - DNA, 20 bp, synthetic construct
  source 1..20: mol_type = other DNA
taccctaatgtgattattac

SEQ ID NO: 100502 - DNA, 20 bp, synthetic construct
  source 1..20: mol_type = other DNA
ttaccctaatgtgattatta

SEQ ID NO: 100503 - DNA, 20 bp, synthetic construct
  source 1..20: mol_type = other DNA
tttaccctaatgtgattatt

SEQ ID NO: 100504 - DNA, 20 bp, synthetic construct
  source 1..20: mol_type = other DNA
atttaccctaatgtgattat

SEQ ID NO: 100505 - DNA, 20 bp, synthetic construct
  source 1..20: mol_type = other DNA
catttaccctaatgtgatta

SEQ ID NO: 100506 - DNA, 20 bp, synthetic construct
  source 1..20: mol_type = other DNA
ccatttaccctaatgtgatt

SEQ ID NO: 100507 - DNA, 20 bp, synthetic construct
  source 1..20: mol_type = other DNA
cccatttaccctaatgtgat

SEQ ID NO: 100508 - DNA, 20 bp, synthetic construct
  source 1..20: mol_type = other DNA
ccccatttaccctaatgtga

SEQ ID NO: 100509 - DNA, 20 bp, synthetic construct
  source 1..20: mol_type = other DNA
accccatttaccctaatgtg

SEQ ID NO: 100510 - DNA, 20 bp, synthetic construct
  source 1..20: mol_type = other DNA
taccccatttaccctaatgt

SEQ ID NO: 100511 - DNA, 20 bp, synthetic construct
  source 1..20: mol_type = other DNA
ataccccatttaccctaatg

SEQ ID NO: 100512 - DNA, 20 bp, synthetic construct
  source 1..20: mol_type = other DNA
gataccccatttaccctaat

SEQ ID NO: 100513 - DNA, 20 bp, synthetic construct
  source 1..20: mol_type = other DNA
ggataccccatttaccctaa

SEQ ID NO: 100514 - DNA, 20 bp, synthetic construct
  source 1..20: mol_type = other DNA
tggataccccatttacccta

SEQ ID NO: 100515 - DNA, 20 bp, synthetic construct
  source 1..20: mol_type = other DNA
atggataccccatttaccct

SEQ ID NO: 100516 - DNA, 20 bp, synthetic construct
  source 1..20: mol_type = other DNA
gatggataccccatttaccc

SEQ ID NO: 100517 - DNA, 20 bp, synthetic construct
  source 1..20: mol_type = other DNA
tgatggataccccatttacc

SEQ ID NO: 100518 - DNA, 20 bp, synthetic construct
  source 1..20: mol_type = other DNA
gtgatggataccccatttac

SEQ ID NO: 100519 - DNA, 20 bp, synthetic construct
  source 1..20: mol_type = other DNA
ggtgatggataccccattta

SEQ ID NO: 100520 - DNA, 20 bp, synthetic construct
  source 1..20: mol_type = other DNA
tggtgatggataccccattt

SEQ ID NO: 100521 - DNA, 20 bp, synthetic construct
  source 1..20: mol_type = other DNA
atggtgatggataccccatt

SEQ ID NO: 100522 - DNA, 20 bp, synthetic construct
  source 1..20: mol_type = other DNA
gatggtgatggataccccat

SEQ ID NO: 100523 - DNA, 20 bp, synthetic construct
  source 1..20: mol_type = other DNA
tgatggtgatggatacccca

SEQ ID NO: 100524 - DNA, 20 bp, synthetic construct
  source 1..20: mol_type = other DNA
atgatggtgatggatacccc

SEQ ID NO: 100525 - DNA, 20 bp, synthetic construct
  source 1..20: mol_type = other DNA
gatgatggtgatggataccc

SEQ ID NO: 100526 - DNA, 20 bp, synthetic construct
  source 1..20: mol_type = other DNA
tgatgatggtgatggatacc

SEQ ID NO: 100527 - DNA, 20 bp, synthetic construct
  source 1..20: mol_type = other DNA
atgatgatggtgatggatac

SEQ ID NO: 100528 - DNA, 20 bp, synthetic construct
  source 1..20: mol_type = other DNA
aatgatgatggtgatggata

SEQ ID NO: 100529 - DNA, 20 bp, synthetic construct
  source 1..20: mol_type = other DNA
gaatgatgatggtgatggat

SEQ ID NO: 100530 - DNA, 20 bp, synthetic construct
  source 1..20: mol_type = other DNA
tgaatgatgatggtgatgga

SEQ ID NO: 100531 - DNA, 20 bp, synthetic construct
  source 1..20: mol_type = other DNA
atgaatgatgatggtgatgg

SEQ ID NO: 100532 - DNA, 20 bp, synthetic construct
  source 1..20: mol_type = other DNA
gatgaatgatgatggtgatg

SEQ ID NO: 100533 - DNA, 20 bp, synthetic construct
  source 1..20: mol_type = other DNA
tgatgaatgatgatggtgat

SEQ ID NO: 100534 - DNA, 20 bp, synthetic construct
  source 1..20: mol_type = other DNA
atgatgaatgatgatggtga

SEQ ID NO: 100535 - DNA, 20 bp, synthetic construct
  source 1..20: mol_type = other DNA
aatgatgaatgatgatggtg

SEQ ID NO: 100536 - DNA, 20 bp, synthetic construct
  source 1..20: mol_type = other DNA
aaatgatgaatgatgatggt

SEQ ID NO: 100537 - DNA, 20 bp, synthetic construct
  source 1..20: mol_type = other DNA
gaaatgatgaatgatgatgg

SEQ ID NO: 100538 - DNA, 20 bp, synthetic construct
  source 1..20: mol_type = other DNA
agaaatgatgaatgatgatg

SEQ ID NO: 100539 - DNA, 20 bp, synthetic construct
  source 1..20: mol_type = other DNA
aagaaatgatgaatgatgat

SEQ ID NO: 100540 - DNA, 20 bp, synthetic construct
  source 1..20: mol_type = other DNA
aaagaaatgatgaatgatga

SEQ ID NO: 100541 - DNA, 20 bp, synthetic construct
  source 1..20: mol_type = other DNA
caaagaaatgatgaatgatg

SEQ ID NO: 100542 - DNA, 20 bp, synthetic construct
  source 1..20: mol_type = other DNA
acaaagaaatgatgaatgat

SEQ ID NO: 100543 - DNA, 20 bp, synthetic construct
  source 1..20: mol_type = other DNA
cacaaagaaatgatgaatga

SEQ ID NO: 100544 - DNA, 20 bp, synthetic construct
  source 1..20: mol_type = other DNA
acacaaagaaatgatgaatg

SEQ ID NO: 100545 - DNA, 20 bp, synthetic construct
  source 1..20: mol_type = other DNA
tacacaaagaaatgatgaat

SEQ ID NO: 100546 - DNA, 20 bp, synthetic construct
  source 1..20: mol_type = other DNA
ttacacaaagaaatgatgaa

SEQ ID NO: 100547 - DNA, 20 bp, synthetic construct
  source 1..20: mol_type = other DNA
attacacaaagaaatgatga

SEQ ID NO: 100548 - DNA, 20 bp, synthetic construct
  source 1..20: mol_type = other DNA
cattacacaaagaaatgatg

SEQ ID NO: 100549 - DNA, 20 bp, synthetic construct
  source 1..20: mol_type = other DNA
tcattacacaaagaaatgat

SEQ ID NO: 100550 - DNA, 20 bp, synthetic construct
  source 1..20: mol_type = other DNA
ttcattacacaaagaaatga

SEQ ID NO: 100551 - DNA, 20 bp, synthetic construct
  source 1..20: mol_type = other DNA
gttcattacacaaagaaatg

SEQ ID NO: 100552 - DNA, 20 bp, synthetic construct
  source 1..20: mol_type = other DNA
cgttcattacacaaagaaat

SEQ ID NO: 100553 - DNA, 20 bp, synthetic construct
  source 1..20: mol_type = other DNA
acgttcattacacaaagaaa

SEQ ID NO: 100554 - DNA, 20 bp, synthetic construct
  source 1..20: mol_type = other DNA
aacgttcattacacaaagaa

SEQ ID NO: 100555 - DNA, 20 bp, synthetic construct
  source 1..20: mol_type = other DNA
caacgttcattacacaaaga

SEQ ID NO: 100556 - DNA, 20 bp, synthetic construct
  source 1..20: mol_type = other DNA
gcaacgttcattacacaaag

SEQ ID NO: 100557 - DNA, 20 bp, synthetic construct
  source 1..20: mol_type = other DNA
tgcaacgttcattacacaaa

SEQ ID NO: 100558 - DNA, 20 bp, synthetic construct
  source 1..20: mol_type = other DNA
ttgcaacgttcattacacaa

SEQ ID NO: 100559 - DNA, 20 bp, synthetic construct
  source 1..20: mol_type = other DNA
attgcaacgttcattacaca

SEQ ID NO: 100560 - DNA, 20 bp, synthetic construct
  source 1..20: mol_type = other DNA
aattgcaacgttcattacac

SEQ ID NO: 100561 - DNA, 20 bp, synthetic construct
  source 1..20: mol_type = other DNA
caattgcaacgttcattaca

SEQ ID NO: 100562 - DNA, 20 bp, synthetic construct
  source 1..20: mol_type = other DNA
acaattgcaacgttcattac

SEQ ID NO: 100563 - DNA, 20 bp, synthetic construct
  source 1..20: mol_type = other DNA
tacaattgcaacgttcatta

SEQ ID NO: 100564 - DNA, 20 bp, synthetic construct
  source 1..20: mol_type = other DNA
gtacaattgcaacgttcatt

SEQ ID NO: 100565 - DNA, 20 bp, synthetic construct
  source 1..20: mol_type = other DNA
agtacaattgcaacgttcat

SEQ ID NO: 100566 - DNA, 20 bp, synthetic construct
  source 1..20: mol_type = other DNA
gagtacaattgcaacgttca

SEQ ID NO: 100567 - DNA, 20 bp, synthetic construct
  source 1..20: mol_type = other DNA
ggagtacaattgcaacgttc

SEQ ID NO: 100568 - DNA, 20 bp, synthetic construct
  source 1..20: mol_type = other DNA
gggagtacaattgcaacgtt

SEQ ID NO: 100569 - DNA, 20 bp, synthetic construct
  source 1..20: mol_type = other DNA
agggagtacaattgcaacgt

SEQ ID NO: 100570 - DNA, 20 bp, synthetic construct
  source 1..20: mol_type = other DNA
gagggagtacaattgcaacg

SEQ ID NO: 100571 - DNA, 20 bp, synthetic construct
  source 1..20: mol_type = other DNA
tgagggagtacaattgcaac

SEQ ID NO: 100572 - DNA, 20 bp, synthetic construct
  source 1..20: mol_type = other DNA
ctgagggagtacaattgcaa

SEQ ID NO: 100573 - DNA, 20 bp, synthetic construct
  source 1..20: mol_type = other DNA
actgagggagtacaattgca

SEQ ID NO: 100574 - DNA, 20 bp, synthetic construct
  source 1..20: mol_type = other DNA
aactgagggagtacaattgc

SEQ ID NO: 100575 - DNA, 20 bp, synthetic construct
  source 1..20: mol_type = other DNA
taactgagggagtacaattg

SEQ ID NO: 100576 - DNA, 20 bp, synthetic construct
  source 1..20: mol_type = other DNA
ataactgagggagtacaatt

SEQ ID NO: 100577 - DNA, 20 bp, synthetic construct
  source 1..20: mol_type = other DNA
aataactgagggagtacaat

SEQ ID NO: 100578 - DNA, 20 bp, synthetic construct
  source 1..20: mol_type = other DNA
gaataactgagggagtacaa

SEQ ID NO: 100579 - DNA, 20 bp, synthetic construct
  source 1..20: mol_type = other DNA
agaataactgagggagtaca

SEQ ID NO: 100580 - DNA, 20 bp, synthetic construct
  source 1..20: mol_type = other DNA
tagaataactgagggagtac

SEQ ID NO: 100581 - DNA, 20 bp, synthetic construct
  source 1..20: mol_type = other DNA
ttagaataactgagggagta

SEQ ID NO: 100582 - DNA, 20 bp, synthetic construct
  source 1..20: mol_type = other DNA
tttagaataactgagggagt

SEQ ID NO: 100583 - DNA, 20 bp, synthetic construct
  source 1..20: mol_type = other DNA
ttttagaataactgagggag

SEQ ID NO: 100584 - DNA, 20 bp, synthetic construct
  source 1..20: mol_type = other DNA
tttttagaataactgaggga

SEQ ID NO: 100585 - DNA, 20 bp, synthetic construct
  source 1..20: mol_type = other DNA
ctttttagaataactgaggg

SEQ ID NO: 100586 - DNA, 20 bp, synthetic construct
  source 1..20: mol_type = other DNA
actttttagaataactgagg

SEQ ID NO: 100587 - DNA, 20 bp, synthetic construct
  source 1..20: mol_type = other DNA
tactttttagaataactgag

SEQ ID NO: 100588 - DNA, 20 bp, synthetic construct
  source 1..20: mol_type = other DNA
gtactttttagaataactga

SEQ ID NO: 100589 - DNA, 20 bp, synthetic construct
  source 1..20: mol_type = other DNA
tgtactttttagaataactg

SEQ ID NO: 100590 - DNA, 20 bp, synthetic construct
  source 1..20: mol_type = other DNA
ttgtactttttagaataact

SEQ ID NO: 100591 - DNA, 20 bp, synthetic construct
  source 1..20: mol_type = other DNA
gttgtactttttagaataac

SEQ ID NO: 100592 - DNA, 20 bp, synthetic construct
  source 1..20: mol_type = other DNA
tgttgtactttttagaataa

SEQ ID NO: 100593 - DNA, 20 bp, synthetic construct
  source 1..20: mol_type = other DNA
ttgttgtactttttagaata

SEQ ID NO: 100594 - DNA, 20 bp, synthetic construct
  source 1..20: mol_type = other DNA
tttgttgtactttttagaat

SEQ ID NO: 100595 - DNA, 20 bp, synthetic construct
  source 1..20: mol_type = other DNA
atttgttgtactttttagaa

SEQ ID NO: 100596 - DNA, 20 bp, synthetic construct
  source 1..20: mol_type = other DNA
aatttgttgtactttttaga

SEQ ID NO: 100597 - DNA, 20 bp, synthetic construct
  source 1..20: mol_type = other DNA
taatttgttgtactttttag

SEQ ID NO: 100598 - DNA, 20 bp, synthetic construct
  source 1..20: mol_type = other DNA
ttaatttgttgtacttttta

SEQ ID NO: 100599 - DNA, 20 bp, synthetic construct
  source 1..20: mol_type = other DNA
attaatttgttgtacttttt

SEQ ID NO: 100600 - DNA, 20 bp, synthetic construct
  source 1..20: mol_type = other DNA
cattaatttgttgtactttt

SEQ ID NO: 100601 - DNA, 20 bp, synthetic construct
  source 1..20: mol_type = other DNA
gcattaatttgttgtacttt

SEQ ID NO: 100602 - DNA, 20 bp, synthetic construct
  source 1..20: mol_type = other DNA
agcattaatttgttgtactt

SEQ ID NO: 100603 - DNA, 20 bp, synthetic construct
  source 1..20: mol_type = other DNA
cagcattaatttgttgtact

SEQ ID NO: 100604 - DNA, 20 bp, synthetic construct
  source 1..20: mol_type = other DNA
tcagcattaatttgttgtac

SEQ ID NO: 100605 - DNA, 20 bp, synthetic construct
  source 1..20: mol_type = other DNA
gtcagcattaatttgttgta

SEQ ID NO: 100606 - DNA, 20 bp, synthetic construct
  source 1..20: mol_type = other DNA
agtcagcattaatttgttgt

SEQ ID NO: 100607 - DNA, 20 bp, synthetic construct
  source 1..20: mol_type = other DNA
cagtcagcattaatttgttg

SEQ ID NO: 100608 - DNA, 20 bp, synthetic construct
  source 1..20: mol_type = other DNA
acagtcagcattaatttgtt

SEQ ID NO: 100609 - DNA, 20 bp, synthetic construct
  source 1..20: mol_type = other DNA
tacagtcagcattaatttgt

SEQ ID NO: 100610 - DNA, 20 bp, synthetic construct
  source 1..20: mol_type = other DNA
ctacagtcagcattaatttg

SEQ ID NO: 100611 - DNA, 20 bp, synthetic construct
  source 1..20: mol_type = other DNA
actacagtcagcattaattt

SEQ ID NO: 100612 - DNA, 20 bp, synthetic construct
  source 1..20: mol_type = other DNA
gactacagtcagcattaatt

SEQ ID NO: 100613 - DNA, 20 bp, synthetic construct
  source 1..20: mol_type = other DNA
tgactacagtcagcattaat

SEQ ID NO: 100614 - DNA, 20 bp, synthetic construct
  source 1..20: mol_type = other DNA
gtgactacagtcagcattaa

SEQ ID NO: 100615 - DNA, 20 bp, synthetic construct
  source 1..20: mol_type = other DNA
ggtgactacagtcagcatta

SEQ ID NO: 100616 - DNA, 20 bp, synthetic construct
  source 1..20: mol_type = other DNA
gggtgactacagtcagcatt

SEQ ID NO: 100617 - DNA, 20 bp, synthetic construct
  source 1..20: mol_type = other DNA
agggtgactacagtcagcat

SEQ ID NO: 100618 - DNA, 20 bp, synthetic construct
  source 1..20: mol_type = other DNA
cagggtgactacagtcagca

SEQ ID NO: 100619 - DNA, 20 bp, synthetic construct
  source 1..20: mol_type = other DNA
gcagggtgactacagtcagc

SEQ ID NO: 100620 - DNA, 20 bp, synthetic construct
  source 1..20: mol_type = other DNA
agcagggtgactacagtcag

SEQ ID NO: 100621 - DNA, 20 bp, synthetic construct
  source 1..20: mol_type = other DNA
aagcagggtgactacagtca

SEQ ID NO: 100622 - DNA, 20 bp, synthetic construct
  source 1..20: mol_type = other DNA
aaagcagggtgactacagtc

SEQ ID NO: 100623 - DNA, 20 bp, synthetic construct
  source 1..20: mol_type = other DNA
caaagcagggtgactacagt

SEQ ID NO: 100624 - DNA, 20 bp, synthetic construct
  source 1..20: mol_type = other DNA
acaaagcagggtgactacag

SEQ ID NO: 100625 - DNA, 20 bp, synthetic construct
  source 1..20: mol_type = other DNA
aacaaagcagggtgactaca

SEQ ID NO: 100626 - DNA, 20 bp, synthetic construct
  source 1..20: mol_type = other DNA
caacaaagcagggtgactac

SEQ ID NO: 100627 - DNA, 20 bp, synthetic construct
  source 1..20: mol_type = other DNA
acaacaaagcagggtgacta

SEQ ID NO: 100628 - DNA, 20 bp, synthetic construct
  source 1..20: mol_type = other DNA
gacaacaaagcagggtgact

SEQ ID NO: 100629 - DNA, 20 bp, synthetic construct
  source 1..20: mol_type = other DNA
tgacaacaaagcagggtgac

SEQ ID NO: 100630 - DNA, 20 bp, synthetic construct
  source 1..20: mol_type = other DNA
ttgacaacaaagcagggtga

SEQ ID NO: 100631 - DNA, 20 bp, synthetic construct
  source 1..20: mol_type = other DNA
tttgacaacaaagcagggtg

SEQ ID NO: 100632 - DNA, 20 bp, synthetic construct
  source 1..20: mol_type = other DNA
atttgacaacaaagcagggt

SEQ ID NO: 100633 - DNA, 20 bp, synthetic construct
  source 1..20: mol_type = other DNA
tatttgacaacaaagcaggg

SEQ ID NO: 100634 - DNA, 20 bp, synthetic construct
  source 1..20: mol_type = other DNA
gtatttgacaacaaagcagg

SEQ ID NO: 100635 - DNA, 20 bp, synthetic construct
  source 1..20: mol_type = other DNA
agtatttgacaacaaagcag

SEQ ID NO: 100636 - DNA, 20 bp, synthetic construct
  source 1..20: mol_type = other DNA
tagtatttgacaacaaagca

SEQ ID NO: 100637 - DNA, 20 bp, synthetic construct
  source 1..20: mol_type = other DNA
ctagtatttgacaacaaagc

SEQ ID NO: 100638 - DNA, 20 bp, synthetic construct
  source 1..20: mol_type = other DNA
tctagtatttgacaacaaag

SEQ ID NO: 100639 - DNA, 20 bp, synthetic construct
  source 1..20: mol_type = other DNA
atctagtatttgacaacaaa

SEQ ID NO: 100640 - DNA, 20 bp, synthetic construct
  source 1..20: mol_type = other DNA
gatctagtatttgacaacaa

SEQ ID NO: 100641 - DNA, 20 bp, synthetic construct
  source 1..20: mol_type = other DNA
agatctagtatttgacaaca

SEQ ID NO: 100642 - DNA, 20 bp, synthetic construct
  source 1..20: mol_type = other DNA
aagatctagtatttgacaac

SEQ ID NO: 100643 - DNA, 20 bp, synthetic construct
  source 1..20: mol_type = other DNA
taagatctagtatttgacaa

SEQ ID NO: 100644 - DNA, 20 bp, synthetic construct
  source 1..20: mol_type = other DNA
ataagatctagtatttgaca

SEQ ID NO: 100645 - DNA, 20 bp, synthetic construct
  source 1..20: mol_type = other DNA
aataagatctagtatttgac

SEQ ID NO: 100646 - DNA, 20 bp, synthetic construct
  source 1..20: mol_type = other DNA
gaataagatctagtatttga

SEQ ID NO: 100647 - DNA, 20 bp, synthetic construct
  source 1..20: mol_type = other DNA
tgaataagatctagtatttg

SEQ ID NO: 100648 - DNA, 20 bp, synthetic construct
  source 1..20: mol_type = other DNA
atgaataagatctagtattt

SEQ ID NO: 100649 - DNA, 20 bp, synthetic construct
  source 1..20: mol_type = other DNA
aatgaataagatctagtatt

SEQ ID NO: 100650 - DNA, 20 bp, synthetic construct
  source 1..20: mol_type = other DNA
gaatgaataagatctagtat

SEQ ID NO: 100651 - DNA, 20 bp, synthetic construct
  source 1..20: mol_type = other DNA
agaatgaataagatctagta

SEQ ID NO: 100652 - DNA, 20 bp, synthetic construct
  source 1..20: mol_type = other DNA
aagaatgaataagatctagt

SEQ ID NO: 100653 - DNA, 20 bp, synthetic construct
  source 1..20: mol_type = other DNA
aaagaatgaataagatctag

SEQ ID NO: 100654 - DNA, 20 bp, synthetic construct
  source 1..20: mol_type = other DNA
taaagaatgaataagatcta

SEQ ID NO: 100655 - DNA, 20 bp, synthetic construct
  source 1..20: mol_type = other DNA
ataaagaatgaataagatct

SEQ ID NO: 100656 - DNA, 20 bp, synthetic construct
  source 1..20: mol_type = other DNA
aataaagaatgaataagatc

SEQ ID NO: 100657 - DNA, 20 bp, synthetic construct
  source 1..20: mol_type = other DNA
aaataaagaatgaataagat

SEQ ID NO: 100658 - DNA, 20 bp, synthetic construct
  source 1..20: mol_type = other DNA
taaataaagaatgaataaga

SEQ ID NO: 100659 - DNA, 20 bp, synthetic construct
  source 1..20: mol_type = other DNA
ttaaataaagaatgaataag

SEQ ID NO: 100660 - DNA, 20 bp, synthetic construct
  source 1..20: mol_type = other DNA
gttaaataaagaatgaataa

SEQ ID NO: 100661 - DNA, 20 bp, synthetic construct
  source 1..20: mol_type = other DNA
agttaaataaagaatgaata

SEQ ID NO: 100662 - DNA, 20 bp, synthetic construct
  source 1..20: mol_type = other DNA
aagttaaataaagaatgaat

SEQ ID NO: 100663 - DNA, 20 bp, synthetic construct
  source 1..20: mol_type = other DNA
aaagttaaataaagaatgaa

SEQ ID NO: 100664 - DNA, 20 bp, synthetic construct
  source 1..20: mol_type = other DNA
aaaagttaaataaagaatga

SEQ ID NO: 100665 - DNA, 20 bp, synthetic construct
  source 1..20: mol_type = other DNA
aaaaagttaaataaagaatg

SEQ ID NO: 100666 - DNA, 20 bp, synthetic construct
  source 1..20: mol_type = other DNA
taaaaagttaaataaagaat

SEQ ID NO: 100667 - DNA, 20 bp, synthetic construct
  source 1..20: mol_type = other DNA
ttaaaaagttaaataaagaa

SEQ ID NO: 100668 - DNA, 20 bp, synthetic construct
  source 1..20: mol_type = other DNA
tttaaaaagttaaataaaga

SEQ ID NO: 100669 - DNA, 20 bp, synthetic construct
  source 1..20: mol_type = other DNA
atttaaaaagttaaataaag

SEQ ID NO: 100670 - DNA, 20 bp, synthetic construct
  source 1..20: mol_type = other DNA
aatttaaaaagttaaataaa

SEQ ID NO: 100671 - DNA, 20 bp, synthetic construct
  source 1..20: mol_type = other DNA
aaatttaaaaagttaaataa

SEQ ID NO: 100672 - DNA, 20 bp, synthetic construct
  source 1..20: mol_type = other DNA
aaaatttaaaaagttaaata

SEQ ID NO: 100673 - DNA, 20 bp, synthetic construct
  source 1..20: mol_type = other DNA
taaaatttaaaaagttaaat

SEQ ID NO: 100674 - DNA, 20 bp, synthetic construct
  source 1..20: mol_type = other DNA
ttaaaatttaaaaagttaaa

SEQ ID NO: 100675 - DNA, 20 bp, synthetic construct
  source 1..20: mol_type = other DNA
tttaaaatttaaaaagttaa

SEQ ID NO: 100676 - DNA, 20 bp, synthetic construct
  source 1..20: mol_type = other DNA
gtttaaaatttaaaaagtta

SEQ ID NO: 100677 - DNA, 20 bp, synthetic construct
  source 1..20: mol_type = other DNA
agtttaaaatttaaaaagtt

SEQ ID NO: 100678 - DNA, 20 bp, synthetic construct
  source 1..20: mol_type = other DNA
aagtttaaaatttaaaaagt

SEQ ID NO: 100679 - DNA, 20 bp, synthetic construct
  source 1..20: mol_type = other DNA
taagtttaaaatttaaaaag

SEQ ID NO: 100680 - DNA, 20 bp, synthetic construct
  source 1..20: mol_type = other DNA
ataagtttaaaatttaaaaa

SEQ ID NO: 100681 - DNA, 20 bp, synthetic construct
  source 1..20: mol_type = other DNA
aataagtttaaaatttaaaa

SEQ ID NO: 100682 - DNA, 20 bp, synthetic construct
  source 1..20: mol_type = other DNA
aaataagtttaaaatttaaa

SEQ ID NO: 100683 - DNA, 20 bp, synthetic construct
  source 1..20: mol_type = other DNA
aaaataagtttaaaatttaa

SEQ ID NO: 100684 - DNA, 20 bp, synthetic construct
  source 1..20: mol_type = other DNA
taaaataagtttaaaattta

SEQ ID NO: 100685 - DNA, 20 bp, synthetic construct
  source 1..20: mol_type = other DNA
ataaaataagtttaaaattt

SEQ ID NO: 100686 - DNA, 20 bp, synthetic construct
  source 1..20: mol_type = other DNA
aataaaataagtttaaaatt

SEQ ID NO: 100687 - DNA, 20 bp, synthetic construct
  source 1..20: mol_type = other DNA
aaataaaataagtttaaaat

SEQ ID NO: 100688 - DNA, 20 bp, synthetic construct
  source 1..20: mol_type = other DNA
taaataaaataagtttaaaa

SEQ ID NO: 100689 - DNA, 20 bp, synthetic construct
  source 1..20: mol_type = other DNA
ataaataaaataagtttaaa

SEQ ID NO: 100690 - DNA, 20 bp, synthetic construct
  source 1..20: mol_type = other DNA
aataaataaaataagtttaa

SEQ ID NO: 100691 - DNA, 20 bp, synthetic construct
  source 1..20: mol_type = other DNA
aaataaataaaataagttta

SEQ ID NO: 100692 - DNA, 20 bp, synthetic construct
  source 1..20: mol_type = other DNA
taaataaataaaataagttt

SEQ ID NO: 100693 - DNA, 20 bp, synthetic construct
  source 1..20: mol_type = other DNA
ataaataaataaaataagtt

SEQ ID NO: 100694 - DNA, 20 bp, synthetic construct
  source 1..20: mol_type = other DNA
aataaataaataaaataagt

SEQ ID NO: 100695 - DNA, 20 bp, synthetic construct
  source 1..20: mol_type = other DNA
aaataaataaataaaataag

SEQ ID NO: 100696 - DNA, 20 bp, synthetic construct
  source 1..20: mol_type = other DNA
aaaataaataaataaaataa

SEQ ID NO: 100697 - DNA, 20 bp, synthetic construct
  source 1..20: mol_type = other DNA
aaaaataaataaataaaata

SEQ ID NO: 100698 - DNA, 20 bp, synthetic construct
  source 1..20: mol_type = other DNA
taaaaataaataaataaaat

SEQ ID NO: 100699 - DNA, 20 bp, synthetic construct
  source 1..20: mol_type = other DNA
ctaaaaataaataaataaaa

SEQ ID NO: 100700 - DNA, 20 bp, synthetic construct
  source 1..20: mol_type = other DNA
tctaaaaataaataaataaa

SEQ ID NO: 100701 - DNA, 20 bp, synthetic construct
  source 1..20: mol_type = other DNA
gtctaaaaataaataaataa

SEQ ID NO: 100702 - DNA, 20 bp, synthetic construct
  source 1..20: mol_type = other DNA
cgtctaaaaataaataaata

SEQ ID NO: 100703 - DNA, 20 bp, synthetic construct
  source 1..20: mol_type = other DNA
ccgtctaaaaataaataaat

SEQ ID NO: 100704 - DNA, 20 bp, synthetic construct
  source 1..20: mol_type = other DNA
tccgtctaaaaataaataaa

SEQ ID NO: 100705 - DNA, 20 bp, synthetic construct
  source 1..20: mol_type = other DNA
ctccgtctaaaaataaataa

SEQ ID NO: 100706 - DNA, 20 bp, synthetic construct
  source 1..20: mol_type = other DNA
actccgtctaaaaataaata

SEQ ID NO: 100707 - DNA, 20 bp, synthetic construct
  source 1..20: mol_type = other DNA
gactccgtctaaaaataaat

SEQ ID NO: 100708 - DNA, 20 bp, synthetic construct
  source 1..20: mol_type = other DNA
agactccgtctaaaaataaa

SEQ ID NO: 100709 - DNA, 20 bp, synthetic construct
  source 1..20: mol_type = other DNA
gagactccgtctaaaaataa

SEQ ID NO: 100710 - DNA, 20 bp, synthetic construct
  source 1..20: mol_type = other DNA
tgagactccgtctaaaaata

SEQ ID NO: 100711 - DNA, 20 bp, synthetic construct
  source 1..20: mol_type = other DNA
gtgagactccgtctaaaaat

SEQ ID NO: 100712 - DNA, 20 bp, synthetic construct
  source 1..20: mol_type = other DNA
agtgagactccgtctaaaaa

SEQ ID NO: 100713 - DNA, 20 bp, synthetic construct
  source 1..20: mol_type = other DNA
gagtgagactccgtctaaaa

SEQ ID NO: 100714 - DNA, 20 bp, synthetic construct
  source 1..20: mol_type = other DNA
agagtgagactccgtctaaa

SEQ ID NO: 100715 - DNA, 20 bp, synthetic construct
  source 1..20: mol_type = other DNA
cagagtgagactccgtctaa

SEQ ID NO: 100716 - DNA, 20 bp, synthetic construct
  source 1..20: mol_type = other DNA
acagagtgagactccgtcta

SEQ ID NO: 100717 - DNA, 20 bp, synthetic construct
  source 1..20: mol_type = other DNA
gacagagtgagactccgtct

SEQ ID NO: 100718 - DNA, 20 bp, synthetic construct
  source 1..20: mol_type = other DNA
cgacagagtgagactccgtc

SEQ ID NO: 100719 - DNA, 20 bp, synthetic construct
  source 1..20: mol_type = other DNA
gcgacagagtgagactccgt

SEQ ID NO: 100720 - DNA, 20 bp, synthetic construct
  source 1..20: mol_type = other DNA
ggcgacagagtgagactccg

SEQ ID NO: 100721 - DNA, 20 bp, synthetic construct
  source 1..20: mol_type = other DNA
tggcgacagagtgagactcc

SEQ ID NO: 100722 - DNA, 20 bp, synthetic construct
  source 1..20: mol_type = other DNA
ctggcgacagagtgagactc

SEQ ID NO: 100723 - DNA, 20 bp, synthetic construct
  source 1..20: mol_type = other DNA
cctggcgacagagtgagact

SEQ ID NO: 100724 - DNA, 20 bp, synthetic construct
  source 1..20: mol_type = other DNA
gcctggcgacagagtgagac

SEQ ID NO: 100725 - DNA, 20 bp, synthetic construct
  source 1..20: mol_type = other DNA
agcctggcgacagagtgaga

SEQ ID NO: 100726 - DNA, 20 bp, synthetic construct
  source 1..20: mol_type = other DNA
cagcctggcgacagagtgag

SEQ ID NO: 100727 - DNA, 20 bp, synthetic construct
  source 1..20: mol_type = other DNA
ccagcctggcgacagagtga

SEQ ID NO: 100728 - DNA, 20 bp, synthetic construct
  source 1..20: mol_type = other DNA
tccagcctggcgacagagtg

SEQ ID NO: 100729 - DNA, 20 bp, synthetic construct
  source 1..20: mol_type = other DNA
ctccagcctggcgacagagt

SEQ ID NO: 100730 - DNA, 20 bp, synthetic construct
  source 1..20: mol_type = other DNA
actccagcctggcgacagag

SEQ ID NO: 100731 - DNA, 20 bp, synthetic construct
  source 1..20: mol_type = other DNA
cactccagcctggcgacaga

SEQ ID NO: 100732 - DNA, 20 bp, synthetic construct
  source 1..20: mol_type = other DNA
gcactccagcctggcgacag

SEQ ID NO: 100733 - DNA, 20 bp, synthetic construct
  source 1..20: mol_type = other DNA
cgcactccagcctggcgaca

SEQ ID NO: 100734 - DNA, 20 bp, synthetic construct
  source 1..20: mol_type = other DNA
ccgcactccagcctggcgac

SEQ ID NO: 100735 - DNA, 20 bp, synthetic construct
  source 1..20: mol_type = other DNA
accgcactccagcctggcga

SEQ ID NO: 100736 - DNA, 20 bp, synthetic construct
  source 1..20: mol_type = other DNA
caccgcactccagcctggcg

SEQ ID NO: 100737 - DNA, 20 bp, synthetic construct
  source 1..20: mol_type = other DNA
ccaccgcactccagcctggc

SEQ ID NO: 100738 - DNA, 20 bp, synthetic construct
  source 1..20: mol_type = other DNA
gccaccgcactccagcctgg

SEQ ID NO: 100739 - DNA, 20 bp, synthetic construct
  source 1..20: mol_type = other DNA
cgccaccgcactccagcctg

SEQ ID NO: 100740 - DNA, 20 bp, synthetic construct
  source 1..20: mol_type = other DNA
gcgccaccgcactccagcct

SEQ ID NO: 100741 - DNA, 20 bp, synthetic construct
  source 1..20: mol_type = other DNA
tgcgccaccgcactccagcc

SEQ ID NO: 100742 - DNA, 20 bp, synthetic construct
  source 1..20: mol_type = other DNA
ctgcgccaccgcactccagc

SEQ ID NO: 100743 - DNA, 20 bp, synthetic construct
  source 1..20: mol_type = other DNA
actgcgccaccgcactccag

SEQ ID NO: 100744 - DNA, 20 bp, synthetic construct
  source 1..20: mol_type = other DNA
gactgcgccaccgcactcca

SEQ ID NO: 100745 - DNA, 20 bp, synthetic construct
  source 1..20: mol_type = other DNA
agactgcgccaccgcactcc

SEQ ID NO: 100746 - DNA, 20 bp, synthetic construct
  source 1..20: mol_type = other DNA
gagactgcgccaccgcactc

SEQ ID NO: 100747 - DNA, 20 bp, synthetic construct
  source 1..20: mol_type = other DNA
tgagactgcgccaccgcact

SEQ ID NO: 100748 - DNA, 20 bp, synthetic construct
  source 1..20: mol_type = other DNA
ttgagactgcgccaccgcac

SEQ ID NO: 100749 - DNA, 20 bp, synthetic construct
  source 1..20: mol_type = other DNA
gttgagactgcgccaccgca

SEQ ID NO: 100750 - DNA, 20 bp, synthetic construct
  source 1..20: mol_type = other DNA
agttgagactgcgccaccgc

SEQ ID NO: 100751 - DNA, 20 bp, synthetic construct
  source 1..20: mol_type = other DNA
gagttgagactgcgccaccg

SEQ ID NO: 100752 - DNA, 20 bp, synthetic construct
  source 1..20: mol_type = other DNA
tgagttgagactgcgccacc

SEQ ID NO: 100753 - DNA, 20 bp, synthetic construct
  source 1..20: mol_type = other DNA
gtgagttgagactgcgccac

SEQ ID NO: 100754 - DNA, 20 bp, synthetic construct
  source 1..20: mol_type = other DNA
agtgagttgagactgcgcca

SEQ ID NO: 100755 - DNA, 20 bp, synthetic construct
  source 1..20: mol_type = other DNA
cagtgagttgagactgcgcc

SEQ ID NO: 100756 - DNA, 20 bp, synthetic construct
  source 1..20: mol_type = other DNA
gcagtgagttgagactgcgc

SEQ ID NO: 100757 - DNA, 20 bp, synthetic construct
  source 1..20: mol_type = other DNA
tgcagtgagttgagactgcg

SEQ ID NO: 100758 - DNA, 20 bp, synthetic construct
  source 1..20: mol_type = other DNA
ttgcagtgagttgagactgc

SEQ ID NO: 100759 - DNA, 20 bp, synthetic construct
  source 1..20: mol_type = other DNA
gttgcagtgagttgagactg

SEQ ID NO: 100760 - DNA, 20 bp, synthetic construct
  source 1..20: mol_type = other DNA
ggttgcagtgagttgagact

SEQ ID NO: 100761 - DNA, 20 bp, synthetic construct
  source 1..20: mol_type = other DNA
aggttgcagtgagttgagac

SEQ ID NO: 100762 - DNA, 20 bp, synthetic construct
  source 1..20: mol_type = other DNA
gaggttgcagtgagttgaga

SEQ ID NO: 100763 - DNA, 20 bp, synthetic construct
  source 1..20: mol_type = other DNA
ggaggttgcagtgagttgag

SEQ ID NO: 100764 - DNA, 20 bp, synthetic construct
  source 1..20: mol_type = other DNA
cggaggttgcagtgagttga

SEQ ID NO: 100765 - DNA, 20 bp, synthetic construct
  source 1..20: mol_type = other DNA
gcggaggttgcagtgagttg

SEQ ID NO: 100766 - DNA, 20 bp, synthetic construct
  source 1..20: mol_type = other DNA
ggcggaggttgcagtgagtt

SEQ ID NO: 100767 - DNA, 20 bp, synthetic construct
  source 1..20: mol_type = other DNA
aggcggaggttgcagtgagt

SEQ ID NO: 100768 - DNA, 20 bp, synthetic construct
  source 1..20: mol_type = other DNA
gaggcggaggttgcagtgag

SEQ ID NO: 100769 - DNA, 20 bp, synthetic construct
  source 1..20: mol_type = other DNA
ggaggcggaggttgcagtga

SEQ ID NO: 100770 - DNA, 20 bp, synthetic construct
  source 1..20: mol_type = other DNA
tggaggcggaggttgcagtg

SEQ ID NO: 100771 - DNA, 20 bp, synthetic construct
  source 1..20: mol_type = other DNA
ctggaggcggaggttgcagt

SEQ ID NO: 100772 - DNA, 20 bp, synthetic construct
  source 1..20: mol_type = other DNA
cctggaggcggaggttgcag

SEQ ID NO: 100773 - DNA, 20 bp, synthetic construct
  source 1..20: mol_type = other DNA
ccctggaggcggaggttgca

SEQ ID NO: 100774 - DNA, 20 bp, synthetic construct
  source 1..20: mol_type = other DNA
accctggaggcggaggttgc

SEQ ID NO: 100775 - DNA, 20 bp, synthetic construct
  source 1..20: mol_type = other DNA
aaccctggaggcggaggttg

SEQ ID NO: 100776 - DNA, 20 bp, synthetic construct
  source 1..20: mol_type = other DNA
gaaccctggaggcggaggtt

SEQ ID NO: 100777 - DNA, 20 bp, synthetic construct
  source 1..20: mol_type = other DNA
tgaaccctggaggcggaggt

SEQ ID NO: 100778 - DNA, 20 bp, synthetic construct
  source 1..20: mol_type = other DNA
ttgaaccctggaggcggagg

SEQ ID NO: 100779 - DNA, 20 bp, synthetic construct
  source 1..20: mol_type = other DNA
cttgaaccctggaggcggag

SEQ ID NO: 100780 - DNA, 20 bp, synthetic construct
  source 1..20: mol_type = other DNA
acttgaaccctggaggcgga

SEQ ID NO: 100781 - DNA, 20 bp, synthetic construct
  source 1..20: mol_type = other DNA
cacttgaaccctggaggcgg

SEQ ID NO: 100782 - DNA, 20 bp, synthetic construct
  source 1..20: mol_type = other DNA
tcacttgaaccctggaggcg

SEQ ID NO: 100783 - DNA, 20 bp, synthetic construct
  source 1..20: mol_type = other DNA
atcacttgaaccctggaggc

SEQ ID NO: 100784 - DNA, 20 bp, synthetic construct
  source 1..20: mol_type = other DNA
aatcacttgaaccctggagg

SEQ ID NO: 100785 - DNA, 20 bp, synthetic construct
  source 1..20: mol_type = other DNA
gaatcacttgaaccctggag

SEQ ID NO: 100786 - DNA, 20 bp, synthetic construct
  source 1..20: mol_type = other DNA
agaatcacttgaaccctgga

SEQ ID NO: 100787 - DNA, 20 bp, synthetic construct
  source 1..20: mol_type = other DNA
gagaatcacttgaaccctgg

SEQ ID NO: 100788 - DNA, 20 bp, synthetic construct
  source 1..20: mol_type = other DNA
ggagaatcacttgaaccctg

SEQ ID NO: 100789 - DNA, 20 bp, synthetic construct
  source 1..20: mol_type = other DNA
aggagaatcacttgaaccct

SEQ ID NO: 100790 - DNA, 20 bp, synthetic construct
  source 1..20: mol_type = other DNA
caggagaatcacttgaaccc

SEQ ID NO: 100791 - DNA, 20 bp, synthetic construct
  source 1..20: mol_type = other DNA
gcaggagaatcacttgaacc

SEQ ID NO: 100792 - DNA, 20 bp, synthetic construct
  source 1..20: mol_type = other DNA
ggcaggagaatcacttgaac

SEQ ID NO: 100793 - DNA, 20 bp, synthetic construct
  source 1..20: mol_type = other DNA
aggcaggagaatcacttgaa

SEQ ID NO: 100794 - DNA, 20 bp, synthetic construct
  source 1..20: mol_type = other DNA
gaggcaggagaatcacttga

SEQ ID NO: 100795 - DNA, 20 bp, synthetic construct
  source 1..20: mol_type = other DNA
tgaggcaggagaatcacttg

SEQ ID NO: 100796 - DNA, 20 bp, synthetic construct
  source 1..20: mol_type = other DNA
ctgaggcaggagaatcactt

SEQ ID NO: 100797 - DNA, 20 bp, synthetic construct
  source 1..20: mol_type = other DNA
gctgaggcaggagaatcact

SEQ ID NO: 100798 - DNA, 20 bp, synthetic construct
  source 1..20: mol_type = other DNA
ggctgaggcaggagaatcac

SEQ ID NO: 100799 - DNA, 20 bp, synthetic construct
  source 1..20: mol_type = other DNA
aggctgaggcaggagaatca

SEQ ID NO: 100800 - DNA, 20 bp, synthetic construct
  source 1..20: mol_type = other DNA
gaggctgaggcaggagaatc

SEQ ID NO: 100801 - DNA, 20 bp, synthetic construct
  source 1..20: mol_type = other DNA
ggaggctgaggcaggagaat

SEQ ID NO: 100802 - DNA, 20 bp, synthetic construct
  source 1..20: mol_type = other DNA
aggaggctgaggcaggagaa

SEQ ID NO: 100803 - DNA, 20 bp, synthetic construct
  source 1..20: mol_type = other DNA
caggaggctgaggcaggaga

SEQ ID NO: 100804 - DNA, 20 bp, synthetic construct
  source 1..20: mol_type = other DNA
tcaggaggctgaggcaggag

SEQ ID NO: 100805 - DNA, 20 bp, synthetic construct
  source 1..20: mol_type = other DNA
gtcaggaggctgaggcagga

SEQ ID NO: 100806 - DNA, 20 bp, synthetic construct
  source 1..20: mol_type = other DNA
agtcaggaggctgaggcagg

SEQ ID NO: 100807 - DNA, 20 bp, synthetic construct
  source 1..20: mol_type = other DNA
tagtcaggaggctgaggcag

SEQ ID NO: 100808 - DNA, 20 bp, synthetic construct
  source 1..20: mol_type = other DNA
ctagtcaggaggctgaggca

SEQ ID NO: 100809 - DNA, 20 bp, synthetic construct
  source 1..20: mol_type = other DNA
gctagtcaggaggctgaggc

SEQ ID NO: 100810 - DNA, 20 bp, synthetic construct
  source 1..20: mol_type = other DNA
agctagtcaggaggctgagg

SEQ ID NO: 100811 - DNA, 20 bp, synthetic construct
  source 1..20: mol_type = other DNA
cagctagtcaggaggctgag

SEQ ID NO: 100812 - DNA, 20 bp, synthetic construct
  source 1..20: mol_type = other DNA
ccagctagtcaggaggctga

SEQ ID NO: 100813 - DNA, 20 bp, synthetic construct
  source 1..20: mol_type = other DNA
tccagctagtcaggaggctg

SEQ ID NO: 100814 - DNA, 20 bp, synthetic construct
  source 1..20: mol_type = other DNA
ttccagctagtcaggaggct

SEQ ID NO: 100815 - DNA, 20 bp, synthetic construct
  source 1..20: mol_type = other DNA
gttccagctagtcaggaggc

SEQ ID NO: 100816 - DNA, 20 bp, synthetic construct
  source 1..20: mol_type = other DNA
agttccagctagtcaggagg

SEQ ID NO: 100817 - DNA, 20 bp, synthetic construct
  source 1..20: mol_type = other DNA
tagttccagctagtcaggag

SEQ ID NO: 100818 - DNA, 20 bp, synthetic construct
  source 1..20: mol_type = other DNA
gtagttccagctagtcagga

SEQ ID NO: 100819 - DNA, 20 bp, synthetic construct
  source 1..20: mol_type = other DNA
tgtagttccagctagtcagg

SEQ ID NO: 100820 - DNA, 20 bp, synthetic construct
  source 1..20: mol_type = other DNA
ctgtagttccagctagtcag

SEQ ID NO: 100821 - DNA, 20 bp, synthetic construct
  source 1..20: mol_type = other DNA
cctgtagttccagctagtca

SEQ ID NO: 100822 - DNA, 20 bp, synthetic construct
  source 1..20: mol_type = other DNA
gcctgtagttccagctagtc

SEQ ID NO: 100823 - DNA, 20 bp, synthetic construct
  source 1..20: mol_type = other DNA
tgcctgtagttccagctagt

SEQ ID NO: 100824 - DNA, 20 bp, synthetic construct
  source 1..20: mol_type = other DNA
gtgcctgtagttccagctag

SEQ ID NO: 100825 - DNA, 20 bp, synthetic construct
  source 1..20: mol_type = other DNA
cgtgcctgtagttccagcta

SEQ ID NO: 100826 - DNA, 20 bp, synthetic construct
  source 1..20: mol_type = other DNA
acgtgcctgtagttccagct

SEQ ID NO: 100827 - DNA, 20 bp, synthetic construct
  source 1..20: mol_type = other DNA
cacgtgcctgtagttccagc

SEQ ID NO: 100828 - DNA, 20 bp, synthetic construct
  source 1..20: mol_type = other DNA
gcacgtgcctgtagttccag

SEQ ID NO: 100829 - DNA, 20 bp, synthetic construct
  source 1..20: mol_type = other DNA
ggcacgtgcctgtagttcca

SEQ ID NO: 100830 - DNA, 20 bp, synthetic construct
  source 1..20: mol_type = other DNA
tggcacgtgcctgtagttcc

SEQ ID NO: 100831 - DNA, 20 bp, synthetic construct
  source 1..20: mol_type = other DNA
gtggcacgtgcctgtagttc

SEQ ID NO: 100832 - DNA, 20 bp, synthetic construct
  source 1..20: mol_type = other DNA
ggtggcacgtgcctgtagtt

SEQ ID NO: 100833 - DNA, 20 bp, synthetic construct
  source 1..20: mol_type = other DNA
tggtggcacgtgcctgtagt

SEQ ID NO: 100834 - DNA, 20 bp, synthetic construct
  source 1..20: mol_type = other DNA
gtggtggcacgtgcctgtag

SEQ ID NO: 100835 - DNA, 20 bp, synthetic construct
  source 1..20: mol_type = other DNA
cgtggtggcacgtgcctgta

SEQ ID NO: 100836 - DNA, 20 bp, synthetic construct
  source 1..20: mol_type = other DNA
gcgtggtggcacgtgcctgt

SEQ ID NO: 100837 - DNA, 20 bp, synthetic construct
  source 1..20: mol_type = other DNA
ggcgtggtggcacgtgcctg

SEQ ID NO: 100838 - DNA, 20 bp, synthetic construct
  source 1..20: mol_type = other DNA
gggcgtggtggcacgtgcct

SEQ ID NO: 100839 - DNA, 20 bp, synthetic construct
  source 1..20: mol_type = other DNA
tgggcgtggtggcacgtgcc

SEQ ID NO: 100840 - DNA, 20 bp, synthetic construct
  source 1..20: mol_type = other DNA
ctgggcgtggtggcacgtgc

SEQ ID NO: 100841 - DNA, 20 bp, synthetic construct
  source 1..20: mol_type = other DNA
gctgggcgtggtggcacgtg

SEQ ID NO: 100842 - DNA, 20 bp, synthetic construct
  source 1..20: mol_type = other DNA
agctgggcgtggtggcacgt

SEQ ID NO: 100843 - DNA, 20 bp, synthetic construct
  source 1..20: mol_type = other DNA
tagctgggcgtggtggcacg

SEQ ID NO: 100844 - DNA, 20 bp, synthetic construct
  source 1..20: mol_type = other DNA
ttagctgggcgtggtggcac

SEQ ID NO: 100845 - DNA, 20 bp, synthetic construct
  source 1..20: mol_type = other DNA
attagctgggcgtggtggca

SEQ ID NO: 100846 - DNA, 20 bp, synthetic construct
  source 1..20: mol_type = other DNA
aattagctgggcgtggtggc

SEQ ID NO: 100847 - DNA, 20 bp, synthetic construct
  source 1..20: mol_type = other DNA
aaattagctgggcgtggtgg

SEQ ID NO: 100848 - DNA, 20 bp, synthetic construct
  source 1..20: mol_type = other DNA
aaaattagctgggcgtggtg

SEQ ID NO: 100849 - DNA, 20 bp, synthetic construct
  source 1..20: mol_type = other DNA
aaaaattagctgggcgtggt

SEQ ID NO: 100850 - DNA, 20 bp, synthetic construct
  source 1..20: mol_type = other DNA
caaaaattagctgggcgtgg

SEQ ID NO: 100851 - DNA, 20 bp, synthetic construct
  source 1..20: mol_type = other DNA
acaaaaattagctgggcgtg

SEQ ID NO: 100852 - DNA, 20 bp, synthetic construct
  source 1..20: mol_type = other DNA
tacaaaaattagctgggcgt

SEQ ID NO: 100853 - DNA, 20 bp, synthetic construct
  source 1..20: mol_type = other DNA
atacaaaaattagctgggcg

SEQ ID NO: 100854 - DNA, 20 bp, synthetic construct
  source 1..20: mol_type = other DNA
aatacaaaaattagctgggc

SEQ ID NO: 100855 - DNA, 20 bp, synthetic construct
  source 1..20: mol_type = other DNA
aaatacaaaaattagctggg

SEQ ID NO: 100856 - DNA, 20 bp, synthetic construct
  source 1..20: mol_type = other DNA
aaaatacaaaaattagctgg

SEQ ID NO: 100857 - DNA, 20 bp, synthetic construct
  source 1..20: mol_type = other DNA
aaaaatacaaaaattagctg

SEQ ID NO: 100858 - DNA, 20 bp, synthetic construct
  source 1..20: mol_type = other DNA
taaaaatacaaaaattagct

SEQ ID NO: 100859 - DNA, 20 bp, synthetic construct
  source 1..20: mol_type = other DNA
ctaaaaatacaaaaattagc

SEQ ID NO: 100860 - DNA, 20 bp, synthetic construct
  source 1..20: mol_type = other DNA
actaaaaatacaaaaattag

SEQ ID NO: 100861 - DNA, 20 bp, synthetic construct
  source 1..20: mol_type = other DNA
tactaaaaatacaaaaatta

SEQ ID NO: 100862 - DNA, 20 bp, synthetic construct
  source 1..20: mol_type = other DNA
ctactaaaaatacaaaaatt

SEQ ID NO: 100863 - DNA, 20 bp, synthetic construct
  source 1..20: mol_type = other DNA
tctactaaaaatacaaaaat

SEQ ID NO: 100864 - DNA, 20 bp, synthetic construct
  source 1..20: mol_type = other DNA
ctctactaaaaatacaaaaa

SEQ ID NO: 100865 - DNA, 20 bp, synthetic construct
  source 1..20: mol_type = other DNA
tctctactaaaaatacaaaa

SEQ ID NO: 100866 - DNA, 20 bp, synthetic construct
  source 1..20: mol_type = other DNA
gtctctactaaaaatacaaa

SEQ ID NO: 100867 - DNA, 20 bp, synthetic construct
  source 1..20: mol_type = other DNA
cgtctctactaaaaatacaa

SEQ ID NO: 100868 - DNA, 20 bp, synthetic construct
  source 1..20: mol_type = other DNA
ccgtctctactaaaaataca

SEQ ID NO: 100869 - DNA, 20 bp, synthetic construct
  source 1..20: mol_type = other DNA
cccgtctctactaaaaatac

SEQ ID NO: 100870 - DNA, 20 bp, synthetic construct
  source 1..20: mol_type = other DNA
ccccgtctctactaaaaata

SEQ ID NO: 100871 - DNA, 20 bp, synthetic construct
  source 1..20: mol_type = other DNA
accccgtctctactaaaaat

SEQ ID NO: 100872 - DNA, 20 bp, synthetic construct
  source 1..20: mol_type = other DNA
aaccccgtctctactaaaaa

SEQ ID NO: 100873 - DNA, 20 bp, synthetic construct
  source 1..20: mol_type = other DNA
aaaccccgtctctactaaaa

SEQ ID NO: 100874 - DNA, 20 bp, synthetic construct
  source 1..20: mol_type = other DNA
gaaaccccgtctctactaaa

SEQ ID NO: 100875 - DNA, 20 bp, synthetic construct
  source 1..20: mol_type = other DNA
tgaaaccccgtctctactaa

SEQ ID NO: 100876 - DNA, 20 bp, synthetic construct
  source 1..20: mol_type = other DNA
gtgaaaccccgtctctacta

SEQ ID NO: 100877 - DNA, 20 bp, synthetic construct
  source 1..20: mol_type = other DNA
agtgaaaccccgtctctact

SEQ ID NO: 100878 - DNA, 20 bp, synthetic construct
  source 1..20: mol_type = other DNA
tagtgaaaccccgtctctac

SEQ ID NO: 100879 - DNA, 20 bp, synthetic construct
  source 1..20: mol_type = other DNA
atagtgaaaccccgtctcta

SEQ ID NO: 100880 - DNA, 20 bp, synthetic construct
  source 1..20: mol_type = other DNA
catagtgaaaccccgtctct

SEQ ID NO: 100881 - DNA, 20 bp, synthetic construct
  source 1..20: mol_type = other DNA
acatagtgaaaccccgtctc

SEQ ID NO: 100882 - DNA, 20 bp, synthetic construct
  source 1..20: mol_type = other DNA
aacatagtgaaaccccgtct

SEQ ID NO: 100883 - DNA, 20 bp, synthetic construct
  source 1..20: mol_type = other DNA
caacatagtgaaaccccgtc

SEQ ID NO: 100884 - DNA, 20 bp, synthetic construct
  source 1..20: mol_type = other DNA
ccaacatagtgaaaccccgt

SEQ ID NO: 100885 - DNA, 20 bp, synthetic construct
  source 1..20: mol_type = other DNA
gccaacatagtgaaaccccg

SEQ ID NO: 100886 - DNA, 20 bp, synthetic construct
  source 1..20: mol_type = other DNA
agccaacatagtgaaacccc

SEQ ID NO: 100887 - DNA, 20 bp, synthetic construct
  source 1..20: mol_type = other DNA
cagccaacatagtgaaaccc

SEQ ID NO: 100888 - DNA, 20 bp, synthetic construct
  source 1..20: mol_type = other DNA
ccagccaacatagtgaaacc

SEQ ID NO: 100889 - DNA, 20 bp, synthetic construct
  source 1..20: mol_type = other DNA
cccagccaacatagtgaaac

SEQ ID NO: 100890 - DNA, 20 bp, synthetic construct
  source 1..20: mol_type = other DNA
tcccagccaacatagtgaaa

SEQ ID NO: 100891 - DNA, 20 bp, synthetic construct
  source 1..20: mol_type = other DNA
atcccagccaacatagtgaa

SEQ ID NO: 100892 - DNA, 20 bp, synthetic construct
  source 1..20: mol_type = other DNA
catcccagccaacatagtga

SEQ ID NO: 100893 - DNA, 20 bp, synthetic construct
  source 1..20: mol_type = other DNA
ccatcccagccaacatagtg

SEQ ID NO: 100894 - DNA, 20 bp, synthetic construct
  source 1..20: mol_type = other DNA
accatcccagccaacatagt

SEQ ID NO: 100895 - DNA, 20 bp, synthetic construct
  source 1..20: mol_type = other DNA
gaccatcccagccaacatag

SEQ ID NO: 100896 - DNA, 20 bp, synthetic construct
  source 1..20: mol_type = other DNA
agaccatcccagccaacata

SEQ ID NO: 100897 - DNA, 20 bp, synthetic construct
  source 1..20: mol_type = other DNA
aagaccatcccagccaacat

SEQ ID NO: 100898 - DNA, 20 bp, synthetic construct
  source 1..20: mol_type = other DNA
caagaccatcccagccaaca

SEQ ID NO: 100899 - DNA, 20 bp, synthetic construct
  source 1..20: mol_type = other DNA
tcaagaccatcccagccaac

SEQ ID NO: 100900 - DNA, 20 bp, synthetic construct
  source 1..20: mol_type = other DNA
atcaagaccatcccagccaa

SEQ ID NO: 100901 - DNA, 20 bp, synthetic construct
  source 1..20: mol_type = other DNA
gatcaagaccatcccagcca

SEQ ID NO: 100902 - DNA, 20 bp, synthetic construct
  source 1..20: mol_type = other DNA
agatcaagaccatcccagcc

SEQ ID NO: 100903 - DNA, 20 bp, synthetic construct
  source 1..20: mol_type = other DNA
gagatcaagaccatcccagc

SEQ ID NO: 100904 - DNA, 20 bp, synthetic construct
  source 1..20: mol_type = other DNA
agagatcaagaccatcccag

SEQ ID NO: 100905 - DNA, 20 bp, synthetic construct
  source 1..20: mol_type = other DNA
aagagatcaagaccatccca

SEQ ID NO: 100906 - DNA, 20 bp, synthetic construct
  source 1..20: mol_type = other DNA
caagagatcaagaccatccc

SEQ ID NO: 100907 - DNA, 20 bp, synthetic construct
  source 1..20: mol_type = other DNA
tcaagagatcaagaccatcc

SEQ ID NO: 100908 - DNA, 20 bp, synthetic construct
  source 1..20: mol_type = other DNA
gtcaagagatcaagaccatc

SEQ ID NO: 100909 - DNA, 20 bp, synthetic construct
  source 1..20: mol_type = other DNA
ggtcaagagatcaagaccat

SEQ ID NO: 100910 - DNA, 20 bp, synthetic construct
  source 1..20: mol_type = other DNA
aggtcaagagatcaagacca

SEQ ID NO: 100911 - DNA, 20 bp, synthetic construct
  source 1..20: mol_type = other DNA
aaggtcaagagatcaagacc

SEQ ID NO: 100912 - DNA, 20 bp, synthetic construct
  source 1..20: mol_type = other DNA
caaggtcaagagatcaagac

SEQ ID NO: 100913 - DNA, 20 bp, synthetic construct
  source 1..20: mol_type = other DNA
acaaggtcaagagatcaaga

SEQ ID NO: 100914 - DNA, 20 bp, synthetic construct
  source 1..20: mol_type = other DNA
cacaaggtcaagagatcaag

SEQ ID NO: 100915 - DNA, 20 bp, synthetic construct
  source 1..20: mol_type = other DNA
tcacaaggtcaagagatcaa

SEQ ID NO: 100916 - DNA, 20 bp, synthetic construct
  source 1..20: mol_type = other DNA
atcacaaggtcaagagatca

SEQ ID NO: 100917 - DNA, 20 bp, synthetic construct
  source 1..20: mol_type = other DNA
gatcacaaggtcaagagatc

SEQ ID NO: 100918 - DNA, 20 bp, synthetic construct
  source 1..20: mol_type = other DNA
ggatcacaaggtcaagagat

SEQ ID NO: 100919 - DNA, 20 bp, synthetic construct
  source 1..20: mol_type = other DNA
cggatcacaaggtcaagaga

SEQ ID NO: 100920 - DNA, 20 bp, synthetic construct
  source 1..20: mol_type = other DNA
ccggatcacaaggtcaagag

SEQ ID NO: 100921 - DNA, 20 bp, synthetic construct
  source 1..20: mol_type = other DNA
gccggatcacaaggtcaaga

SEQ ID NO: 100922 - DNA, 20 bp, synthetic construct
  source 1..20: mol_type = other DNA
agccggatcacaaggtcaag

SEQ ID NO: 100923 - DNA, 20 bp, synthetic construct
  source 1..20: mol_type = other DNA
cagccggatcacaaggtcaa

SEQ ID NO: 100924 - DNA, 20 bp, synthetic construct
  source 1..20: mol_type = other DNA
gcagccggatcacaaggtca

SEQ ID NO: 100925 - DNA, 20 bp, synthetic construct
  source 1..20: mol_type = other DNA
ggcagccggatcacaaggtc

SEQ ID NO: 100926 - DNA, 20 bp, synthetic construct
  source 1..20: mol_type = other DNA
tggcagccggatcacaaggt

SEQ ID NO: 100927 - DNA, 20 bp, synthetic construct
  source 1..20: mol_type = other DNA
gtggcagccggatcacaagg

SEQ ID NO: 100928 - DNA, 20 bp, synthetic construct
  source 1..20: mol_type = other DNA
tgtggcagccggatcacaag

SEQ ID NO: 100929 - DNA, 20 bp, synthetic construct
  source 1..20: mol_type = other DNA
ctgtggcagccggatcacaa

SEQ ID NO: 100930 - DNA, 20 bp, synthetic construct
  source 1..20: mol_type = other DNA
gctgtggcagccggatcaca

SEQ ID NO: 100931 - DNA, 20 bp, synthetic construct
  source 1..20: mol_type = other DNA
ggctgtggcagccggatcac

SEQ ID NO: 100932 - DNA, 20 bp, synthetic construct
  source 1..20: mol_type = other DNA
aggctgtggcagccggatca

SEQ ID NO: 100933 - DNA, 20 bp, synthetic construct
  source 1..20: mol_type = other DNA
gaggctgtggcagccggatc

SEQ ID NO: 100934 - DNA, 20 bp, synthetic construct
  source 1..20: mol_type = other DNA
ggaggctgtggcagccggat

SEQ ID NO: 100935 - DNA, 20 bp, synthetic construct
  source 1..20: mol_type = other DNA
gggaggctgtggcagccgga

SEQ ID NO: 100936 - DNA, 20 bp, synthetic construct
  source 1..20: mol_type = other DNA
tgggaggctgtggcagccgg

SEQ ID NO: 100937 - DNA, 20 bp, synthetic construct
  source 1..20: mol_type = other DNA
ttgggaggctgtggcagccg

SEQ ID NO: 100938 - DNA, 20 bp, synthetic construct
  source 1..20: mol_type = other DNA
tttgggaggctgtggcagcc

SEQ ID NO: 100939 - DNA, 20 bp, synthetic construct
  source 1..20: mol_type = other DNA
ctttgggaggctgtggcagc

SEQ ID NO: 100940 - DNA, 20 bp, synthetic construct
  source 1..20: mol_type = other DNA
actttgggaggctgtggcag

SEQ ID NO: 100941 - DNA, 20 bp, synthetic construct
  source 1..20: mol_type = other DNA
cactttgggaggctgtggca

SEQ ID NO: 100942 - DNA, 20 bp, synthetic construct
  source 1..20: mol_type = other DNA
gcactttgggaggctgtggc

SEQ ID NO: 100943 - DNA, 20 bp, synthetic construct
  source 1..20: mol_type = other DNA
agcactttgggaggctgtgg

SEQ ID NO: 100944 - DNA, 20 bp, synthetic construct
  source 1..20: mol_type = other DNA
cagcactttgggaggctgtg

SEQ ID NO: 100945 - DNA, 20 bp, synthetic construct
  source 1..20: mol_type = other DNA
ccagcactttgggaggctgt

SEQ ID NO: 100946 - DNA, 20 bp, synthetic construct
  source 1..20: mol_type = other DNA
cccagcactttgggaggctg

SEQ ID NO: 100947 - DNA, 20 bp, synthetic construct
  source 1..20: mol_type = other DNA
ccccagcactttgggaggct

SEQ ID NO: 100948 - DNA, 20 bp, synthetic construct
  source 1..20: mol_type = other DNA
accccagcactttgggaggc

SEQ ID NO: 100949 - DNA, 20 bp, synthetic construct
  source 1..20: mol_type = other DNA
aaccccagcactttgggagg

SEQ ID NO: 100950 - DNA, 20 bp, synthetic construct
  source 1..20: mol_type = other DNA
caaccccagcactttgggag

SEQ ID NO: 100951 - DNA, 20 bp, synthetic construct
  source 1..20: mol_type = other DNA
gcaaccccagcactttggga

SEQ ID NO: 100952 - DNA, 20 bp, synthetic construct
  source 1..20: mol_type = other DNA
tgcaaccccagcactttggg

SEQ ID NO: 100953 - DNA, 20 bp, synthetic construct
  source 1..20: mol_type = other DNA
ctgcaaccccagcactttgg

SEQ ID NO: 100954 - DNA, 20 bp, synthetic construct
  source 1..20: mol_type = other DNA
cctgcaaccccagcactttg

SEQ ID NO: 100955 - DNA, 20 bp, synthetic construct
  source 1..20: mol_type = other DNA
gcctgcaaccccagcacttt

SEQ ID NO: 100956 - DNA, 20 bp, synthetic construct
  source 1..20: mol_type = other DNA
cgcctgcaaccccagcactt

SEQ ID NO: 100957 - DNA, 20 bp, synthetic construct
  source 1..20: mol_type = other DNA
acgcctgcaaccccagcact

SEQ ID NO: 100958 - DNA, 20 bp, synthetic construct
  source 1..20: mol_type = other DNA
cacgcctgcaaccccagcac

SEQ ID NO: 100959 - DNA, 20 bp, synthetic construct
  source 1..20: mol_type = other DNA
tcacgcctgcaaccccagca

SEQ ID NO: 100960 - DNA, 20 bp, synthetic construct
  source 1..20: mol_type = other DNA
ctcacgcctgcaaccccagc

SEQ ID NO: 100961 - DNA, 20 bp, synthetic construct
  source 1..20: mol_type = other DNA
gctcacgcctgcaaccccag

SEQ ID NO: 100962 - DNA, 20 bp, synthetic construct
  source 1..20: mol_type = other DNA
ggctcacgcctgcaacccca

SEQ ID NO: 100963 - DNA, 20 bp, synthetic construct
  source 1..20: mol_type = other DNA
tggctcacgcctgcaacccc

SEQ ID NO: 100964 - DNA, 20 bp, synthetic construct
  source 1..20: mol_type = other DNA
gtggctcacgcctgcaaccc

SEQ ID NO: 100965 - DNA, 20 bp, synthetic construct
  source 1..20: mol_type = other DNA
ggtggctcacgcctgcaacc

SEQ ID NO: 100966 - DNA, 20 bp, synthetic construct
  source 1..20: mol_type = other DNA
cggtggctcacgcctgcaac

SEQ ID NO: 100967 - DNA, 20 bp, synthetic construct
  source 1..20: mol_type = other DNA
acggtggctcacgcctgcaa

SEQ ID NO: 100968 - DNA, 20 bp, synthetic construct
  source 1..20: mol_type = other DNA
cacggtggctcacgcctgca

SEQ ID NO: 100969 - DNA, 20 bp, synthetic construct
  source 1..20: mol_type = other DNA
gcacggtggctcacgcctgc

SEQ ID NO: 100970 - DNA, 20 bp, synthetic construct
  source 1..20: mol_type = other DNA
ggcacggtggctcacgcctg

SEQ ID NO: 100971 - DNA, 20 bp, synthetic construct
  source 1..20: mol_type = other DNA
gggcacggtggctcacgcct

SEQ ID NO: 100972 - DNA, 20 bp, synthetic construct
  source 1..20: mol_type = other DNA
cgggcacggtggctcacgcc

SEQ ID NO: 100973 - DNA, 20 bp, synthetic construct
  source 1..20: mol_type = other DNA
ccgggcacggtggctcacgc

SEQ ID NO: 100974 - DNA, 20 bp, synthetic construct
  source 1..20: mol_type = other DNA
gccgggcacggtggctcacg

SEQ ID NO: 100975 - DNA, 20 bp, synthetic construct
  source 1..20: mol_type = other DNA
ggccgggcacggtggctcac

SEQ ID NO: 100976 - DNA, 20 bp, synthetic construct
  source 1..20: mol_type = other DNA
aggccgggcacggtggctca

SEQ ID NO: 100977 - DNA, 20 bp, synthetic construct
  source 1..20: mol_type = other DNA
aaggccgggcacggtggctc

SEQ ID NO: 100978 - DNA, 20 bp, synthetic construct
  source 1..20: mol_type = other DNA
aaaggccgggcacggtggct

SEQ ID NO: 100979 - DNA, 20 bp, synthetic construct
  source 1..20: mol_type = other DNA
taaaggccgggcacggtggc

SEQ ID NO: 100980 - DNA, 20 bp, synthetic construct
  source 1..20: mol_type = other DNA
ttaaaggccgggcacggtgg

SEQ ID NO: 100981 - DNA, 20 bp, synthetic construct
  source 1..20: mol_type = other DNA
tttaaaggccgggcacggtg

SEQ ID NO: 100982 - DNA, 20 bp, synthetic construct
  source 1..20: mol_type = other DNA
ttttaaaggccgggcacggt

SEQ ID NO: 100983 - DNA, 20 bp, synthetic construct
  source 1..20: mol_type = other DNA
attttaaaggccgggcacgg

SEQ ID NO: 100984 - DNA, 20 bp, synthetic construct
  source 1..20: mol_type = other DNA
aattttaaaggccgggcacg

SEQ ID NO: 100985 - DNA, 20 bp, synthetic construct
  source 1..20: mol_type = other DNA
taattttaaaggccgggcac

SEQ ID NO: 100986 - DNA, 20 bp, synthetic construct
  source 1..20: mol_type = other DNA
ataattttaaaggccgggca

SEQ ID NO: 100987 - DNA, 20 bp, synthetic construct
  source 1..20: mol_type = other DNA
aataattttaaaggccgggc

SEQ ID NO: 100988 - DNA, 20 bp, synthetic construct
  source 1..20: mol_type = other DNA
aaataattttaaaggccggg

SEQ ID NO: 100989 - DNA, 20 bp, synthetic construct
  source 1..20: mol_type = other DNA
aaaataattttaaaggccgg

SEQ ID NO: 100990 - DNA, 20 bp, synthetic construct
  source 1..20: mol_type = other DNA
taaaataattttaaaggccg

SEQ ID NO: 100991 - DNA, 20 bp, synthetic construct
  source 1..20: mol_type = other DNA
ttaaaataattttaaaggcc

SEQ ID NO: 100992 - DNA, 20 bp, synthetic construct
  source 1..20: mol_type = other DNA
tttaaaataattttaaaggc

SEQ ID NO: 100993 - DNA, 20 bp, synthetic construct
  source 1..20: mol_type = other DNA
atttaaaataattttaaagg

SEQ ID NO: 100994 - DNA, 20 bp, synthetic construct
  source 1..20: mol_type = other DNA
gatttaaaataattttaaag

SEQ ID NO: 100995 - DNA, 20 bp, synthetic construct
  source 1..20: mol_type = other DNA
tgatttaaaataattttaaa

SEQ ID NO: 100996 - DNA, 20 bp, synthetic construct
  source 1..20: mol_type = other DNA
atgatttaaaataattttaa

SEQ ID NO: 100997 - DNA, 20 bp, synthetic construct
  source 1..20: mol_type = other DNA
aatgatttaaaataatttta

SEQ ID NO: 100998 - DNA, 20 bp, synthetic construct
  source 1..20: mol_type = other DNA
aaatgatttaaaataatttt

SEQ ID NO: 100999 - DNA, 20 bp, synthetic construct
  source 1..20: mol_type = other DNA
aaaatgatttaaaataattt

SEQ ID NO: 101000 - DNA, 20 bp, synthetic construct
  source 1..20: mol_type = other DNA
taaaatgatttaaaataatt

SEQ ID NO: 101001 - DNA, 20 bp, synthetic construct
  source 1..20: mol_type = other DNA
ttaaaatgatttaaaataat

SEQ ID NO: 101002 - DNA, 20 bp, synthetic construct
  source 1..20: mol_type = other DNA
attaaaatgatttaaaataa

SEQ ID NO: 101003 - DNA, 20 bp, synthetic construct
  source 1..20: mol_type = other DNA
tattaaaatgatttaaaata

SEQ ID NO: 101004 - DNA, 20 bp, synthetic construct
  source 1..20: mol_type = other DNA
atattaaaatgatttaaaat

SEQ ID NO: 101005 - DNA, 20 bp, synthetic construct
  source 1..20: mol_type = other DNA
gatattaaaatgatttaaaa

SEQ ID NO: 101006 - DNA, 20 bp, synthetic construct
  source 1..20: mol_type = other DNA
agatattaaaatgatttaaa

SEQ ID NO: 101007 - DNA, 20 bp, synthetic construct
  source 1..20: mol_type = other DNA
aagatattaaaatgatttaa

SEQ ID NO: 101008 - DNA, 20 bp, synthetic construct
  source 1..20: mol_type = other DNA
aaagatattaaaatgattta

SEQ ID NO: 101009 - DNA, 20 bp, synthetic construct
  source 1..20: mol_type = other DNA
aaaagatattaaaatgattt

SEQ ID NO: 101010 - DNA, 20 bp, synthetic construct
  source 1..20: mol_type = other DNA
aaaaagatattaaaatgatt

SEQ ID NO: 101011 - DNA, 20 bp, synthetic construct
  source 1..20: mol_type = other DNA
gaaaaagatattaaaatgat

SEQ ID NO: 101012 - DNA, 20 bp, synthetic construct
  source 1..20: mol_type = other DNA
tgaaaaagatattaaaatga

SEQ ID NO: 101013 - DNA, 20 bp, synthetic construct
  source 1..20: mol_type = other DNA
atgaaaaagatattaaaatg

SEQ ID NO: 101014 - DNA, 20 bp, synthetic construct
  source 1..20: mol_type = other DNA
aatgaaaaagatattaaaat

SEQ ID NO: 101015 - DNA, 20 bp, synthetic construct
  source 1..20: mol_type = other DNA
aaatgaaaaagatattaaaa

SEQ ID NO: 101016 - DNA, 20 bp, synthetic construct
  source 1..20: mol_type = other DNA
gaaatgaaaaagatattaaa

SEQ ID NO: 101017 - DNA, 20 bp, synthetic construct
  source 1..20: mol_type = other DNA
agaaatgaaaaagatattaa

SEQ ID NO: 101018 - DNA, 20 bp, synthetic construct
  source 1..20: mol_type = other DNA
cagaaatgaaaaagatatta

SEQ ID NO: 101019 - DNA, 20 bp, synthetic construct
  source 1..20: mol_type = other DNA
gcagaaatgaaaaagatatt

SEQ ID NO: 101020 - DNA, 20 bp, synthetic construct
  source 1..20: mol_type = other DNA
ggcagaaatgaaaaagatat

SEQ ID NO: 101021 - DNA, 20 bp, synthetic construct
  source 1..20: mol_type = other DNA
aggcagaaatgaaaaagata

SEQ ID NO: 101022 - DNA, 20 bp, synthetic construct
  source 1..20: mol_type = other DNA
gaggcagaaatgaaaaagat

SEQ ID NO: 101023 - DNA, 20 bp, synthetic construct
  source 1..20: mol_type = other DNA
ggaggcagaaatgaaaaaga

SEQ ID NO: 101024 - DNA, 20 bp, synthetic construct
  source 1..20: mol_type = other DNA
cggaggcagaaatgaaaaag

SEQ ID NO: 101025 - DNA, 20 bp, synthetic construct
  source 1..20: mol_type = other DNA
ccggaggcagaaatgaaaaa

SEQ ID NO: 101026 - DNA, 20 bp, synthetic construct
  source 1..20: mol_type = other DNA
accggaggcagaaatgaaaa

SEQ ID NO: 101027 - DNA, 20 bp, synthetic construct
  source 1..20: mol_type = other DNA
gaccggaggcagaaatgaaa

SEQ ID NO: 101028 - DNA, 20 bp, synthetic construct
  source 1..20: mol_type = other DNA
ggaccggaggcagaaatgaa

SEQ ID NO: 101029 - DNA, 20 bp, synthetic construct
  source 1..20: mol_type = other DNA
aggaccggaggcagaaatga

SEQ ID NO: 101030 - DNA, 20 bp, synthetic construct
  source 1..20: mol_type = other DNA
caggaccggaggcagaaatg

SEQ ID NO: 101031 - DNA, 20 bp, synthetic construct
  source 1..20: mol_type = other DNA
gcaggaccggaggcagaaat

SEQ ID NO: 101032 - DNA, 20 bp, synthetic construct
  source 1..20: mol_type = other DNA
tgcaggaccggaggcagaaa

SEQ ID NO: 101033 - DNA, 20 bp, synthetic construct
  source 1..20: mol_type = other DNA
ctgcaggaccggaggcagaa

SEQ ID NO: 101034 - DNA, 20 bp, synthetic construct
  source 1..20: mol_type = other DNA
tctgcaggaccggaggcaga

SEQ ID NO: 101035 - DNA, 20 bp, synthetic construct
  source 1..20: mol_type = other DNA
ctctgcaggaccggaggcag

SEQ ID NO: 101036 - DNA, 20 bp, synthetic construct
  source 1..20: mol_type = other DNA
actctgcaggaccggaggca

SEQ ID NO: 101037 - DNA, 20 bp, synthetic construct
  source 1..20: mol_type = other DNA
aactctgcaggaccggaggc

SEQ ID NO: 101038 - DNA, 20 bp, synthetic construct
  source 1..20: mol_type = other DNA
gaactctgcaggaccggagg

SEQ ID NO: 101039 - DNA, 20 bp, synthetic construct
  source 1..20: mol_type = other DNA
agaactctgcaggaccggag

SEQ ID NO: 101040 - DNA, 20 bp, synthetic construct
  source 1..20: mol_type = other DNA
aagaactctgcaggaccgga

SEQ ID NO: 101041 - DNA, 20 bp, synthetic construct
  source 1..20: mol_type = other DNA
taagaactctgcaggaccgg

SEQ ID NO: 101042 - DNA, 20 bp, synthetic construct
  source 1..20: mol_type = other DNA
ataagaactctgcaggaccg

SEQ ID NO: 101043 - DNA, 20 bp, synthetic construct
  source 1..20: mol_type = other DNA
aataagaactctgcaggacc

SEQ ID NO: 101044 - DNA, 20 bp, synthetic construct
  source 1..20: mol_type = other DNA
gaataagaactctgcaggac

SEQ ID NO: 101045 - DNA, 20 bp, synthetic construct
  source 1..20: mol_type = other DNA
cgaataagaactctgcagga

SEQ ID NO: 101046 - DNA, 20 bp, synthetic construct
  source 1..20: mol_type = other DNA
acgaataagaactctgcagg

SEQ ID NO: 101047 - DNA, 20 bp, synthetic construct
  source 1..20: mol_type = other DNA
aacgaataagaactctgcag

SEQ ID NO: 101048 - DNA, 20 bp, synthetic construct
  source 1..20: mol_type = other DNA
gaacgaataagaactctgca

SEQ ID NO: 101049 - DNA, 20 bp, synthetic construct
  source 1..20: mol_type = other DNA
agaacgaataagaactctgc

SEQ ID NO: 101050 - DNA, 20 bp, synthetic construct
  source 1..20: mol_type = other DNA
aagaacgaataagaactctg

SEQ ID NO: 101051 - DNA, 20 bp, synthetic construct
  source 1..20: mol_type = other DNA
aaagaacgaataagaactct

SEQ ID NO: 101052 - DNA, 20 bp, synthetic construct
  source 1..20: mol_type = other DNA
gaaagaacgaataagaactc

SEQ ID NO: 101053 - DNA, 20 bp, synthetic construct
  source 1..20: mol_type = other DNA
agaaagaacgaataagaact

SEQ ID NO: 101054 - DNA, 20 bp, synthetic construct
  source 1..20: mol_type = other DNA
tagaaagaacgaataagaac

SEQ ID NO: 101055 - DNA, 20 bp, synthetic construct
  source 1..20: mol_type = other DNA
ttagaaagaacgaataagaa

SEQ ID NO: 101056 - DNA, 20 bp, synthetic construct
  source 1..20: mol_type = other DNA
tttagaaagaacgaataaga

SEQ ID NO: 101057 - DNA, 20 bp, synthetic construct
  source 1..20: mol_type = other DNA
atttagaaagaacgaataag

SEQ ID NO: 101058 - DNA, 20 bp, synthetic construct
  source 1..20: mol_type = other DNA
aatttagaaagaacgaataa

SEQ ID NO: 101059 - DNA, 20 bp, synthetic construct
  source 1..20: mol_type = other DNA
aaatttagaaagaacgaata

SEQ ID NO: 101060 - DNA, 20 bp, synthetic construct
  source 1..20: mol_type = other DNA
aaaatttagaaagaacgaat

SEQ ID NO: 101061 - DNA, 20 bp, synthetic construct
  source 1..20: mol_type = other DNA
gaaaatttagaaagaacgaa

SEQ ID NO: 101062 - DNA, 20 bp, synthetic construct
  source 1..20: mol_type = other DNA
agaaaatttagaaagaacga

SEQ ID NO: 101063 - DNA, 20 bp, synthetic construct
  source 1..20: mol_type = other DNA
aagaaaatttagaaagaacg

SEQ ID NO: 101064 - DNA, 20 bp, synthetic construct
  source 1..20: mol_type = other DNA
aaagaaaatttagaaagaac

SEQ ID NO: 101065 - DNA, 20 bp, synthetic construct
  source 1..20: mol_type = other DNA
caaagaaaatttagaaagaa

SEQ ID NO: 101066 - DNA, 20 bp, synthetic construct
  source 1..20: mol_type = other DNA
gcaaagaaaatttagaaaga

SEQ ID NO: 101067 - DNA, 20 bp, synthetic construct
  source 1..20: mol_type = other DNA
tgcaaagaaaatttagaaag

SEQ ID NO: 101068 - DNA, 20 bp, synthetic construct
  source 1..20: mol_type = other DNA
gtgcaaagaaaatttagaaa

SEQ ID NO: 101069 - DNA, 20 bp, synthetic construct
  source 1..20: mol_type = other DNA
ggtgcaaagaaaatttagaa

SEQ ID NO: 101070 - DNA, 20 bp, synthetic construct
  source 1..20: mol_type = other DNA
gggtgcaaagaaaatttaga

SEQ ID NO: 101071 - DNA, 20 bp, synthetic construct
  source 1..20: mol_type = other DNA
tgggtgcaaagaaaatttag

SEQ ID NO: 101072 - DNA, 20 bp, synthetic construct
  source 1..20: mol_type = other DNA
gtgggtgcaaagaaaattta

SEQ ID NO: 101073 - DNA, 20 bp, synthetic construct
  source 1..20: mol_type = other DNA
agtgggtgcaaagaaaattt

SEQ ID NO: 101074 - DNA, 20 bp, synthetic construct
  source 1..20: mol_type = other DNA
tagtgggtgcaaagaaaatt

SEQ ID NO: 101075 - DNA, 20 bp, synthetic construct
  source 1..20: mol_type = other DNA
ttagtgggtgcaaagaaaat

SEQ ID NO: 101076 - DNA, 20 bp, synthetic construct
  source 1..20: mol_type = other DNA
attagtgggtgcaaagaaaa

SEQ ID NO: 101077 - DNA, 20 bp, synthetic construct
  source 1..20: mol_type = other DNA
gattagtgggtgcaaagaaa

SEQ ID NO: 101078 - DNA, 20 bp, synthetic construct
  source 1..20: mol_type = other DNA
tgattagtgggtgcaaagaa

SEQ ID NO: 101079 - DNA, 20 bp, synthetic construct
  source 1..20: mol_type = other DNA
gtgattagtgggtgcaaaga

SEQ ID NO: 101080 - DNA, 20 bp, synthetic construct
  source 1..20: mol_type = other DNA
ggtgattagtgggtgcaaag

SEQ ID NO: 101081 - DNA, 20 bp, synthetic construct
  source 1..20: mol_type = other DNA
aggtgattagtgggtgcaaa

SEQ ID NO: 101082 - DNA, 20 bp, synthetic construct
  source 1..20: mol_type = other DNA
gaggtgattagtgggtgcaa

SEQ ID NO: 101083 - DNA, 20 bp, synthetic construct
  source 1..20: mol_type = other DNA
tgaggtgattagtgggtgca

SEQ ID NO: 101084 - DNA, 20 bp, synthetic construct
  source 1..20: mol_type = other DNA
atgaggtgattagtgggtgc

SEQ ID NO: 101085 - DNA, 20 bp, synthetic construct
  source 1..20: mol_type = other DNA
aatgaggtgattagtgggtg

SEQ ID NO: 101086 - DNA, 20 bp, synthetic construct
  source 1..20: mol_type = other DNA
aaatgaggtgattagtgggt

SEQ ID NO: 101087 - DNA, 20 bp, synthetic construct
  source 1..20: mol_type = other DNA
gaaatgaggtgattagtggg

SEQ ID NO: 101088 - DNA, 20 bp, synthetic construct
  source 1..20: mol_type = other DNA
ggaaatgaggtgattagtgg

SEQ ID NO: 101089 - DNA, 20 bp, synthetic construct
  source 1..20: mol_type = other DNA
gggaaatgaggtgattagtg

SEQ ID NO: 101090 - DNA, 20 bp, synthetic construct
  source 1..20: mol_type = other DNA
agggaaatgaggtgattagt

SEQ ID NO: 101091 - DNA, 20 bp, synthetic construct
  source 1..20: mol_type = other DNA
aagggaaatgaggtgattag

SEQ ID NO: 101092 - DNA, 20 bp, synthetic construct
  source 1..20: mol_type = other DNA
gaagggaaatgaggtgatta

SEQ ID NO: 101093 - DNA, 20 bp, synthetic construct
  source 1..20: mol_type = other DNA
agaagggaaatgaggtgatt

SEQ ID NO: 101094 - DNA, 20 bp, synthetic construct
  source 1..20: mol_type = other DNA
aagaagggaaatgaggtgat

SEQ ID NO: 101095 - DNA, 20 bp, synthetic construct
  source 1..20: mol_type = other DNA
gaagaagggaaatgaggtga

SEQ ID NO: 101096 - DNA, 20 bp, synthetic construct
  source 1..20: mol_type = other DNA
agaagaagggaaatgaggtg

SEQ ID NO: 101097 - DNA, 20 bp, synthetic construct
  source 1..20: mol_type = other DNA
gagaagaagggaaatgaggt

SEQ ID NO: 101098 - DNA, 20 bp, synthetic construct
  source 1..20: mol_type = other DNA
ggagaagaagggaaatgagg

SEQ ID NO: 101099 - DNA, 20 bp, synthetic construct
  source 1..20: mol_type = other DNA
gggagaagaagggaaatgag

SEQ ID NO: 101100 - DNA, 20 bp, synthetic construct
  source 1..20: mol_type = other DNA
ggggagaagaagggaaatga

SEQ ID NO: 101101 - DNA, 20 bp, synthetic construct
  source 1..20: mol_type = other DNA
tggggagaagaagggaaatg

SEQ ID NO: 101102 - DNA, 20 bp, synthetic construct
  source 1..20: mol_type = other DNA
atggggagaagaagggaaat

SEQ ID NO: 101103 - DNA, 20 bp, synthetic construct
  source 1..20: mol_type = other DNA
aatggggagaagaagggaaa

SEQ ID NO: 101104 - DNA, 20 bp, synthetic construct
  source 1..20: mol_type = other DNA
taatggggagaagaagggaa

SEQ ID NO: 101105 - DNA, 20 bp, synthetic construct
  source 1..20: mol_type = other DNA
gtaatggggagaagaaggga

SEQ ID NO: 101106 - DNA, 20 bp, synthetic construct
  source 1..20: mol_type = other DNA
ggtaatggggagaagaaggg

SEQ ID NO: 101107 - DNA, 20 bp, synthetic construct
  source 1..20: mol_type = other DNA
gggtaatggggagaagaagg

SEQ ID NO: 101108 - DNA, 20 bp, synthetic construct
  source 1..20: mol_type = other DNA
agggtaatggggagaagaag

SEQ ID NO: 101109 - DNA, 20 bp, synthetic construct
  source 1..20: mol_type = other DNA
aagggtaatggggagaagaa

SEQ ID NO: 101110 - DNA, 20 bp, synthetic construct
  source 1..20: mol_type = other DNA
gaagggtaatggggagaaga

SEQ ID NO: 101111 - DNA, 20 bp, synthetic construct
  source 1..20: mol_type = other DNA
ggaagggtaatggggagaag

SEQ ID NO: 101112 - DNA, 20 bp, synthetic construct
  source 1..20: mol_type = other DNA
gggaagggtaatggggagaa

SEQ ID NO: 101113 - DNA, 20 bp, synthetic construct
  source 1..20: mol_type = other DNA
tgggaagggtaatggggaga

SEQ ID NO: 101114 - DNA, 20 bp, synthetic construct
  source 1..20: mol_type = other DNA
ttgggaagggtaatggggag

SEQ ID NO: 101115 - DNA, 20 bp, synthetic construct
  source 1..20: mol_type = other DNA
gttgggaagggtaatgggga

SEQ ID NO: 101116 - DNA, 20 bp, synthetic construct
  source 1..20: mol_type = other DNA
agttgggaagggtaatgggg

SEQ ID NO: 101117 - DNA, 20 bp, synthetic construct
  source 1..20: mol_type = other DNA
aagttgggaagggtaatggg

SEQ ID NO: 101118 - DNA, 20 bp, synthetic construct
  source 1..20: mol_type = other DNA
gaagttgggaagggtaatgg

SEQ ID NO: 101119 - DNA, 20 bp, synthetic construct
  source 1..20: mol_type = other DNA
agaagttgggaagggtaatg

SEQ ID NO: 101120 - DNA, 20 bp, synthetic construct
  source 1..20: mol_type = other DNA
cagaagttgggaagggtaat

SEQ ID NO: 101121 - DNA, 20 bp, synthetic construct
  source 1..20: mol_type = other DNA
ccagaagttgggaagggtaa

SEQ ID NO: 101122 - DNA, 20 bp, synthetic construct
  source 1..20: mol_type = other DNA
accagaagttgggaagggta

SEQ ID NO: 101123 - DNA, 20 bp, synthetic construct
  source 1..20: mol_type = other DNA
taccagaagttgggaagggt

SEQ ID NO: 101124 - DNA, 20 bp, synthetic construct
  source 1..20: mol_type = other DNA
ttaccagaagttgggaaggg

SEQ ID NO: 101125 - DNA, 20 bp, synthetic construct
  source 1..20: mol_type = other DNA
gttaccagaagttgggaagg

SEQ ID NO: 101126 - DNA, 20 bp, synthetic construct
  source 1..20: mol_type = other DNA
ggttaccagaagttgggaag

SEQ ID NO: 101127 - DNA, 20 bp, synthetic construct
  source 1..20: mol_type = other DNA
tggttaccagaagttgggaa

SEQ ID NO: 101128 - DNA, 20 bp, synthetic construct
  source 1..20: mol_type = other DNA
atggttaccagaagttggga

SEQ ID NO: 101129 - DNA, 20 bp, synthetic construct
  source 1..20: mol_type = other DNA
aatggttaccagaagttggg

SEQ ID NO: 101130 - DNA, 20 bp, synthetic construct
  source 1..20: mol_type = other DNA
gaatggttaccagaagttgg

SEQ ID NO: 101131 - DNA, 20 bp, synthetic construct
  source 1..20: mol_type = other DNA
agaatggttaccagaagttg

SEQ ID NO: 101132 - DNA, 20 bp, synthetic construct
  source 1..20: mol_type = other DNA
cagaatggttaccagaagtt

SEQ ID NO: 101133 - DNA, 20 bp, synthetic construct
  source 1..20: mol_type = other DNA
gcagaatggttaccagaagt

SEQ ID NO: 101134 - DNA, 20 bp, synthetic construct
  source 1..20: mol_type = other DNA
agcagaatggttaccagaag

SEQ ID NO: 101135 - DNA, 20 bp, synthetic construct
  source 1..20: mol_type = other DNA
tagcagaatggttaccagaa

SEQ ID NO: 101136 - DNA, 20 bp, synthetic construct
  source 1..20: mol_type = other DNA
atagcagaatggttaccaga

SEQ ID NO: 101137 - DNA, 20 bp, synthetic construct
  source 1..20: mol_type = other DNA
gatagcagaatggttaccag

SEQ ID NO: 101138 - DNA, 20 bp, synthetic construct
  source 1..20: mol_type = other DNA
agatagcagaatggttacca

SEQ ID NO: 101139 - DNA, 20 bp, synthetic construct
  source 1..20: mol_type = other DNA
gagatagcagaatggttacc

SEQ ID NO: 101140 - DNA, 20 bp, synthetic construct
  source 1..20: mol_type = other DNA
ggagatagcagaatggttac

SEQ ID NO: 101141 - DNA, 20 bp, synthetic construct
  source 1..20: mol_type = other DNA
tggagatagcagaatggtta

SEQ ID NO: 101142 - DNA, 20 bp, synthetic construct
  source 1..20: mol_type = other DNA
atggagatagcagaatggtt

SEQ ID NO: 101143 - DNA, 20 bp, synthetic construct
  source 1..20: mol_type = other DNA
catggagatagcagaatggt

SEQ ID NO: 101144 - DNA, 20 bp, synthetic construct
  source 1..20: mol_type = other DNA
acatggagatagcagaatgg

SEQ ID NO: 101145 - DNA, 20 bp, synthetic construct
  source 1..20: mol_type = other DNA
cacatggagatagcagaatg

SEQ ID NO: 101146 - DNA, 20 bp, synthetic construct
  source 1..20: mol_type = other DNA
acacatggagatagcagaat

SEQ ID NO: 101147 - DNA, 20 bp, synthetic construct
  source 1..20: mol_type = other DNA
aacacatggagatagcagaa

SEQ ID NO: 101148 - DNA, 20 bp, synthetic construct
  source 1..20: mol_type = other DNA
gaacacatggagatagcaga

SEQ ID NO: 101149 - DNA, 20 bp, synthetic construct
  source 1..20: mol_type = other DNA
tgaacacatggagatagcag

SEQ ID NO: 101150 - DNA, 20 bp, synthetic construct
  source 1..20: mol_type = other DNA
ttgaacacatggagatagca

SEQ ID NO: 101151 - DNA, 20 bp, synthetic construct
  source 1..20: mol_type = other DNA
attgaacacatggagatagc

SEQ ID NO: 101152 - DNA, 20 bp, synthetic construct
  source 1..20: mol_type = other DNA
aattgaacacatggagatag

SEQ ID NO: 101153 - DNA, 20 bp, synthetic construct
  source 1..20: mol_type = other DNA
caattgaacacatggagata

SEQ ID NO: 101154 - DNA, 20 bp, synthetic construct
  source 1..20: mol_type = other DNA
acaattgaacacatggagat

SEQ ID NO: 101155 - DNA, 20 bp, synthetic construct
  source 1..20: mol_type = other DNA
aacaattgaacacatggaga

SEQ ID NO: 101156 - DNA, 20 bp, synthetic construct
  source 1..20: mol_type = other DNA
aaacaattgaacacatggag

SEQ ID NO: 101157 - DNA, 20 bp, synthetic construct
  source 1..20: mol_type = other DNA
aaaacaattgaacacatgga

SEQ ID NO: 101158 - DNA, 20 bp, synthetic construct
  source 1..20: mol_type = other DNA
aaaaacaattgaacacatgg

SEQ ID NO: 101159 - DNA, 20 bp, synthetic construct
  source 1..20: mol_type = other DNA
taaaaacaattgaacacatg

SEQ ID NO: 101160 - DNA, 20 bp, synthetic construct
  source 1..20: mol_type = other DNA
ataaaaacaattgaacacat

SEQ ID NO: 101161 - DNA, 20 bp, synthetic construct
  source 1..20: mol_type = other DNA
aataaaaacaattgaacaca

SEQ ID NO: 101162 - DNA, 20 bp, synthetic construct
  source 1..20: mol_type = other DNA
aaataaaaacaattgaacac

SEQ ID NO: 101163 - DNA, 20 bp, synthetic construct
  source 1..20: mol_type = other DNA
aaaataaaaacaattgaaca

SEQ ID NO: 101164 - DNA, 20 bp, synthetic construct
  source 1..20: mol_type = other DNA
aaaaataaaaacaattgaac

SEQ ID NO: 101165 - DNA, 20 bp, synthetic construct
  source 1..20: mol_type = other DNA
taaaaataaaaacaattgaa

SEQ ID NO: 101166 - DNA, 20 bp, synthetic construct
  source 1..20: mol_type = other DNA
ctaaaaataaaaacaattga

SEQ ID NO: 101167 - DNA, 20 bp, synthetic construct
  source 1..20: mol_type = other DNA
actaaaaataaaaacaattg

SEQ ID NO: 101168 - DNA, 20 bp, synthetic construct
  source 1..20: mol_type = other DNA
cactaaaaataaaaacaatt

SEQ ID NO: 101169 - DNA, 20 bp, synthetic construct
  source 1..20: mol_type = other DNA
gcactaaaaataaaaacaat

SEQ ID NO: 101170 - DNA, 20 bp, synthetic construct
  source 1..20: mol_type = other DNA
ggcactaaaaataaaaacaa

SEQ ID NO: 101171 - DNA, 20 bp, synthetic construct
  source 1..20: mol_type = other DNA
aggcactaaaaataaaaaca

SEQ ID NO: 101172 - DNA, 20 bp, synthetic construct
  source 1..20: mol_type = other DNA
caggcactaaaaataaaaac

SEQ ID NO: 101173 - DNA, 20 bp, synthetic construct
  source 1..20: mol_type = other DNA
gcaggcactaaaaataaaaa

SEQ ID NO: 101174 - DNA, 20 bp, synthetic construct
  source 1..20: mol_type = other DNA
tgcaggcactaaaaataaaa

SEQ ID NO: 101175 - DNA, 20 bp, synthetic construct
  source 1..20: mol_type = other DNA
ttgcaggcactaaaaataaa

SEQ ID NO: 101176 - DNA, 20 bp, synthetic construct
  source 1..20: mol_type = other DNA
tttgcaggcactaaaaataa

SEQ ID NO: 101177 - DNA, 20 bp, synthetic construct
  source 1..20: mol_type = other DNA
gtttgcaggcactaaaaata

SEQ ID NO: 101178 - DNA, 20 bp, synthetic construct
  source 1..20: mol_type = other DNA
cgtttgcaggcactaaaaat

SEQ ID NO: 101179 - DNA, 20 bp, synthetic construct
  source 1..20: mol_type = other DNA
tcgtttgcaggcactaaaaa

SEQ ID NO: 101180 - DNA, 20 bp, synthetic construct
  source 1..20: mol_type = other DNA
ctcgtttgcaggcactaaaa

SEQ ID NO: 101181 - DNA, 20 bp, synthetic construct
  source 1..20: mol_type = other DNA
actcgtttgcaggcactaaa

SEQ ID NO: 101182 - DNA, 20 bp, synthetic construct
  source 1..20: mol_type = other DNA
tactcgtttgcaggcactaa

SEQ ID NO: 101183 - DNA, 20 bp, synthetic construct
  source 1..20: mol_type = other DNA
ttactcgtttgcaggcacta

SEQ ID NO: 101184 - DNA, 20 bp, synthetic construct
  source 1..20: mol_type = other DNA
cttactcgtttgcaggcact

SEQ ID NO: 101185 - DNA, 20 bp, synthetic construct
  source 1..20: mol_type = other DNA
tcttactcgtttgcaggcac

SEQ ID NO: 101186 - DNA, 20 bp, synthetic construct
  source 1..20: mol_type = other DNA
ttcttactcgtttgcaggca

SEQ ID NO: 101187 - DNA, 20 bp, synthetic construct
  source 1..20: mol_type = other DNA
attcttactcgtttgcaggc

SEQ ID NO: 101188 - DNA, 20 bp, synthetic construct
  source 1..20: mol_type = other DNA
tattcttactcgtttgcagg

SEQ ID NO: 101189 - DNA, 20 bp, synthetic construct
  source 1..20: mol_type = other DNA
atattcttactcgtttgcag

SEQ ID NO: 101190 - DNA, 20 bp, synthetic construct
  source 1..20: mol_type = other DNA
catattcttactcgtttgca

SEQ ID NO: 101191 - DNA, 20 bp, synthetic construct
  source 1..20: mol_type = other DNA
gcatattcttactcgtttgc

SEQ ID NO: 101192 - DNA, 20 bp, synthetic construct
  source 1..20: mol_type = other DNA
tgcatattcttactcgtttg

SEQ ID NO: 101193 - DNA, 20 bp, synthetic construct
  source 1..20: mol_type = other DNA
ttgcatattcttactcgttt

SEQ ID NO: 101194 - DNA, 20 bp, synthetic construct
  source 1..20: mol_type = other DNA
tttgcatattcttactcgtt

SEQ ID NO: 101195 - DNA, 20 bp, synthetic construct
  source 1..20: mol_type = other DNA
ctttgcatattcttactcgt

SEQ ID NO: 101196 - DNA, 20 bp, synthetic construct
  source 1..20: mol_type = other DNA
actttgcatattcttactcg

SEQ ID NO: 101197 - DNA, 20 bp, synthetic construct
  source 1..20: mol_type = other DNA
aactttgcatattcttactc

SEQ ID NO: 101198 - DNA, 20 bp, synthetic construct
  source 1..20: mol_type = other DNA
aaactttgcatattcttact

SEQ ID NO: 101199 - DNA, 20 bp, synthetic construct
  source 1..20: mol_type = other DNA
taaactttgcatattcttac

SEQ ID NO: 101200 - DNA, 20 bp, synthetic construct
  source 1..20: mol_type = other DNA
ataaactttgcatattctta

SEQ ID NO: 101201 - DNA, 20 bp, synthetic construct
  source 1..20: mol_type = other DNA
gataaactttgcatattctt

SEQ ID NO: 101202 - DNA, 20 bp, synthetic construct
  source 1..20: mol_type = other DNA
agataaactttgcatattct

SEQ ID NO: 101203 - DNA, 20 bp, synthetic construct
  source 1..20: mol_type = other DNA
aagataaactttgcatattc

SEQ ID NO: 101204 - DNA, 20 bp, synthetic construct
  source 1..20: mol_type = other DNA
aaagataaactttgcatatt

SEQ ID NO: 101205 - DNA, 20 bp, synthetic construct
  source 1..20: mol_type = other DNA
gaaagataaactttgcatat

SEQ ID NO: 101206 - DNA, 20 bp, synthetic construct
  source 1..20: mol_type = other DNA
agaaagataaactttgcata

SEQ ID NO: 101207 - DNA, 20 bp, synthetic construct
  source 1..20: mol_type = other DNA
cagaaagataaactttgcat

SEQ ID NO: 101208 - DNA, 20 bp, synthetic construct
  source 1..20: mol_type = other DNA
acagaaagataaactttgca

SEQ ID NO: 101209 - DNA, 20 bp, synthetic construct
  source 1..20: mol_type = other DNA
gacagaaagataaactttgc

SEQ ID NO: 101210 - DNA, 20 bp, synthetic construct
  source 1..20: mol_type = other DNA
ggacagaaagataaactttg

SEQ ID NO: 101211 - DNA, 20 bp, synthetic construct
  source 1..20: mol_type = other DNA
gggacagaaagataaacttt

SEQ ID NO: 101212 - DNA, 20 bp, synthetic construct
  source 1..20: mol_type = other DNA
agggacagaaagataaactt

SEQ ID NO: 101213 - DNA, 20 bp, synthetic construct
  source 1..20: mol_type = other DNA
cagggacagaaagataaact

SEQ ID NO: 101214 - DNA, 20 bp, synthetic construct
  source 1..20: mol_type = other DNA
ccagggacagaaagataaac

SEQ ID NO: 101215 - DNA, 20 bp, synthetic construct
  source 1..20: mol_type = other DNA
gccagggacagaaagataaa

SEQ ID NO: 101216 - DNA, 20 bp, synthetic construct
  source 1..20: mol_type = other DNA
agccagggacagaaagataa

SEQ ID NO: 101217 - DNA, 20 bp, synthetic construct
  source 1..20: mol_type = other DNA
aagccagggacagaaagata

SEQ ID NO: 101218 - DNA, 20 bp, synthetic construct
  source 1..20: mol_type = other DNA
taagccagggacagaaagat

SEQ ID NO: 101219 - DNA, 20 bp, synthetic construct
  source 1..20: mol_type = other DNA
ataagccagggacagaaaga

SEQ ID NO: 101220 - DNA, 20 bp, synthetic construct
  source 1..20: mol_type = other DNA
aataagccagggacagaaag

SEQ ID NO: 101221 - DNA, 20 bp, synthetic construct
  source 1..20: mol_type = other DNA
aaataagccagggacagaaa

SEQ ID NO: 101222 - DNA, 20 bp, synthetic construct
  source 1..20: mol_type = other DNA
aaaataagccagggacagaa

SEQ ID NO: 101223 - DNA, 20 bp, synthetic construct
  source 1..20: mol_type = other DNA
taaaataagccagggacaga

SEQ ID NO: 101224 - DNA, 20 bp, synthetic construct
  source 1..20: mol_type = other DNA
gtaaaataagccagggacag

SEQ ID NO: 101225 - DNA, 20 bp, synthetic construct
  source 1..20: mol_type = other DNA
agtaaaataagccagggaca

SEQ ID NO: 101226 - DNA, 20 bp, synthetic construct
  source 1..20: mol_type = other DNA
aagtaaaataagccagggac

SEQ ID NO: 101227 - DNA, 20 bp, synthetic construct
  source 1..20: mol_type = other DNA
taagtaaaataagccaggga

SEQ ID NO: 101228 - DNA, 20 bp, synthetic construct
  source 1..20: mol_type = other DNA
ttaagtaaaataagccaggg

SEQ ID NO: 101229 - DNA, 20 bp, synthetic construct
  source 1..20: mol_type = other DNA
gttaagtaaaataagccagg

SEQ ID NO: 101230 - DNA, 20 bp, synthetic construct
  source 1..20: mol_type = other DNA
tgttaagtaaaataagccag

SEQ ID NO: 101231 - DNA, 20 bp, synthetic construct
  source 1..20: mol_type = other DNA
atgttaagtaaaataagcca

SEQ ID NO: 101232 - DNA, 20 bp, synthetic construct
  source 1..20: mol_type = other DNA
tatgttaagtaaaataagcc

SEQ ID NO: 101233 - DNA, 20 bp, synthetic construct
  source 1..20: mol_type = other DNA
ttatgttaagtaaaataagc

SEQ ID NO: 101234 - DNA, 20 bp, synthetic construct
  source 1..20: mol_type = other DNA
attatgttaagtaaaataag

SEQ ID NO: 101235 - DNA, 20 bp, synthetic construct
  source 1..20: mol_type = other DNA
cattatgttaagtaaaataa

SEQ ID NO: 101236 - DNA, 20 bp, synthetic construct
  source 1..20: mol_type = other DNA
acattatgttaagtaaaata

SEQ ID NO: 101237 - DNA, 20 bp, synthetic construct
  source 1..20: mol_type = other DNA
gacattatgttaagtaaaat

SEQ ID NO: 101238 - DNA, 20 bp, synthetic construct
  source 1..20: mol_type = other DNA
ggacattatgttaagtaaaa

SEQ ID NO: 101239 - DNA, 20 bp, synthetic construct
  source 1..20: mol_type = other DNA
aggacattatgttaagtaaa

SEQ ID NO: 101240 - DNA, 20 bp, synthetic construct
  source 1..20: mol_type = other DNA
gaggacattatgttaagtaa

SEQ ID NO: 101241 - DNA, 20 bp, synthetic construct
  source 1..20: mol_type = other DNA
ggaggacattatgttaagta

SEQ ID NO: 101242 - DNA, 20 bp, synthetic construct
  source 1..20: mol_type = other DNA
tggaggacattatgttaagt

SEQ ID NO: 101243 - DNA, 20 bp, synthetic construct
  source 1..20: mol_type = other DNA
ctggaggacattatgttaag

SEQ ID NO: 101244 - DNA, 20 bp, synthetic construct
  source 1..20: mol_type = other DNA
actggaggacattatgttaa

SEQ ID NO: 101245 - DNA, 20 bp, synthetic construct
  source 1..20: mol_type = other DNA
cactggaggacattatgtta

SEQ ID NO: 101246 - DNA, 20 bp, synthetic construct
  source 1..20: mol_type = other DNA
gcactggaggacattatgtt

SEQ ID NO: 101247 - DNA, 20 bp, synthetic construct
  source 1..20: mol_type = other DNA
ggcactggaggacattatgt

SEQ ID NO: 101248 - DNA, 20 bp, synthetic construct
  source 1..20: mol_type = other DNA
tggcactggaggacattatg

SEQ ID NO: 101249 - DNA, 20 bp, synthetic construct
  source 1..20: mol_type = other DNA
atggcactggaggacattat

SEQ ID NO: 101250 - DNA, 20 bp, synthetic construct
  source 1..20: mol_type = other DNA
gatggcactggaggacatta

SEQ ID NO: 101251 - DNA, 20 bp, synthetic construct
  source 1..20: mol_type = other DNA
agatggcactggaggacatt

SEQ ID NO: 101252 - DNA, 20 bp, synthetic construct
  source 1..20: mol_type = other DNA
tagatggcactggaggacat

SEQ ID NO: 101253 - DNA, 20 bp, synthetic construct
  source 1..20: mol_type = other DNA
gtagatggcactggaggaca

SEQ ID NO: 101254 - DNA, 20 bp, synthetic construct
  source 1..20: mol_type = other DNA
tgtagatggcactggaggac

SEQ ID NO: 101255 - DNA, 20 bp, synthetic construct
  source 1..20: mol_type = other DNA
atgtagatggcactggagga

SEQ ID NO: 101256 - DNA, 20 bp, synthetic construct
  source 1..20: mol_type = other DNA
aatgtagatggcactggagg

SEQ ID NO: 101257 - DNA, 20 bp, synthetic construct
  source 1..20: mol_type = other DNA
caatgtagatggcactggag

SEQ ID NO: 101258 - DNA, 20 bp, synthetic construct
  source 1..20: mol_type = other DNA
gcaatgtagatggcactgga

SEQ ID NO: 101259 - DNA, 20 bp, synthetic construct
  source 1..20: mol_type = other DNA
agcaatgtagatggcactgg

SEQ ID NO: 101260 - DNA, 20 bp, synthetic construct
  source 1..20: mol_type = other DNA
cagcaatgtagatggcactg

SEQ ID NO: 101261 - DNA, 20 bp, synthetic construct
  source 1..20: mol_type = other DNA
gcagcaatgtagatggcact

SEQ ID NO: 101262 - DNA, 20 bp, synthetic construct
  source 1..20: mol_type = other DNA
tgcagcaatgtagatggcac

SEQ ID NO: 101263 - DNA, 20 bp, synthetic construct
  source 1..20: mol_type = other DNA
ttgcagcaatgtagatggca

SEQ ID NO: 101264 - DNA, 20 bp, synthetic construct
  source 1..20: mol_type = other DNA
tttgcagcaatgtagatggc

SEQ ID NO: 101265 - DNA, 20 bp, synthetic construct
  source 1..20: mol_type = other DNA
atttgcagcaatgtagatgg

SEQ ID NO: 101266 - DNA, 20 bp, synthetic construct
  source 1..20: mol_type = other DNA
catttgcagcaatgtagatg

SEQ ID NO: 101267 - DNA, 20 bp, synthetic construct
  source 1..20: mol_type = other DNA
tcatttgcagcaatgtagat

SEQ ID NO: 101268 - DNA, 20 bp, synthetic construct
  source 1..20: mol_type = other DNA
gtcatttgcagcaatgtaga

SEQ ID NO: 101269 - DNA, 20 bp, synthetic construct
  source 1..20: mol_type = other DNA
tgtcatttgcagcaatgtag

SEQ ID NO: 101270 - DNA, 20 bp, synthetic construct
  source 1..20: mol_type = other DNA
ctgtcatttgcagcaatgta

SEQ ID NO: 101271 - DNA, 20 bp, synthetic construct
  source 1..20: mol_type = other DNA
cctgtcatttgcagcaatgt

SEQ ID NO: 101272 - DNA, 20 bp, synthetic construct
  source 1..20: mol_type = other DNA
tcctgtcatttgcagcaatg

SEQ ID NO: 101273 - DNA, 20 bp, synthetic construct
  source 1..20: mol_type = other DNA
atcctgtcatttgcagcaat

SEQ ID NO: 101274 - DNA, 20 bp, synthetic construct
  source 1..20: mol_type = other DNA
gatcctgtcatttgcagcaa

SEQ ID NO: 101275 - DNA, 20 bp, synthetic construct
  source 1..20: mol_type = other DNA
agatcctgtcatttgcagca

SEQ ID NO: 101276 - DNA, 20 bp, synthetic construct
  source 1..20: mol_type = other DNA
gagatcctgtcatttgcagc

SEQ ID NO: 101277 - DNA, 20 bp, synthetic construct
  source 1..20: mol_type = other DNA
tgagatcctgtcatttgcag

SEQ ID NO: 101278 - DNA, 20 bp, synthetic construct
  source 1..20: mol_type = other DNA
atgagatcctgtcatttgca

SEQ ID NO: 101279 - DNA, 20 bp, synthetic construct
  source 1..20: mol_type = other DNA
aatgagatcctgtcatttgc

SEQ ID NO: 101280 - DNA, 20 bp, synthetic construct
  source 1..20: mol_type = other DNA
gaatgagatcctgtcatttg

SEQ ID NO: 101281 - DNA, 20 bp, synthetic construct
  source 1..20: mol_type = other DNA
agaatgagatcctgtcattt

SEQ ID NO: 101282 - DNA, 20 bp, synthetic construct
  source 1..20: mol_type = other DNA
aagaatgagatcctgtcatt

SEQ ID NO: 101283 - DNA, 20 bp, synthetic construct
  source 1..20: mol_type = other DNA
aaagaatgagatcctgtcat

SEQ ID NO: 101284 - DNA, 20 bp, synthetic construct
  source 1..20: mol_type = other DNA
aaaagaatgagatcctgtca

SEQ ID NO: 101285 - DNA, 20 bp, synthetic construct
  source 1..20: mol_type = other DNA
aaaaagaatgagatcctgtc

SEQ ID NO: 101286 - DNA, 20 bp, synthetic construct
  source 1..20: mol_type = other DNA
aaaaaagaatgagatcctgt

SEQ ID NO: 101287 - DNA, 20 bp, synthetic construct
  source 1..20: mol_type = other DNA
taaaaaagaatgagatcctg

SEQ ID NO: 101288 - DNA, 20 bp, synthetic construct
  source 1..20: mol_type = other DNA
ataaaaaagaatgagatcct

SEQ ID NO: 101289 - DNA, 20 bp, synthetic construct
  source 1..20: mol_type = other DNA
cataaaaaagaatgagatcc

SEQ ID NO: 101290 - DNA, 20 bp, synthetic construct
  source 1..20: mol_type = other DNA
ccataaaaaagaatgagatc

SEQ ID NO: 101291 - DNA, 20 bp, synthetic construct
  source 1..20: mol_type = other DNA
gccataaaaaagaatgagat

SEQ ID NO: 101292 - DNA, 20 bp, synthetic construct
  source 1..20: mol_type = other DNA
agccataaaaaagaatgaga

SEQ ID NO: 101293 - DNA, 20 bp, synthetic construct
  source 1..20: mol_type = other DNA
cagccataaaaaagaatgag

SEQ ID NO: 101294 - DNA, 20 bp, synthetic construct
  source 1..20: mol_type = other DNA
tcagccataaaaaagaatga

SEQ ID NO: 101295 - DNA, 20 bp, synthetic construct
  source 1..20: mol_type = other DNA
ttcagccataaaaaagaatg

SEQ ID NO: 101296 - DNA, 20 bp, synthetic construct
  source 1..20: mol_type = other DNA
attcagccataaaaaagaat

SEQ ID NO: 101297 - DNA, 20 bp, synthetic construct
  source 1..20: mol_type = other DNA
cattcagccataaaaaagaa

SEQ ID NO: 101298 - DNA, 20 bp, synthetic construct
  source 1..20: mol_type = other DNA
ccattcagccataaaaaaga

SEQ ID NO: 101299 - DNA, 20 bp, synthetic construct
  source 1..20: mol_type = other DNA
accattcagccataaaaaag

SEQ ID NO: 101300 - DNA, 20 bp, synthetic construct
  source 1..20: mol_type = other DNA
taccattcagccataaaaaa

SEQ ID NO: 101301 - DNA, 20 bp, synthetic construct
  source 1..20: mol_type = other DNA
ttaccattcagccataaaaa

SEQ ID NO: 101302 - DNA, 20 bp, synthetic construct
  source 1..20: mol_type = other DNA
attaccattcagccataaaa

SEQ ID NO: 101303 - DNA, 20 bp, synthetic construct
  source 1..20: mol_type = other DNA
gattaccattcagccataaa

SEQ ID NO: 101304 - DNA, 20 bp, synthetic construct
  source 1..20: mol_type = other DNA
agattaccattcagccataa

SEQ ID NO: 101305 - DNA, 20 bp, synthetic construct
  source 1..20: mol_type = other DNA
tagattaccattcagccata

SEQ ID NO: 101306 - DNA, 20 bp, synthetic construct
  source 1..20: mol_type = other DNA
atagattaccattcagccat

SEQ ID NO: 101307 - DNA, 20 bp, synthetic construct
  source 1..20: mol_type = other DNA
aatagattaccattcagcca

SEQ ID NO: 101308 - DNA, 20 bp, synthetic construct
  source 1..20: mol_type = other DNA
caatagattaccattcagcc

SEQ ID NO: 101309 - DNA, 20 bp, synthetic construct
  source 1..20: mol_type = other DNA
acaatagattaccattcagc

SEQ ID NO: 101310 - DNA, 20 bp, synthetic construct
  source 1..20: mol_type = other DNA
cacaatagattaccattcag

SEQ ID NO: 101311 - DNA, 20 bp, synthetic construct
  source 1..20: mol_type = other DNA
acacaatagattaccattca

SEQ ID NO: 101312 - DNA, 20 bp, synthetic construct
  source 1..20: mol_type = other DNA
tacacaatagattaccattc

SEQ ID NO: 101313 - DNA, 20 bp, synthetic construct
  source 1..20: mol_type = other DNA
atacacaatagattaccatt

SEQ ID NO: 101314 - DNA, 20 bp, synthetic construct
  source 1..20: mol_type = other DNA
tatacacaatagattaccat

SEQ ID NO: 101315 - DNA, 20 bp, synthetic construct
  source 1..20: mol_type = other DNA
atatacacaatagattacca

SEQ ID NO: 101316 - DNA, 20 bp, synthetic construct
  source 1..20: mol_type = other DNA
tatatacacaatagattacc

SEQ ID NO: 101317 - DNA, 20 bp, synthetic construct
  source 1..20: mol_type = other DNA
atatatacacaatagattac

SEQ ID NO: 101318 - DNA, 20 bp, synthetic construct
  source 1..20: mol_type = other DNA
tatatatacacaatagatta

SEQ ID NO: 101319 - DNA, 20 bp, synthetic construct
  source 1..20: mol_type = other DNA
gtatatatacacaatagatt

SEQ ID NO: 101320 - DNA, 20 bp, synthetic construct
  source 1..20: mol_type = other DNA
ggtatatatacacaatagat

SEQ ID NO: 101321 - DNA, 20 bp, synthetic construct
  source 1..20: mol_type = other DNA
tggtatatatacacaataga

SEQ ID NO: 101322 - DNA, 20 bp, synthetic construct
  source 1..20: mol_type = other DNA
gtggtatatatacacaatag

SEQ ID NO: 101323 - DNA, 20 bp, synthetic construct
  source 1..20: mol_type = other DNA
tgtggtatatatacacaata

SEQ ID NO: 101324 - DNA, 20 bp, synthetic construct
  source 1..20: mol_type = other DNA
atgtggtatatatacacaat

SEQ ID NO: 101325 - DNA, 20 bp, synthetic construct
  source 1..20: mol_type = other DNA
aatgtggtatatatacacaa

SEQ ID NO: 101326 - DNA, 20 bp, synthetic construct
  source 1..20: mol_type = other DNA
aaatgtggtatatatacaca

SEQ ID NO: 101327 - DNA, 20 bp, synthetic construct
  source 1..20: mol_type = other DNA
aaaatgtggtatatatacac

SEQ ID NO: 101328 - DNA, 20 bp, synthetic construct
  source 1..20: mol_type = other DNA
gaaaatgtggtatatataca

SEQ ID NO: 101329 - DNA, 20 bp, synthetic construct
  source 1..20: mol_type = other DNA
agaaaatgtggtatatatac

SEQ ID NO: 101330 - DNA, 20 bp, synthetic construct
  source 1..20: mol_type = other DNA
aagaaaatgtggtatatata

SEQ ID NO: 101331 - DNA, 20 bp, synthetic construct
  source 1..20: mol_type = other DNA
aaagaaaatgtggtatatat

SEQ ID NO: 101332 - DNA, 20 bp, synthetic construct
  source 1..20: mol_type = other DNA
gaaagaaaatgtggtatata

SEQ ID NO: 101333 - DNA, 20 bp, synthetic construct
  source 1..20: mol_type = other DNA
agaaagaaaatgtggtatat

SEQ ID NO: 101334 - DNA, 20 bp, synthetic construct
  source 1..20: mol_type = other DNA
gagaaagaaaatgtggtata

SEQ ID NO: 101335 - DNA, 20 bp, synthetic construct
  source 1..20: mol_type = other DNA
ggagaaagaaaatgtggtat

SEQ ID NO: 101336 - DNA, 20 bp, synthetic construct
  source 1..20: mol_type = other DNA
tggagaaagaaaatgtggta

SEQ ID NO: 101337 - DNA, 20 bp, synthetic construct
  source 1..20: mol_type = other DNA
atggagaaagaaaatgtggt

SEQ ID NO: 101338 - DNA, 20 bp, synthetic construct
  source 1..20: mol_type = other DNA
aatggagaaagaaaatgtgg

SEQ ID NO: 101339 - DNA, 20 bp, synthetic construct
  source 1..20: mol_type = other DNA
aaatggagaaagaaaatgtg

SEQ ID NO: 101340 - DNA, 20 bp, synthetic construct
  source 1..20: mol_type = other DNA
caaatggagaaagaaaatgt

SEQ ID NO: 101341 - DNA, 20 bp, synthetic construct
  source 1..20: mol_type = other DNA
acaaatggagaaagaaaatg

SEQ ID NO: 101342 - DNA, 20 bp, synthetic construct
  source 1..20: mol_type = other DNA
gacaaatggagaaagaaaat

SEQ ID NO: 101343 - DNA, 20 bp, synthetic construct
  source 1..20: mol_type = other DNA
agacaaatggagaaagaaaa

SEQ ID NO: 101344 - DNA, 20 bp, synthetic construct
  source 1..20: mol_type = other DNA
cagacaaatggagaaagaaa

SEQ ID NO: 101345 - DNA, 20 bp, synthetic construct
  source 1..20: mol_type = other DNA
acagacaaatggagaaagaa

SEQ ID NO: 101346 - DNA, 20 bp, synthetic construct
  source 1..20: mol_type = other DNA
gacagacaaatggagaaaga

SEQ ID NO: 101347 - DNA, 20 bp, synthetic construct
  source 1..20: mol_type = other DNA
tgacagacaaatggagaaag

SEQ ID NO: 101348 - DNA, 20 bp, synthetic construct
  source 1..20: mol_type = other DNA
ctgacagacaaatggagaaa

SEQ ID NO: 101349 - DNA, 20 bp, synthetic construct
  source 1..20: mol_type = other DNA
actgacagacaaatggagaa

SEQ ID NO: 101350 - DNA, 20 bp, synthetic construct
  source 1..20: mol_type = other DNA
cactgacagacaaatggaga

SEQ ID NO: 101351 - DNA, 20 bp, synthetic construct
  source 1..20: mol_type = other DNA
ccactgacagacaaatggag

SEQ ID NO: 101352 - DNA, 20 bp, synthetic construct
  source 1..20: mol_type = other DNA
tccactgacagacaaatgga

SEQ ID NO: 101353 - DNA, 20 bp, synthetic construct
  source 1..20: mol_type = other DNA
gtccactgacagacaaatgg

SEQ ID NO: 101354 - DNA, 20 bp, synthetic construct
  source 1..20: mol_type = other DNA
tgtccactgacagacaaatg

SEQ ID NO: 101355 - DNA, 20 bp, synthetic construct
  source 1..20: mol_type = other DNA
gtgtccactgacagacaaat

SEQ ID NO: 101356 - DNA, 20 bp, synthetic construct
  source 1..20: mol_type = other DNA
cgtgtccactgacagacaaa

SEQ ID NO: 101357 - DNA, 20 bp, synthetic construct
  source 1..20: mol_type = other DNA
acgtgtccactgacagacaa

SEQ ID NO: 101358 - DNA, 20 bp, synthetic construct
  source 1..20: mol_type = other DNA
tacgtgtccactgacagaca

SEQ ID NO: 101359 - DNA, 20 bp, synthetic construct
  source 1..20: mol_type = other DNA
ctacgtgtccactgacagac

SEQ ID NO: 101360 - DNA, 20 bp, synthetic construct
  source 1..20: mol_type = other DNA
cctacgtgtccactgacaga

SEQ ID NO: 101361 - DNA, 20 bp, synthetic construct
  source 1..20: mol_type = other DNA
acctacgtgtccactgacag

SEQ ID NO: 101362 - DNA, 20 bp, synthetic construct
  source 1..20: mol_type = other DNA
aacctacgtgtccactgaca

SEQ ID NO: 101363 - DNA, 20 bp, synthetic construct
  source 1..20: mol_type = other DNA
caacctacgtgtccactgac

SEQ ID NO: 101364 - DNA, 20 bp, synthetic construct
  source 1..20: mol_type = other DNA
tcaacctacgtgtccactga

SEQ ID NO: 101365 - DNA, 20 bp, synthetic construct
  source 1..20: mol_type = other DNA
atcaacctacgtgtccactg

SEQ ID NO: 101366 - DNA, 20 bp, synthetic construct
  source 1..20: mol_type = other DNA
aatcaacctacgtgtccact

SEQ ID NO: 101367 - DNA, 20 bp, synthetic construct
  source 1..20: mol_type = other DNA
gaatcaacctacgtgtccac

SEQ ID NO: 101368 - DNA, 20 bp, synthetic construct
  source 1..20: mol_type = other DNA
ggaatcaacctacgtgtcca

SEQ ID NO: 101369 - DNA, 20 bp, synthetic construct
  source 1..20: mol_type = other DNA
tggaatcaacctacgtgtcc

SEQ ID NO: 101370 - DNA, 20 bp, synthetic construct
  source 1..20: mol_type = other DNA
ttggaatcaacctacgtgtc

SEQ ID NO: 101371 - DNA, 20 bp, synthetic construct
  source 1..20: mol_type = other DNA
tttggaatcaacctacgtgt

SEQ ID NO: 101372 - DNA, 20 bp, synthetic construct
  source 1..20: mol_type = other DNA
atttggaatcaacctacgtg

SEQ ID NO: 101373 - DNA, 20 bp, synthetic construct
  source 1..20: mol_type = other DNA
gatttggaatcaacctacgt

SEQ ID NO: 101374 - DNA, 20 bp, synthetic construct
  source 1..20: mol_type = other DNA
agatttggaatcaacctacg

SEQ ID NO: 101375 - DNA, 20 bp, synthetic construct
  source 1..20: mol_type = other DNA
aagatttggaatcaacctac

SEQ ID NO: 101376 - DNA, 20 bp, synthetic construct
  source 1..20: mol_type = other DNA
caagatttggaatcaaccta

SEQ ID NO: 101377 - DNA, 20 bp, synthetic construct
  source 1..20: mol_type = other DNA
ccaagatttggaatcaacct

SEQ ID NO: 101378 - DNA, 20 bp, synthetic construct
  source 1..20: mol_type = other DNA
gccaagatttggaatcaacc

SEQ ID NO: 101379 - DNA, 20 bp, synthetic construct
  source 1..20: mol_type = other DNA
agccaagatttggaatcaac

SEQ ID NO: 101380 - DNA, 20 bp, synthetic construct
  source 1..20: mol_type = other DNA
cagccaagatttggaatcaa

SEQ ID NO: 101381 - DNA, 20 bp, synthetic construct
  source 1..20: mol_type = other DNA
acagccaagatttggaatca

SEQ ID NO: 101382 - DNA, 20 bp, synthetic construct
  source 1..20: mol_type = other DNA
aacagccaagatttggaatc

SEQ ID NO: 101383 - DNA, 20 bp, synthetic construct
  source 1..20: mol_type = other DNA
caacagccaagatttggaat

SEQ ID NO: 101384 - DNA, 20 bp, synthetic construct
  source 1..20: mol_type = other DNA
acaacagccaagatttggaa

SEQ ID NO: 101385 - DNA, 20 bp, synthetic construct
  source 1..20: mol_type = other DNA
cacaacagccaagatttgga

SEQ ID NO: 101386 - DNA, 20 bp, synthetic construct
  source 1..20: mol_type = other DNA
acacaacagccaagatttgg

SEQ ID NO: 101387 - DNA, 20 bp, synthetic construct
  source 1..20: mol_type = other DNA
tacacaacagccaagatttg

SEQ ID NO: 101388 - DNA, 20 bp, synthetic construct
  source 1..20: mol_type = other DNA
atacacaacagccaagattt

SEQ ID NO: 101389 - DNA, 20 bp, synthetic construct
  source 1..20: mol_type = other DNA
tatacacaacagccaagatt

SEQ ID NO: 101390 - DNA, 20 bp, synthetic construct
  source 1..20: mol_type = other DNA
atatacacaacagccaagat

SEQ ID NO: 101391 - DNA, 20 bp, synthetic construct
  source 1..20: mol_type = other DNA
tatatacacaacagccaaga

SEQ ID NO: 101392 - DNA, 20 bp, synthetic construct
  source 1..20: mol_type = other DNA
ctatatacacaacagccaag

SEQ ID NO: 101393 - DNA, 20 bp, synthetic construct
  source 1..20: mol_type = other DNA
actatatacacaacagccaa

SEQ ID NO: 101394 - DNA, 20 bp, synthetic construct
  source 1..20: mol_type = other DNA
cactatatacacaacagcca

SEQ ID NO: 101395 - DNA, 20 bp, synthetic construct
  source 1..20: mol_type = other DNA
gcactatatacacaacagcc

SEQ ID NO: 101396 - DNA, 20 bp, synthetic construct
  source 1..20: mol_type = other DNA
ggcactatatacacaacagc

SEQ ID NO: 101397 - DNA, 20 bp, synthetic construct
  source 1..20: mol_type = other DNA
cggcactatatacacaacag

SEQ ID NO: 101398 - DNA, 20 bp, synthetic construct
  source 1..20: mol_type = other DNA
acggcactatatacacaaca

SEQ ID NO: 101399 - DNA, 20 bp, synthetic construct
  source 1..20: mol_type = other DNA
tacggcactatatacacaac

SEQ ID NO: 101400 - DNA, 20 bp, synthetic construct
  source 1..20: mol_type = other DNA
ctacggcactatatacacaa

SEQ ID NO: 101401 - DNA, 20 bp, synthetic construct
  source 1..20: mol_type = other DNA
actacggcactatatacaca

SEQ ID NO: 101402 - DNA, 20 bp, synthetic construct
  source 1..20: mol_type = other DNA
tactacggcactatatacac

SEQ ID NO: 101403 - DNA, 20 bp, synthetic construct
  source 1..20: mol_type = other DNA
ttactacggcactatataca

SEQ ID NO: 101404 - DNA, 20 bp, synthetic construct
  source 1..20: mol_type = other DNA
tttactacggcactatatac

SEQ ID NO: 101405 - DNA, 20 bp, synthetic construct
  source 1..20: mol_type = other DNA
gtttactacggcactatata

SEQ ID NO: 101406 - DNA, 20 bp, synthetic construct
  source 1..20: mol_type = other DNA
tgtttactacggcactatat

SEQ ID NO: 101407 - DNA, 20 bp, synthetic construct
  source 1..20: mol_type = other DNA
atgtttactacggcactata

SEQ ID NO: 101408 - DNA, 20 bp, synthetic construct
  source 1..20: mol_type = other DNA
catgtttactacggcactat

SEQ ID NO: 101409 - DNA, 20 bp, synthetic construct
  source 1..20: mol_type = other DNA
ccatgtttactacggcacta

SEQ ID NO: 101410 - DNA, 20 bp, synthetic construct
  source 1..20: mol_type = other DNA
cccatgtttactacggcact

SEQ ID NO: 101411 - DNA, 20 bp, synthetic construct
  source 1..20: mol_type = other DNA
tcccatgtttactacggcac

SEQ ID NO: 101412 - DNA, 20 bp, synthetic construct
  source 1..20: mol_type = other DNA
ctcccatgtttactacggca

SEQ ID NO: 101413 - DNA, 20 bp, synthetic construct
  source 1..20: mol_type = other DNA
actcccatgtttactacggc

SEQ ID NO: 101414 - DNA, 20 bp, synthetic construct
  source 1..20: mol_type = other DNA
cactcccatgtttactacgg

SEQ ID NO: 101415 - DNA, 20 bp, synthetic construct
  source 1..20: mol_type = other DNA
gcactcccatgtttactacg

SEQ ID NO: 101416 - DNA, 20 bp, synthetic construct
  source 1..20: mol_type = other DNA
tgcactcccatgtttactac

SEQ ID NO: 101417 - DNA, 20 bp, synthetic construct
  source 1..20: mol_type = other DNA
ctgcactcccatgtttacta

SEQ ID NO: 101418 - DNA, 20 bp, synthetic construct
  source 1..20: mol_type = other DNA
tctgcactcccatgtttact

SEQ ID NO: 101419 - DNA, 20 bp, synthetic construct
  source 1..20: mol_type = other DNA
atctgcactcccatgtttac

SEQ ID NO: 101420 - DNA, 20 bp, synthetic construct
  source 1..20: mol_type = other DNA
tatctgcactcccatgttta

SEQ ID NO: 101421 - DNA, 20 bp, synthetic construct
  source 1..20: mol_type = other DNA
atatctgcactcccatgttt

SEQ ID NO: 101422 - DNA, 20 bp, synthetic construct
  source 1..20: mol_type = other DNA
aatatctgcactcccatgtt

SEQ ID NO: 101423 - DNA, 20 bp, synthetic construct
  source 1..20: mol_type = other DNA
gaatatctgcactcccatgt

SEQ ID NO: 101424 - DNA, 20 bp, synthetic construct
  source 1..20: mol_type = other DNA
ggaatatctgcactcccatg

SEQ ID NO: 101425 - DNA, 20 bp, synthetic construct
  source 1..20: mol_type = other DNA
aggaatatctgcactcccat

SEQ ID NO: 101426 - DNA, 20 bp, synthetic construct
  source 1..20: mol_type = other DNA
aaggaatatctgcactccca

SEQ ID NO: 101427 - DNA, 20 bp, synthetic construct
  source 1..20: mol_type = other DNA
gaaggaatatctgcactccc

SEQ ID NO: 101428 - DNA, 20 bp, synthetic construct
  source 1..20: mol_type = other DNA
tgaaggaatatctgcactcc

SEQ ID NO: 101429 - DNA, 20 bp, synthetic construct
  source 1..20: mol_type = other DNA
ttgaaggaatatctgcactc

SEQ ID NO: 101430 - DNA, 20 bp, synthetic construct
  source 1..20: mol_type = other DNA
attgaaggaatatctgcact

SEQ ID NO: 101431 - DNA, 20 bp, synthetic construct
  source 1..20: mol_type = other DNA
tattgaaggaatatctgcac

SEQ ID NO: 101432 - DNA, 20 bp, synthetic construct
  source 1..20: mol_type = other DNA
ttattgaaggaatatctgca

SEQ ID NO: 101433 - DNA, 20 bp, synthetic construct
  source 1..20: mol_type = other DNA
tttattgaaggaatatctgc

SEQ ID NO: 101434 - DNA, 20 bp, synthetic construct
  source 1..20: mol_type = other DNA
gtttattgaaggaatatctg

SEQ ID NO: 101435 - DNA, 20 bp, synthetic construct
  source 1..20: mol_type = other DNA
agtttattgaaggaatatct

SEQ ID NO: 101436 - DNA, 20 bp, synthetic construct
  source 1..20: mol_type = other DNA
cagtttattgaaggaatatc

SEQ ID NO: 101437 - DNA, 20 bp, synthetic construct
  source 1..20: mol_type = other DNA
tcagtttattgaaggaatat

SEQ ID NO: 101438 - DNA, 20 bp, synthetic construct
  source 1..20: mol_type = other DNA
atcagtttattgaaggaata

SEQ ID NO: 101439 - DNA, 20 bp, synthetic construct
  source 1..20: mol_type = other DNA
aatcagtttattgaaggaat

SEQ ID NO: 101440 - DNA, 20 bp, synthetic construct
  source 1..20: mol_type = other DNA
aaatcagtttattgaaggaa

SEQ ID NO: 101441 - DNA, 20 bp, synthetic construct
  source 1..20: mol_type = other DNA
gaaatcagtttattgaagga

SEQ ID NO: 101442 - DNA, 20 bp, synthetic construct
  source 1..20: mol_type = other DNA
ggaaatcagtttattgaagg

SEQ ID NO: 101443 - DNA, 20 bp, synthetic construct
  source 1..20: mol_type = other DNA
aggaaatcagtttattgaag

SEQ ID NO: 101444 - DNA, 20 bp, synthetic construct
  source 1..20: mol_type = other DNA
aaggaaatcagtttattgaa

SEQ ID NO: 101445 - DNA, 20 bp, synthetic construct
  source 1..20: mol_type = other DNA
aaaggaaatcagtttattga

SEQ ID NO: 101446 - DNA, 20 bp, synthetic construct
  source 1..20: mol_type = other DNA
gaaaggaaatcagtttattg

SEQ ID NO: 101447 - DNA, 20 bp, synthetic construct
  source 1..20: mol_type = other DNA
agaaaggaaatcagtttatt

SEQ ID NO: 101448 - DNA, 20 bp, synthetic construct
  source 1..20: mol_type = other DNA
cagaaaggaaatcagtttat

SEQ ID NO: 101449 - DNA, 20 bp, synthetic construct
  source 1..20: mol_type = other DNA
tcagaaaggaaatcagttta

SEQ ID NO: 101450 - DNA, 20 bp, synthetic construct
  source 1..20: mol_type = other DNA
ctcagaaaggaaatcagttt

SEQ ID NO: 101451 - DNA, 20 bp, synthetic construct
  source 1..20: mol_type = other DNA
actcagaaaggaaatcagtt

SEQ ID NO: 101452 - DNA, 20 bp, synthetic construct
  source 1..20: mol_type = other DNA
tactcagaaaggaaatcagt

SEQ ID NO: 101453 - DNA, 20 bp, synthetic construct
  source 1..20: mol_type = other DNA
atactcagaaaggaaatcag

SEQ ID NO: 101454 - DNA, 20 bp, synthetic construct
  source 1..20: mol_type = other DNA
tatactcagaaaggaaatca

SEQ ID NO: 101455 - DNA, 20 bp, synthetic construct
  source 1..20: mol_type = other DNA
atatactcagaaaggaaatc

SEQ ID NO: 101456 - DNA, 20 bp, synthetic construct
  source 1..20: mol_type = other DNA
tatatactcagaaaggaaat

SEQ ID NO: 101457 - DNA, 20 bp, synthetic construct
  source 1..20: mol_type = other DNA
gtatatactcagaaaggaaa

SEQ ID NO: 101458 - DNA, 20 bp, synthetic construct
  source 1..20: mol_type = other DNA
ggtatatactcagaaaggaa

SEQ ID NO: 101459 - DNA, 20 bp, synthetic construct
  source 1..20: mol_type = other DNA
aggtatatactcagaaagga

SEQ ID NO: 101460 - DNA, 20 bp, synthetic construct
  source 1..20: mol_type = other DNA
taggtatatactcagaaagg

SEQ ID NO: 101461 - DNA, 20 bp, synthetic construct
  source 1..20: mol_type = other DNA
ctaggtatatactcagaaag

SEQ ID NO: 101462 - DNA, 20 bp, synthetic construct
  source 1..20: mol_type = other DNA
gctaggtatatactcagaaa

SEQ ID NO: 101463 - DNA, 20 bp, synthetic construct
  source 1..20: mol_type = other DNA
tgctaggtatatactcagaa

SEQ ID NO: 101464 - DNA, 20 bp, synthetic construct
  source 1..20: mol_type = other DNA
ctgctaggtatatactcaga

SEQ ID NO: 101465 - DNA, 20 bp, synthetic construct
  source 1..20: mol_type = other DNA
actgctaggtatatactcag

SEQ ID NO: 101466 - DNA, 20 bp, synthetic construct
  source 1..20: mol_type = other DNA
cactgctaggtatatactca

SEQ ID NO: 101467 - DNA, 20 bp, synthetic construct
  source 1..20: mol_type = other DNA
gcactgctaggtatatactc

SEQ ID NO: 101468 - DNA, 20 bp, synthetic construct
  source 1..20: mol_type = other DNA
tgcactgctaggtatatact

SEQ ID NO: 101469 - DNA, 20 bp, synthetic construct
  source 1..20: mol_type = other DNA
ttgcactgctaggtatatac

SEQ ID NO: 101470 - DNA, 20 bp, synthetic construct
  source 1..20: mol_type = other DNA
attgcactgctaggtatata

SEQ ID NO: 101471 - DNA, 20 bp, synthetic construct
  source 1..20: mol_type = other DNA
aattgcactgctaggtatat

SEQ ID NO: 101472 - DNA, 20 bp, synthetic construct
  source 1..20: mol_type = other DNA
caattgcactgctaggtata

SEQ ID NO: 101473 - DNA, 20 bp, synthetic construct
  source 1..20: mol_type = other DNA
gcaattgcactgctaggtat

SEQ ID NO: 101474 - DNA, 20 bp, synthetic construct
  source 1..20: mol_type = other DNA
agcaattgcactgctaggta

SEQ ID NO: 101475 - DNA, 20 bp, synthetic construct
  source 1..20: mol_type = other DNA
cagcaattgcactgctaggt

SEQ ID NO: 101476 - DNA, 20 bp, synthetic construct
  source 1..20: mol_type = other DNA
ccagcaattgcactgctagg

SEQ ID NO: 101477 - DNA, 20 bp, synthetic construct
  source 1..20: mol_type = other DNA
tccagcaattgcactgctag

SEQ ID NO: 101478 - DNA, 20 bp, synthetic construct
  source 1..20: mol_type = other DNA
atccagcaattgcactgcta

SEQ ID NO: 101479 - DNA, 20 bp, synthetic construct
  source 1..20: mol_type = other DNA
gatccagcaattgcactgct

SEQ ID NO: 101480 - DNA, 20 bp, synthetic construct
  source 1..20: mol_type = other DNA
tgatccagcaattgcactgc

SEQ ID NO: 101481 - DNA, 20 bp, synthetic construct
  source 1..20: mol_type = other DNA
atgatccagcaattgcactg

SEQ ID NO: 101482 - DNA, 20 bp, synthetic construct
  source 1..20: mol_type = other DNA
tatgatccagcaattgcact

SEQ ID NO: 101483 - DNA, 20 bp, synthetic construct
  source 1..20: mol_type = other DNA
atatgatccagcaattgcac

SEQ ID NO: 101484 - DNA, 20 bp, synthetic construct
  source 1..20: mol_type = other DNA
catatgatccagcaattgca

SEQ ID NO: 101485 - DNA, 20 bp, synthetic construct
  source 1..20: mol_type = other DNA
ccatatgatccagcaattgc

SEQ ID NO: 101486 - DNA, 20 bp, synthetic construct
  source 1..20: mol_type = other DNA
accatatgatccagcaattg

SEQ ID NO: 101487 - DNA, 20 bp, synthetic construct
  source 1..20: mol_type = other DNA
taccatatgatccagcaatt

SEQ ID NO: 101488 - DNA, 20 bp, synthetic construct
  source 1..20: mol_type = other DNA
ctaccatatgatccagcaat

SEQ ID NO: 101489 - DNA, 20 bp, synthetic construct
  source 1..20: mol_type = other DNA
gctaccatatgatccagcaa

SEQ ID NO: 101490 - DNA, 20 bp, synthetic construct
  source 1..20: mol_type = other DNA
agctaccatatgatccagca

SEQ ID NO: 101491 - DNA, 20 bp, synthetic construct
  source 1..20: mol_type = other DNA
gagctaccatatgatccagc

SEQ ID NO: 101492 - DNA, 20 bp, synthetic construct
  source 1..20: mol_type = other DNA
agagctaccatatgatccag

SEQ ID NO: 101493 - DNA, 20 bp, synthetic construct
  source 1..20: mol_type = other DNA
tagagctaccatatgatcca

SEQ ID NO: 101494 - DNA, 20 bp, synthetic construct
  source 1..20: mol_type = other DNA
atagagctaccatatgatcc

SEQ ID NO: 101495 - DNA, 20 bp, synthetic construct
  source 1..20: mol_type = other DNA
aatagagctaccatatgatc

SEQ ID NO: 101496 - DNA, 20 bp, synthetic construct
  source 1..20: mol_type = other DNA
aaatagagctaccatatgat

SEQ ID NO: 101497 - DNA, 20 bp, synthetic construct
  source 1..20: mol_type = other DNA
aaaatagagctaccatatga

SEQ ID NO: 101498 - DNA, 20 bp, synthetic construct
  source 1..20: mol_type = other DNA
aaaaatagagctaccatatg

SEQ ID NO: 101499 - DNA, 20 bp, synthetic construct
  source 1..20: mol_type = other DNA
taaaaatagagctaccatat

SEQ ID NO: 101500 - DNA, 20 bp, synthetic construct
  source 1..20: mol_type = other DNA
ctaaaaatagagctaccata

SEQ ID NO: 101501 - DNA, 20 bp, synthetic construct
  source 1..20: mol_type = other DNA
actaaaaatagagctaccat

SEQ ID NO: 101502 - DNA, 20 bp, synthetic construct
  source 1..20: mol_type = other DNA
aactaaaaatagagctacca

SEQ ID NO: 101503 - DNA, 20 bp, synthetic construct
  source 1..20: mol_type = other DNA
aaactaaaaatagagctacc

SEQ ID NO: 101504 - DNA, 20 bp, synthetic construct
  source 1..20: mol_type = other DNA
aaaactaaaaatagagctac

SEQ ID NO: 101505 - DNA, 20 bp, synthetic construct
  source 1..20: mol_type = other DNA
aaaaactaaaaatagagcta

SEQ ID NO: 101506 - DNA, 20 bp, synthetic construct
  source 1..20: mol_type = other DNA
aaaaaactaaaaatagagct

SEQ ID NO: 101507 - DNA, 20 bp, synthetic construct
  source 1..20: mol_type = other DNA
caaaaaactaaaaatagagc

SEQ ID NO: 101508 - DNA, 20 bp, synthetic construct
  source 1..20: mol_type = other DNA
tcaaaaaactaaaaatagag

SEQ ID NO: 101509 - DNA, 20 bp, synthetic construct
  source 1..20: mol_type = other DNA
ctcaaaaaactaaaaataga

SEQ ID NO: 101510 - DNA, 20 bp, synthetic construct
  source 1..20: mol_type = other DNA
cctcaaaaaactaaaaatag

SEQ ID NO: 101511 - DNA, 20 bp, synthetic construct
  source 1..20: mol_type = other DNA
tcctcaaaaaactaaaaata

SEQ ID NO: 101512 - DNA, 20 bp, synthetic construct
  source 1..20: mol_type = other DNA
ttcctcaaaaaactaaaaat

SEQ ID NO: 101513 - DNA, 20 bp, synthetic construct
  source 1..20: mol_type = other DNA
attcctcaaaaaactaaaaa

SEQ ID NO: 101514 - DNA, 20 bp, synthetic construct
  source 1..20: mol_type = other DNA
aattcctcaaaaaactaaaa

SEQ ID NO: 101515 - DNA, 20 bp, synthetic construct
  source 1..20: mol_type = other DNA
aaattcctcaaaaaactaaa

SEQ ID NO: 101516 - DNA, 20 bp, synthetic construct
  source 1..20: mol_type = other DNA
gaaattcctcaaaaaactaa

SEQ ID NO: 101517 - DNA, 20 bp, synthetic construct
  source 1..20: mol_type = other DNA
ggaaattcctcaaaaaacta

SEQ ID NO: 101518 - DNA, 20 bp, synthetic construct
  source 1..20: mol_type = other DNA
tggaaattcctcaaaaaact

SEQ ID NO: 101519 - DNA, 20 bp, synthetic construct
  source 1..20: mol_type = other DNA
atggaaattcctcaaaaaac

SEQ ID NO: 101520 - DNA, 20 bp, synthetic construct
  source 1..20: mol_type = other DNA
tatggaaattcctcaaaaaa

SEQ ID NO: 101521 - DNA, 20 bp, synthetic construct
  source 1..20: mol_type = other DNA
gtatggaaattcctcaaaaa

SEQ ID NO: 101522 - DNA, 20 bp, synthetic construct
  source 1..20: mol_type = other DNA
agtatggaaattcctcaaaa

SEQ ID NO: 101523 - DNA, 20 bp, synthetic construct
  source 1..20: mol_type = other DNA
cagtatggaaattcctcaaa

SEQ ID NO: 101524 - DNA, 20 bp, synthetic construct
  source 1..20: mol_type = other DNA
acagtatggaaattcctcaa

SEQ ID NO: 101525 - DNA, 20 bp, synthetic construct
  source 1..20: mol_type = other DNA
aacagtatggaaattcctca

SEQ ID NO: 101526 - DNA, 20 bp, synthetic construct
  source 1..20: mol_type = other DNA
gaacagtatggaaattcctc

SEQ ID NO: 101527 - DNA, 20 bp, synthetic construct
  source 1..20: mol_type = other DNA
agaacagtatggaaattcct

SEQ ID NO: 101528 - DNA, 20 bp, synthetic construct
  source 1..20: mol_type = other DNA
gagaacagtatggaaattcc

SEQ ID NO: 101529 - DNA, 20 bp, synthetic construct
  source 1..20: mol_type = other DNA
ggagaacagtatggaaattc

SEQ ID NO: 101530 - DNA, 20 bp, synthetic construct
  source 1..20: mol_type = other DNA
tggagaacagtatggaaatt

SEQ ID NO: 101531 - DNA, 20 bp, synthetic construct
  source 1..20: mol_type = other DNA
atggagaacagtatggaaat

SEQ ID NO: 101532 - DNA, 20 bp, synthetic construct
  source 1..20: mol_type = other DNA
tatggagaacagtatggaaa

SEQ ID NO: 101533 - DNA, 20 bp, synthetic construct
  source 1..20: mol_type = other DNA
ctatggagaacagtatggaa

SEQ ID NO: 101534 - DNA, 20 bp, synthetic construct
  source 1..20: mol_type = other DNA
actatggagaacagtatgga

SEQ ID NO: 101535 - DNA, 20 bp, synthetic construct
  source 1..20: mol_type = other DNA
cactatggagaacagtatgg

SEQ ID NO: 101536 - DNA, 20 bp, synthetic construct
  source 1..20: mol_type = other DNA
ccactatggagaacagtatg

SEQ ID NO: 101537 - DNA, 20 bp, synthetic construct
  source 1..20: mol_type = other DNA
accactatggagaacagtat

SEQ ID NO: 101538 - DNA, 20 bp, synthetic construct
  source 1..20: mol_type = other DNA
aaccactatggagaacagta

SEQ ID NO: 101539 - DNA, 20 bp, synthetic construct
  source 1..20: mol_type = other DNA
aaaccactatggagaacagt

SEQ ID NO: 101540 - DNA, 20 bp, synthetic construct
  source 1..20: mol_type = other DNA
aaaaccactatggagaacag

SEQ ID NO: 101541 - DNA, 20 bp, synthetic construct
  source 1..20: mol_type = other DNA
taaaaccactatggagaaca

SEQ ID NO: 101542 - DNA, 20 bp, synthetic construct
  source 1..20: mol_type = other DNA
gtaaaaccactatggagaac

SEQ ID NO: 101543 - DNA, 20 bp, synthetic construct
  source 1..20: mol_type = other DNA
ggtaaaaccactatggagaa

SEQ ID NO: 101544 - DNA, 20 bp, synthetic construct
  source 1..20: mol_type = other DNA
tggtaaaaccactatggaga

SEQ ID NO: 101545 - DNA, 20 bp, synthetic construct
  source 1..20: mol_type = other DNA
ttggtaaaaccactatggag

SEQ ID NO: 101546 - DNA, 20 bp, synthetic construct
  source 1..20: mol_type = other DNA
attggtaaaaccactatgga

SEQ ID NO: 101547 - DNA, 20 bp, synthetic construct
  source 1..20: mol_type = other DNA
aattggtaaaaccactatgg

SEQ ID NO: 101548 - DNA, 20 bp, synthetic construct
  source 1..20: mol_type = other DNA
aaattggtaaaaccactatg

SEQ ID NO: 101549 - DNA, 20 bp, synthetic construct
  source 1..20: mol_type = other DNA
taaattggtaaaaccactat

SEQ ID NO: 101550 - DNA, 20 bp, synthetic construct
  source 1..20: mol_type = other DNA
gtaaattggtaaaaccacta

SEQ ID NO: 101551 - DNA, 20 bp, synthetic construct
  source 1..20: mol_type = other DNA
tgtaaattggtaaaaccact

SEQ ID NO: 101552 - DNA, 20 bp, synthetic construct
  source 1..20: mol_type = other DNA
atgtaaattggtaaaaccac

SEQ ID NO: 101553 - DNA, 20 bp, synthetic construct
  source 1..20: mol_type = other DNA
catgtaaattggtaaaacca

SEQ ID NO: 101554 - DNA, 20 bp, synthetic construct
  source 1..20: mol_type = other DNA
acatgtaaattggtaaaacc

SEQ ID NO: 101555 - DNA, 20 bp, synthetic construct
  source 1..20: mol_type = other DNA
gacatgtaaattggtaaaac

SEQ ID NO: 101556 - DNA, 20 bp, synthetic construct
  source 1..20: mol_type = other DNA
ggacatgtaaattggtaaaa

SEQ ID NO: 101557 - DNA, 20 bp, synthetic construct
  source 1..20: mol_type = other DNA
tggacatgtaaattggtaaa

SEQ ID NO: 101558 - DNA, 20 bp, synthetic construct
  source 1..20: mol_type = other DNA
gtggacatgtaaattggtaa

SEQ ID NO: 101559 - DNA, 20 bp, synthetic construct
  source 1..20: mol_type = other DNA
ggtggacatgtaaattggta

SEQ ID NO: 101560 - DNA, 20 bp, synthetic construct
  source 1..20: mol_type = other DNA
tggtggacatgtaaattggt

SEQ ID NO: 101561 - DNA, 20 bp, synthetic construct
  source 1..20: mol_type = other DNA
ttggtggacatgtaaattgg

SEQ ID NO: 101562 - DNA, 20 bp, synthetic construct
  source 1..20: mol_type = other DNA
gttggtggacatgtaaattg

SEQ ID NO: 101563 - DNA, 20 bp, synthetic construct
  source 1..20: mol_type = other DNA
tgttggtggacatgtaaatt

SEQ ID NO: 101564 - DNA, 20 bp, synthetic construct
  source 1..20: mol_type = other DNA
ctgttggtggacatgtaaat

SEQ ID NO: 101565 - DNA, 20 bp, synthetic construct
  source 1..20: mol_type = other DNA
actgttggtggacatgtaaa

SEQ ID NO: 101566 - DNA, 20 bp, synthetic construct
  source 1..20: mol_type = other DNA
cactgttggtggacatgtaa

SEQ ID NO: 101567 - DNA, 20 bp, synthetic construct
  source 1..20: mol_type = other DNA
acactgttggtggacatgta

SEQ ID NO: 101568 - DNA, 20 bp, synthetic construct
  source 1..20: mol_type = other DNA
cacactgttggtggacatgt

SEQ ID NO: 101569 - DNA, 20 bp, synthetic construct
  source 1..20: mol_type = other DNA
acacactgttggtggacatg

SEQ ID NO: 101570 - DNA, 20 bp, synthetic construct
  source 1..20: mol_type = other DNA
cacacactgttggtggacat

SEQ ID NO: 101571 - DNA, 20 bp, synthetic construct
  source 1..20: mol_type = other DNA
tcacacactgttggtggaca

SEQ ID NO: 101572 - DNA, 20 bp, synthetic construct
  source 1..20: mol_type = other DNA
ttcacacactgttggtggac

SEQ ID NO: 101573 - DNA, 20 bp, synthetic construct
  source 1..20: mol_type = other DNA
cttcacacactgttggtgga

SEQ ID NO: 101574 - DNA, 20 bp, synthetic construct
  source 1..20: mol_type = other DNA
ccttcacacactgttggtgg

SEQ ID NO: 101575 - DNA, 20 bp, synthetic construct
  source 1..20: mol_type = other DNA
accttcacacactgttggtg

SEQ ID NO: 101576 - DNA, 20 bp, synthetic construct
  source 1..20: mol_type = other DNA
aaccttcacacactgttggt

SEQ ID NO: 101577 - DNA, 20 bp, synthetic construct
  source 1..20: mol_type = other DNA
gaaccttcacacactgttgg

SEQ ID NO: 101578 - DNA, 20 bp, synthetic construct
  source 1..20: mol_type = other DNA
ggaaccttcacacactgttg

SEQ ID NO: 101579 - DNA, 20 bp, synthetic construct
  source 1..20: mol_type = other DNA
gggaaccttcacacactgtt

SEQ ID NO: 101580 - DNA, 20 bp, synthetic construct
  source 1..20: mol_type = other DNA
ggggaaccttcacacactgt

SEQ ID NO: 101581 - DNA, 20 bp, synthetic construct
  source 1..20: mol_type = other DNA
aggggaaccttcacacactg

SEQ ID NO: 101582 - DNA, 20 bp, synthetic construct
  source 1..20: mol_type = other DNA
aaggggaaccttcacacact

SEQ ID NO: 101583 - DNA, 20 bp, synthetic construct
  source 1..20: mol_type = other DNA
aaaggggaaccttcacacac

SEQ ID NO: 101584 - DNA, 20 bp, synthetic construct
  source 1..20: mol_type = other DNA
taaaggggaaccttcacaca

SEQ ID NO: 101585 - DNA, 20 bp, synthetic construct
  source 1..20: mol_type = other DNA
ataaaggggaaccttcacac

SEQ ID NO: 101586 - DNA, 20 bp, synthetic construct
  source 1..20: mol_type = other DNA
gataaaggggaaccttcaca

SEQ ID NO: 101587 - DNA, 20 bp, synthetic construct
  source 1..20: mol_type = other DNA
ggataaaggggaaccttcac

SEQ ID NO: 101588 - DNA, 20 bp, synthetic construct
  source 1..20: mol_type = other DNA
tggataaaggggaaccttca

SEQ ID NO: 101589 - DNA, 20 bp, synthetic construct
  source 1..20: mol_type = other DNA
gtggataaaggggaaccttc

SEQ ID NO: 101590 - DNA, 20 bp, synthetic construct
  source 1..20: mol_type = other DNA
tgtggataaaggggaacctt

SEQ ID NO: 101591 - DNA, 20 bp, synthetic construct
  source 1..20: mol_type = other DNA
atgtggataaaggggaacct

SEQ ID NO: 101592 - DNA, 20 bp, synthetic construct
  source 1..20: mol_type = other DNA
gatgtggataaaggggaacc

SEQ ID NO: 101593 - DNA, 20 bp, synthetic construct
  source 1..20: mol_type = other DNA
cgatgtggataaaggggaac

SEQ ID NO: 101594 - DNA, 20 bp, synthetic construct
  source 1..20: mol_type = other DNA
acgatgtggataaaggggaa

SEQ ID NO: 101595 - DNA, 20 bp, synthetic construct
  source 1..20: mol_type = other DNA
aacgatgtggataaagggga

SEQ ID NO: 101596 - DNA, 20 bp, synthetic construct
  source 1..20: mol_type = other DNA
taacgatgtggataaagggg

SEQ ID NO: 101597 - DNA, 20 bp, synthetic construct
  source 1..20: mol_type = other DNA
gtaacgatgtggataaaggg

SEQ ID NO: 101598 - DNA, 20 bp, synthetic construct
  source 1..20: mol_type = other DNA
ggtaacgatgtggataaagg

SEQ ID NO: 101599 - DNA, 20 bp, synthetic construct
  source 1..20: mol_type = other DNA
tggtaacgatgtggataaag

SEQ ID NO: 101600 - DNA, 20 bp, synthetic construct
  source 1..20: mol_type = other DNA
ctggtaacgatgtggataaa

SEQ ID NO: 101601 - DNA, 20 bp, synthetic construct
  source 1..20: mol_type = other DNA
gctggtaacgatgtggataa

SEQ ID NO: 101602 - DNA, 20 bp, synthetic construct
  source 1..20: mol_type = other DNA
tgctggtaacgatgtggata

SEQ ID NO: 101603 - DNA, 20 bp, synthetic construct
  source 1..20: mol_type = other DNA
atgctggtaacgatgtggat

SEQ ID NO: 101604 - DNA, 20 bp, synthetic construct
  source 1..20: mol_type = other DNA
aatgctggtaacgatgtgga

SEQ ID NO: 101605 - DNA, 20 bp, synthetic construct
  source 1..20: mol_type = other DNA
aaatgctggtaacgatgtgg

SEQ ID NO: 101606 - DNA, 20 bp, synthetic construct
  source 1..20: mol_type = other DNA
caaatgctggtaacgatgtg

SEQ ID NO: 101607 - DNA, 20 bp, synthetic construct
  source 1..20: mol_type = other DNA
acaaatgctggtaacgatgt

SEQ ID NO: 101608 - DNA, 20 bp, synthetic construct
  source 1..20: mol_type = other DNA
aacaaatgctggtaacgatg

SEQ ID NO: 101609 - DNA, 20 bp, synthetic construct
  source 1..20: mol_type = other DNA
taacaaatgctggtaacgat

SEQ ID NO: 101610 - DNA, 20 bp, synthetic construct
  source 1..20: mol_type = other DNA
ataacaaatgctggtaacga

SEQ ID NO: 101611 - DNA, 20 bp, synthetic construct
  source 1..20: mol_type = other DNA
aataacaaatgctggtaacg

SEQ ID NO: 101612 - DNA, 20 bp, synthetic construct
  source 1..20: mol_type = other DNA
caataacaaatgctggtaac

SEQ ID NO: 101613 - DNA, 20 bp, synthetic construct
  source 1..20: mol_type = other DNA
gcaataacaaatgctggtaa

SEQ ID NO: 101614 - DNA, 20 bp, synthetic construct
  source 1..20: mol_type = other DNA
ggcaataacaaatgctggta

SEQ ID NO: 101615 - DNA, 20 bp, synthetic construct
  source 1..20: mol_type = other DNA
aggcaataacaaatgctggt

SEQ ID NO: 101616 - DNA, 20 bp, synthetic construct
  source 1..20: mol_type = other DNA
caggcaataacaaatgctgg

SEQ ID NO: 101617 - DNA, 20 bp, synthetic construct
  source 1..20: mol_type = other DNA
acaggcaataacaaatgctg

SEQ ID NO: 101618 - DNA, 20 bp, synthetic construct
  source 1..20: mol_type = other DNA
gacaggcaataacaaatgct

SEQ ID NO: 101619 - DNA, 20 bp, synthetic construct
  source 1..20: mol_type = other DNA
agacaggcaataacaaatgc

SEQ ID NO: 101620 - DNA, 20 bp, synthetic construct
  source 1..20: mol_type = other DNA
aagacaggcaataacaaatg

SEQ ID NO: 101621 - DNA, 20 bp, synthetic construct
  source 1..20: mol_type = other DNA
aaagacaggcaataacaaat

SEQ ID NO: 101622 - DNA, 20 bp, synthetic construct
  source 1..20: mol_type = other DNA
aaaagacaggcaataacaaa

SEQ ID NO: 101623 - DNA, 20 bp, synthetic construct
  source 1..20: mol_type = other DNA
caaaagacaggcaataacaa

SEQ ID NO: 101624 - DNA, 20 bp, synthetic construct
  source 1..20: mol_type = other DNA
ccaaaagacaggcaataaca

SEQ ID NO: 101625 - DNA, 20 bp, synthetic construct
  source 1..20: mol_type = other DNA
tccaaaagacaggcaataac

SEQ ID NO: 101626 - DNA, 20 bp, synthetic construct
  source 1..20: mol_type = other DNA
atccaaaagacaggcaataa

SEQ ID NO: 101627 - DNA, 20 bp, synthetic construct
  source 1..20: mol_type = other DNA
tatccaaaagacaggcaata

SEQ ID NO: 101628 - DNA, 20 bp, synthetic construct
  source 1..20: mol_type = other DNA
ttatccaaaagacaggcaat

SEQ ID NO: 101629 - DNA, 20 bp, synthetic construct
  source 1..20: mol_type = other DNA
tttatccaaaagacaggcaa

SEQ ID NO: 101630 - DNA, 20 bp, synthetic construct
  source 1..20: mol_type = other DNA
ttttatccaaaagacaggca

SEQ ID NO: 101631 - DNA, 20 bp, synthetic construct
  source 1..20: mol_type = other DNA
cttttatccaaaagacaggc

SEQ ID NO: 101632 - DNA, 20 bp, synthetic construct
  source 1..20: mol_type = other DNA
gcttttatccaaaagacagg

SEQ ID NO: 101633 - DNA, 20 bp, synthetic construct
  source 1..20: mol_type = other DNA
ggcttttatccaaaagacag

SEQ ID NO: 101634 - DNA, 20 bp, synthetic construct
  source 1..20: mol_type = other DNA
tggcttttatccaaaagaca

SEQ ID NO: 101635 - DNA, 20 bp, synthetic construct
  source 1..20: mol_type = other DNA
atggcttttatccaaaagac

SEQ ID NO: 101636 - DNA, 20 bp, synthetic construct
  source 1..20: mol_type = other DNA
aatggcttttatccaaaaga

SEQ ID NO: 101637 - DNA, 20 bp, synthetic construct
  source 1..20: mol_type = other DNA
aaatggcttttatccaaaag

SEQ ID NO: 101638 - DNA, 20 bp, synthetic construct
  source 1..20: mol_type = other DNA
aaaatggcttttatccaaaa

SEQ ID NO: 101639 - DNA, 20 bp, synthetic construct
  source 1..20: mol_type = other DNA
taaaatggcttttatccaaa

SEQ ID NO: 101640 - DNA, 20 bp, synthetic construct
  source 1..20: mol_type = other DNA
ttaaaatggcttttatccaa

SEQ ID NO: 101641 - DNA, 20 bp, synthetic construct
  source 1..20: mol_type = other DNA
gttaaaatggcttttatcca

SEQ ID NO: 101642 - DNA, 20 bp, synthetic construct
  source 1..20: mol_type = other DNA
agttaaaatggcttttatcc

SEQ ID NO: 101643 - DNA, 20 bp, synthetic construct
  source 1..20: mol_type = other DNA
cagttaaaatggcttttatc

SEQ ID NO: 101644 - DNA, 20 bp, synthetic construct
  source 1..20: mol_type = other DNA
ccagttaaaatggcttttat

SEQ ID NO: 101645 - DNA, 20 bp, synthetic construct
  source 1..20: mol_type = other DNA
cccagttaaaatggctttta

SEQ ID NO: 101646 - DNA, 20 bp, synthetic construct
  source 1..20: mol_type = other DNA
ccccagttaaaatggctttt

SEQ ID NO: 101647 - DNA, 20 bp, synthetic construct
  source 1..20: mol_type = other DNA
accccagttaaaatggcttt

SEQ ID NO: 101648 - DNA, 20 bp, synthetic construct
  source 1..20: mol_type = other DNA
caccccagttaaaatggctt

SEQ ID NO: 101649 - DNA, 20 bp, synthetic construct
  source 1..20: mol_type = other DNA
tcaccccagttaaaatggct

SEQ ID NO: 101650 - DNA, 20 bp, synthetic construct
  source 1..20: mol_type = other DNA
ctcaccccagttaaaatggc

SEQ ID NO: 101651 - DNA, 20 bp, synthetic construct
  source 1..20: mol_type = other DNA
tctcaccccagttaaaatgg

SEQ ID NO: 101652 - DNA, 20 bp, synthetic construct
  source 1..20: mol_type = other DNA
atctcaccccagttaaaatg

SEQ ID NO: 101653 - DNA, 20 bp, synthetic construct
  source 1..20: mol_type = other DNA
catctcaccccagttaaaat

SEQ ID NO: 101654 - DNA, 20 bp, synthetic construct
  source 1..20: mol_type = other DNA
tcatctcaccccagttaaaa

SEQ ID NO: 101655 - DNA, 20 bp, synthetic construct
  source 1..20: mol_type = other DNA
atcatctcaccccagttaaa

SEQ ID NO: 101656 - DNA, 20 bp, synthetic construct
  source 1..20: mol_type = other DNA
tatcatctcaccccagttaa

SEQ ID NO: 101657 - DNA, 20 bp, synthetic construct
  source 1..20: mol_type = other DNA
atatcatctcaccccagtta

SEQ ID NO: 101658 - DNA, 20 bp, synthetic construct
  source 1..20: mol_type = other DNA
gatatcatctcaccccagtt

SEQ ID NO: 101659 - DNA, 20 bp, synthetic construct
  source 1..20: mol_type = other DNA
agatatcatctcaccccagt

SEQ ID NO: 101660 - DNA, 20 bp, synthetic construct
  source 1..20: mol_type = other DNA
aagatatcatctcaccccag

SEQ ID NO: 101661 - DNA, 20 bp, synthetic construct
  source 1..20: mol_type = other DNA
caagatatcatctcacccca

SEQ ID NO: 101662 - DNA, 20 bp, synthetic construct
  source 1..20: mol_type = other DNA
acaagatatcatctcacccc

SEQ ID NO: 101663 - DNA, 20 bp, synthetic construct
  source 1..20: mol_type = other DNA
aacaagatatcatctcaccc

SEQ ID NO: 101664 - DNA, 20 bp, synthetic construct
  source 1..20: mol_type = other DNA
caacaagatatcatctcacc

SEQ ID NO: 101665 - DNA, 20 bp, synthetic construct
  source 1..20: mol_type = other DNA
acaacaagatatcatctcac

SEQ ID NO: 101666 - DNA, 20 bp, synthetic construct
  source 1..20: mol_type = other DNA
tacaacaagatatcatctca

SEQ ID NO: 101667 - DNA, 20 bp, synthetic construct
  source 1..20: mol_type = other DNA
ctacaacaagatatcatctc

SEQ ID NO: 101668 - DNA, 20 bp, synthetic construct
  source 1..20: mol_type = other DNA
actacaacaagatatcatct

SEQ ID NO: 101669 - DNA, 20 bp, synthetic construct
  source 1..20: mol_type = other DNA
aactacaacaagatatcatc

SEQ ID NO: 101670 - DNA, 20 bp, synthetic construct
  source 1..20: mol_type = other DNA
aaactacaacaagatatcat

SEQ ID NO: 101671 - DNA, 20 bp, synthetic construct
  source 1..20: mol_type = other DNA
aaaactacaacaagatatca

SEQ ID NO: 101672 - DNA, 20 bp, synthetic construct
  source 1..20: mol_type = other DNA
taaaactacaacaagatatc

SEQ ID NO: 101673 - DNA, 20 bp, synthetic construct
  source 1..20: mol_type = other DNA
ttaaaactacaacaagatat

SEQ ID NO: 101674 - DNA, 20 bp, synthetic construct
  source 1..20: mol_type = other DNA
attaaaactacaacaagata

SEQ ID NO: 101675 - DNA, 20 bp, synthetic construct
  source 1..20: mol_type = other DNA
aattaaaactacaacaagat

SEQ ID NO: 101676 - DNA, 20 bp, synthetic construct
  source 1..20: mol_type = other DNA
aaattaaaactacaacaaga

SEQ ID NO: 101677 - DNA, 20 bp, synthetic construct
  source 1..20: mol_type = other DNA
gaaattaaaactacaacaag

SEQ ID NO: 101678 - DNA, 20 bp, synthetic construct
  source 1..20: mol_type = other DNA
ggaaattaaaactacaacaa

SEQ ID NO: 101679 - DNA, 20 bp, synthetic construct
  source 1..20: mol_type = other DNA
tggaaattaaaactacaaca

SEQ ID NO: 101680 - DNA, 20 bp, synthetic construct
  source 1..20: mol_type = other DNA
atggaaattaaaactacaac

SEQ ID NO: 101681 - DNA, 20 bp, synthetic construct
  source 1..20: mol_type = other DNA
aatggaaattaaaactacaa

SEQ ID NO: 101682 - DNA, 20 bp, synthetic construct
  source 1..20: mol_type = other DNA
aaatggaaattaaaactaca

SEQ ID NO: 101683 - DNA, 20 bp, synthetic construct
  source 1..20: mol_type = other DNA
aaaatggaaattaaaactac

SEQ ID NO: 101684 - DNA, 20 bp, synthetic construct
  source 1..20: mol_type = other DNA
aaaaatggaaattaaaacta

SEQ ID NO: 101685 - DNA, 20 bp, synthetic construct
  source 1..20: mol_type = other DNA
gaaaaatggaaattaaaact

SEQ ID NO: 101686 - DNA, 20 bp, synthetic construct
  source 1..20: mol_type = other DNA
agaaaaatggaaattaaaac

SEQ ID NO: 101687 - DNA, 20 bp, synthetic construct
  source 1..20: mol_type = other DNA
cagaaaaatggaaattaaaa

SEQ ID NO: 101688 - DNA, 20 bp, synthetic construct
  source 1..20: mol_type = other DNA
ccagaaaaatggaaattaaa

SEQ ID NO: 101689 - DNA, 20 bp, synthetic construct
  source 1..20: mol_type = other DNA
accagaaaaatggaaattaa

SEQ ID NO: 101690 - DNA, 20 bp, synthetic construct
  source 1..20: mol_type = other DNA
caccagaaaaatggaaatta

SEQ ID NO: 101691 - DNA, 20 bp, synthetic construct
  source 1..20: mol_type = other DNA
tcaccagaaaaatggaaatt

SEQ ID NO: 101692 - DNA, 20 bp, synthetic construct
  source 1..20: mol_type = other DNA
atcaccagaaaaatggaaat

SEQ ID NO: 101693 - DNA, 20 bp, synthetic construct
  source 1..20: mol_type = other DNA
gatcaccagaaaaatggaaa

SEQ ID NO: 101694 - DNA, 20 bp, synthetic construct
  source 1..20: mol_type = other DNA
tgatcaccagaaaaatggaa

SEQ ID NO: 101695 - DNA, 20 bp, synthetic construct
  source 1..20: mol_type = other DNA
ctgatcaccagaaaaatgga

SEQ ID NO: 101696 - DNA, 20 bp, synthetic construct
  source 1..20: mol_type = other DNA
actgatcaccagaaaaatgg

SEQ ID NO: 101697 - DNA, 20 bp, synthetic construct
  source 1..20: mol_type = other DNA
tactgatcaccagaaaaatg

SEQ ID NO: 101698 - DNA, 20 bp, synthetic construct
  source 1..20: mol_type = other DNA
ctactgatcaccagaaaaat

SEQ ID NO: 101699 - DNA, 20 bp, synthetic construct
  source 1..20: mol_type = other DNA
actactgatcaccagaaaaa

SEQ ID NO: 101700 - DNA, 20 bp, synthetic construct
  source 1..20: mol_type = other DNA
tactactgatcaccagaaaa

SEQ ID NO: 101701 - DNA, 20 bp, synthetic construct
  source 1..20: mol_type = other DNA
atactactgatcaccagaaa

SEQ ID NO: 101702 - DNA, 20 bp, synthetic construct
  source 1..20: mol_type = other DNA
aatactactgatcaccagaa

SEQ ID NO: 101703 - DNA, 20 bp, synthetic construct
  source 1..20: mol_type = other DNA
caatactactgatcaccaga

SEQ ID NO: 101704 - DNA, 20 bp, synthetic construct
  source 1..20: mol_type = other DNA
tcaatactactgatcaccag

SEQ ID NO: 101705 - DNA, 20 bp, synthetic construct
  source 1..20: mol_type = other DNA
ttcaatactactgatcacca

SEQ ID NO: 101706 - DNA, 20 bp, synthetic construct
  source 1..20: mol_type = other DNA
attcaatactactgatcacc

SEQ ID NO: 101707 - DNA, 20 bp, synthetic construct
  source 1..20: mol_type = other DNA
tattcaatactactgatcac

SEQ ID NO: 101708 - DNA, 20 bp, synthetic construct
  source 1..20: mol_type = other DNA
gtattcaatactactgatca

SEQ ID NO: 101709 - DNA, 20 bp, synthetic construct
  source 1..20: mol_type = other DNA
ggtattcaatactactgatc

SEQ ID NO: 101710 - DNA, 20 bp, synthetic construct
  source 1..20: mol_type = other DNA
aggtattcaatactactgat

SEQ ID NO: 101711 - DNA, 20 bp, synthetic construct
  source 1..20: mol_type = other DNA
aaggtattcaatactactga

SEQ ID NO: 101712 - DNA, 20 bp, synthetic construct
  source 1..20: mol_type = other DNA
aaaggtattcaatactactg

SEQ ID NO: 101713 - DNA, 20 bp, synthetic construct
  source 1..20: mol_type = other DNA
gaaaggtattcaatactact

SEQ ID NO: 101714 - DNA, 20 bp, synthetic construct
  source 1..20: mol_type = other DNA
tgaaaggtattcaatactac

SEQ ID NO: 101715 - DNA, 20 bp, synthetic construct
  source 1..20: mol_type = other DNA
atgaaaggtattcaatacta

SEQ ID NO: 101716 - DNA, 20 bp, synthetic construct
  source 1..20: mol_type = other DNA
tatgaaaggtattcaatact

SEQ ID NO: 101717 - DNA, 20 bp, synthetic construct
  source 1..20: mol_type = other DNA
atatgaaaggtattcaatac

SEQ ID NO: 101718 - DNA, 20 bp, synthetic construct
  source 1..20: mol_type = other DNA
tatatgaaaggtattcaata

SEQ ID NO: 101719 - DNA, 20 bp, synthetic construct
  source 1..20: mol_type = other DNA
gtatatgaaaggtattcaat

SEQ ID NO: 101720 - DNA, 20 bp, synthetic construct
  source 1..20: mol_type = other DNA
ggtatatgaaaggtattcaa

SEQ ID NO: 101721 - DNA, 20 bp, synthetic construct
  source 1..20: mol_type = other DNA
aggtatatgaaaggtattca

SEQ ID NO: 101722 - DNA, 20 bp, synthetic construct
  source 1..20: mol_type = other DNA
caggtatatgaaaggtattc

SEQ ID NO: 101723 - DNA, 20 bp, synthetic construct
  source 1..20: mol_type = other DNA
acaggtatatgaaaggtatt

SEQ ID NO: 101724 - DNA, 20 bp, synthetic construct
  source 1..20: mol_type = other DNA
aacaggtatatgaaaggtat

SEQ ID NO: 101725 - DNA, 20 bp, synthetic construct
  source 1..20: mol_type = other DNA
aaacaggtatatgaaaggta

SEQ ID NO: 101726 - DNA, 20 bp, synthetic construct
  source 1..20: mol_type = other DNA
caaacaggtatatgaaaggt

SEQ ID NO: 101727 - DNA, 20 bp, synthetic construct
  source 1..20: mol_type = other DNA
gcaaacaggtatatgaaagg

SEQ ID NO: 101728 - DNA, 20 bp, synthetic construct
  source 1..20: mol_type = other DNA
ggcaaacaggtatatgaaag

SEQ ID NO: 101729 - DNA, 20 bp, synthetic construct
  source 1..20: mol_type = other DNA
tggcaaacaggtatatgaaa

SEQ ID NO: 101730 - DNA, 20 bp, synthetic construct
  source 1..20: mol_type = other DNA
atggcaaacaggtatatgaa

SEQ ID NO: 101731 - DNA, 20 bp, synthetic construct
  source 1..20: mol_type = other DNA
aatggcaaacaggtatatga

SEQ ID NO: 101732 - DNA, 20 bp, synthetic construct
  source 1..20: mol_type = other DNA
gaatggcaaacaggtatatg

SEQ ID NO: 101733 - DNA, 20 bp, synthetic construct
  source 1..20: mol_type = other DNA
tgaatggcaaacaggtatat

SEQ ID NO: 101734 - DNA, 20 bp, synthetic construct
  source 1..20: mol_type = other DNA
atgaatggcaaacaggtata

SEQ ID NO: 101735 - DNA, 20 bp, synthetic construct
  source 1..20: mol_type = other DNA
tatgaatggcaaacaggtat

SEQ ID NO: 101736 - DNA, 20 bp, synthetic construct
  source 1..20: mol_type = other DNA
ttatgaatggcaaacaggta

SEQ ID NO: 101737 - DNA, 20 bp, synthetic construct
  source 1..20: mol_type = other DNA
tttatgaatggcaaacaggt

SEQ ID NO: 101738 - DNA, 20 bp, synthetic construct
  source 1..20: mol_type = other DNA
atttatgaatggcaaacagg

SEQ ID NO: 101739 - DNA, 20 bp, synthetic construct
  source 1..20: mol_type = other DNA
tatttatgaatggcaaacag

SEQ ID NO: 101740 - DNA, 20 bp, synthetic construct
  source 1..20: mol_type = other DNA
ttatttatgaatggcaaaca

SEQ ID NO: 101741 - DNA, 20 bp, synthetic construct
  source 1..20: mol_type = other DNA
gttatttatgaatggcaaac

SEQ ID NO: 101742 - DNA, 20 bp, synthetic construct
  source 1..20: mol_type = other DNA
cgttatttatgaatggcaaa

SEQ ID NO: 101743 - DNA, 20 bp, synthetic construct
  source 1..20: mol_type = other DNA
tcgttatttatgaatggcaa

SEQ ID NO: 101744 - DNA, 20 bp, synthetic construct
  source 1..20: mol_type = other DNA
atcgttatttatgaatggca

SEQ ID NO: 101745 - DNA, 20 bp, synthetic construct
  source 1..20: mol_type = other DNA
catcgttatttatgaatggc

SEQ ID NO: 101746 - DNA, 20 bp, synthetic construct
  source 1..20: mol_type = other DNA
tcatcgttatttatgaatgg

SEQ ID NO: 101747 - DNA, 20 bp, synthetic construct
  source 1..20: mol_type = other DNA
ctcatcgttatttatgaatg

SEQ ID NO: 101748 - DNA, 20 bp, synthetic construct
  source 1..20: mol_type = other DNA
cctcatcgttatttatgaat

SEQ ID NO: 101749 - DNA, 20 bp, synthetic construct
  source 1..20: mol_type = other DNA
acctcatcgttatttatgaa

SEQ ID NO: 101750 - DNA, 20 bp, synthetic construct
  source 1..20: mol_type = other DNA
gacctcatcgttatttatga

SEQ ID NO: 101751 - DNA, 20 bp, synthetic construct
  source 1..20: mol_type = other DNA
agacctcatcgttatttatg

SEQ ID NO: 101752 - DNA, 20 bp, synthetic construct
  source 1..20: mol_type = other DNA
aagacctcatcgttatttat

SEQ ID NO: 101753 - DNA, 20 bp, synthetic construct
  source 1..20: mol_type = other DNA
caagacctcatcgttattta

SEQ ID NO: 101754 - DNA, 20 bp, synthetic construct
  source 1..20: mol_type = other DNA
gcaagacctcatcgttattt

SEQ ID NO: 101755 - DNA, 20 bp, synthetic construct
  source 1..20: mol_type = other DNA
agcaagacctcatcgttatt

SEQ ID NO: 101756 - DNA, 20 bp, synthetic construct
  source 1..20: mol_type = other DNA
cagcaagacctcatcgttat

SEQ ID NO: 101757 - DNA, 20 bp, synthetic construct
  source 1..20: mol_type = other DNA
acagcaagacctcatcgtta

SEQ ID NO: 101758 - DNA, 20 bp, synthetic construct
  source 1..20: mol_type = other DNA
aacagcaagacctcatcgtt

SEQ ID NO: 101759 - DNA, 20 bp, synthetic construct
  source 1..20: mol_type = other DNA
aaacagcaagacctcatcgt

SEQ ID NO: 101760 - DNA, 20 bp, synthetic construct
  source 1..20: mol_type = other DNA
caaacagcaagacctcatcg

SEQ ID NO: 101761 - DNA, 20 bp, synthetic construct
  source 1..20: mol_type = other DNA
ccaaacagcaagacctcatc

SEQ ID NO: 101762 - DNA, 20 bp, synthetic construct
  source 1..20: mol_type = other DNA
gccaaacagcaagacctcat

SEQ ID NO: 101763 - DNA, 20 bp, synthetic construct
  source 1..20: mol_type = other DNA
ggccaaacagcaagacctca

SEQ ID NO: 101764 - DNA, 20 bp, synthetic construct
  source 1..20: mol_type = other DNA
gggccaaacagcaagacctc

SEQ ID NO: 101765 - DNA, 20 bp, synthetic construct
  source 1..20: mol_type = other DNA
tgggccaaacagcaagacct

SEQ ID NO: 101766 - DNA, 20 bp, synthetic construct
  source 1..20: mol_type = other DNA
ctgggccaaacagcaagacc

SEQ ID NO: 101767 - DNA, 20 bp, synthetic construct
  source 1..20: mol_type = other DNA
cctgggccaaacagcaagac

SEQ ID NO: 101768 - DNA, 20 bp, synthetic construct
  source 1..20: mol_type = other DNA
gcctgggccaaacagcaaga

SEQ ID NO: 101769 - DNA, 20 bp, synthetic construct
  source 1..20: mol_type = other DNA
agcctgggccaaacagcaag

SEQ ID NO: 101770 - DNA, 20 bp, synthetic construct
  source 1..20: mol_type = other DNA
cagcctgggccaaacagcaa

SEQ ID NO: 101771 - DNA, 20 bp, synthetic construct
  source 1..20: mol_type = other DNA
ccagcctgggccaaacagca

SEQ ID NO: 101772 - DNA, 20 bp, synthetic construct
  source 1..20: mol_type = other DNA
accagcctgggccaaacagc

SEQ ID NO: 101773 - DNA, 20 bp, synthetic construct
  source 1..20: mol_type = other DNA
gaccagcctgggccaaacag

SEQ ID NO: 101774 - DNA, 20 bp, synthetic construct
  source 1..20: mol_type = other DNA
agaccagcctgggccaaaca

SEQ ID NO: 101775 - DNA, 20 bp, synthetic construct
  source 1..20: mol_type = other DNA
gagaccagcctgggccaaac

SEQ ID NO: 101776 - DNA, 20 bp, synthetic construct
  source 1..20: mol_type = other DNA
cgagaccagcctgggccaaa

SEQ ID NO: 101777 - DNA, 20 bp, synthetic construct
  source 1..20: mol_type = other DNA
tcgagaccagcctgggccaa

SEQ ID NO: 101778 - DNA, 20 bp, synthetic construct
  source 1..20: mol_type = other DNA
ttcgagaccagcctgggcca

SEQ ID NO: 101779 - DNA, 20 bp, synthetic construct
  source 1..20: mol_type = other DNA
gttcgagaccagcctgggcc

SEQ ID NO: 101780 - DNA, 20 bp, synthetic construct
  source 1..20: mol_type = other DNA
agttcgagaccagcctgggc

SEQ ID NO: 101781 - DNA, 20 bp, synthetic construct
  source 1..20: mol_type = other DNA
gagttcgagaccagcctggg

SEQ ID NO: 101782 - DNA, 20 bp, synthetic construct
  source 1..20: mol_type = other DNA
ggagttcgagaccagcctgg

SEQ ID NO: 101783 - DNA, 20 bp, synthetic construct
  source 1..20: mol_type = other DNA
aggagttcgagaccagcctg

SEQ ID NO: 101784 - DNA, 20 bp, synthetic construct
  source 1..20: mol_type = other DNA
caggagttcgagaccagcct

SEQ ID NO: 101785 - DNA, 20 bp, synthetic construct
  source 1..20: mol_type = other DNA
ccaggagttcgagaccagcc

SEQ ID NO: 101786 - DNA, 20 bp, synthetic construct
  source 1..20: mol_type = other DNA
cccaggagttcgagaccagc

SEQ ID NO: 101787 - DNA, 20 bp, synthetic construct
  source 1..20: mol_type = other DNA
gcccaggagttcgagaccag

SEQ ID NO: 101788 - DNA, 20 bp, synthetic construct
  source 1..20: mol_type = other DNA
agcccaggagttcgagacca

SEQ ID NO: 101789 - DNA, 20 bp, synthetic construct
  source 1..20: mol_type = other DNA
gagcccaggagttcgagacc

SEQ ID NO: 101790 - DNA, 20 bp, synthetic construct
  source 1..20: mol_type = other DNA
tgagcccaggagttcgagac

SEQ ID NO: 101791 - DNA, 20 bp, synthetic construct
  source 1..20: mol_type = other DNA
ttgagcccaggagttcgaga

SEQ ID NO: 101792 - DNA, 20 bp, synthetic construct
  source 1..20: mol_type = other DNA
cttgagcccaggagttcgag

SEQ ID NO: 101793 - DNA, 20 bp, synthetic construct
  source 1..20: mol_type = other DNA
gcttgagcccaggagttcga

SEQ ID NO: 101794 - DNA, 20 bp, synthetic construct
  source 1..20: mol_type = other DNA
tgcttgagcccaggagttcg

SEQ ID NO: 101795 - DNA, 20 bp, synthetic construct
  source 1..20: mol_type = other DNA
ttgcttgagcccaggagttc

SEQ ID NO: 101796 - DNA, 20 bp, synthetic construct
  source 1..20: mol_type = other DNA
attgcttgagcccaggagtt

SEQ ID NO: 101797 - DNA, 20 bp, synthetic construct
  source 1..20: mol_type = other DNA
gattgcttgagcccaggagt

SEQ ID NO: 101798 - DNA, 20 bp, synthetic construct
  source 1..20: mol_type = other DNA
ggattgcttgagcccaggag

SEQ ID NO: 101799 - DNA, 20 bp, synthetic construct
  source 1..20: mol_type = other DNA
aggattgcttgagcccagga

SEQ ID NO: 101800 - DNA, 20 bp, synthetic construct
  source 1..20: mol_type = other DNA
gaggattgcttgagcccagg

SEQ ID NO: 101801 - DNA, 20 bp, synthetic construct
  source 1..20: mol_type = other DNA
ggaggattgcttgagcccag

SEQ ID NO: 101802 - DNA, 20 bp, synthetic construct
  source 1..20: mol_type = other DNA
gggaggattgcttgagccca

SEQ ID NO: 101803 - DNA, 20 bp, synthetic construct
  source 1..20: mol_type = other DNA
tgggaggattgcttgagccc

SEQ ID NO: 101804 - DNA, 20 bp, synthetic construct
  source 1..20: mol_type = other DNA
gtgggaggattgcttgagcc

SEQ ID NO: 101805 - DNA, 20 bp, synthetic construct
  source 1..20: mol_type = other DNA
ggtgggaggattgcttgagc

SEQ ID NO: 101806 - DNA, 20 bp, synthetic construct
  source 1..20: mol_type = other DNA
aggtgggaggattgcttgag

SEQ ID NO: 101807 - DNA, 20 bp, synthetic construct
  source 1..20: mol_type = other DNA
aaggtgggaggattgcttga

SEQ ID NO: 101808 - DNA, 20 bp, synthetic construct
  source 1..20: mol_type = other DNA
caaggtgggaggattgcttg

SEQ ID NO: 101809 - DNA, 20 bp, synthetic construct
  source 1..20: mol_type = other DNA
ccaaggtgggaggattgctt

SEQ ID NO: 101810 - DNA, 20 bp, synthetic construct
  source 1..20: mol_type = other DNA
gccaaggtgggaggattgct

SEQ ID NO: 101811 - DNA, 20 bp, synthetic construct
  source 1..20: mol_type = other DNA
agccaaggtgggaggattgc

SEQ ID NO: 101812 - DNA, 20 bp, synthetic construct
  source 1..20: mol_type = other DNA
aagccaaggtgggaggattg

SEQ ID NO: 101813 - DNA, 20 bp, synthetic construct
  source 1..20: mol_type = other DNA
gaagccaaggtgggaggatt

SEQ ID NO: 101814 - DNA, 20 bp, synthetic construct
  source 1..20: mol_type = other DNA
ggaagccaaggtgggaggat

SEQ ID NO: 101815 - DNA, 20 bp, synthetic construct
  source 1..20: mol_type = other DNA
gggaagccaaggtgggagga

SEQ ID NO: 101816 - DNA, 20 bp, synthetic construct
  source 1..20: mol_type = other DNA
tgggaagccaaggtgggagg

SEQ ID NO: 101817 - DNA, 20 bp, synthetic construct
  source 1..20: mol_type = other DNA
ttgggaagccaaggtgggag

SEQ ID NO: 101818 - DNA, 20 bp, synthetic construct
  source 1..20: mol_type = other DNA
tttgggaagccaaggtggga

SEQ ID NO: 101819 - DNA, 20 bp, synthetic construct
  source 1..20: mol_type = other DNA
ttttgggaagccaaggtggg

SEQ ID NO: 101820 - DNA, 20 bp, synthetic construct
  source 1..20: mol_type = other DNA
attttgggaagccaaggtgg

SEQ ID NO: 101821 - DNA, 20 bp, synthetic construct
  source 1..20: mol_type = other DNA
cattttgggaagccaaggtg

SEQ ID NO: 101822 - DNA, 20 bp, synthetic construct
  source 1..20: mol_type = other DNA
gcattttgggaagccaaggt

SEQ ID NO: 101823 - DNA, 20 bp, synthetic construct
  source 1..20: mol_type = other DNA
agcattttgggaagccaagg

SEQ ID NO: 101824 - DNA, 20 bp, synthetic construct
  source 1..20: mol_type = other DNA
cagcattttgggaagccaag

SEQ ID NO: 101825 - DNA, 20 bp, synthetic construct
  source 1..20: mol_type = other DNA
tcagcattttgggaagccaa

SEQ ID NO: 101826 - DNA, 20 bp, synthetic construct
  source 1..20: mol_type = other DNA
ttcagcattttgggaagcca

SEQ ID NO: 101827 - DNA, 20 bp, synthetic construct
  source 1..20: mol_type = other DNA
tttcagcattttgggaagcc

SEQ ID NO: 101828 - DNA, 20 bp, synthetic construct
  source 1..20: mol_type = other DNA
atttcagcattttgggaagc

SEQ ID NO: 101829 - DNA, 20 bp, synthetic construct
  source 1..20: mol_type = other DNA
aatttcagcattttgggaag

SEQ ID NO: 101830 - DNA, 20 bp, synthetic construct
  source 1..20: mol_type = other DNA
taatttcagcattttgggaa

SEQ ID NO: 101831 - DNA, 20 bp, synthetic construct
  source 1..20: mol_type = other DNA
ataatttcagcattttggga

SEQ ID NO: 101832 - DNA, 20 bp, synthetic construct
  source 1..20: mol_type = other DNA
tataatttcagcattttggg

SEQ ID NO: 101833 - DNA, 20 bp, synthetic construct
  source 1..20: mol_type = other DNA
ctataatttcagcattttgg

SEQ ID NO: 101834 - DNA, 20 bp, synthetic construct
  source 1..20: mol_type = other DNA
actataatttcagcattttg

SEQ ID NO: 101835 - DNA, 20 bp, synthetic construct
  source 1..20: mol_type = other DNA
aactataatttcagcatttt

SEQ ID NO: 101836 - DNA, 20 bp, synthetic construct
  source 1..20: mol_type = other DNA
caactataatttcagcattt

SEQ ID NO: 101837 - DNA, 20 bp, synthetic construct
  source 1..20: mol_type = other DNA
acaactataatttcagcatt

SEQ ID NO: 101838 - DNA, 20 bp, synthetic construct
  source 1..20: mol_type = other DNA
cacaactataatttcagcat

SEQ ID NO: 101839 - DNA, 20 bp, synthetic construct
  source 1..20: mol_type = other DNA
tcacaactataatttcagca

SEQ ID NO: 101840 - DNA, 20 bp, synthetic construct
  source 1..20: mol_type = other DNA
ctcacaactataatttcagc

SEQ ID NO: 101841 - DNA, 20 bp, synthetic construct
  source 1..20: mol_type = other DNA
gctcacaactataatttcag

SEQ ID NO: 101842 - DNA, 20 bp, synthetic construct
  source 1..20: mol_type = other DNA
ggctcacaactataatttca

SEQ ID NO: 101843 - DNA, 20 bp, synthetic construct
  source 1..20: mol_type = other DNA
tggctcacaactataatttc

SEQ ID NO: 101844 - DNA, 20 bp, synthetic construct
  source 1..20: mol_type = other DNA
gtggctcacaactataattt

SEQ ID NO: 101845 - DNA, 20 bp, synthetic construct
  source 1..20: mol_type = other DNA
agtggctcacaactataatt

SEQ ID NO: 101846 - DNA, 20 bp, synthetic construct
  source 1..20: mol_type = other DNA
cagtggctcacaactataat

SEQ ID NO: 101847 - DNA, 20 bp, synthetic construct
  source 1..20: mol_type = other DNA
gcagtggctcacaactataa

SEQ ID NO: 101848 - DNA, 20 bp, synthetic construct
  source 1..20: mol_type = other DNA
tgcagtggctcacaactata

SEQ ID NO: 101849 - DNA, 20 bp, synthetic construct
  source 1..20: mol_type = other DNA
gtgcagtggctcacaactat

SEQ ID NO: 101850 - DNA, 20 bp, synthetic construct
  source 1..20: mol_type = other DNA
ggtgcagtggctcacaacta

SEQ ID NO: 101851 - DNA, 20 bp, synthetic construct
  source 1..20: mol_type = other DNA
aggtgcagtggctcacaact

SEQ ID NO: 101852 - DNA, 20 bp, synthetic construct
  source 1..20: mol_type = other DNA
caggtgcagtggctcacaac

SEQ ID NO: 101853 - DNA, 20 bp, synthetic construct
  source 1..20: mol_type = other DNA
ccaggtgcagtggctcacaa

SEQ ID NO: 101854 - DNA, 20 bp, synthetic construct
  source 1..20: mol_type = other DNA
gccaggtgcagtggctcaca

SEQ ID NO: 101855 - DNA, 20 bp, synthetic construct
  source 1..20: mol_type = other DNA
ggccaggtgcagtggctcac

SEQ ID NO: 101856 - DNA, 20 bp, synthetic construct
  source 1..20: mol_type = other DNA
aggccaggtgcagtggctca

SEQ ID NO: 101857 - DNA, 20 bp, synthetic construct
  source 1..20: mol_type = other DNA
aaggccaggtgcagtggctc

SEQ ID NO: 101858 - DNA, 20 bp, synthetic construct
  source 1..20: mol_type = other DNA
caaggccaggtgcagtggct

SEQ ID NO: 101859 - DNA, 20 bp, synthetic construct
  source 1..20: mol_type = other DNA
acaaggccaggtgcagtggc

SEQ ID NO: 101860 - DNA, 20 bp, synthetic construct
  source 1..20: mol_type = other DNA
tacaaggccaggtgcagtgg

SEQ ID NO: 101861 - DNA, 20 bp, synthetic construct
  source 1..20: mol_type = other DNA
atacaaggccaggtgcagtg

SEQ ID NO: 101862 - DNA, 20 bp, synthetic construct
  source 1..20: mol_type = other DNA
catacaaggccaggtgcagt

SEQ ID NO: 101863 - DNA, 20 bp, synthetic construct
  source 1..20: mol_type = other DNA
acatacaaggccaggtgcag

SEQ ID NO: 101864 - DNA, 20 bp, synthetic construct
  source 1..20: mol_type = other DNA
gacatacaaggccaggtgca

SEQ ID NO: 101865 - DNA, 20 bp, synthetic construct
  source 1..20: mol_type = other DNA
agacatacaaggccaggtgc

SEQ ID NO: 101866 - DNA, 20 bp, synthetic construct
  source 1..20: mol_type = other DNA
aagacatacaaggccaggtg

SEQ ID NO: 101867 - DNA, 20 bp, synthetic construct
  source 1..20: mol_type = other DNA
gaagacatacaaggccaggt

SEQ ID NO: 101868 - DNA, 20 bp, synthetic construct
  source 1..20: mol_type = other DNA
ggaagacatacaaggccagg

SEQ ID NO: 101869 - DNA, 20 bp, synthetic construct
  source 1..20: mol_type = other DNA
aggaagacatacaaggccag

SEQ ID NO: 101870 - DNA, 20 bp, synthetic construct
  source 1..20: mol_type = other DNA
aaggaagacatacaaggcca

SEQ ID NO: 101871 - DNA, 20 bp, synthetic construct
  source 1..20: mol_type = other DNA
aaaggaagacatacaaggcc

SEQ ID NO: 101872 - DNA, 20 bp, synthetic construct
  source 1..20: mol_type = other DNA
aaaaggaagacatacaaggc

SEQ ID NO: 101873 - DNA, 20 bp, synthetic construct
  source 1..20: mol_type = other DNA
aaaaaggaagacatacaagg

SEQ ID NO: 101874 - DNA, 20 bp, synthetic construct
  source 1..20: mol_type = other DNA
aaaaaaggaagacatacaag

SEQ ID NO: 101875 - DNA, 20 bp, synthetic construct
  source 1..20: mol_type = other DNA
aaaaaaaggaagacatacaa

SEQ ID NO: 101876 - DNA, 20 bp, synthetic construct
  source 1..20: mol_type = other DNA
aaaaaaaaggaagacataca

SEQ ID NO: 101877 - DNA, 20 bp, synthetic construct
  source 1..20: mol_type = other DNA
aaaaaaaaaggaagacatac

SEQ ID NO: 101878 - DNA, 20 bp, synthetic construct
  source 1..20: mol_type = other DNA
aaaaaaaaaaggaagacata

SEQ ID NO: 101879 - DNA, 20 bp, synthetic construct
  source 1..20: mol_type = other DNA
caaaaaaaaaaggaagacat

SEQ ID NO: 101880 - DNA, 20 bp, synthetic construct
  source 1..20: mol_type = other DNA
acaaaaaaaaaaggaagaca

SEQ ID NO: 101881 - DNA, 20 bp, synthetic construct
  source 1..20: mol_type = other DNA
aacaaaaaaaaaaggaagac

SEQ ID NO: 101882 - DNA, 20 bp, synthetic construct
  source 1..20: mol_type = other DNA
aaacaaaaaaaaaaggaaga

SEQ ID NO: 101883 - DNA, 20 bp, synthetic construct
  source 1..20: mol_type = other DNA
aaaacaaaaaaaaaaggaag

SEQ ID NO: 101884 - DNA, 20 bp, synthetic construct
  source 1..20: mol_type = other DNA
caaaacaaaaaaaaaaggaa

SEQ ID NO: 101885 - DNA, 20 bp, synthetic construct
  source 1..20: mol_type = other DNA
acaaaacaaaaaaaaaagga

SEQ ID NO: 101886 - DNA, 20 bp, synthetic construct
  source 1..20: mol_type = other DNA
aacaaaacaaaaaaaaaagg

SEQ ID NO: 101887 - DNA, 20 bp, synthetic construct
  source 1..20: mol_type = other DNA
aaacaaaacaaaaaaaaaag

SEQ ID NO: 101888 - DNA, 20 bp, synthetic construct
  source 1..20: mol_type = other DNA
aaaacaaaacaaaaaaaaaa

SEQ ID NO: 101889 - DNA, 20 bp, synthetic construct
  source 1..20: mol_type = other DNA
caaaacaaaacaaaaaaaaa

SEQ ID NO: 101890 - DNA, 20 bp, synthetic construct
  source 1..20: mol_type = other DNA
acaaaacaaaacaaaaaaaa

SEQ ID NO: 101891 - DNA, 20 bp, synthetic construct
  source 1..20: mol_type = other DNA
aacaaaacaaaacaaaaaaa

SEQ ID NO: 101892 - DNA, 20 bp, synthetic construct
  source 1..20: mol_type = other DNA
aaacaaaacaaaacaaaaaa

SEQ ID NO: 101893 - DNA, 20 bp, synthetic construct
  source 1..20: mol_type = other DNA
aaaacaaaacaaaacaaaaa

SEQ ID NO: 101894 - DNA, 20 bp, synthetic construct
  source 1..20: mol_type = other DNA
aaaaacaaaacaaaacaaaa

SEQ ID NO: 101895 - DNA, 20 bp, synthetic construct
  source 1..20: mol_type = other DNA
caaaaacaaaacaaaacaaa

SEQ ID NO: 101896 - DNA, 20 bp, synthetic construct
  source 1..20: mol_type = other DNA
tcaaaaacaaaacaaaacaa

SEQ ID NO: 101897 - DNA, 20 bp, synthetic construct
  source 1..20: mol_type = other DNA
ctcaaaaacaaaacaaaaca

SEQ ID NO: 101898 - DNA, 20 bp, synthetic construct
  source 1..20: mol_type = other DNA
tctcaaaaacaaaacaaaac

SEQ ID NO: 101899 - DNA, 20 bp, synthetic construct
  source 1..20: mol_type = other DNA
gtctcaaaaacaaaacaaaa

SEQ ID NO: 101900 - DNA, 20 bp, synthetic construct
  source 1..20: mol_type = other DNA
tgtctcaaaaacaaaacaaa

SEQ ID NO: 101901 - DNA, 20 bp, synthetic construct
  source 1..20: mol_type = other DNA
ctgtctcaaaaacaaaacaa

SEQ ID NO: 101902 - DNA, 20 bp, synthetic construct
  source 1..20: mol_type = other DNA
tctgtctcaaaaacaaaaca

SEQ ID NO: 101903 - DNA, 20 bp, synthetic construct
  source 1..20: mol_type = other DNA
ctctgtctcaaaaacaaaac

SEQ ID NO: 101904 - DNA, 20 bp, synthetic construct
  source 1..20: mol_type = other DNA
actctgtctcaaaaacaaaa

SEQ ID NO: 101905 - DNA, 20 bp, synthetic construct
  source 1..20: mol_type = other DNA
gactctgtctcaaaaacaaa

SEQ ID NO: 101906 - DNA, 20 bp, synthetic construct
  source 1..20: mol_type = other DNA
agactctgtctcaaaaacaa

SEQ ID NO: 101907 - DNA, 20 bp, synthetic construct
  source 1..20: mol_type = other DNA
gagactctgtctcaaaaaca

SEQ ID NO: 101908 - DNA, 20 bp, synthetic construct
  source 1..20: mol_type = other DNA
tgagactctgtctcaaaaac

SEQ ID NO: 101909 - DNA, 20 bp, synthetic construct
  source 1..20: mol_type = other DNA
gtgagactctgtctcaaaaa

SEQ ID NO: 101910 - DNA, 20 bp, synthetic construct
  source 1..20: mol_type = other DNA
agtgagactctgtctcaaaa

SEQ ID NO: 101911 - DNA, 20 bp, synthetic construct
  source 1..20: mol_type = other DNA
aagtgagactctgtctcaaa

SEQ ID NO: 101912 - DNA, 20 bp, synthetic construct
  source 1..20: mol_type = other DNA
aaagtgagactctgtctcaa

SEQ ID NO: 101913 - DNA, 20 bp, synthetic construct
  source 1..20: mol_type = other DNA
caaagtgagactctgtctca

SEQ ID NO: 101914 - DNA, 20 bp, synthetic construct
  source 1..20: mol_type = other DNA
acaaagtgagactctgtctc

SEQ ID NO: 101915 - DNA, 20 bp, synthetic construct
  source 1..20: mol_type = other DNA
aacaaagtgagactctgtct

SEQ ID NO: 101916 - DNA, 20 bp, synthetic construct
  source 1..20: mol_type = other DNA
caacaaagtgagactctgtc

SEQ ID NO: 101917 - DNA, 20 bp, synthetic construct
  source 1..20: mol_type = other DNA
gcaacaaagtgagactctgt

SEQ ID NO: 101918 - DNA, 20 bp, synthetic construct
  source 1..20: mol_type = other DNA
ggcaacaaagtgagactctg

SEQ ID NO: 101919 - DNA, 20 bp, synthetic construct
  source 1..20: mol_type = other DNA
gggcaacaaagtgagactct

SEQ ID NO: 101920 - DNA, 20 bp, synthetic construct
  source 1..20: mol_type = other DNA
tgggcaacaaagtgagactc

SEQ ID NO: 101921 - DNA, 20 bp, synthetic construct
  source 1..20: mol_type = other DNA
ctgggcaacaaagtgagact

SEQ ID NO: 101922 - DNA, 20 bp, synthetic construct
  source 1..20: mol_type = other DNA
cctgggcaacaaagtgagac

SEQ ID NO: 101923 - DNA, 20 bp, synthetic construct
  source 1..20: mol_type = other DNA
gcctgggcaacaaagtgaga

SEQ ID NO: 101924 - DNA, 20 bp, synthetic construct
  source 1..20: mol_type = other DNA
agcctgggcaacaaagtgag

SEQ ID NO: 101925 - DNA, 20 bp, synthetic construct
  source 1..20: mol_type = other DNA
cagcctgggcaacaaagtga

SEQ ID NO: 101926 - DNA, 20 bp, synthetic construct
  source 1..20: mol_type = other DNA
ccagcctgggcaacaaagtg

SEQ ID NO: 101927 - DNA, 20 bp, synthetic construct
  source 1..20: mol_type = other DNA
tccagcctgggcaacaaagt

SEQ ID NO: 101928 - DNA, 20 bp, synthetic construct
  source 1..20: mol_type = other DNA
ctccagcctgggcaacaaag

SEQ ID NO: 101929 - DNA, 20 bp, synthetic construct
  source 1..20: mol_type = other DNA
gctccagcctgggcaacaaa

SEQ ID NO: 101930 - DNA, 20 bp, synthetic construct
  source 1..20: mol_type = other DNA
cgctccagcctgggcaacaa

SEQ ID NO: 101931 - DNA, 20 bp, synthetic construct
  source 1..20: mol_type = other DNA
acgctccagcctgggcaaca

SEQ ID NO: 101932 - DNA, 20 bp, synthetic construct
  source 1..20: mol_type = other DNA
tacgctccagcctgggcaac

SEQ ID NO: 101933 - DNA, 20 bp, synthetic construct
  source 1..20: mol_type = other DNA
ctacgctccagcctgggcaa

SEQ ID NO: 101934 - DNA, 20 bp, synthetic construct
  source 1..20: mol_type = other DNA
actacgctccagcctgggca

SEQ ID NO: 101935 - DNA, 20 bp, synthetic construct
  source 1..20: mol_type = other DNA
cactacgctccagcctgggc

SEQ ID NO: 101936 - DNA, 20 bp, synthetic construct
  source 1..20: mol_type = other DNA
ccactacgctccagcctggg

SEQ ID NO: 101937 - DNA, 20 bp, synthetic construct
  source 1..20: mol_type = other DNA
accactacgctccagcctgg

SEQ ID NO: 101938 - DNA, 20 bp, synthetic construct
  source 1..20: mol_type = other DNA
caccactacgctccagcctg

SEQ ID NO: 101939 - DNA, 20 bp, synthetic construct
  source 1..20: mol_type = other DNA
acaccactacgctccagcct

SEQ ID NO: 101940 - DNA, 20 bp, synthetic construct
  source 1..20: mol_type = other DNA
cacaccactacgctccagcc

SEQ ID NO: 101941 - DNA, 20 bp, synthetic construct
  source 1..20: mol_type = other DNA
tcacaccactacgctccagc

SEQ ID NO: 101942 - DNA, 20 bp, synthetic construct
  source 1..20: mol_type = other DNA
atcacaccactacgctccag

SEQ ID NO: 101943 - DNA, 20 bp, synthetic construct
  source 1..20: mol_type = other DNA
gatcacaccactacgctcca

SEQ ID NO: 101944 - DNA, 20 bp, synthetic construct
  source 1..20: mol_type = other DNA
agatcacaccactacgctcc

SEQ ID NO: 101945 - DNA, 20 bp, synthetic construct
  source 1..20: mol_type = other DNA
aagatcacaccactacgctc

SEQ ID NO: 101946 - DNA, 20 bp, synthetic construct
  source 1..20: mol_type = other DNA
caagatcacaccactacgct

SEQ ID NO: 101947 - DNA, 20 bp, synthetic construct
  source 1..20: mol_type = other DNA
ccaagatcacaccactacgc

SEQ ID NO: 101948 - DNA, 20 bp, synthetic construct
  source 1..20: mol_type = other DNA
gccaagatcacaccactacg

SEQ ID NO: 101949 - DNA, 20 bp, synthetic construct
  source 1..20: mol_type = other DNA
agccaagatcacaccactac

SEQ ID NO: 101950 - DNA, 20 bp, synthetic construct
  source 1..20: mol_type = other DNA
gagccaagatcacaccacta

SEQ ID NO: 101951 - DNA, 20 bp, synthetic construct
  source 1..20: mol_type = other DNA
tgagccaagatcacaccact

SEQ ID NO: 101952 - DNA, 20 bp, synthetic construct
  source 1..20: mol_type = other DNA
gtgagccaagatcacaccac

SEQ ID NO: 101953 - DNA, 20 bp, synthetic construct
  source 1..20: mol_type = other DNA
agtgagccaagatcacacca

SEQ ID NO: 101954 - DNA, 20 bp, synthetic construct
  source 1..20: mol_type = other DNA
cagtgagccaagatcacacc

SEQ ID NO: 101955 - DNA, 20 bp, synthetic construct
  source 1..20: mol_type = other DNA
gcagtgagccaagatcacac

SEQ ID NO: 101956 - DNA, 20 bp, synthetic construct
  source 1..20: mol_type = other DNA
cgcagtgagccaagatcaca

SEQ ID NO: 101957 - DNA, 20 bp, synthetic construct
  source 1..20: mol_type = other DNA
gcgcagtgagccaagatcac

SEQ ID NO: 101958 - DNA, 20 bp, synthetic construct
  source 1..20: mol_type = other DNA
ggcgcagtgagccaagatca

SEQ ID NO: 101959 - DNA, 20 bp, synthetic construct
  source 1..20: mol_type = other DNA
gggcgcagtgagccaagatc

SEQ ID NO: 101960 - DNA, 20 bp, synthetic construct
  source 1..20: mol_type = other DNA
agggcgcagtgagccaagat

SEQ ID NO: 101961 - DNA, 20 bp, synthetic construct
  source 1..20: mol_type = other DNA
tagggcgcagtgagccaaga

SEQ ID NO: 101962 - DNA, 20 bp, synthetic construct
  source 1..20: mol_type = other DNA
gtagggcgcagtgagccaag

SEQ ID NO: 101963 - DNA, 20 bp, synthetic construct
  source 1..20: mol_type = other DNA
tgtagggcgcagtgagccaa

SEQ ID NO: 101964 - DNA, 20 bp, synthetic construct
  source 1..20: mol_type = other DNA
gtgtagggcgcagtgagcca

SEQ ID NO: 101965 - DNA, 20 bp, synthetic construct
  source 1..20: mol_type = other DNA
ggtgtagggcgcagtgagcc

SEQ ID NO: 101966 - DNA, 20 bp, synthetic construct
  source 1..20: mol_type = other DNA
aggtgtagggcgcagtgagc

SEQ ID NO: 101967 - DNA, 20 bp, synthetic construct
  source 1..20: mol_type = other DNA
gaggtgtagggcgcagtgag

SEQ ID NO: 101968 - DNA, 20 bp, synthetic construct
  source 1..20: mol_type = other DNA
ggaggtgtagggcgcagtga

SEQ ID NO: 101969 - DNA, 20 bp, synthetic construct
  source 1..20: mol_type = other DNA
gggaggtgtagggcgcagtg

SEQ ID NO: 101970 - DNA, 20 bp, synthetic construct
  source 1..20: mol_type = other DNA
cgggaggtgtagggcgcagt

SEQ ID NO: 101971 - DNA, 20 bp, synthetic construct
  source 1..20: mol_type = other DNA
ccgggaggtgtagggcgcag

SEQ ID NO: 101972 - DNA, 20 bp, synthetic construct
  source 1..20: mol_type = other DNA
tccgggaggtgtagggcgca

SEQ ID NO: 101973 - DNA, 20 bp, synthetic construct
  source 1..20: mol_type = other DNA
atccgggaggtgtagggcgc

SEQ ID NO: 101974 - DNA, 20 bp, synthetic construct
  source 1..20: mol_type = other DNA
aatccgggaggtgtagggcg

SEQ ID NO: 101975 - DNA, 20 bp, synthetic construct
  source 1..20: mol_type = other DNA
gaatccgggaggtgtagggc

SEQ ID NO: 101976 - DNA, 20 bp, synthetic construct
  source 1..20: mol_type = other DNA
tgaatccgggaggtgtaggg

SEQ ID NO: 101977 - DNA, 20 bp, synthetic construct
  source 1..20: mol_type = other DNA
ttgaatccgggaggtgtagg

SEQ ID NO: 101978 - DNA, 20 bp, synthetic construct
  source 1..20: mol_type = other DNA
cttgaatccgggaggtgtag

SEQ ID NO: 101979 - DNA, 20 bp, synthetic construct
  source 1..20: mol_type = other DNA
gcttgaatccgggaggtgta

SEQ ID NO: 101980 - DNA, 20 bp, synthetic construct
  source 1..20: mol_type = other DNA
tgcttgaatccgggaggtgt

SEQ ID NO: 101981 - DNA, 20 bp, synthetic construct
  source 1..20: mol_type = other DNA
ttgcttgaatccgggaggtg

SEQ ID NO: 101982 - DNA, 20 bp, synthetic construct
  source 1..20: mol_type = other DNA
attgcttgaatccgggaggt

SEQ ID NO: 101983 - DNA, 20 bp, synthetic construct
  source 1..20: mol_type = other DNA
aattgcttgaatccgggagg

SEQ ID NO: 101984 - DNA, 20 bp, synthetic construct
  source 1..20: mol_type = other DNA
gaattgcttgaatccgggag

SEQ ID NO: 101985 - DNA, 20 bp, synthetic construct
  source 1..20: mol_type = other DNA
agaattgcttgaatccggga

SEQ ID NO: 101986 - DNA, 20 bp, synthetic construct
  source 1..20: mol_type = other DNA
gagaattgcttgaatccggg

SEQ ID NO: 101987 - DNA, 20 bp, synthetic construct
  source 1..20: mol_type = other DNA
ggagaattgcttgaatccgg

SEQ ID NO: 101988 - DNA, 20 bp, synthetic construct
  source 1..20: mol_type = other DNA
aggagaattgcttgaatccg

SEQ ID NO: 101989 - DNA, 20 bp, synthetic construct
  source 1..20: mol_type = other DNA
caggagaattgcttgaatcc

SEQ ID NO: 101990 - DNA, 20 bp, synthetic construct
  source 1..20: mol_type = other DNA
gcaggagaattgcttgaatc

SEQ ID NO: 101991 - DNA, 20 bp, synthetic construct
  source 1..20: mol_type = other DNA
ggcaggagaattgcttgaat

SEQ ID NO: 101992 - DNA, 20 bp, synthetic construct
  source 1..20: mol_type = other DNA
aggcaggagaattgcttgaa

SEQ ID NO: 101993 - DNA, 20 bp, synthetic construct
  source 1..20: mol_type = other DNA
gaggcaggagaattgcttga

SEQ ID NO: 101994 - DNA, 20 bp, synthetic construct
  source 1..20: mol_type = other DNA
ggaggcaggagaattgcttg

SEQ ID NO: 101995 - DNA, 20 bp, synthetic construct
  source 1..20: mol_type = other DNA
aggaggcaggagaattgctt

SEQ ID NO: 101996 - DNA, 20 bp, synthetic construct
  source 1..20: mol_type = other DNA
caggaggcaggagaattgct

SEQ ID NO: 101997 - DNA, 20 bp, synthetic construct
  source 1..20: mol_type = other DNA
gcaggaggcaggagaattgc

SEQ ID NO: 101998 - DNA, 20 bp, synthetic construct
  source 1..20: mol_type = other DNA
ggcaggaggcaggagaattg

SEQ ID NO: 101999 - DNA, 20 bp, synthetic construct
  source 1..20: mol_type = other DNA
tggcaggaggcaggagaatt

SEQ ID NO: 102000 - DNA, 20 bp, synthetic construct
  source 1..20: mol_type = other DNA
gtggcaggaggcaggagaat

SEQ ID NO: 102001 - DNA, 20 bp, synthetic construct
  source 1..20: mol_type = other DNA
ggtggcaggaggcaggagaa

SEQ ID NO: 102002 - DNA, 20 bp, synthetic construct
  source 1..20: mol_type = other DNA
tggtggcaggaggcaggaga

SEQ ID NO: 102003 - DNA, 20 bp, synthetic construct
  source 1..20: mol_type = other DNA
atggtggcaggaggcaggag

SEQ ID NO: 102004 - DNA, 20 bp, synthetic construct
  source 1..20: mol_type = other DNA
catggtggcaggaggcagga

SEQ ID NO: 102005 - DNA, 20 bp, synthetic construct
  source 1..20: mol_type = other DNA
acatggtggcaggaggcagg

SEQ ID NO: 102006 - DNA, 20 bp, synthetic construct
  source 1..20: mol_type = other DNA
gacatggtggcaggaggcag

SEQ ID NO: 102007 - DNA, 20 bp, synthetic construct
  source 1..20: mol_type = other DNA
agacatggtggcaggaggca

SEQ ID NO: 102008 - DNA, 20 bp, synthetic construct
  source 1..20: mol_type = other DNA
cagacatggtggcaggaggc

SEQ ID NO: 102009 - DNA, 20 bp, synthetic construct
  source 1..20: mol_type = other DNA
gcagacatggtggcaggagg

SEQ ID NO: 102010 - DNA, 20 bp, synthetic construct
  source 1..20: mol_type = other DNA
ggcagacatggtggcaggag

SEQ ID NO: 102011 - DNA, 20 bp, synthetic construct
  source 1..20: mol_type = other DNA
aggcagacatggtggcagga

SEQ ID NO: 102012 - DNA, 20 bp, synthetic construct
  source 1..20: mol_type = other DNA
taggcagacatggtggcagg

SEQ ID NO: 102013 - DNA, 20 bp, synthetic construct
  source 1..20: mol_type = other DNA
ttaggcagacatggtggcag

SEQ ID NO: 102014 - DNA, 20 bp, synthetic construct
  source 1..20: mol_type = other DNA
attaggcagacatggtggca

SEQ ID NO: 102015 - DNA, 20 bp, synthetic construct
  source 1..20: mol_type = other DNA
aattaggcagacatggtggc

SEQ ID NO: 102016 - DNA, 20 bp, synthetic construct
  source 1..20: mol_type = other DNA
aaattaggcagacatggtgg

SEQ ID NO: 102017 - DNA, 20 bp, synthetic construct
  source 1..20: mol_type = other DNA
aaaattaggcagacatggtg

SEQ ID NO: 102018 - DNA, 20 bp, synthetic construct
  source 1..20: mol_type = other DNA
aaaaattaggcagacatggt

SEQ ID NO: 102019 - DNA, 20 bp, synthetic construct
  source 1..20: mol_type = other DNA
caaaaattaggcagacatgg

SEQ ID NO: 102020 - DNA, 20 bp, synthetic construct
  source 1..20: mol_type = other DNA
acaaaaattaggcagacatg

SEQ ID NO: 102021 - DNA, 20 bp, synthetic construct
  source 1..20: mol_type = other DNA
tacaaaaattaggcagacat

SEQ ID NO: 102022 - DNA, 20 bp, synthetic construct
  source 1..20: mol_type = other DNA
atacaaaaattaggcagaca

SEQ ID NO: 102023 - DNA, 20 bp, synthetic construct
  source 1..20: mol_type = other DNA
aatacaaaaattaggcagac

SEQ ID NO: 102024 - DNA, 20 bp, synthetic construct
  source 1..20: mol_type = other DNA
aaatacaaaaattaggcaga

SEQ ID NO: 102025 - DNA, 20 bp, synthetic construct
  source 1..20: mol_type = other DNA
aaaatacaaaaattaggcag

SEQ ID NO: 102026 - DNA, 20 bp, synthetic construct
  source 1..20: mol_type = other DNA
aaaaatacaaaaattaggca

SEQ ID NO: 102027 - DNA, 20 bp, synthetic construct
  source 1..20: mol_type = other DNA
taaaaatacaaaaattaggc

SEQ ID NO: 102028 - DNA, 20 bp, synthetic construct
  source 1..20: mol_type = other DNA
ctaaaaatacaaaaattagg

SEQ ID NO: 102029 - DNA, 20 bp, synthetic construct
  source 1..20: mol_type = other DNA
actaaaaatacaaaaattag

SEQ ID NO: 102030 - DNA, 20 bp, synthetic construct
  source 1..20: mol_type = other DNA
tactaaaaatacaaaaatta

SEQ ID NO: 102031 - DNA, 20 bp, synthetic construct
  source 1..20: mol_type = other DNA
ctactaaaaatacaaaaatt

SEQ ID NO: 102032 - DNA, 20 bp, synthetic construct
  source 1..20: mol_type = other DNA
tctactaaaaatacaaaaat

SEQ ID NO: 102033 - DNA, 20 bp, synthetic construct
  source 1..20: mol_type = other DNA
ctctactaaaaatacaaaaa

SEQ ID NO: 102034 - DNA, 20 bp, synthetic construct
  source 1..20: mol_type = other DNA
tctctactaaaaatacaaaa

SEQ ID NO: 102035 - DNA, 20 bp, synthetic construct
  source 1..20: mol_type = other DNA
gtctctactaaaaatacaaa

SEQ ID NO: 102036 - DNA, 20 bp, synthetic construct
  source 1..20: mol_type = other DNA
cgtctctactaaaaatacaa

SEQ ID NO: 102037 - DNA, 20 bp, synthetic construct
  source 1..20: mol_type = other DNA
ccgtctctactaaaaataca

SEQ ID NO: 102038 - DNA, 20 bp, synthetic construct
  source 1..20: mol_type = other DNA
cccgtctctactaaaaatac

SEQ ID NO: 102039 - DNA, 20 bp, synthetic construct
  source 1..20: mol_type = other DNA
tcccgtctctactaaaaata

SEQ ID NO: 102040 - DNA, 20 bp, synthetic construct
  source 1..20: mol_type = other DNA
atcccgtctctactaaaaat

SEQ ID NO: 102041 - DNA, 20 bp, synthetic construct
  source 1..20: mol_type = other DNA
aatcccgtctctactaaaaa

SEQ ID NO: 102042 - DNA, 20 bp, synthetic construct
  source 1..20: mol_type = other DNA
aaatcccgtctctactaaaa

SEQ ID NO: 102043 - DNA, 20 bp, synthetic construct
  source 1..20: mol_type = other DNA
gaaatcccgtctctactaaa

SEQ ID NO: 102044 - DNA, 20 bp, synthetic construct
  source 1..20: mol_type = other DNA
agaaatcccgtctctactaa

SEQ ID NO: 102045 - DNA, 20 bp, synthetic construct
  source 1..20: mol_type = other DNA
gagaaatcccgtctctacta

SEQ ID NO: 102046 - DNA, 20 bp, synthetic construct
  source 1..20: mol_type = other DNA
ggagaaatcccgtctctact

SEQ ID NO: 102047 - DNA, 20 bp, synthetic construct
  source 1..20: mol_type = other DNA
aggagaaatcccgtctctac

SEQ ID NO: 102048 - DNA, 20 bp, synthetic construct
  source 1..20: mol_type = other DNA
aaggagaaatcccgtctcta

SEQ ID NO: 102049 - DNA, 20 bp, synthetic construct
  source 1..20: mol_type = other DNA
caaggagaaatcccgtctct

SEQ ID NO: 102050 - DNA, 20 bp, synthetic construct
  source 1..20: mol_type = other DNA
acaaggagaaatcccgtctc

SEQ ID NO: 102051 - DNA, 20 bp, synthetic construct
  source 1..20: mol_type = other DNA
aacaaggagaaatcccgtct

SEQ ID NO: 102052 - DNA, 20 bp, synthetic construct
  source 1..20: mol_type = other DNA
caacaaggagaaatcccgtc

SEQ ID NO: 102053 - DNA, 20 bp, synthetic construct
  source 1..20: mol_type = other DNA
gcaacaaggagaaatcccgt

SEQ ID NO: 102054 - DNA, 20 bp, synthetic construct
  source 1..20: mol_type = other DNA
ggcaacaaggagaaatcccg

SEQ ID NO: 102055 - DNA, 20 bp, synthetic construct
  source 1..20: mol_type = other DNA
gggcaacaaggagaaatccc

SEQ ID NO: 102056 - DNA, 20 bp, synthetic construct
  source 1..20: mol_type = other DNA
tgggcaacaaggagaaatcc

SEQ ID NO: 102057 - DNA, 20 bp, synthetic construct
  source 1..20: mol_type = other DNA
ctgggcaacaaggagaaatc

SEQ ID NO: 102058 - DNA, 20 bp, synthetic construct
  source 1..20: mol_type = other DNA
cctgggcaacaaggagaaat

SEQ ID NO: 102059 - DNA, 20 bp, synthetic construct
  source 1..20: mol_type = other DNA
gcctgggcaacaaggagaaa

SEQ ID NO: 102060 - DNA, 20 bp, synthetic construct
  source 1..20: mol_type = other DNA
agcctgggcaacaaggagaa

SEQ ID NO: 102061 - DNA, 20 bp, synthetic construct
  source 1..20: mol_type = other DNA
cagcctgggcaacaaggaga

SEQ ID NO: 102062 - DNA, 20 bp, synthetic construct
  source 1..20: mol_type = other DNA
ccagcctgggcaacaaggag

SEQ ID NO: 102063 - DNA, 20 bp, synthetic construct
  source 1..20: mol_type = other DNA
accagcctgggcaacaagga

SEQ ID NO: 102064 - DNA, 20 bp, synthetic construct
  source 1..20: mol_type = other DNA
gaccagcctgggcaacaagg

SEQ ID NO: 102065 - DNA, 20 bp, synthetic construct
  source 1..20: mol_type = other DNA
agaccagcctgggcaacaag

SEQ ID NO: 102066 - DNA, 20 bp, synthetic construct
  source 1..20: mol_type = other DNA
aagaccagcctgggcaacaa

SEQ ID NO: 102067 - DNA, 20 bp, synthetic construct
  source 1..20: mol_type = other DNA
caagaccagcctgggcaaca

SEQ ID NO: 102068 - DNA, 20 bp, synthetic construct
  source 1..20: mol_type = other DNA
tcaagaccagcctgggcaac

SEQ ID NO: 102069 - DNA, 20 bp, synthetic construct
  source 1..20: mol_type = other DNA
ttcaagaccagcctgggcaa

SEQ ID NO: 102070 - DNA, 20 bp, synthetic construct
  source 1..20: mol_type = other DNA
gttcaagaccagcctgggca

SEQ ID NO: 102071 - DNA, 20 bp, synthetic construct
  source 1..20: mol_type = other DNA
agttcaagaccagcctgggc

SEQ ID NO: 102072 - DNA, 20 bp, synthetic construct
  source 1..20: mol_type = other DNA
gagttcaagaccagcctggg

SEQ ID NO: 102073 - DNA, 20 bp, synthetic construct
  source 1..20: mol_type = other DNA
ggagttcaagaccagcctgg

SEQ ID NO: 102074 - DNA, 20 bp, synthetic construct
  source 1..20: mol_type = other DNA
aggagttcaagaccagcctg

SEQ ID NO: 102075 - DNA, 20 bp, synthetic construct
  source 1..20: mol_type = other DNA
taggagttcaagaccagcct

SEQ ID NO: 102076 - DNA, 20 bp, synthetic construct
  source 1..20: mol_type = other DNA
ttaggagttcaagaccagcc

SEQ ID NO: 102077 - DNA, 20 bp, synthetic construct
  source 1..20: mol_type = other DNA
gttaggagttcaagaccagc

SEQ ID NO: 102078 - DNA, 20 bp, synthetic construct
  source 1..20: mol_type = other DNA
ggttaggagttcaagaccag

SEQ ID NO: 102079 - DNA, 20 bp, synthetic construct
  source 1..20: mol_type = other DNA
aggttaggagttcaagacca

SEQ ID NO: 102080 - DNA, 20 bp, synthetic construct
  source 1..20: mol_type = other DNA
gaggttaggagttcaagacc

SEQ ID NO: 102081 - DNA, 20 bp, synthetic construct
  source 1..20: mol_type = other DNA
tgaggttaggagttcaagac

SEQ ID NO: 102082 - DNA, 20 bp, synthetic construct
  source 1..20: mol_type = other DNA
ctgaggttaggagttcaaga

SEQ ID NO: 102083 - DNA, 20 bp, synthetic construct
  source 1..20: mol_type = other DNA
cctgaggttaggagttcaag

SEQ ID NO: 102084 - DNA, 20 bp, synthetic construct
  source 1..20: mol_type = other DNA
acctgaggttaggagttcaa

SEQ ID NO: 102085 - DNA, 20 bp, synthetic construct
  source 1..20: mol_type = other DNA
cacctgaggttaggagttca

SEQ ID NO: 102086 - DNA, 20 bp, synthetic construct
  source 1..20: mol_type = other DNA
tcacctgaggttaggagttc

SEQ ID NO: 102087 - DNA, 20 bp, synthetic construct
  source 1..20: mol_type = other DNA
atcacctgaggttaggagtt

SEQ ID NO: 102088 - DNA, 20 bp, synthetic construct
  source 1..20: mol_type = other DNA
aatcacctgaggttaggagt

SEQ ID NO: 102089 - DNA, 20 bp, synthetic construct
  source 1..20: mol_type = other DNA
aaatcacctgaggttaggag

SEQ ID NO: 102090 - DNA, 20 bp, synthetic construct
  source 1..20: mol_type = other DNA
taaatcacctgaggttagga

SEQ ID NO: 102091 - DNA, 20 bp, synthetic construct
  source 1..20: mol_type = other DNA
gtaaatcacctgaggttagg

SEQ ID NO: 102092 - DNA, 20 bp, synthetic construct
  source 1..20: mol_type = other DNA
ggtaaatcacctgaggttag

SEQ ID NO: 102093 - DNA, 20 bp, synthetic construct
  source 1..20: mol_type = other DNA
aggtaaatcacctgaggtta

SEQ ID NO: 102094 - DNA, 20 bp, synthetic construct
  source 1..20: mol_type = other DNA
caggtaaatcacctgaggtt

SEQ ID NO: 102095 - DNA, 20 bp, synthetic construct
  source 1..20: mol_type = other DNA
gcaggtaaatcacctgaggt

SEQ ID NO: 102096 - DNA, 20 bp, synthetic construct
  source 1..20: mol_type = other DNA
ggcaggtaaatcacctgagg

SEQ ID NO: 102097 - DNA, 20 bp, synthetic construct
  source 1..20: mol_type = other DNA
aggcaggtaaatcacctgag

SEQ ID NO: 102098 - DNA, 20 bp, synthetic construct
  source 1..20: mol_type = other DNA
gaggcaggtaaatcacctga

SEQ ID NO: 102099 - DNA, 20 bp, synthetic construct
  source 1..20: mol_type = other DNA
tgaggcaggtaaatcacctg

SEQ ID NO: 102100 - DNA, 20 bp, synthetic construct
  source 1..20: mol_type = other DNA
ctgaggcaggtaaatcacct

SEQ ID NO: 102101 - DNA, 20 bp, synthetic construct
  source 1..20: mol_type = other DNA
gctgaggcaggtaaatcacc

SEQ ID NO: 102102 - DNA, 20 bp, synthetic construct
  source 1..20: mol_type = other DNA
ggctgaggcaggtaaatcac

SEQ ID NO: 102103 - DNA, 20 bp, synthetic construct
  source 1..20: mol_type = other DNA
aggctgaggcaggtaaatca

SEQ ID NO: 102104 - DNA, 20 bp, synthetic construct
  source 1..20: mol_type = other DNA
gaggctgaggcaggtaaatc

SEQ ID NO: 102105 - DNA, 20 bp, synthetic construct
  source 1..20: mol_type = other DNA
ggaggctgaggcaggtaaat

SEQ ID NO: 102106 - DNA, 20 bp, synthetic construct
  source 1..20: mol_type = other DNA
gggaggctgaggcaggtaaa

SEQ ID NO: 102107 - DNA, 20 bp, synthetic construct
  source 1..20: mol_type = other DNA
tgggaggctgaggcaggtaa

SEQ ID NO: 102108 - DNA, 20 bp, synthetic construct
  source 1..20: mol_type = other DNA
ttgggaggctgaggcaggta

SEQ ID NO: 102109 - DNA, 20 bp, synthetic construct
  source 1..20: mol_type = other DNA
tttgggaggctgaggcaggt

SEQ ID NO: 102110 - DNA, 20 bp, synthetic construct
  source 1..20: mol_type = other DNA
ctttgggaggctgaggcagg

SEQ ID NO: 102111 - DNA, 20 bp, synthetic construct
  source 1..20: mol_type = other DNA
actttgggaggctgaggcag

SEQ ID NO: 102112 - DNA, 20 bp, synthetic construct
  source 1..20: mol_type = other DNA
cactttgggaggctgaggca

SEQ ID NO: 102113 - DNA, 20 bp, synthetic construct
  source 1..20: mol_type = other DNA
gcactttgggaggctgaggc

SEQ ID NO: 102114 - DNA, 20 bp, synthetic construct
  source 1..20: mol_type = other DNA
agcactttgggaggctgagg

SEQ ID NO: 102115 - DNA, 20 bp, synthetic construct
  source 1..20: mol_type = other DNA
tagcactttgggaggctgag

SEQ ID NO: 102116 - DNA, 20 bp, synthetic construct
  source 1..20: mol_type = other DNA
ctagcactttgggaggctga

SEQ ID NO: 102117 - DNA, 20 bp, synthetic construct
  source 1..20: mol_type = other DNA
cctagcactttgggaggctg

SEQ ID NO: 102118 - DNA, 20 bp, synthetic construct
  source 1..20: mol_type = other DNA
tcctagcactttgggaggct

SEQ ID NO: 102119 - DNA, 20 bp, synthetic construct
  source 1..20: mol_type = other DNA
atcctagcactttgggaggc

SEQ ID NO: 102120 - DNA, 20 bp, synthetic construct
  source 1..20: mol_type = other DNA
aatcctagcactttgggagg

SEQ ID NO: 102121 - DNA, 20 bp, synthetic construct
  source 1..20: mol_type = other DNA
taatcctagcactttgggag

SEQ ID NO: 102122 - DNA, 20 bp, synthetic construct
  source 1..20: mol_type = other DNA
gtaatcctagcactttggga

SEQ ID NO: 102123 - DNA, 20 bp, synthetic construct
  source 1..20: mol_type = other DNA
tgtaatcctagcactttggg

SEQ ID NO: 102124 - DNA, 20 bp, synthetic construct
  source 1..20: mol_type = other DNA
ctgtaatcctagcactttgg

SEQ ID NO: 102125 - DNA, 20 bp, synthetic construct
  source 1..20: mol_type = other DNA
cctgtaatcctagcactttg

SEQ ID NO: 102126 - DNA, 20 bp, synthetic construct
  source 1..20: mol_type = other DNA
gcctgtaatcctagcacttt

SEQ ID NO: 102127 - DNA, 20 bp, synthetic construct
  source 1..20: mol_type = other DNA
cgcctgtaatcctagcactt

SEQ ID NO: 102128 - DNA, 20 bp, synthetic construct
  source 1..20: mol_type = other DNA
acgcctgtaatcctagcact

SEQ ID NO: 102129 - DNA, 20 bp, synthetic construct
  source 1..20: mol_type = other DNA
cacgcctgtaatcctagcac

SEQ ID NO: 102130 - DNA, 20 bp, synthetic construct
  source 1..20: mol_type = other DNA
tcacgcctgtaatcctagca

SEQ ID NO: 102131 - DNA, 20 bp, synthetic construct
  source 1..20: mol_type = other DNA
ctcacgcctgtaatcctagc

SEQ ID NO: 102132 - DNA, 20 bp, synthetic construct
  source 1..20: mol_type = other DNA
gctcacgcctgtaatcctag

SEQ ID NO: 102133 - DNA, 20 bp, synthetic construct
  source 1..20: mol_type = other DNA
agctcacgcctgtaatccta

SEQ ID NO: 102134 - DNA, 20 bp, synthetic construct
  source 1..20: mol_type = other DNA
cagctcacgcctgtaatcct

SEQ ID NO: 102135 - DNA, 20 bp, synthetic construct
  source 1..20: mol_type = other DNA
gcagctcacgcctgtaatcc

SEQ ID NO: 102136 - DNA, 20 bp, synthetic construct
  source 1..20: mol_type = other DNA
agcagctcacgcctgtaatc

SEQ ID NO: 102137 - DNA, 20 bp, synthetic construct
  source 1..20: mol_type = other DNA
cagcagctcacgcctgtaat

SEQ ID NO: 102138 - DNA, 20 bp, synthetic construct
  source 1..20: mol_type = other DNA
gcagcagctcacgcctgtaa

SEQ ID NO: 102139 - DNA, 20 bp, synthetic construct
  source 1..20: mol_type = other DNA
cgcagcagctcacgcctgta

SEQ ID NO: 102140 - DNA, 20 bp, synthetic construct
  source 1..20: mol_type = other DNA
gcgcagcagctcacgcctgt

SEQ ID NO: 102141 - DNA, 20 bp, synthetic construct
  source 1..20: mol_type = other DNA
ggcgcagcagctcacgcctg

SEQ ID NO: 102142 - DNA, 20 bp, synthetic construct
  source 1..20: mol_type = other DNA
gggcgcagcagctcacgcct

SEQ ID NO: 102143 - DNA, 20 bp, synthetic construct
  source 1..20: mol_type = other DNA
tgggcgcagcagctcacgcc

SEQ ID NO: 102144 - DNA, 20 bp, synthetic construct
  source 1..20: mol_type = other DNA
ctgggcgcagcagctcacgc

SEQ ID NO: 102145 - DNA, 20 bp, synthetic construct
  source 1..20: mol_type = other DNA
gctgggcgcagcagctcacg

SEQ ID NO: 102146 - DNA, 20 bp, synthetic construct
  source 1..20: mol_type = other DNA
ggctgggcgcagcagctcac

SEQ ID NO: 102147 - DNA, 20 bp, synthetic construct
  source 1..20: mol_type = other DNA
aggctgggcgcagcagctca

SEQ ID NO: 102148 - DNA, 20 bp, synthetic construct
  source 1..20: mol_type = other DNA
caggctgggcgcagcagctc

SEQ ID NO: 102149 - DNA, 20 bp, synthetic construct
  source 1..20: mol_type = other DNA
acaggctgggcgcagcagct

SEQ ID NO: 102150 - DNA, 20 bp, synthetic construct
  source 1..20: mol_type = other DNA
tacaggctgggcgcagcagc

SEQ ID NO: 102151 - DNA, 20 bp, synthetic construct
  source 1..20: mol_type = other DNA
atacaggctgggcgcagcag

SEQ ID NO: 102152 - DNA, 20 bp, synthetic construct
  source 1..20: mol_type = other DNA
catacaggctgggcgcagca

SEQ ID NO: 102153 - DNA, 20 bp, synthetic construct
  source 1..20: mol_type = other DNA
acatacaggctgggcgcagc

SEQ ID NO: 102154 - DNA, 20 bp, synthetic construct
  source 1..20: mol_type = other DNA
gacatacaggctgggcgcag

SEQ ID NO: 102155 - DNA, 20 bp, synthetic construct
  source 1..20: mol_type = other DNA
cgacatacaggctgggcgca

SEQ ID NO: 102156 - DNA, 20 bp, synthetic construct
  source 1..20: mol_type = other DNA
acgacatacaggctgggcgc

SEQ ID NO: 102157 - DNA, 20 bp, synthetic construct
  source 1..20: mol_type = other DNA
gacgacatacaggctgggcg

SEQ ID NO: 102158 - DNA, 20 bp, synthetic construct
  source 1..20: mol_type = other DNA
agacgacatacaggctgggc

SEQ ID NO: 102159 - DNA, 20 bp, synthetic construct
  source 1..20: mol_type = other DNA
aagacgacatacaggctggg

SEQ ID NO: 102160 - DNA, 20 bp, synthetic construct
  source 1..20: mol_type = other DNA
aaagacgacatacaggctgg

SEQ ID NO: 102161 - DNA, 20 bp, synthetic construct
  source 1..20: mol_type = other DNA
aaaagacgacatacaggctg

SEQ ID NO: 102162 - DNA, 20 bp, synthetic construct
  source 1..20: mol_type = other DNA
caaaagacgacatacaggct

SEQ ID NO: 102163 - DNA, 20 bp, synthetic construct
  source 1..20: mol_type = other DNA
tcaaaagacgacatacaggc

SEQ ID NO: 102164 - DNA, 20 bp, synthetic construct
  source 1..20: mol_type = other DNA
ctcaaaagacgacatacagg

SEQ ID NO: 102165 - DNA, 20 bp, synthetic construct
  source 1..20: mol_type = other DNA
tctcaaaagacgacatacag

SEQ ID NO: 102166 - DNA, 20 bp, synthetic construct
  source 1..20: mol_type = other DNA
ttctcaaaagacgacataca

SEQ ID NO: 102167 - DNA, 20 bp, synthetic construct
  source 1..20: mol_type = other DNA
tttctcaaaagacgacatac

SEQ ID NO: 102168 - DNA, 20 bp, synthetic construct
  source 1..20: mol_type = other DNA
atttctcaaaagacgacata

SEQ ID NO: 102169 - DNA, 20 bp, synthetic construct
  source 1..20: mol_type = other DNA
catttctcaaaagacgacat

SEQ ID NO: 102170 - DNA, 20 bp, synthetic construct
  source 1..20: mol_type = other DNA
acatttctcaaaagacgaca

SEQ ID NO: 102171 - DNA, 20 bp, synthetic construct
  source 1..20: mol_type = other DNA
gacatttctcaaaagacgac

SEQ ID NO: 102172 - DNA, 20 bp, synthetic construct
  source 1..20: mol_type = other DNA
agacatttctcaaaagacga

SEQ ID NO: 102173 - DNA, 20 bp, synthetic construct
  source 1..20: mol_type = other DNA
tagacatttctcaaaagacg

SEQ ID NO: 102174 - DNA, 20 bp, synthetic construct
  source 1..20: mol_type = other DNA
atagacatttctcaaaagac

SEQ ID NO: 102175 - DNA, 20 bp, synthetic construct
  source 1..20: mol_type = other DNA
aatagacatttctcaaaaga

SEQ ID NO: 102176 - DNA, 20 bp, synthetic construct
  source 1..20: mol_type = other DNA
gaatagacatttctcaaaag

SEQ ID NO: 102177 - DNA, 20 bp, synthetic construct
  source 1..20: mol_type = other DNA
tgaatagacatttctcaaaa

SEQ ID NO: 102178 - DNA, 20 bp, synthetic construct
  source 1..20: mol_type = other DNA
ctgaatagacatttctcaaa

SEQ ID NO: 102179 - DNA, 20 bp, synthetic construct
  source 1..20: mol_type = other DNA
tctgaatagacatttctcaa

SEQ ID NO: 102180 - DNA, 20 bp, synthetic construct
  source 1..20: mol_type = other DNA
atctgaatagacatttctca

SEQ ID NO: 102181 - DNA, 20 bp, synthetic construct
  source 1..20: mol_type = other DNA
gatctgaatagacatttctc

SEQ ID NO: 102182 - DNA, 20 bp, synthetic construct
  source 1..20: mol_type = other DNA
agatctgaatagacatttct

SEQ ID NO: 102183 - DNA, 20 bp, synthetic construct
  source 1..20: mol_type = other DNA
aagatctgaatagacatttc

SEQ ID NO: 102184 - DNA, 20 bp, synthetic construct
  source 1..20: mol_type = other DNA
aaagatctgaatagacattt

SEQ ID NO: 102185 - DNA, 20 bp, synthetic construct
  source 1..20: mol_type = other DNA
aaaagatctgaatagacatt

SEQ ID NO: 102186 - DNA, 20 bp, synthetic construct
  source 1..20: mol_type = other DNA
caaaagatctgaatagacat

SEQ ID NO: 102187 - DNA, 20 bp, synthetic construct
  source 1..20: mol_type = other DNA
gcaaaagatctgaatagaca

SEQ ID NO: 102188 - DNA, 20 bp, synthetic construct
  source 1..20: mol_type = other DNA
ggcaaaagatctgaatagac

SEQ ID NO: 102189 - DNA, 20 bp, synthetic construct
  source 1..20: mol_type = other DNA
gggcaaaagatctgaataga

SEQ ID NO: 102190 - DNA, 20 bp, synthetic construct
  source 1..20: mol_type = other DNA
tgggcaaaagatctgaatag

SEQ ID NO: 102191 - DNA, 20 bp, synthetic construct
  source 1..20: mol_type = other DNA
atgggcaaaagatctgaata

SEQ ID NO: 102192 - DNA, 20 bp, synthetic construct
  source 1..20: mol_type = other DNA
aatgggcaaaagatctgaat

SEQ ID NO: 102193 - DNA, 20 bp, synthetic construct
  source 1..20: mol_type = other DNA
aaatgggcaaaagatctgaa

SEQ ID NO: 102194 - DNA, 20 bp, synthetic construct
  source 1..20: mol_type = other DNA
aaaatgggcaaaagatctga

SEQ ID NO: 102195 - DNA, 20 bp, synthetic construct
  source 1..20: mol_type = other DNA
aaaaatgggcaaaagatctg

SEQ ID NO: 102196 - DNA, 20 bp, synthetic construct
  source 1..20: mol_type = other DNA
taaaaatgggcaaaagatct

SEQ ID NO: 102197 - DNA, 20 bp, synthetic construct
  source 1..20: mol_type = other DNA
ttaaaaatgggcaaaagatc

SEQ ID NO: 102198 - DNA, 20 bp, synthetic construct
  source 1..20: mol_type = other DNA
attaaaaatgggcaaaagat

SEQ ID NO: 102199 - DNA, 20 bp, synthetic construct
  source 1..20: mol_type = other DNA
aattaaaaatgggcaaaaga

SEQ ID NO: 102200 - DNA, 20 bp, synthetic construct
  source 1..20: mol_type = other DNA
caattaaaaatgggcaaaag

SEQ ID NO: 102201 - DNA, 20 bp, synthetic construct
  source 1..20: mol_type = other DNA
tcaattaaaaatgggcaaaa

SEQ ID NO: 102202 - DNA, 20 bp, synthetic construct
  source 1..20: mol_type = other DNA
ctcaattaaaaatgggcaaa

SEQ ID NO: 102203 - DNA, 20 bp, synthetic construct
  source 1..20: mol_type = other DNA
actcaattaaaaatgggcaa

SEQ ID NO: 102204 - DNA, 20 bp, synthetic construct
  source 1..20: mol_type = other DNA
aactcaattaaaaatgggca

SEQ ID NO: 102205 - DNA, 20 bp, synthetic construct
  source 1..20: mol_type = other DNA
taactcaattaaaaatgggc

SEQ ID NO: 102206 - DNA, 20 bp, synthetic construct
  source 1..20: mol_type = other DNA
gtaactcaattaaaaatggg

SEQ ID NO: 102207 - DNA, 20 bp, synthetic construct
  source 1..20: mol_type = other DNA
agtaactcaattaaaaatgg

SEQ ID NO: 102208 - DNA, 20 bp, synthetic construct
  source 1..20: mol_type = other DNA
tagtaactcaattaaaaatg

SEQ ID NO: 102209 - DNA, 20 bp, synthetic construct
  source 1..20: mol_type = other DNA
ttagtaactcaattaaaaat

SEQ ID NO: 102210 - DNA, 20 bp, synthetic construct
  source 1..20: mol_type = other DNA
tttagtaactcaattaaaaa

SEQ ID NO: 102211 - DNA, 20 bp, synthetic construct
  source 1..20: mol_type = other DNA
ttttagtaactcaattaaaa

SEQ ID NO: 102212 - DNA, 20 bp, synthetic construct
  source 1..20: mol_type = other DNA
attttagtaactcaattaaa

SEQ ID NO: 102213 - DNA, 20 bp, synthetic construct
  source 1..20: mol_type = other DNA
aattttagtaactcaattaa

SEQ ID NO: 102214 - DNA, 20 bp, synthetic construct
  source 1..20: mol_type = other DNA
aaattttagtaactcaatta

SEQ ID NO: 102215 - DNA, 20 bp, synthetic construct
  source 1..20: mol_type = other DNA
aaaattttagtaactcaatt

SEQ ID NO: 102216 - DNA, 20 bp, synthetic construct
  source 1..20: mol_type = other DNA
gaaaattttagtaactcaat

SEQ ID NO: 102217 - DNA, 20 bp, synthetic construct
  source 1..20: mol_type = other DNA
ggaaaattttagtaactcaa

SEQ ID NO: 102218 - DNA, 20 bp, synthetic construct
  source 1..20: mol_type = other DNA
gggaaaattttagtaactca

SEQ ID NO: 102219 - DNA, 20 bp, synthetic construct
  source 1..20: mol_type = other DNA
agggaaaattttagtaactc

SEQ ID NO: 102220 - DNA, 20 bp, synthetic construct
  source 1..20: mol_type = other DNA
tagggaaaattttagtaact

SEQ ID NO: 102221 - DNA, 20 bp, synthetic construct
  source 1..20: mol_type = other DNA
atagggaaaattttagtaac

SEQ ID NO: 102222 - DNA, 20 bp, synthetic construct
  source 1..20: mol_type = other DNA
catagggaaaattttagtaa

SEQ ID NO: 102223 - DNA, 20 bp, synthetic construct
  source 1..20: mol_type = other DNA
ccatagggaaaattttagta

SEQ ID NO: 102224 - DNA, 20 bp, synthetic construct
  source 1..20: mol_type = other DNA
tccatagggaaaattttagt

SEQ ID NO: 102225 - DNA, 20 bp, synthetic construct
  source 1..20: mol_type = other DNA
ctccatagggaaaattttag

SEQ ID NO: 102226 - DNA, 20 bp, synthetic construct
  source 1..20: mol_type = other DNA
actccatagggaaaatttta

SEQ ID NO: 102227 - DNA, 20 bp, synthetic construct
  source 1..20: mol_type = other DNA
aactccatagggaaaatttt

SEQ ID NO: 102228 - DNA, 20 bp, synthetic construct
  source 1..20: mol_type = other DNA
caactccatagggaaaattt

SEQ ID NO: 102229 - DNA, 20 bp, synthetic construct
  source 1..20: mol_type = other DNA
gcaactccatagggaaaatt

SEQ ID NO: 102230 - DNA, 20 bp, synthetic construct
  source 1..20: mol_type = other DNA
agcaactccatagggaaaat

SEQ ID NO: 102231 - DNA, 20 bp, synthetic construct
  source 1..20: mol_type = other DNA
aagcaactccatagggaaaa

SEQ ID NO: 102232 - DNA, 20 bp, synthetic construct
  source 1..20: mol_type = other DNA
caagcaactccatagggaaa

SEQ ID NO: 102233 - DNA, 20 bp, synthetic construct
  source 1..20: mol_type = other DNA
tcaagcaactccatagggaa

SEQ ID NO: 102234 - DNA, 20 bp, synthetic construct
  source 1..20: mol_type = other DNA
ctcaagcaactccataggga

SEQ ID NO: 102235 - DNA, 20 bp, synthetic construct
  source 1..20: mol_type = other DNA
actcaagcaactccataggg

SEQ ID NO: 102236 - DNA, 20 bp, synthetic construct
  source 1..20: mol_type = other DNA
cactcaagcaactccatagg

SEQ ID NO: 102237 - DNA, 20 bp, synthetic construct
  source 1..20: mol_type = other DNA
gcactcaagcaactccatag

SEQ ID NO: 102238 - DNA, 20 bp, synthetic construct
  source 1..20: mol_type = other DNA
ggcactcaagcaactccata

SEQ ID NO: 102239 - DNA, 20 bp, synthetic construct
  source 1..20: mol_type = other DNA
aggcactcaagcaactccat

SEQ ID NO: 102240 - DNA, 20 bp, synthetic construct
  source 1..20: mol_type = other DNA
aaggcactcaagcaactcca

SEQ ID NO: 102241 - DNA, 20 bp, synthetic construct
  source 1..20: mol_type = other DNA
aaaggcactcaagcaactcc

SEQ ID NO: 102242 - DNA, 20 bp, synthetic construct
  source 1..20: mol_type = other DNA
aaaaggcactcaagcaactc

SEQ ID NO: 102243 - DNA, 20 bp, synthetic construct
  source 1..20: mol_type = other DNA
taaaaggcactcaagcaact

SEQ ID NO: 102244 - DNA, 20 bp, synthetic construct
  source 1..20: mol_type = other DNA
ataaaaggcactcaagcaac

SEQ ID NO: 102245 - DNA, 20 bp, synthetic construct
  source 1..20: mol_type = other DNA
tataaaaggcactcaagcaa

SEQ ID NO: 102246 - DNA, 20 bp, synthetic construct
  source 1..20: mol_type = other DNA
atataaaaggcactcaagca

SEQ ID NO: 102247 - DNA, 20 bp, synthetic construct
  source 1..20: mol_type = other DNA
aatataaaaggcactcaagc

SEQ ID NO: 102248 - DNA, 20 bp, synthetic construct
  source 1..20: mol_type = other DNA
gaatataaaaggcactcaag

SEQ ID NO: 102249 - DNA, 20 bp, synthetic construct
  source 1..20: mol_type = other DNA
agaatataaaaggcactcaa

SEQ ID NO: 102250 - DNA, 20 bp, synthetic construct
  source 1..20: mol_type = other DNA
cagaatataaaaggcactca

SEQ ID NO: 102251 - DNA, 20 bp, synthetic construct
  source 1..20: mol_type = other DNA
ccagaatataaaaggcactc

SEQ ID NO: 102252 - DNA, 20 bp, synthetic construct
  source 1..20: mol_type = other DNA
accagaatataaaaggcact

SEQ ID NO: 102253 - DNA, 20 bp, synthetic construct
  source 1..20: mol_type = other DNA
aaccagaatataaaaggcac

SEQ ID NO: 102254 - DNA, 20 bp, synthetic construct
  source 1..20: mol_type = other DNA
taaccagaatataaaaggca

SEQ ID NO: 102255 - DNA, 20 bp, synthetic construct
  source 1..20: mol_type = other DNA
ataaccagaatataaaaggc

SEQ ID NO: 102256 - DNA, 20 bp, synthetic construct
  source 1..20: mol_type = other DNA
aataaccagaatataaaagg

SEQ ID NO: 102257 - DNA, 20 bp, synthetic construct
  source 1..20: mol_type = other DNA
caataaccagaatataaaag

SEQ ID NO: 102258 - DNA, 20 bp, synthetic construct
  source 1..20: mol_type = other DNA
tcaataaccagaatataaaa

SEQ ID NO: 102259 - DNA, 20 bp, synthetic construct
  source 1..20: mol_type = other DNA
atcaataaccagaatataaa

SEQ ID NO: 102260 - DNA, 20 bp, synthetic construct
  source 1..20: mol_type = other DNA
gatcaataaccagaatataa

SEQ ID NO: 102261 - DNA, 20 bp, synthetic construct
  source 1..20: mol_type = other DNA
ggatcaataaccagaatata

SEQ ID NO: 102262 - DNA, 20 bp, synthetic construct
  source 1..20: mol_type = other DNA
gggatcaataaccagaatat

SEQ ID NO: 102263 - DNA, 20 bp, synthetic construct
  source 1..20: mol_type = other DNA
agggatcaataaccagaata

SEQ ID NO: 102264 - DNA, 20 bp, synthetic construct
  source 1..20: mol_type = other DNA
aagggatcaataaccagaat

SEQ ID NO: 102265 - DNA, 20 bp, synthetic construct
  source 1..20: mol_type = other DNA
caagggatcaataaccagaa

SEQ ID NO: 102266 - DNA, 20 bp, synthetic construct
  source 1..20: mol_type = other DNA
acaagggatcaataaccaga

SEQ ID NO: 102267 - DNA, 20 bp, synthetic construct
  source 1..20: mol_type = other DNA
gacaagggatcaataaccag

SEQ ID NO: 102268 - DNA, 20 bp, synthetic construct
  source 1..20: mol_type = other DNA
tgacaagggatcaataacca

SEQ ID NO: 102269 - DNA, 20 bp, synthetic construct
  source 1..20: mol_type = other DNA
ctgacaagggatcaataacc

SEQ ID NO: 102270 - DNA, 20 bp, synthetic construct
  source 1..20: mol_type = other DNA
tctgacaagggatcaataac

SEQ ID NO: 102271 - DNA, 20 bp, synthetic construct
  source 1..20: mol_type = other DNA
atctgacaagggatcaataa

SEQ ID NO: 102272 - DNA, 20 bp, synthetic construct
  source 1..20: mol_type = other DNA
catctgacaagggatcaata

SEQ ID NO: 102273 - DNA, 20 bp, synthetic construct
  source 1..20: mol_type = other DNA
tcatctgacaagggatcaat

SEQ ID NO: 102274 - DNA, 20 bp, synthetic construct
  source 1..20: mol_type = other DNA
ctcatctgacaagggatcaa

SEQ ID NO: 102275 - DNA, 20 bp, synthetic construct
  source 1..20: mol_type = other DNA
actcatctgacaagggatca

SEQ ID NO: 102276 - DNA, 20 bp, synthetic construct
  source 1..20: mol_type = other DNA
tactcatctgacaagggatc

SEQ ID NO: 102277 - DNA, 20 bp, synthetic construct
  source 1..20: mol_type = other DNA
ctactcatctgacaagggat

SEQ ID NO: 102278 - DNA, 20 bp, synthetic construct
  source 1..20: mol_type = other DNA
actactcatctgacaaggga

SEQ ID NO: 102279 - DNA, 20 bp, synthetic construct
  source 1..20: mol_type = other DNA
aactactcatctgacaaggg

SEQ ID NO: 102280 - DNA, 20 bp, synthetic construct
  source 1..20: mol_type = other DNA
aaactactcatctgacaagg

SEQ ID NO: 102281 - DNA, 20 bp, synthetic construct
  source 1..20: mol_type = other DNA
caaactactcatctgacaag

SEQ ID NO: 102282 - DNA, 20 bp, synthetic construct
  source 1..20: mol_type = other DNA
gcaaactactcatctgacaa

SEQ ID NO: 102283 - DNA, 20 bp, synthetic construct
  source 1..20: mol_type = other DNA
tgcaaactactcatctgaca

SEQ ID NO: 102284 - DNA, 20 bp, synthetic construct
  source 1..20: mol_type = other DNA
ttgcaaactactcatctgac

SEQ ID NO: 102285 - DNA, 20 bp, synthetic construct
  source 1..20: mol_type = other DNA
tttgcaaactactcatctga

SEQ ID NO: 102286 - DNA, 20 bp, synthetic construct
  source 1..20: mol_type = other DNA
atttgcaaactactcatctg

SEQ ID NO: 102287 - DNA, 20 bp, synthetic construct
  source 1..20: mol_type = other DNA
tatttgcaaactactcatct

SEQ ID NO: 102288 - DNA, 20 bp, synthetic construct
  source 1..20: mol_type = other DNA
atatttgcaaactactcatc

SEQ ID NO: 102289 - DNA, 20 bp, synthetic construct
  source 1..20: mol_type = other DNA
aatatttgcaaactactcat

SEQ ID NO: 102290 - DNA, 20 bp, synthetic construct
  source 1..20: mol_type = other DNA
aaatatttgcaaactactca

SEQ ID NO: 102291 - DNA, 20 bp, synthetic construct
  source 1..20: mol_type = other DNA
aaaatatttgcaaactactc

SEQ ID NO: 102292 - DNA, 20 bp, synthetic construct
  source 1..20: mol_type = other DNA
gaaaatatttgcaaactact

SEQ ID NO: 102293 - DNA, 20 bp, synthetic construct
  source 1..20: mol_type = other DNA
agaaaatatttgcaaactac

SEQ ID NO: 102294 - DNA, 20 bp, synthetic construct
  source 1..20: mol_type = other DNA
gagaaaatatttgcaaacta

SEQ ID NO: 102295 - DNA, 20 bp, synthetic construct
  source 1..20: mol_type = other DNA
ggagaaaatatttgcaaact

SEQ ID NO: 102296 - DNA, 20 bp, synthetic construct
  source 1..20: mol_type = other DNA
gggagaaaatatttgcaaac

SEQ ID NO: 102297 - DNA, 20 bp, synthetic construct
  source 1..20: mol_type = other DNA
tgggagaaaatatttgcaaa

SEQ ID NO: 102298 - DNA, 20 bp, synthetic construct
  source 1..20: mol_type = other DNA
atgggagaaaatatttgcaa

SEQ ID NO: 102299 - DNA, 20 bp, synthetic construct
  source 1..20: mol_type = other DNA
aatgggagaaaatatttgca

SEQ ID NO: 102300 - DNA, 20 bp, synthetic construct
  source 1..20: mol_type = other DNA
gaatgggagaaaatatttgc

SEQ ID NO: 102301 - DNA, 20 bp, synthetic construct
  source 1..20: mol_type = other DNA
agaatgggagaaaatatttg

SEQ ID NO: 102302 - DNA, 20 bp, synthetic construct
  source 1..20: mol_type = other DNA
cagaatgggagaaaatattt

SEQ ID NO: 102303 - DNA, 20 bp, synthetic construct
  source 1..20: mol_type = other DNA
acagaatgggagaaaatatt

SEQ ID NO: 102304 - DNA, 20 bp, synthetic construct
  source 1..20: mol_type = other DNA
cacagaatgggagaaaatat

SEQ ID NO: 102305 - DNA, 20 bp, synthetic construct
  source 1..20: mol_type = other DNA
ccacagaatgggagaaaata

SEQ ID NO: 102306 - DNA, 20 bp, synthetic construct
  source 1..20: mol_type = other DNA
cccacagaatgggagaaaat

SEQ ID NO: 102307 - DNA, 20 bp, synthetic construct
  source 1..20: mol_type = other DNA
gcccacagaatgggagaaaa

SEQ ID NO: 102308 - DNA, 20 bp, synthetic construct
  source 1..20: mol_type = other DNA
agcccacagaatgggagaaa

SEQ ID NO: 102309 - DNA, 20 bp, synthetic construct
  source 1..20: mol_type = other DNA
cagcccacagaatgggagaa

SEQ ID NO: 102310 - DNA, 20 bp, synthetic construct
  source 1..20: mol_type = other DNA
acagcccacagaatgggaga

SEQ ID NO: 102311 - DNA, 20 bp, synthetic construct
  source 1..20: mol_type = other DNA
gacagcccacagaatgggag

SEQ ID NO: 102312 - DNA, 20 bp, synthetic construct
  source 1..20: mol_type = other DNA
agacagcccacagaatggga

SEQ ID NO: 102313 - DNA, 20 bp, synthetic construct
  source 1..20: mol_type = other DNA
gagacagcccacagaatggg

SEQ ID NO: 102314 - DNA, 20 bp, synthetic construct
  source 1..20: mol_type = other DNA
agagacagcccacagaatgg

SEQ ID NO: 102315 - DNA, 20 bp, synthetic construct
  source 1..20: mol_type = other DNA
aagagacagcccacagaatg

SEQ ID NO: 102316 - DNA, 20 bp, synthetic construct
  source 1..20: mol_type = other DNA
gaagagacagcccacagaat

SEQ ID NO: 102317 - DNA, 20 bp, synthetic construct
  source 1..20: mol_type = other DNA
tgaagagacagcccacagaa

SEQ ID NO: 102318 - DNA, 20 bp, synthetic construct
  source 1..20: mol_type = other DNA
gtgaagagacagcccacaga

SEQ ID NO: 102319 - DNA, 20 bp, synthetic construct
  source 1..20: mol_type = other DNA
agtgaagagacagcccacag

SEQ ID NO: 102320 - DNA, 20 bp, synthetic construct
  source 1..20: mol_type = other DNA
aagtgaagagacagcccaca

SEQ ID NO: 102321 - DNA, 20 bp, synthetic construct
  source 1..20: mol_type = other DNA
aaagtgaagagacagcccac

SEQ ID NO: 102322 - DNA, 20 bp, synthetic construct
  source 1..20: mol_type = other DNA
caaagtgaagagacagccca

SEQ ID NO: 102323 - DNA, 20 bp, synthetic construct
  source 1..20: mol_type = other DNA
acaaagtgaagagacagccc

SEQ ID NO: 102324 - DNA, 20 bp, synthetic construct
  source 1..20: mol_type = other DNA
aacaaagtgaagagacagcc

SEQ ID NO: 102325 - DNA, 20 bp, synthetic construct
  source 1..20: mol_type = other DNA
caacaaagtgaagagacagc

SEQ ID NO: 102326 - DNA, 20 bp, synthetic construct
  source 1..20: mol_type = other DNA
tcaacaaagtgaagagacag

SEQ ID NO: 102327 - DNA, 20 bp, synthetic construct
  source 1..20: mol_type = other DNA
atcaacaaagtgaagagaca

SEQ ID NO: 102328 - DNA, 20 bp, synthetic construct
  source 1..20: mol_type = other DNA
catcaacaaagtgaagagac

SEQ ID NO: 102329 - DNA, 20 bp, synthetic construct
  source 1..20: mol_type = other DNA
ccatcaacaaagtgaagaga

SEQ ID NO: 102330 - DNA, 20 bp, synthetic construct
  source 1..20: mol_type = other DNA
accatcaacaaagtgaagag

SEQ ID NO: 102331 - DNA, 20 bp, synthetic construct
  source 1..20: mol_type = other DNA
aaccatcaacaaagtgaaga

SEQ ID NO: 102332 - DNA, 20 bp, synthetic construct
  source 1..20: mol_type = other DNA
aaaccatcaacaaagtgaag

SEQ ID NO: 102333 - DNA, 20 bp, synthetic construct
  source 1..20: mol_type = other DNA
gaaaccatcaacaaagtgaa

SEQ ID NO: 102334 - DNA, 20 bp, synthetic construct
  source 1..20: mol_type = other DNA
ggaaaccatcaacaaagtga

SEQ ID NO: 102335 - DNA, 20 bp, synthetic construct
  source 1..20: mol_type = other DNA
aggaaaccatcaacaaagtg

SEQ ID NO: 102336 - DNA, 20 bp, synthetic construct
  source 1..20: mol_type = other DNA
aaggaaaccatcaacaaagt

SEQ ID NO: 102337 - DNA, 20 bp, synthetic construct
  source 1..20: mol_type = other DNA
aaaggaaaccatcaacaaag

SEQ ID NO: 102338 - DNA, 20 bp, synthetic construct
  source 1..20: mol_type = other DNA
caaaggaaaccatcaacaaa

SEQ ID NO: 102339 - DNA, 20 bp, synthetic construct
  source 1..20: mol_type = other DNA
gcaaaggaaaccatcaacaa

SEQ ID NO: 102340 - DNA, 20 bp, synthetic construct
  source 1..20: mol_type = other DNA
agcaaaggaaaccatcaaca

SEQ ID NO: 102341 - DNA, 20 bp, synthetic construct
  source 1..20: mol_type = other DNA
cagcaaaggaaaccatcaac

SEQ ID NO: 102342 - DNA, 20 bp, synthetic construct
  source 1..20: mol_type = other DNA
acagcaaaggaaaccatcaa

SEQ ID NO: 102343 - DNA, 20 bp, synthetic construct
  source 1..20: mol_type = other DNA
cacagcaaaggaaaccatca

SEQ ID NO: 102344 - DNA, 20 bp, synthetic construct
  source 1..20: mol_type = other DNA
gcacagcaaaggaaaccatc

SEQ ID NO: 102345 - DNA, 20 bp, synthetic construct
  source 1..20: mol_type = other DNA
tgcacagcaaaggaaaccat

SEQ ID NO: 102346 - DNA, 20 bp, synthetic construct
  source 1..20: mol_type = other DNA
ctgcacagcaaaggaaacca

SEQ ID NO: 102347 - DNA, 20 bp, synthetic construct
  source 1..20: mol_type = other DNA
tctgcacagcaaaggaaacc

SEQ ID NO: 102348 - DNA, 20 bp, synthetic construct
  source 1..20: mol_type = other DNA
ttctgcacagcaaaggaaac

SEQ ID NO: 102349 - DNA, 20 bp, synthetic construct
  source 1..20: mol_type = other DNA
cttctgcacagcaaaggaaa

SEQ ID NO: 102350 - DNA, 20 bp, synthetic construct
  source 1..20: mol_type = other DNA
gcttctgcacagcaaaggaa

SEQ ID NO: 102351 - DNA, 20 bp, synthetic construct
  source 1..20: mol_type = other DNA
agcttctgcacagcaaagga

SEQ ID NO: 102352 - DNA, 20 bp, synthetic construct
  source 1..20: mol_type = other DNA
aagcttctgcacagcaaagg

SEQ ID NO: 102353 - DNA, 20 bp, synthetic construct
  source 1..20: mol_type = other DNA
aaagcttctgcacagcaaag

SEQ ID NO: 102354 - DNA, 20 bp, synthetic construct
  source 1..20: mol_type = other DNA
aaaagcttctgcacagcaaa

SEQ ID NO: 102355 - DNA, 20 bp, synthetic construct
  source 1..20: mol_type = other DNA
aaaaagcttctgcacagcaa

SEQ ID NO: 102356 - DNA, 20 bp, synthetic construct
  source 1..20: mol_type = other DNA
taaaaagcttctgcacagca

SEQ ID NO: 102357 - DNA, 20 bp, synthetic construct
  source 1..20: mol_type = other DNA
ttaaaaagcttctgcacagc

SEQ ID NO: 102358 - DNA, 20 bp, synthetic construct
  source 1..20: mol_type = other DNA
gttaaaaagcttctgcacag

SEQ ID NO: 102359 - DNA, 20 bp, synthetic construct
  source 1..20: mol_type = other DNA
agttaaaaagcttctgcaca

SEQ ID NO: 102360 - DNA, 20 bp, synthetic construct
  source 1..20: mol_type = other DNA
aagttaaaaagcttctgcac

SEQ ID NO: 102361 - DNA, 20 bp, synthetic construct
  source 1..20: mol_type = other DNA
caagttaaaaagcttctgca

SEQ ID NO: 102362 - DNA, 20 bp, synthetic construct
  source 1..20: mol_type = other DNA
tcaagttaaaaagcttctgc

SEQ ID NO: 102363 - DNA, 20 bp, synthetic construct
  source 1..20: mol_type = other DNA
atcaagttaaaaagcttctg

SEQ ID NO: 102364 - DNA, 20 bp, synthetic construct
  source 1..20: mol_type = other DNA
catcaagttaaaaagcttct

SEQ ID NO: 102365 - DNA, 20 bp, synthetic construct
  source 1..20: mol_type = other DNA
acatcaagttaaaaagcttc

SEQ ID NO: 102366 - DNA, 20 bp, synthetic construct
  source 1..20: mol_type = other DNA
cacatcaagttaaaaagctt

SEQ ID NO: 102367 - DNA, 20 bp, synthetic construct
  source 1..20: mol_type = other DNA
tcacatcaagttaaaaagct

SEQ ID NO: 102368 - DNA, 20 bp, synthetic construct
  source 1..20: mol_type = other DNA
atcacatcaagttaaaaagc

SEQ ID NO: 102369 - DNA, 20 bp, synthetic construct
  source 1..20: mol_type = other DNA
gatcacatcaagttaaaaag

SEQ ID NO: 102370 - DNA, 20 bp, synthetic construct
  source 1..20: mol_type = other DNA
ggatcacatcaagttaaaaa

SEQ ID NO: 102371 - DNA, 20 bp, synthetic construct
  source 1..20: mol_type = other DNA
gggatcacatcaagttaaaa

SEQ ID NO: 102372 - DNA, 20 bp, synthetic construct
  source 1..20: mol_type = other DNA
tgggatcacatcaagttaaa

SEQ ID NO: 102373 - DNA, 20 bp, synthetic construct
  source 1..20: mol_type = other DNA
atgggatcacatcaagttaa

SEQ ID NO: 102374 - DNA, 20 bp, synthetic construct
  source 1..20: mol_type = other DNA
aatgggatcacatcaagtta

SEQ ID NO: 102375 - DNA, 20 bp, synthetic construct
  source 1..20: mol_type = other DNA
aaatgggatcacatcaagtt

SEQ ID NO: 102376 - DNA, 20 bp, synthetic construct
  source 1..20: mol_type = other DNA
caaatgggatcacatcaagt

SEQ ID NO: 102377 - DNA, 20 bp, synthetic construct
  source 1..20: mol_type = other DNA
acaaatgggatcacatcaag

SEQ ID NO: 102378 - DNA, 20 bp, synthetic construct
  source 1..20: mol_type = other DNA
gacaaatgggatcacatcaa

SEQ ID NO: 102379 - DNA, 20 bp, synthetic construct
  source 1..20: mol_type = other DNA
ggacaaatgggatcacatca

SEQ ID NO: 102380 - DNA, 20 bp, synthetic construct
  source 1..20: mol_type = other DNA
tggacaaatgggatcacatc

SEQ ID NO: 102381 - DNA, 20 bp, synthetic construct
  source 1..20: mol_type = other DNA
atggacaaatgggatcacat

SEQ ID NO: 102382 - DNA, 20 bp, synthetic construct
  source 1..20: mol_type = other DNA
gatggacaaatgggatcaca

SEQ ID NO: 102383 - DNA, 20 bp, synthetic construct
  source 1..20: mol_type = other DNA
agatggacaaatgggatcac

SEQ ID NO: 102384 - DNA, 20 bp, synthetic construct
  source 1..20: mol_type = other DNA
aagatggacaaatgggatca

SEQ ID NO: 102385 - DNA, 20 bp, synthetic construct
  source 1..20: mol_type = other DNA
aaagatggacaaatgggatc

SEQ ID NO: 102386 - DNA, 20 bp, synthetic construct
  source 1..20: mol_type = other DNA
caaagatggacaaatgggat

SEQ ID NO: 102387 - DNA, 20 bp, synthetic construct
  source 1..20: mol_type = other DNA
gcaaagatggacaaatggga

SEQ ID NO: 102388 - DNA, 20 bp, synthetic construct
  source 1..20: mol_type = other DNA
agcaaagatggacaaatggg

SEQ ID NO: 102389 - DNA, 20 bp, synthetic construct
  source 1..20: mol_type = other DNA
aagcaaagatggacaaatgg

SEQ ID NO: 102390 - DNA, 20 bp, synthetic construct
  source 1..20: mol_type = other DNA
aaagcaaagatggacaaatg

SEQ ID NO: 102391 - DNA, 20 bp, synthetic construct
  source 1..20: mol_type = other DNA
caaagcaaagatggacaaat

SEQ ID NO: 102392 - DNA, 20 bp, synthetic construct
  source 1..20: mol_type = other DNA
ccaaagcaaagatggacaaa

SEQ ID NO: 102393 - DNA, 20 bp, synthetic construct
  source 1..20: mol_type = other DNA
accaaagcaaagatggacaa

SEQ ID NO: 102394 - DNA, 20 bp, synthetic construct
  source 1..20: mol_type = other DNA
aaccaaagcaaagatggaca

SEQ ID NO: 102395 - DNA, 20 bp, synthetic construct
  source 1..20: mol_type = other DNA
caaccaaagcaaagatggac

SEQ ID NO: 102396 - DNA, 20 bp, synthetic construct
  source 1..20: mol_type = other DNA
gcaaccaaagcaaagatgga

SEQ ID NO: 102397 - DNA, 20 bp, synthetic construct
  source 1..20: mol_type = other DNA
ggcaaccaaagcaaagatgg

SEQ ID NO: 102398 - DNA, 20 bp, synthetic construct
  source 1..20: mol_type = other DNA
aggcaaccaaagcaaagatg

SEQ ID NO: 102399 - DNA, 20 bp, synthetic construct
  source 1..20: mol_type = other DNA
caggcaaccaaagcaaagat

SEQ ID NO: 102400 - DNA, 20 bp, synthetic construct
  source 1..20: mol_type = other DNA
acaggcaaccaaagcaaaga

SEQ ID NO: 102401 - DNA, 20 bp, synthetic construct
  source 1..20: mol_type = other DNA
tacaggcaaccaaagcaaag

SEQ ID NO: 102402 - DNA, 20 bp, synthetic construct
  source 1..20: mol_type = other DNA
gtacaggcaaccaaagcaaa

SEQ ID NO: 102403 - DNA, 20 bp, synthetic construct
  source 1..20: mol_type = other DNA
agtacaggcaaccaaagcaa

SEQ ID NO: 102404 - DNA, 20 bp, synthetic construct
  source 1..20: mol_type = other DNA
aagtacaggcaaccaaagca

SEQ ID NO: 102405 - DNA, 20 bp, synthetic construct
  source 1..20: mol_type = other DNA
aaagtacaggcaaccaaagc

SEQ ID NO: 102406 - DNA, 20 bp, synthetic construct
  source 1..20: mol_type = other DNA
aaaagtacaggcaaccaaag

SEQ ID NO: 102407 - DNA, 20 bp, synthetic construct
  source 1..20: mol_type = other DNA
caaaagtacaggcaaccaaa

SEQ ID NO: 102408 - DNA, 20 bp, synthetic construct
  source 1..20: mol_type = other DNA
ccaaaagtacaggcaaccaa

SEQ ID NO: 102409 - DNA, 20 bp, synthetic construct
  source 1..20: mol_type = other DNA
cccaaaagtacaggcaacca

SEQ ID NO: 102410 - DNA, 20 bp, synthetic construct
  source 1..20: mol_type = other DNA
ccccaaaagtacaggcaacc

SEQ ID NO: 102411 - DNA, 20 bp, synthetic construct
  source 1..20: mol_type = other DNA
accccaaaagtacaggcaac

SEQ ID NO: 102412 - DNA, 20 bp, synthetic construct
  source 1..20: mol_type = other DNA
taccccaaaagtacaggcaa

SEQ ID NO: 102413 - DNA, 20 bp, synthetic construct
  source 1..20: mol_type = other DNA
ataccccaaaagtacaggca

SEQ ID NO: 102414 - DNA, 20 bp, synthetic construct
  source 1..20: mol_type = other DNA
aataccccaaaagtacaggc

SEQ ID NO: 102415 - DNA, 20 bp, synthetic construct
  source 1..20: mol_type = other DNA
taataccccaaaagtacagg

SEQ ID NO: 102416 - DNA, 20 bp, synthetic construct
  source 1..20: mol_type = other DNA
gtaataccccaaaagtacag

SEQ ID NO: 102417 - DNA, 20 bp, synthetic construct
  source 1..20: mol_type = other DNA
agtaataccccaaaagtaca

SEQ ID NO: 102418 - DNA, 20 bp, synthetic construct
  source 1..20: mol_type = other DNA
gagtaataccccaaaagtac

SEQ ID NO: 102419 - DNA, 20 bp, synthetic construct
  source 1..20: mol_type = other DNA
tgagtaataccccaaaagta

SEQ ID NO: 102420 - DNA, 20 bp, synthetic construct
  source 1..20: mol_type = other DNA
ttgagtaataccccaaaagt

SEQ ID NO: 102421 - DNA, 20 bp, synthetic construct
  source 1..20: mol_type = other DNA
cttgagtaataccccaaaag

SEQ ID NO: 102422 - DNA, 20 bp, synthetic construct
  source 1..20: mol_type = other DNA
tcttgagtaataccccaaaa

SEQ ID NO: 102423 - DNA, 20 bp, synthetic construct
  source 1..20: mol_type = other DNA
ttcttgagtaataccccaaa

SEQ ID NO: 102424 - DNA, 20 bp, synthetic construct
  source 1..20: mol_type = other DNA
tttcttgagtaataccccaa

SEQ ID NO: 102425 - DNA, 20 bp, synthetic construct
  source 1..20: mol_type = other DNA
atttcttgagtaatacccca

SEQ ID NO: 102426 - DNA, 20 bp, synthetic construct
  source 1..20: mol_type = other DNA
gatttcttgagtaatacccc

SEQ ID NO: 102427 - DNA, 20 bp, synthetic construct
  source 1..20: mol_type = other DNA
agatttcttgagtaataccc

SEQ ID NO: 102428 - DNA, 20 bp, synthetic construct
  source 1..20: mol_type = other DNA
aagatttcttgagtaatacc

SEQ ID NO: 102429 - DNA, 20 bp, synthetic construct
  source 1..20: mol_type = other DNA
aaagatttcttgagtaatac

SEQ ID NO: 102430 - DNA, 20 bp, synthetic construct
  source 1..20: mol_type = other DNA
caaagatttcttgagtaata

SEQ ID NO: 102431 - DNA, 20 bp, synthetic construct
  source 1..20: mol_type = other DNA
gcaaagatttcttgagtaat

SEQ ID NO: 102432 - DNA, 20 bp, synthetic construct
  source 1..20: mol_type = other DNA
ggcaaagatttcttgagtaa

SEQ ID NO: 102433 - DNA, 20 bp, synthetic construct
  source 1..20: mol_type = other DNA
gggcaaagatttcttgagta

SEQ ID NO: 102434 - DNA, 20 bp, synthetic construct
  source 1..20: mol_type = other DNA
tgggcaaagatttcttgagt

SEQ ID NO: 102435 - DNA, 20 bp, synthetic construct
  source 1..20: mol_type = other DNA
ctgggcaaagatttcttgag

SEQ ID NO: 102436 - DNA, 20 bp, synthetic construct
  source 1..20: mol_type = other DNA
tctgggcaaagatttcttga

SEQ ID NO: 102437 - DNA, 20 bp, synthetic construct
  source 1..20: mol_type = other DNA
ctctgggcaaagatttcttg

SEQ ID NO: 102438 - DNA, 20 bp, synthetic construct
  source 1..20: mol_type = other DNA
actctgggcaaagatttctt

SEQ ID NO: 102439 - DNA, 20 bp, synthetic construct
  source 1..20: mol_type = other DNA
tactctgggcaaagatttct

SEQ ID NO: 102440 - DNA, 20 bp, synthetic construct
  source 1..20: mol_type = other DNA
ttactctgggcaaagatttc

SEQ ID NO: 102441 - DNA, 20 bp, synthetic construct
  source 1..20: mol_type = other DNA
attactctgggcaaagattt

SEQ ID NO: 102442 - DNA, 20 bp, synthetic construct
  source 1..20: mol_type = other DNA
cattactctgggcaaagatt

SEQ ID NO: 102443 - DNA, 20 bp, synthetic construct
  source 1..20: mol_type = other DNA
acattactctgggcaaagat

SEQ ID NO: 102444 - DNA, 20 bp, synthetic construct
  source 1..20: mol_type = other DNA
gacattactctgggcaaaga

SEQ ID NO: 102445 - DNA, 20 bp, synthetic construct
  source 1..20: mol_type = other DNA
ggacattactctgggcaaag

SEQ ID NO: 102446 - DNA, 20 bp, synthetic construct
  source 1..20: mol_type = other DNA
gggacattactctgggcaaa

SEQ ID NO: 102447 - DNA, 20 bp, synthetic construct
  source 1..20: mol_type = other DNA
agggacattactctgggcaa

SEQ ID NO: 102448 - DNA, 20 bp, synthetic construct
  source 1..20: mol_type = other DNA
cagggacattactctgggca

SEQ ID NO: 102449 - DNA, 20 bp, synthetic construct
  source 1..20: mol_type = other DNA
ccagggacattactctgggc

SEQ ID NO: 102450 - DNA, 20 bp, synthetic construct
  source 1..20: mol_type = other DNA
cccagggacattactctggg

SEQ ID NO: 102451 - DNA, 20 bp, synthetic construct
  source 1..20: mol_type = other DNA
tcccagggacattactctgg

SEQ ID NO: 102452 - DNA, 20 bp, synthetic construct
  source 1..20: mol_type = other DNA
ctcccagggacattactctg

SEQ ID NO: 102453 - DNA, 20 bp, synthetic construct
  source 1..20: mol_type = other DNA
actcccagggacattactct

SEQ ID NO: 102454 - DNA, 20 bp, synthetic construct
  source 1..20: mol_type = other DNA
aactcccagggacattactc

SEQ ID NO: 102455 - DNA, 20 bp, synthetic construct
  source 1..20: mol_type = other DNA
aaactcccagggacattact

SEQ ID NO: 102456 - DNA, 20 bp, synthetic construct
  source 1..20: mol_type = other DNA
taaactcccagggacattac

SEQ ID NO: 102457 - DNA, 20 bp, synthetic construct
  source 1..20: mol_type = other DNA
ttaaactcccagggacatta

SEQ ID NO: 102458 - DNA, 20 bp, synthetic construct
  source 1..20: mol_type = other DNA
attaaactcccagggacatt

SEQ ID NO: 102459 - DNA, 20 bp, synthetic construct
  source 1..20: mol_type = other DNA
cattaaactcccagggacat

SEQ ID NO: 102460 - DNA, 20 bp, synthetic construct
  source 1..20: mol_type = other DNA
acattaaactcccagggaca

SEQ ID NO: 102461 - DNA, 20 bp, synthetic construct
  source 1..20: mol_type = other DNA
aacattaaactcccagggac

SEQ ID NO: 102462 - DNA, 20 bp, synthetic construct
  source 1..20: mol_type = other DNA
aaacattaaactcccaggga

SEQ ID NO: 102463 - DNA, 20 bp, synthetic construct
  source 1..20: mol_type = other DNA
aaaacattaaactcccaggg

SEQ ID NO: 102464 - DNA, 20 bp, synthetic construct
  source 1..20: mol_type = other DNA
gaaaacattaaactcccagg

SEQ ID NO: 102465 - DNA, 20 bp, synthetic construct
  source 1..20: mol_type = other DNA
agaaaacattaaactcccag

SEQ ID NO: 102466 - DNA, 20 bp, synthetic construct
  source 1..20: mol_type = other DNA
aagaaaacattaaactccca

SEQ ID NO: 102467 - DNA, 20 bp, synthetic construct
  source 1..20: mol_type = other DNA
aaagaaaacattaaactccc

SEQ ID NO: 102468 - DNA, 20 bp, synthetic construct
  source 1..20: mol_type = other DNA
aaaagaaaacattaaactcc

SEQ ID NO: 102469 - DNA, 20 bp, synthetic construct
  source 1..20: mol_type = other DNA
taaaagaaaacattaaactc

SEQ ID NO: 102470 - DNA, 20 bp, synthetic construct
  source 1..20: mol_type = other DNA
ctaaaagaaaacattaaact

SEQ ID NO: 102471 - DNA, 20 bp, synthetic construct
  source 1..20: mol_type = other DNA
actaaaagaaaacattaaac

SEQ ID NO: 102472 - DNA, 20 bp, synthetic construct
  source 1..20: mol_type = other DNA
tactaaaagaaaacattaaa

SEQ ID NO: 102473 - DNA, 20 bp, synthetic construct
  source 1..20: mol_type = other DNA
ctactaaaagaaaacattaa

SEQ ID NO: 102474 - DNA, 20 bp, synthetic construct
  source 1..20: mol_type = other DNA
actactaaaagaaaacatta

SEQ ID NO: 102475 - DNA, 20 bp, synthetic construct
  source 1..20: mol_type = other DNA
aactactaaaagaaaacatt

SEQ ID NO: 102476 - DNA, 20 bp, synthetic construct
  source 1..20: mol_type = other DNA
aaactactaaaagaaaacat

SEQ ID NO: 102477 - DNA, 20 bp, synthetic construct
  source 1..20: mol_type = other DNA
gaaactactaaaagaaaaca

SEQ ID NO: 102478 - DNA, 20 bp, synthetic construct
  source 1..20: mol_type = other DNA
tgaaactactaaaagaaaac

SEQ ID NO: 102479 - DNA, 20 bp, synthetic construct
  source 1..20: mol_type = other DNA
atgaaactactaaaagaaaa

SEQ ID NO: 102480 - DNA, 20 bp, synthetic construct
  source 1..20: mol_type = other DNA
tatgaaactactaaaagaaa

SEQ ID NO: 102481 - DNA, 20 bp, synthetic construct
  source 1..20: mol_type = other DNA
ctatgaaactactaaaagaa

SEQ ID NO: 102482 - DNA, 20 bp, synthetic construct
  source 1..20: mol_type = other DNA
actatgaaactactaaaaga

SEQ ID NO: 102483 - DNA, 20 bp, synthetic construct
  source 1..20: mol_type = other DNA
aactatgaaactactaaaag

SEQ ID NO: 102484 - DNA, 20 bp, synthetic construct
  source 1..20: mol_type = other DNA
aaactatgaaactactaaaa

SEQ ID NO: 102485 - DNA, 20 bp, synthetic construct
  source 1..20: mol_type = other DNA
caaactatgaaactactaaa

SEQ ID NO: 102486 - DNA, 20 bp, synthetic construct
  source 1..20: mol_type = other DNA
tcaaactatgaaactactaa

SEQ ID NO: 102487 - DNA, 20 bp, synthetic construct
  source 1..20: mol_type = other DNA
ctcaaactatgaaactacta

SEQ ID NO: 102488 - DNA, 20 bp, synthetic construct
  source 1..20: mol_type = other DNA
cctcaaactatgaaactact

SEQ ID NO: 102489 - DNA, 20 bp, synthetic construct
  source 1..20: mol_type = other DNA
acctcaaactatgaaactac

SEQ ID NO: 102490 - DNA, 20 bp, synthetic construct
  source 1..20: mol_type = other DNA
gacctcaaactatgaaacta

SEQ ID NO: 102491 - DNA, 20 bp, synthetic construct
  source 1..20: mol_type = other DNA
agacctcaaactatgaaact

SEQ ID NO: 102492 - DNA, 20 bp, synthetic construct
  source 1..20: mol_type = other DNA
aagacctcaaactatgaaac

SEQ ID NO: 102493 - DNA, 20 bp, synthetic construct
  source 1..20: mol_type = other DNA
taagacctcaaactatgaaa

SEQ ID NO: 102494 - DNA, 20 bp, synthetic construct
  source 1..20: mol_type = other DNA
ctaagacctcaaactatgaa

SEQ ID NO: 102495 - DNA, 20 bp, synthetic construct
  source 1..20: mol_type = other DNA
tctaagacctcaaactatga

SEQ ID NO: 102496 - DNA, 20 bp, synthetic construct
  source 1..20: mol_type = other DNA
atctaagacctcaaactatg

SEQ ID NO: 102497 - DNA, 20 bp, synthetic construct
  source 1..20: mol_type = other DNA
aatctaagacctcaaactat

SEQ ID NO: 102498 - DNA, 20 bp, synthetic construct
  source 1..20: mol_type = other DNA
aaatctaagacctcaaacta

SEQ ID NO: 102499 - DNA, 20 bp, synthetic construct
  source 1..20: mol_type = other DNA
taaatctaagacctcaaact

SEQ ID NO: 102500 - DNA, 20 bp, synthetic construct
  source 1..20: mol_type = other DNA
ttaaatctaagacctcaaac

SEQ ID NO: 102501 - DNA, 20 bp, synthetic construct
  source 1..20: mol_type = other DNA
tttaaatctaagacctcaaa

SEQ ID NO: 102502 - DNA, 20 bp, synthetic construct
  source 1..20: mol_type = other DNA
atttaaatctaagacctcaa

SEQ ID NO: 102503 - DNA, 20 bp, synthetic construct
  source 1..20: mol_type = other DNA
gatttaaatctaagacctca

SEQ ID NO: 102504 - DNA, 20 bp, synthetic construct
  source 1..20: mol_type = other DNA
agatttaaatctaagacctc

SEQ ID NO: 102505 - DNA, 20 bp, synthetic construct
  source 1..20: mol_type = other DNA
aagatttaaatctaagacct

SEQ ID NO: 102506 - DNA, 20 bp, synthetic construct
  source 1..20: mol_type = other DNA
aaagatttaaatctaagacc

SEQ ID NO: 102507 - DNA, 20 bp, synthetic construct
  source 1..20: mol_type = other DNA
taaagatttaaatctaagac

SEQ ID NO: 102508 - DNA, 20 bp, synthetic construct
  source 1..20: mol_type = other DNA
ctaaagatttaaatctaaga

SEQ ID NO: 102509 - DNA, 20 bp, synthetic construct
  source 1..20: mol_type = other DNA
actaaagatttaaatctaag

SEQ ID NO: 102510 - DNA, 20 bp, synthetic construct
  source 1..20: mol_type = other DNA
gactaaagatttaaatctaa

SEQ ID NO: 102511 - DNA, 20 bp, synthetic construct
  source 1..20: mol_type = other DNA
ggactaaagatttaaatcta

SEQ ID NO: 102512 - DNA, 20 bp, synthetic construct
  source 1..20: mol_type = other DNA
tggactaaagatttaaatct

SEQ ID NO: 102513 - DNA, 20 bp, synthetic construct
  source 1..20: mol_type = other DNA
atggactaaagatttaaatc

SEQ ID NO: 102514 - DNA, 20 bp, synthetic construct
  source 1..20: mol_type = other DNA
aatggactaaagatttaaat

SEQ ID NO: 102515 - DNA, 20 bp, synthetic construct
  source 1..20: mol_type = other DNA
aaatggactaaagatttaaa

SEQ ID NO: 102516 - DNA, 20 bp, synthetic construct
  source 1..20: mol_type = other DNA
aaaatggactaaagatttaa

SEQ ID NO: 102517 - DNA, 20 bp, synthetic construct
  source 1..20: mol_type = other DNA
caaaatggactaaagattta

SEQ ID NO: 102518 - DNA, 20 bp, synthetic construct
  source 1..20: mol_type = other DNA
tcaaaatggactaaagattt

SEQ ID NO: 102519 - DNA, 20 bp, synthetic construct
  source 1..20: mol_type = other DNA
atcaaaatggactaaagatt

SEQ ID NO: 102520 - DNA, 20 bp, synthetic construct
  source 1..20: mol_type = other DNA
aatcaaaatggactaaagat

SEQ ID NO: 102521 - DNA, 20 bp, synthetic construct
  source 1..20: mol_type = other DNA
aaatcaaaatggactaaaga

SEQ ID NO: 102522 - DNA, 20 bp, synthetic construct
  source 1..20: mol_type = other DNA
caaatcaaaatggactaaag

SEQ ID NO: 102523 - DNA, 20 bp, synthetic construct
  source 1..20: mol_type = other DNA
tcaaatcaaaatggactaaa

SEQ ID NO: 102524 - DNA, 20 bp, synthetic construct
  source 1..20: mol_type = other DNA
atcaaatcaaaatggactaa

SEQ ID NO: 102525 - DNA, 20 bp, synthetic construct
  source 1..20: mol_type = other DNA
aatcaaatcaaaatggacta

SEQ ID NO: 102526 - DNA, 20 bp, synthetic construct
  source 1..20: mol_type = other DNA
aaatcaaatcaaaatggact

SEQ ID NO: 102527 - DNA, 20 bp, synthetic construct
  source 1..20: mol_type = other DNA
aaaatcaaatcaaaatggac

SEQ ID NO: 102528 - DNA, 20 bp, synthetic construct
  source 1..20: mol_type = other DNA
aaaaatcaaatcaaaatgga

SEQ ID NO: 102529 - DNA, 20 bp, synthetic construct
  source 1..20: mol_type = other DNA
aaaaaatcaaatcaaaatgg

SEQ ID NO: 102530 - DNA, 20 bp, synthetic construct
  source 1..20: mol_type = other DNA
aaaaaaatcaaatcaaaatg

SEQ ID NO: 102531 - DNA, 20 bp, synthetic construct
  source 1..20: mol_type = other DNA
aaaaaaaatcaaatcaaaat

SEQ ID NO: 102532 - DNA, 20 bp, synthetic construct
  source 1..20: mol_type = other DNA
aaaaaaaaatcaaatcaaaa

SEQ ID NO: 102533 - DNA, 20 bp, synthetic construct
  source 1..20: mol_type = other DNA
taaaaaaaaatcaaatcaaa

SEQ ID NO: 102534 - DNA, 20 bp, synthetic construct
  source 1..20: mol_type = other DNA
ttaaaaaaaaatcaaatcaa

SEQ ID NO: 102535 - DNA, 20 bp, synthetic construct
  source 1..20: mol_type = other DNA
attaaaaaaaaatcaaatca

SEQ ID NO: 102536 - DNA, 20 bp, synthetic construct
  source 1..20: mol_type = other DNA
tattaaaaaaaaatcaaatc

SEQ ID NO: 102537 - DNA, 20 bp, synthetic construct
  source 1..20: mol_type = other DNA
atattaaaaaaaaatcaaat

SEQ ID NO: 102538 - DNA, 20 bp, synthetic construct
  source 1..20: mol_type = other DNA
catattaaaaaaaaatcaaa

SEQ ID NO: 102539 - DNA, 20 bp, synthetic construct
  source 1..20: mol_type = other DNA
ccatattaaaaaaaaatcaa

SEQ ID NO: 102540 - DNA, 20 bp, synthetic construct
  source 1..20: mol_type = other DNA
accatattaaaaaaaaatca

SEQ ID NO: 102541 - DNA, 20 bp, synthetic construct
  source 1..20: mol_type = other DNA
caccatattaaaaaaaaatc

SEQ ID NO: 102542 - DNA, 20 bp, synthetic construct
  source 1..20: mol_type = other DNA
ccaccatattaaaaaaaaat

SEQ ID NO: 102543 - DNA, 20 bp, synthetic construct
  source 1..20: mol_type = other DNA
cccaccatattaaaaaaaaa

SEQ ID NO: 102544 - DNA, 20 bp, synthetic construct
  source 1..20: mol_type = other DNA
tcccaccatattaaaaaaaa

SEQ ID NO: 102545 - DNA, 20 bp, synthetic construct
  source 1..20: mol_type = other DNA
gtcccaccatattaaaaaaa

SEQ ID NO: 102546 - DNA, 20 bp, synthetic construct
  source 1..20: mol_type = other DNA
tgtcccaccatattaaaaaa

SEQ ID NO: 102547 - DNA, 20 bp, synthetic construct
  source 1..20: mol_type = other DNA
gtgtcccaccatattaaaaa

SEQ ID NO: 102548 - DNA, 20 bp, synthetic construct
  source 1..20: mol_type = other DNA
tgtgtcccaccatattaaaa

SEQ ID NO: 102549 - DNA, 20 bp, synthetic construct
  source 1..20: mol_type = other DNA
ctgtgtcccaccatattaaa

SEQ ID NO: 102550 - DNA, 20 bp, synthetic construct
  source 1..20: mol_type = other DNA
cctgtgtcccaccatattaa

SEQ ID NO: 102551 - DNA, 20 bp, synthetic construct
  source 1..20: mol_type = other DNA
ccctgtgtcccaccatatta

SEQ ID NO: 102552 - DNA, 20 bp, synthetic construct
  source 1..20: mol_type = other DNA
cccctgtgtcccaccatatt

SEQ ID NO: 102553 - DNA, 20 bp, synthetic construct
  source 1..20: mol_type = other DNA
acccctgtgtcccaccatat

SEQ ID NO: 102554 - DNA, 20 bp, synthetic construct
  source 1..20: mol_type = other DNA
gacccctgtgtcccaccata

SEQ ID NO: 102555 - DNA, 20 bp, synthetic construct
  source 1..20: mol_type = other DNA
agacccctgtgtcccaccat

SEQ ID NO: 102556 - DNA, 20 bp, synthetic construct
  source 1..20: mol_type = other DNA
cagacccctgtgtcccacca

SEQ ID NO: 102557 - DNA, 20 bp, synthetic construct
  source 1..20: mol_type = other DNA
ccagacccctgtgtcccacc

SEQ ID NO: 102558 - DNA, 20 bp, synthetic construct
  source 1..20: mol_type = other DNA
accagacccctgtgtcccac

SEQ ID NO: 102559 - DNA, 20 bp, synthetic construct
  source 1..20: mol_type = other DNA
aaccagacccctgtgtccca

SEQ ID NO: 102560 - DNA, 20 bp, synthetic construct
  source 1..20: mol_type = other DNA
aaaccagacccctgtgtccc

SEQ ID NO: 102561 - DNA, 20 bp, synthetic construct
  source 1..20: mol_type = other DNA
gaaaccagacccctgtgtcc

SEQ ID NO: 102562 - DNA, 20 bp, synthetic construct
  source 1..20: mol_type = other DNA
tgaaaccagacccctgtgtc

SEQ ID NO: 102563 - DNA, 20 bp, synthetic construct
  source 1..20: mol_type = other DNA
atgaaaccagacccctgtgt

SEQ ID NO: 102564 - DNA, 20 bp, synthetic construct
  source 1..20: mol_type = other DNA
aatgaaaccagacccctgtg

SEQ ID NO: 102565 - DNA, 20 bp, synthetic construct
  source 1..20: mol_type = other DNA
gaatgaaaccagacccctgt

SEQ ID NO: 102566 - DNA, 20 bp, synthetic construct
  source 1..20: mol_type = other DNA
agaatgaaaccagacccctg

SEQ ID NO: 102567 - DNA, 20 bp, synthetic construct
  source 1..20: mol_type = other DNA
aagaatgaaaccagacccct

SEQ ID NO: 102568 - DNA, 20 bp, synthetic construct
  source 1..20: mol_type = other DNA
gaagaatgaaaccagacccc

SEQ ID NO: 102569 - DNA, 20 bp, synthetic construct
  source 1..20: mol_type = other DNA
agaagaatgaaaccagaccc

SEQ ID NO: 102570 - DNA, 20 bp, synthetic construct
  source 1..20: mol_type = other DNA
cagaagaatgaaaccagacc

SEQ ID NO: 102571 - DNA, 20 bp, synthetic construct
  source 1..20: mol_type = other DNA
gcagaagaatgaaaccagac

SEQ ID NO: 102572 - DNA, 20 bp, synthetic construct
  source 1..20: mol_type = other DNA
tgcagaagaatgaaaccaga

SEQ ID NO: 102573 - DNA, 20 bp, synthetic construct
  source 1..20: mol_type = other DNA
atgcagaagaatgaaaccag

SEQ ID NO: 102574 - DNA, 20 bp, synthetic construct
  source 1..20: mol_type = other DNA
tatgcagaagaatgaaacca

SEQ ID NO: 102575 - DNA, 20 bp, synthetic construct
  source 1..20: mol_type = other DNA
atatgcagaagaatgaaacc

SEQ ID NO: 102576 - DNA, 20 bp, synthetic construct
  source 1..20: mol_type = other DNA
catatgcagaagaatgaaac

SEQ ID NO: 102577 - DNA, 20 bp, synthetic construct
  source 1..20: mol_type = other DNA
ccatatgcagaagaatgaaa

SEQ ID NO: 102578 - DNA, 20 bp, synthetic construct
  source 1..20: mol_type = other DNA
tccatatgcagaagaatgaa

SEQ ID NO: 102579 - DNA, 20 bp, synthetic construct
  source 1..20: mol_type = other DNA
atccatatgcagaagaatga

SEQ ID NO: 102580 - DNA, 20 bp, synthetic construct
  source 1..20: mol_type = other DNA
tatccatatgcagaagaatg

SEQ ID NO: 102581 - DNA, 20 bp, synthetic construct
  source 1..20: mol_type = other DNA
atatccatatgcagaagaat

SEQ ID NO: 102582 - DNA, 20 bp, synthetic construct
  source 1..20: mol_type = other DNA
gatatccatatgcagaagaa

SEQ ID NO: 102583 - DNA, 20 bp, synthetic construct
  source 1..20: mol_type = other DNA
ggatatccatatgcagaaga

SEQ ID NO: 102584 - DNA, 20 bp, synthetic construct
  source 1..20: mol_type = other DNA
tggatatccatatgcagaag

SEQ ID NO: 102585 - DNA, 20 bp, synthetic construct
  source 1..20: mol_type = other DNA
ctggatatccatatgcagaa

SEQ ID NO: 102586 - DNA, 20 bp, synthetic construct
  source 1..20: mol_type = other DNA
actggatatccatatgcaga

SEQ ID NO: 102587 - DNA, 20 bp, synthetic construct
  source 1..20: mol_type = other DNA
aactggatatccatatgcag

SEQ ID NO: 102588 - DNA, 20 bp, synthetic construct
  source 1..20: mol_type = other DNA
aaactggatatccatatgca

SEQ ID NO: 102589 - DNA, 20 bp, synthetic construct
  source 1..20: mol_type = other DNA
aaaactggatatccatatgc

SEQ ID NO: 102590 - DNA, 20 bp, synthetic construct
  source 1..20: mol_type = other DNA
gaaaactggatatccatatg

SEQ ID NO: 102591 - DNA, 20 bp, synthetic construct
  source 1..20: mol_type = other DNA
ggaaaactggatatccatat

SEQ ID NO: 102592 - DNA, 20 bp, synthetic construct
  source 1..20: mol_type = other DNA
gggaaaactggatatccata

SEQ ID NO: 102593 - DNA, 20 bp, synthetic construct
  source 1..20: mol_type = other DNA
tgggaaaactggatatccat

SEQ ID NO: 102594 - DNA, 20 bp, synthetic construct
  source 1..20: mol_type = other DNA
ctgggaaaactggatatcca

SEQ ID NO: 102595 - DNA, 20 bp, synthetic construct
  source 1..20: mol_type = other DNA
gctgggaaaactggatatcc

SEQ ID NO: 102596 - DNA, 20 bp, synthetic construct
  source 1..20: mol_type = other DNA
tgctgggaaaactggatatc

SEQ ID NO: 102597 - DNA, 20 bp, synthetic construct
  source 1..20: mol_type = other DNA
gtgctgggaaaactggatat

SEQ ID NO: 102598 - DNA, 20 bp, synthetic construct
  source 1..20: mol_type = other DNA
ggtgctgggaaaactggata

SEQ ID NO: 102599 - DNA, 20 bp, synthetic construct
  source 1..20: mol_type = other DNA
tggtgctgggaaaactggat

SEQ ID NO: 102600 - DNA, 20 bp, synthetic construct
  source 1..20: mol_type = other DNA
atggtgctgggaaaactgga

SEQ ID NO: 102601 - DNA, 20 bp, synthetic construct
  source 1..20: mol_type = other DNA
aatggtgctgggaaaactgg

SEQ ID NO: 102602 - DNA, 20 bp, synthetic construct
  source 1..20: mol_type = other DNA
aaatggtgctgggaaaactg

SEQ ID NO: 102603 - DNA, 20 bp, synthetic construct
  source 1..20: mol_type = other DNA
taaatggtgctgggaaaact

SEQ ID NO: 102604 - DNA, 20 bp, synthetic construct
  source 1..20: mol_type = other DNA
ataaatggtgctgggaaaac

SEQ ID NO: 102605 - DNA, 20 bp, synthetic construct
  source 1..20: mol_type = other DNA
aataaatggtgctgggaaaa

SEQ ID NO: 102606 - DNA, 20 bp, synthetic construct
  source 1..20: mol_type = other DNA
caataaatggtgctgggaaa

SEQ ID NO: 102607 - DNA, 20 bp, synthetic construct
  source 1..20: mol_type = other DNA
tcaataaatggtgctgggaa

SEQ ID NO: 102608 - DNA, 20 bp, synthetic construct
  source 1..20: mol_type = other DNA
ttcaataaatggtgctggga

SEQ ID NO: 102609 - DNA, 20 bp, synthetic construct
  source 1..20: mol_type = other DNA
cttcaataaatggtgctggg

SEQ ID NO: 102610 - DNA, 20 bp, synthetic construct
  source 1..20: mol_type = other DNA
tcttcaataaatggtgctgg

SEQ ID NO: 102611 - DNA, 20 bp, synthetic construct
  source 1..20: mol_type = other DNA
ctcttcaataaatggtgctg

SEQ ID NO: 102612 - DNA, 20 bp, synthetic construct
  source 1..20: mol_type = other DNA
tctcttcaataaatggtgct

SEQ ID NO: 102613 - DNA, 20 bp, synthetic construct
  source 1..20: mol_type = other DNA
gtctcttcaataaatggtgc

SEQ ID NO: 102614 - DNA, 20 bp, synthetic construct
  source 1..20: mol_type = other DNA
agtctcttcaataaatggtg

SEQ ID NO: 102615 - DNA, 20 bp, synthetic construct
  source 1..20: mol_type = other DNA
cagtctcttcaataaatggt

SEQ ID NO: 102616 - DNA, 20 bp, synthetic construct
  source 1..20: mol_type = other DNA
acagtctcttcaataaatgg

SEQ ID NO: 102617 - DNA, 20 bp, synthetic construct
  source 1..20: mol_type = other DNA
gacagtctcttcaataaatg

SEQ ID NO: 102618 - DNA, 20 bp, synthetic construct
  source 1..20: mol_type = other DNA
ggacagtctcttcaataaat

SEQ ID NO: 102619 - DNA, 20 bp, synthetic construct
  source 1..20: mol_type = other DNA
aggacagtctcttcaataaa

SEQ ID NO: 102620 - DNA, 20 bp, synthetic construct
  source 1..20: mol_type = other DNA
aaggacagtctcttcaataa

SEQ ID NO: 102621 - DNA, 20 bp, synthetic construct
  source 1..20: mol_type = other DNA
aaaggacagtctcttcaata

SEQ ID NO: 102622 - DNA, 20 bp, synthetic construct
  source 1..20: mol_type = other DNA
gaaaggacagtctcttcaat

SEQ ID NO: 102623 - DNA, 20 bp, synthetic construct
  source 1..20: mol_type = other DNA
ggaaaggacagtctcttcaa

SEQ ID NO: 102624 - DNA, 20 bp, synthetic construct
  source 1..20: mol_type = other DNA
gggaaaggacagtctcttca

SEQ ID NO: 102625 - DNA, 20 bp, synthetic construct
  source 1..20: mol_type = other DNA
ggggaaaggacagtctcttc

SEQ ID NO: 102626 - DNA, 20 bp, synthetic construct
  source 1..20: mol_type = other DNA
tggggaaaggacagtctctt

SEQ ID NO: 102627 - DNA, 20 bp, synthetic construct
  source 1..20: mol_type = other DNA
ctggggaaaggacagtctct

SEQ ID NO: 102628 - DNA, 20 bp, synthetic construct
  source 1..20: mol_type = other DNA
actggggaaaggacagtctc

SEQ ID NO: 102629 - DNA, 20 bp, synthetic construct
  source 1..20: mol_type = other DNA
cactggggaaaggacagtct

SEQ ID NO: 102630 - DNA, 20 bp, synthetic construct
  source 1..20: mol_type = other DNA
acactggggaaaggacagtc

SEQ ID NO: 102631 - DNA, 20 bp, synthetic construct
  source 1..20: mol_type = other DNA
tacactggggaaaggacagt

SEQ ID NO: 102632 - DNA, 20 bp, synthetic construct
  source 1..20: mol_type = other DNA
atacactggggaaaggacag

SEQ ID NO: 102633 - DNA, 20 bp, synthetic construct
  source 1..20: mol_type = other DNA
catacactggggaaaggaca

SEQ ID NO: 102634 - DNA, 20 bp, synthetic construct
  source 1..20: mol_type = other DNA
acatacactggggaaaggac

SEQ ID NO: 102635 - DNA, 20 bp, synthetic construct
  source 1..20: mol_type = other DNA
aacatacactggggaaagga

SEQ ID NO: 102636 - DNA, 20 bp, synthetic construct
  source 1..20: mol_type = other DNA
gaacatacactggggaaagg

SEQ ID NO: 102637 - DNA, 20 bp, synthetic construct
  source 1..20: mol_type = other DNA
tgaacatacactggggaaag

SEQ ID NO: 102638 - DNA, 20 bp, synthetic construct
  source 1..20: mol_type = other DNA
atgaacatacactggggaaa

SEQ ID NO: 102639 - DNA, 20 bp, synthetic construct
  source 1..20: mol_type = other DNA
catgaacatacactggggaa

SEQ ID NO: 102640 - DNA, 20 bp, synthetic construct
  source 1..20: mol_type = other DNA
ccatgaacatacactgggga

SEQ ID NO: 102641 - DNA, 20 bp, synthetic construct
  source 1..20: mol_type = other DNA
gccatgaacatacactgggg

SEQ ID NO: 102642 - DNA, 20 bp, synthetic construct
  source 1..20: mol_type = other DNA
agccatgaacatacactggg

SEQ ID NO: 102643 - DNA, 20 bp, synthetic construct
  source 1..20: mol_type = other DNA
aagccatgaacatacactgg

SEQ ID NO: 102644 - DNA, 20 bp, synthetic construct
  source 1..20: mol_type = other DNA
gaagccatgaacatacactg

SEQ ID NO: 102645 - DNA, 20 bp, synthetic construct
  source 1..20: mol_type = other DNA
agaagccatgaacatacact

SEQ ID NO: 102646 - DNA, 20 bp, synthetic construct
  source 1..20: mol_type = other DNA
aagaagccatgaacatacac

SEQ ID NO: 102647 - DNA, 20 bp, synthetic construct
  source 1..20: mol_type = other DNA
aaagaagccatgaacataca

SEQ ID NO: 102648 - DNA, 20 bp, synthetic construct
  source 1..20: mol_type = other DNA
caaagaagccatgaacatac

SEQ ID NO: 102649 - DNA, 20 bp, synthetic construct
  source 1..20: mol_type = other DNA
acaaagaagccatgaacata

SEQ ID NO: 102650 - DNA, 20 bp, synthetic construct
  source 1..20: mol_type = other DNA
cacaaagaagccatgaacat

SEQ ID NO: 102651 - DNA, 20 bp, synthetic construct
  source 1..20: mol_type = other DNA
ccacaaagaagccatgaaca

SEQ ID NO: 102652 - DNA, 20 bp, synthetic construct
  source 1..20: mol_type = other DNA
tccacaaagaagccatgaac

SEQ ID NO: 102653 - DNA, 20 bp, synthetic construct
  source 1..20: mol_type = other DNA
ttccacaaagaagccatgaa

SEQ ID NO: 102654 - DNA, 20 bp, synthetic construct
  source 1..20: mol_type = other DNA
tttccacaaagaagccatga

SEQ ID NO: 102655 - DNA, 20 bp, synthetic construct
  source 1..20: mol_type = other DNA
ttttccacaaagaagccatg

SEQ ID NO: 102656 - DNA, 20 bp, synthetic construct
  source 1..20: mol_type = other DNA
attttccacaaagaagccat

SEQ ID NO: 102657 - DNA, 20 bp, synthetic construct
  source 1..20: mol_type = other DNA
cattttccacaaagaagcca

SEQ ID NO: 102658 - DNA, 20 bp, synthetic construct
  source 1..20: mol_type = other DNA
tcattttccacaaagaagcc

SEQ ID NO: 102659 - DNA, 20 bp, synthetic construct
  source 1..20: mol_type = other DNA
ctcattttccacaaagaagc

SEQ ID NO: 102660 - DNA, 20 bp, synthetic construct
  source 1..20: mol_type = other DNA
actcattttccacaaagaag

SEQ ID NO: 102661 - DNA, 20 bp, synthetic construct
  source 1..20: mol_type = other DNA
aactcattttccacaaagaa

SEQ ID NO: 102662 - DNA, 20 bp, synthetic construct
  source 1..20: mol_type = other DNA
gaactcattttccacaaaga

SEQ ID NO: 102663 - DNA, 20 bp, synthetic construct
  source 1..20: mol_type = other DNA
tgaactcattttccacaaag

SEQ ID NO: 102664 - DNA, 20 bp, synthetic construct
  source 1..20: mol_type = other DNA
gtgaactcattttccacaaa

SEQ ID NO: 102665 - DNA, 20 bp, synthetic construct
  source 1..20: mol_type = other DNA
agtgaactcattttccacaa

SEQ ID NO: 102666 - DNA, 20 bp, synthetic construct
  source 1..20: mol_type = other DNA
aagtgaactcattttccaca

SEQ ID NO: 102667 - DNA, 20 bp, synthetic construct
  source 1..20: mol_type = other DNA
taagtgaactcattttccac

SEQ ID NO: 102668 - DNA, 20 bp, synthetic construct
  source 1..20: mol_type = other DNA
ctaagtgaactcattttcca

SEQ ID NO: 102669 - DNA, 20 bp, synthetic construct
  source 1..20: mol_type = other DNA
tctaagtgaactcattttcc

SEQ ID NO: 102670 - DNA, 20 bp, synthetic construct
  source 1..20: mol_type = other DNA
gtctaagtgaactcattttc

SEQ ID NO: 102671 - DNA, 20 bp, synthetic construct
  source 1..20: mol_type = other DNA
cgtctaagtgaactcatttt

SEQ ID NO: 102672 - DNA, 20 bp, synthetic construct
  source 1..20: mol_type = other DNA
acgtctaagtgaactcattt

SEQ ID NO: 102673 - DNA, 20 bp, synthetic construct
  source 1..20: mol_type = other DNA
tacgtctaagtgaactcatt

SEQ ID NO: 102674 - DNA, 20 bp, synthetic construct
  source 1..20: mol_type = other DNA
atacgtctaagtgaactcat

SEQ ID NO: 102675 - DNA, 20 bp, synthetic construct
  source 1..20: mol_type = other DNA
catacgtctaagtgaactca

SEQ ID NO: 102676 - DNA, 20 bp, synthetic construct
  source 1..20: mol_type = other DNA
ccatacgtctaagtgaactc

SEQ ID NO: 102677 - DNA, 20 bp, synthetic construct
  source 1..20: mol_type = other DNA
tccatacgtctaagtgaact

SEQ ID NO: 102678 - DNA, 20 bp, synthetic construct
  source 1..20: mol_type = other DNA
atccatacgtctaagtgaac

SEQ ID NO: 102679 - DNA, 20 bp, synthetic construct
  source 1..20: mol_type = other DNA
aatccatacgtctaagtgaa

SEQ ID NO: 102680 - DNA, 20 bp, synthetic construct
  source 1..20: mol_type = other DNA
gaatccatacgtctaagtga

SEQ ID NO: 102681 - DNA, 20 bp, synthetic construct
  source 1..20: mol_type = other DNA
tgaatccatacgtctaagtg

SEQ ID NO: 102682 - DNA, 20 bp, synthetic construct
  source 1..20: mol_type = other DNA
atgaatccatacgtctaagt

SEQ ID NO: 102683 - DNA, 20 bp, synthetic construct
  source 1..20: mol_type = other DNA
aatgaatccatacgtctaag

SEQ ID NO: 102684 - DNA, 20 bp, synthetic construct
  source 1..20: mol_type = other DNA
aaatgaatccatacgtctaa

SEQ ID NO: 102685 - DNA, 20 bp, synthetic construct
  source 1..20: mol_type = other DNA
gaaatgaatccatacgtcta

SEQ ID NO: 102686 - DNA, 20 bp, synthetic construct
  source 1..20: mol_type = other DNA
agaaatgaatccatacgtct

SEQ ID NO: 102687 - DNA, 20 bp, synthetic construct
  source 1..20: mol_type = other DNA
cagaaatgaatccatacgtc

SEQ ID NO: 102688 - DNA, 20 bp, synthetic construct
  source 1..20: mol_type = other DNA
tcagaaatgaatccatacgt

SEQ ID NO: 102689 - DNA, 20 bp, synthetic construct
  source 1..20: mol_type = other DNA
ctcagaaatgaatccatacg

SEQ ID NO: 102690 - DNA, 20 bp, synthetic construct
  source 1..20: mol_type = other DNA
actcagaaatgaatccatac

SEQ ID NO: 102691 - DNA, 20 bp, synthetic construct
  source 1..20: mol_type = other DNA
aactcagaaatgaatccata

SEQ ID NO: 102692 - DNA, 20 bp, synthetic construct
  source 1..20: mol_type = other DNA
gaactcagaaatgaatccat

SEQ ID NO: 102693 - DNA, 20 bp, synthetic construct
  source 1..20: mol_type = other DNA
agaactcagaaatgaatcca

SEQ ID NO: 102694 - DNA, 20 bp, synthetic construct
  source 1..20: mol_type = other DNA
gagaactcagaaatgaatcc

SEQ ID NO: 102695 - DNA, 20 bp, synthetic construct
  source 1..20: mol_type = other DNA
agagaactcagaaatgaatc

SEQ ID NO: 102696 - DNA, 20 bp, synthetic construct
  source 1..20: mol_type = other DNA
cagagaactcagaaatgaat

SEQ ID NO: 102697 - DNA, 20 bp, synthetic construct
  source 1..20: mol_type = other DNA
acagagaactcagaaatgaa

SEQ ID NO: 102698 - DNA, 20 bp, synthetic construct
  source 1..20: mol_type = other DNA
aacagagaactcagaaatga

SEQ ID NO: 102699 - DNA, 20 bp, synthetic construct
  source 1..20: mol_type = other DNA
gaacagagaactcagaaatg

SEQ ID NO: 102700 - DNA, 20 bp, synthetic construct
  source 1..20: mol_type = other DNA
agaacagagaactcagaaat

SEQ ID NO: 102701 - DNA, 20 bp, synthetic construct
  source 1..20: mol_type = other DNA
cagaacagagaactcagaaa

SEQ ID NO: 102702 - DNA, 20 bp, synthetic construct
  source 1..20: mol_type = other DNA
acagaacagagaactcagaa

SEQ ID NO: 102703 - DNA, 20 bp, synthetic construct
  source 1..20: mol_type = other DNA
aacagaacagagaactcaga

SEQ ID NO: 102704 - DNA, 20 bp, synthetic construct
  source 1..20: mol_type = other DNA
aaacagaacagagaactcag

SEQ ID NO: 102705 - DNA, 20 bp, synthetic construct
  source 1..20: mol_type = other DNA
gaaacagaacagagaactca

SEQ ID NO: 102706 - DNA, 20 bp, synthetic construct
  source 1..20: mol_type = other DNA
tgaaacagaacagagaactc

SEQ ID NO: 102707 - DNA, 20 bp, synthetic construct
  source 1..20: mol_type = other DNA
atgaaacagaacagagaact

SEQ ID NO: 102708 - DNA, 20 bp, synthetic construct
  source 1..20: mol_type = other DNA
aatgaaacagaacagagaac

SEQ ID NO: 102709 - DNA, 20 bp, synthetic construct
  source 1..20: mol_type = other DNA
caatgaaacagaacagagaa

SEQ ID NO: 102710 - DNA, 20 bp, synthetic construct
  source 1..20: mol_type = other DNA
tcaatgaaacagaacagaga

SEQ ID NO: 102711 - DNA, 20 bp, synthetic construct
  source 1..20: mol_type = other DNA
atcaatgaaacagaacagag

SEQ ID NO: 102712 - DNA, 20 bp, synthetic construct
  source 1..20: mol_type = other DNA
gatcaatgaaacagaacaga

SEQ ID NO: 102713 - DNA, 20 bp, synthetic construct
  source 1..20: mol_type = other DNA
agatcaatgaaacagaacag

SEQ ID NO: 102714 - DNA, 20 bp, synthetic construct
  source 1..20: mol_type = other DNA
tagatcaatgaaacagaaca

SEQ ID NO: 102715 - DNA, 20 bp, synthetic construct
  source 1..20: mol_type = other DNA
atagatcaatgaaacagaac

SEQ ID NO: 102716 - DNA, 20 bp, synthetic construct
  source 1..20: mol_type = other DNA
tatagatcaatgaaacagaa

SEQ ID NO: 102717 - DNA, 20 bp, synthetic construct
  source 1..20: mol_type = other DNA
atatagatcaatgaaacaga

SEQ ID NO: 102718 - DNA, 20 bp, synthetic construct
  source 1..20: mol_type = other DNA
gatatagatcaatgaaacag

SEQ ID NO: 102719 - DNA, 20 bp, synthetic construct
  source 1..20: mol_type = other DNA
agatatagatcaatgaaaca

SEQ ID NO: 102720 - DNA, 20 bp, synthetic construct
  source 1..20: mol_type = other DNA
aagatatagatcaatgaaac

SEQ ID NO: 102721 - DNA, 20 bp, synthetic construct
  source 1..20: mol_type = other DNA
aaagatatagatcaatgaaa

SEQ ID NO: 102722 - DNA, 20 bp, synthetic construct
  source 1..20: mol_type = other DNA
aaaagatatagatcaatgaa

SEQ ID NO: 102723 - DNA, 20 bp, synthetic construct
  source 1..20: mol_type = other DNA
aaaaagatatagatcaatga

SEQ ID NO: 102724 - DNA, 20 bp, synthetic construct
  source 1..20: mol_type = other DNA
aaaaaagatatagatcaatg

SEQ ID NO: 102725 - DNA, 20 bp, synthetic construct
  source 1..20: mol_type = other DNA
aaaaaaagatatagatcaat

SEQ ID NO: 102726 - DNA, 20 bp, synthetic construct
  source 1..20: mol_type = other DNA
taaaaaaagatatagatcaa

SEQ ID NO: 102727 - DNA, 20 bp, synthetic construct
  source 1..20: mol_type = other DNA
ataaaaaaagatatagatca

SEQ ID NO: 102728 - DNA, 20 bp, synthetic construct
  source 1..20: mol_type = other DNA
cataaaaaaagatatagatc

SEQ ID NO: 102729 - DNA, 20 bp, synthetic construct
  source 1..20: mol_type = other DNA
gcataaaaaaagatatagat

SEQ ID NO: 102730 - DNA, 20 bp, synthetic construct
  source 1..20: mol_type = other DNA
ggcataaaaaaagatataga

SEQ ID NO: 102731 - DNA, 20 bp, synthetic construct
  source 1..20: mol_type = other DNA
tggcataaaaaaagatatag

SEQ ID NO: 102732 - DNA, 20 bp, synthetic construct
  source 1..20: mol_type = other DNA
ctggcataaaaaaagatata

SEQ ID NO: 102733 - DNA, 20 bp, synthetic construct
  source 1..20: mol_type = other DNA
actggcataaaaaaagatat

SEQ ID NO: 102734 - DNA, 20 bp, synthetic construct
  source 1..20: mol_type = other DNA
tactggcataaaaaaagata

SEQ ID NO: 102735 - DNA, 20 bp, synthetic construct
  source 1..20: mol_type = other DNA
gtactggcataaaaaaagat

SEQ ID NO: 102736 - DNA, 20 bp, synthetic construct
  source 1..20: mol_type = other DNA
ggtactggcataaaaaaaga

SEQ ID NO: 102737 - DNA, 20 bp, synthetic construct
  source 1..20: mol_type = other DNA
tggtactggcataaaaaaag

SEQ ID NO: 102738 - DNA, 20 bp, synthetic construct
  source 1..20: mol_type = other DNA
atggtactggcataaaaaaa

SEQ ID NO: 102739 - DNA, 20 bp, synthetic construct
  source 1..20: mol_type = other DNA
catggtactggcataaaaaa

SEQ ID NO: 102740 - DNA, 20 bp, synthetic construct
  source 1..20: mol_type = other DNA
gcatggtactggcataaaaa

SEQ ID NO: 102741 - DNA, 20 bp, synthetic construct
  source 1..20: mol_type = other DNA
ggcatggtactggcataaaa

SEQ ID NO: 102742 - DNA, 20 bp, synthetic construct
  source 1..20: mol_type = other DNA
tggcatggtactggcataaa

SEQ ID NO: 102743 - DNA, 20 bp, synthetic construct
  source 1..20: mol_type = other DNA
atggcatggtactggcataa

SEQ ID NO: 102744 - DNA, 20 bp, synthetic construct
  source 1..20: mol_type = other DNA
aatggcatggtactggcata

SEQ ID NO: 102745 - DNA, 20 bp, synthetic construct
  source 1..20: mol_type = other DNA
aaatggcatggtactggcat

SEQ ID NO: 102746 - DNA, 20 bp, synthetic construct
  source 1..20: mol_type = other DNA
aaaatggcatggtactggca

SEQ ID NO: 102747 - DNA, 20 bp, synthetic construct
  source 1..20: mol_type = other DNA
caaaatggcatggtactggc

SEQ ID NO: 102748 - DNA, 20 bp, synthetic construct
  source 1..20: mol_type = other DNA
ccaaaatggcatggtactgg

SEQ ID NO: 102749 - DNA, 20 bp, synthetic construct
  source 1..20: mol_type = other DNA
accaaaatggcatggtactg

SEQ ID NO: 102750 - DNA, 20 bp, synthetic construct
  source 1..20: mol_type = other DNA
aaccaaaatggcatggtact

SEQ ID NO: 102751 - DNA, 20 bp, synthetic construct
  source 1..20: mol_type = other DNA
taaccaaaatggcatggtac

SEQ ID NO: 102752 - DNA, 20 bp, synthetic construct
  source 1..20: mol_type = other DNA
gtaaccaaaatggcatggta

SEQ ID NO: 102753 - DNA, 20 bp, synthetic construct
  source 1..20: mol_type = other DNA
tgtaaccaaaatggcatggt

SEQ ID NO: 102754 - DNA, 20 bp, synthetic construct
  source 1..20: mol_type = other DNA
ttgtaaccaaaatggcatgg

SEQ ID NO: 102755 - DNA, 20 bp, synthetic construct
  source 1..20: mol_type = other DNA
attgtaaccaaaatggcatg

SEQ ID NO: 102756 - DNA, 20 bp, synthetic construct
  source 1..20: mol_type = other DNA
tattgtaaccaaaatggcat

SEQ ID NO: 102757 - DNA, 20 bp, synthetic construct
  source 1..20: mol_type = other DNA
ttattgtaaccaaaatggca

SEQ ID NO: 102758 - DNA, 20 bp, synthetic construct
  source 1..20: mol_type = other DNA
attattgtaaccaaaatggc

SEQ ID NO: 102759 - DNA, 20 bp, synthetic construct
  source 1..20: mol_type = other DNA
aattattgtaaccaaaatgg

SEQ ID NO: 102760 - DNA, 20 bp, synthetic construct
  source 1..20: mol_type = other DNA
aaattattgtaaccaaaatg

SEQ ID NO: 102761 - DNA, 20 bp, synthetic construct
  source 1..20: mol_type = other DNA
caaattattgtaaccaaaat

SEQ ID NO: 102762 - DNA, 20 bp, synthetic construct
  source 1..20: mol_type = other DNA
tcaaattattgtaaccaaaa

SEQ ID NO: 102763 - DNA, 20 bp, synthetic construct
  source 1..20: mol_type = other DNA
ttcaaattattgtaaccaaa

SEQ ID NO: 102764 - DNA, 20 bp, synthetic construct
  source 1..20: mol_type = other DNA
cttcaaattattgtaaccaa

SEQ ID NO: 102765 - DNA, 20 bp, synthetic construct
  source 1..20: mol_type = other DNA
acttcaaattattgtaacca

SEQ ID NO: 102766 - DNA, 20 bp, synthetic construct
  source 1..20: mol_type = other DNA
gacttcaaattattgtaacc

SEQ ID NO: 102767 - DNA, 20 bp, synthetic construct
  source 1..20: mol_type = other DNA
tgacttcaaattattgtaac

SEQ ID NO: 102768 - DNA, 20 bp, synthetic construct
  source 1..20: mol_type = other DNA
ctgacttcaaattattgtaa

SEQ ID NO: 102769 - DNA, 20 bp, synthetic construct
  source 1..20: mol_type = other DNA
tctgacttcaaattattgta

SEQ ID NO: 102770 - DNA, 20 bp, synthetic construct
  source 1..20: mol_type = other DNA
atctgacttcaaattattgt

SEQ ID NO: 102771 - DNA, 20 bp, synthetic construct
  source 1..20: mol_type = other DNA
tatctgacttcaaattattg

SEQ ID NO: 102772 - DNA, 20 bp, synthetic construct
  source 1..20: mol_type = other DNA
ttatctgacttcaaattatt

SEQ ID NO: 102773 - DNA, 20 bp, synthetic construct
  source 1..20: mol_type = other DNA
attatctgacttcaaattat

SEQ ID NO: 102774 - DNA, 20 bp, synthetic construct
  source 1..20: mol_type = other DNA
cattatctgacttcaaatta

SEQ ID NO: 102775 - DNA, 20 bp, synthetic construct
  source 1..20: mol_type = other DNA
tcattatctgacttcaaatt

SEQ ID NO: 102776 - DNA, 20 bp, synthetic construct
  source 1..20: mol_type = other DNA
atcattatctgacttcaaat

SEQ ID NO: 102777 - DNA, 20 bp, synthetic construct
  source 1..20: mol_type = other DNA
aatcattatctgacttcaaa

SEQ ID NO: 102778 - DNA, 20 bp, synthetic construct
  source 1..20: mol_type = other DNA
gaatcattatctgacttcaa

SEQ ID NO: 102779 - DNA, 20 bp, synthetic construct
  source 1..20: mol_type = other DNA
ggaatcattatctgacttca

SEQ ID NO: 102780 - DNA, 20 bp, synthetic construct
  source 1..20: mol_type = other DNA
aggaatcattatctgacttc

SEQ ID NO: 102781 - DNA, 20 bp, synthetic construct
  source 1..20: mol_type = other DNA
gaggaatcattatctgactt

SEQ ID NO: 102782 - DNA, 20 bp, synthetic construct
  source 1..20: mol_type = other DNA
ggaggaatcattatctgact

SEQ ID NO: 102783 - DNA, 20 bp, synthetic construct
  source 1..20: mol_type = other DNA
gggaggaatcattatctgac

SEQ ID NO: 102784 - DNA, 20 bp, synthetic construct
  source 1..20: mol_type = other DNA
cgggaggaatcattatctga

SEQ ID NO: 102785 - DNA, 20 bp, synthetic construct
  source 1..20: mol_type = other DNA
acgggaggaatcattatctg

SEQ ID NO: 102786 - DNA, 20 bp, synthetic construct
  source 1..20: mol_type = other DNA
aacgggaggaatcattatct

SEQ ID NO: 102787 - DNA, 20 bp, synthetic construct
  source 1..20: mol_type = other DNA
aaacgggaggaatcattatc

SEQ ID NO: 102788 - DNA, 20 bp, synthetic construct
  source 1..20: mol_type = other DNA
aaaacgggaggaatcattat

SEQ ID NO: 102789 - DNA, 20 bp, synthetic construct
  source 1..20: mol_type = other DNA
caaaacgggaggaatcatta

SEQ ID NO: 102790 - DNA, 20 bp, synthetic construct
  source 1..20: mol_type = other DNA
acaaaacgggaggaatcatt

SEQ ID NO: 102791 - DNA, 20 bp, synthetic construct
  source 1..20: mol_type = other DNA
aacaaaacgggaggaatcat

SEQ ID NO: 102792 - DNA, 20 bp, synthetic construct
  source 1..20: mol_type = other DNA
gaacaaaacgggaggaatca

SEQ ID NO: 102793 - DNA, 20 bp, synthetic construct
  source 1..20: mol_type = other DNA
tgaacaaaacgggaggaatc

SEQ ID NO: 102794 - DNA, 20 bp, synthetic construct
  source 1..20: mol_type = other DNA
atgaacaaaacgggaggaat

SEQ ID NO: 102795 - DNA, 20 bp, synthetic construct
  source 1..20: mol_type = other DNA
aatgaacaaaacgggaggaa

SEQ ID NO: 102796 - DNA, 20 bp, synthetic construct
  source 1..20: mol_type = other DNA
aaatgaacaaaacgggagga

SEQ ID NO: 102797 - DNA, 20 bp, synthetic construct
  source 1..20: mol_type = other DNA
aaaatgaacaaaacgggagg

SEQ ID NO: 102798 - DNA, 20 bp, synthetic construct
  source 1..20: mol_type = other DNA
caaaatgaacaaaacgggag

SEQ ID NO: 102799 - DNA, 20 bp, synthetic construct
  source 1..20: mol_type = other DNA
gcaaaatgaacaaaacggga

SEQ ID NO: 102800 - DNA, 20 bp, synthetic construct
  source 1..20: mol_type = other DNA
agcaaaatgaacaaaacggg

SEQ ID NO: 102801 - DNA, 20 bp, synthetic construct
  source 1..20: mol_type = other DNA
gagcaaaatgaacaaaacgg

SEQ ID NO: 102802 - DNA, 20 bp, synthetic construct
  source 1..20: mol_type = other DNA
tgagcaaaatgaacaaaacg

SEQ ID NO: 102803 - DNA, 20 bp, synthetic construct
  source 1..20: mol_type = other DNA
ctgagcaaaatgaacaaaac

SEQ ID NO: 102804 - DNA, 20 bp, synthetic construct
  source 1..20: mol_type = other DNA
actgagcaaaatgaacaaaa

SEQ ID NO: 102805 - DNA, 20 bp, synthetic construct
  source 1..20: mol_type = other DNA
tactgagcaaaatgaacaaa

SEQ ID NO: 102806 - DNA, 20 bp, synthetic construct
  source 1..20: mol_type = other DNA
atactgagcaaaatgaacaa

SEQ ID NO: 102807 - DNA, 20 bp, synthetic construct
  source 1..20: mol_type = other DNA
catactgagcaaaatgaaca

SEQ ID NO: 102808 - DNA, 20 bp, synthetic construct
  source 1..20: mol_type = other DNA
ccatactgagcaaaatgaac

SEQ ID NO: 102809 - DNA, 20 bp, synthetic construct
  source 1..20: mol_type = other DNA
gccatactgagcaaaatgaa

SEQ ID NO: 102810 - DNA, 20 bp, synthetic construct
  source 1..20: mol_type = other DNA
agccatactgagcaaaatga

SEQ ID NO: 102811 - DNA, 20 bp, synthetic construct
  source 1..20: mol_type = other DNA
aagccatactgagcaaaatg

SEQ ID NO: 102812 - DNA, 20 bp, synthetic construct
  source 1..20: mol_type = other DNA
aaagccatactgagcaaaat

SEQ ID NO: 102813 - DNA, 20 bp, synthetic construct
  source 1..20: mol_type = other DNA
aaaagccatactgagcaaaa

SEQ ID NO: 102814 - DNA, 20 bp, synthetic construct
  source 1..20: mol_type = other DNA
caaaagccatactgagcaaa

SEQ ID NO: 102815 - DNA, 20 bp, synthetic construct
  source 1..20: mol_type = other DNA
gcaaaagccatactgagcaa

SEQ ID NO: 102816 - DNA, 20 bp, synthetic construct
  source 1..20: mol_type = other DNA
agcaaaagccatactgagca

SEQ ID NO: 102817 - DNA, 20 bp, synthetic construct
  source 1..20: mol_type = other DNA
gagcaaaagccatactgagc

SEQ ID NO: 102818 - DNA, 20 bp, synthetic construct
  source 1..20: mol_type = other DNA
agagcaaaagccatactgag

SEQ ID NO: 102819 - DNA, 20 bp, synthetic construct
  source 1..20: mol_type = other DNA
aagagcaaaagccatactga

SEQ ID NO: 102820 - DNA, 20 bp, synthetic construct
  source 1..20: mol_type = other DNA
aaagagcaaaagccatactg

SEQ ID NO: 102821 - DNA, 20 bp, synthetic construct
  source 1..20: mol_type = other DNA
aaaagagcaaaagccatact

SEQ ID NO: 102822 - DNA, 20 bp, synthetic construct
  source 1..20: mol_type = other DNA
caaaagagcaaaagccatac

SEQ ID NO: 102823 - DNA, 20 bp, synthetic construct
  source 1..20: mol_type = other DNA
ccaaaagagcaaaagccata

SEQ ID NO: 102824 - DNA, 20 bp, synthetic construct
  source 1..20: mol_type = other DNA
cccaaaagagcaaaagccat

SEQ ID NO: 102825 - DNA, 20 bp, synthetic construct
  source 1..20: mol_type = other DNA
gcccaaaagagcaaaagcca

SEQ ID NO: 102826 - DNA, 20 bp, synthetic construct
  source 1..20: mol_type = other DNA
ggcccaaaagagcaaaagcc

SEQ ID NO: 102827 - DNA, 20 bp, synthetic construct
  source 1..20: mol_type = other DNA
aggcccaaaagagcaaaagc

SEQ ID NO: 102828 - DNA, 20 bp, synthetic construct
  source 1..20: mol_type = other DNA
aaggcccaaaagagcaaaag

SEQ ID NO: 102829 - DNA, 20 bp, synthetic construct
  source 1..20: mol_type = other DNA
aaaggcccaaaagagcaaaa

SEQ ID NO: 102830 - DNA, 20 bp, synthetic construct
  source 1..20: mol_type = other DNA
aaaaggcccaaaagagcaaa

SEQ ID NO: 102831 - DNA, 20 bp, synthetic construct
  source 1..20: mol_type = other DNA
caaaaggcccaaaagagcaa

SEQ ID NO: 102832 - DNA, 20 bp, synthetic construct
  source 1..20: mol_type = other DNA
acaaaaggcccaaaagagca

SEQ ID NO: 102833 - DNA, 20 bp, synthetic construct
  source 1..20: mol_type = other DNA
cacaaaaggcccaaaagagc

SEQ ID NO: 102834 - DNA, 20 bp, synthetic construct
  source 1..20: mol_type = other DNA
ccacaaaaggcccaaaagag

SEQ ID NO: 102835 - DNA, 20 bp, synthetic construct
  source 1..20: mol_type = other DNA
accacaaaaggcccaaaaga

SEQ ID NO: 102836 - DNA, 20 bp, synthetic construct
  source 1..20: mol_type = other DNA
aaccacaaaaggcccaaaag

SEQ ID NO: 102837 - DNA, 20 bp, synthetic construct
  source 1..20: mol_type = other DNA
gaaccacaaaaggcccaaaa

SEQ ID NO: 102838 - DNA, 20 bp, synthetic construct
  source 1..20: mol_type = other DNA
ggaaccacaaaaggcccaaa

SEQ ID NO: 102839 - DNA, 20 bp, synthetic construct
  source 1..20: mol_type = other DNA
gggaaccacaaaaggcccaa

SEQ ID NO: 102840 - DNA, 20 bp, synthetic construct
  source 1..20: mol_type = other DNA
agggaaccacaaaaggccca

SEQ ID NO: 102841 - DNA, 20 bp, synthetic construct
  source 1..20: mol_type = other DNA
tagggaaccacaaaaggccc

SEQ ID NO: 102842 - DNA, 20 bp, synthetic construct
  source 1..20: mol_type = other DNA
gtagggaaccacaaaaggcc

SEQ ID NO: 102843 - DNA, 20 bp, synthetic construct
  source 1..20: mol_type = other DNA
tgtagggaaccacaaaaggc

SEQ ID NO: 102844 - DNA, 20 bp, synthetic construct
  source 1..20: mol_type = other DNA
ttgtagggaaccacaaaagg

SEQ ID NO: 102845 - DNA, 20 bp, synthetic construct
  source 1..20: mol_type = other DNA
tttgtagggaaccacaaaag

SEQ ID NO: 102846 - DNA, 20 bp, synthetic construct
  source 1..20: mol_type = other DNA
atttgtagggaaccacaaaa

SEQ ID NO: 102847 - DNA, 20 bp, synthetic construct
  source 1..20: mol_type = other DNA
aatttgtagggaaccacaaa

SEQ ID NO: 102848 - DNA, 20 bp, synthetic construct
  source 1..20: mol_type = other DNA
aaatttgtagggaaccacaa

SEQ ID NO: 102849 - DNA, 20 bp, synthetic construct
  source 1..20: mol_type = other DNA
aaaatttgtagggaaccaca

SEQ ID NO: 102850 - DNA, 20 bp, synthetic construct
  source 1..20: mol_type = other DNA
taaaatttgtagggaaccac

SEQ ID NO: 102851 - DNA, 20 bp, synthetic construct
  source 1..20: mol_type = other DNA
ctaaaatttgtagggaacca

SEQ ID NO: 102852 - DNA, 20 bp, synthetic construct
  source 1..20: mol_type = other DNA
tctaaaatttgtagggaacc

SEQ ID NO: 102853 - DNA, 20 bp, synthetic construct
  source 1..20: mol_type = other DNA
ttctaaaatttgtagggaac

SEQ ID NO: 102854 - DNA, 20 bp, synthetic construct
  source 1..20: mol_type = other DNA
attctaaaatttgtagggaa

SEQ ID NO: 102855 - DNA, 20 bp, synthetic construct
  source 1..20: mol_type = other DNA
aattctaaaatttgtaggga

SEQ ID NO: 102856 - DNA, 20 bp, synthetic construct
  source 1..20: mol_type = other DNA
taattctaaaatttgtaggg

SEQ ID NO: 102857 - DNA, 20 bp, synthetic construct
  source 1..20: mol_type = other DNA
ataattctaaaatttgtagg

SEQ ID NO: 102858 - DNA, 20 bp, synthetic construct
  source 1..20: mol_type = other DNA
aataattctaaaatttgtag

SEQ ID NO: 102859 - DNA, 20 bp, synthetic construct
  source 1..20: mol_type = other DNA
aaataattctaaaatttgta

SEQ ID NO: 102860 - DNA, 20 bp, synthetic construct
  source 1..20: mol_type = other DNA
aaaataattctaaaatttgt

SEQ ID NO: 102861 - DNA, 20 bp, synthetic construct
  source 1..20: mol_type = other DNA
aaaaataattctaaaatttg

SEQ ID NO: 102862 - DNA, 20 bp, synthetic construct
  source 1..20: mol_type = other DNA
caaaaataattctaaaattt

SEQ ID NO: 102863 - DNA, 20 bp, synthetic construct
  source 1..20: mol_type = other DNA
acaaaaataattctaaaatt

SEQ ID NO: 102864 - DNA, 20 bp, synthetic construct
  source 1..20: mol_type = other DNA
gacaaaaataattctaaaat

SEQ ID NO: 102865 - DNA, 20 bp, synthetic construct
  source 1..20: mol_type = other DNA
agacaaaaataattctaaaa

SEQ ID NO: 102866 - DNA, 20 bp, synthetic construct
  source 1..20: mol_type = other DNA
tagacaaaaataattctaaa

SEQ ID NO: 102867 - DNA, 20 bp, synthetic construct
  source 1..20: mol_type = other DNA
gtagacaaaaataattctaa

SEQ ID NO: 102868 - DNA, 20 bp, synthetic construct
  source 1..20: mol_type = other DNA
agtagacaaaaataattcta

SEQ ID NO: 102869 - DNA, 20 bp, synthetic construct
  source 1..20: mol_type = other DNA
aagtagacaaaaataattct

SEQ ID NO: 102870 - DNA, 20 bp, synthetic construct
  source 1..20: mol_type = other DNA
gaagtagacaaaaataattc

SEQ ID NO: 102871 - DNA, 20 bp, synthetic construct
  source 1..20: mol_type = other DNA
agaagtagacaaaaataatt

SEQ ID NO: 102872 - DNA, 20 bp, synthetic construct
  source 1..20: mol_type = other DNA
cagaagtagacaaaaataat

SEQ ID NO: 102873 - DNA, 20 bp, synthetic construct
  source 1..20: mol_type = other DNA
acagaagtagacaaaaataa

SEQ ID NO: 102874 - DNA, 20 bp, synthetic construct
  source 1..20: mol_type = other DNA
cacagaagtagacaaaaata

SEQ ID NO: 102875 - DNA, 20 bp, synthetic construct
  source 1..20: mol_type = other DNA
tcacagaagtagacaaaaat

SEQ ID NO: 102876 - DNA, 20 bp, synthetic construct
  source 1..20: mol_type = other DNA
ctcacagaagtagacaaaaa

SEQ ID NO: 102877 - DNA, 20 bp, synthetic construct
  source 1..20: mol_type = other DNA
cctcacagaagtagacaaaa

SEQ ID NO: 102878 - DNA, 20 bp, synthetic construct
  source 1..20: mol_type = other DNA
tcctcacagaagtagacaaa

SEQ ID NO: 102879 - DNA, 20 bp, synthetic construct
  source 1..20: mol_type = other DNA
ttcctcacagaagtagacaa

SEQ ID NO: 102880 - DNA, 20 bp, synthetic construct
  source 1..20: mol_type = other DNA
attcctcacagaagtagaca

SEQ ID NO: 102881 - DNA, 20 bp, synthetic construct
  source 1..20: mol_type = other DNA
cattcctcacagaagtagac

SEQ ID NO: 102882 - DNA, 20 bp, synthetic construct
  source 1..20: mol_type = other DNA
acattcctcacagaagtaga

SEQ ID NO: 102883 - DNA, 20 bp, synthetic construct
  source 1..20: mol_type = other DNA
gacattcctcacagaagtag

SEQ ID NO: 102884 - DNA, 20 bp, synthetic construct
  source 1..20: mol_type = other DNA
tgacattcctcacagaagta

SEQ ID NO: 102885 - DNA, 20 bp, synthetic construct
  source 1..20: mol_type = other DNA
atgacattcctcacagaagt

SEQ ID NO: 102886 - DNA, 20 bp, synthetic construct
  source 1..20: mol_type = other DNA
aatgacattcctcacagaag

SEQ ID NO: 102887 - DNA, 20 bp, synthetic construct
  source 1..20: mol_type = other DNA
caatgacattcctcacagaa

SEQ ID NO: 102888 - DNA, 20 bp, synthetic construct
  source 1..20: mol_type = other DNA
ccaatgacattcctcacaga

SEQ ID NO: 102889 - DNA, 20 bp, synthetic construct
  source 1..20: mol_type = other DNA
accaatgacattcctcacag

SEQ ID NO: 102890 - DNA, 20 bp, synthetic construct
  source 1..20: mol_type = other DNA
taccaatgacattcctcaca

SEQ ID NO: 102891 - DNA, 20 bp, synthetic construct
  source 1..20: mol_type = other DNA
ataccaatgacattcctcac

SEQ ID NO: 102892 - DNA, 20 bp, synthetic construct
  source 1..20: mol_type = other DNA
aataccaatgacattcctca

SEQ ID NO: 102893 - DNA, 20 bp, synthetic construct
  source 1..20: mol_type = other DNA
aaataccaatgacattcctc

SEQ ID NO: 102894 - DNA, 20 bp, synthetic construct
  source 1..20: mol_type = other DNA
aaaataccaatgacattcct

SEQ ID NO: 102895 - DNA, 20 bp, synthetic construct
  source 1..20: mol_type = other DNA
caaaataccaatgacattcc

SEQ ID NO: 102896 - DNA, 20 bp, synthetic construct
  source 1..20: mol_type = other DNA
tcaaaataccaatgacattc

SEQ ID NO: 102897 - DNA, 20 bp, synthetic construct
  source 1..20: mol_type = other DNA
atcaaaataccaatgacatt

SEQ ID NO: 102898 - DNA, 20 bp, synthetic construct
  source 1..20: mol_type = other DNA
tatcaaaataccaatgacat

SEQ ID NO: 102899 - DNA, 20 bp, synthetic construct
  source 1..20: mol_type = other DNA
ctatcaaaataccaatgaca

SEQ ID NO: 102900 - DNA, 20 bp, synthetic construct
  source 1..20: mol_type = other DNA
cctatcaaaataccaatgac

SEQ ID NO: 102901 - DNA, 20 bp, synthetic construct
  source 1..20: mol_type = other DNA
ccctatcaaaataccaatga

SEQ ID NO: 102902 - DNA, 20 bp, synthetic construct
  source 1..20: mol_type = other DNA
tccctatcaaaataccaatg

SEQ ID NO: 102903 - DNA, 20 bp, synthetic construct
  source 1..20: mol_type = other DNA
atccctatcaaaataccaat

SEQ ID NO: 102904 - DNA, 20 bp, synthetic construct
  source 1..20: mol_type = other DNA
aatccctatcaaaataccaa

SEQ ID NO: 102905 - DNA, 20 bp, synthetic construct
  source 1..20: mol_type = other DNA
caatccctatcaaaatacca

SEQ ID NO: 102906 - DNA, 20 bp, synthetic construct
  source 1..20: mol_type = other DNA
gcaatccctatcaaaatacc

SEQ ID NO: 102907 - DNA, 20 bp, synthetic construct
  source 1..20: mol_type = other DNA
tgcaatccctatcaaaatac

SEQ ID NO: 102908 - DNA, 20 bp, synthetic construct
  source 1..20: mol_type = other DNA
gtgcaatccctatcaaaata

SEQ ID NO: 102909 - DNA, 20 bp, synthetic construct
  source 1..20: mol_type = other DNA
agtgcaatccctatcaaaat

SEQ ID NO: 102910 - DNA, 20 bp, synthetic construct
  source 1..20: mol_type = other DNA
cagtgcaatccctatcaaaa

SEQ ID NO: 102911 - DNA, 20 bp, synthetic construct
  source 1..20: mol_type = other DNA
tcagtgcaatccctatcaaa

SEQ ID NO: 102912 - DNA, 20 bp, synthetic construct
  source 1..20: mol_type = other DNA
ttcagtgcaatccctatcaa

SEQ ID NO: 102913 - DNA, 20 bp, synthetic construct
  source 1..20: mol_type = other DNA
attcagtgcaatccctatca

SEQ ID NO: 102914 - DNA, 20 bp, synthetic construct
  source 1..20: mol_type = other DNA
gattcagtgcaatccctatc

SEQ ID NO: 102915 - DNA, 20 bp, synthetic construct
  source 1..20: mol_type = other DNA
agattcagtgcaatccctat

SEQ ID NO: 102916 - DNA, 20 bp, synthetic construct
  source 1..20: mol_type = other DNA
cagattcagtgcaatcccta

SEQ ID NO: 102917 - DNA, 20 bp, synthetic construct
  source 1..20: mol_type = other DNA
acagattcagtgcaatccct

SEQ ID NO: 102918 - DNA, 20 bp, synthetic construct
  source 1..20: mol_type = other DNA
tacagattcagtgcaatccc

SEQ ID NO: 102919 - DNA, 20 bp, synthetic construct
  source 1..20: mol_type = other DNA
ctacagattcagtgcaatcc

SEQ ID NO: 102920 - DNA, 20 bp, synthetic construct
  source 1..20: mol_type = other DNA
tctacagattcagtgcaatc

SEQ ID NO: 102921 - DNA, 20 bp, synthetic construct
  source 1..20: mol_type = other DNA
atctacagattcagtgcaat

SEQ ID NO: 102922 - DNA, 20 bp, synthetic construct
  source 1..20: mol_type = other DNA
aatctacagattcagtgcaa

SEQ ID NO: 102923 - DNA, 20 bp, synthetic construct
  source 1..20: mol_type = other DNA
caatctacagattcagtgca

SEQ ID NO: 102924 - DNA, 20 bp, synthetic construct
  source 1..20: mol_type = other DNA
gcaatctacagattcagtgc

SEQ ID NO: 102925 - DNA, 20 bp, synthetic construct
  source 1..20: mol_type = other DNA
agcaatctacagattcagtg

SEQ ID NO: 102926 - DNA, 20 bp, synthetic construct
  source 1..20: mol_type = other DNA
aagcaatctacagattcagt

SEQ ID NO: 102927 - DNA, 20 bp, synthetic construct
  source 1..20: mol_type = other DNA
aaagcaatctacagattcag

SEQ ID NO: 102928 - DNA, 20 bp, synthetic construct
  source 1..20: mol_type = other DNA
caaagcaatctacagattca

SEQ ID NO: 102929 - DNA, 20 bp, synthetic construct
  source 1..20: mol_type = other DNA
tcaaagcaatctacagattc

SEQ ID NO: 102930 - DNA, 20 bp, synthetic construct
  source 1..20: mol_type = other DNA
ctcaaagcaatctacagatt

SEQ ID NO: 102931 - DNA, 20 bp, synthetic construct
  source 1..20: mol_type = other DNA
actcaaagcaatctacagat

SEQ ID NO: 102932 - DNA, 20 bp, synthetic construct
  source 1..20: mol_type = other DNA
tactcaaagcaatctacaga

SEQ ID NO: 102933 - DNA, 20 bp, synthetic construct
  source 1..20: mol_type = other DNA
atactcaaagcaatctacag

SEQ ID NO: 102934 - DNA, 20 bp, synthetic construct
  source 1..20: mol_type = other DNA
aatactcaaagcaatctaca

SEQ ID NO: 102935 - DNA, 20 bp, synthetic construct
  source 1..20: mol_type = other DNA
taatactcaaagcaatctac

SEQ ID NO: 102936 - DNA, 20 bp, synthetic construct
  source 1..20: mol_type = other DNA
ataatactcaaagcaatcta

SEQ ID NO: 102937 - DNA, 20 bp, synthetic construct
  source 1..20: mol_type = other DNA
gataatactcaaagcaatct

SEQ ID NO: 102938 - DNA, 20 bp, synthetic construct
  source 1..20: mol_type = other DNA
tgataatactcaaagcaatc

SEQ ID NO: 102939 - DNA, 20 bp, synthetic construct
  source 1..20: mol_type = other DNA
ttgataatactcaaagcaat

SEQ ID NO: 102940 - DNA, 20 bp, synthetic construct
  source 1..20: mol_type = other DNA
gttgataatactcaaagcaa

SEQ ID NO: 102941 - DNA, 20 bp, synthetic construct
  source 1..20: mol_type = other DNA
tgttgataatactcaaagca

SEQ ID NO: 102942 - DNA, 20 bp, synthetic construct
  source 1..20: mol_type = other DNA
atgttgataatactcaaagc

SEQ ID NO: 102943 - DNA, 20 bp, synthetic construct
  source 1..20: mol_type = other DNA
aatgttgataatactcaaag

SEQ ID NO: 102944 - DNA, 20 bp, synthetic construct
  source 1..20: mol_type = other DNA
aaatgttgataatactcaaa

SEQ ID NO: 102945 - DNA, 20 bp, synthetic construct
  source 1..20: mol_type = other DNA
aaaatgttgataatactcaa

SEQ ID NO: 102946 - DNA, 20 bp, synthetic construct
  source 1..20: mol_type = other DNA
taaaatgttgataatactca

SEQ ID NO: 102947 - DNA, 20 bp, synthetic construct
  source 1..20: mol_type = other DNA
ctaaaatgttgataatactc

SEQ ID NO: 102948 - DNA, 20 bp, synthetic construct
  source 1..20: mol_type = other DNA
gctaaaatgttgataatact

SEQ ID NO: 102949 - DNA, 20 bp, synthetic construct
  source 1..20: mol_type = other DNA
tgctaaaatgttgataatac

SEQ ID NO: 102950 - DNA, 20 bp, synthetic construct
  source 1..20: mol_type = other DNA
ttgctaaaatgttgataata

SEQ ID NO: 102951 - DNA, 20 bp, synthetic construct
  source 1..20: mol_type = other DNA
attgctaaaatgttgataat

SEQ ID NO: 102952 - DNA, 20 bp, synthetic construct
  source 1..20: mol_type = other DNA
tattgctaaaatgttgataa

SEQ ID NO: 102953 - DNA, 20 bp, synthetic construct
  source 1..20: mol_type = other DNA
atattgctaaaatgttgata

SEQ ID NO: 102954 - DNA, 20 bp, synthetic construct
  source 1..20: mol_type = other DNA
aatattgctaaaatgttgat

SEQ ID NO: 102955 - DNA, 20 bp, synthetic construct
  source 1..20: mol_type = other DNA
taatattgctaaaatgttga

SEQ ID NO: 102956 - DNA, 20 bp, synthetic construct
  source 1..20: mol_type = other DNA
ttaatattgctaaaatgttg

SEQ ID NO: 102957 - DNA, 20 bp, synthetic construct
  source 1..20: mol_type = other DNA
attaatattgctaaaatgtt

SEQ ID NO: 102958 - DNA, 20 bp, synthetic construct
  source 1..20: mol_type = other DNA
aattaatattgctaaaatgt

SEQ ID NO: 102959 - DNA, 20 bp, synthetic construct
  source 1..20: mol_type = other DNA
gaattaatattgctaaaatg

SEQ ID NO: 102960 - DNA, 20 bp, synthetic construct
  source 1..20: mol_type = other DNA
agaattaatattgctaaaat

SEQ ID NO: 102961 - DNA, 20 bp, synthetic construct
  source 1..20: mol_type = other DNA
aagaattaatattgctaaaa

SEQ ID NO: 102962 - DNA, 20 bp, synthetic construct
  source 1..20: mol_type = other DNA
gaagaattaatattgctaaa

SEQ ID NO: 102963 - DNA, 20 bp, synthetic construct
  source 1..20: mol_type = other DNA
agaagaattaatattgctaa

SEQ ID NO: 102964 - DNA, 20 bp, synthetic construct
  source 1..20: mol_type = other DNA
tagaagaattaatattgcta

SEQ ID NO: 102965 - DNA, 20 bp, synthetic construct
  source 1..20: mol_type = other DNA
ttagaagaattaatattgct

SEQ ID NO: 102966 - DNA, 20 bp, synthetic construct
  source 1..20: mol_type = other DNA
attagaagaattaatattgc

SEQ ID NO: 102967 - DNA, 20 bp, synthetic construct
  source 1..20: mol_type = other DNA
gattagaagaattaatattg

SEQ ID NO: 102968 - DNA, 20 bp, synthetic construct
  source 1..20: mol_type = other DNA
ggattagaagaattaatatt

SEQ ID NO: 102969 - DNA, 20 bp, synthetic construct
  source 1..20: mol_type = other DNA
tggattagaagaattaatat

SEQ ID NO: 102970 - DNA, 20 bp, synthetic construct
  source 1..20: mol_type = other DNA
atggattagaagaattaata

SEQ ID NO: 102971 - DNA, 20 bp, synthetic construct
  source 1..20: mol_type = other DNA
tatggattagaagaattaat

SEQ ID NO: 102972 - DNA, 20 bp, synthetic construct
  source 1..20: mol_type = other DNA
ttatggattagaagaattaa

SEQ ID NO: 102973 - DNA, 20 bp, synthetic construct
  source 1..20: mol_type = other DNA
tttatggattagaagaatta

SEQ ID NO: 102974 - DNA, 20 bp, synthetic construct
  source 1..20: mol_type = other DNA
gtttatggattagaagaatt

SEQ ID NO: 102975 - DNA, 20 bp, synthetic construct
  source 1..20: mol_type = other DNA
tgtttatggattagaagaat

SEQ ID NO: 102976 - DNA, 20 bp, synthetic construct
  source 1..20: mol_type = other DNA
atgtttatggattagaagaa

SEQ ID NO: 102977 - DNA, 20 bp, synthetic construct
  source 1..20: mol_type = other DNA
catgtttatggattagaaga

SEQ ID NO: 102978 - DNA, 20 bp, synthetic construct
  source 1..20: mol_type = other DNA
ccatgtttatggattagaag

SEQ ID NO: 102979 - DNA, 20 bp, synthetic construct
  source 1..20: mol_type = other DNA
tccatgtttatggattagaa

SEQ ID NO: 102980 - DNA, 20 bp, synthetic construct
  source 1..20: mol_type = other DNA
ttccatgtttatggattaga

SEQ ID NO: 102981 - DNA, 20 bp, synthetic construct
  source 1..20: mol_type = other DNA
attccatgtttatggattag

SEQ ID NO: 102982 - DNA, 20 bp, synthetic construct
  source 1..20: mol_type = other DNA
gattccatgtttatggatta

SEQ ID NO: 102983 - DNA, 20 bp, synthetic construct
  source 1..20: mol_type = other DNA
agattccatgtttatggatt

SEQ ID NO: 102984 - DNA, 20 bp, synthetic construct
  source 1..20: mol_type = other DNA
gagattccatgtttatggat

SEQ ID NO: 102985 - DNA, 20 bp, synthetic construct
  source 1..20: mol_type = other DNA
agagattccatgtttatgga

SEQ ID NO: 102986 - DNA, 20 bp, synthetic construct
  source 1..20: mol_type = other DNA
aagagattccatgtttatgg

SEQ ID NO: 102987 - DNA, 20 bp, synthetic construct
  source 1..20: mol_type = other DNA
aaagagattccatgtttatg

SEQ ID NO: 102988 - DNA, 20 bp, synthetic construct
  source 1..20: mol_type = other DNA
aaaagagattccatgtttat

SEQ ID NO: 102989 - DNA, 20 bp, synthetic construct
  source 1..20: mol_type = other DNA
gaaaagagattccatgttta

SEQ ID NO: 102990 - DNA, 20 bp, synthetic construct
  source 1..20: mol_type = other DNA
tgaaaagagattccatgttt

SEQ ID NO: 102991 - DNA, 20 bp, synthetic construct
  source 1..20: mol_type = other DNA
atgaaaagagattccatgtt

SEQ ID NO: 102992 - DNA, 20 bp, synthetic construct
  source 1..20: mol_type = other DNA
catgaaaagagattccatgt

SEQ ID NO: 102993 - DNA, 20 bp, synthetic construct
  source 1..20: mol_type = other DNA
acatgaaaagagattccatg

SEQ ID NO: 102994 - DNA, 20 bp, synthetic construct
  source 1..20: mol_type = other DNA
aacatgaaaagagattccat

SEQ ID NO: 102995 - DNA, 20 bp, synthetic construct
  source 1..20: mol_type = other DNA
aaacatgaaaagagattcca

SEQ ID NO: 102996 - DNA, 20 bp, synthetic construct
  source 1..20: mol_type = other DNA
aaaacatgaaaagagattcc

SEQ ID NO: 102997 - DNA, 20 bp, synthetic construct
  source 1..20: mol_type = other DNA
aaaaacatgaaaagagattc

SEQ ID NO: 102998 - DNA, 20 bp, synthetic construct
  source 1..20: mol_type = other DNA
aaaaaacatgaaaagagatt

SEQ ID NO: 102999 - DNA, 20 bp, synthetic construct
  source 1..20: mol_type = other DNA
gaaaaaacatgaaaagagat

SEQ ID NO: 103000 - DNA, 20 bp, synthetic construct
  source 1..20: mol_type = other DNA
agaaaaaacatgaaaagaga

SEQ ID NO: 103001 - DNA, 20 bp, synthetic construct
  source 1..20: mol_type = other DNA
cagaaaaaacatgaaaagag

SEQ ID NO: 103002 - DNA, 20 bp, synthetic construct
  source 1..20: mol_type = other DNA
acagaaaaaacatgaaaaga

SEQ ID NO: 103003 - DNA, 20 bp, synthetic construct
  source 1..20: mol_type = other DNA
cacagaaaaaacatgaaaag

SEQ ID NO: 103004 - DNA, 20 bp, synthetic construct
  source 1..20: mol_type = other DNA
acacagaaaaaacatgaaaa

SEQ ID NO: 103005 - DNA, 20 bp, synthetic construct
  source 1..20: mol_type = other DNA
gacacagaaaaaacatgaaa

SEQ ID NO: 103006 - DNA, 20 bp, synthetic construct
  source 1..20: mol_type = other DNA
tgacacagaaaaaacatgaa

SEQ ID NO: 103007 - DNA, 20 bp, synthetic construct
  source 1..20: mol_type = other DNA
atgacacagaaaaaacatga

SEQ ID NO: 103008 - DNA, 20 bp, synthetic construct
  source 1..20: mol_type = other DNA
gatgacacagaaaaaacatg

SEQ ID NO: 103009 - DNA, 20 bp, synthetic construct
  source 1..20: mol_type = other DNA
tgatgacacagaaaaaacat

SEQ ID NO: 103010 - DNA, 20 bp, synthetic construct
  source 1..20: mol_type = other DNA
ttgatgacacagaaaaaaca

SEQ ID NO: 103011 - DNA, 20 bp, synthetic construct
  source 1..20: mol_type = other DNA
attgatgacacagaaaaaac

SEQ ID NO: 103012 - DNA, 20 bp, synthetic construct
  source 1..20: mol_type = other DNA
aattgatgacacagaaaaaa

SEQ ID NO: 103013 - DNA, 20 bp, synthetic construct
  source 1..20: mol_type = other DNA
aaattgatgacacagaaaaa

SEQ ID NO: 103014 - DNA, 20 bp, synthetic construct
  source 1..20: mol_type = other DNA
gaaattgatgacacagaaaa

SEQ ID NO: 103015 - DNA, 20 bp, synthetic construct
  source 1..20: mol_type = other DNA
tgaaattgatgacacagaaa

SEQ ID NO: 103016 - DNA, 20 bp, synthetic construct
  source 1..20: mol_type = other DNA
ctgaaattgatgacacagaa

SEQ ID NO: 103017 - DNA, 20 bp, synthetic construct
  source 1..20: mol_type = other DNA
actgaaattgatgacacaga

SEQ ID NO: 103018 - DNA, 20 bp, synthetic construct
  source 1..20: mol_type = other DNA
cactgaaattgatgacacag

SEQ ID NO: 103019 - DNA, 20 bp, synthetic construct
  source 1..20: mol_type = other DNA
acactgaaattgatgacaca

SEQ ID NO: 103020 - DNA, 20 bp, synthetic construct
  source 1..20: mol_type = other DNA
aacactgaaattgatgacac

SEQ ID NO: 103021 - DNA, 20 bp, synthetic construct
  source 1..20: mol_type = other DNA
aaacactgaaattgatgaca

SEQ ID NO: 103022 - DNA, 20 bp, synthetic construct
  source 1..20: mol_type = other DNA
aaaacactgaaattgatgac

SEQ ID NO: 103023 - DNA, 20 bp, synthetic construct
  source 1..20: mol_type = other DNA
taaaacactgaaattgatga

SEQ ID NO: 103024 - DNA, 20 bp, synthetic construct
  source 1..20: mol_type = other DNA
ttaaaacactgaaattgatg

SEQ ID NO: 103025 - DNA, 20 bp, synthetic construct
  source 1..20: mol_type = other DNA
tttaaaacactgaaattgat

SEQ ID NO: 103026 - DNA, 20 bp, synthetic construct
  source 1..20: mol_type = other DNA
ctttaaaacactgaaattga

SEQ ID NO: 103027 - DNA, 20 bp, synthetic construct
  source 1..20: mol_type = other DNA
actttaaaacactgaaattg

SEQ ID NO: 103028 - DNA, 20 bp, synthetic construct
  source 1..20: mol_type = other DNA
aactttaaaacactgaaatt

SEQ ID NO: 103029 - DNA, 20 bp, synthetic construct
  source 1..20: mol_type = other DNA
caactttaaaacactgaaat

SEQ ID NO: 103030 - DNA, 20 bp, synthetic construct
  source 1..20: mol_type = other DNA
acaactttaaaacactgaaa

SEQ ID NO: 103031 - DNA, 20 bp, synthetic construct
  source 1..20: mol_type = other DNA
gacaactttaaaacactgaa

SEQ ID NO: 103032 - DNA, 20 bp, synthetic construct
  source 1..20: mol_type = other DNA
tgacaactttaaaacactga

SEQ ID NO: 103033 - DNA, 20 bp, synthetic construct
  source 1..20: mol_type = other DNA
atgacaactttaaaacactg

SEQ ID NO: 103034 - DNA, 20 bp, synthetic construct
  source 1..20: mol_type = other DNA
aatgacaactttaaaacact

SEQ ID NO: 103035 - DNA, 20 bp, synthetic construct
  source 1..20: mol_type = other DNA
taatgacaactttaaaacac

SEQ ID NO: 103036 - DNA, 20 bp, synthetic construct
  source 1..20: mol_type = other DNA
ataatgacaactttaaaaca

SEQ ID NO: 103037 - DNA, 20 bp, synthetic construct
  source 1..20: mol_type = other DNA
tataatgacaactttaaaac

SEQ ID NO: 103038 - DNA, 20 bp, synthetic construct
  source 1..20: mol_type = other DNA
ctataatgacaactttaaaa

SEQ ID NO: 103039 - DNA, 20 bp, synthetic construct
  source 1..20: mol_type = other DNA
tctataatgacaactttaaa

SEQ ID NO: 103040 - DNA, 20 bp, synthetic construct
  source 1..20: mol_type = other DNA
ttctataatgacaactttaa

SEQ ID NO: 103041 - DNA, 20 bp, synthetic construct
  source 1..20: mol_type = other DNA
tttctataatgacaacttta

SEQ ID NO: 103042 - DNA, 20 bp, synthetic construct
  source 1..20: mol_type = other DNA
atttctataatgacaacttt

SEQ ID NO: 103043 - DNA, 20 bp, synthetic construct
  source 1..20: mol_type = other DNA
gatttctataatgacaactt

SEQ ID NO: 103044 - DNA, 20 bp, synthetic construct
  source 1..20: mol_type = other DNA
agatttctataatgacaact

SEQ ID NO: 103045 - DNA, 20 bp, synthetic construct
  source 1..20: mol_type = other DNA
aagatttctataatgacaac

SEQ ID NO: 103046 - DNA, 20 bp, synthetic construct
  source 1..20: mol_type = other DNA
aaagatttctataatgacaa

SEQ ID NO: 103047 - DNA, 20 bp, synthetic construct
  source 1..20: mol_type = other DNA
aaaagatttctataatgaca

SEQ ID NO: 103048 - DNA, 20 bp, synthetic construct
  source 1..20: mol_type = other DNA
taaaagatttctataatgac

SEQ ID NO: 103049 - DNA, 20 bp, synthetic construct
  source 1..20: mol_type = other DNA
gtaaaagatttctataatga

SEQ ID NO: 103050 - DNA, 20 bp, synthetic construct
  source 1..20: mol_type = other DNA
agtaaaagatttctataatg

SEQ ID NO: 103051 - DNA, 20 bp, synthetic construct
  source 1..20: mol_type = other DNA
gagtaaaagatttctataat

SEQ ID NO: 103052 - DNA, 20 bp, synthetic construct
  source 1..20: mol_type = other DNA
tgagtaaaagatttctataa

SEQ ID NO: 103053 - DNA, 20 bp, synthetic construct
  source 1..20: mol_type = other DNA
atgagtaaaagatttctata

SEQ ID NO: 103054 - DNA, 20 bp, synthetic construct
  source 1..20: mol_type = other DNA
aatgagtaaaagatttctat

SEQ ID NO: 103055 - DNA, 20 bp, synthetic construct
  source 1..20: mol_type = other DNA
aaatgagtaaaagatttcta

SEQ ID NO: 103056 - DNA, 20 bp, synthetic construct
  source 1..20: mol_type = other DNA
caaatgagtaaaagatttct

SEQ ID NO: 103057 - DNA, 20 bp, synthetic construct
  source 1..20: mol_type = other DNA
ccaaatgagtaaaagatttc

SEQ ID NO: 103058 - DNA, 20 bp, synthetic construct
  source 1..20: mol_type = other DNA
accaaatgagtaaaagattt

SEQ ID NO: 103059 - DNA, 20 bp, synthetic construct
  source 1..20: mol_type = other DNA
aaccaaatgagtaaaagatt

SEQ ID NO: 103060 - DNA, 20 bp, synthetic construct
  source 1..20: mol_type = other DNA
taaccaaatgagtaaaagat

SEQ ID NO: 103061 - DNA, 20 bp, synthetic construct
  source 1..20: mol_type = other DNA
ttaaccaaatgagtaaaaga

SEQ ID NO: 103062 - DNA, 20 bp, synthetic construct
  source 1..20: mol_type = other DNA
cttaaccaaatgagtaaaag

SEQ ID NO: 103063 - DNA, 20 bp, synthetic construct
  source 1..20: mol_type = other DNA
acttaaccaaatgagtaaaa

SEQ ID NO: 103064 - DNA, 20 bp, synthetic construct
  source 1..20: mol_type = other DNA
aacttaaccaaatgagtaaa

SEQ ID NO: 103065 - DNA, 20 bp, synthetic construct
  source 1..20: mol_type = other DNA
aaacttaaccaaatgagtaa

SEQ ID NO: 103066 - DNA, 20 bp, synthetic construct
  source 1..20: mol_type = other DNA
taaacttaaccaaatgagta

SEQ ID NO: 103067 - DNA, 20 bp, synthetic construct
  source 1..20: mol_type = other DNA
ataaacttaaccaaatgagt

SEQ ID NO: 103068 - DNA, 20 bp, synthetic construct
  source 1..20: mol_type = other DNA
aataaacttaaccaaatgag

SEQ ID NO: 103069 - DNA, 20 bp, synthetic construct
  source 1..20: mol_type = other DNA
gaataaacttaaccaaatga

SEQ ID NO: 103070 - DNA, 20 bp, synthetic construct
  source 1..20: mol_type = other DNA
ggaataaacttaaccaaatg

SEQ ID NO: 103071 - DNA, 20 bp, synthetic construct
  source 1..20: mol_type = other DNA
aggaataaacttaaccaaat

SEQ ID NO: 103072 - DNA, 20 bp, synthetic construct
  source 1..20: mol_type = other DNA
taggaataaacttaaccaaa

SEQ ID NO: 103073 - DNA, 20 bp, synthetic construct
  source 1..20: mol_type = other DNA
ttaggaataaacttaaccaa

SEQ ID NO: 103074 - DNA, 20 bp, synthetic construct
  source 1..20: mol_type = other DNA
cttaggaataaacttaacca

SEQ ID NO: 103075 - DNA, 20 bp, synthetic construct
  source 1..20: mol_type = other DNA
acttaggaataaacttaacc

SEQ ID NO: 103076 - DNA, 20 bp, synthetic construct
  source 1..20: mol_type = other DNA
tacttaggaataaacttaac

SEQ ID NO: 103077 - DNA, 20 bp, synthetic construct
  source 1..20: mol_type = other DNA
atacttaggaataaacttaa

SEQ ID NO: 103078 - DNA, 20 bp, synthetic construct
  source 1..20: mol_type = other DNA
aatacttaggaataaactta

SEQ ID NO: 103079 - DNA, 20 bp, synthetic construct
  source 1..20: mol_type = other DNA
aaatacttaggaataaactt

SEQ ID NO: 103080 - DNA, 20 bp, synthetic construct
  source 1..20: mol_type = other DNA
aaaatacttaggaataaact

SEQ ID NO: 103081 - DNA, 20 bp, synthetic construct
  source 1..20: mol_type = other DNA
taaaatacttaggaataaac

SEQ ID NO: 103082 - DNA, 20 bp, synthetic construct
  source 1..20: mol_type = other DNA
ataaaatacttaggaataaa

SEQ ID NO: 103083 - DNA, 20 bp, synthetic construct
  source 1..20: mol_type = other DNA
aataaaatacttaggaataa

SEQ ID NO: 103084 - DNA, 20 bp, synthetic construct
  source 1..20: mol_type = other DNA
taataaaatacttaggaata

SEQ ID NO: 103085 - DNA, 20 bp, synthetic construct
  source 1..20: mol_type = other DNA
ataataaaatacttaggaat

SEQ ID NO: 103086 - DNA, 20 bp, synthetic construct
  source 1..20: mol_type = other DNA
tataataaaatacttaggaa

SEQ ID NO: 103087 - DNA, 20 bp, synthetic construct
  source 1..20: mol_type = other DNA
atataataaaatacttagga

SEQ ID NO: 103088 - DNA, 20 bp, synthetic construct
  source 1..20: mol_type = other DNA
aatataataaaatacttagg

SEQ ID NO: 103089 - DNA, 20 bp, synthetic construct
  source 1..20: mol_type = other DNA
aaatataataaaatacttag

SEQ ID NO: 103090 - DNA, 20 bp, synthetic construct
  source 1..20: mol_type = other DNA
caaatataataaaatactta

SEQ ID NO: 103091 - DNA, 20 bp, synthetic construct
  source 1..20: mol_type = other DNA
acaaatataataaaatactt

SEQ ID NO: 103092 - DNA, 20 bp, synthetic construct
  source 1..20: mol_type = other DNA
tacaaatataataaaatact

SEQ ID NO: 103093 - DNA, 20 bp, synthetic construct
  source 1..20: mol_type = other DNA
ctacaaatataataaaatac

SEQ ID NO: 103094 - DNA, 20 bp, synthetic construct
  source 1..20: mol_type = other DNA
gctacaaatataataaaata

SEQ ID NO: 103095 - DNA, 20 bp, synthetic construct
  source 1..20: mol_type = other DNA
agctacaaatataataaaat

SEQ ID NO: 103096 - DNA, 20 bp, synthetic construct
  source 1..20: mol_type = other DNA
tagctacaaatataataaaa

SEQ ID NO: 103097 - DNA, 20 bp, synthetic construct
  source 1..20: mol_type = other DNA
atagctacaaatataataaa

SEQ ID NO: 103098 - DNA, 20 bp, synthetic construct
  source 1..20: mol_type = other DNA
aatagctacaaatataataa

SEQ ID NO: 103099 - DNA, 20 bp, synthetic construct
  source 1..20: mol_type = other DNA
caatagctacaaatataata

SEQ ID NO: 103100 - DNA, 20 bp, synthetic construct
  source 1..20: mol_type = other DNA
acaatagctacaaatataat

SEQ ID NO: 103101 - DNA, 20 bp, synthetic construct
  source 1..20: mol_type = other DNA
tacaatagctacaaatataa

SEQ ID NO: 103102 - DNA, 20 bp, synthetic construct
  source 1..20: mol_type = other DNA
ttacaatagctacaaatata

SEQ ID NO: 103103 - DNA, 20 bp, synthetic construct
  source 1..20: mol_type = other DNA
tttacaatagctacaaatat

SEQ ID NO: 103104 - DNA, 20 bp, synthetic construct
  source 1..20: mol_type = other DNA
atttacaatagctacaaata

SEQ ID NO: 103105 - DNA, 20 bp, synthetic construct
  source 1..20: mol_type = other DNA
catttacaatagctacaaat

SEQ ID NO: 103106 - DNA, 20 bp, synthetic construct
  source 1..20: mol_type = other DNA
ccatttacaatagctacaaa

SEQ ID NO: 103107 - DNA, 20 bp, synthetic construct
  source 1..20: mol_type = other DNA
cccatttacaatagctacaa

SEQ ID NO: 103108 - DNA, 20 bp, synthetic construct
  source 1..20: mol_type = other DNA
tcccatttacaatagctaca

SEQ ID NO: 103109 - DNA, 20 bp, synthetic construct
  source 1..20: mol_type = other DNA
atcccatttacaatagctac

SEQ ID NO: 103110 - DNA, 20 bp, synthetic construct
  source 1..20: mol_type = other DNA
aatcccatttacaatagcta

SEQ ID NO: 103111 - DNA, 20 bp, synthetic construct
  source 1..20: mol_type = other DNA
caatcccatttacaatagct

SEQ ID NO: 103112 - DNA, 20 bp, synthetic construct
  source 1..20: mol_type = other DNA
gcaatcccatttacaatagc

SEQ ID NO: 103113 - DNA, 20 bp, synthetic construct
  source 1..20: mol_type = other DNA
cgcaatcccatttacaatag

SEQ ID NO: 103114 - DNA, 20 bp, synthetic construct
  source 1..20: mol_type = other DNA
acgcaatcccatttacaata

SEQ ID NO: 103115 - DNA, 20 bp, synthetic construct
  source 1..20: mol_type = other DNA
aacgcaatcccatttacaat

SEQ ID NO: 103116 - DNA, 20 bp, synthetic construct
  source 1..20: mol_type = other DNA
aaacgcaatcccatttacaa

SEQ ID NO: 103117 - DNA, 20 bp, synthetic construct
  source 1..20: mol_type = other DNA
taaacgcaatcccatttaca

SEQ ID NO: 103118 - DNA, 20 bp, synthetic construct
  source 1..20: mol_type = other DNA
ttaaacgcaatcccatttac

SEQ ID NO: 103119 - DNA, 20 bp, synthetic construct
  source 1..20: mol_type = other DNA
tttaaacgcaatcccattta

SEQ ID NO: 103120 - DNA, 20 bp, synthetic construct
  source 1..20: mol_type = other DNA
ttttaaacgcaatcccattt

SEQ ID NO: 103121 - DNA, 20 bp, synthetic construct
  source 1..20: mol_type = other DNA
tttttaaacgcaatcccatt

SEQ ID NO: 103122 - DNA, 20 bp, synthetic construct
  source 1..20: mol_type = other DNA
ttttttaaacgcaatcccat

SEQ ID NO: 103123 - DNA, 20 bp, synthetic construct
  source 1..20: mol_type = other DNA
attttttaaacgcaatccca

SEQ ID NO: 103124 - DNA, 20 bp, synthetic construct
  source 1..20: mol_type = other DNA
aattttttaaacgcaatccc

SEQ ID NO: 103125 - DNA, 20 bp, synthetic construct
  source 1..20: mol_type = other DNA
aaattttttaaacgcaatcc

SEQ ID NO: 103126 - DNA, 20 bp, synthetic construct
  source 1..20: mol_type = other DNA
aaaattttttaaacgcaatc

SEQ ID NO: 103127 - DNA, 20 bp, synthetic construct
  source 1..20: mol_type = other DNA
aaaaattttttaaacgcaat

SEQ ID NO: 103128 - DNA, 20 bp, synthetic construct
  source 1..20: mol_type = other DNA
gaaaaattttttaaacgcaa

SEQ ID NO: 103129 - DNA, 20 bp, synthetic construct
  source 1..20: mol_type = other DNA
tgaaaaattttttaaacgca

SEQ ID NO: 103130 - DNA, 20 bp, synthetic construct
  source 1..20: mol_type = other DNA
ctgaaaaattttttaaacgc

SEQ ID NO: 103131 - DNA, 20 bp, synthetic construct
  source 1..20: mol_type = other DNA
tctgaaaaattttttaaacg

SEQ ID NO: 103132 - DNA, 20 bp, synthetic construct
  source 1..20: mol_type = other DNA
atctgaaaaattttttaaac

SEQ ID NO: 103133 - DNA, 20 bp, synthetic construct
  source 1..20: mol_type = other DNA
aatctgaaaaattttttaaa

SEQ ID NO: 103134 - DNA, 20 bp, synthetic construct
  source 1..20: mol_type = other DNA
caatctgaaaaattttttaa

SEQ ID NO: 103135 - DNA, 20 bp, synthetic construct
  source 1..20: mol_type = other DNA
acaatctgaaaaatttttta

SEQ ID NO: 103136 - DNA, 20 bp, synthetic construct
  source 1..20: mol_type = other DNA
aacaatctgaaaaatttttt

SEQ ID NO: 103137 - DNA, 20 bp, synthetic construct
  source 1..20: mol_type = other DNA
aaacaatctgaaaaattttt

SEQ ID NO: 103138 - DNA, 20 bp, synthetic construct
  source 1..20: mol_type = other DNA
caaacaatctgaaaaatttt

SEQ ID NO: 103139 - DNA, 20 bp, synthetic construct
  source 1..20: mol_type = other DNA
gcaaacaatctgaaaaattt

SEQ ID NO: 103140 - DNA, 20 bp, synthetic construct
  source 1..20: mol_type = other DNA
agcaaacaatctgaaaaatt

SEQ ID NO: 103141 - DNA, 20 bp, synthetic construct
  source 1..20: mol_type = other DNA
cagcaaacaatctgaaaaat

SEQ ID NO: 103142 - DNA, 20 bp, synthetic construct
  source 1..20: mol_type = other DNA
acagcaaacaatctgaaaaa

SEQ ID NO: 103143 - DNA, 20 bp, synthetic construct
  source 1..20: mol_type = other DNA
aacagcaaacaatctgaaaa

SEQ ID NO: 103144 - DNA, 20 bp, synthetic construct
  source 1..20: mol_type = other DNA
taacagcaaacaatctgaaa

SEQ ID NO: 103145 - DNA, 20 bp, synthetic construct
  source 1..20: mol_type = other DNA
ttaacagcaaacaatctgaa

SEQ ID NO: 103146 - DNA, 20 bp, synthetic construct
  source 1..20: mol_type = other DNA
tttaacagcaaacaatctga

SEQ ID NO: 103147 - DNA, 20 bp, synthetic construct
  source 1..20: mol_type = other DNA
atttaacagcaaacaatctg

SEQ ID NO: 103148 - DNA, 20 bp, synthetic construct
  source 1..20: mol_type = other DNA
tatttaacagcaaacaatct

SEQ ID NO: 103149 - DNA, 20 bp, synthetic construct
  source 1..20: mol_type = other DNA
atatttaacagcaaacaatc

SEQ ID NO: 103150 - DNA, 20 bp, synthetic construct
  source 1..20: mol_type = other DNA
tatatttaacagcaaacaat

SEQ ID NO: 103151 - DNA, 20 bp, synthetic construct
  source 1..20: mol_type = other DNA
ttatatttaacagcaaacaa

SEQ ID NO: 103152 - DNA, 20 bp, synthetic construct
  source 1..20: mol_type = other DNA
tttatatttaacagcaaaca

SEQ ID NO: 103153 - DNA, 20 bp, synthetic construct
  source 1..20: mol_type = other DNA
ttttatatttaacagcaaac

SEQ ID NO: 103154 - DNA, 20 bp, synthetic construct
  source 1..20: mol_type = other DNA
tttttatatttaacagcaaa

SEQ ID NO: 103155 - DNA, 20 bp, synthetic construct
  source 1..20: mol_type = other DNA
atttttatatttaacagcaa

SEQ ID NO: 103156 - DNA, 20 bp, synthetic construct
  source 1..20: mol_type = other DNA
catttttatatttaacagca

SEQ ID NO: 103157 - DNA, 20 bp, synthetic construct
  source 1..20: mol_type = other DNA
gcatttttatatttaacagc

SEQ ID NO: 103158 - DNA, 20 bp, synthetic construct
  source 1..20: mol_type = other DNA
agcatttttatatttaacag

SEQ ID NO: 103159 - DNA, 20 bp, synthetic construct
  source 1..20: mol_type = other DNA
gagcatttttatatttaaca

SEQ ID NO: 103160 - DNA, 20 bp, synthetic construct
  source 1..20: mol_type = other DNA
ggagcatttttatatttaac

SEQ ID NO: 103161 - DNA, 20 bp, synthetic construct
  source 1..20: mol_type = other DNA
aggagcatttttatatttaa

SEQ ID NO: 103162 - DNA, 20 bp, synthetic construct
  source 1..20: mol_type = other DNA
caggagcatttttatattta

SEQ ID NO: 103163 - DNA, 20 bp, synthetic construct
  source 1..20: mol_type = other DNA
tcaggagcatttttatattt

SEQ ID NO: 103164 - DNA, 20 bp, synthetic construct
  source 1..20: mol_type = other DNA
atcaggagcatttttatatt

SEQ ID NO: 103165 - DNA, 20 bp, synthetic construct
  source 1..20: mol_type = other DNA
aatcaggagcatttttatat

SEQ ID NO: 103166 - DNA, 20 bp, synthetic construct
  source 1..20: mol_type = other DNA
aaatcaggagcatttttata

SEQ ID NO: 103167 - DNA, 20 bp, synthetic construct
  source 1..20: mol_type = other DNA
aaaatcaggagcatttttat

SEQ ID NO: 103168 - DNA, 20 bp, synthetic construct
  source 1..20: mol_type = other DNA
aaaaatcaggagcattttta

SEQ ID NO: 103169 - DNA, 20 bp, synthetic construct
  source 1..20: mol_type = other DNA
caaaaatcaggagcattttt

SEQ ID NO: 103170 - DNA, 20 bp, synthetic construct
  source 1..20: mol_type = other DNA
acaaaaatcaggagcatttt

SEQ ID NO: 103171 - DNA, 20 bp, synthetic construct
  source 1..20: mol_type = other DNA
cacaaaaatcaggagcattt

SEQ ID NO: 103172 - DNA, 20 bp, synthetic construct
  source 1..20: mol_type = other DNA
acacaaaaatcaggagcatt

SEQ ID NO: 103173 - DNA, 20 bp, synthetic construct
  source 1..20: mol_type = other DNA
cacacaaaaatcaggagcat

SEQ ID NO: 103174 - DNA, 20 bp, synthetic construct
  source 1..20: mol_type = other DNA
acacacaaaaatcaggagca

SEQ ID NO: 103175 - DNA, 20 bp, synthetic construct
  source 1..20: mol_type = other DNA
aacacacaaaaatcaggagc

SEQ ID NO: 103176 - DNA, 20 bp, synthetic construct
  source 1..20: mol_type = other DNA
caacacacaaaaatcaggag

SEQ ID NO: 103177 - DNA, 20 bp, synthetic construct
  source 1..20: mol_type = other DNA
tcaacacacaaaaatcagga

SEQ ID NO: 103178 - DNA, 20 bp, synthetic construct
  source 1..20: mol_type = other DNA
atcaacacacaaaaatcagg

SEQ ID NO: 103179 - DNA, 20 bp, synthetic construct
  source 1..20: mol_type = other DNA
aatcaacacacaaaaatcag

SEQ ID NO: 103180 - DNA, 20 bp, synthetic construct
  source 1..20: mol_type = other DNA
aaatcaacacacaaaaatca

SEQ ID NO: 103181 - DNA, 20 bp, synthetic construct
  source 1..20: mol_type = other DNA
aaaatcaacacacaaaaatc

SEQ ID NO: 103182 - DNA, 20 bp, synthetic construct
  source 1..20: mol_type = other DNA
aaaaatcaacacacaaaaat

SEQ ID NO: 103183 - DNA, 20 bp, synthetic construct
  source 1..20: mol_type = other DNA
caaaaatcaacacacaaaaa

SEQ ID NO: 103184 - DNA, 20 bp, synthetic construct
  source 1..20: mol_type = other DNA
acaaaaatcaacacacaaaa

SEQ ID NO: 103185 - DNA, 20 bp, synthetic construct
  source 1..20: mol_type = other DNA
tacaaaaatcaacacacaaa

SEQ ID NO: 103186 - DNA, 20 bp, synthetic construct
  source 1..20: mol_type = other DNA
atacaaaaatcaacacacaa

SEQ ID NO: 103187 - DNA, 20 bp, synthetic construct
  source 1..20: mol_type = other DNA
gatacaaaaatcaacacaca

SEQ ID NO: 103188 - DNA, 20 bp, synthetic construct
  source 1..20: mol_type = other DNA
ggatacaaaaatcaacacac

SEQ ID NO: 103189 - DNA, 20 bp, synthetic construct
  source 1..20: mol_type = other DNA
aggatacaaaaatcaacaca

SEQ ID NO: 103190 - DNA, 20 bp, synthetic construct
  source 1..20: mol_type = other DNA
caggatacaaaaatcaacac

SEQ ID NO: 103191 - DNA, 20 bp, synthetic construct
  source 1..20: mol_type = other DNA
gcaggatacaaaaatcaaca

SEQ ID NO: 103192 - DNA, 20 bp, synthetic construct
  source 1..20: mol_type = other DNA
tgcaggatacaaaaatcaac

SEQ ID NO: 103193 - DNA, 20 bp, synthetic construct
  source 1..20: mol_type = other DNA
ttgcaggatacaaaaatcaa

SEQ ID NO: 103194 - DNA, 20 bp, synthetic construct
  source 1..20: mol_type = other DNA
attgcaggatacaaaaatca

SEQ ID NO: 103195 - DNA, 20 bp, synthetic construct
  source 1..20: mol_type = other DNA
aattgcaggatacaaaaatc

SEQ ID NO: 103196 - DNA, 20 bp, synthetic construct
  source 1..20: mol_type = other DNA
aaattgcaggatacaaaaat

SEQ ID NO: 103197 - DNA, 20 bp, synthetic construct
  source 1..20: mol_type = other DNA
aaaattgcaggatacaaaaa

SEQ ID NO: 103198 - DNA, 20 bp, synthetic construct
  source 1..20: mol_type = other DNA
taaaattgcaggatacaaaa

SEQ ID NO: 103199 - DNA, 20 bp, synthetic construct
  source 1..20: mol_type = other DNA
gtaaaattgcaggatacaaa

SEQ ID NO: 103200 - DNA, 20 bp, synthetic construct
  source 1..20: mol_type = other DNA
agtaaaattgcaggatacaa

SEQ ID NO: 103201 - DNA, 20 bp, synthetic construct
  source 1..20: mol_type = other DNA
cagtaaaattgcaggataca

SEQ ID NO: 103202 - DNA, 20 bp, synthetic construct
  source 1..20: mol_type = other DNA
tcagtaaaattgcaggatac

SEQ ID NO: 103203 - DNA, 20 bp, synthetic construct
  source 1..20: mol_type = other DNA
ttcagtaaaattgcaggata

SEQ ID NO: 103204 - DNA, 20 bp, synthetic construct
  source 1..20: mol_type = other DNA
attcagtaaaattgcaggat

SEQ ID NO: 103205 - DNA, 20 bp, synthetic construct
  source 1..20: mol_type = other DNA
aattcagtaaaattgcagga

SEQ ID NO: 103206 - DNA, 20 bp, synthetic construct
  source 1..20: mol_type = other DNA
aaattcagtaaaattgcagg

SEQ ID NO: 103207 - DNA, 20 bp, synthetic construct
  source 1..20: mol_type = other DNA
caaattcagtaaaattgcag

SEQ ID NO: 103208 - DNA, 20 bp, synthetic construct
  source 1..20: mol_type = other DNA
acaaattcagtaaaattgca

SEQ ID NO: 103209 - DNA, 20 bp, synthetic construct
  source 1..20: mol_type = other DNA
aacaaattcagtaaaattgc

SEQ ID NO: 103210 - DNA, 20 bp, synthetic construct
  source 1..20: mol_type = other DNA
aaacaaattcagtaaaattg

SEQ ID NO: 103211 - DNA, 20 bp, synthetic construct
  source 1..20: mol_type = other DNA
caaacaaattcagtaaaatt

SEQ ID NO: 103212 - DNA, 20 bp, synthetic construct
  source 1..20: mol_type = other DNA
acaaacaaattcagtaaaat

SEQ ID NO: 103213 - DNA, 20 bp, synthetic construct
  source 1..20: mol_type = other DNA
gacaaacaaattcagtaaaa

SEQ ID NO: 103214 - DNA, 20 bp, synthetic construct
  source 1..20: mol_type = other DNA
tgacaaacaaattcagtaaa

SEQ ID NO: 103215 - DNA, 20 bp, synthetic construct
  source 1..20: mol_type = other DNA
ctgacaaacaaattcagtaa

SEQ ID NO: 103216 - DNA, 20 bp, synthetic construct
  source 1..20: mol_type = other DNA
actgacaaacaaattcagta

SEQ ID NO: 103217 - DNA, 20 bp, synthetic construct
  source 1..20: mol_type = other DNA
aactgacaaacaaattcagt

SEQ ID NO: 103218 - DNA, 20 bp, synthetic construct
  source 1..20: mol_type = other DNA
gaactgacaaacaaattcag

SEQ ID NO: 103219 - DNA, 20 bp, synthetic construct
  source 1..20: mol_type = other DNA
agaactgacaaacaaattca

SEQ ID NO: 103220 - DNA, 20 bp, synthetic construct
  source 1..20: mol_type = other DNA
tagaactgacaaacaaattc

SEQ ID NO: 103221 - DNA, 20 bp, synthetic construct
  source 1..20: mol_type = other DNA
ttagaactgacaaacaaatt

SEQ ID NO: 103222 - DNA, 20 bp, synthetic construct
  source 1..20: mol_type = other DNA
attagaactgacaaacaaat

SEQ ID NO: 103223 - DNA, 20 bp, synthetic construct
  source 1..20: mol_type = other DNA
tattagaactgacaaacaaa

SEQ ID NO: 103224 - DNA, 20 bp, synthetic construct
  source 1..20: mol_type = other DNA
ctattagaactgacaaacaa

SEQ ID NO: 103225 - DNA, 20 bp, synthetic construct
  source 1..20: mol_type = other DNA
cctattagaactgacaaaca

SEQ ID NO: 103226 - DNA, 20 bp, synthetic construct
  source 1..20: mol_type = other DNA
acctattagaactgacaaac

SEQ ID NO: 103227 - DNA, 20 bp, synthetic construct
  source 1..20: mol_type = other DNA
aacctattagaactgacaaa

SEQ ID NO: 103228 - DNA, 20 bp, synthetic construct
  source 1..20: mol_type = other DNA
aaacctattagaactgacaa

SEQ ID NO: 103229 - DNA, 20 bp, synthetic construct
  source 1..20: mol_type = other DNA
aaaacctattagaactgaca

SEQ ID NO: 103230 - DNA, 20 bp, synthetic construct
  source 1..20: mol_type = other DNA
aaaaacctattagaactgac

SEQ ID NO: 103231 - DNA, 20 bp, synthetic construct
  source 1..20: mol_type = other DNA
gaaaaacctattagaactga

SEQ ID NO: 103232 - DNA, 20 bp, synthetic construct
  source 1..20: mol_type = other DNA
agaaaaacctattagaactg

SEQ ID NO: 103233 - DNA, 20 bp, synthetic construct
  source 1..20: mol_type = other DNA
aagaaaaacctattagaact

SEQ ID NO: 103234 - DNA, 20 bp, synthetic construct
  source 1..20: mol_type = other DNA
aaagaaaaacctattagaac

SEQ ID NO: 103235 - DNA, 20 bp, synthetic construct
  source 1..20: mol_type = other DNA
aaaagaaaaacctattagaa

SEQ ID NO: 103236 - DNA, 20 bp, synthetic construct
  source 1..20: mol_type = other DNA
aaaaagaaaaacctattaga

SEQ ID NO: 103237 - DNA, 20 bp, synthetic construct
  source 1..20: mol_type = other DNA
aaaaaagaaaaacctattag

SEQ ID NO: 103238 - DNA, 20 bp, synthetic construct
  source 1..20: mol_type = other DNA
caaaaaagaaaaacctatta

SEQ ID NO: 103239 - DNA, 20 bp, synthetic construct
  source 1..20: mol_type = other DNA
ccaaaaaagaaaaacctatt

SEQ ID NO: 103240 - DNA, 20 bp, synthetic construct
  source 1..20: mol_type = other DNA
tccaaaaaagaaaaacctat

SEQ ID NO: 103241 - DNA, 20 bp, synthetic construct
  source 1..20: mol_type = other DNA
ctccaaaaaagaaaaaccta

SEQ ID NO: 103242 - DNA, 20 bp, synthetic construct
  source 1..20: mol_type = other DNA
actccaaaaaagaaaaacct

SEQ ID NO: 103243 - DNA, 20 bp, synthetic construct
  source 1..20: mol_type = other DNA
gactccaaaaaagaaaaacc

SEQ ID NO: 103244 - DNA, 20 bp, synthetic construct
  source 1..20: mol_type = other DNA
agactccaaaaaagaaaaac

SEQ ID NO: 103245 - DNA, 20 bp, synthetic construct
  source 1..20: mol_type = other DNA
tagactccaaaaaagaaaaa

SEQ ID NO: 103246 - DNA, 20 bp, synthetic construct
  source 1..20: mol_type = other DNA
ctagactccaaaaaagaaaa

SEQ ID NO: 103247 - DNA, 20 bp, synthetic construct
  source 1..20: mol_type = other DNA
cctagactccaaaaaagaaa

SEQ ID NO: 103248 - DNA, 20 bp, synthetic construct
  source 1..20: mol_type = other DNA
acctagactccaaaaaagaa

SEQ ID NO: 103249 - DNA, 20 bp, synthetic construct
  source 1..20: mol_type = other DNA
aacctagactccaaaaaaga

SEQ ID NO: 103250 - DNA, 20 bp, synthetic construct
  source 1..20: mol_type = other DNA
aaacctagactccaaaaaag

SEQ ID NO: 103251 - DNA, 20 bp, synthetic construct
  source 1..20: mol_type = other DNA
aaaacctagactccaaaaaa

SEQ ID NO: 103252 - DNA, 20 bp, synthetic construct
  source 1..20: mol_type = other DNA
aaaaacctagactccaaaaa

SEQ ID NO: 103253 - DNA, 20 bp, synthetic construct
  source 1..20: mol_type = other DNA
gaaaaacctagactccaaaa

SEQ ID NO: 103254 - DNA, 20 bp, synthetic construct
  source 1..20: mol_type = other DNA
ggaaaaacctagactccaaa

SEQ ID NO: 103255 - DNA, 20 bp, synthetic construct
  source 1..20: mol_type = other DNA
tggaaaaacctagactccaa

SEQ ID NO: 103256 - DNA, 20 bp, synthetic construct
  source 1..20: mol_type = other DNA
ttggaaaaacctagactcca

SEQ ID NO: 103257 - DNA, 20 bp, synthetic construct
  source 1..20: mol_type = other DNA
tttggaaaaacctagactcc

SEQ ID NO: 103258 - DNA, 20 bp, synthetic construct
  source 1..20: mol_type = other DNA
atttggaaaaacctagactc

SEQ ID NO: 103259 - DNA, 20 bp, synthetic construct
  source 1..20: mol_type = other DNA
catttggaaaaacctagact

SEQ ID NO: 103260 - DNA, 20 bp, synthetic construct
  source 1..20: mol_type = other DNA
acatttggaaaaacctagac

SEQ ID NO: 103261 - DNA, 20 bp, synthetic construct
  source 1..20: mol_type = other DNA
tacatttggaaaaacctaga

SEQ ID NO: 103262 - DNA, 20 bp, synthetic construct
  source 1..20: mol_type = other DNA
ttacatttggaaaaacctag

SEQ ID NO: 103263 - DNA, 20 bp, synthetic construct
  source 1..20: mol_type = other DNA
cttacatttggaaaaaccta

SEQ ID NO: 103264 - DNA, 20 bp, synthetic construct
  source 1..20: mol_type = other DNA
tcttacatttggaaaaacct

SEQ ID NO: 103265 - DNA, 20 bp, synthetic construct
  source 1..20: mol_type = other DNA
atcttacatttggaaaaacc

SEQ ID NO: 103266 - DNA, 20 bp, synthetic construct
  source 1..20: mol_type = other DNA
gatcttacatttggaaaaac

SEQ ID NO: 103267 - DNA, 20 bp, synthetic construct
  source 1..20: mol_type = other DNA
tgatcttacatttggaaaaa

SEQ ID NO: 103268 - DNA, 20 bp, synthetic construct
  source 1..20: mol_type = other DNA
atgatcttacatttggaaaa

SEQ ID NO: 103269 - DNA, 20 bp, synthetic construct
  source 1..20: mol_type = other DNA
tatgatcttacatttggaaa

SEQ ID NO: 103270 - DNA, 20 bp, synthetic construct
  source 1..20: mol_type = other DNA
atatgatcttacatttggaa

SEQ ID NO: 103271 - DNA, 20 bp, synthetic construct
  source 1..20: mol_type = other DNA
aatatgatcttacatttgga

SEQ ID NO: 103272 - DNA, 20 bp, synthetic construct
  source 1..20: mol_type = other DNA
taatatgatcttacatttgg

SEQ ID NO: 103273 - DNA, 20 bp, synthetic construct
  source 1..20: mol_type = other DNA
ataatatgatcttacatttg

SEQ ID NO: 103274 - DNA, 20 bp, synthetic construct
  source 1..20: mol_type = other DNA
gataatatgatcttacattt

SEQ ID NO: 103275 - DNA, 20 bp, synthetic construct
  source 1..20: mol_type = other DNA
agataatatgatcttacatt

SEQ ID NO: 103276 - DNA, 20 bp, synthetic construct
  source 1..20: mol_type = other DNA
cagataatatgatcttacat

SEQ ID NO: 103277 - DNA, 20 bp, synthetic construct
  source 1..20: mol_type = other DNA
gcagataatatgatcttaca

SEQ ID NO: 103278 - DNA, 20 bp, synthetic construct
  source 1..20: mol_type = other DNA
tgcagataatatgatcttac

SEQ ID NO: 103279 - DNA, 20 bp, synthetic construct
  source 1..20: mol_type = other DNA
ttgcagataatatgatctta

SEQ ID NO: 103280 - DNA, 20 bp, synthetic construct
  source 1..20: mol_type = other DNA
tttgcagataatatgatctt

SEQ ID NO: 103281 - DNA, 20 bp, synthetic construct
  source 1..20: mol_type = other DNA
gtttgcagataatatgatct

SEQ ID NO: 103282 - DNA, 20 bp, synthetic construct
  source 1..20: mol_type = other DNA
tgtttgcagataatatgatc

SEQ ID NO: 103283 - DNA, 20 bp, synthetic construct
  source 1..20: mol_type = other DNA
ttgtttgcagataatatgat

SEQ ID NO: 103284 - DNA, 20 bp, synthetic construct
  source 1..20: mol_type = other DNA
cttgtttgcagataatatga

SEQ ID NO: 103285 - DNA, 20 bp, synthetic construct
  source 1..20: mol_type = other DNA
ccttgtttgcagataatatg

SEQ ID NO: 103286 - DNA, 20 bp, synthetic construct
  source 1..20: mol_type = other DNA
tccttgtttgcagataatat

SEQ ID NO: 103287 - DNA, 20 bp, synthetic construct
  source 1..20: mol_type = other DNA
atccttgtttgcagataata

SEQ ID NO: 103288 - DNA, 20 bp, synthetic construct
  source 1..20: mol_type = other DNA
tatccttgtttgcagataat

SEQ ID NO: 103289 - DNA, 20 bp, synthetic construct
  source 1..20: mol_type = other DNA
ttatccttgtttgcagataa

SEQ ID NO: 103290 - DNA, 20 bp, synthetic construct
  source 1..20: mol_type = other DNA
attatccttgtttgcagata

SEQ ID NO: 103291 - DNA, 20 bp, synthetic construct
  source 1..20: mol_type = other DNA
aattatccttgtttgcagat

SEQ ID NO: 103292 - DNA, 20 bp, synthetic construct
  source 1..20: mol_type = other DNA
aaattatccttgtttgcaga

SEQ ID NO: 103293 - DNA, 20 bp, synthetic construct
  source 1..20: mol_type = other DNA
caaattatccttgtttgcag

SEQ ID NO: 103294 - DNA, 20 bp, synthetic construct
  source 1..20: mol_type = other DNA
tcaaattatccttgtttgca

SEQ ID NO: 103295 - DNA, 20 bp, synthetic construct
  source 1..20: mol_type = other DNA
gtcaaattatccttgtttgc

SEQ ID NO: 103296 - DNA, 20 bp, synthetic construct
  source 1..20: mol_type = other DNA
agtcaaattatccttgtttg

SEQ ID NO: 103297 - DNA, 20 bp, synthetic construct
  source 1..20: mol_type = other DNA
aagtcaaattatccttgttt

SEQ ID NO: 103298 - DNA, 20 bp, synthetic construct
  source 1..20: mol_type = other DNA
gaagtcaaattatccttgtt

SEQ ID NO: 103299 - DNA, 20 bp, synthetic construct
  source 1..20: mol_type = other DNA
agaagtcaaattatccttgt

SEQ ID NO: 103300 - DNA, 20 bp, synthetic construct
  source 1..20: mol_type = other DNA
aagaagtcaaattatccttg

SEQ ID NO: 103301 - DNA, 20 bp, synthetic construct
  source 1..20: mol_type = other DNA
gaagaagtcaaattatcctt

SEQ ID NO: 103302 - DNA, 20 bp, synthetic construct
  source 1..20: mol_type = other DNA
ggaagaagtcaaattatcct

SEQ ID NO: 103303 - DNA, 20 bp, synthetic construct
  source 1..20: mol_type = other DNA
tggaagaagtcaaattatcc

SEQ ID NO: 103304 - DNA, 20 bp, synthetic construct
  source 1..20: mol_type = other DNA
atggaagaagtcaaattatc

SEQ ID NO: 103305 - DNA, 20 bp, synthetic construct
  source 1..20: mol_type = other DNA
aatggaagaagtcaaattat

SEQ ID NO: 103306 - DNA, 20 bp, synthetic construct
  source 1..20: mol_type = other DNA
gaatggaagaagtcaaatta

SEQ ID NO: 103307 - DNA, 20 bp, synthetic construct
  source 1..20: mol_type = other DNA
ggaatggaagaagtcaaatt

SEQ ID NO: 103308 - DNA, 20 bp, synthetic construct
  source 1..20: mol_type = other DNA
tggaatggaagaagtcaaat

SEQ ID NO: 103309 - DNA, 20 bp, synthetic construct
  source 1..20: mol_type = other DNA
ctggaatggaagaagtcaaa

SEQ ID NO: 103310 - DNA, 20 bp, synthetic construct
  source 1..20: mol_type = other DNA
actggaatggaagaagtcaa

SEQ ID NO: 103311 - DNA, 20 bp, synthetic construct
  source 1..20: mol_type = other DNA
cactggaatggaagaagtca

SEQ ID NO: 103312 - DNA, 20 bp, synthetic construct
  source 1..20: mol_type = other DNA
acactggaatggaagaagtc

SEQ ID NO: 103313 - DNA, 20 bp, synthetic construct
  source 1..20: mol_type = other DNA
cacactggaatggaagaagt

SEQ ID NO: 103314 - DNA, 20 bp, synthetic construct
  source 1..20: mol_type = other DNA
ccacactggaatggaagaag

SEQ ID NO: 103315 - DNA, 20 bp, synthetic construct
  source 1..20: mol_type = other DNA
tccacactggaatggaagaa

SEQ ID NO: 103316 - DNA, 20 bp, synthetic construct
  source 1..20: mol_type = other DNA
atccacactggaatggaaga

SEQ ID NO: 103317 - DNA, 20 bp, synthetic construct
  source 1..20: mol_type = other DNA
catccacactggaatggaag

SEQ ID NO: 103318 - DNA, 20 bp, synthetic construct
  source 1..20: mol_type = other DNA
gcatccacactggaatggaa

SEQ ID NO: 103319 - DNA, 20 bp, synthetic construct
  source 1..20: mol_type = other DNA
agcatccacactggaatgga

SEQ ID NO: 103320 - DNA, 20 bp, synthetic construct
  source 1..20: mol_type = other DNA
aagcatccacactggaatgg

SEQ ID NO: 103321 - DNA, 20 bp, synthetic construct
  source 1..20: mol_type = other DNA
aaagcatccacactggaatg

SEQ ID NO: 103322 - DNA, 20 bp, synthetic construct
  source 1..20: mol_type = other DNA
aaaagcatccacactggaat

SEQ ID NO: 103323 - DNA, 20 bp, synthetic construct
  source 1..20: mol_type = other DNA
aaaaagcatccacactggaa

SEQ ID NO: 103324 - DNA, 20 bp, synthetic construct
  source 1..20: mol_type = other DNA
taaaaagcatccacactgga

SEQ ID NO: 103325 - DNA, 20 bp, synthetic construct
  source 1..20: mol_type = other DNA
ataaaaagcatccacactgg

SEQ ID NO: 103326 - DNA, 20 bp, synthetic construct
  source 1..20: mol_type = other DNA
aataaaaagcatccacactg

SEQ ID NO: 103327 - DNA, 20 bp, synthetic construct
  source 1..20: mol_type = other DNA
aaataaaaagcatccacact

SEQ ID NO: 103328 - DNA, 20 bp, synthetic construct
  source 1..20: mol_type = other DNA
gaaataaaaagcatccacac

SEQ ID NO: 103329 - DNA, 20 bp, synthetic construct
  source 1..20: mol_type = other DNA
agaaataaaaagcatccaca

SEQ ID NO: 103330 - DNA, 20 bp, synthetic construct
  source 1..20: mol_type = other DNA
aagaaataaaaagcatccac

SEQ ID NO: 103331 - DNA, 20 bp, synthetic construct
  source 1..20: mol_type = other DNA
aaagaaataaaaagcatcca

SEQ ID NO: 103332 - DNA, 20 bp, synthetic construct
  source 1..20: mol_type = other DNA
gaaagaaataaaaagcatcc

SEQ ID NO: 103333 - DNA, 20 bp, synthetic construct
  source 1..20: mol_type = other DNA
agaaagaaataaaaagcatc

SEQ ID NO: 103334 - DNA, 20 bp, synthetic construct
  source 1..20: mol_type = other DNA
cagaaagaaataaaaagcat

SEQ ID NO: 103335 - DNA, 20 bp, synthetic construct
  source 1..20: mol_type = other DNA
acagaaagaaataaaaagca

SEQ ID NO: 103336 - DNA, 20 bp, synthetic construct
  source 1..20: mol_type = other DNA
aacagaaagaaataaaaagc

SEQ ID NO: 103337 - DNA, 20 bp, synthetic construct
  source 1..20: mol_type = other DNA
caacagaaagaaataaaaag

SEQ ID NO: 103338 - DNA, 20 bp, synthetic construct
  source 1..20: mol_type = other DNA
acaacagaaagaaataaaaa

SEQ ID NO: 103339 - DNA, 20 bp, synthetic construct
  source 1..20: mol_type = other DNA
gacaacagaaagaaataaaa

SEQ ID NO: 103340 - DNA, 20 bp, synthetic construct
  source 1..20: mol_type = other DNA
agacaacagaaagaaataaa

SEQ ID NO: 103341 - DNA, 20 bp, synthetic construct
  source 1..20: mol_type = other DNA
cagacaacagaaagaaataa

SEQ ID NO: 103342 - DNA, 20 bp, synthetic construct
  source 1..20: mol_type = other DNA
tcagacaacagaaagaaata

SEQ ID NO: 103343 - DNA, 20 bp, synthetic construct
  source 1..20: mol_type = other DNA
atcagacaacagaaagaaat

SEQ ID NO: 103344 - DNA, 20 bp, synthetic construct
  source 1..20: mol_type = other DNA
aatcagacaacagaaagaaa

SEQ ID NO: 103345 - DNA, 20 bp, synthetic construct
  source 1..20: mol_type = other DNA
caatcagacaacagaaagaa

SEQ ID NO: 103346 - DNA, 20 bp, synthetic construct
  source 1..20: mol_type = other DNA
gcaatcagacaacagaaaga

SEQ ID NO: 103347 - DNA, 20 bp, synthetic construct
  source 1..20: mol_type = other DNA
agcaatcagacaacagaaag

SEQ ID NO: 103348 - DNA, 20 bp, synthetic construct
  source 1..20: mol_type = other DNA
gagcaatcagacaacagaaa

SEQ ID NO: 103349 - DNA, 20 bp, synthetic construct
  source 1..20: mol_type = other DNA
ggagcaatcagacaacagaa

SEQ ID NO: 103350 - DNA, 20 bp, synthetic construct
  source 1..20: mol_type = other DNA
tggagcaatcagacaacaga

SEQ ID NO: 103351 - DNA, 20 bp, synthetic construct
  source 1..20: mol_type = other DNA
ttggagcaatcagacaacag

SEQ ID NO: 103352 - DNA, 20 bp, synthetic construct
  source 1..20: mol_type = other DNA
attggagcaatcagacaaca

SEQ ID NO: 103353 - DNA, 20 bp, synthetic construct
  source 1..20: mol_type = other DNA
aattggagcaatcagacaac

SEQ ID NO: 103354 - DNA, 20 bp, synthetic construct
  source 1..20: mol_type = other DNA
taattggagcaatcagacaa

SEQ ID NO: 103355 - DNA, 20 bp, synthetic construct
  source 1..20: mol_type = other DNA
ctaattggagcaatcagaca

SEQ ID NO: 103356 - DNA, 20 bp, synthetic construct
  source 1..20: mol_type = other DNA
cctaattggagcaatcagac

SEQ ID NO: 103357 - DNA, 20 bp, synthetic construct
  source 1..20: mol_type = other DNA
tcctaattggagcaatcaga

SEQ ID NO: 103358 - DNA, 20 bp, synthetic construct
  source 1..20: mol_type = other DNA
gtcctaattggagcaatcag

SEQ ID NO: 103359 - DNA, 20 bp, synthetic construct
  source 1..20: mol_type = other DNA
agtcctaattggagcaatca

SEQ ID NO: 103360 - DNA, 20 bp, synthetic construct
  source 1..20: mol_type = other DNA
aagtcctaattggagcaatc

SEQ ID NO: 103361 - DNA, 20 bp, synthetic construct
  source 1..20: mol_type = other DNA
gaagtcctaattggagcaat

SEQ ID NO: 103362 - DNA, 20 bp, synthetic construct
  source 1..20: mol_type = other DNA
ggaagtcctaattggagcaa

SEQ ID NO: 103363 - DNA, 20 bp, synthetic construct
  source 1..20: mol_type = other DNA
cggaagtcctaattggagca

SEQ ID NO: 103364 - DNA, 20 bp, synthetic construct
  source 1..20: mol_type = other DNA
tcggaagtcctaattggagc

SEQ ID NO: 103365 - DNA, 20 bp, synthetic construct
  source 1..20: mol_type = other DNA
ctcggaagtcctaattggag

SEQ ID NO: 103366 - DNA, 20 bp, synthetic construct
  source 1..20: mol_type = other DNA
actcggaagtcctaattgga

SEQ ID NO: 103367 - DNA, 20 bp, synthetic construct
  source 1..20: mol_type = other DNA
tactcggaagtcctaattgg

SEQ ID NO: 103368 - DNA, 20 bp, synthetic construct
  source 1..20: mol_type = other DNA
atactcggaagtcctaattg

SEQ ID NO: 103369 - DNA, 20 bp, synthetic construct
  source 1..20: mol_type = other DNA
aatactcggaagtcctaatt

SEQ ID NO: 103370 - DNA, 20 bp, synthetic construct
  source 1..20: mol_type = other DNA
taatactcggaagtcctaat

SEQ ID NO: 103371 - DNA, 20 bp, synthetic construct
  source 1..20: mol_type = other DNA
ataatactcggaagtcctaa

SEQ ID NO: 103372 - DNA, 20 bp, synthetic construct
  source 1..20: mol_type = other DNA
cataatactcggaagtccta

SEQ ID NO: 103373 - DNA, 20 bp, synthetic construct
  source 1..20: mol_type = other DNA
acataatactcggaagtcct

SEQ ID NO: 103374 - DNA, 20 bp, synthetic construct
  source 1..20: mol_type = other DNA
aacataatactcggaagtcc

SEQ ID NO: 103375 - DNA, 20 bp, synthetic construct
  source 1..20: mol_type = other DNA
caacataatactcggaagtc

SEQ ID NO: 103376 - DNA, 20 bp, synthetic construct
  source 1..20: mol_type = other DNA
tcaacataatactcggaagt

SEQ ID NO: 103377 - DNA, 20 bp, synthetic construct
  source 1..20: mol_type = other DNA
ttcaacataatactcggaag

SEQ ID NO: 103378 - DNA, 20 bp, synthetic construct
  source 1..20: mol_type = other DNA
attcaacataatactcggaa

SEQ ID NO: 103379 - DNA, 20 bp, synthetic construct
  source 1..20: mol_type = other DNA
tattcaacataatactcgga

SEQ ID NO: 103380 - DNA, 20 bp, synthetic construct
  source 1..20: mol_type = other DNA
ttattcaacataatactcgg

SEQ ID NO: 103381 - DNA, 20 bp, synthetic construct
  source 1..20: mol_type = other DNA
gttattcaacataatactcg

SEQ ID NO: 103382 - DNA, 20 bp, synthetic construct
  source 1..20: mol_type = other DNA
tgttattcaacataatactc

SEQ ID NO: 103383 - DNA, 20 bp, synthetic construct
  source 1..20: mol_type = other DNA
ttgttattcaacataatact

SEQ ID NO: 103384 - DNA, 20 bp, synthetic construct
  source 1..20: mol_type = other DNA
attgttattcaacataatac

SEQ ID NO: 103385 - DNA, 20 bp, synthetic construct
  source 1..20: mol_type = other DNA
cattgttattcaacataata

SEQ ID NO: 103386 - DNA, 20 bp, synthetic construct
  source 1..20: mol_type = other DNA
ccattgttattcaacataat

SEQ ID NO: 103387 - DNA, 20 bp, synthetic construct
  source 1..20: mol_type = other DNA
accattgttattcaacataa

SEQ ID NO: 103388 - DNA, 20 bp, synthetic construct
  source 1..20: mol_type = other DNA
caccattgttattcaacata

SEQ ID NO: 103389 - DNA, 20 bp, synthetic construct
  source 1..20: mol_type = other DNA
tcaccattgttattcaacat

SEQ ID NO: 103390 - DNA, 20 bp, synthetic construct
  source 1..20: mol_type = other DNA
ttcaccattgttattcaaca

SEQ ID NO: 103391 - DNA, 20 bp, synthetic construct
  source 1..20: mol_type = other DNA
tttcaccattgttattcaac

SEQ ID NO: 103392 - DNA, 20 bp, synthetic construct
  source 1..20: mol_type = other DNA
ctttcaccattgttattcaa

SEQ ID NO: 103393 - DNA, 20 bp, synthetic construct
  source 1..20: mol_type = other DNA
actttcaccattgttattca

SEQ ID NO: 103394 - DNA, 20 bp, synthetic construct
  source 1..20: mol_type = other DNA
cactttcaccattgttattc

SEQ ID NO: 103395 - DNA, 20 bp, synthetic construct
  source 1..20: mol_type = other DNA
ccactttcaccattgttatt

SEQ ID NO: 103396 - DNA, 20 bp, synthetic construct
  source 1..20: mol_type = other DNA
cccactttcaccattgttat

SEQ ID NO: 103397 - DNA, 20 bp, synthetic construct
  source 1..20: mol_type = other DNA
gcccactttcaccattgtta

SEQ ID NO: 103398 - DNA, 20 bp, synthetic construct
  source 1..20: mol_type = other DNA
tgcccactttcaccattgtt

SEQ ID NO: 103399 - DNA, 20 bp, synthetic construct
  source 1..20: mol_type = other DNA
atgcccactttcaccattgt

SEQ ID NO: 103400 - DNA, 20 bp, synthetic construct
  source 1..20: mol_type = other DNA
gatgcccactttcaccattg

SEQ ID NO: 103401 - DNA, 20 bp, synthetic construct
  source 1..20: mol_type = other DNA
ggatgcccactttcaccatt

SEQ ID NO: 103402 - DNA, 20 bp, synthetic construct
  source 1..20: mol_type = other DNA
aggatgcccactttcaccat

SEQ ID NO: 103403 - DNA, 20 bp, synthetic construct
  source 1..20: mol_type = other DNA
aaggatgcccactttcacca

SEQ ID NO: 103404 - DNA, 20 bp, synthetic construct
  source 1..20: mol_type = other DNA
caaggatgcccactttcacc

SEQ ID NO: 103405 - DNA, 20 bp, synthetic construct
  source 1..20: mol_type = other DNA
acaaggatgcccactttcac

SEQ ID NO: 103406 - DNA, 20 bp, synthetic construct
  source 1..20: mol_type = other DNA
gacaaggatgcccactttca

SEQ ID NO: 103407 - DNA, 20 bp, synthetic construct
  source 1..20: mol_type = other DNA
agacaaggatgcccactttc

SEQ ID NO: 103408 - DNA, 20 bp, synthetic construct
  source 1..20: mol_type = other DNA
aagacaaggatgcccacttt

SEQ ID NO: 103409 - DNA, 20 bp, synthetic construct
  source 1..20: mol_type = other DNA
caagacaaggatgcccactt

SEQ ID NO: 103410 - DNA, 20 bp, synthetic construct
  source 1..20: mol_type = other DNA
acaagacaaggatgcccact

SEQ ID NO: 103411 - DNA, 20 bp, synthetic construct
  source 1..20: mol_type = other DNA
aacaagacaaggatgcccac

SEQ ID NO: 103412 - DNA, 20 bp, synthetic construct
  source 1..20: mol_type = other DNA
gaacaagacaaggatgccca

SEQ ID NO: 103413 - DNA, 20 bp, synthetic construct
  source 1..20: mol_type = other DNA
ggaacaagacaaggatgccc

SEQ ID NO: 103414 - DNA, 20 bp, synthetic construct
  source 1..20: mol_type = other DNA
tggaacaagacaaggatgcc

SEQ ID NO: 103415 - DNA, 20 bp, synthetic construct
  source 1..20: mol_type = other DNA
ctggaacaagacaaggatgc

SEQ ID NO: 103416 - DNA, 20 bp, synthetic construct
  source 1..20: mol_type = other DNA
tctggaacaagacaaggatg

SEQ ID NO: 103417 - DNA, 20 bp, synthetic construct
  source 1..20: mol_type = other DNA
atctggaacaagacaaggat

SEQ ID NO: 103418 - DNA, 20 bp, synthetic construct
  source 1..20: mol_type = other DNA
gatctggaacaagacaagga

SEQ ID NO: 103419 - DNA, 20 bp, synthetic construct
  source 1..20: mol_type = other DNA
agatctggaacaagacaagg

SEQ ID NO: 103420 - DNA, 20 bp, synthetic construct
  source 1..20: mol_type = other DNA
aagatctggaacaagacaag

SEQ ID NO: 103421 - DNA, 20 bp, synthetic construct
  source 1..20: mol_type = other DNA
taagatctggaacaagacaa

SEQ ID NO: 103422 - DNA, 20 bp, synthetic construct
  source 1..20: mol_type = other DNA
ctaagatctggaacaagaca

SEQ ID NO: 103423 - DNA, 20 bp, synthetic construct
  source 1..20: mol_type = other DNA
tctaagatctggaacaagac

SEQ ID NO: 103424 - DNA, 20 bp, synthetic construct
  source 1..20: mol_type = other DNA
ctctaagatctggaacaaga

SEQ ID NO: 103425 - DNA, 20 bp, synthetic construct
  source 1..20: mol_type = other DNA
cctctaagatctggaacaag

SEQ ID NO: 103426 - DNA, 20 bp, synthetic construct
  source 1..20: mol_type = other DNA
tcctctaagatctggaacaa

SEQ ID NO: 103427 - DNA, 20 bp, synthetic construct
  source 1..20: mol_type = other DNA
ttcctctaagatctggaaca

SEQ ID NO: 103428 - DNA, 20 bp, synthetic construct
  source 1..20: mol_type = other DNA
tttcctctaagatctggaac

SEQ ID NO: 103429 - DNA, 20 bp, synthetic construct
  source 1..20: mol_type = other DNA
ctttcctctaagatctggaa

SEQ ID NO: 103430 - DNA, 20 bp, synthetic construct
  source 1..20: mol_type = other DNA
gctttcctctaagatctgga

SEQ ID NO: 103431 - DNA, 20 bp, synthetic construct
  source 1..20: mol_type = other DNA
ggctttcctctaagatctgg

SEQ ID NO: 103432 - DNA, 20 bp, synthetic construct
  source 1..20: mol_type = other DNA
aggctttcctctaagatctg

SEQ ID NO: 103433 - DNA, 20 bp, synthetic construct
  source 1..20: mol_type = other DNA
aaggctttcctctaagatct

SEQ ID NO: 103434 - DNA, 20 bp, synthetic construct
  source 1..20: mol_type = other DNA
aaaggctttcctctaagatc

SEQ ID NO: 103435 - DNA, 20 bp, synthetic construct
  source 1..20: mol_type = other DNA
gaaaggctttcctctaagat

SEQ ID NO: 103436 - DNA, 20 bp, synthetic construct
  source 1..20: mol_type = other DNA
tgaaaggctttcctctaaga

SEQ ID NO: 103437 - DNA, 20 bp, synthetic construct
  source 1..20: mol_type = other DNA
ctgaaaggctttcctctaag

SEQ ID NO: 103438 - DNA, 20 bp, synthetic construct
  source 1..20: mol_type = other DNA
actgaaaggctttcctctaa

SEQ ID NO: 103439 - DNA, 20 bp, synthetic construct
  source 1..20: mol_type = other DNA
aactgaaaggctttcctcta

SEQ ID NO: 103440 - DNA, 20 bp, synthetic construct
  source 1..20: mol_type = other DNA
aaactgaaaggctttcctct

SEQ ID NO: 103441 - DNA, 20 bp, synthetic construct
  source 1..20: mol_type = other DNA
aaaactgaaaggctttcctc

SEQ ID NO: 103442 - DNA, 20 bp, synthetic construct
  source 1..20: mol_type = other DNA
aaaaactgaaaggctttcct

SEQ ID NO: 103443 - DNA, 20 bp, synthetic construct
  source 1..20: mol_type = other DNA
gaaaaactgaaaggctttcc

SEQ ID NO: 103444 - DNA, 20 bp, synthetic construct
  source 1..20: mol_type = other DNA
ggaaaaactgaaaggctttc

SEQ ID NO: 103445 - DNA, 20 bp, synthetic construct
  source 1..20: mol_type = other DNA
gggaaaaactgaaaggcttt

SEQ ID NO: 103446 - DNA, 20 bp, synthetic construct
  source 1..20: mol_type = other DNA
agggaaaaactgaaaggctt

SEQ ID NO: 103447 - DNA, 20 bp, synthetic construct
  source 1..20: mol_type = other DNA
aagggaaaaactgaaaggct

SEQ ID NO: 103448 - DNA, 20 bp, synthetic construct
  source 1..20: mol_type = other DNA
aaagggaaaaactgaaaggc

SEQ ID NO: 103449 - DNA, 20 bp, synthetic construct
  source 1..20: mol_type = other DNA
aaaagggaaaaactgaaagg

SEQ ID NO: 103450 - DNA, 20 bp, synthetic construct
  source 1..20: mol_type = other DNA
gaaaagggaaaaactgaaag

SEQ ID NO: 103451 - DNA, 20 bp, synthetic construct
  source 1..20: mol_type = other DNA
tgaaaagggaaaaactgaaa

SEQ ID NO: 103452 - DNA, 20 bp, synthetic construct
  source 1..20: mol_type = other DNA
ctgaaaagggaaaaactgaa

SEQ ID NO: 103453 - DNA, 20 bp, synthetic construct
  source 1..20: mol_type = other DNA
actgaaaagggaaaaactga

SEQ ID NO: 103454 - DNA, 20 bp, synthetic construct
  source 1..20: mol_type = other DNA
tactgaaaagggaaaaactg

SEQ ID NO: 103455 - DNA, 20 bp, synthetic construct
  source 1..20: mol_type = other DNA
atactgaaaagggaaaaact

SEQ ID NO: 103456 - DNA, 20 bp, synthetic construct
  source 1..20: mol_type = other DNA
catactgaaaagggaaaaac

SEQ ID NO: 103457 - DNA, 20 bp, synthetic construct
  source 1..20: mol_type = other DNA
ccatactgaaaagggaaaaa

SEQ ID NO: 103458 - DNA, 20 bp, synthetic construct
  source 1..20: mol_type = other DNA
accatactgaaaagggaaaa

SEQ ID NO: 103459 - DNA, 20 bp, synthetic construct
  source 1..20: mol_type = other DNA
taccatactgaaaagggaaa

SEQ ID NO: 103460 - DNA, 20 bp, synthetic construct
  source 1..20: mol_type = other DNA
gtaccatactgaaaagggaa

SEQ ID NO: 103461 - DNA, 20 bp, synthetic construct
  source 1..20: mol_type = other DNA
agtaccatactgaaaaggga

SEQ ID NO: 103462 - DNA, 20 bp, synthetic construct
  source 1..20: mol_type = other DNA
tagtaccatactgaaaaggg

SEQ ID NO: 103463 - DNA, 20 bp, synthetic construct
  source 1..20: mol_type = other DNA
ctagtaccatactgaaaagg

SEQ ID NO: 103464 - DNA, 20 bp, synthetic construct
  source 1..20: mol_type = other DNA
actagtaccatactgaaaag

SEQ ID NO: 103465 - DNA, 20 bp, synthetic construct
  source 1..20: mol_type = other DNA
aactagtaccatactgaaaa

SEQ ID NO: 103466 - DNA, 20 bp, synthetic construct
  source 1..20: mol_type = other DNA
taactagtaccatactgaaa

SEQ ID NO: 103467 - DNA, 20 bp, synthetic construct
  source 1..20: mol_type = other DNA
ataactagtaccatactgaa

SEQ ID NO: 103468 - DNA, 20 bp, synthetic construct
  source 1..20: mol_type = other DNA
cataactagtaccatactga

SEQ ID NO: 103469 - DNA, 20 bp, synthetic construct
  source 1..20: mol_type = other DNA
ccataactagtaccatactg

SEQ ID NO: 103470 - DNA, 20 bp, synthetic construct
  source 1..20: mol_type = other DNA
cccataactagtaccatact

SEQ ID NO: 103471 - DNA, 20 bp, synthetic construct
  source 1..20: mol_type = other DNA
acccataactagtaccatac

SEQ ID NO: 103472 - DNA, 20 bp, synthetic construct
  source 1..20: mol_type = other DNA
gacccataactagtaccata

SEQ ID NO: 103473 - DNA, 20 bp, synthetic construct
  source 1..20: mol_type = other DNA
agacccataactagtaccat

SEQ ID NO: 103474 - DNA, 20 bp, synthetic construct
  source 1..20: mol_type = other DNA
cagacccataactagtacca

SEQ ID NO: 103475 - DNA, 20 bp, synthetic construct
  source 1..20: mol_type = other DNA
acagacccataactagtacc

SEQ ID NO: 103476 - DNA, 20 bp, synthetic construct
  source 1..20: mol_type = other DNA
gacagacccataactagtac

SEQ ID NO: 103477 - DNA, 20 bp, synthetic construct
  source 1..20: mol_type = other DNA
tgacagacccataactagta

SEQ ID NO: 103478 - DNA, 20 bp, synthetic construct
  source 1..20: mol_type = other DNA
atgacagacccataactagt

SEQ ID NO: 103479 - DNA, 20 bp, synthetic construct
  source 1..20: mol_type = other DNA
tatgacagacccataactag

SEQ ID NO: 103480 - DNA, 20 bp, synthetic construct
  source 1..20: mol_type = other DNA
atatgacagacccataacta

SEQ ID NO: 103481 - DNA, 20 bp, synthetic construct
  source 1..20: mol_type = other DNA
tatatgacagacccataact

SEQ ID NO: 103482 - DNA, 20 bp, synthetic construct
  source 1..20: mol_type = other DNA
atatatgacagacccataac

SEQ ID NO: 103483 - DNA, 20 bp, synthetic construct
  source 1..20: mol_type = other DNA
catatatgacagacccataa

SEQ ID NO: 103484 - DNA, 20 bp, synthetic construct
  source 1..20: mol_type = other DNA
ccatatatgacagacccata

SEQ ID NO: 103485 - DNA, 20 bp, synthetic construct
  source 1..20: mol_type = other DNA
gccatatatgacagacccat

SEQ ID NO: 103486 - DNA, 20 bp, synthetic construct
  source 1..20: mol_type = other DNA
agccatatatgacagaccca

SEQ ID NO: 103487 - DNA, 20 bp, synthetic construct
  source 1..20: mol_type = other DNA
aagccatatatgacagaccc

SEQ ID NO: 103488 - DNA, 20 bp, synthetic construct
  source 1..20: mol_type = other DNA
gaagccatatatgacagacc

SEQ ID NO: 103489 - DNA, 20 bp, synthetic construct
  source 1..20: mol_type = other DNA
agaagccatatatgacagac

SEQ ID NO: 103490 - DNA, 20 bp, synthetic construct
  source 1..20: mol_type = other DNA
cagaagccatatatgacaga

SEQ ID NO: 103491 - DNA, 20 bp, synthetic construct
  source 1..20: mol_type = other DNA
acagaagccatatatgacag

SEQ ID NO: 103492 - DNA, 20 bp, synthetic construct
  source 1..20: mol_type = other DNA
aacagaagccatatatgaca

SEQ ID NO: 103493 - DNA, 20 bp, synthetic construct
  source 1..20: mol_type = other DNA
aaacagaagccatatatgac

SEQ ID NO: 103494 - DNA, 20 bp, synthetic construct
  source 1..20: mol_type = other DNA
aaaacagaagccatatatga

SEQ ID NO: 103495 - DNA, 20 bp, synthetic construct
  source 1..20: mol_type = other DNA
caaaacagaagccatatatg

SEQ ID NO: 103496 - DNA, 20 bp, synthetic construct
  source 1..20: mol_type = other DNA
acaaaacagaagccatatat

SEQ ID NO: 103497 - DNA, 20 bp, synthetic construct
  source 1..20: mol_type = other DNA
aacaaaacagaagccatata

SEQ ID NO: 103498 - DNA, 20 bp, synthetic construct
  source 1..20: mol_type = other DNA
caacaaaacagaagccatat

SEQ ID NO: 103499 - DNA, 20 bp, synthetic construct
  source 1..20: mol_type = other DNA
tcaacaaaacagaagccata

SEQ ID NO: 103500 - DNA, 20 bp, synthetic construct
  source 1..20: mol_type = other DNA
ctcaacaaaacagaagccat

SEQ ID NO: 103501 - DNA, 20 bp, synthetic construct
  source 1..20: mol_type = other DNA
cctcaacaaaacagaagcca

SEQ ID NO: 103502 - DNA, 20 bp, synthetic construct
  source 1..20: mol_type = other DNA
acctcaacaaaacagaagcc

SEQ ID NO: 103503 - DNA, 20 bp, synthetic construct
  source 1..20: mol_type = other DNA
tacctcaacaaaacagaagc

SEQ ID NO: 103504 - DNA, 20 bp, synthetic construct
  source 1..20: mol_type = other DNA
atacctcaacaaaacagaag

SEQ ID NO: 103505 - DNA, 20 bp, synthetic construct
  source 1..20: mol_type = other DNA
tatacctcaacaaaacagaa

SEQ ID NO: 103506 - DNA, 20 bp, synthetic construct
  source 1..20: mol_type = other DNA
atatacctcaacaaaacaga

SEQ ID NO: 103507 - DNA, 20 bp, synthetic construct
  source 1..20: mol_type = other DNA
aatatacctcaacaaaacag

SEQ ID NO: 103508 - DNA, 20 bp, synthetic construct
  source 1..20: mol_type = other DNA
gaatatacctcaacaaaaca

SEQ ID NO: 103509 - DNA, 20 bp, synthetic construct
  source 1..20: mol_type = other DNA
ggaatatacctcaacaaaac

SEQ ID NO: 103510 - DNA, 20 bp, synthetic construct
  source 1..20: mol_type = other DNA
aggaatatacctcaacaaaa

SEQ ID NO: 103511 - DNA, 20 bp, synthetic construct
  source 1..20: mol_type = other DNA
aaggaatatacctcaacaaa

SEQ ID NO: 103512 - DNA, 20 bp, synthetic construct
  source 1..20: mol_type = other DNA
gaaggaatatacctcaacaa

SEQ ID NO: 103513 - DNA, 20 bp, synthetic construct
  source 1..20: mol_type = other DNA
agaaggaatatacctcaaca

SEQ ID NO: 103514 - DNA, 20 bp, synthetic construct
  source 1..20: mol_type = other DNA
tagaaggaatatacctcaac

SEQ ID NO: 103515 - DNA, 20 bp, synthetic construct
  source 1..20: mol_type = other DNA
atagaaggaatatacctcaa

SEQ ID NO: 103516 - DNA, 20 bp, synthetic construct
  source 1..20: mol_type = other DNA
tatagaaggaatatacctca

SEQ ID NO: 103517 - DNA, 20 bp, synthetic construct
  source 1..20: mol_type = other DNA
gtatagaaggaatatacctc

SEQ ID NO: 103518 - DNA, 20 bp, synthetic construct
  source 1..20: mol_type = other DNA
ggtatagaaggaatatacct

SEQ ID NO: 103519 - DNA, 20 bp, synthetic construct
  source 1..20: mol_type = other DNA
gggtatagaaggaatatacc

SEQ ID NO: 103520 - DNA, 20 bp, synthetic construct
  source 1..20: mol_type = other DNA
tgggtatagaaggaatatac

SEQ ID NO: 103521 - DNA, 20 bp, synthetic construct
  source 1..20: mol_type = other DNA
ctgggtatagaaggaatata

SEQ ID NO: 103522 - DNA, 20 bp, synthetic construct
  source 1..20: mol_type = other DNA
actgggtatagaaggaatat

SEQ ID NO: 103523 - DNA, 20 bp, synthetic construct
  source 1..20: mol_type = other DNA
aactgggtatagaaggaata

SEQ ID NO: 103524 - DNA, 20 bp, synthetic construct
  source 1..20: mol_type = other DNA
gaactgggtatagaaggaat

SEQ ID NO: 103525 - DNA, 20 bp, synthetic construct
  source 1..20: mol_type = other DNA
agaactgggtatagaaggaa

SEQ ID NO: 103526 - DNA, 20 bp, synthetic construct
  source 1..20: mol_type = other DNA
aagaactgggtatagaagga

SEQ ID NO: 103527 - DNA, 20 bp, synthetic construct
  source 1..20: mol_type = other DNA
aaagaactgggtatagaagg

SEQ ID NO: 103528 - DNA, 20 bp, synthetic construct
  source 1..20: mol_type = other DNA
caaagaactgggtatagaag

SEQ ID NO: 103529 - DNA, 20 bp, synthetic construct
  source 1..20: mol_type = other DNA
ccaaagaactgggtatagaa

SEQ ID NO: 103530 - DNA, 20 bp, synthetic construct
  source 1..20: mol_type = other DNA
cccaaagaactgggtataga

SEQ ID NO: 103531 - DNA, 20 bp, synthetic construct
  source 1..20: mol_type = other DNA
ccccaaagaactgggtatag

SEQ ID NO: 103532 - DNA, 20 bp, synthetic construct
  source 1..20: mol_type = other DNA
accccaaagaactgggtata

SEQ ID NO: 103533 - DNA, 20 bp, synthetic construct
  source 1..20: mol_type = other DNA
aaccccaaagaactgggtat

SEQ ID NO: 103534 - DNA, 20 bp, synthetic construct
  source 1..20: mol_type = other DNA
aaaccccaaagaactgggta

SEQ ID NO: 103535 - DNA, 20 bp, synthetic construct
  source 1..20: mol_type = other DNA
aaaaccccaaagaactgggt

SEQ ID NO: 103536 - DNA, 20 bp, synthetic construct
  source 1..20: mol_type = other DNA
aaaaaccccaaagaactggg

SEQ ID NO: 103537 - DNA, 20 bp, synthetic construct
  source 1..20: mol_type = other DNA
aaaaaaccccaaagaactgg

SEQ ID NO: 103538 - DNA, 20 bp, synthetic construct
  source 1..20: mol_type = other DNA
aaaaaaaccccaaagaactg

SEQ ID NO: 103539 - DNA, 20 bp, synthetic construct
  source 1..20: mol_type = other DNA
caaaaaaaccccaaagaact

SEQ ID NO: 103540 - DNA, 20 bp, synthetic construct
  source 1..20: mol_type = other DNA
acaaaaaaaccccaaagaac

SEQ ID NO: 103541 - DNA, 20 bp, synthetic construct
  source 1..20: mol_type = other DNA
aacaaaaaaaccccaaagaa

SEQ ID NO: 103542 - DNA, 20 bp, synthetic construct
  source 1..20: mol_type = other DNA
aaacaaaaaaaccccaaaga

SEQ ID NO: 103543 - DNA, 20 bp, synthetic construct
  source 1..20: mol_type = other DNA
caaacaaaaaaaccccaaag

SEQ ID NO: 103544 - DNA, 20 bp, synthetic construct
  source 1..20: mol_type = other DNA
acaaacaaaaaaaccccaaa

SEQ ID NO: 103545 - DNA, 20 bp, synthetic construct
  source 1..20: mol_type = other DNA
aacaaacaaaaaaaccccaa

SEQ ID NO: 103546 - DNA, 20 bp, synthetic construct
  source 1..20: mol_type = other DNA
aaacaaacaaaaaaacccca

SEQ ID NO: 103547 - DNA, 20 bp, synthetic construct
  source 1..20: mol_type = other DNA
caaacaaacaaaaaaacccc

SEQ ID NO: 103548 - DNA, 20 bp, synthetic construct
  source 1..20: mol_type = other DNA
acaaacaaacaaaaaaaccc

SEQ ID NO: 103549 - DNA, 20 bp, synthetic construct
  source 1..20: mol_type = other DNA
aacaaacaaacaaaaaaacc

SEQ ID NO: 103550 - DNA, 20 bp, synthetic construct
  source 1..20: mol_type = other DNA
aaacaaacaaacaaaaaaac

SEQ ID NO: 103551 - DNA, 20 bp, synthetic construct
  source 1..20: mol_type = other DNA
aaaacaaacaaacaaaaaaa

SEQ ID NO: 103552 - DNA, 20 bp, synthetic construct
  source 1..20: mol_type = other DNA
aaaaacaaacaaacaaaaaa

SEQ ID NO: 103553 - DNA, 20 bp, synthetic construct
  source 1..20: mol_type = other DNA
caaaaacaaacaaacaaaaa

SEQ ID NO: 103554 - DNA, 20 bp, synthetic construct
  source 1..20: mol_type = other DNA
tcaaaaacaaacaaacaaaa

SEQ ID NO: 103555 - DNA, 20 bp, synthetic construct
  source 1..20: mol_type = other DNA
ctcaaaaacaaacaaacaaa

SEQ ID NO: 103556 - DNA, 20 bp, synthetic construct
  source 1..20: mol_type = other DNA
tctcaaaaacaaacaaacaa

SEQ ID NO: 103557 - DNA, 20 bp, synthetic construct
  source 1..20: mol_type = other DNA
atctcaaaaacaaacaaaca

SEQ ID NO: 103558 - DNA, 20 bp, synthetic construct
  source 1..20: mol_type = other DNA
catctcaaaaacaaacaaac

SEQ ID NO: 103559 - DNA, 20 bp, synthetic construct
  source 1..20: mol_type = other DNA
ccatctcaaaaacaaacaaa

SEQ ID NO: 103560 - DNA, 20 bp, synthetic construct
  source 1..20: mol_type = other DNA
tccatctcaaaaacaaacaa

SEQ ID NO: 103561 - DNA, 20 bp, synthetic construct
  source 1..20: mol_type = other DNA
ctccatctcaaaaacaaaca

SEQ ID NO: 103562 - DNA, 20 bp, synthetic construct
  source 1..20: mol_type = other DNA
actccatctcaaaaacaaac

SEQ ID NO: 103563 - DNA, 20 bp, synthetic construct
  source 1..20: mol_type = other DNA
gactccatctcaaaaacaaa

SEQ ID NO: 103564 - DNA, 20 bp, synthetic construct
  source 1..20: mol_type = other DNA
agactccatctcaaaaacaa

SEQ ID NO: 103565 - DNA, 20 bp, synthetic construct
  source 1..20: mol_type = other DNA
gagactccatctcaaaaaca

SEQ ID NO: 103566 - DNA, 20 bp, synthetic construct
  source 1..20: mol_type = other DNA
tgagactccatctcaaaaac

SEQ ID NO: 103567 - DNA, 20 bp, synthetic construct
  source 1..20: mol_type = other DNA
gtgagactccatctcaaaaa

SEQ ID NO: 103568 - DNA, 20 bp, synthetic construct
  source 1..20: mol_type = other DNA
agtgagactccatctcaaaa

SEQ ID NO: 103569 - DNA, 20 bp, synthetic construct
  source 1..20: mol_type = other DNA
gagtgagactccatctcaaa

SEQ ID NO: 103570 - DNA, 20 bp, synthetic construct
  source 1..20: mol_type = other DNA
agagtgagactccatctcaa

SEQ ID NO: 103571 - DNA, 20 bp, synthetic construct
  source 1..20: mol_type = other DNA
cagagtgagactccatctca

SEQ ID NO: 103572 - DNA, 20 bp, synthetic construct
  source 1..20: mol_type = other DNA
acagagtgagactccatctc

SEQ ID NO: 103573 - DNA, 20 bp, synthetic construct
  source 1..20: mol_type = other DNA
gacagagtgagactccatct

SEQ ID NO: 103574 - DNA, 20 bp, synthetic construct
  source 1..20: mol_type = other DNA
tgacagagtgagactccatc

SEQ ID NO: 103575 - DNA, 20 bp, synthetic construct
  source 1..20: mol_type = other DNA
gtgacagagtgagactccat

SEQ ID NO: 103576 - DNA, 20 bp, synthetic construct
  source 1..20: mol_type = other DNA
ggtgacagagtgagactcca

SEQ ID NO: 103577 - DNA, 20 bp, synthetic construct
  source 1..20: mol_type = other DNA
gggtgacagagtgagactcc

SEQ ID NO: 103578 - DNA, 20 bp, synthetic construct
  source 1..20: mol_type = other DNA
tgggtgacagagtgagactc

SEQ ID NO: 103579 - DNA, 20 bp, synthetic construct
  source 1..20: mol_type = other DNA
ctgggtgacagagtgagact

SEQ ID NO: 103580 - DNA, 20 bp, synthetic construct
  source 1..20: mol_type = other DNA
cctgggtgacagagtgagac

SEQ ID NO: 103581 - DNA, 20 bp, synthetic construct
  source 1..20: mol_type = other DNA
gcctgggtgacagagtgaga

SEQ ID NO: 103582 - DNA, 20 bp, synthetic construct
  source 1..20: mol_type = other DNA
agcctgggtgacagagtgag

SEQ ID NO: 103583 - DNA, 20 bp, synthetic construct
  source 1..20: mol_type = other DNA
cagcctgggtgacagagtga

SEQ ID NO: 103584 - DNA, 20 bp, synthetic construct
  source 1..20: mol_type = other DNA
ccagcctgggtgacagagtg

SEQ ID NO: 103585 - DNA, 20 bp, synthetic construct
  source 1..20: mol_type = other DNA
tccagcctgggtgacagagt

SEQ ID NO: 103586 - DNA, 20 bp, synthetic construct
  source 1..20: mol_type = other DNA
ctccagcctgggtgacagag

SEQ ID NO: 103587 - DNA, 20 bp, synthetic construct
  source 1..20: mol_type = other DNA
actccagcctgggtgacaga

SEQ ID NO: 103588 - DNA, 20 bp, synthetic construct
  source 1..20: mol_type = other DNA
cactccagcctgggtgacag

SEQ ID NO: 103589 - DNA, 20 bp, synthetic construct
  source 1..20: mol_type = other DNA
gcactccagcctgggtgaca

SEQ ID NO: 103590 - DNA, 20 bp, synthetic construct
  source 1..20: mol_type = other DNA
tgcactccagcctgggtgac

SEQ ID NO: 103591 - DNA, 20 bp, synthetic construct
  source 1..20: mol_type = other DNA
ctgcactccagcctgggtga

SEQ ID NO: 103592 - DNA, 20 bp, synthetic construct
  source 1..20: mol_type = other DNA
actgcactccagcctgggtg

SEQ ID NO: 103593 - DNA, 20 bp, synthetic construct
  source 1..20: mol_type = other DNA
cactgcactccagcctgggt

SEQ ID NO: 103594 - DNA, 20 bp, synthetic construct
  source 1..20: mol_type = other DNA
ccactgcactccagcctggg

SEQ ID NO: 103595 - DNA, 20 bp, synthetic construct
  source 1..20: mol_type = other DNA
gccactgcactccagcctgg

SEQ ID NO: 103596 - DNA, 20 bp, synthetic construct
  source 1..20: mol_type = other DNA
cgccactgcactccagcctg

SEQ ID NO: 103597 - DNA, 20 bp, synthetic construct
  source 1..20: mol_type = other DNA
gcgccactgcactccagcct

SEQ ID NO: 103598 - DNA, 20 bp, synthetic construct
  source 1..20: mol_type = other DNA
tgcgccactgcactccagcc

SEQ ID NO: 103599 - DNA, 20 bp, synthetic construct
  source 1..20: mol_type = other DNA
ttgcgccactgcactccagc

SEQ ID NO: 103600 - DNA, 20 bp, synthetic construct
  source 1..20: mol_type = other DNA
attgcgccactgcactccag

SEQ ID NO: 103601 - DNA, 20 bp, synthetic construct
  source 1..20: mol_type = other DNA
cattgcgccactgcactcca

SEQ ID NO: 103602 - DNA, 20 bp, synthetic construct
  source 1..20: mol_type = other DNA
acattgcgccactgcactcc

SEQ ID NO: 103603 - DNA, 20 bp, synthetic construct
  source 1..20: mol_type = other DNA
aacattgcgccactgcactc

SEQ ID NO: 103604 - DNA, 20 bp, synthetic construct
  source 1..20: mol_type = other DNA
caacattgcgccactgcact

SEQ ID NO: 103605 - DNA, 20 bp, synthetic construct
  source 1..20: mol_type = other DNA
ccaacattgcgccactgcac

SEQ ID NO: 103606 - DNA, 20 bp, synthetic construct
  source 1..20: mol_type = other DNA
gccaacattgcgccactgca

SEQ ID NO: 103607 - DNA, 20 bp, synthetic construct
  source 1..20: mol_type = other DNA
agccaacattgcgccactgc

SEQ ID NO: 103608 - DNA, 20 bp, synthetic construct
  source 1..20: mol_type = other DNA
gagccaacattgcgccactg

SEQ ID NO: 103609 - DNA, 20 bp, synthetic construct
  source 1..20: mol_type = other DNA
tgagccaacattgcgccact

SEQ ID NO: 103610 - DNA, 20 bp, synthetic construct
  source 1..20: mol_type = other DNA
gtgagccaacattgcgccac

SEQ ID NO: 103611 - DNA, 20 bp, synthetic construct
  source 1..20: mol_type = other DNA
agtgagccaacattgcgcca

SEQ ID NO: 103612 - DNA, 20 bp, synthetic construct
  source 1..20: mol_type = other DNA
cagtgagccaacattgcgcc

SEQ ID NO: 103613 - DNA, 20 bp, synthetic construct
  source 1..20: mol_type = other DNA
gcagtgagccaacattgcgc

SEQ ID NO: 103614 - DNA, 20 bp, synthetic construct
  source 1..20: mol_type = other DNA
tgcagtgagccaacattgcg

SEQ ID NO: 103615 - DNA, 20 bp, synthetic construct
  source 1..20: mol_type = other DNA
ttgcagtgagccaacattgc

SEQ ID NO: 103616 - DNA, 20 bp, synthetic construct
  source 1..20: mol_type = other DNA
cttgcagtgagccaacattg

SEQ ID NO: 103617 - DNA, 20 bp, synthetic construct
  source 1..20: mol_type = other DNA
gcttgcagtgagccaacatt

SEQ ID NO: 103618 - DNA, 20 bp, synthetic construct
  source 1..20: mol_type = other DNA
agcttgcagtgagccaacat

SEQ ID NO: 103619 - DNA, 20 bp, synthetic construct
  source 1..20: mol_type = other DNA
gagcttgcagtgagccaaca

SEQ ID NO: 103620 - DNA, 20 bp, synthetic construct
  source 1..20: mol_type = other DNA
ggagcttgcagtgagccaac

SEQ ID NO: 103621 - DNA, 20 bp, synthetic construct
  source 1..20: mol_type = other DNA
tggagcttgcagtgagccaa

SEQ ID NO: 103622 - DNA, 20 bp, synthetic construct
  source 1..20: mol_type = other DNA
gtggagcttgcagtgagcca

SEQ ID NO: 103623 - DNA, 20 bp, synthetic construct
  source 1..20: mol_type = other DNA
ggtggagcttgcagtgagcc

SEQ ID NO: 103624 - DNA, 20 bp, synthetic construct
  source 1..20: mol_type = other DNA
aggtggagcttgcagtgagc

SEQ ID NO: 103625 - DNA, 20 bp, synthetic construct
  source 1..20: mol_type = other DNA
gaggtggagcttgcagtgag

SEQ ID NO: 103626 - DNA, 20 bp, synthetic construct
  source 1..20: mol_type = other DNA
ggaggtggagcttgcagtga

SEQ ID NO: 103627 - DNA, 20 bp, synthetic construct
  source 1..20: mol_type = other DNA
aggaggtggagcttgcagtg

SEQ ID NO: 103628 - DNA, 20 bp, synthetic construct
  source 1..20: mol_type = other DNA
caggaggtggagcttgcagt

SEQ ID NO: 103629 - DNA, 20 bp, synthetic construct
  source 1..20: mol_type = other DNA
ccaggaggtggagcttgcag

SEQ ID NO: 103630 - DNA, 20 bp, synthetic construct
  source 1..20: mol_type = other DNA
cccaggaggtggagcttgca

SEQ ID NO: 103631 - DNA, 20 bp, synthetic construct
  source 1..20: mol_type = other DNA
acccaggaggtggagcttgc

SEQ ID NO: 103632 - DNA, 20 bp, synthetic construct
  source 1..20: mol_type = other DNA
aacccaggaggtggagcttg

SEQ ID NO: 103633 - DNA, 20 bp, synthetic construct
  source 1..20: mol_type = other DNA
gaacccaggaggtggagctt

SEQ ID NO: 103634 - DNA, 20 bp, synthetic construct
  source 1..20: mol_type = other DNA
tgaacccaggaggtggagct

SEQ ID NO: 103635 - DNA, 20 bp, synthetic construct
  source 1..20: mol_type = other DNA
atgaacccaggaggtggagc

SEQ ID NO: 103636 - DNA, 20 bp, synthetic construct
  source 1..20: mol_type = other DNA
catgaacccaggaggtggag

SEQ ID NO: 103637 - DNA, 20 bp, synthetic construct
  source 1..20: mol_type = other DNA
gcatgaacccaggaggtgga

SEQ ID NO: 103638 - DNA, 20 bp, synthetic construct
  source 1..20: mol_type = other DNA
ggcatgaacccaggaggtgg

SEQ ID NO: 103639 - DNA, 20 bp, synthetic construct
  source 1..20: mol_type = other DNA
cggcatgaacccaggaggtg

SEQ ID NO: 103640 - DNA, 20 bp, synthetic construct
  source 1..20: mol_type = other DNA
acggcatgaacccaggaggt

SEQ ID NO: 103641 - DNA, 20 bp, synthetic construct
  source 1..20: mol_type = other DNA
aacggcatgaacccaggagg

SEQ ID NO: 103642 - DNA, 20 bp, synthetic construct
  source 1..20: mol_type = other DNA
gaacggcatgaacccaggag

SEQ ID NO: 103643 - DNA, 20 bp, synthetic construct
  source 1..20: mol_type = other DNA
agaacggcatgaacccagga

SEQ ID NO: 103644 - DNA, 20 bp, synthetic construct
  source 1..20: mol_type = other DNA
gagaacggcatgaacccagg

SEQ ID NO: 103645 - DNA, 20 bp, synthetic construct
  source 1..20: mol_type = other DNA
ggagaacggcatgaacccag

SEQ ID NO: 103646 - DNA, 20 bp, synthetic construct
  source 1..20: mol_type = other DNA
aggagaacggcatgaaccca

SEQ ID NO: 103647 - DNA, 20 bp, synthetic construct
  source 1..20: mol_type = other DNA
caggagaacggcatgaaccc

SEQ ID NO: 103648 - DNA, 20 bp, synthetic construct
  source 1..20: mol_type = other DNA
gcaggagaacggcatgaacc

SEQ ID NO: 103649 - DNA, 20 bp, synthetic construct
  source 1..20: mol_type = other DNA
ggcaggagaacggcatgaac

SEQ ID NO: 103650 - DNA, 20 bp, synthetic construct
  source 1..20: mol_type = other DNA
aggcaggagaacggcatgaa

SEQ ID NO: 103651 - DNA, 20 bp, synthetic construct
  source 1..20: mol_type = other DNA
gaggcaggagaacggcatga

SEQ ID NO: 103652 - DNA, 20 bp, synthetic construct
  source 1..20: mol_type = other DNA
tgaggcaggagaacggcatg

SEQ ID NO: 103653 - DNA, 20 bp, synthetic construct
  source 1..20: mol_type = other DNA
ctgaggcaggagaacggcat

SEQ ID NO: 103654 - DNA, 20 bp, synthetic construct
  source 1..20: mol_type = other DNA
gctgaggcaggagaacggca

SEQ ID NO: 103655 - DNA, 20 bp, synthetic construct
  source 1..20: mol_type = other DNA
ggctgaggcaggagaacggc

SEQ ID NO: 103656 - DNA, 20 bp, synthetic construct
  source 1..20: mol_type = other DNA
aggctgaggcaggagaacgg

SEQ ID NO: 103657 - DNA, 20 bp, synthetic construct
  source 1..20: mol_type = other DNA
gaggctgaggcaggagaacg

SEQ ID NO: 103658 - DNA, 20 bp, synthetic construct
  source 1..20: mol_type = other DNA
ggaggctgaggcaggagaac

SEQ ID NO: 103659 - DNA, 20 bp, synthetic construct
  source 1..20: mol_type = other DNA
gggaggctgaggcaggagaa

SEQ ID NO: 103660 - DNA, 20 bp, synthetic construct
  source 1..20: mol_type = other DNA
cgggaggctgaggcaggaga

SEQ ID NO: 103661 - DNA, 20 bp, synthetic construct
  source 1..20: mol_type = other DNA
tcgggaggctgaggcaggag

SEQ ID NO: 103662 - DNA, 20 bp, synthetic construct
  source 1..20: mol_type = other DNA
ctcgggaggctgaggcagga

SEQ ID NO: 103663 - DNA, 20 bp, synthetic construct
  source 1..20: mol_type = other DNA
actcgggaggctgaggcagg

SEQ ID NO: 103664 - DNA, 20 bp, synthetic construct
  source 1..20: mol_type = other DNA
tactcgggaggctgaggcag

SEQ ID NO: 103665 - DNA, 20 bp, synthetic construct
  source 1..20: mol_type = other DNA
ctactcgggaggctgaggca

SEQ ID NO: 103666 - DNA, 20 bp, synthetic construct
  source 1..20: mol_type = other DNA
gctactcgggaggctgaggc

SEQ ID NO: 103667 - DNA, 20 bp, synthetic construct
  source 1..20: mol_type = other DNA
agctactcgggaggctgagg

SEQ ID NO: 103668 - DNA, 20 bp, synthetic construct
  source 1..20: mol_type = other DNA
cagctactcgggaggctgag

SEQ ID NO: 103669 - DNA, 20 bp, synthetic construct
  source 1..20: mol_type = other DNA
ccagctactcgggaggctga

SEQ ID NO: 103670 - DNA, 20 bp, synthetic construct
  source 1..20: mol_type = other DNA
cccagctactcgggaggctg

SEQ ID NO: 103671 - DNA, 20 bp, synthetic construct
  source 1..20: mol_type = other DNA
tcccagctactcgggaggct

SEQ ID NO: 103672 - DNA, 20 bp, synthetic construct
  source 1..20: mol_type = other DNA
gtcccagctactcgggaggc

SEQ ID NO: 103673 - DNA, 20 bp, synthetic construct
  source 1..20: mol_type = other DNA
agtcccagctactcgggagg

SEQ ID NO: 103674 - DNA, 20 bp, synthetic construct
  source 1..20: mol_type = other DNA
tagtcccagctactcgggag

SEQ ID NO: 103675 - DNA, 20 bp, synthetic construct
  source 1..20: mol_type = other DNA
gtagtcccagctactcggga

SEQ ID NO: 103676 - DNA, 20 bp, synthetic construct
  source 1..20: mol_type = other DNA
tgtagtcccagctactcggg

SEQ ID NO: 103677 - DNA, 20 bp, synthetic construct
  source 1..20: mol_type = other DNA
ctgtagtcccagctactcgg

SEQ ID NO: 103678 - DNA, 20 bp, synthetic construct
  source 1..20: mol_type = other DNA
cctgtagtcccagctactcg

SEQ ID NO: 103679 - DNA, 20 bp, synthetic construct
  source 1..20: mol_type = other DNA
acctgtagtcccagctactc

SEQ ID NO: 103680 - DNA, 20 bp, synthetic construct
  source 1..20: mol_type = other DNA
cacctgtagtcccagctact

SEQ ID NO: 103681 - DNA, 20 bp, synthetic construct
  source 1..20: mol_type = other DNA
acacctgtagtcccagctac

SEQ ID NO: 103682 - DNA, 20 bp, synthetic construct
  source 1..20: mol_type = other DNA
gacacctgtagtcccagcta

SEQ ID NO: 103683 - DNA, 20 bp, synthetic construct
  source 1..20: mol_type = other DNA
ggacacctgtagtcccagct

SEQ ID NO: 103684 - DNA, 20 bp, synthetic construct
  source 1..20: mol_type = other DNA
cggacacctgtagtcccagc

SEQ ID NO: 103685 - DNA, 20 bp, synthetic construct
  source 1..20: mol_type = other DNA
gcggacacctgtagtcccag

SEQ ID NO: 103686 - DNA, 20 bp, synthetic construct
  source 1..20: mol_type = other DNA
agcggacacctgtagtccca

SEQ ID NO: 103687 - DNA, 20 bp, synthetic construct
  source 1..20: mol_type = other DNA
tagcggacacctgtagtccc

SEQ ID NO: 103688 - DNA, 20 bp, synthetic construct
  source 1..20: mol_type = other DNA
ttagcggacacctgtagtcc

SEQ ID NO: 103689 - DNA, 20 bp, synthetic construct
  source 1..20: mol_type = other DNA
gttagcggacacctgtagtc

SEQ ID NO: 103690 - DNA, 20 bp, synthetic construct
  source 1..20: mol_type = other DNA
tgttagcggacacctgtagt

SEQ ID NO: 103691 - DNA, 20 bp, synthetic construct
  source 1..20: mol_type = other DNA
gtgttagcggacacctgtag

SEQ ID NO: 103692 - DNA, 20 bp, synthetic construct
  source 1..20: mol_type = other DNA
cgtgttagcggacacctgta

SEQ ID NO: 103693 - DNA, 20 bp, synthetic construct
  source 1..20: mol_type = other DNA
gcgtgttagcggacacctgt

SEQ ID NO: 103694 - DNA, 20 bp, synthetic construct
  source 1..20: mol_type = other DNA
ggcgtgttagcggacacctg

SEQ ID NO: 103695 - DNA, 20 bp, synthetic construct
  source 1..20: mol_type = other DNA
gggcgtgttagcggacacct

SEQ ID NO: 103696 - DNA, 20 bp, synthetic construct
  source 1..20: mol_type = other DNA
cgggcgtgttagcggacacc

SEQ ID NO: 103697 - DNA, 20 bp, synthetic construct
  source 1..20: mol_type = other DNA
ccgggcgtgttagcggacac

SEQ ID NO: 103698 - DNA, 20 bp, synthetic construct
  source 1..20: mol_type = other DNA
gccgggcgtgttagcggaca

SEQ ID NO: 103699 - DNA, 20 bp, synthetic construct
  source 1..20: mol_type = other DNA
agccgggcgtgttagcggac

SEQ ID NO: 103700 - DNA, 20 bp, synthetic construct
  source 1..20: mol_type = other DNA
tagccgggcgtgttagcgga

SEQ ID NO: 103701 - DNA, 20 bp, synthetic construct
  source 1..20: mol_type = other DNA
ttagccgggcgtgttagcgg

SEQ ID NO: 103702 - DNA, 20 bp, synthetic construct
  source 1..20: mol_type = other DNA
attagccgggcgtgttagcg

SEQ ID NO: 103703 - DNA, 20 bp, synthetic construct
  source 1..20: mol_type = other DNA
aattagccgggcgtgttagc

SEQ ID NO: 103704 - DNA, 20 bp, synthetic construct
  source 1..20: mol_type = other DNA
aaattagccgggcgtgttag

SEQ ID NO: 103705 - DNA, 20 bp, synthetic construct
  source 1..20: mol_type = other DNA
aaaattagccgggcgtgtta

SEQ ID NO: 103706 - DNA, 20 bp, synthetic construct
  source 1..20: mol_type = other DNA
aaaaattagccgggcgtgtt

SEQ ID NO: 103707 - DNA, 20 bp, synthetic construct
  source 1..20: mol_type = other DNA
aaaaaattagccgggcgtgt

SEQ ID NO: 103708 - DNA, 20 bp, synthetic construct
  source 1..20: mol_type = other DNA
caaaaaattagccgggcgtg

SEQ ID NO: 103709 - DNA, 20 bp, synthetic construct
  source 1..20: mol_type = other DNA
acaaaaaattagccgggcgt

SEQ ID NO: 103710 - DNA, 20 bp, synthetic construct
  source 1..20: mol_type = other DNA
tacaaaaaattagccgggcg

SEQ ID NO: 103711 - DNA, 20 bp, synthetic construct
  source 1..20: mol_type = other DNA
atacaaaaaattagccgggc

SEQ ID NO: 103712 - DNA, 20 bp, synthetic construct
  source 1..20: mol_type = other DNA
aatacaaaaaattagccggg

SEQ ID NO: 103713 - DNA, 20 bp, synthetic construct
  source 1..20: mol_type = other DNA
aaatacaaaaaattagccgg

SEQ ID NO: 103714 - DNA, 20 bp, synthetic construct
  source 1..20: mol_type = other DNA
aaaatacaaaaaattagccg

SEQ ID NO: 103715 - DNA, 20 bp, synthetic construct
  source 1..20: mol_type = other DNA
aaaaatacaaaaaattagcc

SEQ ID NO: 103716 - DNA, 20 bp, synthetic construct
  source 1..20: mol_type = other DNA
taaaaatacaaaaaattagc

SEQ ID NO: 103717 - DNA, 20 bp, synthetic construct
  source 1..20: mol_type = other DNA
ctaaaaatacaaaaaattag

SEQ ID NO: 103718 - DNA, 20 bp, synthetic construct
  source 1..20: mol_type = other DNA
actaaaaatacaaaaaatta

SEQ ID NO: 103719 - DNA, 20 bp, synthetic construct
  source 1..20: mol_type = other DNA
tactaaaaatacaaaaaatt

SEQ ID NO: 103720 - DNA, 20 bp, synthetic construct
  source 1..20: mol_type = other DNA
ctactaaaaatacaaaaaat

SEQ ID NO: 103721 - DNA, 20 bp, synthetic construct
  source 1..20: mol_type = other DNA
tctactaaaaatacaaaaaa

SEQ ID NO: 103722 - DNA, 20 bp, synthetic construct
  source 1..20: mol_type = other DNA
ctctactaaaaatacaaaaa

SEQ ID NO: 103723 - DNA, 20 bp, synthetic construct
  source 1..20: mol_type = other DNA
tctctactaaaaatacaaaa

SEQ ID NO: 103724 - DNA, 20 bp, synthetic construct
  source 1..20: mol_type = other DNA
gtctctactaaaaatacaaa

SEQ ID NO: 103725 - DNA, 20 bp, synthetic construct
  source 1..20: mol_type = other DNA
cgtctctactaaaaatacaa

SEQ ID NO: 103726 - DNA, 20 bp, synthetic construct
  source 1..20: mol_type = other DNA
ccgtctctactaaaaataca

SEQ ID NO: 103727 - DNA, 20 bp, synthetic construct
  source 1..20: mol_type = other DNA
cccgtctctactaaaaatac

SEQ ID NO: 103728 - DNA, 20 bp, synthetic construct
  source 1..20: mol_type = other DNA
ccccgtctctactaaaaata

SEQ ID NO: 103729 - DNA, 20 bp, synthetic construct
  source 1..20: mol_type = other DNA
accccgtctctactaaaaat

SEQ ID NO: 103730 - DNA, 20 bp, synthetic construct
  source 1..20: mol_type = other DNA
aaccccgtctctactaaaaa

SEQ ID NO: 103731 - DNA, 20 bp, synthetic construct
  source 1..20: mol_type = other DNA
aaaccccgtctctactaaaa

SEQ ID NO: 103732 - DNA, 20 bp, synthetic construct
  source 1..20: mol_type = other DNA
gaaaccccgtctctactaaa

SEQ ID NO: 103733 - DNA, 20 bp, synthetic construct
  source 1..20: mol_type = other DNA
tgaaaccccgtctctactaa

SEQ ID NO: 103734 - DNA, 20 bp, synthetic construct
  source 1..20: mol_type = other DNA
gtgaaaccccgtctctacta

SEQ ID NO: 103735 - DNA, 20 bp, synthetic construct
  source 1..20: mol_type = other DNA
ggtgaaaccccgtctctact

SEQ ID NO: 103736 - DNA, 20 bp, synthetic construct
  source 1..20: mol_type = other DNA
cggtgaaaccccgtctctac

SEQ ID NO: 103737 - DNA, 20 bp, synthetic construct
  source 1..20: mol_type = other DNA
acggtgaaaccccgtctcta

SEQ ID NO: 103738 - DNA, 20 bp, synthetic construct
  source 1..20: mol_type = other DNA
cacggtgaaaccccgtctct

SEQ ID NO: 103739 - DNA, 20 bp, synthetic construct
  source 1..20: mol_type = other DNA
acacggtgaaaccccgtctc

SEQ ID NO: 103740 - DNA, 20 bp, synthetic construct
  source 1..20: mol_type = other DNA
aacacggtgaaaccccgtct

SEQ ID NO: 103741 - DNA, 20 bp, synthetic construct
  source 1..20: mol_type = other DNA
taacacggtgaaaccccgtc

SEQ ID NO: 103742 - DNA, 20 bp, synthetic construct
  source 1..20: mol_type = other DNA
ctaacacggtgaaaccccgt

SEQ ID NO: 103743 - DNA, 20 bp, synthetic construct
  source 1..20: mol_type = other DNA
gctaacacggtgaaaccccg

SEQ ID NO: 103744 - DNA, 20 bp, synthetic construct
  source 1..20: mol_type = other DNA
ggctaacacggtgaaacccc

SEQ ID NO: 103745 - DNA, 20 bp, synthetic construct
  source 1..20: mol_type = other DNA
tggctaacacggtgaaaccc

SEQ ID NO: 103746 - DNA, 20 bp, synthetic construct
  source 1..20: mol_type = other DNA
ctggctaacacggtgaaacc

SEQ ID NO: 103747 - DNA, 20 bp, synthetic construct
  source 1..20: mol_type = other DNA
cctggctaacacggtgaaac

SEQ ID NO: 103748 - DNA, 20 bp, synthetic construct
  source 1..20: mol_type = other DNA
tcctggctaacacggtgaaa

SEQ ID NO: 103749 - DNA, 20 bp, synthetic construct
  source 1..20: mol_type = other DNA
atcctggctaacacggtgaa

SEQ ID NO: 103750 - DNA, 20 bp, synthetic construct
  source 1..20: mol_type = other DNA
catcctggctaacacggtga

SEQ ID NO: 103751 - DNA, 20 bp, synthetic construct
  source 1..20: mol_type = other DNA
ccatcctggctaacacggtg

SEQ ID NO: 103752 - DNA, 20 bp, synthetic construct
  source 1..20: mol_type = other DNA
accatcctggctaacacggt

SEQ ID NO: 103753 - DNA, 20 bp, synthetic construct
  source 1..20: mol_type = other DNA
gaccatcctggctaacacgg

SEQ ID NO: 103754 - DNA, 20 bp, synthetic construct
  source 1..20: mol_type = other DNA
agaccatcctggctaacacg

SEQ ID NO: 103755 - DNA, 20 bp, synthetic construct
  source 1..20: mol_type = other DNA
gagaccatcctggctaacac

SEQ ID NO: 103756 - DNA, 20 bp, synthetic construct
  source 1..20: mol_type = other DNA
cgagaccatcctggctaaca

SEQ ID NO: 103757 - DNA, 20 bp, synthetic construct
  source 1..20: mol_type = other DNA
tcgagaccatcctggctaac

SEQ ID NO: 103758 - DNA, 20 bp, synthetic construct
  source 1..20: mol_type = other DNA
ttcgagaccatcctggctaa

SEQ ID NO: 103759 - DNA, 20 bp, synthetic construct
  source 1..20: mol_type = other DNA
gttcgagaccatcctggcta

SEQ ID NO: 103760 - DNA, 20 bp, synthetic construct
  source 1..20: mol_type = other DNA
agttcgagaccatcctggct

SEQ ID NO: 103761 - DNA, 20 bp, synthetic construct
  source 1..20: mol_type = other DNA
gagttcgagaccatcctggc

SEQ ID NO: 103762 - DNA, 20 bp, synthetic construct
  source 1..20: mol_type = other DNA
ggagttcgagaccatcctgg

SEQ ID NO: 103763 - DNA, 20 bp, synthetic construct
  source 1..20: mol_type = other DNA
aggagttcgagaccatcctg

SEQ ID NO: 103764 - DNA, 20 bp, synthetic construct
  source 1..20: mol_type = other DNA
caggagttcgagaccatcct

SEQ ID NO: 103765 - DNA, 20 bp, synthetic construct
  source 1..20: mol_type = other DNA
tcaggagttcgagaccatcc

SEQ ID NO: 103766 - DNA, 20 bp, synthetic construct
  source 1..20: mol_type = other DNA
gtcaggagttcgagaccatc

SEQ ID NO: 103767 - DNA, 20 bp, synthetic construct
  source 1..20: mol_type = other DNA
ggtcaggagttcgagaccat

SEQ ID NO: 103768 - DNA, 20 bp, synthetic construct
  source 1..20: mol_type = other DNA
aggtcaggagttcgagacca

SEQ ID NO: 103769 - DNA, 20 bp, synthetic construct
  source 1..20: mol_type = other DNA
gaggtcaggagttcgagacc

SEQ ID NO: 103770 - DNA, 20 bp, synthetic construct
  source 1..20: mol_type = other DNA
tgaggtcaggagttcgagac

SEQ ID NO: 103771 - DNA, 20 bp, synthetic construct
  source 1..20: mol_type = other DNA
atgaggtcaggagttcgaga

SEQ ID NO: 103772 - DNA, 20 bp, synthetic construct
  source 1..20: mol_type = other DNA
catgaggtcaggagttcgag

SEQ ID NO: 103773 - DNA, 20 bp, synthetic construct
  source 1..20: mol_type = other DNA
tcatgaggtcaggagttcga

SEQ ID NO: 103774 - DNA, 20 bp, synthetic construct
  source 1..20: mol_type = other DNA
atcatgaggtcaggagttcg

SEQ ID NO: 103775 - DNA, 20 bp, synthetic construct
  source 1..20: mol_type = other DNA
gatcatgaggtcaggagttc

SEQ ID NO: 103776 - DNA, 20 bp, synthetic construct
  source 1..20: mol_type = other DNA
agatcatgaggtcaggagtt

SEQ ID NO: 103777 - DNA, 20 bp, synthetic construct
  source 1..20: mol_type = other DNA
cagatcatgaggtcaggagt

SEQ ID NO: 103778 - DNA, 20 bp, synthetic construct
  source 1..20: mol_type = other DNA
gcagatcatgaggtcaggag

SEQ ID NO: 103779 - DNA, 20 bp, synthetic construct
  source 1..20: mol_type = other DNA
ggcagatcatgaggtcagga

SEQ ID NO: 103780 - DNA, 20 bp, synthetic construct
  source 1..20: mol_type = other DNA
gggcagatcatgaggtcagg

SEQ ID NO: 103781 - DNA, 20 bp, synthetic construct
  source 1..20: mol_type = other DNA
cgggcagatcatgaggtcag

SEQ ID NO: 103782 - DNA, 20 bp, synthetic construct
  source 1..20: mol_type = other DNA
acgggcagatcatgaggtca

SEQ ID NO: 103783 - DNA, 20 bp, synthetic construct
  source 1..20: mol_type = other DNA
gacgggcagatcatgaggtc

SEQ ID NO: 103784 - DNA, 20 bp, synthetic construct
  source 1..20: mol_type = other DNA
agacgggcagatcatgaggt

SEQ ID NO: 103785 - DNA, 20 bp, synthetic construct
  source 1..20: mol_type = other DNA
gagacgggcagatcatgagg

SEQ ID NO: 103786 - DNA, 20 bp, synthetic construct
  source 1..20: mol_type = other DNA
tgagacgggcagatcatgag

SEQ ID NO: 103787 - DNA, 20 bp, synthetic construct
  source 1..20: mol_type = other DNA
ctgagacgggcagatcatga

SEQ ID NO: 103788 - DNA, 20 bp, synthetic construct
  source 1..20: mol_type = other DNA
gctgagacgggcagatcatg

SEQ ID NO: 103789 - DNA, 20 bp, synthetic construct
  source 1..20: mol_type = other DNA
ggctgagacgggcagatcat

SEQ ID NO: 103790 - DNA, 20 bp, synthetic construct
  source 1..20: mol_type = other DNA
aggctgagacgggcagatca

SEQ ID NO: 103791 - DNA, 20 bp, synthetic construct
  source 1..20: mol_type = other DNA
gaggctgagacgggcagatc

SEQ ID NO: 103792 - DNA, 20 bp, synthetic construct
  source 1..20: mol_type = other DNA
ggaggctgagacgggcagat

SEQ ID NO: 103793 - DNA, 20 bp, synthetic construct
  source 1..20: mol_type = other DNA
gggaggctgagacgggcaga

SEQ ID NO: 103794 - DNA, 20 bp, synthetic construct
  source 1..20: mol_type = other DNA
tgggaggctgagacgggcag

SEQ ID NO: 103795 - DNA, 20 bp, synthetic construct
  source 1..20: mol_type = other DNA
ttgggaggctgagacgggca

SEQ ID NO: 103796 - DNA, 20 bp, synthetic construct
  source 1..20: mol_type = other DNA
tttgggaggctgagacgggc

SEQ ID NO: 103797 - DNA, 20 bp, synthetic construct
  source 1..20: mol_type = other DNA
ctttgggaggctgagacggg

SEQ ID NO: 103798 - DNA, 20 bp, synthetic construct
  source 1..20: mol_type = other DNA
actttgggaggctgagacgg

SEQ ID NO: 103799 - DNA, 20 bp, synthetic construct
  source 1..20: mol_type = other DNA
cactttgggaggctgagacg

SEQ ID NO: 103800 - DNA, 20 bp, synthetic construct
  source 1..20: mol_type = other DNA
gcactttgggaggctgagac

SEQ ID NO: 103801 - DNA, 20 bp, synthetic construct
  source 1..20: mol_type = other DNA
agcactttgggaggctgaga

SEQ ID NO: 103802 - DNA, 20 bp, synthetic construct
  source 1..20: mol_type = other DNA
cagcactttgggaggctgag

SEQ ID NO: 103803 - DNA, 20 bp, synthetic construct
  source 1..20: mol_type = other DNA
ccagcactttgggaggctga

SEQ ID NO: 103804 - DNA, 20 bp, synthetic construct
  source 1..20: mol_type = other DNA
cccagcactttgggaggctg

SEQ ID NO: 103805 - DNA, 20 bp, synthetic construct
  source 1..20: mol_type = other DNA
tcccagcactttgggaggct

SEQ ID NO: 103806 - DNA, 20 bp, synthetic construct
  source 1..20: mol_type = other DNA
atcccagcactttgggaggc

SEQ ID NO: 103807 - DNA, 20 bp, synthetic construct
  source 1..20: mol_type = other DNA
aatcccagcactttgggagg

SEQ ID NO: 103808 - DNA, 20 bp, synthetic construct
  source 1..20: mol_type = other DNA
taatcccagcactttgggag

SEQ ID NO: 103809 - DNA, 20 bp, synthetic construct
  source 1..20: mol_type = other DNA
gtaatcccagcactttggga

SEQ ID NO: 103810 - DNA, 20 bp, synthetic construct
  source 1..20: mol_type = other DNA
tgtaatcccagcactttggg

SEQ ID NO: 103811 - DNA, 20 bp, synthetic construct
  source 1..20: mol_type = other DNA
ctgtaatcccagcactttgg

SEQ ID NO: 103812 - DNA, 20 bp, synthetic construct
  source 1..20: mol_type = other DNA
cctgtaatcccagcactttg

SEQ ID NO: 103813 - DNA, 20 bp, synthetic construct
  source 1..20: mol_type = other DNA
gcctgtaatcccagcacttt

SEQ ID NO: 103814 - DNA, 20 bp, synthetic construct
  source 1..20: mol_type = other DNA
cgcctgtaatcccagcactt

SEQ ID NO: 103815 - DNA, 20 bp, synthetic construct
  source 1..20: mol_type = other DNA
acgcctgtaatcccagcact

SEQ ID NO: 103816 - DNA, 20 bp, synthetic construct
  source 1..20: mol_type = other DNA
cacgcctgtaatcccagcac

SEQ ID NO: 103817 - DNA, 20 bp, synthetic construct
  source 1..20: mol_type = other DNA
tcacgcctgtaatcccagca

SEQ ID NO: 103818 - DNA, 20 bp, synthetic construct
  source 1..20: mol_type = other DNA
ctcacgcctgtaatcccagc

SEQ ID NO: 103819 - DNA, 20 bp, synthetic construct
  source 1..20: mol_type = other DNA
gctcacgcctgtaatcccag

SEQ ID NO: 103820 - DNA, 20 bp, synthetic construct
  source 1..20: mol_type = other DNA
ggctcacgcctgtaatccca

SEQ ID NO: 103821 - DNA, 20 bp, synthetic construct
  source 1..20: mol_type = other DNA
tggctcacgcctgtaatccc

SEQ ID NO: 103822 - DNA, 20 bp, synthetic construct
  source 1..20: mol_type = other DNA
gtggctcacgcctgtaatcc

SEQ ID NO: 103823 - DNA, 20 bp, synthetic construct
  source 1..20: mol_type = other DNA
ggtggctcacgcctgtaatc

SEQ ID NO: 103824 - DNA, 20 bp, synthetic construct
  source 1..20: mol_type = other DNA
tggtggctcacgcctgtaat

SEQ ID NO: 103825 - DNA, 20 bp, synthetic construct
  source 1..20: mol_type = other DNA
gtggtggctcacgcctgtaa

SEQ ID NO: 103826 - DNA, 20 bp, synthetic construct
  source 1..20: mol_type = other DNA
cgtggtggctcacgcctgta

SEQ ID NO: 103827 - DNA, 20 bp, synthetic construct
  source 1..20: mol_type = other DNA
gcgtggtggctcacgcctgt

SEQ ID NO: 103828 - DNA, 20 bp, synthetic construct
  source 1..20: mol_type = other DNA
ggcgtggtggctcacgcctg

SEQ ID NO: 103829 - DNA, 20 bp, synthetic construct
  source 1..20: mol_type = other DNA
gggcgtggtggctcacgcct

SEQ ID NO: 103830 - DNA, 20 bp, synthetic construct
  source 1..20: mol_type = other DNA
cgggcgtggtggctcacgcc

SEQ ID NO: 103831 - DNA, 20 bp, synthetic construct
  source 1..20: mol_type = other DNA
ccgggcgtggtggctcacgc

SEQ ID NO: 103832 - DNA, 20 bp, synthetic construct
  source 1..20: mol_type = other DNA
gccgggcgtggtggctcacg

SEQ ID NO: 103833 - DNA, 20 bp, synthetic construct
  source 1..20: mol_type = other DNA
ggccgggcgtggtggctcac

SEQ ID NO: 103834 - DNA, 20 bp, synthetic construct
  source 1..20: mol_type = other DNA
tggccgggcgtggtggctca

SEQ ID NO: 103835 - DNA, 20 bp, synthetic construct
  source 1..20: mol_type = other DNA
ttggccgggcgtggtggctc

SEQ ID NO: 103836 - DNA, 20 bp, synthetic construct
  source 1..20: mol_type = other DNA
cttggccgggcgtggtggct

SEQ ID NO: 103837 - DNA, 20 bp, synthetic construct
  source 1..20: mol_type = other DNA
ccttggccgggcgtggtggc

SEQ ID NO: 103838 - DNA, 20 bp, synthetic construct
  source 1..20: mol_type = other DNA
cccttggccgggcgtggtgg

SEQ ID NO: 103839 - DNA, 20 bp, synthetic construct
  source 1..20: mol_type = other DNA
acccttggccgggcgtggtg

SEQ ID NO: 103840 - DNA, 20 bp, synthetic construct
  source 1..20: mol_type = other DNA
aacccttggccgggcgtggt

SEQ ID NO: 103841 - DNA, 20 bp, synthetic construct
  source 1..20: mol_type = other DNA
aaacccttggccgggcgtgg

SEQ ID NO: 103842 - DNA, 20 bp, synthetic construct
  source 1..20: mol_type = other DNA
aaaacccttggccgggcgtg

SEQ ID NO: 103843 - DNA, 20 bp, synthetic construct
  source 1..20: mol_type = other DNA
taaaacccttggccgggcgt

SEQ ID NO: 103844 - DNA, 20 bp, synthetic construct
  source 1..20: mol_type = other DNA
ttaaaacccttggccgggcg

SEQ ID NO: 103845 - DNA, 20 bp, synthetic construct
  source 1..20: mol_type = other DNA
attaaaacccttggccgggc

SEQ ID NO: 103846 - DNA, 20 bp, synthetic construct
  source 1..20: mol_type = other DNA
gattaaaacccttggccggg

SEQ ID NO: 103847 - DNA, 20 bp, synthetic construct
  source 1..20: mol_type = other DNA
tgattaaaacccttggccgg

SEQ ID NO: 103848 - DNA, 20 bp, synthetic construct
  source 1..20: mol_type = other DNA
atgattaaaacccttggccg

SEQ ID NO: 103849 - DNA, 20 bp, synthetic construct
  source 1..20: mol_type = other DNA
tatgattaaaacccttggcc

SEQ ID NO: 103850 - DNA, 20 bp, synthetic construct
  source 1..20: mol_type = other DNA
ttatgattaaaacccttggc

SEQ ID NO: 103851 - DNA, 20 bp, synthetic construct
  source 1..20: mol_type = other DNA
cttatgattaaaacccttgg

SEQ ID NO: 103852 - DNA, 20 bp, synthetic construct
  source 1..20: mol_type = other DNA
ccttatgattaaaacccttg

SEQ ID NO: 103853 - DNA, 20 bp, synthetic construct
  source 1..20: mol_type = other DNA
cccttatgattaaaaccctt

SEQ ID NO: 103854 - DNA, 20 bp, synthetic construct
  source 1..20: mol_type = other DNA
ccccttatgattaaaaccct

SEQ ID NO: 103855 - DNA, 20 bp, synthetic construct
  source 1..20: mol_type = other DNA
tccccttatgattaaaaccc

SEQ ID NO: 103856 - DNA, 20 bp, synthetic construct
  source 1..20: mol_type = other DNA
atccccttatgattaaaacc

SEQ ID NO: 103857 - DNA, 20 bp, synthetic construct
  source 1..20: mol_type = other DNA
catccccttatgattaaaac

SEQ ID NO: 103858 - DNA, 20 bp, synthetic construct
  source 1..20: mol_type = other DNA
acatccccttatgattaaaa

SEQ ID NO: 103859 - DNA, 20 bp, synthetic construct
  source 1..20: mol_type = other DNA
cacatccccttatgattaaa

SEQ ID NO: 103860 - DNA, 20 bp, synthetic construct
  source 1..20: mol_type = other DNA
ccacatccccttatgattaa

SEQ ID NO: 103861 - DNA, 20 bp, synthetic construct
  source 1..20: mol_type = other DNA
gccacatccccttatgatta

SEQ ID NO: 103862 - DNA, 20 bp, synthetic construct
  source 1..20: mol_type = other DNA
tgccacatccccttatgatt

SEQ ID NO: 103863 - DNA, 20 bp, synthetic construct
  source 1..20: mol_type = other DNA
atgccacatccccttatgat

SEQ ID NO: 103864 - DNA, 20 bp, synthetic construct
  source 1..20: mol_type = other DNA
aatgccacatccccttatga

SEQ ID NO: 103865 - DNA, 20 bp, synthetic construct
  source 1..20: mol_type = other DNA
aaatgccacatccccttatg

SEQ ID NO: 103866 - DNA, 20 bp, synthetic construct
  source 1..20: mol_type = other DNA
aaaatgccacatccccttat

SEQ ID NO: 103867 - DNA, 20 bp, synthetic construct
  source 1..20: mol_type = other DNA
taaaatgccacatcccctta

SEQ ID NO: 103868 - DNA, 20 bp, synthetic construct
  source 1..20: mol_type = other DNA
ataaaatgccacatcccctt

SEQ ID NO: 103869 - DNA, 20 bp, synthetic construct
  source 1..20: mol_type = other DNA
cataaaatgccacatcccct

SEQ ID NO: 103870 - DNA, 20 bp, synthetic construct
  source 1..20: mol_type = other DNA
acataaaatgccacatcccc

SEQ ID NO: 103871 - DNA, 20 bp, synthetic construct
  source 1..20: mol_type = other DNA
cacataaaatgccacatccc

SEQ ID NO: 103872 - DNA, 20 bp, synthetic construct
  source 1..20: mol_type = other DNA
tcacataaaatgccacatcc

SEQ ID NO: 103873 - DNA, 20 bp, synthetic construct
  source 1..20: mol_type = other DNA
atcacataaaatgccacatc

SEQ ID NO: 103874 - DNA, 20 bp, synthetic construct
  source 1..20: mol_type = other DNA
tatcacataaaatgccacat

SEQ ID NO: 103875 - DNA, 20 bp, synthetic construct
  source 1..20: mol_type = other DNA
atatcacataaaatgccaca

SEQ ID NO: 103876 - DNA, 20 bp, synthetic construct
  source 1..20: mol_type = other DNA
tatatcacataaaatgccac

SEQ ID NO: 103877 - DNA, 20 bp, synthetic construct
  source 1..20: mol_type = other DNA
ttatatcacataaaatgcca

SEQ ID NO: 103878 - DNA, 20 bp, synthetic construct
  source 1..20: mol_type = other DNA
tttatatcacataaaatgcc

SEQ ID NO: 103879 - DNA, 20 bp, synthetic construct
  source 1..20: mol_type = other DNA
atttatatcacataaaatgc

SEQ ID NO: 103880 - DNA, 20 bp, synthetic construct
  source 1..20: mol_type = other DNA
aatttatatcacataaaatg

SEQ ID NO: 103881 - DNA, 20 bp, synthetic construct
  source 1..20: mol_type = other DNA
taatttatatcacataaaat

SEQ ID NO: 103882 - DNA, 20 bp, synthetic construct
  source 1..20: mol_type = other DNA
ataatttatatcacataaaa

SEQ ID NO: 103883 - DNA, 20 bp, synthetic construct
  source 1..20: mol_type = other DNA
tataatttatatcacataaa

SEQ ID NO: 103884 - DNA, 20 bp, synthetic construct
  source 1..20: mol_type = other DNA
atataatttatatcacataa

SEQ ID NO: 103885 - DNA, 20 bp, synthetic construct
  source 1..20: mol_type = other DNA
tatataatttatatcacata

SEQ ID NO: 103886 - DNA, 20 bp, synthetic construct
  source 1..20: mol_type = other DNA
atatataatttatatcacat

SEQ ID NO: 103887 - DNA, 20 bp, synthetic construct
  source 1..20: mol_type = other DNA
aatatataatttatatcaca

SEQ ID NO: 103888 - DNA, 20 bp, synthetic construct
  source 1..20: mol_type = other DNA
aaatatataatttatatcac

SEQ ID NO: 103889 - DNA, 20 bp, synthetic construct
  source 1..20: mol_type = other DNA
taaatatataatttatatca

SEQ ID NO: 103890 - DNA, 20 bp, synthetic construct
  source 1..20: mol_type = other DNA
ataaatatataatttatatc

SEQ ID NO: 103891 - DNA, 20 bp, synthetic construct
  source 1..20: mol_type = other DNA
tataaatatataatttatat

SEQ ID NO: 103892 - DNA, 20 bp, synthetic construct
  source 1..20: mol_type = other DNA
atataaatatataatttata

SEQ ID NO: 103893 - DNA, 20 bp, synthetic construct
  source 1..20: mol_type = other DNA
gatataaatatataatttat

SEQ ID NO: 103894 - DNA, 20 bp, synthetic construct
  source 1..20: mol_type = other DNA
tgatataaatatataattta

SEQ ID NO: 103895 - DNA, 20 bp, synthetic construct
  source 1..20: mol_type = other DNA
atgatataaatatataattt

SEQ ID NO: 103896 - DNA, 20 bp, synthetic construct
  source 1..20: mol_type = other DNA
catgatataaatatataatt

SEQ ID NO: 103897 - DNA, 20 bp, synthetic construct
  source 1..20: mol_type = other DNA
acatgatataaatatataat

SEQ ID NO: 103898 - DNA, 20 bp, synthetic construct
  source 1..20: mol_type = other DNA
cacatgatataaatatataa

SEQ ID NO: 103899 - DNA, 20 bp, synthetic construct
  source 1..20: mol_type = other DNA
tcacatgatataaatatata

SEQ ID NO: 103900 - DNA, 20 bp, synthetic construct
  source 1..20: mol_type = other DNA
atcacatgatataaatatat

SEQ ID NO: 103901 - DNA, 20 bp, synthetic construct
  source 1..20: mol_type = other DNA
tatcacatgatataaatata

SEQ ID NO: 103902 - DNA, 20 bp, synthetic construct
  source 1..20: mol_type = other DNA
atatcacatgatataaatat

SEQ ID NO: 103903 - DNA, 20 bp, synthetic construct
  source 1..20: mol_type = other DNA
tatatcacatgatataaata

SEQ ID NO: 103904 - DNA, 20 bp, synthetic construct
  source 1..20: mol_type = other DNA
atatatcacatgatataaat

SEQ ID NO: 103905 - DNA, 20 bp, synthetic construct
  source 1..20: mol_type = other DNA
tatatatcacatgatataaa

SEQ ID NO: 103906 - DNA, 20 bp, synthetic construct
  source 1..20: mol_type = other DNA
atatatatcacatgatataa

SEQ ID NO: 103907 - DNA, 20 bp, synthetic construct
  source 1..20: mol_type = other DNA
aatatatatcacatgatata

SEQ ID NO: 103908 - DNA, 20 bp, synthetic construct
  source 1..20: mol_type = other DNA
aaatatatatcacatgatat

SEQ ID NO: 103909 - DNA, 20 bp, synthetic construct
  source 1..20: mol_type = other DNA
taaatatatatcacatgata

SEQ ID NO: 103910 - DNA, 20 bp, synthetic construct
  source 1..20: mol_type = other DNA
ataaatatatatcacatgat

SEQ ID NO: 103911 - DNA, 20 bp, synthetic construct
  source 1..20: mol_type = other DNA
tataaatatatatcacatga

SEQ ID NO: 103912 - DNA, 20 bp, synthetic construct
  source 1..20: mol_type = other DNA
atataaatatatatcacatg

SEQ ID NO: 103913 - DNA, 20 bp, synthetic construct
  source 1..20: mol_type = other DNA
gatataaatatatatcacat

SEQ ID NO: 103914 - DNA, 20 bp, synthetic construct
  source 1..20: mol_type = other DNA
tgatataaatatatatcaca

SEQ ID NO: 103915 - DNA, 20 bp, synthetic construct
  source 1..20: mol_type = other DNA
atgatataaatatatatcac

SEQ ID NO: 103916 - DNA, 20 bp, synthetic construct
  source 1..20: mol_type = other DNA
tatgatataaatatatatca

SEQ ID NO: 103917 - DNA, 20 bp, synthetic construct
  source 1..20: mol_type = other DNA
gtatgatataaatatatatc

SEQ ID NO: 103918 - DNA, 20 bp, synthetic construct
  source 1..20: mol_type = other DNA
tgtatgatataaatatatat

SEQ ID NO: 103919 - DNA, 20 bp, synthetic construct
  source 1..20: mol_type = other DNA
gtgtatgatataaatatata

SEQ ID NO: 103920 - DNA, 20 bp, synthetic construct
  source 1..20: mol_type = other DNA
tgtgtatgatataaatatat

SEQ ID NO: 103921 - DNA, 20 bp, synthetic construct
  source 1..20: mol_type = other DNA
ctgtgtatgatataaatata

SEQ ID NO: 103922 - DNA, 20 bp, synthetic construct
  source 1..20: mol_type = other DNA
actgtgtatgatataaatat

SEQ ID NO: 103923 - DNA, 20 bp, synthetic construct
  source 1..20: mol_type = other DNA
tactgtgtatgatataaata

SEQ ID NO: 103924 - DNA, 20 bp, synthetic construct
  source 1..20: mol_type = other DNA
atactgtgtatgatataaat

SEQ ID NO: 103925 - DNA, 20 bp, synthetic construct
  source 1..20: mol_type = other DNA
tatactgtgtatgatataaa

SEQ ID NO: 103926 - DNA, 20 bp, synthetic construct
  source 1..20: mol_type = other DNA
ttatactgtgtatgatataa

SEQ ID NO: 103927 - DNA, 20 bp, synthetic construct
  source 1..20: mol_type = other DNA
tttatactgtgtatgatata

SEQ ID NO: 103928 - DNA, 20 bp, synthetic construct
  source 1..20: mol_type = other DNA
atttatactgtgtatgatat

SEQ ID NO: 103929 - DNA, 20 bp, synthetic construct
  source 1..20: mol_type = other DNA
tatttatactgtgtatgata

SEQ ID NO: 103930 - DNA, 20 bp, synthetic construct
  source 1..20: mol_type = other DNA
ttatttatactgtgtatgat

SEQ ID NO: 103931 - DNA, 20 bp, synthetic construct
  source 1..20: mol_type = other DNA
attatttatactgtgtatga

SEQ ID NO: 103932 - DNA, 20 bp, synthetic construct
  source 1..20: mol_type = other DNA
tattatttatactgtgtatg

SEQ ID NO: 103933 - DNA, 20 bp, synthetic construct
  source 1..20: mol_type = other DNA
atattatttatactgtgtat

SEQ ID NO: 103934 - DNA, 20 bp, synthetic construct
  source 1..20: mol_type = other DNA
tatattatttatactgtgta

SEQ ID NO: 103935 - DNA, 20 bp, synthetic construct
  source 1..20: mol_type = other DNA
atatattatttatactgtgt

SEQ ID NO: 103936 - DNA, 20 bp, synthetic construct
  source 1..20: mol_type = other DNA
tatatattatttatactgtg

SEQ ID NO: 103937 - DNA, 20 bp, synthetic construct
  source 1..20: mol_type = other DNA
atatatattatttatactgt

SEQ ID NO: 103938 - DNA, 20 bp, synthetic construct
  source 1..20: mol_type = other DNA
tatatatattatttatactg

SEQ ID NO: 103939 - DNA, 20 bp, synthetic construct
  source 1..20: mol_type = other DNA
atatatatattatttatact

SEQ ID NO: 103940 - DNA, 20 bp, synthetic construct
  source 1..20: mol_type = other DNA
tatatatatattatttatac

SEQ ID NO: 103941 - DNA, 20 bp, synthetic construct
  source 1..20: mol_type = other DNA
atatatatatattatttata

SEQ ID NO: 103942 - DNA, 20 bp, synthetic construct
  source 1..20: mol_type = other DNA
tatatatatatattatttat

SEQ ID NO: 103943 - DNA, 20 bp, synthetic construct
  source 1..20: mol_type = other DNA
atatatatatatattattta

SEQ ID NO: 103944 - DNA, 20 bp, synthetic construct
  source 1..20: mol_type = other DNA
aatatatatatatattattt

SEQ ID NO: 103945 - DNA, 20 bp, synthetic construct
  source 1..20: mol_type = other DNA
aaatatatatatatattatt

SEQ ID NO: 103946 - DNA, 20 bp, synthetic construct
  source 1..20: mol_type = other DNA
aaaatatatatatatattat

SEQ ID NO: 103947 - DNA, 20 bp, synthetic construct
  source 1..20: mol_type = other DNA
aaaaatatatatatatatta

SEQ ID NO: 103948 - DNA, 20 bp, synthetic construct
  source 1..20: mol_type = other DNA
aaaaaatatatatatatatt

SEQ ID NO: 103949 - DNA, 20 bp, synthetic construct
  source 1..20: mol_type = other DNA
taaaaaatatatatatatat

SEQ ID NO: 103950 - DNA, 20 bp, synthetic construct
  source 1..20: mol_type = other DNA
ctaaaaaatatatatatata

SEQ ID NO: 103951 - DNA, 20 bp, synthetic construct
  source 1..20: mol_type = other DNA
actaaaaaatatatatatat

SEQ ID NO: 103952 - DNA, 20 bp, synthetic construct
  source 1..20: mol_type = other DNA
gactaaaaaatatatatata

SEQ ID NO: 103953 - DNA, 20 bp, synthetic construct
  source 1..20: mol_type = other DNA
agactaaaaaatatatatat

SEQ ID NO: 103954 - DNA, 20 bp, synthetic construct
  source 1..20: mol_type = other DNA
aagactaaaaaatatatata

SEQ ID NO: 103955 - DNA, 20 bp, synthetic construct
  source 1..20: mol_type = other DNA
aaagactaaaaaatatatat

SEQ ID NO: 103956 - DNA, 20 bp, synthetic construct
  source 1..20: mol_type = other DNA
caaagactaaaaaatatata

SEQ ID NO: 103957 - DNA, 20 bp, synthetic construct
  source 1..20: mol_type = other DNA
acaaagactaaaaaatatat

SEQ ID NO: 103958 - DNA, 20 bp, synthetic construct
  source 1..20: mol_type = other DNA
gacaaagactaaaaaatata

SEQ ID NO: 103959 - DNA, 20 bp, synthetic construct
  source 1..20: mol_type = other DNA
agacaaagactaaaaaatat

SEQ ID NO: 103960 - DNA, 20 bp, synthetic construct
  source 1..20: mol_type = other DNA
aagacaaagactaaaaaata

SEQ ID NO: 103961 - DNA, 20 bp, synthetic construct
  source 1..20: mol_type = other DNA
aaagacaaagactaaaaaat

SEQ ID NO: 103962 - DNA, 20 bp, synthetic construct
  source 1..20: mol_type = other DNA
aaaagacaaagactaaaaaa

SEQ ID NO: 103963 - DNA, 20 bp, synthetic construct
  source 1..20: mol_type = other DNA
taaaagacaaagactaaaaa

SEQ ID NO: 103964 - DNA, 20 bp, synthetic construct
  source 1..20: mol_type = other DNA
ataaaagacaaagactaaaa

SEQ ID NO: 103965 - DNA, 20 bp, synthetic construct
  source 1..20: mol_type = other DNA
aataaaagacaaagactaaa

SEQ ID NO: 103966 - DNA, 20 bp, synthetic construct
  source 1..20: mol_type = other DNA
gaataaaagacaaagactaa

SEQ ID NO: 103967 - DNA, 20 bp, synthetic construct
  source 1..20: mol_type = other DNA
agaataaaagacaaagacta

SEQ ID NO: 103968 - DNA, 20 bp, synthetic construct
  source 1..20: mol_type = other DNA
cagaataaaagacaaagact

SEQ ID NO: 103969 - DNA, 20 bp, synthetic construct
  source 1..20: mol_type = other DNA
acagaataaaagacaaagac

SEQ ID NO: 103970 - DNA, 20 bp, synthetic construct
  source 1..20: mol_type = other DNA
aacagaataaaagacaaaga

SEQ ID NO: 103971 - DNA, 20 bp, synthetic construct
  source 1..20: mol_type = other DNA
taacagaataaaagacaaag

SEQ ID NO: 103972 - DNA, 20 bp, synthetic construct
  source 1..20: mol_type = other DNA
ttaacagaataaaagacaaa

SEQ ID NO: 103973 - DNA, 20 bp, synthetic construct
  source 1..20: mol_type = other DNA
cttaacagaataaaagacaa

SEQ ID NO: 103974 - DNA, 20 bp, synthetic construct
  source 1..20: mol_type = other DNA
tcttaacagaataaaagaca

SEQ ID NO: 103975 - DNA, 20 bp, synthetic construct
  source 1..20: mol_type = other DNA
atcttaacagaataaaagac

SEQ ID NO: 103976 - DNA, 20 bp, synthetic construct
  source 1..20: mol_type = other DNA
catcttaacagaataaaaga

SEQ ID NO: 103977 - DNA, 20 bp, synthetic construct
  source 1..20: mol_type = other DNA
acatcttaacagaataaaag

SEQ ID NO: 103978 - DNA, 20 bp, synthetic construct
  source 1..20: mol_type = other DNA
tacatcttaacagaataaaa

SEQ ID NO: 103979 - DNA, 20 bp, synthetic construct
  source 1..20: mol_type = other DNA
gtacatcttaacagaataaa

SEQ ID NO: 103980 - DNA, 20 bp, synthetic construct
  source 1..20: mol_type = other DNA
ggtacatcttaacagaataa

SEQ ID NO: 103981 - DNA, 20 bp, synthetic construct
  source 1..20: mol_type = other DNA
tggtacatcttaacagaata

SEQ ID NO: 103982 - DNA, 20 bp, synthetic construct
  source 1..20: mol_type = other DNA
atggtacatcttaacagaat

SEQ ID NO: 103983 - DNA, 20 bp, synthetic construct
  source 1..20: mol_type = other DNA
catggtacatcttaacagaa

SEQ ID NO: 103984 - DNA, 20 bp, synthetic construct
  source 1..20: mol_type = other DNA
acatggtacatcttaacaga

SEQ ID NO: 103985 - DNA, 20 bp, synthetic construct
  source 1..20: mol_type = other DNA
aacatggtacatcttaacag

SEQ ID NO: 103986 - DNA, 20 bp, synthetic construct
  source 1..20: mol_type = other DNA
aaacatggtacatcttaaca

SEQ ID NO: 103987 - DNA, 20 bp, synthetic construct
  source 1..20: mol_type = other DNA
taaacatggtacatcttaac

SEQ ID NO: 103988 - DNA, 20 bp, synthetic construct
  source 1..20: mol_type = other DNA
ataaacatggtacatcttaa

SEQ ID NO: 103989 - DNA, 20 bp, synthetic construct
  source 1..20: mol_type = other DNA
aataaacatggtacatctta

SEQ ID NO: 103990 - DNA, 20 bp, synthetic construct
  source 1..20: mol_type = other DNA
caataaacatggtacatctt

SEQ ID NO: 103991 - DNA, 20 bp, synthetic construct
  source 1..20: mol_type = other DNA
tcaataaacatggtacatct

SEQ ID NO: 103992 - DNA, 20 bp, synthetic construct
  source 1..20: mol_type = other DNA
atcaataaacatggtacatc

SEQ ID NO: 103993 - DNA, 20 bp, synthetic construct
  source 1..20: mol_type = other DNA
aatcaataaacatggtacat

SEQ ID NO: 103994 - DNA, 20 bp, synthetic construct
  source 1..20: mol_type = other DNA
aaatcaataaacatggtaca

SEQ ID NO: 103995 - DNA, 20 bp, synthetic construct
  source 1..20: mol_type = other DNA
caaatcaataaacatggtac

SEQ ID NO: 103996 - DNA, 20 bp, synthetic construct
  source 1..20: mol_type = other DNA
gcaaatcaataaacatggta

SEQ ID NO: 103997 - DNA, 20 bp, synthetic construct
  source 1..20: mol_type = other DNA
cgcaaatcaataaacatggt

SEQ ID NO: 103998 - DNA, 20 bp, synthetic construct
  source 1..20: mol_type = other DNA
acgcaaatcaataaacatgg

SEQ ID NO: 103999 - DNA, 20 bp, synthetic construct
  source 1..20: mol_type = other DNA
tacgcaaatcaataaacatg

SEQ ID NO: 104000 - DNA, 20 bp, synthetic construct
  source 1..20: mol_type = other DNA
atacgcaaatcaataaacat

SEQ ID NO: 104001 - DNA, 20 bp, synthetic construct
  source 1..20: mol_type = other DNA
catacgcaaatcaataaaca

SEQ ID NO: 104002 - DNA, 20 bp, synthetic construct
  source 1..20: mol_type = other DNA
acatacgcaaatcaataaac

SEQ ID NO: 104003 - DNA, 20 bp, synthetic construct
  source 1..20: mol_type = other DNA
gacatacgcaaatcaataaa

SEQ ID NO: 104004 - DNA, 20 bp, synthetic construct
  source 1..20: mol_type = other DNA
cgacatacgcaaatcaataa

SEQ ID NO: 104005 - DNA, 20 bp, synthetic construct
  source 1..20: mol_type = other DNA
tcgacatacgcaaatcaata

SEQ ID NO: 104006 - DNA, 20 bp, synthetic construct
  source 1..20: mol_type = other DNA
ttcgacatacgcaaatcaat

SEQ ID NO: 104007 - DNA, 20 bp, synthetic construct
  source 1..20: mol_type = other DNA
gttcgacatacgcaaatcaa

SEQ ID NO: 104008 - DNA, 20 bp, synthetic construct
  source 1..20: mol_type = other DNA
ggttcgacatacgcaaatca

SEQ ID NO: 104009 - DNA, 20 bp, synthetic construct
  source 1..20: mol_type = other DNA
tggttcgacatacgcaaatc

SEQ ID NO: 104010 - DNA, 20 bp, synthetic construct
  source 1..20: mol_type = other DNA
atggttcgacatacgcaaat

SEQ ID NO: 104011 - DNA, 20 bp, synthetic construct
  source 1..20: mol_type = other DNA
gatggttcgacatacgcaaa

SEQ ID NO: 104012 - DNA, 20 bp, synthetic construct
  source 1..20: mol_type = other DNA
ggatggttcgacatacgcaa

SEQ ID NO: 104013 - DNA, 20 bp, synthetic construct
  source 1..20: mol_type = other DNA
aggatggttcgacatacgca

SEQ ID NO: 104014 - DNA, 20 bp, synthetic construct
  source 1..20: mol_type = other DNA
aaggatggttcgacatacgc

SEQ ID NO: 104015 - DNA, 20 bp, synthetic construct
  source 1..20: mol_type = other DNA
caaggatggttcgacatacg

SEQ ID NO: 104016 - DNA, 20 bp, synthetic construct
  source 1..20: mol_type = other DNA
gcaaggatggttcgacatac

SEQ ID NO: 104017 - DNA, 20 bp, synthetic construct
  source 1..20: mol_type = other DNA
tgcaaggatggttcgacata

SEQ ID NO: 104018 - DNA, 20 bp, synthetic construct
  source 1..20: mol_type = other DNA
atgcaaggatggttcgacat

SEQ ID NO: 104019 - DNA, 20 bp, synthetic construct
  source 1..20: mol_type = other DNA
gatgcaaggatggttcgaca

SEQ ID NO: 104020 - DNA, 20 bp, synthetic construct
  source 1..20: mol_type = other DNA
ggatgcaaggatggttcgac

SEQ ID NO: 104021 - DNA, 20 bp, synthetic construct
  source 1..20: mol_type = other DNA
gggatgcaaggatggttcga

SEQ ID NO: 104022 - DNA, 20 bp, synthetic construct
  source 1..20: mol_type = other DNA
agggatgcaaggatggttcg

SEQ ID NO: 104023 - DNA, 20 bp, synthetic construct
  source 1..20: mol_type = other DNA
cagggatgcaaggatggttc

SEQ ID NO: 104024 - DNA, 20 bp, synthetic construct
  source 1..20: mol_type = other DNA
ccagggatgcaaggatggtt

SEQ ID NO: 104025 - DNA, 20 bp, synthetic construct
  source 1..20: mol_type = other DNA
cccagggatgcaaggatggt

SEQ ID NO: 104026 - DNA, 20 bp, synthetic construct
  source 1..20: mol_type = other DNA
tcccagggatgcaaggatgg

SEQ ID NO: 104027 - DNA, 20 bp, synthetic construct
  source 1..20: mol_type = other DNA
atcccagggatgcaaggatg

SEQ ID NO: 104028 - DNA, 20 bp, synthetic construct
  source 1..20: mol_type = other DNA
catcccagggatgcaaggat

SEQ ID NO: 104029 - DNA, 20 bp, synthetic construct
  source 1..20: mol_type = other DNA
tcatcccagggatgcaagga

SEQ ID NO: 104030 - DNA, 20 bp, synthetic construct
  source 1..20: mol_type = other DNA
ttcatcccagggatgcaagg

SEQ ID NO: 104031 - DNA, 20 bp, synthetic construct
  source 1..20: mol_type = other DNA
attcatcccagggatgcaag

SEQ ID NO: 104032 - DNA, 20 bp, synthetic construct
  source 1..20: mol_type = other DNA
gattcatcccagggatgcaa

SEQ ID NO: 104033 - DNA, 20 bp, synthetic construct
  source 1..20: mol_type = other DNA
ggattcatcccagggatgca

SEQ ID NO: 104034 - DNA, 20 bp, synthetic construct
  source 1..20: mol_type = other DNA
gggattcatcccagggatgc

SEQ ID NO: 104035 - DNA, 20 bp, synthetic construct
  source 1..20: mol_type = other DNA
tgggattcatcccagggatg

SEQ ID NO: 104036 - DNA, 20 bp, synthetic construct
  source 1..20: mol_type = other DNA
gtgggattcatcccagggat

SEQ ID NO: 104037 - DNA, 20 bp, synthetic construct
  source 1..20: mol_type = other DNA
agtgggattcatcccaggga

SEQ ID NO: 104038 - DNA, 20 bp, synthetic construct
  source 1..20: mol_type = other DNA
aagtgggattcatcccaggg

SEQ ID NO: 104039 - DNA, 20 bp, synthetic construct
  source 1..20: mol_type = other DNA
taagtgggattcatcccagg

SEQ ID NO: 104040 - DNA, 20 bp, synthetic construct
  source 1..20: mol_type = other DNA
ctaagtgggattcatcccag

SEQ ID NO: 104041 - DNA, 20 bp, synthetic construct
  source 1..20: mol_type = other DNA
actaagtgggattcatccca

SEQ ID NO: 104042 - DNA, 20 bp, synthetic construct
  source 1..20: mol_type = other DNA
gactaagtgggattcatccc

SEQ ID NO: 104043 - DNA, 20 bp, synthetic construct
  source 1..20: mol_type = other DNA
tgactaagtgggattcatcc

SEQ ID NO: 104044 - DNA, 20 bp, synthetic construct
  source 1..20: mol_type = other DNA
atgactaagtgggattcatc

SEQ ID NO: 104045 - DNA, 20 bp, synthetic construct
  source 1..20: mol_type = other DNA
catgactaagtgggattcat

SEQ ID NO: 104046 - DNA, 20 bp, synthetic construct
  source 1..20: mol_type = other DNA
tcatgactaagtgggattca

SEQ ID NO: 104047 - DNA, 20 bp, synthetic construct
  source 1..20: mol_type = other DNA
atcatgactaagtgggattc

SEQ ID NO: 104048 - DNA, 20 bp, synthetic construct
  source 1..20: mol_type = other DNA
catcatgactaagtgggatt

SEQ ID NO: 104049 - DNA, 20 bp, synthetic construct
  source 1..20: mol_type = other DNA
tcatcatgactaagtgggat

SEQ ID NO: 104050 - DNA, 20 bp, synthetic construct
  source 1..20: mol_type = other DNA
ttcatcatgactaagtggga

SEQ ID NO: 104051 - DNA, 20 bp, synthetic construct
  source 1..20: mol_type = other DNA
attcatcatgactaagtggg

SEQ ID NO: 104052 - DNA, 20 bp, synthetic construct
  source 1..20: mol_type = other DNA
cattcatcatgactaagtgg

SEQ ID NO: 104053 - DNA, 20 bp, synthetic construct
  source 1..20: mol_type = other DNA
tcattcatcatgactaagtg

SEQ ID NO: 104054 - DNA, 20 bp, synthetic construct
  source 1..20: mol_type = other DNA
atcattcatcatgactaagt

SEQ ID NO: 104055 - DNA, 20 bp, synthetic construct
  source 1..20: mol_type = other DNA
gatcattcatcatgactaag

SEQ ID NO: 104056 - DNA, 20 bp, synthetic construct
  source 1..20: mol_type = other DNA
agatcattcatcatgactaa

SEQ ID NO: 104057 - DNA, 20 bp, synthetic construct
  source 1..20: mol_type = other DNA
aagatcattcatcatgacta

SEQ ID NO: 104058 - DNA, 20 bp, synthetic construct
  source 1..20: mol_type = other DNA
aaagatcattcatcatgact

SEQ ID NO: 104059 - DNA, 20 bp, synthetic construct
  source 1..20: mol_type = other DNA
aaaagatcattcatcatgac

SEQ ID NO: 104060 - DNA, 20 bp, synthetic construct
  source 1..20: mol_type = other DNA
aaaaagatcattcatcatga

SEQ ID NO: 104061 - DNA, 20 bp, synthetic construct
  source 1..20: mol_type = other DNA
taaaaagatcattcatcatg

SEQ ID NO: 104062 - DNA, 20 bp, synthetic construct
  source 1..20: mol_type = other DNA
ttaaaaagatcattcatcat

SEQ ID NO: 104063 - DNA, 20 bp, synthetic construct
  source 1..20: mol_type = other DNA
attaaaaagatcattcatca

SEQ ID NO: 104064 - DNA, 20 bp, synthetic construct
  source 1..20: mol_type = other DNA
cattaaaaagatcattcatc

SEQ ID NO: 104065 - DNA, 20 bp, synthetic construct
  source 1..20: mol_type = other DNA
acattaaaaagatcattcat

SEQ ID NO: 104066 - DNA, 20 bp, synthetic construct
  source 1..20: mol_type = other DNA
cacattaaaaagatcattca

SEQ ID NO: 104067 - DNA, 20 bp, synthetic construct
  source 1..20: mol_type = other DNA
acacattaaaaagatcattc

SEQ ID NO: 104068 - DNA, 20 bp, synthetic construct
  source 1..20: mol_type = other DNA
aacacattaaaaagatcatt

SEQ ID NO: 104069 - DNA, 20 bp, synthetic construct
  source 1..20: mol_type = other DNA
taacacattaaaaagatcat

SEQ ID NO: 104070 - DNA, 20 bp, synthetic construct
  source 1..20: mol_type = other DNA
gtaacacattaaaaagatca

SEQ ID NO: 104071 - DNA, 20 bp, synthetic construct
  source 1..20: mol_type = other DNA
agtaacacattaaaaagatc

SEQ ID NO: 104072 - DNA, 20 bp, synthetic construct
  source 1..20: mol_type = other DNA
cagtaacacattaaaaagat

SEQ ID NO: 104073 - DNA, 20 bp, synthetic construct
  source 1..20: mol_type = other DNA
tcagtaacacattaaaaaga

SEQ ID NO: 104074 - DNA, 20 bp, synthetic construct
  source 1..20: mol_type = other DNA
ttcagtaacacattaaaaag

SEQ ID NO: 104075 - DNA, 20 bp, synthetic construct
  source 1..20: mol_type = other DNA
attcagtaacacattaaaaa

SEQ ID NO: 104076 - DNA, 20 bp, synthetic construct
  source 1..20: mol_type = other DNA
aattcagtaacacattaaaa

SEQ ID NO: 104077 - DNA, 20 bp, synthetic construct
  source 1..20: mol_type = other DNA
gaattcagtaacacattaaa

SEQ ID NO: 104078 - DNA, 20 bp, synthetic construct
  source 1..20: mol_type = other DNA
cgaattcagtaacacattaa

SEQ ID NO: 104079 - DNA, 20 bp, synthetic construct
  source 1..20: mol_type = other DNA
ccgaattcagtaacacatta

SEQ ID NO: 104080 - DNA, 20 bp, synthetic construct
  source 1..20: mol_type = other DNA
accgaattcagtaacacatt

SEQ ID NO: 104081 - DNA, 20 bp, synthetic construct
  source 1..20: mol_type = other DNA
aaccgaattcagtaacacat

SEQ ID NO: 104082 - DNA, 20 bp, synthetic construct
  source 1..20: mol_type = other DNA
aaaccgaattcagtaacaca

SEQ ID NO: 104083 - DNA, 20 bp, synthetic construct
  source 1..20: mol_type = other DNA
caaaccgaattcagtaacac

SEQ ID NO: 104084 - DNA, 20 bp, synthetic construct
  source 1..20: mol_type = other DNA
gcaaaccgaattcagtaaca

SEQ ID NO: 104085 - DNA, 20 bp, synthetic construct
  source 1..20: mol_type = other DNA
agcaaaccgaattcagtaac

SEQ ID NO: 104086 - DNA, 20 bp, synthetic construct
  source 1..20: mol_type = other DNA
tagcaaaccgaattcagtaa

SEQ ID NO: 104087 - DNA, 20 bp, synthetic construct
  source 1..20: mol_type = other DNA
ctagcaaaccgaattcagta

SEQ ID NO: 104088 - DNA, 20 bp, synthetic construct
  source 1..20: mol_type = other DNA
actagcaaaccgaattcagt

SEQ ID NO: 104089 - DNA, 20 bp, synthetic construct
  source 1..20: mol_type = other DNA
tactagcaaaccgaattcag

SEQ ID NO: 104090 - DNA, 20 bp, synthetic construct
  source 1..20: mol_type = other DNA
atactagcaaaccgaattca

SEQ ID NO: 104091 - DNA, 20 bp, synthetic construct
  source 1..20: mol_type = other DNA
aatactagcaaaccgaattc

SEQ ID NO: 104092 - DNA, 20 bp, synthetic construct
  source 1..20: mol_type = other DNA
taatactagcaaaccgaatt

SEQ ID NO: 104093 - DNA, 20 bp, synthetic construct
  source 1..20: mol_type = other DNA
ataatactagcaaaccgaat

SEQ ID NO: 104094 - DNA, 20 bp, synthetic construct
  source 1..20: mol_type = other DNA
tataatactagcaaaccgaa

SEQ ID NO: 104095 - DNA, 20 bp, synthetic construct
  source 1..20: mol_type = other DNA
atataatactagcaaaccga

SEQ ID NO: 104096 - DNA, 20 bp, synthetic construct
  source 1..20: mol_type = other DNA
aatataatactagcaaaccg

SEQ ID NO: 104097 - DNA, 20 bp, synthetic construct
  source 1..20: mol_type = other DNA
caatataatactagcaaacc

SEQ ID NO: 104098 - DNA, 20 bp, synthetic construct
  source 1..20: mol_type = other DNA
tcaatataatactagcaaac

SEQ ID NO: 104099 - DNA, 20 bp, synthetic construct
  source 1..20: mol_type = other DNA
ctcaatataatactagcaaa

SEQ ID NO: 104100 - DNA, 20 bp, synthetic construct
  source 1..20: mol_type = other DNA
cctcaatataatactagcaa

SEQ ID NO: 104101 - DNA, 20 bp, synthetic construct
  source 1..20: mol_type = other DNA
tcctcaatataatactagca

SEQ ID NO: 104102 - DNA, 20 bp, synthetic construct
  source 1..20: mol_type = other DNA
atcctcaatataatactagc

SEQ ID NO: 104103 - DNA, 20 bp, synthetic construct
  source 1..20: mol_type = other DNA
aatcctcaatataatactag

SEQ ID NO: 104104 - DNA, 20 bp, synthetic construct
  source 1..20: mol_type = other DNA
aaatcctcaatataatacta

SEQ ID NO: 104105 - DNA, 20 bp, synthetic construct
  source 1..20: mol_type = other DNA
aaaatcctcaatataatact

SEQ ID NO: 104106 - DNA, 20 bp, synthetic construct
  source 1..20: mol_type = other DNA
aaaaatcctcaatataatac

SEQ ID NO: 104107 - DNA, 20 bp, synthetic construct
  source 1..20: mol_type = other DNA
caaaaatcctcaatataata

SEQ ID NO: 104108 - DNA, 20 bp, synthetic construct
  source 1..20: mol_type = other DNA
gcaaaaatcctcaatataat

SEQ ID NO: 104109 - DNA, 20 bp, synthetic construct
  source 1..20: mol_type = other DNA
tgcaaaaatcctcaatataa

SEQ ID NO: 104110 - DNA, 20 bp, synthetic construct
  source 1..20: mol_type = other DNA
atgcaaaaatcctcaatata

SEQ ID NO: 104111 - DNA, 20 bp, synthetic construct
  source 1..20: mol_type = other DNA
tatgcaaaaatcctcaatat

SEQ ID NO: 104112 - DNA, 20 bp, synthetic construct
  source 1..20: mol_type = other DNA
ttatgcaaaaatcctcaata

SEQ ID NO: 104113 - DNA, 20 bp, synthetic construct
  source 1..20: mol_type = other DNA
attatgcaaaaatcctcaat

SEQ ID NO: 104114 - DNA, 20 bp, synthetic construct
  source 1..20: mol_type = other DNA
cattatgcaaaaatcctcaa

SEQ ID NO: 104115 - DNA, 20 bp, synthetic construct
  source 1..20: mol_type = other DNA
acattatgcaaaaatcctca

SEQ ID NO: 104116 - DNA, 20 bp, synthetic construct
  source 1..20: mol_type = other DNA
aacattatgcaaaaatcctc

SEQ ID NO: 104117 - DNA, 20 bp, synthetic construct
  source 1..20: mol_type = other DNA
gaacattatgcaaaaatcct

SEQ ID NO: 104118 - DNA, 20 bp, synthetic construct
  source 1..20: mol_type = other DNA
agaacattatgcaaaaatcc

SEQ ID NO: 104119 - DNA, 20 bp, synthetic construct
  source 1..20: mol_type = other DNA
aagaacattatgcaaaaatc

SEQ ID NO: 104120 - DNA, 20 bp, synthetic construct
  source 1..20: mol_type = other DNA
gaagaacattatgcaaaaat

SEQ ID NO: 104121 - DNA, 20 bp, synthetic construct
  source 1..20: mol_type = other DNA
tgaagaacattatgcaaaaa

SEQ ID NO: 104122 - DNA, 20 bp, synthetic construct
  source 1..20: mol_type = other DNA
ctgaagaacattatgcaaaa

SEQ ID NO: 104123 - DNA, 20 bp, synthetic construct
  source 1..20: mol_type = other DNA
tctgaagaacattatgcaaa

SEQ ID NO: 104124 - DNA, 20 bp, synthetic construct
  source 1..20: mol_type = other DNA
ctctgaagaacattatgcaa

SEQ ID NO: 104125 - DNA, 20 bp, synthetic construct
  source 1..20: mol_type = other DNA
tctctgaagaacattatgca

SEQ ID NO: 104126 - DNA, 20 bp, synthetic construct
  source 1..20: mol_type = other DNA
gtctctgaagaacattatgc

SEQ ID NO: 104127 - DNA, 20 bp, synthetic construct
  source 1..20: mol_type = other DNA
tgtctctgaagaacattatg

SEQ ID NO: 104128 - DNA, 20 bp, synthetic construct
  source 1..20: mol_type = other DNA
gtgtctctgaagaacattat

SEQ ID NO: 104129 - DNA, 20 bp, synthetic construct
  source 1..20: mol_type = other DNA
agtgtctctgaagaacatta

SEQ ID NO: 104130 - DNA, 20 bp, synthetic construct
  source 1..20: mol_type = other DNA
cagtgtctctgaagaacatt

SEQ ID NO: 104131 - DNA, 20 bp, synthetic construct
  source 1..20: mol_type = other DNA
ccagtgtctctgaagaacat

SEQ ID NO: 104132 - DNA, 20 bp, synthetic construct
  source 1..20: mol_type = other DNA
gccagtgtctctgaagaaca

SEQ ID NO: 104133 - DNA, 20 bp, synthetic construct
  source 1..20: mol_type = other DNA
agccagtgtctctgaagaac

SEQ ID NO: 104134 - DNA, 20 bp, synthetic construct
  source 1..20: mol_type = other DNA
aagccagtgtctctgaagaa

SEQ ID NO: 104135 - DNA, 20 bp, synthetic construct
  source 1..20: mol_type = other DNA
gaagccagtgtctctgaaga

SEQ ID NO: 104136 - DNA, 20 bp, synthetic construct
  source 1..20: mol_type = other DNA
agaagccagtgtctctgaag

SEQ ID NO: 104137 - DNA, 20 bp, synthetic construct
  source 1..20: mol_type = other DNA
tagaagccagtgtctctgaa

SEQ ID NO: 104138 - DNA, 20 bp, synthetic construct
  source 1..20: mol_type = other DNA
ctagaagccagtgtctctga

SEQ ID NO: 104139 - DNA, 20 bp, synthetic construct
  source 1..20: mol_type = other DNA
actagaagccagtgtctctg

SEQ ID NO: 104140 - DNA, 20 bp, synthetic construct
  source 1..20: mol_type = other DNA
aactagaagccagtgtctct

SEQ ID NO: 104141 - DNA, 20 bp, synthetic construct
  source 1..20: mol_type = other DNA
aaactagaagccagtgtctc

SEQ ID NO: 104142 - DNA, 20 bp, synthetic construct
  source 1..20: mol_type = other DNA
aaaactagaagccagtgtct

SEQ ID NO: 104143 - DNA, 20 bp, synthetic construct
  source 1..20: mol_type = other DNA
gaaaactagaagccagtgtc

SEQ ID NO: 104144 - DNA, 20 bp, synthetic construct
  source 1..20: mol_type = other DNA
ggaaaactagaagccagtgt

SEQ ID NO: 104145 - DNA, 20 bp, synthetic construct
  source 1..20: mol_type = other DNA
gggaaaactagaagccagtg

SEQ ID NO: 104146 - DNA, 20 bp, synthetic construct
  source 1..20: mol_type = other DNA
agggaaaactagaagccagt

SEQ ID NO: 104147 - DNA, 20 bp, synthetic construct
  source 1..20: mol_type = other DNA
aagggaaaactagaagccag

SEQ ID NO: 104148 - DNA, 20 bp, synthetic construct
  source 1..20: mol_type = other DNA
aaagggaaaactagaagcca

SEQ ID NO: 104149 - DNA, 20 bp, synthetic construct
  source 1..20: mol_type = other DNA
aaaagggaaaactagaagcc

SEQ ID NO: 104150 - DNA, 20 bp, synthetic construct
  source 1..20: mol_type = other DNA
aaaaagggaaaactagaagc

SEQ ID NO: 104151 - DNA, 20 bp, synthetic construct
  source 1..20: mol_type = other DNA
caaaaagggaaaactagaag

SEQ ID NO: 104152 - DNA, 20 bp, synthetic construct
  source 1..20: mol_type = other DNA
tcaaaaagggaaaactagaa

SEQ ID NO: 104153 - DNA, 20 bp, synthetic construct
  source 1..20: mol_type = other DNA
atcaaaaagggaaaactaga

SEQ ID NO: 104154 - DNA, 20 bp, synthetic construct
  source 1..20: mol_type = other DNA
catcaaaaagggaaaactag

SEQ ID NO: 104155 - DNA, 20 bp, synthetic construct
  source 1..20: mol_type = other DNA
acatcaaaaagggaaaacta

SEQ ID NO: 104156 - DNA, 20 bp, synthetic construct
  source 1..20: mol_type = other DNA
cacatcaaaaagggaaaact

SEQ ID NO: 104157 - DNA, 20 bp, synthetic construct
  source 1..20: mol_type = other DNA
acacatcaaaaagggaaaac

SEQ ID NO: 104158 - DNA, 20 bp, synthetic construct
  source 1..20: mol_type = other DNA
gacacatcaaaaagggaaaa

SEQ ID NO: 104159 - DNA, 20 bp, synthetic construct
  source 1..20: mol_type = other DNA
ggacacatcaaaaagggaaa

SEQ ID NO: 104160 - DNA, 20 bp, synthetic construct
  source 1..20: mol_type = other DNA
aggacacatcaaaaagggaa

SEQ ID NO: 104161 - DNA, 20 bp, synthetic construct
  source 1..20: mol_type = other DNA
aaggacacatcaaaaaggga

SEQ ID NO: 104162 - DNA, 20 bp, synthetic construct
  source 1..20: mol_type = other DNA
aaaggacacatcaaaaaggg

SEQ ID NO: 104163 - DNA, 20 bp, synthetic construct
  source 1..20: mol_type = other DNA
caaaggacacatcaaaaagg

SEQ ID NO: 104164 - DNA, 20 bp, synthetic construct
  source 1..20: mol_type = other DNA
ccaaaggacacatcaaaaag

SEQ ID NO: 104165 - DNA, 20 bp, synthetic construct
  source 1..20: mol_type = other DNA
accaaaggacacatcaaaaa

SEQ ID NO: 104166 - DNA, 20 bp, synthetic construct
  source 1..20: mol_type = other DNA
aaccaaaggacacatcaaaa

SEQ ID NO: 104167 - DNA, 20 bp, synthetic construct
  source 1..20: mol_type = other DNA
aaaccaaaggacacatcaaa

SEQ ID NO: 104168 - DNA, 20 bp, synthetic construct
  source 1..20: mol_type = other DNA
aaaaccaaaggacacatcaa

SEQ ID NO: 104169 - DNA, 20 bp, synthetic construct
  source 1..20: mol_type = other DNA
caaaaccaaaggacacatca

SEQ ID NO: 104170 - DNA, 20 bp, synthetic construct
  source 1..20: mol_type = other DNA
acaaaaccaaaggacacatc

SEQ ID NO: 104171 - DNA, 20 bp, synthetic construct
  source 1..20: mol_type = other DNA
tacaaaaccaaaggacacat

SEQ ID NO: 104172 - DNA, 20 bp, synthetic construct
  source 1..20: mol_type = other DNA
atacaaaaccaaaggacaca

SEQ ID NO: 104173 - DNA, 20 bp, synthetic construct
  source 1..20: mol_type = other DNA
tatacaaaaccaaaggacac

SEQ ID NO: 104174 - DNA, 20 bp, synthetic construct
  source 1..20: mol_type = other DNA
ctatacaaaaccaaaggaca

SEQ ID NO: 104175 - DNA, 20 bp, synthetic construct
  source 1..20: mol_type = other DNA
cctatacaaaaccaaaggac

SEQ ID NO: 104176 - DNA, 20 bp, synthetic construct
  source 1..20: mol_type = other DNA
ccctatacaaaaccaaagga

SEQ ID NO: 104177 - DNA, 20 bp, synthetic construct
  source 1..20: mol_type = other DNA
accctatacaaaaccaaagg

SEQ ID NO: 104178 - DNA, 20 bp, synthetic construct
  source 1..20: mol_type = other DNA
taccctatacaaaaccaaag

SEQ ID NO: 104179 - DNA, 20 bp, synthetic construct
  source 1..20: mol_type = other DNA
ttaccctatacaaaaccaaa

SEQ ID NO: 104180 - DNA, 20 bp, synthetic construct
  source 1..20: mol_type = other DNA
attaccctatacaaaaccaa

SEQ ID NO: 104181 - DNA, 20 bp, synthetic construct
  source 1..20: mol_type = other DNA
tattaccctatacaaaacca

SEQ ID NO: 104182 - DNA, 20 bp, synthetic construct
  source 1..20: mol_type = other DNA
ctattaccctatacaaaacc

SEQ ID NO: 104183 - DNA, 20 bp, synthetic construct
  source 1..20: mol_type = other DNA
actattaccctatacaaaac

SEQ ID NO: 104184 - DNA, 20 bp, synthetic construct
  source 1..20: mol_type = other DNA
cactattaccctatacaaaa

SEQ ID NO: 104185 - DNA, 20 bp, synthetic construct
  source 1..20: mol_type = other DNA
ccactattaccctatacaaa

SEQ ID NO: 104186 - DNA, 20 bp, synthetic construct
  source 1..20: mol_type = other DNA
gccactattaccctatacaa

SEQ ID NO: 104187 - DNA, 20 bp, synthetic construct
  source 1..20: mol_type = other DNA
ggccactattaccctataca

SEQ ID NO: 104188 - DNA, 20 bp, synthetic construct
  source 1..20: mol_type = other DNA
aggccactattaccctatac

SEQ ID NO: 104189 - DNA, 20 bp, synthetic construct
  source 1..20: mol_type = other DNA
aaggccactattaccctata

SEQ ID NO: 104190 - DNA, 20 bp, synthetic construct
  source 1..20: mol_type = other DNA
caaggccactattaccctat

SEQ ID NO: 104191 - DNA, 20 bp, synthetic construct
  source 1..20: mol_type = other DNA
acaaggccactattacccta

SEQ ID NO: 104192 - DNA, 20 bp, synthetic construct
  source 1..20: mol_type = other DNA
tacaaggccactattaccct

SEQ ID NO: 104193 - DNA, 20 bp, synthetic construct
  source 1..20: mol_type = other DNA
ctacaaggccactattaccc

SEQ ID NO: 104194 - DNA, 20 bp, synthetic construct
  source 1..20: mol_type = other DNA
tctacaaggccactattacc

SEQ ID NO: 104195 - DNA, 20 bp, synthetic construct
  source 1..20: mol_type = other DNA
ttctacaaggccactattac

SEQ ID NO: 104196 - DNA, 20 bp, synthetic construct
  source 1..20: mol_type = other DNA
attctacaaggccactatta

SEQ ID NO: 104197 - DNA, 20 bp, synthetic construct
  source 1..20: mol_type = other DNA
cattctacaaggccactatt

SEQ ID NO: 104198 - DNA, 20 bp, synthetic construct
  source 1..20: mol_type = other DNA
tcattctacaaggccactat

SEQ ID NO: 104199 - DNA, 20 bp, synthetic construct
  source 1..20: mol_type = other DNA
ctcattctacaaggccacta

SEQ ID NO: 104200 - DNA, 20 bp, synthetic construct
  source 1..20: mol_type = other DNA
actcattctacaaggccact

SEQ ID NO: 104201 - DNA, 20 bp, synthetic construct
  source 1..20: mol_type = other DNA
aactcattctacaaggccac

SEQ ID NO: 104202 - DNA, 20 bp, synthetic construct
  source 1..20: mol_type = other DNA
aaactcattctacaaggcca

SEQ ID NO: 104203 - DNA, 20 bp, synthetic construct
  source 1..20: mol_type = other DNA
taaactcattctacaaggcc

SEQ ID NO: 104204 - DNA, 20 bp, synthetic construct
  source 1..20: mol_type = other DNA
ctaaactcattctacaaggc

SEQ ID NO: 104205 - DNA, 20 bp, synthetic construct
  source 1..20: mol_type = other DNA
tctaaactcattctacaagg

SEQ ID NO: 104206 - DNA, 20 bp, synthetic construct
  source 1..20: mol_type = other DNA
ttctaaactcattctacaag

SEQ ID NO: 104207 - DNA, 20 bp, synthetic construct
  source 1..20: mol_type = other DNA
cttctaaactcattctacaa

SEQ ID NO: 104208 - DNA, 20 bp, synthetic construct
  source 1..20: mol_type = other DNA
acttctaaactcattctaca

SEQ ID NO: 104209 - DNA, 20 bp, synthetic construct
  source 1..20: mol_type = other DNA
tacttctaaactcattctac

SEQ ID NO: 104210 - DNA, 20 bp, synthetic construct
  source 1..20: mol_type = other DNA
atacttctaaactcattcta

SEQ ID NO: 104211 - DNA, 20 bp, synthetic construct
  source 1..20: mol_type = other DNA
aatacttctaaactcattct

SEQ ID NO: 104212 - DNA, 20 bp, synthetic construct
  source 1..20: mol_type = other DNA
gaatacttctaaactcattc

SEQ ID NO: 104213 - DNA, 20 bp, synthetic construct
  source 1..20: mol_type = other DNA
ggaatacttctaaactcatt

SEQ ID NO: 104214 - DNA, 20 bp, synthetic construct
  source 1..20: mol_type = other DNA
gggaatacttctaaactcat

SEQ ID NO: 104215 - DNA, 20 bp, synthetic construct
  source 1..20: mol_type = other DNA
agggaatacttctaaactca

SEQ ID NO: 104216 - DNA, 20 bp, synthetic construct
  source 1..20: mol_type = other DNA
gagggaatacttctaaactc

SEQ ID NO: 104217 - DNA, 20 bp, synthetic construct
  source 1..20: mol_type = other DNA
agagggaatacttctaaact

SEQ ID NO: 104218 - DNA, 20 bp, synthetic construct
  source 1..20: mol_type = other DNA
aagagggaatacttctaaac

SEQ ID NO: 104219 - DNA, 20 bp, synthetic construct
  source 1..20: mol_type = other DNA
gaagagggaatacttctaaa

SEQ ID NO: 104220 - DNA, 20 bp, synthetic construct
  source 1..20: mol_type = other DNA
ggaagagggaatacttctaa

SEQ ID NO: 104221 - DNA, 20 bp, synthetic construct
  source 1..20: mol_type = other DNA
aggaagagggaatacttcta

SEQ ID NO: 104222 - DNA, 20 bp, synthetic construct
  source 1..20: mol_type = other DNA
caggaagagggaatacttct

SEQ ID NO: 104223 - DNA, 20 bp, synthetic construct
  source 1..20: mol_type = other DNA
acaggaagagggaatacttc

SEQ ID NO: 104224 - DNA, 20 bp, synthetic construct
  source 1..20: mol_type = other DNA
tacaggaagagggaatactt

SEQ ID NO: 104225 - DNA, 20 bp, synthetic construct
  source 1..20: mol_type = other DNA
atacaggaagagggaatact

SEQ ID NO: 104226 - DNA, 20 bp, synthetic construct
  source 1..20: mol_type = other DNA
aatacaggaagagggaatac

SEQ ID NO: 104227 - DNA, 20 bp, synthetic construct
  source 1..20: mol_type = other DNA
caatacaggaagagggaata

SEQ ID NO: 104228 - DNA, 20 bp, synthetic construct
  source 1..20: mol_type = other DNA
acaatacaggaagagggaat

SEQ ID NO: 104229 - DNA, 20 bp, synthetic construct
  source 1..20: mol_type = other DNA
cacaatacaggaagagggaa

SEQ ID NO: 104230 - DNA, 20 bp, synthetic construct
  source 1..20: mol_type = other DNA
acacaatacaggaagaggga

SEQ ID NO: 104231 - DNA, 20 bp, synthetic construct
  source 1..20: mol_type = other DNA
aacacaatacaggaagaggg

SEQ ID NO: 104232 - DNA, 20 bp, synthetic construct
  source 1..20: mol_type = other DNA
caacacaatacaggaagagg

SEQ ID NO: 104233 - DNA, 20 bp, synthetic construct
  source 1..20: mol_type = other DNA
ccaacacaatacaggaagag

SEQ ID NO: 104234 - DNA, 20 bp, synthetic construct
  source 1..20: mol_type = other DNA
tccaacacaatacaggaaga

SEQ ID NO: 104235 - DNA, 20 bp, synthetic construct
  source 1..20: mol_type = other DNA
ttccaacacaatacaggaag

SEQ ID NO: 104236 - DNA, 20 bp, synthetic construct
  source 1..20: mol_type = other DNA
attccaacacaatacaggaa

SEQ ID NO: 104237 - DNA, 20 bp, synthetic construct
  source 1..20: mol_type = other DNA
tattccaacacaatacagga

SEQ ID NO: 104238 - DNA, 20 bp, synthetic construct
  source 1..20: mol_type = other DNA
ctattccaacacaatacagg

SEQ ID NO: 104239 - DNA, 20 bp, synthetic construct
  source 1..20: mol_type = other DNA
actattccaacacaatacag

SEQ ID NO: 104240 - DNA, 20 bp, synthetic construct
  source 1..20: mol_type = other DNA
aactattccaacacaataca

SEQ ID NO: 104241 - DNA, 20 bp, synthetic construct
  source 1..20: mol_type = other DNA
aaactattccaacacaatac

SEQ ID NO: 104242 - DNA, 20 bp, synthetic construct
  source 1..20: mol_type = other DNA
caaactattccaacacaata

SEQ ID NO: 104243 - DNA, 20 bp, synthetic construct
  source 1..20: mol_type = other DNA
tcaaactattccaacacaat

SEQ ID NO: 104244 - DNA, 20 bp, synthetic construct
  source 1..20: mol_type = other DNA
ctcaaactattccaacacaa

SEQ ID NO: 104245 - DNA, 20 bp, synthetic construct
  source 1..20: mol_type = other DNA
actcaaactattccaacaca

SEQ ID NO: 104246 - DNA, 20 bp, synthetic construct
  source 1..20: mol_type = other DNA
tactcaaactattccaacac

SEQ ID NO: 104247 - DNA, 20 bp, synthetic construct
  source 1..20: mol_type = other DNA
ctactcaaactattccaaca

SEQ ID NO: 104248 - DNA, 20 bp, synthetic construct
  source 1..20: mol_type = other DNA
cctactcaaactattccaac

SEQ ID NO: 104249 - DNA, 20 bp, synthetic construct
  source 1..20: mol_type = other DNA
tcctactcaaactattccaa

SEQ ID NO: 104250 - DNA, 20 bp, synthetic construct
  source 1..20: mol_type = other DNA
atcctactcaaactattcca

SEQ ID NO: 104251 - DNA, 20 bp, synthetic construct
  source 1..20: mol_type = other DNA
aatcctactcaaactattcc

SEQ ID NO: 104252 - DNA, 20 bp, synthetic construct
  source 1..20: mol_type = other DNA
caatcctactcaaactattc

SEQ ID NO: 104253 - DNA, 20 bp, synthetic construct
  source 1..20: mol_type = other DNA
ccaatcctactcaaactatt

SEQ ID NO: 104254 - DNA, 20 bp, synthetic construct
  source 1..20: mol_type = other DNA
accaatcctactcaaactat

SEQ ID NO: 104255 - DNA, 20 bp, synthetic construct
  source 1..20: mol_type = other DNA
taccaatcctactcaaacta

SEQ ID NO: 104256 - DNA, 20 bp, synthetic construct
  source 1..20: mol_type = other DNA
ataccaatcctactcaaact

SEQ ID NO: 104257 - DNA, 20 bp, synthetic construct
  source 1..20: mol_type = other DNA
aataccaatcctactcaaac

SEQ ID NO: 104258 - DNA, 20 bp, synthetic construct
  source 1..20: mol_type = other DNA
taataccaatcctactcaaa

SEQ ID NO: 104259 - DNA, 20 bp, synthetic construct
  source 1..20: mol_type = other DNA
ctaataccaatcctactcaa

SEQ ID NO: 104260 - DNA, 20 bp, synthetic construct
  source 1..20: mol_type = other DNA
actaataccaatcctactca

SEQ ID NO: 104261 - DNA, 20 bp, synthetic construct
  source 1..20: mol_type = other DNA
aactaataccaatcctactc

SEQ ID NO: 104262 - DNA, 20 bp, synthetic construct
  source 1..20: mol_type = other DNA
gaactaataccaatcctact

SEQ ID NO: 104263 - DNA, 20 bp, synthetic construct
  source 1..20: mol_type = other DNA
agaactaataccaatcctac

SEQ ID NO: 104264 - DNA, 20 bp, synthetic construct
  source 1..20: mol_type = other DNA
aagaactaataccaatccta

SEQ ID NO: 104265 - DNA, 20 bp, synthetic construct
  source 1..20: mol_type = other DNA
gaagaactaataccaatcct

SEQ ID NO: 104266 - DNA, 20 bp, synthetic construct
  source 1..20: mol_type = other DNA
agaagaactaataccaatcc

SEQ ID NO: 104267 - DNA, 20 bp, synthetic construct
  source 1..20: mol_type = other DNA
aagaagaactaataccaatc

SEQ ID NO: 104268 - DNA, 20 bp, synthetic construct
  source 1..20: mol_type = other DNA
aaagaagaactaataccaat

SEQ ID NO: 104269 - DNA, 20 bp, synthetic construct
  source 1..20: mol_type = other DNA
taaagaagaactaataccaa

SEQ ID NO: 104270 - DNA, 20 bp, synthetic construct
  source 1..20: mol_type = other DNA
ttaaagaagaactaatacca

SEQ ID NO: 104271 - DNA, 20 bp, synthetic construct
  source 1..20: mol_type = other DNA
tttaaagaagaactaatacc

SEQ ID NO: 104272 - DNA, 20 bp, synthetic construct
  source 1..20: mol_type = other DNA
ctttaaagaagaactaatac

SEQ ID NO: 104273 - DNA, 20 bp, synthetic construct
  source 1..20: mol_type = other DNA
cctttaaagaagaactaata

SEQ ID NO: 104274 - DNA, 20 bp, synthetic construct
  source 1..20: mol_type = other DNA
acctttaaagaagaactaat

SEQ ID NO: 104275 - DNA, 20 bp, synthetic construct
  source 1..20: mol_type = other DNA
aacctttaaagaagaactaa

SEQ ID NO: 104276 - DNA, 20 bp, synthetic construct
  source 1..20: mol_type = other DNA
aaacctttaaagaagaacta

SEQ ID NO: 104277 - DNA, 20 bp, synthetic construct
  source 1..20: mol_type = other DNA
taaacctttaaagaagaact

SEQ ID NO: 104278 - DNA, 20 bp, synthetic construct
  source 1..20: mol_type = other DNA
ctaaacctttaaagaagaac

SEQ ID NO: 104279 - DNA, 20 bp, synthetic construct
  source 1..20: mol_type = other DNA
actaaacctttaaagaagaa

SEQ ID NO: 104280 - DNA, 20 bp, synthetic construct
  source 1..20: mol_type = other DNA
tactaaacctttaaagaaga

SEQ ID NO: 104281 - DNA, 20 bp, synthetic construct
  source 1..20: mol_type = other DNA
ctactaaacctttaaagaag

SEQ ID NO: 104282 - DNA, 20 bp, synthetic construct
  source 1..20: mol_type = other DNA
tctactaaacctttaaagaa

SEQ ID NO: 104283 - DNA, 20 bp, synthetic construct
  source 1..20: mol_type = other DNA
ttctactaaacctttaaaga

SEQ ID NO: 104284 - DNA, 20 bp, synthetic construct
  source 1..20: mol_type = other DNA
attctactaaacctttaaag

SEQ ID NO: 104285 - DNA, 20 bp, synthetic construct
  source 1..20: mol_type = other DNA
aattctactaaacctttaaa

SEQ ID NO: 104286 - DNA, 20 bp, synthetic construct
  source 1..20: mol_type = other DNA
gaattctactaaacctttaa

SEQ ID NO: 104287 - DNA, 20 bp, synthetic construct
  source 1..20: mol_type = other DNA
tgaattctactaaaccttta

SEQ ID NO: 104288 - DNA, 20 bp, synthetic construct
  source 1..20: mol_type = other DNA
ctgaattctactaaaccttt

SEQ ID NO: 104289 - DNA, 20 bp, synthetic construct
  source 1..20: mol_type = other DNA
gctgaattctactaaacctt

SEQ ID NO: 104290 - DNA, 20 bp, synthetic construct
  source 1..20: mol_type = other DNA
tgctgaattctactaaacct

SEQ ID NO: 104291 - DNA, 20 bp, synthetic construct
  source 1..20: mol_type = other DNA
ctgctgaattctactaaacc

SEQ ID NO: 104292 - DNA, 20 bp, synthetic construct
  source 1..20: mol_type = other DNA
actgctgaattctactaaac

SEQ ID NO: 104293 - DNA, 20 bp, synthetic construct
  source 1..20: mol_type = other DNA
cactgctgaattctactaaa

SEQ ID NO: 104294 - DNA, 20 bp, synthetic construct
  source 1..20: mol_type = other DNA
tcactgctgaattctactaa

SEQ ID NO: 104295 - DNA, 20 bp, synthetic construct
  source 1..20: mol_type = other DNA
ttcactgctgaattctacta

SEQ ID NO: 104296 - DNA, 20 bp, synthetic construct
  source 1..20: mol_type = other DNA
cttcactgctgaattctact

SEQ ID NO: 104297 - DNA, 20 bp, synthetic construct
  source 1..20: mol_type = other DNA
gcttcactgctgaattctac

SEQ ID NO: 104298 - DNA, 20 bp, synthetic construct
  source 1..20: mol_type = other DNA
ggcttcactgctgaattcta

SEQ ID NO: 104299 - DNA, 20 bp, synthetic construct
  source 1..20: mol_type = other DNA
tggcttcactgctgaattct

SEQ ID NO: 104300 - DNA, 20 bp, synthetic construct
  source 1..20: mol_type = other DNA
atggcttcactgctgaattc

SEQ ID NO: 104301 - DNA, 20 bp, synthetic construct
  source 1..20: mol_type = other DNA
gatggcttcactgctgaatt

SEQ ID NO: 104302 - DNA, 20 bp, synthetic construct
  source 1..20: mol_type = other DNA
tgatggcttcactgctgaat

SEQ ID NO: 104303 - DNA, 20 bp, synthetic construct
  source 1..20: mol_type = other DNA
ctgatggcttcactgctgaa

SEQ ID NO: 104304 - DNA, 20 bp, synthetic construct
  source 1..20: mol_type = other DNA
cctgatggcttcactgctga

SEQ ID NO: 104305 - DNA, 20 bp, synthetic construct
  source 1..20: mol_type = other DNA
acctgatggcttcactgctg

SEQ ID NO: 104306 - DNA, 20 bp, synthetic construct
  source 1..20: mol_type = other DNA
gacctgatggcttcactgct

SEQ ID NO: 104307 - DNA, 20 bp, synthetic construct
  source 1..20: mol_type = other DNA
ggacctgatggcttcactgc

SEQ ID NO: 104308 - DNA, 20 bp, synthetic construct
  source 1..20: mol_type = other DNA
tggacctgatggcttcactg

SEQ ID NO: 104309 - DNA, 20 bp, synthetic construct
  source 1..20: mol_type = other DNA
atggacctgatggcttcact

SEQ ID NO: 104310 - DNA, 20 bp, synthetic construct
  source 1..20: mol_type = other DNA
catggacctgatggcttcac

SEQ ID NO: 104311 - DNA, 20 bp, synthetic construct
  source 1..20: mol_type = other DNA
ccatggacctgatggcttca

SEQ ID NO: 104312 - DNA, 20 bp, synthetic construct
  source 1..20: mol_type = other DNA
gccatggacctgatggcttc

SEQ ID NO: 104313 - DNA, 20 bp, synthetic construct
  source 1..20: mol_type = other DNA
agccatggacctgatggctt

SEQ ID NO: 104314 - DNA, 20 bp, synthetic construct
  source 1..20: mol_type = other DNA
aagccatggacctgatggct

SEQ ID NO: 104315 - DNA, 20 bp, synthetic construct
  source 1..20: mol_type = other DNA
aaagccatggacctgatggc

SEQ ID NO: 104316 - DNA, 20 bp, synthetic construct
  source 1..20: mol_type = other DNA
aaaagccatggacctgatgg

SEQ ID NO: 104317 - DNA, 20 bp, synthetic construct
  source 1..20: mol_type = other DNA
gaaaagccatggacctgatg

SEQ ID NO: 104318 - DNA, 20 bp, synthetic construct
  source 1..20: mol_type = other DNA
agaaaagccatggacctgat

SEQ ID NO: 104319 - DNA, 20 bp, synthetic construct
  source 1..20: mol_type = other DNA
aagaaaagccatggacctga

SEQ ID NO: 104320 - DNA, 20 bp, synthetic construct
  source 1..20: mol_type = other DNA
aaagaaaagccatggacctg

SEQ ID NO: 104321 - DNA, 20 bp, synthetic construct
  source 1..20: mol_type = other DNA
caaagaaaagccatggacct

SEQ ID NO: 104322 - DNA, 20 bp, synthetic construct
  source 1..20: mol_type = other DNA
gcaaagaaaagccatggacc

SEQ ID NO: 104323 - DNA, 20 bp, synthetic construct
  source 1..20: mol_type = other DNA
agcaaagaaaagccatggac

SEQ ID NO: 104324 - DNA, 20 bp, synthetic construct
  source 1..20: mol_type = other DNA
cagcaaagaaaagccatgga

SEQ ID NO: 104325 - DNA, 20 bp, synthetic construct
  source 1..20: mol_type = other DNA
ccagcaaagaaaagccatgg

SEQ ID NO: 104326 - DNA, 20 bp, synthetic construct
  source 1..20: mol_type = other DNA
cccagcaaagaaaagccatg

SEQ ID NO: 104327 - DNA, 20 bp, synthetic construct
  source 1..20: mol_type = other DNA
tcccagcaaagaaaagccat

SEQ ID NO: 104328 - DNA, 20 bp, synthetic construct
  source 1..20: mol_type = other DNA
ctcccagcaaagaaaagcca

SEQ ID NO: 104329 - DNA, 20 bp, synthetic construct
  source 1..20: mol_type = other DNA
tctcccagcaaagaaaagcc

SEQ ID NO: 104330 - DNA, 20 bp, synthetic construct
  source 1..20: mol_type = other DNA
gtctcccagcaaagaaaagc

SEQ ID NO: 104331 - DNA, 20 bp, synthetic construct
  source 1..20: mol_type = other DNA
agtctcccagcaaagaaaag

SEQ ID NO: 104332 - DNA, 20 bp, synthetic construct
  source 1..20: mol_type = other DNA
tagtctcccagcaaagaaaa

SEQ ID NO: 104333 - DNA, 20 bp, synthetic construct
  source 1..20: mol_type = other DNA
atagtctcccagcaaagaaa

SEQ ID NO: 104334 - DNA, 20 bp, synthetic construct
  source 1..20: mol_type = other DNA
aatagtctcccagcaaagaa

SEQ ID NO: 104335 - DNA, 20 bp, synthetic construct
  source 1..20: mol_type = other DNA
aaatagtctcccagcaaaga

SEQ ID NO: 104336 - DNA, 20 bp, synthetic construct
  source 1..20: mol_type = other DNA
gaaatagtctcccagcaaag

SEQ ID NO: 104337 - DNA, 20 bp, synthetic construct
  source 1..20: mol_type = other DNA
agaaatagtctcccagcaaa

SEQ ID NO: 104338 - DNA, 20 bp, synthetic construct
  source 1..20: mol_type = other DNA
aagaaatagtctcccagcaa

SEQ ID NO: 104339 - DNA, 20 bp, synthetic construct
  source 1..20: mol_type = other DNA
taagaaatagtctcccagca

SEQ ID NO: 104340 - DNA, 20 bp, synthetic construct
  source 1..20: mol_type = other DNA
ataagaaatagtctcccagc

SEQ ID NO: 104341 - DNA, 20 bp, synthetic construct
  source 1..20: mol_type = other DNA
tataagaaatagtctcccag

SEQ ID NO: 104342 - DNA, 20 bp, synthetic construct
  source 1..20: mol_type = other DNA
ctataagaaatagtctccca

SEQ ID NO: 104343 - DNA, 20 bp, synthetic construct
  source 1..20: mol_type = other DNA
gctataagaaatagtctccc

SEQ ID NO: 104344 - DNA, 20 bp, synthetic construct
  source 1..20: mol_type = other DNA
agctataagaaatagtctcc

SEQ ID NO: 104345 - DNA, 20 bp, synthetic construct
  source 1..20: mol_type = other DNA
aagctataagaaatagtctc

SEQ ID NO: 104346 - DNA, 20 bp, synthetic construct
  source 1..20: mol_type = other DNA
aaagctataagaaatagtct

SEQ ID NO: 104347 - DNA, 20 bp, synthetic construct
  source 1..20: mol_type = other DNA
caaagctataagaaatagtc

SEQ ID NO: 104348 - DNA, 20 bp, synthetic construct
  source 1..20: mol_type = other DNA
tcaaagctataagaaatagt

SEQ ID NO: 104349 - DNA, 20 bp, synthetic construct
  source 1..20: mol_type = other DNA
atcaaagctataagaaatag

SEQ ID NO: 104350 - DNA, 20 bp, synthetic construct
  source 1..20: mol_type = other DNA
gatcaaagctataagaaata

SEQ ID NO: 104351 - DNA, 20 bp, synthetic construct
  source 1..20: mol_type = other DNA
agatcaaagctataagaaat

SEQ ID NO: 104352 - DNA, 20 bp, synthetic construct
  source 1..20: mol_type = other DNA
gagatcaaagctataagaaa

SEQ ID NO: 104353 - DNA, 20 bp, synthetic construct
  source 1..20: mol_type = other DNA
cgagatcaaagctataagaa

SEQ ID NO: 104354 - DNA, 20 bp, synthetic construct
  source 1..20: mol_type = other DNA
acgagatcaaagctataaga

SEQ ID NO: 104355 - DNA, 20 bp, synthetic construct
  source 1..20: mol_type = other DNA
aacgagatcaaagctataag

SEQ ID NO: 104356 - DNA, 20 bp, synthetic construct
  source 1..20: mol_type = other DNA
taacgagatcaaagctataa

SEQ ID NO: 104357 - DNA, 20 bp, synthetic construct
  source 1..20: mol_type = other DNA
gtaacgagatcaaagctata

SEQ ID NO: 104358 - DNA, 20 bp, synthetic construct
  source 1..20: mol_type = other DNA
agtaacgagatcaaagctat

SEQ ID NO: 104359 - DNA, 20 bp, synthetic construct
  source 1..20: mol_type = other DNA
aagtaacgagatcaaagcta

SEQ ID NO: 104360 - DNA, 20 bp, synthetic construct
  source 1..20: mol_type = other DNA
caagtaacgagatcaaagct

SEQ ID NO: 104361 - DNA, 20 bp, synthetic construct
  source 1..20: mol_type = other DNA
acaagtaacgagatcaaagc

SEQ ID NO: 104362 - DNA, 20 bp, synthetic construct
  source 1..20: mol_type = other DNA
aacaagtaacgagatcaaag

SEQ ID NO: 104363 - DNA, 20 bp, synthetic construct
  source 1..20: mol_type = other DNA
taacaagtaacgagatcaaa

SEQ ID NO: 104364 - DNA, 20 bp, synthetic construct
  source 1..20: mol_type = other DNA
ataacaagtaacgagatcaa

SEQ ID NO: 104365 - DNA, 20 bp, synthetic construct
  source 1..20: mol_type = other DNA
aataacaagtaacgagatca

SEQ ID NO: 104366 - DNA, 20 bp, synthetic construct
  source 1..20: mol_type = other DNA
caataacaagtaacgagatc

SEQ ID NO: 104367 - DNA, 20 bp, synthetic construct
  source 1..20: mol_type = other DNA
ccaataacaagtaacgagat

SEQ ID NO: 104368 - DNA, 20 bp, synthetic construct
  source 1..20: mol_type = other DNA
accaataacaagtaacgaga

SEQ ID NO: 104369 - DNA, 20 bp, synthetic construct
  source 1..20: mol_type = other DNA
gaccaataacaagtaacgag

SEQ ID NO: 104370 - DNA, 20 bp, synthetic construct
  source 1..20: mol_type = other DNA
agaccaataacaagtaacga

SEQ ID NO: 104371 - DNA, 20 bp, synthetic construct
  source 1..20: mol_type = other DNA
gagaccaataacaagtaacg

SEQ ID NO: 104372 - DNA, 20 bp, synthetic construct
  source 1..20: mol_type = other DNA
cgagaccaataacaagtaac

SEQ ID NO: 104373 - DNA, 20 bp, synthetic construct
  source 1..20: mol_type = other DNA
acgagaccaataacaagtaa

SEQ ID NO: 104374 - DNA, 20 bp, synthetic construct
  source 1..20: mol_type = other DNA
aacgagaccaataacaagta

SEQ ID NO: 104375 - DNA, 20 bp, synthetic construct
  source 1..20: mol_type = other DNA
taacgagaccaataacaagt

SEQ ID NO: 104376 - DNA, 20 bp, synthetic construct
  source 1..20: mol_type = other DNA
gtaacgagaccaataacaag

SEQ ID NO: 104377 - DNA, 20 bp, synthetic construct
  source 1..20: mol_type = other DNA
agtaacgagaccaataacaa

SEQ ID NO: 104378 - DNA, 20 bp, synthetic construct
  source 1..20: mol_type = other DNA
aagtaacgagaccaataaca

SEQ ID NO: 104379 - DNA, 20 bp, synthetic construct
  source 1..20: mol_type = other DNA
caagtaacgagaccaataac

SEQ ID NO: 104380 - DNA, 20 bp, synthetic construct
  source 1..20: mol_type = other DNA
acaagtaacgagaccaataa

SEQ ID NO: 104381 - DNA, 20 bp, synthetic construct
  source 1..20: mol_type = other DNA
aacaagtaacgagaccaata

SEQ ID NO: 104382 - DNA, 20 bp, synthetic construct
  source 1..20: mol_type = other DNA
taacaagtaacgagaccaat

SEQ ID NO: 104383 - DNA, 20 bp, synthetic construct
  source 1..20: mol_type = other DNA
ataacaagtaacgagaccaa

SEQ ID NO: 104384 - DNA, 20 bp, synthetic construct
  source 1..20: mol_type = other DNA
aataacaagtaacgagacca

SEQ ID NO: 104385 - DNA, 20 bp, synthetic construct
  source 1..20: mol_type = other DNA
caataacaagtaacgagacc

SEQ ID NO: 104386 - DNA, 20 bp, synthetic construct
  source 1..20: mol_type = other DNA
acaataacaagtaacgagac

SEQ ID NO: 104387 - DNA, 20 bp, synthetic construct
  source 1..20: mol_type = other DNA
tacaataacaagtaacgaga

SEQ ID NO: 104388 - DNA, 20 bp, synthetic construct
  source 1..20: mol_type = other DNA
atacaataacaagtaacgag

SEQ ID NO: 104389 - DNA, 20 bp, synthetic construct
  source 1..20: mol_type = other DNA
aatacaataacaagtaacga

SEQ ID NO: 104390 - DNA, 20 bp, synthetic construct
  source 1..20: mol_type = other DNA
aaatacaataacaagtaacg

SEQ ID NO: 104391 - DNA, 20 bp, synthetic construct
  source 1..20: mol_type = other DNA
caaatacaataacaagtaac

SEQ ID NO: 104392 - DNA, 20 bp, synthetic construct
  source 1..20: mol_type = other DNA
ccaaatacaataacaagtaa

SEQ ID NO: 104393 - DNA, 20 bp, synthetic construct
  source 1..20: mol_type = other DNA
cccaaatacaataacaagta

SEQ ID NO: 104394 - DNA, 20 bp, synthetic construct
  source 1..20: mol_type = other DNA
acccaaatacaataacaagt

SEQ ID NO: 104395 - DNA, 20 bp, synthetic construct
  source 1..20: mol_type = other DNA
aacccaaatacaataacaag

SEQ ID NO: 104396 - DNA, 20 bp, synthetic construct
  source 1..20: mol_type = other DNA
aaacccaaatacaataacaa

SEQ ID NO: 104397 - DNA, 20 bp, synthetic construct
  source 1..20: mol_type = other DNA
aaaacccaaatacaataaca

SEQ ID NO: 104398 - DNA, 20 bp, synthetic construct
  source 1..20: mol_type = other DNA
caaaacccaaatacaataac

SEQ ID NO: 104399 - DNA, 20 bp, synthetic construct
  source 1..20: mol_type = other DNA
ccaaaacccaaatacaataa

SEQ ID NO: 104400 - DNA, 20 bp, synthetic construct
  source 1..20: mol_type = other DNA
tccaaaacccaaatacaata

SEQ ID NO: 104401 - DNA, 20 bp, synthetic construct
  source 1..20: mol_type = other DNA
atccaaaacccaaatacaat

SEQ ID NO: 104402 - DNA, 20 bp, synthetic construct
  source 1..20: mol_type = other DNA
aatccaaaacccaaatacaa

SEQ ID NO: 104403 - DNA, 20 bp, synthetic construct
  source 1..20: mol_type = other DNA
aaatccaaaacccaaataca

SEQ ID NO: 104404 - DNA, 20 bp, synthetic construct
  source 1..20: mol_type = other DNA
gaaatccaaaacccaaatac

SEQ ID NO: 104405 - DNA, 20 bp, synthetic construct
  source 1..20: mol_type = other DNA
agaaatccaaaacccaaata

SEQ ID NO: 104406 - DNA, 20 bp, synthetic construct
  source 1..20: mol_type = other DNA
aagaaatccaaaacccaaat

SEQ ID NO: 104407 - DNA, 20 bp, synthetic construct
  source 1..20: mol_type = other DNA
aaagaaatccaaaacccaaa

SEQ ID NO: 104408 - DNA, 20 bp, synthetic construct
  source 1..20: mol_type = other DNA
caaagaaatccaaaacccaa

SEQ ID NO: 104409 - DNA, 20 bp, synthetic construct
  source 1..20: mol_type = other DNA
acaaagaaatccaaaaccca

SEQ ID NO: 104410 - DNA, 20 bp, synthetic construct
  source 1..20: mol_type = other DNA
cacaaagaaatccaaaaccc

SEQ ID NO: 104411 - DNA, 20 bp, synthetic construct
  source 1..20: mol_type = other DNA
ccacaaagaaatccaaaacc

SEQ ID NO: 104412 - DNA, 20 bp, synthetic construct
  source 1..20: mol_type = other DNA
accacaaagaaatccaaaac

SEQ ID NO: 104413 - DNA, 20 bp, synthetic construct
  source 1..20: mol_type = other DNA
aaccacaaagaaatccaaaa

SEQ ID NO: 104414 - DNA, 20 bp, synthetic construct
  source 1..20: mol_type = other DNA
gaaccacaaagaaatccaaa

SEQ ID NO: 104415 - DNA, 20 bp, synthetic construct
  source 1..20: mol_type = other DNA
tgaaccacaaagaaatccaa

SEQ ID NO: 104416 - DNA, 20 bp, synthetic construct
  source 1..20: mol_type = other DNA
ctgaaccacaaagaaatcca

SEQ ID NO: 104417 - DNA, 20 bp, synthetic construct
  source 1..20: mol_type = other DNA
actgaaccacaaagaaatcc

SEQ ID NO: 104418 - DNA, 20 bp, synthetic construct
  source 1..20: mol_type = other DNA
gactgaaccacaaagaaatc

SEQ ID NO: 104419 - DNA, 20 bp, synthetic construct
  source 1..20: mol_type = other DNA
agactgaaccacaaagaaat

SEQ ID NO: 104420 - DNA, 20 bp, synthetic construct
  source 1..20: mol_type = other DNA
aagactgaaccacaaagaaa

SEQ ID NO: 104421 - DNA, 20 bp, synthetic construct
  source 1..20: mol_type = other DNA
caagactgaaccacaaagaa

SEQ ID NO: 104422 - DNA, 20 bp, synthetic construct
  source 1..20: mol_type = other DNA
ccaagactgaaccacaaaga

SEQ ID NO: 104423 - DNA, 20 bp, synthetic construct
  source 1..20: mol_type = other DNA
accaagactgaaccacaaag

SEQ ID NO: 104424 - DNA, 20 bp, synthetic construct
  source 1..20: mol_type = other DNA
taccaagactgaaccacaaa

SEQ ID NO: 104425 - DNA, 20 bp, synthetic construct
  source 1..20: mol_type = other DNA
ctaccaagactgaaccacaa

SEQ ID NO: 104426 - DNA, 20 bp, synthetic construct
  source 1..20: mol_type = other DNA
cctaccaagactgaaccaca

SEQ ID NO: 104427 - DNA, 20 bp, synthetic construct
  source 1..20: mol_type = other DNA
acctaccaagactgaaccac

SEQ ID NO: 104428 - DNA, 20 bp, synthetic construct
  source 1..20: mol_type = other DNA
aacctaccaagactgaacca

SEQ ID NO: 104429 - DNA, 20 bp, synthetic construct
  source 1..20: mol_type = other DNA
caacctaccaagactgaacc

SEQ ID NO: 104430 - DNA, 20 bp, synthetic construct
  source 1..20: mol_type = other DNA
acaacctaccaagactgaac

SEQ ID NO: 104431 - DNA, 20 bp, synthetic construct
  source 1..20: mol_type = other DNA
tacaacctaccaagactgaa

SEQ ID NO: 104432 - DNA, 20 bp, synthetic construct
  source 1..20: mol_type = other DNA
atacaacctaccaagactga

SEQ ID NO: 104433 - DNA, 20 bp, synthetic construct
  source 1..20: mol_type = other DNA
catacaacctaccaagactg

SEQ ID NO: 104434 - DNA, 20 bp, synthetic construct
  source 1..20: mol_type = other DNA
acatacaacctaccaagact

SEQ ID NO: 104435 - DNA, 20 bp, synthetic construct
  source 1..20: mol_type = other DNA
cacatacaacctaccaagac

SEQ ID NO: 104436 - DNA, 20 bp, synthetic construct
  source 1..20: mol_type = other DNA
acacatacaacctaccaaga

SEQ ID NO: 104437 - DNA, 20 bp, synthetic construct
  source 1..20: mol_type = other DNA
gacacatacaacctaccaag

SEQ ID NO: 104438 - DNA, 20 bp, synthetic construct
  source 1..20: mol_type = other DNA
agacacatacaacctaccaa

SEQ ID NO: 104439 - DNA, 20 bp, synthetic construct
  source 1..20: mol_type = other DNA
tagacacatacaacctacca

SEQ ID NO: 104440 - DNA, 20 bp, synthetic construct
  source 1..20: mol_type = other DNA
ctagacacatacaacctacc

SEQ ID NO: 104441 - DNA, 20 bp, synthetic construct
  source 1..20: mol_type = other DNA
cctagacacatacaacctac

SEQ ID NO: 104442 - DNA, 20 bp, synthetic construct
  source 1..20: mol_type = other DNA
tcctagacacatacaaccta

SEQ ID NO: 104443 - DNA, 20 bp, synthetic construct
  source 1..20: mol_type = other DNA
ttcctagacacatacaacct

SEQ ID NO: 104444 - DNA, 20 bp, synthetic construct
  source 1..20: mol_type = other DNA
attcctagacacatacaacc

SEQ ID NO: 104445 - DNA, 20 bp, synthetic construct
  source 1..20: mol_type = other DNA
aattcctagacacatacaac

SEQ ID NO: 104446 - DNA, 20 bp, synthetic construct
  source 1..20: mol_type = other DNA
aaattcctagacacatacaa

SEQ ID NO: 104447 - DNA, 20 bp, synthetic construct
  source 1..20: mol_type = other DNA
taaattcctagacacataca

SEQ ID NO: 104448 - DNA, 20 bp, synthetic construct
  source 1..20: mol_type = other DNA
ataaattcctagacacatac

SEQ ID NO: 104449 - DNA, 20 bp, synthetic construct
  source 1..20: mol_type = other DNA
gataaattcctagacacata

SEQ ID NO: 104450 - DNA, 20 bp, synthetic construct
  source 1..20: mol_type = other DNA
ggataaattcctagacacat

SEQ ID NO: 104451 - DNA, 20 bp, synthetic construct
  source 1..20: mol_type = other DNA
tggataaattcctagacaca

SEQ ID NO: 104452 - DNA, 20 bp, synthetic construct
  source 1..20: mol_type = other DNA
atggataaattcctagacac

SEQ ID NO: 104453 - DNA, 20 bp, synthetic construct
  source 1..20: mol_type = other DNA
aatggataaattcctagaca

SEQ ID NO: 104454 - DNA, 20 bp, synthetic construct
  source 1..20: mol_type = other DNA
aaatggataaattcctagac

SEQ ID NO: 104455 - DNA, 20 bp, synthetic construct
  source 1..20: mol_type = other DNA
gaaatggataaattcctaga

SEQ ID NO: 104456 - DNA, 20 bp, synthetic construct
  source 1..20: mol_type = other DNA
agaaatggataaattcctag

SEQ ID NO: 104457 - DNA, 20 bp, synthetic construct
  source 1..20: mol_type = other DNA
aagaaatggataaattccta

SEQ ID NO: 104458 - DNA, 20 bp, synthetic construct
  source 1..20: mol_type = other DNA
gaagaaatggataaattcct

SEQ ID NO: 104459 - DNA, 20 bp, synthetic construct
  source 1..20: mol_type = other DNA
tgaagaaatggataaattcc

SEQ ID NO: 104460 - DNA, 20 bp, synthetic construct
  source 1..20: mol_type = other DNA
ttgaagaaatggataaattc

SEQ ID NO: 104461 - DNA, 20 bp, synthetic construct
  source 1..20: mol_type = other DNA
cttgaagaaatggataaatt

SEQ ID NO: 104462 - DNA, 20 bp, synthetic construct
  source 1..20: mol_type = other DNA
ccttgaagaaatggataaat

SEQ ID NO: 104463 - DNA, 20 bp, synthetic construct
  source 1..20: mol_type = other DNA
accttgaagaaatggataaa

SEQ ID NO: 104464 - DNA, 20 bp, synthetic construct
  source 1..20: mol_type = other DNA
aaccttgaagaaatggataa

SEQ ID NO: 104465 - DNA, 20 bp, synthetic construct
  source 1..20: mol_type = other DNA
aaaccttgaagaaatggata

SEQ ID NO: 104466 - DNA, 20 bp, synthetic construct
  source 1..20: mol_type = other DNA
aaaaccttgaagaaatggat

SEQ ID NO: 104467 - DNA, 20 bp, synthetic construct
  source 1..20: mol_type = other DNA
gaaaaccttgaagaaatgga

SEQ ID NO: 104468 - DNA, 20 bp, synthetic construct
  source 1..20: mol_type = other DNA
ggaaaaccttgaagaaatgg

SEQ ID NO: 104469 - DNA, 20 bp, synthetic construct
  source 1..20: mol_type = other DNA
tggaaaaccttgaagaaatg

SEQ ID NO: 104470 - DNA, 20 bp, synthetic construct
  source 1..20: mol_type = other DNA
ttggaaaaccttgaagaaat

SEQ ID NO: 104471 - DNA, 20 bp, synthetic construct
  source 1..20: mol_type = other DNA
attggaaaaccttgaagaaa

SEQ ID NO: 104472 - DNA, 20 bp, synthetic construct
  source 1..20: mol_type = other DNA
cattggaaaaccttgaagaa

SEQ ID NO: 104473 - DNA, 20 bp, synthetic construct
  source 1..20: mol_type = other DNA
acattggaaaaccttgaaga

SEQ ID NO: 104474 - DNA, 20 bp, synthetic construct
  source 1..20: mol_type = other DNA
tacattggaaaaccttgaag

SEQ ID NO: 104475 - DNA, 20 bp, synthetic construct
  source 1..20: mol_type = other DNA
atacattggaaaaccttgaa

SEQ ID NO: 104476 - DNA, 20 bp, synthetic construct
  source 1..20: mol_type = other DNA
gatacattggaaaaccttga

SEQ ID NO: 104477 - DNA, 20 bp, synthetic construct
  source 1..20: mol_type = other DNA
tgatacattggaaaaccttg

SEQ ID NO: 104478 - DNA, 20 bp, synthetic construct
  source 1..20: mol_type = other DNA
ctgatacattggaaaacctt

SEQ ID NO: 104479 - DNA, 20 bp, synthetic construct
  source 1..20: mol_type = other DNA
gctgatacattggaaaacct

SEQ ID NO: 104480 - DNA, 20 bp, synthetic construct
  source 1..20: mol_type = other DNA
tgctgatacattggaaaacc

SEQ ID NO: 104481 - DNA, 20 bp, synthetic construct
  source 1..20: mol_type = other DNA
atgctgatacattggaaaac

SEQ ID NO: 104482 - DNA, 20 bp, synthetic construct
  source 1..20: mol_type = other DNA
tatgctgatacattggaaaa

SEQ ID NO: 104483 - DNA, 20 bp, synthetic construct
  source 1..20: mol_type = other DNA
atatgctgatacattggaaa

SEQ ID NO: 104484 - DNA, 20 bp, synthetic construct
  source 1..20: mol_type = other DNA
tatatgctgatacattggaa

SEQ ID NO: 104485 - DNA, 20 bp, synthetic construct
  source 1..20: mol_type = other DNA
ctatatgctgatacattgga

SEQ ID NO: 104486 - DNA, 20 bp, synthetic construct
  source 1..20: mol_type = other DNA
tctatatgctgatacattgg

SEQ ID NO: 104487 - DNA, 20 bp, synthetic construct
  source 1..20: mol_type = other DNA
atctatatgctgatacattg

SEQ ID NO: 104488 - DNA, 20 bp, synthetic construct
  source 1..20: mol_type = other DNA
catctatatgctgatacatt

SEQ ID NO: 104489 - DNA, 20 bp, synthetic construct
  source 1..20: mol_type = other DNA
gcatctatatgctgatacat

SEQ ID NO: 104490 - DNA, 20 bp, synthetic construct
  source 1..20: mol_type = other DNA
agcatctatatgctgataca

SEQ ID NO: 104491 - DNA, 20 bp, synthetic construct
  source 1..20: mol_type = other DNA
gagcatctatatgctgatac

SEQ ID NO: 104492 - DNA, 20 bp, synthetic construct
  source 1..20: mol_type = other DNA
tgagcatctatatgctgata

SEQ ID NO: 104493 - DNA, 20 bp, synthetic construct
  source 1..20: mol_type = other DNA
atgagcatctatatgctgat

SEQ ID NO: 104494 - DNA, 20 bp, synthetic construct
  source 1..20: mol_type = other DNA
tatgagcatctatatgctga

SEQ ID NO: 104495 - DNA, 20 bp, synthetic construct
  source 1..20: mol_type = other DNA
ctatgagcatctatatgctg

SEQ ID NO: 104496 - DNA, 20 bp, synthetic construct
  source 1..20: mol_type = other DNA
actatgagcatctatatgct

SEQ ID NO: 104497 - DNA, 20 bp, synthetic construct
  source 1..20: mol_type = other DNA
tactatgagcatctatatgc

SEQ ID NO: 104498 - DNA, 20 bp, synthetic construct
  source 1..20: mol_type = other DNA
ctactatgagcatctatatg

SEQ ID NO: 104499 - DNA, 20 bp, synthetic construct
  source 1..20: mol_type = other DNA
actactatgagcatctatat

SEQ ID NO: 104500 - DNA, 20 bp, synthetic construct
  source 1..20: mol_type = other DNA
gactactatgagcatctata

SEQ ID NO: 104501 - DNA, 20 bp, synthetic construct
  source 1..20: mol_type = other DNA
agactactatgagcatctat

SEQ ID NO: 104502 - DNA, 20 bp, synthetic construct
  source 1..20: mol_type = other DNA
gagactactatgagcatcta

SEQ ID NO: 104503 - DNA, 20 bp, synthetic construct
  source 1..20: mol_type = other DNA
agagactactatgagcatct

SEQ ID NO: 104504 - DNA, 20 bp, synthetic construct
  source 1..20: mol_type = other DNA
tagagactactatgagcatc

SEQ ID NO: 104505 - DNA, 20 bp, synthetic construct
  source 1..20: mol_type = other DNA
ttagagactactatgagcat

SEQ ID NO: 104506 - DNA, 20 bp, synthetic construct
  source 1..20: mol_type = other DNA
attagagactactatgagca

SEQ ID NO: 104507 - DNA, 20 bp, synthetic construct
  source 1..20: mol_type = other DNA
cattagagactactatgagc

SEQ ID NO: 104508 - DNA, 20 bp, synthetic construct
  source 1..20: mol_type = other DNA
tcattagagactactatgag

SEQ ID NO: 104509 - DNA, 20 bp, synthetic construct
  source 1..20: mol_type = other DNA
atcattagagactactatga

SEQ ID NO: 104510 - DNA, 20 bp, synthetic construct
  source 1..20: mol_type = other DNA
gatcattagagactactatg

SEQ ID NO: 104511 - DNA, 20 bp, synthetic construct
  source 1..20: mol_type = other DNA
ggatcattagagactactat

SEQ ID NO: 104512 - DNA, 20 bp, synthetic construct
  source 1..20: mol_type = other DNA
aggatcattagagactacta

SEQ ID NO: 104513 - DNA, 20 bp, synthetic construct
  source 1..20: mol_type = other DNA
aaggatcattagagactact

SEQ ID NO: 104514 - DNA, 20 bp, synthetic construct
  source 1..20: mol_type = other DNA
aaaggatcattagagactac

SEQ ID NO: 104515 - DNA, 20 bp, synthetic construct
  source 1..20: mol_type = other DNA
caaaggatcattagagacta

SEQ ID NO: 104516 - DNA, 20 bp, synthetic construct
  source 1..20: mol_type = other DNA
tcaaaggatcattagagact

SEQ ID NO: 104517 - DNA, 20 bp, synthetic construct
  source 1..20: mol_type = other DNA
ttcaaaggatcattagagac

SEQ ID NO: 104518 - DNA, 20 bp, synthetic construct
  source 1..20: mol_type = other DNA
attcaaaggatcattagaga

SEQ ID NO: 104519 - DNA, 20 bp, synthetic construct
  source 1..20: mol_type = other DNA
aattcaaaggatcattagag

SEQ ID NO: 104520 - DNA, 20 bp, synthetic construct
  source 1..20: mol_type = other DNA
aaattcaaaggatcattaga

SEQ ID NO: 104521 - DNA, 20 bp, synthetic construct
  source 1..20: mol_type = other DNA
gaaattcaaaggatcattag

SEQ ID NO: 104522 - DNA, 20 bp, synthetic construct
  source 1..20: mol_type = other DNA
cgaaattcaaaggatcatta

SEQ ID NO: 104523 - DNA, 20 bp, synthetic construct
  source 1..20: mol_type = other DNA
ccgaaattcaaaggatcatt

SEQ ID NO: 104524 - DNA, 20 bp, synthetic construct
  source 1..20: mol_type = other DNA
accgaaattcaaaggatcat

SEQ ID NO: 104525 - DNA, 20 bp, synthetic construct
  source 1..20: mol_type = other DNA
caccgaaattcaaaggatca

SEQ ID NO: 104526 - DNA, 20 bp, synthetic construct
  source 1..20: mol_type = other DNA
ccaccgaaattcaaaggatc

SEQ ID NO: 104527 - DNA, 20 bp, synthetic construct
  source 1..20: mol_type = other DNA
accaccgaaattcaaaggat

SEQ ID NO: 104528 - DNA, 20 bp, synthetic construct
  source 1..20: mol_type = other DNA
taccaccgaaattcaaagga

SEQ ID NO: 104529 - DNA, 20 bp, synthetic construct
  source 1..20: mol_type = other DNA
ttaccaccgaaattcaaagg

SEQ ID NO: 104530 - DNA, 20 bp, synthetic construct
  source 1..20: mol_type = other DNA
gttaccaccgaaattcaaag

SEQ ID NO: 104531 - DNA, 20 bp, synthetic construct
  source 1..20: mol_type = other DNA
tgttaccaccgaaattcaaa

SEQ ID NO: 104532 - DNA, 20 bp, synthetic construct
  source 1..20: mol_type = other DNA
ttgttaccaccgaaattcaa

SEQ ID NO: 104533 - DNA, 20 bp, synthetic construct
  source 1..20: mol_type = other DNA
attgttaccaccgaaattca

SEQ ID NO: 104534 - DNA, 20 bp, synthetic construct
  source 1..20: mol_type = other DNA
aattgttaccaccgaaattc

SEQ ID NO: 104535 - DNA, 20 bp, synthetic construct
  source 1..20: mol_type = other DNA
taattgttaccaccgaaatt

SEQ ID NO: 104536 - DNA, 20 bp, synthetic construct
  source 1..20: mol_type = other DNA
ataattgttaccaccgaaat

SEQ ID NO: 104537 - DNA, 20 bp, synthetic construct
  source 1..20: mol_type = other DNA
tataattgttaccaccgaaa

SEQ ID NO: 104538 - DNA, 20 bp, synthetic construct
  source 1..20: mol_type = other DNA
ttataattgttaccaccgaa

SEQ ID NO: 104539 - DNA, 20 bp, synthetic construct
  source 1..20: mol_type = other DNA
attataattgttaccaccga

SEQ ID NO: 104540 - DNA, 20 bp, synthetic construct
  source 1..20: mol_type = other DNA
cattataattgttaccaccg

SEQ ID NO: 104541 - DNA, 20 bp, synthetic construct
  source 1..20: mol_type = other DNA
acattataattgttaccacc

SEQ ID NO: 104542 - DNA, 20 bp, synthetic construct
  source 1..20: mol_type = other DNA
gacattataattgttaccac

SEQ ID NO: 104543 - DNA, 20 bp, synthetic construct
  source 1..20: mol_type = other DNA
agacattataattgttacca

SEQ ID NO: 104544 - DNA, 20 bp, synthetic construct
  source 1..20: mol_type = other DNA
gagacattataattgttacc

SEQ ID NO: 104545 - DNA, 20 bp, synthetic construct
  source 1..20: mol_type = other DNA
ggagacattataattgttac

SEQ ID NO: 104546 - DNA, 20 bp, synthetic construct
  source 1..20: mol_type = other DNA
aggagacattataattgtta

SEQ ID NO: 104547 - DNA, 20 bp, synthetic construct
  source 1..20: mol_type = other DNA
aaggagacattataattgtt

SEQ ID NO: 104548 - DNA, 20 bp, synthetic construct
  source 1..20: mol_type = other DNA
aaaggagacattataattgt

SEQ ID NO: 104549 - DNA, 20 bp, synthetic construct
  source 1..20: mol_type = other DNA
aaaaggagacattataattg

SEQ ID NO: 104550 - DNA, 20 bp, synthetic construct
  source 1..20: mol_type = other DNA
aaaaaggagacattataatt

SEQ ID NO: 104551 - DNA, 20 bp, synthetic construct
  source 1..20: mol_type = other DNA
gaaaaaggagacattataat

SEQ ID NO: 104552 - DNA, 20 bp, synthetic construct
  source 1..20: mol_type = other DNA
tgaaaaaggagacattataa

SEQ ID NO: 104553 - DNA, 20 bp, synthetic construct
  source 1..20: mol_type = other DNA
atgaaaaaggagacattata

SEQ ID NO: 104554 - DNA, 20 bp, synthetic construct
  source 1..20: mol_type = other DNA
gatgaaaaaggagacattat

SEQ ID NO: 104555 - DNA, 20 bp, synthetic construct
  source 1..20: mol_type = other DNA
agatgaaaaaggagacatta

SEQ ID NO: 104556 - DNA, 20 bp, synthetic construct
  source 1..20: mol_type = other DNA
gagatgaaaaaggagacatt

SEQ ID NO: 104557 - DNA, 20 bp, synthetic construct
  source 1..20: mol_type = other DNA
agagatgaaaaaggagacat

SEQ ID NO: 104558 - DNA, 20 bp, synthetic construct
  source 1..20: mol_type = other DNA
gagagatgaaaaaggagaca

SEQ ID NO: 104559 - DNA, 20 bp, synthetic construct
  source 1..20: mol_type = other DNA
tgagagatgaaaaaggagac

SEQ ID NO: 104560 - DNA, 20 bp, synthetic construct
  source 1..20: mol_type = other DNA
atgagagatgaaaaaggaga

SEQ ID NO: 104561 - DNA, 20 bp, synthetic construct
  source 1..20: mol_type = other DNA
aatgagagatgaaaaaggag

SEQ ID NO: 104562 - DNA, 20 bp, synthetic construct
  source 1..20: mol_type = other DNA
aaatgagagatgaaaaagga

SEQ ID NO: 104563 - DNA, 20 bp, synthetic construct
  source 1..20: mol_type = other DNA
aaaatgagagatgaaaaagg

SEQ ID NO: 104564 - DNA, 20 bp, synthetic construct
  source 1..20: mol_type = other DNA
taaaatgagagatgaaaaag

SEQ ID NO: 104565 - DNA, 20 bp, synthetic construct
  source 1..20: mol_type = other DNA
ataaaatgagagatgaaaaa

SEQ ID NO: 104566 - DNA, 20 bp, synthetic construct
  source 1..20: mol_type = other DNA
aataaaatgagagatgaaaa

SEQ ID NO: 104567 - DNA, 20 bp, synthetic construct
  source 1..20: mol_type = other DNA
taataaaatgagagatgaaa

SEQ ID NO: 104568 - DNA, 20 bp, synthetic construct
  source 1..20: mol_type = other DNA
ataataaaatgagagatgaa

SEQ ID NO: 104569 - DNA, 20 bp, synthetic construct
  source 1..20: mol_type = other DNA
aataataaaatgagagatga

SEQ ID NO: 104570 - DNA, 20 bp, synthetic construct
  source 1..20: mol_type = other DNA
aaataataaaatgagagatg

SEQ ID NO: 104571 - DNA, 20 bp, synthetic construct
  source 1..20: mol_type = other DNA
caaataataaaatgagagat

SEQ ID NO: 104572 - DNA, 20 bp, synthetic construct
  source 1..20: mol_type = other DNA
ccaaataataaaatgagaga

SEQ ID NO: 104573 - DNA, 20 bp, synthetic construct
  source 1..20: mol_type = other DNA
cccaaataataaaatgagag

SEQ ID NO: 104574 - DNA, 20 bp, synthetic construct
  source 1..20: mol_type = other DNA
acccaaataataaaatgaga

SEQ ID NO: 104575 - DNA, 20 bp, synthetic construct
  source 1..20: mol_type = other DNA
aacccaaataataaaatgag

SEQ ID NO: 104576 - DNA, 20 bp, synthetic construct
  source 1..20: mol_type = other DNA
aaacccaaataataaaatga

SEQ ID NO: 104577 - DNA, 20 bp, synthetic construct
  source 1..20: mol_type = other DNA
aaaacccaaataataaaatg

SEQ ID NO: 104578 - DNA, 20 bp, synthetic construct
  source 1..20: mol_type = other DNA
gaaaacccaaataataaaat

SEQ ID NO: 104579 - DNA, 20 bp, synthetic construct
  source 1..20: mol_type = other DNA
agaaaacccaaataataaaa

SEQ ID NO: 104580 - DNA, 20 bp, synthetic construct
  source 1..20: mol_type = other DNA
gagaaaacccaaataataaa

SEQ ID NO: 104581 - DNA, 20 bp, synthetic construct
  source 1..20: mol_type = other DNA
agagaaaacccaaataataa

SEQ ID NO: 104582 - DNA, 20 bp, synthetic construct
  source 1..20: mol_type = other DNA
aagagaaaacccaaataata

SEQ ID NO: 104583 - DNA, 20 bp, synthetic construct
  source 1..20: mol_type = other DNA
aaagagaaaacccaaataat

SEQ ID NO: 104584 - DNA, 20 bp, synthetic construct
  source 1..20: mol_type = other DNA
aaaagagaaaacccaaataa

SEQ ID NO: 104585 - DNA, 20 bp, synthetic construct
  source 1..20: mol_type = other DNA
aaaaagagaaaacccaaata

SEQ ID NO: 104586 - DNA, 20 bp, synthetic construct
  source 1..20: mol_type = other DNA
aaaaaagagaaaacccaaat

SEQ ID NO: 104587 - DNA, 20 bp, synthetic construct
  source 1..20: mol_type = other DNA
aaaaaaagagaaaacccaaa

SEQ ID NO: 104588 - DNA, 20 bp, synthetic construct
  source 1..20: mol_type = other DNA
aaaaaaaagagaaaacccaa

SEQ ID NO: 104589 - DNA, 20 bp, synthetic construct
  source 1..20: mol_type = other DNA
gaaaaaaaagagaaaaccca

SEQ ID NO: 104590 - DNA, 20 bp, synthetic construct
  source 1..20: mol_type = other DNA
agaaaaaaaagagaaaaccc

SEQ ID NO: 104591 - DNA, 20 bp, synthetic construct
  source 1..20: mol_type = other DNA
cagaaaaaaaagagaaaacc

SEQ ID NO: 104592 - DNA, 20 bp, synthetic construct
  source 1..20: mol_type = other DNA
tcagaaaaaaaagagaaaac

SEQ ID NO: 104593 - DNA, 20 bp, synthetic construct
  source 1..20: mol_type = other DNA
ctcagaaaaaaaagagaaaa

SEQ ID NO: 104594 - DNA, 20 bp, synthetic construct
  source 1..20: mol_type = other DNA
actcagaaaaaaaagagaaa

SEQ ID NO: 104595 - DNA, 20 bp, synthetic construct
  source 1..20: mol_type = other DNA
gactcagaaaaaaaagagaa

SEQ ID NO: 104596 - DNA, 20 bp, synthetic construct
  source 1..20: mol_type = other DNA
agactcagaaaaaaaagaga

SEQ ID NO: 104597 - DNA, 20 bp, synthetic construct
  source 1..20: mol_type = other DNA
cagactcagaaaaaaaagag

SEQ ID NO: 104598 - DNA, 20 bp, synthetic construct
  source 1..20: mol_type = other DNA
ccagactcagaaaaaaaaga

SEQ ID NO: 104599 - DNA, 20 bp, synthetic construct
  source 1..20: mol_type = other DNA
gccagactcagaaaaaaaag

SEQ ID NO: 104600 - DNA, 20 bp, synthetic construct
  source 1..20: mol_type = other DNA
agccagactcagaaaaaaaa

SEQ ID NO: 104601 - DNA, 20 bp, synthetic construct
  source 1..20: mol_type = other DNA
tagccagactcagaaaaaaa

SEQ ID NO: 104602 - DNA, 20 bp, synthetic construct
  source 1..20: mol_type = other DNA
ttagccagactcagaaaaaa

SEQ ID NO: 104603 - DNA, 20 bp, synthetic construct
  source 1..20: mol_type = other DNA
tttagccagactcagaaaaa

SEQ ID NO: 104604 - DNA, 20 bp, synthetic construct
  source 1..20: mol_type = other DNA
ctttagccagactcagaaaa

SEQ ID NO: 104605 - DNA, 20 bp, synthetic construct
  source 1..20: mol_type = other DNA
cctttagccagactcagaaa

SEQ ID NO: 104606 - DNA, 20 bp, synthetic construct
  source 1..20: mol_type = other DNA
acctttagccagactcagaa

SEQ ID NO: 104607 - DNA, 20 bp, synthetic construct
  source 1..20: mol_type = other DNA
aacctttagccagactcaga

SEQ ID NO: 104608 - DNA, 20 bp, synthetic construct
  source 1..20: mol_type = other DNA
aaacctttagccagactcag

SEQ ID NO: 104609 - DNA, 20 bp, synthetic construct
  source 1..20: mol_type = other DNA
caaacctttagccagactca

SEQ ID NO: 104610 - DNA, 20 bp, synthetic construct
  source 1..20: mol_type = other DNA
acaaacctttagccagactc

SEQ ID NO: 104611 - DNA, 20 bp, synthetic construct
  source 1..20: mol_type = other DNA
gacaaacctttagccagact

SEQ ID NO: 104612 - DNA, 20 bp, synthetic construct
  source 1..20: mol_type = other DNA
tgacaaacctttagccagac

SEQ ID NO: 104613 - DNA, 20 bp, synthetic construct
  source 1..20: mol_type = other DNA
ctgacaaacctttagccaga

SEQ ID NO: 104614 - DNA, 20 bp, synthetic construct
  source 1..20: mol_type = other DNA
actgacaaacctttagccag

SEQ ID NO: 104615 - DNA, 20 bp, synthetic construct
  source 1..20: mol_type = other DNA
aactgacaaacctttagcca

SEQ ID NO: 104616 - DNA, 20 bp, synthetic construct
  source 1..20: mol_type = other DNA
aaactgacaaacctttagcc

SEQ ID NO: 104617 - DNA, 20 bp, synthetic construct
  source 1..20: mol_type = other DNA
aaaactgacaaacctttagc

SEQ ID NO: 104618 - DNA, 20 bp, synthetic construct
  source 1..20: mol_type = other DNA
caaaactgacaaacctttag

SEQ ID NO: 104619 - DNA, 20 bp, synthetic construct
  source 1..20: mol_type = other DNA
acaaaactgacaaaccttta

SEQ ID NO: 104620 - DNA, 20 bp, synthetic construct
  source 1..20: mol_type = other DNA
aacaaaactgacaaaccttt

SEQ ID NO: 104621 - DNA, 20 bp, synthetic construct
  source 1..20: mol_type = other DNA
aaacaaaactgacaaacctt

SEQ ID NO: 104622 - DNA, 20 bp, synthetic construct
  source 1..20: mol_type = other DNA
taaacaaaactgacaaacct

SEQ ID NO: 104623 - DNA, 20 bp, synthetic construct
  source 1..20: mol_type = other DNA
ataaacaaaactgacaaacc

SEQ ID NO: 104624 - DNA, 20 bp, synthetic construct
  source 1..20: mol_type = other DNA
gataaacaaaactgacaaac

SEQ ID NO: 104625 - DNA, 20 bp, synthetic construct
  source 1..20: mol_type = other DNA
agataaacaaaactgacaaa

SEQ ID NO: 104626 - DNA, 20 bp, synthetic construct
  source 1..20: mol_type = other DNA
gagataaacaaaactgacaa

SEQ ID NO: 104627 - DNA, 20 bp, synthetic construct
  source 1..20: mol_type = other DNA
agagataaacaaaactgaca

SEQ ID NO: 104628 - DNA, 20 bp, synthetic construct
  source 1..20: mol_type = other DNA
aagagataaacaaaactgac

SEQ ID NO: 104629 - DNA, 20 bp, synthetic construct
  source 1..20: mol_type = other DNA
gaagagataaacaaaactga

SEQ ID NO: 104630 - DNA, 20 bp, synthetic construct
  source 1..20: mol_type = other DNA
tgaagagataaacaaaactg

SEQ ID NO: 104631 - DNA, 20 bp, synthetic construct
  source 1..20: mol_type = other DNA
ttgaagagataaacaaaact

SEQ ID NO: 104632 - DNA, 20 bp, synthetic construct
  source 1..20: mol_type = other DNA
tttgaagagataaacaaaac

SEQ ID NO: 104633 - DNA, 20 bp, synthetic construct
  source 1..20: mol_type = other DNA
ttttgaagagataaacaaaa

SEQ ID NO: 104634 - DNA, 20 bp, synthetic construct
  source 1..20: mol_type = other DNA
gttttgaagagataaacaaa

SEQ ID NO: 104635 - DNA, 20 bp, synthetic construct
  source 1..20: mol_type = other DNA
tgttttgaagagataaacaa

SEQ ID NO: 104636 - DNA, 20 bp, synthetic construct
  source 1..20: mol_type = other DNA
ttgttttgaagagataaaca

SEQ ID NO: 104637 - DNA, 20 bp, synthetic construct
  source 1..20: mol_type = other DNA
attgttttgaagagataaac

SEQ ID NO: 104638 - DNA, 20 bp, synthetic construct
  source 1..20: mol_type = other DNA
aattgttttgaagagataaa

SEQ ID NO: 104639 - DNA, 20 bp, synthetic construct
  source 1..20: mol_type = other DNA
aaattgttttgaagagataa

SEQ ID NO: 104640 - DNA, 20 bp, synthetic construct
  source 1..20: mol_type = other DNA
taaattgttttgaagagata

SEQ ID NO: 104641 - DNA, 20 bp, synthetic construct
  source 1..20: mol_type = other DNA
gtaaattgttttgaagagat

SEQ ID NO: 104642 - DNA, 20 bp, synthetic construct
  source 1..20: mol_type = other DNA
agtaaattgttttgaagaga

SEQ ID NO: 104643 - DNA, 20 bp, synthetic construct
  source 1..20: mol_type = other DNA
cagtaaattgttttgaagag

SEQ ID NO: 104644 - DNA, 20 bp, synthetic construct
  source 1..20: mol_type = other DNA
acagtaaattgttttgaaga

SEQ ID NO: 104645 - DNA, 20 bp, synthetic construct
  source 1..20: mol_type = other DNA
aacagtaaattgttttgaag

SEQ ID NO: 104646 - DNA, 20 bp, synthetic construct
  source 1..20: mol_type = other DNA
aaacagtaaattgttttgaa

SEQ ID NO: 104647 - DNA, 20 bp, synthetic construct
  source 1..20: mol_type = other DNA
aaaacagtaaattgttttga

SEQ ID NO: 104648 - DNA, 20 bp, synthetic construct
  source 1..20: mol_type = other DNA
taaaacagtaaattgttttg

SEQ ID NO: 104649 - DNA, 20 bp, synthetic construct
  source 1..20: mol_type = other DNA
ataaaacagtaaattgtttt

SEQ ID NO: 104650 - DNA, 20 bp, synthetic construct
  source 1..20: mol_type = other DNA
aataaaacagtaaattgttt

SEQ ID NO: 104651 - DNA, 20 bp, synthetic construct
  source 1..20: mol_type = other DNA
caataaaacagtaaattgtt

SEQ ID NO: 104652 - DNA, 20 bp, synthetic construct
  source 1..20: mol_type = other DNA
tcaataaaacagtaaattgt

SEQ ID NO: 104653 - DNA, 20 bp, synthetic construct
  source 1..20: mol_type = other DNA
atcaataaaacagtaaattg

SEQ ID NO: 104654 - DNA, 20 bp, synthetic construct
  source 1..20: mol_type = other DNA
gatcaataaaacagtaaatt

SEQ ID NO: 104655 - DNA, 20 bp, synthetic construct
  source 1..20: mol_type = other DNA
agatcaataaaacagtaaat

SEQ ID NO: 104656 - DNA, 20 bp, synthetic construct
  source 1..20: mol_type = other DNA
aagatcaataaaacagtaaa

SEQ ID NO: 104657 - DNA, 20 bp, synthetic construct
  source 1..20: mol_type = other DNA
aaagatcaataaaacagtaa

SEQ ID NO: 104658 - DNA, 20 bp, synthetic construct
  source 1..20: mol_type = other DNA
aaaagatcaataaaacagta

SEQ ID NO: 104659 - DNA, 20 bp, synthetic construct
  source 1..20: mol_type = other DNA
caaaagatcaataaaacagt

SEQ ID NO: 104660 - DNA, 20 bp, synthetic construct
  source 1..20: mol_type = other DNA
acaaaagatcaataaaacag

SEQ ID NO: 104661 - DNA, 20 bp, synthetic construct
  source 1..20: mol_type = other DNA
tacaaaagatcaataaaaca

SEQ ID NO: 104662 - DNA, 20 bp, synthetic construct
  source 1..20: mol_type = other DNA
atacaaaagatcaataaaac

SEQ ID NO: 104663 - DNA, 20 bp, synthetic construct
  source 1..20: mol_type = other DNA
aatacaaaagatcaataaaa

SEQ ID NO: 104664 - DNA, 20 bp, synthetic construct
  source 1..20: mol_type = other DNA
aaatacaaaagatcaataaa

SEQ ID NO: 104665 - DNA, 20 bp, synthetic construct
  source 1..20: mol_type = other DNA
aaaatacaaaagatcaataa

SEQ ID NO: 104666 - DNA, 20 bp, synthetic construct
  source 1..20: mol_type = other DNA
gaaaatacaaaagatcaata

SEQ ID NO: 104667 - DNA, 20 bp, synthetic construct
  source 1..20: mol_type = other DNA
agaaaatacaaaagatcaat

SEQ ID NO: 104668 - DNA, 20 bp, synthetic construct
  source 1..20: mol_type = other DNA
aagaaaatacaaaagatcaa

SEQ ID NO: 104669 - DNA, 20 bp, synthetic construct
  source 1..20: mol_type = other DNA
gaagaaaatacaaaagatca

SEQ ID NO: 104670 - DNA, 20 bp, synthetic construct
  source 1..20: mol_type = other DNA
tgaagaaaatacaaaagatc

SEQ ID NO: 104671 - DNA, 20 bp, synthetic construct
  source 1..20: mol_type = other DNA
atgaagaaaatacaaaagat

SEQ ID NO: 104672 - DNA, 20 bp, synthetic construct
  source 1..20: mol_type = other DNA
aatgaagaaaatacaaaaga

SEQ ID NO: 104673 - DNA, 20 bp, synthetic construct
  source 1..20: mol_type = other DNA
aaatgaagaaaatacaaaag

SEQ ID NO: 104674 - DNA, 20 bp, synthetic construct
  source 1..20: mol_type = other DNA
gaaatgaagaaaatacaaaa

SEQ ID NO: 104675 - DNA, 20 bp, synthetic construct
  source 1..20: mol_type = other DNA
tgaaatgaagaaaatacaaa

SEQ ID NO: 104676 - DNA, 20 bp, synthetic construct
  source 1..20: mol_type = other DNA
ttgaaatgaagaaaatacaa

SEQ ID NO: 104677 - DNA, 20 bp, synthetic construct
  source 1..20: mol_type = other DNA
attgaaatgaagaaaataca

SEQ ID NO: 104678 - DNA, 20 bp, synthetic construct
  source 1..20: mol_type = other DNA
aattgaaatgaagaaaatac

SEQ ID NO: 104679 - DNA, 20 bp, synthetic construct
  source 1..20: mol_type = other DNA
aaattgaaatgaagaaaata

SEQ ID NO: 104680 - DNA, 20 bp, synthetic construct
  source 1..20: mol_type = other DNA
aaaattgaaatgaagaaaat

SEQ ID NO: 104681 - DNA, 20 bp, synthetic construct
  source 1..20: mol_type = other DNA
taaaattgaaatgaagaaaa

SEQ ID NO: 104682 - DNA, 20 bp, synthetic construct
  source 1..20: mol_type = other DNA
ataaaattgaaatgaagaaa

SEQ ID NO: 104683 - DNA, 20 bp, synthetic construct
  source 1..20: mol_type = other DNA
aataaaattgaaatgaagaa

SEQ ID NO: 104684 - DNA, 20 bp, synthetic construct
  source 1..20: mol_type = other DNA
aaataaaattgaaatgaaga

SEQ ID NO: 104685 - DNA, 20 bp, synthetic construct
  source 1..20: mol_type = other DNA
taaataaaattgaaatgaag

SEQ ID NO: 104686 - DNA, 20 bp, synthetic construct
  source 1..20: mol_type = other DNA
ataaataaaattgaaatgaa

SEQ ID NO: 104687 - DNA, 20 bp, synthetic construct
  source 1..20: mol_type = other DNA
aataaataaaattgaaatga

SEQ ID NO: 104688 - DNA, 20 bp, synthetic construct
  source 1..20: mol_type = other DNA
aaataaataaaattgaaatg

SEQ ID NO: 104689 - DNA, 20 bp, synthetic construct
  source 1..20: mol_type = other DNA
gaaataaataaaattgaaat

SEQ ID NO: 104690 - DNA, 20 bp, synthetic construct
  source 1..20: mol_type = other DNA
agaaataaataaaattgaaa

SEQ ID NO: 104691 - DNA, 20 bp, synthetic construct
  source 1..20: mol_type = other DNA
cagaaataaataaaattgaa

SEQ ID NO: 104692 - DNA, 20 bp, synthetic construct
  source 1..20: mol_type = other DNA
gcagaaataaataaaattga

SEQ ID NO: 104693 - DNA, 20 bp, synthetic construct
  source 1..20: mol_type = other DNA
agcagaaataaataaaattg

SEQ ID NO: 104694 - DNA, 20 bp, synthetic construct
  source 1..20: mol_type = other DNA
aagcagaaataaataaaatt

SEQ ID NO: 104695 - DNA, 20 bp, synthetic construct
  source 1..20: mol_type = other DNA
aaagcagaaataaataaaat

SEQ ID NO: 104696 - DNA, 20 bp, synthetic construct
  source 1..20: mol_type = other DNA
caaagcagaaataaataaaa

SEQ ID NO: 104697 - DNA, 20 bp, synthetic construct
  source 1..20: mol_type = other DNA
tcaaagcagaaataaataaa

SEQ ID NO: 104698 - DNA, 20 bp, synthetic construct
  source 1..20: mol_type = other DNA
atcaaagcagaaataaataa

SEQ ID NO: 104699 - DNA, 20 bp, synthetic construct
  source 1..20: mol_type = other DNA
aatcaaagcagaaataaata

SEQ ID NO: 104700 - DNA, 20 bp, synthetic construct
  source 1..20: mol_type = other DNA
aaatcaaagcagaaataaat

SEQ ID NO: 104701 - DNA, 20 bp, synthetic construct
  source 1..20: mol_type = other DNA
aaaatcaaagcagaaataaa

SEQ ID NO: 104702 - DNA, 20 bp, synthetic construct
  source 1..20: mol_type = other DNA
aaaaatcaaagcagaaataa

SEQ ID NO: 104703 - DNA, 20 bp, synthetic construct
  source 1..20: mol_type = other DNA
aaaaaatcaaagcagaaata

SEQ ID NO: 104704 - DNA, 20 bp, synthetic construct
  source 1..20: mol_type = other DNA
aaaaaaatcaaagcagaaat

SEQ ID NO: 104705 - DNA, 20 bp, synthetic construct
  source 1..20: mol_type = other DNA
aaaaaaaatcaaagcagaaa

SEQ ID NO: 104706 - DNA, 20 bp, synthetic construct
  source 1..20: mol_type = other DNA
taaaaaaaatcaaagcagaa

SEQ ID NO: 104707 - DNA, 20 bp, synthetic construct
  source 1..20: mol_type = other DNA
ataaaaaaaatcaaagcaga

SEQ ID NO: 104708 - DNA, 20 bp, synthetic construct
  source 1..20: mol_type = other DNA
aataaaaaaaatcaaagcag

SEQ ID NO: 104709 - DNA, 20 bp, synthetic construct
  source 1..20: mol_type = other DNA
aaataaaaaaaatcaaagca

SEQ ID NO: 104710 - DNA, 20 bp, synthetic construct
  source 1..20: mol_type = other DNA
gaaataaaaaaaatcaaagc

SEQ ID NO: 104711 - DNA, 20 bp, synthetic construct
  source 1..20: mol_type = other DNA
agaaataaaaaaaatcaaag

SEQ ID NO: 104712 - DNA, 20 bp, synthetic construct
  source 1..20: mol_type = other DNA
aagaaataaaaaaaatcaaa

SEQ ID NO: 104713 - DNA, 20 bp, synthetic construct
  source 1..20: mol_type = other DNA
gaagaaataaaaaaaatcaa

SEQ ID NO: 104714 - DNA, 20 bp, synthetic construct
  source 1..20: mol_type = other DNA
agaagaaataaaaaaaatca

SEQ ID NO: 104715 - DNA, 20 bp, synthetic construct
  source 1..20: mol_type = other DNA
tagaagaaataaaaaaaatc

SEQ ID NO: 104716 - DNA, 20 bp, synthetic construct
  source 1..20: mol_type = other DNA
gtagaagaaataaaaaaaat

SEQ ID NO: 104717 - DNA, 20 bp, synthetic construct
  source 1..20: mol_type = other DNA
agtagaagaaataaaaaaaa

SEQ ID NO: 104718 - DNA, 20 bp, synthetic construct
  source 1..20: mol_type = other DNA
cagtagaagaaataaaaaaa

SEQ ID NO: 104719 - DNA, 20 bp, synthetic construct
  source 1..20: mol_type = other DNA
tcagtagaagaaataaaaaa

SEQ ID NO: 104720 - DNA, 20 bp, synthetic construct
  source 1..20: mol_type = other DNA
atcagtagaagaaataaaaa

SEQ ID NO: 104721 - DNA, 20 bp, synthetic construct
  source 1..20: mol_type = other DNA
aatcagtagaagaaataaaa

SEQ ID NO: 104722 - DNA, 20 bp, synthetic construct
  source 1..20: mol_type = other DNA
aaatcagtagaagaaataaa

SEQ ID NO: 104723 - DNA, 20 bp, synthetic construct
  source 1..20: mol_type = other DNA
aaaatcagtagaagaaataa

SEQ ID NO: 104724 - DNA, 20 bp, synthetic construct
  source 1..20: mol_type = other DNA
taaaatcagtagaagaaata

SEQ ID NO: 104725 - DNA, 20 bp, synthetic construct
  source 1..20: mol_type = other DNA
ctaaaatcagtagaagaaat

SEQ ID NO: 104726 - DNA, 20 bp, synthetic construct
  source 1..20: mol_type = other DNA
cctaaaatcagtagaagaaa

SEQ ID NO: 104727 - DNA, 20 bp, synthetic construct
  source 1..20: mol_type = other DNA
acctaaaatcagtagaagaa

SEQ ID NO: 104728 - DNA, 20 bp, synthetic construct
  source 1..20: mol_type = other DNA
aacctaaaatcagtagaaga

SEQ ID NO: 104729 - DNA, 20 bp, synthetic construct
  source 1..20: mol_type = other DNA
aaacctaaaatcagtagaag

SEQ ID NO: 104730 - DNA, 20 bp, synthetic construct
  source 1..20: mol_type = other DNA
aaaacctaaaatcagtagaa

SEQ ID NO: 104731 - DNA, 20 bp, synthetic construct
  source 1..20: mol_type = other DNA
caaaacctaaaatcagtaga

SEQ ID NO: 104732 - DNA, 20 bp, synthetic construct
  source 1..20: mol_type = other DNA
acaaaacctaaaatcagtag

SEQ ID NO: 104733 - DNA, 20 bp, synthetic construct
  source 1..20: mol_type = other DNA
gacaaaacctaaaatcagta

SEQ ID NO: 104734 - DNA, 20 bp, synthetic construct
  source 1..20: mol_type = other DNA
ggacaaaacctaaaatcagt

SEQ ID NO: 104735 - DNA, 20 bp, synthetic construct
  source 1..20: mol_type = other DNA
aggacaaaacctaaaatcag

SEQ ID NO: 104736 - DNA, 20 bp, synthetic construct
  source 1..20: mol_type = other DNA
aaggacaaaacctaaaatca

SEQ ID NO: 104737 - DNA, 20 bp, synthetic construct
  source 1..20: mol_type = other DNA
caaggacaaaacctaaaatc

SEQ ID NO: 104738 - DNA, 20 bp, synthetic construct
  source 1..20: mol_type = other DNA
gcaaggacaaaacctaaaat

SEQ ID NO: 104739 - DNA, 20 bp, synthetic construct
  source 1..20: mol_type = other DNA
agcaaggacaaaacctaaaa

SEQ ID NO: 104740 - DNA, 20 bp, synthetic construct
  source 1..20: mol_type = other DNA
aagcaaggacaaaacctaaa

SEQ ID NO: 104741 - DNA, 20 bp, synthetic construct
  source 1..20: mol_type = other DNA
aaagcaaggacaaaacctaa

SEQ ID NO: 104742 - DNA, 20 bp, synthetic construct
  source 1..20: mol_type = other DNA
aaaagcaaggacaaaaccta

SEQ ID NO: 104743 - DNA, 20 bp, synthetic construct
  source 1..20: mol_type = other DNA
gaaaagcaaggacaaaacct

SEQ ID NO: 104744 - DNA, 20 bp, synthetic construct
  source 1..20: mol_type = other DNA
agaaaagcaaggacaaaacc

SEQ ID NO: 104745 - DNA, 20 bp, synthetic construct
  source 1..20: mol_type = other DNA
tagaaaagcaaggacaaaac

SEQ ID NO: 104746 - DNA, 20 bp, synthetic construct
  source 1..20: mol_type = other DNA
ctagaaaagcaaggacaaaa

SEQ ID NO: 104747 - DNA, 20 bp, synthetic construct
  source 1..20: mol_type = other DNA
actagaaaagcaaggacaaa

SEQ ID NO: 104748 - DNA, 20 bp, synthetic construct
  source 1..20: mol_type = other DNA
aactagaaaagcaaggacaa

SEQ ID NO: 104749 - DNA, 20 bp, synthetic construct
  source 1..20: mol_type = other DNA
gaactagaaaagcaaggaca

SEQ ID NO: 104750 - DNA, 20 bp, synthetic construct
  source 1..20: mol_type = other DNA
agaactagaaaagcaaggac

SEQ ID NO: 104751 - DNA, 20 bp, synthetic construct
  source 1..20: mol_type = other DNA
aagaactagaaaagcaagga

SEQ ID NO: 104752 - DNA, 20 bp, synthetic construct
  source 1..20: mol_type = other DNA
aaagaactagaaaagcaagg

SEQ ID NO: 104753 - DNA, 20 bp, synthetic construct
  source 1..20: mol_type = other DNA
taaagaactagaaaagcaag

SEQ ID NO: 104754 - DNA, 20 bp, synthetic construct
  source 1..20: mol_type = other DNA
ctaaagaactagaaaagcaa

SEQ ID NO: 104755 - DNA, 20 bp, synthetic construct
  source 1..20: mol_type = other DNA
cctaaagaactagaaaagca

SEQ ID NO: 104756 - DNA, 20 bp, synthetic construct
  source 1..20: mol_type = other DNA
tcctaaagaactagaaaagc

SEQ ID NO: 104757 - DNA, 20 bp, synthetic construct
  source 1..20: mol_type = other DNA
atcctaaagaactagaaaag

SEQ ID NO: 104758 - DNA, 20 bp, synthetic construct
  source 1..20: mol_type = other DNA
catcctaaagaactagaaaa

SEQ ID NO: 104759 - DNA, 20 bp, synthetic construct
  source 1..20: mol_type = other DNA
acatcctaaagaactagaaa

SEQ ID NO: 104760 - DNA, 20 bp, synthetic construct
  source 1..20: mol_type = other DNA
tacatcctaaagaactagaa

SEQ ID NO: 104761 - DNA, 20 bp, synthetic construct
  source 1..20: mol_type = other DNA
atacatcctaaagaactaga

SEQ ID NO: 104762 - DNA, 20 bp, synthetic construct
  source 1..20: mol_type = other DNA
aatacatcctaaagaactag

SEQ ID NO: 104763 - DNA, 20 bp, synthetic construct
  source 1..20: mol_type = other DNA
caatacatcctaaagaacta

SEQ ID NO: 104764 - DNA, 20 bp, synthetic construct
  source 1..20: mol_type = other DNA
ccaatacatcctaaagaact

SEQ ID NO: 104765 - DNA, 20 bp, synthetic construct
  source 1..20: mol_type = other DNA
gccaatacatcctaaagaac

SEQ ID NO: 104766 - DNA, 20 bp, synthetic construct
  source 1..20: mol_type = other DNA
tgccaatacatcctaaagaa

SEQ ID NO: 104767 - DNA, 20 bp, synthetic construct
  source 1..20: mol_type = other DNA
ctgccaatacatcctaaaga

SEQ ID NO: 104768 - DNA, 20 bp, synthetic construct
  source 1..20: mol_type = other DNA
tctgccaatacatcctaaag

SEQ ID NO: 104769 - DNA, 20 bp, synthetic construct
  source 1..20: mol_type = other DNA
atctgccaatacatcctaaa

SEQ ID NO: 104770 - DNA, 20 bp, synthetic construct
  source 1..20: mol_type = other DNA
catctgccaatacatcctaa

SEQ ID NO: 104771 - DNA, 20 bp, synthetic construct
  source 1..20: mol_type = other DNA
tcatctgccaatacatccta

SEQ ID NO: 104772 - DNA, 20 bp, synthetic construct
  source 1..20: mol_type = other DNA
ttcatctgccaatacatcct

SEQ ID NO: 104773 - DNA, 20 bp, synthetic construct
  source 1..20: mol_type = other DNA
cttcatctgccaatacatcc

SEQ ID NO: 104774 - DNA, 20 bp, synthetic construct
  source 1..20: mol_type = other DNA
acttcatctgccaatacatc

SEQ ID NO: 104775 - DNA, 20 bp, synthetic construct
  source 1..20: mol_type = other DNA
aacttcatctgccaatacat

SEQ ID NO: 104776 - DNA, 20 bp, synthetic construct
  source 1..20: mol_type = other DNA
aaacttcatctgccaataca

SEQ ID NO: 104777 - DNA, 20 bp, synthetic construct
  source 1..20: mol_type = other DNA
aaaacttcatctgccaatac

SEQ ID NO: 104778 - DNA, 20 bp, synthetic construct
  source 1..20: mol_type = other DNA
aaaaacttcatctgccaata

SEQ ID NO: 104779 - DNA, 20 bp, synthetic construct
  source 1..20: mol_type = other DNA
gaaaaacttcatctgccaat

SEQ ID NO: 104780 - DNA, 20 bp, synthetic construct
  source 1..20: mol_type = other DNA
ggaaaaacttcatctgccaa

SEQ ID NO: 104781 - DNA, 20 bp, synthetic construct
  source 1..20: mol_type = other DNA
tggaaaaacttcatctgcca

SEQ ID NO: 104782 - DNA, 20 bp, synthetic construct
  source 1..20: mol_type = other DNA
gtggaaaaacttcatctgcc

SEQ ID NO: 104783 - DNA, 20 bp, synthetic construct
  source 1..20: mol_type = other DNA
agtggaaaaacttcatctgc

SEQ ID NO: 104784 - DNA, 20 bp, synthetic construct
  source 1..20: mol_type = other DNA
aagtggaaaaacttcatctg

SEQ ID NO: 104785 - DNA, 20 bp, synthetic construct
  source 1..20: mol_type = other DNA
aaagtggaaaaacttcatct

SEQ ID NO: 104786 - DNA, 20 bp, synthetic construct
  source 1..20: mol_type = other DNA
aaaagtggaaaaacttcatc

SEQ ID NO: 104787 - DNA, 20 bp, synthetic construct
  source 1..20: mol_type = other DNA
aaaaagtggaaaaacttcat

SEQ ID NO: 104788 - DNA, 20 bp, synthetic construct
  source 1..20: mol_type = other DNA
aaaaaagtggaaaaacttca

SEQ ID NO: 104789 - DNA, 20 bp, synthetic construct
  source 1..20: mol_type = other DNA
caaaaaagtggaaaaacttc

SEQ ID NO: 104790 - DNA, 20 bp, synthetic construct
  source 1..20: mol_type = other DNA
tcaaaaaagtggaaaaactt

SEQ ID NO: 104791 - DNA, 20 bp, synthetic construct
  source 1..20: mol_type = other DNA
atcaaaaaagtggaaaaact

SEQ ID NO: 104792 - DNA, 20 bp, synthetic construct
  source 1..20: mol_type = other DNA
catcaaaaaagtggaaaaac

SEQ ID NO: 104793 - DNA, 20 bp, synthetic construct
  source 1..20: mol_type = other DNA
acatcaaaaaagtggaaaaa

SEQ ID NO: 104794 - DNA, 20 bp, synthetic construct
  source 1..20: mol_type = other DNA
tacatcaaaaaagtggaaaa

SEQ ID NO: 104795 - DNA, 20 bp, synthetic construct
  source 1..20: mol_type = other DNA
ctacatcaaaaaagtggaaa

SEQ ID NO: 104796 - DNA, 20 bp, synthetic construct
  source 1..20: mol_type = other DNA
cctacatcaaaaaagtggaa

SEQ ID NO: 104797 - DNA, 20 bp, synthetic construct
  source 1..20: mol_type = other DNA
gcctacatcaaaaaagtgga

SEQ ID NO: 104798 - DNA, 20 bp, synthetic construct
  source 1..20: mol_type = other DNA
tgcctacatcaaaaaagtgg

SEQ ID NO: 104799 - DNA, 20 bp, synthetic construct
  source 1..20: mol_type = other DNA
gtgcctacatcaaaaaagtg

SEQ ID NO: 104800 - DNA, 20 bp, synthetic construct
  source 1..20: mol_type = other DNA
agtgcctacatcaaaaaagt

SEQ ID NO: 104801 - DNA, 20 bp, synthetic construct
  source 1..20: mol_type = other DNA
aagtgcctacatcaaaaaag

SEQ ID NO: 104802 - DNA, 20 bp, synthetic construct
  source 1..20: mol_type = other DNA
taagtgcctacatcaaaaaa

SEQ ID NO: 104803 - DNA, 20 bp, synthetic construct
  source 1..20: mol_type = other DNA
gtaagtgcctacatcaaaaa

SEQ ID NO: 104804 - DNA, 20 bp, synthetic construct
  source 1..20: mol_type = other DNA
agtaagtgcctacatcaaaa

SEQ ID NO: 104805 - DNA, 20 bp, synthetic construct
  source 1..20: mol_type = other DNA
cagtaagtgcctacatcaaa

SEQ ID NO: 104806 - DNA, 20 bp, synthetic construct
  source 1..20: mol_type = other DNA
gcagtaagtgcctacatcaa

SEQ ID NO: 104807 - DNA, 20 bp, synthetic construct
  source 1..20: mol_type = other DNA
agcagtaagtgcctacatca

SEQ ID NO: 104808 - DNA, 20 bp, synthetic construct
  source 1..20: mol_type = other DNA
cagcagtaagtgcctacatc

SEQ ID NO: 104809 - DNA, 20 bp, synthetic construct
  source 1..20: mol_type = other DNA
acagcagtaagtgcctacat

SEQ ID NO: 104810 - DNA, 20 bp, synthetic construct
  source 1..20: mol_type = other DNA
tacagcagtaagtgcctaca

SEQ ID NO: 104811 - DNA, 20 bp, synthetic construct
  source 1..20: mol_type = other DNA
ttacagcagtaagtgcctac

SEQ ID NO: 104812 - DNA, 20 bp, synthetic construct
  source 1..20: mol_type = other DNA
tttacagcagtaagtgccta

SEQ ID NO: 104813 - DNA, 20 bp, synthetic construct
  source 1..20: mol_type = other DNA
gtttacagcagtaagtgcct

SEQ ID NO: 104814 - DNA, 20 bp, synthetic construct
  source 1..20: mol_type = other DNA
tgtttacagcagtaagtgcc

SEQ ID NO: 104815 - DNA, 20 bp, synthetic construct
  source 1..20: mol_type = other DNA
atgtttacagcagtaagtgc

SEQ ID NO: 104816 - DNA, 20 bp, synthetic construct
  source 1..20: mol_type = other DNA
aatgtttacagcagtaagtg

SEQ ID NO: 104817 - DNA, 20 bp, synthetic construct
  source 1..20: mol_type = other DNA
gaatgtttacagcagtaagt

SEQ ID NO: 104818 - DNA, 20 bp, synthetic construct
  source 1..20: mol_type = other DNA
ggaatgtttacagcagtaag

SEQ ID NO: 104819 - DNA, 20 bp, synthetic construct
  source 1..20: mol_type = other DNA
aggaatgtttacagcagtaa

SEQ ID NO: 104820 - DNA, 20 bp, synthetic construct
  source 1..20: mol_type = other DNA
gaggaatgtttacagcagta

SEQ ID NO: 104821 - DNA, 20 bp, synthetic construct
  source 1..20: mol_type = other DNA
agaggaatgtttacagcagt

SEQ ID NO: 104822 - DNA, 20 bp, synthetic construct
  source 1..20: mol_type = other DNA
aagaggaatgtttacagcag

SEQ ID NO: 104823 - DNA, 20 bp, synthetic construct
  source 1..20: mol_type = other DNA
taagaggaatgtttacagca

SEQ ID NO: 104824 - DNA, 20 bp, synthetic construct
  source 1..20: mol_type = other DNA
ataagaggaatgtttacagc

SEQ ID NO: 104825 - DNA, 20 bp, synthetic construct
  source 1..20: mol_type = other DNA
aataagaggaatgtttacag

SEQ ID NO: 104826 - DNA, 20 bp, synthetic construct
  source 1..20: mol_type = other DNA
caataagaggaatgtttaca

SEQ ID NO: 104827 - DNA, 20 bp, synthetic construct
  source 1..20: mol_type = other DNA
acaataagaggaatgtttac

SEQ ID NO: 104828 - DNA, 20 bp, synthetic construct
  source 1..20: mol_type = other DNA
aacaataagaggaatgttta

SEQ ID NO: 104829 - DNA, 20 bp, synthetic construct
  source 1..20: mol_type = other DNA
caacaataagaggaatgttt

SEQ ID NO: 104830 - DNA, 20 bp, synthetic construct
  source 1..20: mol_type = other DNA
gcaacaataagaggaatgtt

SEQ ID NO: 104831 - DNA, 20 bp, synthetic construct
  source 1..20: mol_type = other DNA
agcaacaataagaggaatgt

SEQ ID NO: 104832 - DNA, 20 bp, synthetic construct
  source 1..20: mol_type = other DNA
aagcaacaataagaggaatg

SEQ ID NO: 104833 - DNA, 20 bp, synthetic construct
  source 1..20: mol_type = other DNA
aaagcaacaataagaggaat

SEQ ID NO: 104834 - DNA, 20 bp, synthetic construct
  source 1..20: mol_type = other DNA
aaaagcaacaataagaggaa

SEQ ID NO: 104835 - DNA, 20 bp, synthetic construct
  source 1..20: mol_type = other DNA
taaaagcaacaataagagga

SEQ ID NO: 104836 - DNA, 20 bp, synthetic construct
  source 1..20: mol_type = other DNA
gtaaaagcaacaataagagg

SEQ ID NO: 104837 - DNA, 20 bp, synthetic construct
  source 1..20: mol_type = other DNA
agtaaaagcaacaataagag

SEQ ID NO: 104838 - DNA, 20 bp, synthetic construct
  source 1..20: mol_type = other DNA
cagtaaaagcaacaataaga

SEQ ID NO: 104839 - DNA, 20 bp, synthetic construct
  source 1..20: mol_type = other DNA
acagtaaaagcaacaataag

SEQ ID NO: 104840 - DNA, 20 bp, synthetic construct
  source 1..20: mol_type = other DNA
tacagtaaaagcaacaataa

SEQ ID NO: 104841 - DNA, 20 bp, synthetic construct
  source 1..20: mol_type = other DNA
atacagtaaaagcaacaata

SEQ ID NO: 104842 - DNA, 20 bp, synthetic construct
  source 1..20: mol_type = other DNA
gatacagtaaaagcaacaat

SEQ ID NO: 104843 - DNA, 20 bp, synthetic construct
  source 1..20: mol_type = other DNA
ggatacagtaaaagcaacaa

SEQ ID NO: 104844 - DNA, 20 bp, synthetic construct
  source 1..20: mol_type = other DNA
aggatacagtaaaagcaaca

SEQ ID NO: 104845 - DNA, 20 bp, synthetic construct
  source 1..20: mol_type = other DNA
taggatacagtaaaagcaac

SEQ ID NO: 104846 - DNA, 20 bp, synthetic construct
  source 1..20: mol_type = other DNA
ataggatacagtaaaagcaa

SEQ ID NO: 104847 - DNA, 20 bp, synthetic construct
  source 1..20: mol_type = other DNA
tataggatacagtaaaagca

SEQ ID NO: 104848 - DNA, 20 bp, synthetic construct
  source 1..20: mol_type = other DNA
ctataggatacagtaaaagc

SEQ ID NO: 104849 - DNA, 20 bp, synthetic construct
  source 1..20: mol_type = other DNA
cctataggatacagtaaaag

SEQ ID NO: 104850 - DNA, 20 bp, synthetic construct
  source 1..20: mol_type = other DNA
acctataggatacagtaaaa

SEQ ID NO: 104851 - DNA, 20 bp, synthetic construct
  source 1..20: mol_type = other DNA
aacctataggatacagtaaa

SEQ ID NO: 104852 - DNA, 20 bp, synthetic construct
  source 1..20: mol_type = other DNA
aaacctataggatacagtaa

SEQ ID NO: 104853 - DNA, 20 bp, synthetic construct
  source 1..20: mol_type = other DNA
aaaacctataggatacagta

SEQ ID NO: 104854 - DNA, 20 bp, synthetic construct
  source 1..20: mol_type = other DNA
caaaacctataggatacagt

SEQ ID NO: 104855 - DNA, 20 bp, synthetic construct
  source 1..20: mol_type = other DNA
tcaaaacctataggatacag

SEQ ID NO: 104856 - DNA, 20 bp, synthetic construct
  source 1..20: mol_type = other DNA
atcaaaacctataggataca

SEQ ID NO: 104857 - DNA, 20 bp, synthetic construct
  source 1..20: mol_type = other DNA
tatcaaaacctataggatac

SEQ ID NO: 104858 - DNA, 20 bp, synthetic construct
  source 1..20: mol_type = other DNA
ttatcaaaacctataggata

SEQ ID NO: 104859 - DNA, 20 bp, synthetic construct
  source 1..20: mol_type = other DNA
cttatcaaaacctataggat

SEQ ID NO: 104860 - DNA, 20 bp, synthetic construct
  source 1..20: mol_type = other DNA
gcttatcaaaacctatagga

SEQ ID NO: 104861 - DNA, 20 bp, synthetic construct
  source 1..20: mol_type = other DNA
agcttatcaaaacctatagg

SEQ ID NO: 104862 - DNA, 20 bp, synthetic construct
  source 1..20: mol_type = other DNA
cagcttatcaaaacctatag

SEQ ID NO: 104863 - DNA, 20 bp, synthetic construct
  source 1..20: mol_type = other DNA
acagcttatcaaaacctata

SEQ ID NO: 104864 - DNA, 20 bp, synthetic construct
  source 1..20: mol_type = other DNA
cacagcttatcaaaacctat

SEQ ID NO: 104865 - DNA, 20 bp, synthetic construct
  source 1..20: mol_type = other DNA
acacagcttatcaaaaccta

SEQ ID NO: 104866 - DNA, 20 bp, synthetic construct
  source 1..20: mol_type = other DNA
aacacagcttatcaaaacct

SEQ ID NO: 104867 - DNA, 20 bp, synthetic construct
  source 1..20: mol_type = other DNA
aaacacagcttatcaaaacc

SEQ ID NO: 104868 - DNA, 20 bp, synthetic construct
  source 1..20: mol_type = other DNA
gaaacacagcttatcaaaac

SEQ ID NO: 104869 - DNA, 20 bp, synthetic construct
  source 1..20: mol_type = other DNA
ggaaacacagcttatcaaaa

SEQ ID NO: 104870 - DNA, 20 bp, synthetic construct
  source 1..20: mol_type = other DNA
tggaaacacagcttatcaaa

SEQ ID NO: 104871 - DNA, 20 bp, synthetic construct
  source 1..20: mol_type = other DNA
atggaaacacagcttatcaa

SEQ ID NO: 104872 - DNA, 20 bp, synthetic construct
  source 1..20: mol_type = other DNA
aatggaaacacagcttatca

SEQ ID NO: 104873 - DNA, 20 bp, synthetic construct
  source 1..20: mol_type = other DNA
aaatggaaacacagcttatc

SEQ ID NO: 104874 - DNA, 20 bp, synthetic construct
  source 1..20: mol_type = other DNA
aaaatggaaacacagcttat

SEQ ID NO: 104875 - DNA, 20 bp, synthetic construct
  source 1..20: mol_type = other DNA
gaaaatggaaacacagctta

SEQ ID NO: 104876 - DNA, 20 bp, synthetic construct
  source 1..20: mol_type = other DNA
tgaaaatggaaacacagctt

SEQ ID NO: 104877 - DNA, 20 bp, synthetic construct
  source 1..20: mol_type = other DNA
atgaaaatggaaacacagct

SEQ ID NO: 104878 - DNA, 20 bp, synthetic construct
  source 1..20: mol_type = other DNA
aatgaaaatggaaacacagc

SEQ ID NO: 104879 - DNA, 20 bp, synthetic construct
  source 1..20: mol_type = other DNA
aaatgaaaatggaaacacag

SEQ ID NO: 104880 - DNA, 20 bp, synthetic construct
  source 1..20: mol_type = other DNA
caaatgaaaatggaaacaca

SEQ ID NO: 104881 - DNA, 20 bp, synthetic construct
  source 1..20: mol_type = other DNA
acaaatgaaaatggaaacac

SEQ ID NO: 104882 - DNA, 20 bp, synthetic construct
  source 1..20: mol_type = other DNA
aacaaatgaaaatggaaaca

SEQ ID NO: 104883 - DNA, 20 bp, synthetic construct
  source 1..20: mol_type = other DNA
aaacaaatgaaaatggaaac

SEQ ID NO: 104884 - DNA, 20 bp, synthetic construct
  source 1..20: mol_type = other DNA
gaaacaaatgaaaatggaaa

SEQ ID NO: 104885 - DNA, 20 bp, synthetic construct
  source 1..20: mol_type = other DNA
tgaaacaaatgaaaatggaa

SEQ ID NO: 104886 - DNA, 20 bp, synthetic construct
  source 1..20: mol_type = other DNA
ttgaaacaaatgaaaatgga

SEQ ID NO: 104887 - DNA, 20 bp, synthetic construct
  source 1..20: mol_type = other DNA
cttgaaacaaatgaaaatgg

SEQ ID NO: 104888 - DNA, 20 bp, synthetic construct
  source 1..20: mol_type = other DNA
ccttgaaacaaatgaaaatg

SEQ ID NO: 104889 - DNA, 20 bp, synthetic construct
  source 1..20: mol_type = other DNA
tccttgaaacaaatgaaaat

SEQ ID NO: 104890 - DNA, 20 bp, synthetic construct
  source 1..20: mol_type = other DNA
ttccttgaaacaaatgaaaa

SEQ ID NO: 104891 - DNA, 20 bp, synthetic construct
  source 1..20: mol_type = other DNA
attccttgaaacaaatgaaa

SEQ ID NO: 104892 - DNA, 20 bp, synthetic construct
  source 1..20: mol_type = other DNA
aattccttgaaacaaatgaa

SEQ ID NO: 104893 - DNA, 20 bp, synthetic construct
  source 1..20: mol_type = other DNA
aaattccttgaaacaaatga

SEQ ID NO: 104894 - DNA, 20 bp, synthetic construct
  source 1..20: mol_type = other DNA
aaaattccttgaaacaaatg

SEQ ID NO: 104895 - DNA, 20 bp, synthetic construct
  source 1..20: mol_type = other DNA
gaaaattccttgaaacaaat

SEQ ID NO: 104896 - DNA, 20 bp, synthetic construct
  source 1..20: mol_type = other DNA
ggaaaattccttgaaacaaa

SEQ ID NO: 104897 - DNA, 20 bp, synthetic construct
  source 1..20: mol_type = other DNA
tggaaaattccttgaaacaa

SEQ ID NO: 104898 - DNA, 20 bp, synthetic construct
  source 1..20: mol_type = other DNA
ctggaaaattccttgaaaca

SEQ ID NO: 104899 - DNA, 20 bp, synthetic construct
  source 1..20: mol_type = other DNA
actggaaaattccttgaaac

SEQ ID NO: 104900 - DNA, 20 bp, synthetic construct
  source 1..20: mol_type = other DNA
aactggaaaattccttgaaa

SEQ ID NO: 104901 - DNA, 20 bp, synthetic construct
  source 1..20: mol_type = other DNA
aaactggaaaattccttgaa

SEQ ID NO: 104902 - DNA, 20 bp, synthetic construct
  source 1..20: mol_type = other DNA
aaaactggaaaattccttga

SEQ ID NO: 104903 - DNA, 20 bp, synthetic construct
  source 1..20: mol_type = other DNA
gaaaactggaaaattccttg

SEQ ID NO: 104904 - DNA, 20 bp, synthetic construct
  source 1..20: mol_type = other DNA
agaaaactggaaaattcctt

SEQ ID NO: 104905 - DNA, 20 bp, synthetic construct
  source 1..20: mol_type = other DNA
aagaaaactggaaaattcct

SEQ ID NO: 104906 - DNA, 20 bp, synthetic construct
  source 1..20: mol_type = other DNA
gaagaaaactggaaaattcc

SEQ ID NO: 104907 - DNA, 20 bp, synthetic construct
  source 1..20: mol_type = other DNA
agaagaaaactggaaaattc

SEQ ID NO: 104908 - DNA, 20 bp, synthetic construct
  source 1..20: mol_type = other DNA
aagaagaaaactggaaaatt

SEQ ID NO: 104909 - DNA, 20 bp, synthetic construct
  source 1..20: mol_type = other DNA
taagaagaaaactggaaaat

SEQ ID NO: 104910 - DNA, 20 bp, synthetic construct
  source 1..20: mol_type = other DNA
ttaagaagaaaactggaaaa

SEQ ID NO: 104911 - DNA, 20 bp, synthetic construct
  source 1..20: mol_type = other DNA
attaagaagaaaactggaaa

SEQ ID NO: 104912 - DNA, 20 bp, synthetic construct
  source 1..20: mol_type = other DNA
aattaagaagaaaactggaa

SEQ ID NO: 104913 - DNA, 20 bp, synthetic construct
  source 1..20: mol_type = other DNA
aaattaagaagaaaactgga

SEQ ID NO: 104914 - DNA, 20 bp, synthetic construct
  source 1..20: mol_type = other DNA
gaaattaagaagaaaactgg

SEQ ID NO: 104915 - DNA, 20 bp, synthetic construct
  source 1..20: mol_type = other DNA
agaaattaagaagaaaactg

SEQ ID NO: 104916 - DNA, 20 bp, synthetic construct
  source 1..20: mol_type = other DNA
aagaaattaagaagaaaact

SEQ ID NO: 104917 - DNA, 20 bp, synthetic construct
  source 1..20: mol_type = other DNA
gaagaaattaagaagaaaac

SEQ ID NO: 104918 - DNA, 20 bp, synthetic construct
  source 1..20: mol_type = other DNA
tgaagaaattaagaagaaaa

SEQ ID NO: 104919 - DNA, 20 bp, synthetic construct
  source 1..20: mol_type = other DNA
atgaagaaattaagaagaaa

SEQ ID NO: 104920 - DNA, 20 bp, synthetic construct
  source 1..20: mol_type = other DNA
catgaagaaattaagaagaa

SEQ ID NO: 104921 - DNA, 20 bp, synthetic construct
  source 1..20: mol_type = other DNA
ccatgaagaaattaagaaga

SEQ ID NO: 104922 - DNA, 20 bp, synthetic construct
  source 1..20: mol_type = other DNA
tccatgaagaaattaagaag

SEQ ID NO: 104923 - DNA, 20 bp, synthetic construct
  source 1..20: mol_type = other DNA
gtccatgaagaaattaagaa

SEQ ID NO: 104924 - DNA, 20 bp, synthetic construct
  source 1..20: mol_type = other DNA
ggtccatgaagaaattaaga

SEQ ID NO: 104925 - DNA, 20 bp, synthetic construct
  source 1..20: mol_type = other DNA
gggtccatgaagaaattaag

SEQ ID NO: 104926 - DNA, 20 bp, synthetic construct
  source 1..20: mol_type = other DNA
tgggtccatgaagaaattaa

SEQ ID NO: 104927 - DNA, 20 bp, synthetic construct
  source 1..20: mol_type = other DNA
gtgggtccatgaagaaatta

SEQ ID NO: 104928 - DNA, 20 bp, synthetic construct
  source 1..20: mol_type = other DNA
agtgggtccatgaagaaatt

SEQ ID NO: 104929 - DNA, 20 bp, synthetic construct
  source 1..20: mol_type = other DNA
cagtgggtccatgaagaaat

SEQ ID NO: 104930 - DNA, 20 bp, synthetic construct
  source 1..20: mol_type = other DNA
ccagtgggtccatgaagaaa

SEQ ID NO: 104931 - DNA, 20 bp, synthetic construct
  source 1..20: mol_type = other DNA
accagtgggtccatgaagaa

SEQ ID NO: 104932 - DNA, 20 bp, synthetic construct
  source 1..20: mol_type = other DNA
gaccagtgggtccatgaaga

SEQ ID NO: 104933 - DNA, 20 bp, synthetic construct
  source 1..20: mol_type = other DNA
tgaccagtgggtccatgaag

SEQ ID NO: 104934 - DNA, 20 bp, synthetic construct
  source 1..20: mol_type = other DNA
atgaccagtgggtccatgaa

SEQ ID NO: 104935 - DNA, 20 bp, synthetic construct
  source 1..20: mol_type = other DNA
aatgaccagtgggtccatga

SEQ ID NO: 104936 - DNA, 20 bp, synthetic construct
  source 1..20: mol_type = other DNA
gaatgaccagtgggtccatg

SEQ ID NO: 104937 - DNA, 20 bp, synthetic construct
  source 1..20: mol_type = other DNA
tgaatgaccagtgggtccat

SEQ ID NO: 104938 - DNA, 20 bp, synthetic construct
  source 1..20: mol_type = other DNA
ctgaatgaccagtgggtcca

SEQ ID NO: 104939 - DNA, 20 bp, synthetic construct
  source 1..20: mol_type = other DNA
cctgaatgaccagtgggtcc

SEQ ID NO: 104940 - DNA, 20 bp, synthetic construct
  source 1..20: mol_type = other DNA
tcctgaatgaccagtgggtc

SEQ ID NO: 104941 - DNA, 20 bp, synthetic construct
  source 1..20: mol_type = other DNA
ctcctgaatgaccagtgggt

SEQ ID NO: 104942 - DNA, 20 bp, synthetic construct
  source 1..20: mol_type = other DNA
gctcctgaatgaccagtggg

SEQ ID NO: 104943 - DNA, 20 bp, synthetic construct
  source 1..20: mol_type = other DNA
tgctcctgaatgaccagtgg

SEQ ID NO: 104944 - DNA, 20 bp, synthetic construct
  source 1..20: mol_type = other DNA
atgctcctgaatgaccagtg

SEQ ID NO: 104945 - DNA, 20 bp, synthetic construct
  source 1..20: mol_type = other DNA
tatgctcctgaatgaccagt

SEQ ID NO: 104946 - DNA, 20 bp, synthetic construct
  source 1..20: mol_type = other DNA
atatgctcctgaatgaccag

SEQ ID NO: 104947 - DNA, 20 bp, synthetic construct
  source 1..20: mol_type = other DNA
aatatgctcctgaatgacca

SEQ ID NO: 104948 - DNA, 20 bp, synthetic construct
  source 1..20: mol_type = other DNA
caatatgctcctgaatgacc

SEQ ID NO: 104949 - DNA, 20 bp, synthetic construct
  source 1..20: mol_type = other DNA
gcaatatgctcctgaatgac

SEQ ID NO: 104950 - DNA, 20 bp, synthetic construct
  source 1..20: mol_type = other DNA
agcaatatgctcctgaatga

SEQ ID NO: 104951 - DNA, 20 bp, synthetic construct
  source 1..20: mol_type = other DNA
aagcaatatgctcctgaatg

SEQ ID NO: 104952 - DNA, 20 bp, synthetic construct
  source 1..20: mol_type = other DNA
taagcaatatgctcctgaat

SEQ ID NO: 104953 - DNA, 20 bp, synthetic construct
  source 1..20: mol_type = other DNA
ttaagcaatatgctcctgaa

SEQ ID NO: 104954 - DNA, 20 bp, synthetic construct
  source 1..20: mol_type = other DNA
attaagcaatatgctcctga

SEQ ID NO: 104955 - DNA, 20 bp, synthetic construct
  source 1..20: mol_type = other DNA
aattaagcaatatgctcctg

SEQ ID NO: 104956 - DNA, 20 bp, synthetic construct
  source 1..20: mol_type = other DNA
aaattaagcaatatgctcct

SEQ ID NO: 104957 - DNA, 20 bp, synthetic construct
  source 1..20: mol_type = other DNA
aaaattaagcaatatgctcc

SEQ ID NO: 104958 - DNA, 20 bp, synthetic construct
  source 1..20: mol_type = other DNA
gaaaattaagcaatatgctc

SEQ ID NO: 104959 - DNA, 20 bp, synthetic construct
  source 1..20: mol_type = other DNA
tgaaaattaagcaatatgct

SEQ ID NO: 104960 - DNA, 20 bp, synthetic construct
  source 1..20: mol_type = other DNA
atgaaaattaagcaatatgc

SEQ ID NO: 104961 - DNA, 20 bp, synthetic construct
  source 1..20: mol_type = other DNA
catgaaaattaagcaatatg

SEQ ID NO: 104962 - DNA, 20 bp, synthetic construct
  source 1..20: mol_type = other DNA
acatgaaaattaagcaatat

SEQ ID NO: 104963 - DNA, 20 bp, synthetic construct
  source 1..20: mol_type = other DNA
tacatgaaaattaagcaata

SEQ ID NO: 104964 - DNA, 20 bp, synthetic construct
  source 1..20: mol_type = other DNA
atacatgaaaattaagcaat

SEQ ID NO: 104965 - DNA, 20 bp, synthetic construct
  source 1..20: mol_type = other DNA
aatacatgaaaattaagcaa

SEQ ID NO: 104966 - DNA, 20 bp, synthetic construct
  source 1..20: mol_type = other DNA
aaatacatgaaaattaagca

SEQ ID NO: 104967 - DNA, 20 bp, synthetic construct
  source 1..20: mol_type = other DNA
caaatacatgaaaattaagc

SEQ ID NO: 104968 - DNA, 20 bp, synthetic construct
  source 1..20: mol_type = other DNA
acaaatacatgaaaattaag

SEQ ID NO: 104969 - DNA, 20 bp, synthetic construct
  source 1..20: mol_type = other DNA
tacaaatacatgaaaattaa

SEQ ID NO: 104970 - DNA, 20 bp, synthetic construct
  source 1..20: mol_type = other DNA
atacaaatacatgaaaatta

SEQ ID NO: 104971 - DNA, 20 bp, synthetic construct
  source 1..20: mol_type = other DNA
tatacaaatacatgaaaatt

SEQ ID NO: 104972 - DNA, 20 bp, synthetic construct
  source 1..20: mol_type = other DNA
gtatacaaatacatgaaaat

SEQ ID NO: 104973 - DNA, 20 bp, synthetic construct
  source 1..20: mol_type = other DNA
agtatacaaatacatgaaaa

SEQ ID NO: 104974 - DNA, 20 bp, synthetic construct
  source 1..20: mol_type = other DNA
aagtatacaaatacatgaaa

SEQ ID NO: 104975 - DNA, 20 bp, synthetic construct
  source 1..20: mol_type = other DNA
aaagtatacaaatacatgaa

SEQ ID NO: 104976 - DNA, 20 bp, synthetic construct
  source 1..20: mol_type = other DNA
gaaagtatacaaatacatga

SEQ ID NO: 104977 - DNA, 20 bp, synthetic construct
  source 1..20: mol_type = other DNA
ggaaagtatacaaatacatg

SEQ ID NO: 104978 - DNA, 20 bp, synthetic construct
  source 1..20: mol_type = other DNA
tggaaagtatacaaatacat

SEQ ID NO: 104979 - DNA, 20 bp, synthetic construct
  source 1..20: mol_type = other DNA
ttggaaagtatacaaataca

SEQ ID NO: 104980 - DNA, 20 bp, synthetic construct
  source 1..20: mol_type = other DNA
tttggaaagtatacaaatac

SEQ ID NO: 104981 - DNA, 20 bp, synthetic construct
  source 1..20: mol_type = other DNA
ctttggaaagtatacaaata

SEQ ID NO: 104982 - DNA, 20 bp, synthetic construct
  source 1..20: mol_type = other DNA
actttggaaagtatacaaat

SEQ ID NO: 104983 - DNA, 20 bp, synthetic construct
  source 1..20: mol_type = other DNA
aactttggaaagtatacaaa

SEQ ID NO: 104984 - DNA, 20 bp, synthetic construct
  source 1..20: mol_type = other DNA
gaactttggaaagtatacaa

SEQ ID NO: 104985 - DNA, 20 bp, synthetic construct
  source 1..20: mol_type = other DNA
ggaactttggaaagtataca

SEQ ID NO: 104986 - DNA, 20 bp, synthetic construct
  source 1..20: mol_type = other DNA
aggaactttggaaagtatac

SEQ ID NO: 104987 - DNA, 20 bp, synthetic construct
  source 1..20: mol_type = other DNA
gaggaactttggaaagtata

SEQ ID NO: 104988 - DNA, 20 bp, synthetic construct
  source 1..20: mol_type = other DNA
agaggaactttggaaagtat

SEQ ID NO: 104989 - DNA, 20 bp, synthetic construct
  source 1..20: mol_type = other DNA
aagaggaactttggaaagta

SEQ ID NO: 104990 - DNA, 20 bp, synthetic construct
  source 1..20: mol_type = other DNA
caagaggaactttggaaagt

SEQ ID NO: 104991 - DNA, 20 bp, synthetic construct
  source 1..20: mol_type = other DNA
acaagaggaactttggaaag

SEQ ID NO: 104992 - DNA, 20 bp, synthetic construct
  source 1..20: mol_type = other DNA
aacaagaggaactttggaaa

SEQ ID NO: 104993 - DNA, 20 bp, synthetic construct
  source 1..20: mol_type = other DNA
taacaagaggaactttggaa

SEQ ID NO: 104994 - DNA, 20 bp, synthetic construct
  source 1..20: mol_type = other DNA
ataacaagaggaactttgga

SEQ ID NO: 104995 - DNA, 20 bp, synthetic construct
  source 1..20: mol_type = other DNA
gataacaagaggaactttgg

SEQ ID NO: 104996 - DNA, 20 bp, synthetic construct
  source 1..20: mol_type = other DNA
agataacaagaggaactttg

SEQ ID NO: 104997 - DNA, 20 bp, synthetic construct
  source 1..20: mol_type = other DNA
tagataacaagaggaacttt

SEQ ID NO: 104998 - DNA, 20 bp, synthetic construct
  source 1..20: mol_type = other DNA
ctagataacaagaggaactt

SEQ ID NO: 104999 - DNA, 20 bp, synthetic construct
  source 1..20: mol_type = other DNA
actagataacaagaggaact

SEQ ID NO: 105000 - DNA, 20 bp, synthetic construct
  source 1..20: mol_type = other DNA
cactagataacaagaggaac

SEQ ID NO: 105001 - DNA, 20 bp, synthetic construct
  source 1..20: mol_type = other DNA
acactagataacaagaggaa

SEQ ID NO: 105002 - DNA, 20 bp, synthetic construct
  source 1..20: mol_type = other DNA
aacactagataacaagagga

SEQ ID NO: 105003 - DNA, 20 bp, synthetic construct
  source 1..20: mol_type = other DNA
taacactagataacaagagg

SEQ ID NO: 105004 - DNA, 20 bp, synthetic construct
  source 1..20: mol_type = other DNA
ataacactagataacaagag

SEQ ID NO: 105005 - DNA, 20 bp, synthetic construct
  source 1..20: mol_type = other DNA
aataacactagataacaaga

SEQ ID NO: 105006 - DNA, 20 bp, synthetic construct
  source 1..20: mol_type = other DNA
aaataacactagataacaag

SEQ ID NO: 105007 - DNA, 20 bp, synthetic construct
  source 1..20: mol_type = other DNA
aaaataacactagataacaa

SEQ ID NO: 105008 - DNA, 20 bp, synthetic construct
  source 1..20: mol_type = other DNA
taaaataacactagataaca

SEQ ID NO: 105009 - DNA, 20 bp, synthetic construct
  source 1..20: mol_type = other DNA
ataaaataacactagataac

SEQ ID NO: 105010 - DNA, 20 bp, synthetic construct
  source 1..20: mol_type = other DNA
aataaaataacactagataa

SEQ ID NO: 105011 - DNA, 20 bp, synthetic construct
  source 1..20: mol_type = other DNA
aaataaaataacactagata

SEQ ID NO: 105012 - DNA, 20 bp, synthetic construct
  source 1..20: mol_type = other DNA
aaaataaaataacactagat

SEQ ID NO: 105013 - DNA, 20 bp, synthetic construct
  source 1..20: mol_type = other DNA
taaaataaaataacactaga

SEQ ID NO: 105014 - DNA, 20 bp, synthetic construct
  source 1..20: mol_type = other DNA
ataaaataaaataacactag

SEQ ID NO: 105015 - DNA, 20 bp, synthetic construct
  source 1..20: mol_type = other DNA
aataaaataaaataacacta

SEQ ID NO: 105016 - DNA, 20 bp, synthetic construct
  source 1..20: mol_type = other DNA
aaataaaataaaataacact

SEQ ID NO: 105017 - DNA, 20 bp, synthetic construct
  source 1..20: mol_type = other DNA
aaaataaaataaaataacac

SEQ ID NO: 105018 - DNA, 20 bp, synthetic construct
  source 1..20: mol_type = other DNA
aaaaataaaataaaataaca

SEQ ID NO: 105019 - DNA, 20 bp, synthetic construct
  source 1..20: mol_type = other DNA
taaaaataaaataaaataac

SEQ ID NO: 105020 - DNA, 20 bp, synthetic construct
  source 1..20: mol_type = other DNA
ataaaaataaaataaaataa

SEQ ID NO: 105021 - DNA, 20 bp, synthetic construct
  source 1..20: mol_type = other DNA
aataaaaataaaataaaata

SEQ ID NO: 105022 - DNA, 20 bp, synthetic construct
  source 1..20: mol_type = other DNA
aaataaaaataaaataaaat

SEQ ID NO: 105023 - DNA, 20 bp, synthetic construct
  source 1..20: mol_type = other DNA
aaaataaaaataaaataaaa

SEQ ID NO: 105024 - DNA, 20 bp, synthetic construct
  source 1..20: mol_type = other DNA
aaaaataaaaataaaataaa

SEQ ID NO: 105025 - DNA, 20 bp, synthetic construct
  source 1..20: mol_type = other DNA
caaaaataaaaataaaataa

SEQ ID NO: 105026 - DNA, 20 bp, synthetic construct
  source 1..20: mol_type = other DNA
acaaaaataaaaataaaata

SEQ ID NO: 105027 - DNA, 20 bp, synthetic construct
  source 1..20: mol_type = other DNA
aacaaaaataaaaataaaat

SEQ ID NO: 105028 - DNA, 20 bp, synthetic construct
  source 1..20: mol_type = other DNA
aaacaaaaataaaaataaaa

SEQ ID NO: 105029 - DNA, 20 bp, synthetic construct
  source 1..20: mol_type = other DNA
aaaacaaaaataaaaataaa

SEQ ID NO: 105030 - DNA, 20 bp, synthetic construct
  source 1..20: mol_type = other DNA
aaaaacaaaaataaaaataa

SEQ ID NO: 105031 - DNA, 20 bp, synthetic construct
  source 1..20: mol_type = other DNA
aaaaaacaaaaataaaaata

SEQ ID NO: 105032 - DNA, 20 bp, synthetic construct
  source 1..20: mol_type = other DNA
aaaaaaacaaaaataaaaat

SEQ ID NO: 105033 - DNA, 20 bp, synthetic construct
  source 1..20: mol_type = other DNA
caaaaaaacaaaaataaaaa

SEQ ID NO: 105034 - DNA, 20 bp, synthetic construct
  source 1..20: mol_type = other DNA
tcaaaaaaacaaaaataaaa

SEQ ID NO: 105035 - DNA, 20 bp, synthetic construct
  source 1..20: mol_type = other DNA
ctcaaaaaaacaaaaataaa

SEQ ID NO: 105036 - DNA, 20 bp, synthetic construct
  source 1..20: mol_type = other DNA
tctcaaaaaaacaaaaataa

SEQ ID NO: 105037 - DNA, 20 bp, synthetic construct
  source 1..20: mol_type = other DNA
atctcaaaaaaacaaaaata

SEQ ID NO: 105038 - DNA, 20 bp, synthetic construct
  source 1..20: mol_type = other DNA
catctcaaaaaaacaaaaat

SEQ ID NO: 105039 - DNA, 20 bp, synthetic construct
  source 1..20: mol_type = other DNA
ccatctcaaaaaaacaaaaa

SEQ ID NO: 105040 - DNA, 20 bp, synthetic construct
  source 1..20: mol_type = other DNA
tccatctcaaaaaaacaaaa

SEQ ID NO: 105041 - DNA, 20 bp, synthetic construct
  source 1..20: mol_type = other DNA
ctccatctcaaaaaaacaaa

SEQ ID NO: 105042 - DNA, 20 bp, synthetic construct
  source 1..20: mol_type = other DNA
actccatctcaaaaaaacaa

SEQ ID NO: 105043 - DNA, 20 bp, synthetic construct
  source 1..20: mol_type = other DNA
gactccatctcaaaaaaaca

SEQ ID NO: 105044 - DNA, 20 bp, synthetic construct
  source 1..20: mol_type = other DNA
agactccatctcaaaaaaac

SEQ ID NO: 105045 - DNA, 20 bp, synthetic construct
  source 1..20: mol_type = other DNA
gagactccatctcaaaaaaa

SEQ ID NO: 105046 - DNA, 20 bp, synthetic construct
  source 1..20: mol_type = other DNA
cgagactccatctcaaaaaa

SEQ ID NO: 105047 - DNA, 20 bp, synthetic construct
  source 1..20: mol_type = other DNA
gcgagactccatctcaaaaa

SEQ ID NO: 105048 - DNA, 20 bp, synthetic construct
  source 1..20: mol_type = other DNA
agcgagactccatctcaaaa

SEQ ID NO: 105049 - DNA, 20 bp, synthetic construct
  source 1..20: mol_type = other DNA
gagcgagactccatctcaaa

SEQ ID NO: 105050 - DNA, 20 bp, synthetic construct
  source 1..20: mol_type = other DNA
agagcgagactccatctcaa

SEQ ID NO: 105051 - DNA, 20 bp, synthetic construct
  source 1..20: mol_type = other DNA
cagagcgagactccatctca

SEQ ID NO: 105052 - DNA, 20 bp, synthetic construct
  source 1..20: mol_type = other DNA
acagagcgagactccatctc

SEQ ID NO: 105053 - DNA, 20 bp, synthetic construct
  source 1..20: mol_type = other DNA
gacagagcgagactccatct

SEQ ID NO: 105054 - DNA, 20 bp, synthetic construct
  source 1..20: mol_type = other DNA
tgacagagcgagactccatc

SEQ ID NO: 105055 - DNA, 20 bp, synthetic construct
  source 1..20: mol_type = other DNA
gtgacagagcgagactccat

SEQ ID NO: 105056 - DNA, 20 bp, synthetic construct
  source 1..20: mol_type = other DNA
ggtgacagagcgagactcca

SEQ ID NO: 105057 - DNA, 20 bp, synthetic construct
  source 1..20: mol_type = other DNA
gggtgacagagcgagactcc

SEQ ID NO: 105058 - DNA, 20 bp, synthetic construct
  source 1..20: mol_type = other DNA
tgggtgacagagcgagactc

SEQ ID NO: 105059 - DNA, 20 bp, synthetic construct
  source 1..20: mol_type = other DNA
atgggtgacagagcgagact

SEQ ID NO: 105060 - DNA, 20 bp, synthetic construct
  source 1..20: mol_type = other DNA
catgggtgacagagcgagac

SEQ ID NO: 105061 - DNA, 20 bp, synthetic construct
  source 1..20: mol_type = other DNA
gcatgggtgacagagcgaga

SEQ ID NO: 105062 - DNA, 20 bp, synthetic construct
  source 1..20: mol_type = other DNA
agcatgggtgacagagcgag

SEQ ID NO: 105063 - DNA, 20 bp, synthetic construct
  source 1..20: mol_type = other DNA
cagcatgggtgacagagcga

SEQ ID NO: 105064 - DNA, 20 bp, synthetic construct
  source 1..20: mol_type = other DNA
ccagcatgggtgacagagcg

SEQ ID NO: 105065 - DNA, 20 bp, synthetic construct
  source 1..20: mol_type = other DNA
tccagcatgggtgacagagc

SEQ ID NO: 105066 - DNA, 20 bp, synthetic construct
  source 1..20: mol_type = other DNA
ctccagcatgggtgacagag

SEQ ID NO: 105067 - DNA, 20 bp, synthetic construct
  source 1..20: mol_type = other DNA
actccagcatgggtgacaga

SEQ ID NO: 105068 - DNA, 20 bp, synthetic construct
  source 1..20: mol_type = other DNA
cactccagcatgggtgacag

SEQ ID NO: 105069 - DNA, 20 bp, synthetic construct
  source 1..20: mol_type = other DNA
acactccagcatgggtgaca

SEQ ID NO: 105070 - DNA, 20 bp, synthetic construct
  source 1..20: mol_type = other DNA
tacactccagcatgggtgac

SEQ ID NO: 105071 - DNA, 20 bp, synthetic construct
  source 1..20: mol_type = other DNA
ctacactccagcatgggtga

SEQ ID NO: 105072 - DNA, 20 bp, synthetic construct
  source 1..20: mol_type = other DNA
actacactccagcatgggtg

SEQ ID NO: 105073 - DNA, 20 bp, synthetic construct
  source 1..20: mol_type = other DNA
cactacactccagcatgggt

SEQ ID NO: 105074 - DNA, 20 bp, synthetic construct
  source 1..20: mol_type = other DNA
ccactacactccagcatggg

SEQ ID NO: 105075 - DNA, 20 bp, synthetic construct
  source 1..20: mol_type = other DNA
gccactacactccagcatgg

SEQ ID NO: 105076 - DNA, 20 bp, synthetic construct
  source 1..20: mol_type = other DNA
cgccactacactccagcatg

SEQ ID NO: 105077 - DNA, 20 bp, synthetic construct
  source 1..20: mol_type = other DNA
gcgccactacactccagcat

SEQ ID NO: 105078 - DNA, 20 bp, synthetic construct
  source 1..20: mol_type = other DNA
cgcgccactacactccagca

SEQ ID NO: 105079 - DNA, 20 bp, synthetic construct
  source 1..20: mol_type = other DNA
tcgcgccactacactccagc

SEQ ID NO: 105080 - DNA, 20 bp, synthetic construct
  source 1..20: mol_type = other DNA
atcgcgccactacactccag

SEQ ID NO: 105081 - DNA, 20 bp, synthetic construct
  source 1..20: mol_type = other DNA
gatcgcgccactacactcca

SEQ ID NO: 105082 - DNA, 20 bp, synthetic construct
  source 1..20: mol_type = other DNA
agatcgcgccactacactcc

SEQ ID NO: 105083 - DNA, 20 bp, synthetic construct
  source 1..20: mol_type = other DNA
gagatcgcgccactacactc

SEQ ID NO: 105084 - DNA, 20 bp, synthetic construct
  source 1..20: mol_type = other DNA
cgagatcgcgccactacact

SEQ ID NO: 105085 - DNA, 20 bp, synthetic construct
  source 1..20: mol_type = other DNA
ccgagatcgcgccactacac

SEQ ID NO: 105086 - DNA, 20 bp, synthetic construct
  source 1..20: mol_type = other DNA
gccgagatcgcgccactaca

SEQ ID NO: 105087 - DNA, 20 bp, synthetic construct
  source 1..20: mol_type = other DNA
agccgagatcgcgccactac

SEQ ID NO: 105088 - DNA, 20 bp, synthetic construct
  source 1..20: mol_type = other DNA
aagccgagatcgcgccacta

SEQ ID NO: 105089 - DNA, 20 bp, synthetic construct
  source 1..20: mol_type = other DNA
taagccgagatcgcgccact

SEQ ID NO: 105090 - DNA, 20 bp, synthetic construct
  source 1..20: mol_type = other DNA
gtaagccgagatcgcgccac

SEQ ID NO: 105091 - DNA, 20 bp, synthetic construct
  source 1..20: mol_type = other DNA
agtaagccgagatcgcgcca

SEQ ID NO: 105092 - DNA, 20 bp, synthetic construct
  source 1..20: mol_type = other DNA
cagtaagccgagatcgcgcc

SEQ ID NO: 105093 - DNA, 20 bp, synthetic construct
  source 1..20: mol_type = other DNA
gcagtaagccgagatcgcgc

SEQ ID NO: 105094 - DNA, 20 bp, synthetic construct
  source 1..20: mol_type = other DNA
tgcagtaagccgagatcgcg

SEQ ID NO: 105095 - DNA, 20 bp, synthetic construct
  source 1..20: mol_type = other DNA
ttgcagtaagccgagatcgc

SEQ ID NO: 105096 - DNA, 20 bp, synthetic construct
  source 1..20: mol_type = other DNA
gttgcagtaagccgagatcg

SEQ ID NO: 105097 - DNA, 20 bp, synthetic construct
  source 1..20: mol_type = other DNA
ggttgcagtaagccgagatc

SEQ ID NO: 105098 - DNA, 20 bp, synthetic construct
  source 1..20: mol_type = other DNA
aggttgcagtaagccgagat

SEQ ID NO: 105099 - DNA, 20 bp, synthetic construct
  source 1..20: mol_type = other DNA
gaggttgcagtaagccgaga

SEQ ID NO: 105100 - DNA, 20 bp, synthetic construct
  source 1..20: mol_type = other DNA
agaggttgcagtaagccgag

SEQ ID NO: 105101 - DNA, 20 bp, synthetic construct
  source 1..20: mol_type = other DNA
cagaggttgcagtaagccga

SEQ ID NO: 105102 - DNA, 20 bp, synthetic construct
  source 1..20: mol_type = other DNA
gcagaggttgcagtaagccg

SEQ ID NO: 105103 - DNA, 20 bp, synthetic construct
  source 1..20: mol_type = other DNA
ggcagaggttgcagtaagcc

SEQ ID NO: 105104 - DNA, 20 bp, synthetic construct
  source 1..20: mol_type = other DNA
aggcagaggttgcagtaagc

SEQ ID NO: 105105 - DNA, 20 bp, synthetic construct
  source 1..20: mol_type = other DNA
gaggcagaggttgcagtaag

SEQ ID NO: 105106 - DNA, 20 bp, synthetic construct
  source 1..20: mol_type = other DNA
ggaggcagaggttgcagtaa

SEQ ID NO: 105107 - DNA, 20 bp, synthetic construct
  source 1..20: mol_type = other DNA
gggaggcagaggttgcagta

SEQ ID NO: 105108 - DNA, 20 bp, synthetic construct
  source 1..20: mol_type = other DNA
ggggaggcagaggttgcagt

SEQ ID NO: 105109 - DNA, 20 bp, synthetic construct
  source 1..20: mol_type = other DNA
tggggaggcagaggttgcag

SEQ ID NO: 105110 - DNA, 20 bp, synthetic construct
  source 1..20: mol_type = other DNA
ctggggaggcagaggttgca

SEQ ID NO: 105111 - DNA, 20 bp, synthetic construct
  source 1..20: mol_type = other DNA
actggggaggcagaggttgc

SEQ ID NO: 105112 - DNA, 20 bp, synthetic construct
  source 1..20: mol_type = other DNA
aactggggaggcagaggttg

SEQ ID NO: 105113 - DNA, 20 bp, synthetic construct
  source 1..20: mol_type = other DNA
gaactggggaggcagaggtt

SEQ ID NO: 105114 - DNA, 20 bp, synthetic construct
  source 1..20: mol_type = other DNA
tgaactggggaggcagaggt

SEQ ID NO: 105115 - DNA, 20 bp, synthetic construct
  source 1..20: mol_type = other DNA
ttgaactggggaggcagagg

SEQ ID NO: 105116 - DNA, 20 bp, synthetic construct
  source 1..20: mol_type = other DNA
cttgaactggggaggcagag

SEQ ID NO: 105117 - DNA, 20 bp, synthetic construct
  source 1..20: mol_type = other DNA
acttgaactggggaggcaga

SEQ ID NO: 105118 - DNA, 20 bp, synthetic construct
  source 1..20: mol_type = other DNA
cacttgaactggggaggcag

SEQ ID NO: 105119 - DNA, 20 bp, synthetic construct
  source 1..20: mol_type = other DNA
tcacttgaactggggaggca

SEQ ID NO: 105120 - DNA, 20 bp, synthetic construct
  source 1..20: mol_type = other DNA
atcacttgaactggggaggc

SEQ ID NO: 105121 - DNA, 20 bp, synthetic construct
  source 1..20: mol_type = other DNA
aatcacttgaactggggagg

SEQ ID NO: 105122 - DNA, 20 bp, synthetic construct
  source 1..20: mol_type = other DNA
gaatcacttgaactggggag

SEQ ID NO: 105123 - DNA, 20 bp, synthetic construct
  source 1..20: mol_type = other DNA
agaatcacttgaactgggga

SEQ ID NO: 105124 - DNA, 20 bp, synthetic construct
  source 1..20: mol_type = other DNA
aagaatcacttgaactgggg

SEQ ID NO: 105125 - DNA, 20 bp, synthetic construct
  source 1..20: mol_type = other DNA
gaagaatcacttgaactggg

SEQ ID NO: 105126 - DNA, 20 bp, synthetic construct
  source 1..20: mol_type = other DNA
agaagaatcacttgaactgg

SEQ ID NO: 105127 - DNA, 20 bp, synthetic construct
  source 1..20: mol_type = other DNA
cagaagaatcacttgaactg

SEQ ID NO: 105128 - DNA, 20 bp, synthetic construct
  source 1..20: mol_type = other DNA
gcagaagaatcacttgaact

SEQ ID NO: 105129 - DNA, 20 bp, synthetic construct
  source 1..20: mol_type = other DNA
ggcagaagaatcacttgaac

SEQ ID NO: 105130 - DNA, 20 bp, synthetic construct
  source 1..20: mol_type = other DNA
aggcagaagaatcacttgaa

SEQ ID NO: 105131 - DNA, 20 bp, synthetic construct
  source 1..20: mol_type = other DNA
gaggcagaagaatcacttga

SEQ ID NO: 105132 - DNA, 20 bp, synthetic construct
  source 1..20: mol_type = other DNA
tgaggcagaagaatcacttg

SEQ ID NO: 105133 - DNA, 20 bp, synthetic construct
  source 1..20: mol_type = other DNA
ctgaggcagaagaatcactt

SEQ ID NO: 105134 - DNA, 20 bp, synthetic construct
  source 1..20: mol_type = other DNA
gctgaggcagaagaatcact

SEQ ID NO: 105135 - DNA, 20 bp, synthetic construct
  source 1..20: mol_type = other DNA
ggctgaggcagaagaatcac

SEQ ID NO: 105136 - DNA, 20 bp, synthetic construct
  source 1..20: mol_type = other DNA
aggctgaggcagaagaatca

SEQ ID NO: 105137 - DNA, 20 bp, synthetic construct
  source 1..20: mol_type = other DNA
gaggctgaggcagaagaatc

SEQ ID NO: 105138 - DNA, 20 bp, synthetic construct
  source 1..20: mol_type = other DNA
ggaggctgaggcagaagaat

SEQ ID NO: 105139 - DNA, 20 bp, synthetic construct
  source 1..20: mol_type = other DNA
aggaggctgaggcagaagaa

SEQ ID NO: 105140 - DNA, 20 bp, synthetic construct
  source 1..20: mol_type = other DNA
caggaggctgaggcagaaga

SEQ ID NO: 105141 - DNA, 20 bp, synthetic construct
  source 1..20: mol_type = other DNA
tcaggaggctgaggcagaag

SEQ ID NO: 105142 - DNA, 20 bp, synthetic construct
  source 1..20: mol_type = other DNA
ctcaggaggctgaggcagaa

SEQ ID NO: 105143 - DNA, 20 bp, synthetic construct
  source 1..20: mol_type = other DNA
actcaggaggctgaggcaga

SEQ ID NO: 105144 - DNA, 20 bp, synthetic construct
  source 1..20: mol_type = other DNA
tactcaggaggctgaggcag

SEQ ID NO: 105145 - DNA, 20 bp, synthetic construct
  source 1..20: mol_type = other DNA
ctactcaggaggctgaggca

SEQ ID NO: 105146 - DNA, 20 bp, synthetic construct
  source 1..20: mol_type = other DNA
gctactcaggaggctgaggc

SEQ ID NO: 105147 - DNA, 20 bp, synthetic construct
  source 1..20: mol_type = other DNA
agctactcaggaggctgagg

SEQ ID NO: 105148 - DNA, 20 bp, synthetic construct
  source 1..20: mol_type = other DNA
cagctactcaggaggctgag

SEQ ID NO: 105149 - DNA, 20 bp, synthetic construct
  source 1..20: mol_type = other DNA
ccagctactcaggaggctga

SEQ ID NO: 105150 - DNA, 20 bp, synthetic construct
  source 1..20: mol_type = other DNA
cccagctactcaggaggctg

SEQ ID NO: 105151 - DNA, 20 bp, synthetic construct
  source 1..20: mol_type = other DNA
tcccagctactcaggaggct

SEQ ID NO: 105152 - DNA, 20 bp, synthetic construct
  source 1..20: mol_type = other DNA
atcccagctactcaggaggc

SEQ ID NO: 105153 - DNA, 20 bp, synthetic construct
  source 1..20: mol_type = other DNA
aatcccagctactcaggagg

SEQ ID NO: 105154 - DNA, 20 bp, synthetic construct
  source 1..20: mol_type = other DNA
taatcccagctactcaggag

SEQ ID NO: 105155 - DNA, 20 bp, synthetic construct
  source 1..20: mol_type = other DNA
gtaatcccagctactcagga

SEQ ID NO: 105156 - DNA, 20 bp, synthetic construct
  source 1..20: mol_type = other DNA
tgtaatcccagctactcagg

SEQ ID NO: 105157 - DNA, 20 bp, synthetic construct
  source 1..20: mol_type = other DNA
ctgtaatcccagctactcag

SEQ ID NO: 105158 - DNA, 20 bp, synthetic construct
  source 1..20: mol_type = other DNA
cctgtaatcccagctactca

SEQ ID NO: 105159 - DNA, 20 bp, synthetic construct
  source 1..20: mol_type = other DNA
gcctgtaatcccagctactc

SEQ ID NO: 105160 - DNA, 20 bp, synthetic construct
  source 1..20: mol_type = other DNA
tgcctgtaatcccagctact

SEQ ID NO: 105161 - DNA, 20 bp, synthetic construct
  source 1..20: mol_type = other DNA
atgcctgtaatcccagctac

SEQ ID NO: 105162 - DNA, 20 bp, synthetic construct
  source 1..20: mol_type = other DNA
catgcctgtaatcccagcta

SEQ ID NO: 105163 - DNA, 20 bp, synthetic construct
  source 1..20: mol_type = other DNA
acatgcctgtaatcccagct

SEQ ID NO: 105164 - DNA, 20 bp, synthetic construct
  source 1..20: mol_type = other DNA
tacatgcctgtaatcccagc

SEQ ID NO: 105165 - DNA, 20 bp, synthetic construct
  source 1..20: mol_type = other DNA
gtacatgcctgtaatcccag

SEQ ID NO: 105166 - DNA, 20 bp, synthetic construct
  source 1..20: mol_type = other DNA
ggtacatgcctgtaatccca

SEQ ID NO: 105167 - DNA, 20 bp, synthetic construct
  source 1..20: mol_type = other DNA
tggtacatgcctgtaatccc

SEQ ID NO: 105168 - DNA, 20 bp, synthetic construct
  source 1..20: mol_type = other DNA
gtggtacatgcctgtaatcc

SEQ ID NO: 105169 - DNA, 20 bp, synthetic construct
  source 1..20: mol_type = other DNA
ggtggtacatgcctgtaatc

SEQ ID NO: 105170 - DNA, 20 bp, synthetic construct
  source 1..20: mol_type = other DNA
tggtggtacatgcctgtaat

SEQ ID NO: 105171 - DNA, 20 bp, synthetic construct
  source 1..20: mol_type = other DNA
gtggtggtacatgcctgtaa

SEQ ID NO: 105172 - DNA, 20 bp, synthetic construct
  source 1..20: mol_type = other DNA
agtggtggtacatgcctgta

SEQ ID NO: 105173 - DNA, 20 bp, synthetic construct
  source 1..20: mol_type = other DNA
gagtggtggtacatgcctgt

SEQ ID NO: 105174 - DNA, 20 bp, synthetic construct
  source 1..20: mol_type = other DNA
ggagtggtggtacatgcctg

SEQ ID NO: 105175 - DNA, 20 bp, synthetic construct
  source 1..20: mol_type = other DNA
aggagtggtggtacatgcct

SEQ ID NO: 105176 - DNA, 20 bp, synthetic construct
  source 1..20: mol_type = other DNA
caggagtggtggtacatgcc

SEQ ID NO: 105177 - DNA, 20 bp, synthetic construct
  source 1..20: mol_type = other DNA
ccaggagtggtggtacatgc

SEQ ID NO: 105178 - DNA, 20 bp, synthetic construct
  source 1..20: mol_type = other DNA
gccaggagtggtggtacatg

SEQ ID NO: 105179 - DNA, 20 bp, synthetic construct
  source 1..20: mol_type = other DNA
agccaggagtggtggtacat

SEQ ID NO: 105180 - DNA, 20 bp, synthetic construct
  source 1..20: mol_type = other DNA
tagccaggagtggtggtaca

SEQ ID NO: 105181 - DNA, 20 bp, synthetic construct
  source 1..20: mol_type = other DNA
ttagccaggagtggtggtac

SEQ ID NO: 105182 - DNA, 20 bp, synthetic construct
  source 1..20: mol_type = other DNA
attagccaggagtggtggta

SEQ ID NO: 105183 - DNA, 20 bp, synthetic construct
  source 1..20: mol_type = other DNA
aattagccaggagtggtggt

SEQ ID NO: 105184 - DNA, 20 bp, synthetic construct
  source 1..20: mol_type = other DNA
aaattagccaggagtggtgg

SEQ ID NO: 105185 - DNA, 20 bp, synthetic construct
  source 1..20: mol_type = other DNA
aaaattagccaggagtggtg

SEQ ID NO: 105186 - DNA, 20 bp, synthetic construct
  source 1..20: mol_type = other DNA
aaaaattagccaggagtggt

SEQ ID NO: 105187 - DNA, 20 bp, synthetic construct
  source 1..20: mol_type = other DNA
aaaaaattagccaggagtgg

SEQ ID NO: 105188 - DNA, 20 bp, synthetic construct
  source 1..20: mol_type = other DNA
aaaaaaattagccaggagtg

SEQ ID NO: 105189 - DNA, 20 bp, synthetic construct
  source 1..20: mol_type = other DNA
aaaaaaaattagccaggagt

SEQ ID NO: 105190 - DNA, 20 bp, synthetic construct
  source 1..20: mol_type = other DNA
aaaaaaaaattagccaggag

SEQ ID NO: 105191 - DNA, 20 bp, synthetic construct
  source 1..20: mol_type = other DNA
caaaaaaaaattagccagga

SEQ ID NO: 105192 - DNA, 20 bp, synthetic construct
  source 1..20: mol_type = other DNA
acaaaaaaaaattagccagg

SEQ ID NO: 105193 - DNA, 20 bp, synthetic construct
  source 1..20: mol_type = other DNA
tacaaaaaaaaattagccag

SEQ ID NO: 105194 - DNA, 20 bp, synthetic construct
  source 1..20: mol_type = other DNA
atacaaaaaaaaattagcca

SEQ ID NO: 105195 - DNA, 20 bp, synthetic construct
  source 1..20: mol_type = other DNA
aatacaaaaaaaaattagcc

SEQ ID NO: 105196 - DNA, 20 bp, synthetic construct
  source 1..20: mol_type = other DNA
aaatacaaaaaaaaattagc

SEQ ID NO: 105197 - DNA, 20 bp, synthetic construct
  source 1..20: mol_type = other DNA
aaaatacaaaaaaaaattag

SEQ ID NO: 105198 - DNA, 20 bp, synthetic construct
  source 1..20: mol_type = other DNA
aaaaatacaaaaaaaaatta

SEQ ID NO: 105199 - DNA, 20 bp, synthetic construct
  source 1..20: mol_type = other DNA
taaaaatacaaaaaaaaatt

SEQ ID NO: 105200 - DNA, 20 bp, synthetic construct
  source 1..20: mol_type = other DNA
ctaaaaatacaaaaaaaaat

SEQ ID NO: 105201 - DNA, 20 bp, synthetic construct
  source 1..20: mol_type = other DNA
actaaaaatacaaaaaaaaa

SEQ ID NO: 105202 - DNA, 20 bp, synthetic construct
  source 1..20: mol_type = other DNA
tactaaaaatacaaaaaaaa

SEQ ID NO: 105203 - DNA, 20 bp, synthetic construct
  source 1..20: mol_type = other DNA
ctactaaaaatacaaaaaaa

SEQ ID NO: 105204 - DNA, 20 bp, synthetic construct
  source 1..20: mol_type = other DNA
tctactaaaaatacaaaaaa

SEQ ID NO: 105205 - DNA, 20 bp, synthetic construct
  source 1..20: mol_type = other DNA
ctctactaaaaatacaaaaa

SEQ ID NO: 105206 - DNA, 20 bp, synthetic construct
  source 1..20: mol_type = other DNA
tctctactaaaaatacaaaa

SEQ ID NO: 105207 - DNA, 20 bp, synthetic construct
  source 1..20: mol_type = other DNA
ctctctactaaaaatacaaa

SEQ ID NO: 105208 - DNA, 20 bp, synthetic construct
  source 1..20: mol_type = other DNA
cctctctactaaaaatacaa

SEQ ID NO: 105209 - DNA, 20 bp, synthetic construct
  source 1..20: mol_type = other DNA
ccctctctactaaaaataca

SEQ ID NO: 105210 - DNA, 20 bp, synthetic construct
  source 1..20: mol_type = other DNA
cccctctctactaaaaatac

SEQ ID NO: 105211 - DNA, 20 bp, synthetic construct
  source 1..20: mol_type = other DNA
ccccctctctactaaaaata

SEQ ID NO: 105212 - DNA, 20 bp, synthetic construct
  source 1..20: mol_type = other DNA
accccctctctactaaaaat

SEQ ID NO: 105213 - DNA, 20 bp, synthetic construct
  source 1..20: mol_type = other DNA
aaccccctctctactaaaaa

SEQ ID NO: 105214 - DNA, 20 bp, synthetic construct
  source 1..20: mol_type = other DNA
aaaccccctctctactaaaa

SEQ ID NO: 105215 - DNA, 20 bp, synthetic construct
  source 1..20: mol_type = other DNA
gaaaccccctctctactaaa

SEQ ID NO: 105216 - DNA, 20 bp, synthetic construct
  source 1..20: mol_type = other DNA
tgaaaccccctctctactaa

SEQ ID NO: 105217 - DNA, 20 bp, synthetic construct
  source 1..20: mol_type = other DNA
gtgaaaccccctctctacta

SEQ ID NO: 105218 - DNA, 20 bp, synthetic construct
  source 1..20: mol_type = other DNA
ggtgaaaccccctctctact

SEQ ID NO: 105219 - DNA, 20 bp, synthetic construct
  source 1..20: mol_type = other DNA
tggtgaaaccccctctctac

SEQ ID NO: 105220 - DNA, 20 bp, synthetic construct
  source 1..20: mol_type = other DNA
atggtgaaaccccctctcta

SEQ ID NO: 105221 - DNA, 20 bp, synthetic construct
  source 1..20: mol_type = other DNA
catggtgaaaccccctctct

SEQ ID NO: 105222 - DNA, 20 bp, synthetic construct
  source 1..20: mol_type = other DNA
acatggtgaaaccccctctc

SEQ ID NO: 105223 - DNA, 20 bp, synthetic construct
  source 1..20: mol_type = other DNA
aacatggtgaaaccccctct

SEQ ID NO: 105224 - DNA, 20 bp, synthetic construct
  source 1..20: mol_type = other DNA
caacatggtgaaaccccctc

SEQ ID NO: 105225 - DNA, 20 bp, synthetic construct
  source 1..20: mol_type = other DNA
ccaacatggtgaaaccccct

SEQ ID NO: 105226 - DNA, 20 bp, synthetic construct
  source 1..20: mol_type = other DNA
accaacatggtgaaaccccc

SEQ ID NO: 105227 - DNA, 20 bp, synthetic construct
  source 1..20: mol_type = other DNA
gaccaacatggtgaaacccc

SEQ ID NO: 105228 - DNA, 20 bp, synthetic construct
  source 1..20: mol_type = other DNA
tgaccaacatggtgaaaccc

SEQ ID NO: 105229 - DNA, 20 bp, synthetic construct
  source 1..20: mol_type = other DNA
ttgaccaacatggtgaaacc

SEQ ID NO: 105230 - DNA, 20 bp, synthetic construct
  source 1..20: mol_type = other DNA
cttgaccaacatggtgaaac

SEQ ID NO: 105231 - DNA, 20 bp, synthetic construct
  source 1..20: mol_type = other DNA
gcttgaccaacatggtgaaa

SEQ ID NO: 105232 - DNA, 20 bp, synthetic construct
  source 1..20: mol_type = other DNA
agcttgaccaacatggtgaa

SEQ ID NO: 105233 - DNA, 20 bp, synthetic construct
  source 1..20: mol_type = other DNA
cagcttgaccaacatggtga

SEQ ID NO: 105234 - DNA, 20 bp, synthetic construct
  source 1..20: mol_type = other DNA
tcagcttgaccaacatggtg

SEQ ID NO: 105235 - DNA, 20 bp, synthetic construct
  source 1..20: mol_type = other DNA
atcagcttgaccaacatggt

SEQ ID NO: 105236 - DNA, 20 bp, synthetic construct
  source 1..20: mol_type = other DNA
gatcagcttgaccaacatgg

SEQ ID NO: 105237 - DNA, 20 bp, synthetic construct
  source 1..20: mol_type = other DNA
agatcagcttgaccaacatg

SEQ ID NO: 105238 - DNA, 20 bp, synthetic construct
  source 1..20: mol_type = other DNA
gagatcagcttgaccaacat

SEQ ID NO: 105239 - DNA, 20 bp, synthetic construct
  source 1..20: mol_type = other DNA
cgagatcagcttgaccaaca

SEQ ID NO: 105240 - DNA, 20 bp, synthetic construct
  source 1..20: mol_type = other DNA
tcgagatcagcttgaccaac

SEQ ID NO: 105241 - DNA, 20 bp, synthetic construct
  source 1..20: mol_type = other DNA
ttcgagatcagcttgaccaa

SEQ ID NO: 105242 - DNA, 20 bp, synthetic construct
  source 1..20: mol_type = other DNA
gttcgagatcagcttgacca

SEQ ID NO: 105243 - DNA, 20 bp, synthetic construct
  source 1..20: mol_type = other DNA
agttcgagatcagcttgacc

SEQ ID NO: 105244 - DNA, 20 bp, synthetic construct
  source 1..20: mol_type = other DNA
gagttcgagatcagcttgac

SEQ ID NO: 105245 - DNA, 20 bp, synthetic construct
  source 1..20: mol_type = other DNA
ggagttcgagatcagcttga

SEQ ID NO: 105246 - DNA, 20 bp, synthetic construct
  source 1..20: mol_type = other DNA
aggagttcgagatcagcttg

SEQ ID NO: 105247 - DNA, 20 bp, synthetic construct
  source 1..20: mol_type = other DNA
caggagttcgagatcagctt

SEQ ID NO: 105248 - DNA, 20 bp, synthetic construct
  source 1..20: mol_type = other DNA
tcaggagttcgagatcagct

SEQ ID NO: 105249 - DNA, 20 bp, synthetic construct
  source 1..20: mol_type = other DNA
gtcaggagttcgagatcagc

SEQ ID NO: 105250 - DNA, 20 bp, synthetic construct
  source 1..20: mol_type = other DNA
ggtcaggagttcgagatcag

SEQ ID NO: 105251 - DNA, 20 bp, synthetic construct
  source 1..20: mol_type = other DNA
aggtcaggagttcgagatca

SEQ ID NO: 105252 - DNA, 20 bp, synthetic construct
  source 1..20: mol_type = other DNA
gaggtcaggagttcgagatc

SEQ ID NO: 105253 - DNA, 20 bp, synthetic construct
  source 1..20: mol_type = other DNA
tgaggtcaggagttcgagat

SEQ ID NO: 105254 - DNA, 20 bp, synthetic construct
  source 1..20: mol_type = other DNA
ctgaggtcaggagttcgaga

SEQ ID NO: 105255 - DNA, 20 bp, synthetic construct
  source 1..20: mol_type = other DNA
tctgaggtcaggagttcgag

SEQ ID NO: 105256 - DNA, 20 bp, synthetic construct
  source 1..20: mol_type = other DNA
atctgaggtcaggagttcga

SEQ ID NO: 105257 - DNA, 20 bp, synthetic construct
  source 1..20: mol_type = other DNA
catctgaggtcaggagttcg

SEQ ID NO: 105258 - DNA, 20 bp, synthetic construct
  source 1..20: mol_type = other DNA
tcatctgaggtcaggagttc

SEQ ID NO: 105259 - DNA, 20 bp, synthetic construct
  source 1..20: mol_type = other DNA
atcatctgaggtcaggagtt

SEQ ID NO: 105260 - DNA, 20 bp, synthetic construct
  source 1..20: mol_type = other DNA
gatcatctgaggtcaggagt

SEQ ID NO: 105261 - DNA, 20 bp, synthetic construct
  source 1..20: mol_type = other DNA
ggatcatctgaggtcaggag

SEQ ID NO: 105262 - DNA, 20 bp, synthetic construct
  source 1..20: mol_type = other DNA
tggatcatctgaggtcagga

SEQ ID NO: 105263 - DNA, 20 bp, synthetic construct
  source 1..20: mol_type = other DNA
gtggatcatctgaggtcagg

SEQ ID NO: 105264 - DNA, 20 bp, synthetic construct
  source 1..20: mol_type = other DNA
ggtggatcatctgaggtcag

SEQ ID NO: 105265 - DNA, 20 bp, synthetic construct
  source 1..20: mol_type = other DNA
gggtggatcatctgaggtca

SEQ ID NO: 105266 - DNA, 20 bp, synthetic construct
  source 1..20: mol_type = other DNA
tgggtggatcatctgaggtc

SEQ ID NO: 105267 - DNA, 20 bp, synthetic construct
  source 1..20: mol_type = other DNA
gtgggtggatcatctgaggt

SEQ ID NO: 105268 - DNA, 20 bp, synthetic construct
  source 1..20: mol_type = other DNA
ggtgggtggatcatctgagg

SEQ ID NO: 105269 - DNA, 20 bp, synthetic construct
  source 1..20: mol_type = other DNA
aggtgggtggatcatctgag

SEQ ID NO: 105270 - DNA, 20 bp, synthetic construct
  source 1..20: mol_type = other DNA
aaggtgggtggatcatctga

SEQ ID NO: 105271 - DNA, 20 bp, synthetic construct
  source 1..20: mol_type = other DNA
caaggtgggtggatcatctg

SEQ ID NO: 105272 - DNA, 20 bp, synthetic construct
  source 1..20: mol_type = other DNA
ccaaggtgggtggatcatct

SEQ ID NO: 105273 - DNA, 20 bp, synthetic construct
  source 1..20: mol_type = other DNA
gccaaggtgggtggatcatc

SEQ ID NO: 105274 - DNA, 20 bp, synthetic construct
  source 1..20: mol_type = other DNA
ggccaaggtgggtggatcat

SEQ ID NO: 105275 - DNA, 20 bp, synthetic construct
  source 1..20: mol_type = other DNA
aggccaaggtgggtggatca

SEQ ID NO: 105276 - DNA, 20 bp, synthetic construct
  source 1..20: mol_type = other DNA
gaggccaaggtgggtggatc

SEQ ID NO: 105277 - DNA, 20 bp, synthetic construct
  source 1..20: mol_type = other DNA
ggaggccaaggtgggtggat

SEQ ID NO: 105278 - DNA, 20 bp, synthetic construct
  source 1..20: mol_type = other DNA
aggaggccaaggtgggtgga

SEQ ID NO: 105279 - DNA, 20 bp, synthetic construct
  source 1..20: mol_type = other DNA
taggaggccaaggtgggtgg

SEQ ID NO: 105280 - DNA, 20 bp, synthetic construct
  source 1..20: mol_type = other DNA
ttaggaggccaaggtgggtg

SEQ ID NO: 105281 - DNA, 20 bp, synthetic construct
  source 1..20: mol_type = other DNA
tttaggaggccaaggtgggt

SEQ ID NO: 105282 - DNA, 20 bp, synthetic construct
  source 1..20: mol_type = other DNA
ctttaggaggccaaggtggg

SEQ ID NO: 105283 - DNA, 20 bp, synthetic construct
  source 1..20: mol_type = other DNA
actttaggaggccaaggtgg

SEQ ID NO: 105284 - DNA, 20 bp, synthetic construct
  source 1..20: mol_type = other DNA
cactttaggaggccaaggtg

SEQ ID NO: 105285 - DNA, 20 bp, synthetic construct
  source 1..20: mol_type = other DNA
gcactttaggaggccaaggt

SEQ ID NO: 105286 - DNA, 20 bp, synthetic construct
  source 1..20: mol_type = other DNA
agcactttaggaggccaagg

SEQ ID NO: 105287 - DNA, 20 bp, synthetic construct
  source 1..20: mol_type = other DNA
cagcactttaggaggccaag

SEQ ID NO: 105288 - DNA, 20 bp, synthetic construct
  source 1..20: mol_type = other DNA
ccagcactttaggaggccaa

SEQ ID NO: 105289 - DNA, 20 bp, synthetic construct
  source 1..20: mol_type = other DNA
tccagcactttaggaggcca

SEQ ID NO: 105290 - DNA, 20 bp, synthetic construct
  source 1..20: mol_type = other DNA
ttccagcactttaggaggcc

SEQ ID NO: 105291 - DNA, 20 bp, synthetic construct
  source 1..20: mol_type = other DNA
attccagcactttaggaggc

SEQ ID NO: 105292 - DNA, 20 bp, synthetic construct
  source 1..20: mol_type = other DNA
aattccagcactttaggagg

SEQ ID NO: 105293 - DNA, 20 bp, synthetic construct
  source 1..20: mol_type = other DNA
taattccagcactttaggag

SEQ ID NO: 105294 - DNA, 20 bp, synthetic construct
  source 1..20: mol_type = other DNA
gtaattccagcactttagga

SEQ ID NO: 105295 - DNA, 20 bp, synthetic construct
  source 1..20: mol_type = other DNA
tgtaattccagcactttagg

SEQ ID NO: 105296 - DNA, 20 bp, synthetic construct
  source 1..20: mol_type = other DNA
ctgtaattccagcactttag

SEQ ID NO: 105297 - DNA, 20 bp, synthetic construct
  source 1..20: mol_type = other DNA
cctgtaattccagcacttta

SEQ ID NO: 105298 - DNA, 20 bp, synthetic construct
  source 1..20: mol_type = other DNA
gcctgtaattccagcacttt

SEQ ID NO: 105299 - DNA, 20 bp, synthetic construct
  source 1..20: mol_type = other DNA
tgcctgtaattccagcactt

SEQ ID NO: 105300 - DNA, 20 bp, synthetic construct
  source 1..20: mol_type = other DNA
atgcctgtaattccagcact

SEQ ID NO: 105301 - DNA, 20 bp, synthetic construct
  source 1..20: mol_type = other DNA
catgcctgtaattccagcac

SEQ ID NO: 105302 - DNA, 20 bp, synthetic construct
  source 1..20: mol_type = other DNA
tcatgcctgtaattccagca

SEQ ID NO: 105303 - DNA, 20 bp, synthetic construct
  source 1..20: mol_type = other DNA
ctcatgcctgtaattccagc

SEQ ID NO: 105304 - DNA, 20 bp, synthetic construct
  source 1..20: mol_type = other DNA
gctcatgcctgtaattccag

SEQ ID NO: 105305 - DNA, 20 bp, synthetic construct
  source 1..20: mol_type = other DNA
ggctcatgcctgtaattcca

SEQ ID NO: 105306 - DNA, 20 bp, synthetic construct
  source 1..20: mol_type = other DNA
tggctcatgcctgtaattcc

SEQ ID NO: 105307 - DNA, 20 bp, synthetic construct
  source 1..20: mol_type = other DNA
gtggctcatgcctgtaattc

SEQ ID NO: 105308 - DNA, 20 bp, synthetic construct
  source 1..20: mol_type = other DNA
ggtggctcatgcctgtaatt

SEQ ID NO: 105309 - DNA, 20 bp, synthetic construct
  source 1..20: mol_type = other DNA
cggtggctcatgcctgtaat

SEQ ID NO: 105310 - DNA, 20 bp, synthetic construct
  source 1..20: mol_type = other DNA
acggtggctcatgcctgtaa

SEQ ID NO: 105311 - DNA, 20 bp, synthetic construct
  source 1..20: mol_type = other DNA
cacggtggctcatgcctgta

SEQ ID NO: 105312 - DNA, 20 bp, synthetic construct
  source 1..20: mol_type = other DNA
gcacggtggctcatgcctgt

SEQ ID NO: 105313 - DNA, 20 bp, synthetic construct
  source 1..20: mol_type = other DNA
ggcacggtggctcatgcctg

SEQ ID NO: 105314 - DNA, 20 bp, synthetic construct
  source 1..20: mol_type = other DNA
gggcacggtggctcatgcct

SEQ ID NO: 105315 - DNA, 20 bp, synthetic construct
  source 1..20: mol_type = other DNA
cgggcacggtggctcatgcc

SEQ ID NO: 105316 - DNA, 20 bp, synthetic construct
  source 1..20: mol_type = other DNA
ccgggcacggtggctcatgc

SEQ ID NO: 105317 - DNA, 20 bp, synthetic construct
  source 1..20: mol_type = other DNA
gccgggcacggtggctcatg

SEQ ID NO: 105318 - DNA, 20 bp, synthetic construct
  source 1..20: mol_type = other DNA
ggccgggcacggtggctcat

SEQ ID NO: 105319 - DNA, 20 bp, synthetic construct
  source 1..20: mol_type = other DNA
aggccgggcacggtggctca

SEQ ID NO: 105320 - DNA, 20 bp, synthetic construct
  source 1..20: mol_type = other DNA
gaggccgggcacggtggctc

SEQ ID NO: 105321 - DNA, 20 bp, synthetic construct
  source 1..20: mol_type = other DNA
agaggccgggcacggtggct

SEQ ID NO: 105322 - DNA, 20 bp, synthetic construct
  source 1..20: mol_type = other DNA
tagaggccgggcacggtggc

SEQ ID NO: 105323 - DNA, 20 bp, synthetic construct
  source 1..20: mol_type = other DNA
ctagaggccgggcacggtgg

SEQ ID NO: 105324 - DNA, 20 bp, synthetic construct
  source 1..20: mol_type = other DNA
actagaggccgggcacggtg

SEQ ID NO: 105325 - DNA, 20 bp, synthetic construct
  source 1..20: mol_type = other DNA
cactagaggccgggcacggt

SEQ ID NO: 105326 - DNA, 20 bp, synthetic construct
  source 1..20: mol_type = other DNA
acactagaggccgggcacgg

SEQ ID NO: 105327 - DNA, 20 bp, synthetic construct
  source 1..20: mol_type = other DNA
aacactagaggccgggcacg

SEQ ID NO: 105328 - DNA, 20 bp, synthetic construct
  source 1..20: mol_type = other DNA
taacactagaggccgggcac

SEQ ID NO: 105329 - DNA, 20 bp, synthetic construct
  source 1..20: mol_type = other DNA
ataacactagaggccgggca

SEQ ID NO: 105330 - DNA, 20 bp, synthetic construct
  source 1..20: mol_type = other DNA
gataacactagaggccgggc

SEQ ID NO: 105331 - DNA, 20 bp, synthetic construct
  source 1..20: mol_type = other DNA
agataacactagaggccggg

SEQ ID NO: 105332 - DNA, 20 bp, synthetic construct
  source 1..20: mol_type = other DNA
aagataacactagaggccgg

SEQ ID NO: 105333 - DNA, 20 bp, synthetic construct
  source 1..20: mol_type = other DNA
taagataacactagaggccg

SEQ ID NO: 105334 - DNA, 20 bp, synthetic construct
  source 1..20: mol_type = other DNA
ataagataacactagaggcc

SEQ ID NO: 105335 - DNA, 20 bp, synthetic construct
  source 1..20: mol_type = other DNA
aataagataacactagaggc

SEQ ID NO: 105336 - DNA, 20 bp, synthetic construct
  source 1..20: mol_type = other DNA
caataagataacactagagg

SEQ ID NO: 105337 - DNA, 20 bp, synthetic construct
  source 1..20: mol_type = other DNA
acaataagataacactagag

SEQ ID NO: 105338 - DNA, 20 bp, synthetic construct
  source 1..20: mol_type = other DNA
cacaataagataacactaga

SEQ ID NO: 105339 - DNA, 20 bp, synthetic construct
  source 1..20: mol_type = other DNA
tcacaataagataacactag

SEQ ID NO: 105340 - DNA, 20 bp, synthetic construct
  source 1..20: mol_type = other DNA
atcacaataagataacacta

SEQ ID NO: 105341 - DNA, 20 bp, synthetic construct
  source 1..20: mol_type = other DNA
gatcacaataagataacact

SEQ ID NO: 105342 - DNA, 20 bp, synthetic construct
  source 1..20: mol_type = other DNA
tgatcacaataagataacac

SEQ ID NO: 105343 - DNA, 20 bp, synthetic construct
  source 1..20: mol_type = other DNA
ctgatcacaataagataaca

SEQ ID NO: 105344 - DNA, 20 bp, synthetic construct
  source 1..20: mol_type = other DNA
tctgatcacaataagataac

SEQ ID NO: 105345 - DNA, 20 bp, synthetic construct
  source 1..20: mol_type = other DNA
ctctgatcacaataagataa

SEQ ID NO: 105346 - DNA, 20 bp, synthetic construct
  source 1..20: mol_type = other DNA
tctctgatcacaataagata

SEQ ID NO: 105347 - DNA, 20 bp, synthetic construct
  source 1..20: mol_type = other DNA
ttctctgatcacaataagat

SEQ ID NO: 105348 - DNA, 20 bp, synthetic construct
  source 1..20: mol_type = other DNA
cttctctgatcacaataaga

SEQ ID NO: 105349 - DNA, 20 bp, synthetic construct
  source 1..20: mol_type = other DNA
tcttctctgatcacaataag

SEQ ID NO: 105350 - DNA, 20 bp, synthetic construct
  source 1..20: mol_type = other DNA
atcttctctgatcacaataa

SEQ ID NO: 105351 - DNA, 20 bp, synthetic construct
  source 1..20: mol_type = other DNA
tatcttctctgatcacaata

SEQ ID NO: 105352 - DNA, 20 bp, synthetic construct
  source 1..20: mol_type = other DNA
ctatcttctctgatcacaat

SEQ ID NO: 105353 - DNA, 20 bp, synthetic construct
  source 1..20: mol_type = other DNA
actatcttctctgatcacaa

SEQ ID NO: 105354 - DNA, 20 bp, synthetic construct
  source 1..20: mol_type = other DNA
aactatcttctctgatcaca

SEQ ID NO: 105355 - DNA, 20 bp, synthetic construct
  source 1..20: mol_type = other DNA
caactatcttctctgatcac

SEQ ID NO: 105356 - DNA, 20 bp, synthetic construct
  source 1..20: mol_type = other DNA
tcaactatcttctctgatca

SEQ ID NO: 105357 - DNA, 20 bp, synthetic construct
  source 1..20: mol_type = other DNA
atcaactatcttctctgatc

SEQ ID NO: 105358 - DNA, 20 bp, synthetic construct
  source 1..20: mol_type = other DNA
tatcaactatcttctctgat

SEQ ID NO: 105359 - DNA, 20 bp, synthetic construct
  source 1..20: mol_type = other DNA
atatcaactatcttctctga

SEQ ID NO: 105360 - DNA, 20 bp, synthetic construct
  source 1..20: mol_type = other DNA
catatcaactatcttctctg

SEQ ID NO: 105361 - DNA, 20 bp, synthetic construct
  source 1..20: mol_type = other DNA
tcatatcaactatcttctct

SEQ ID NO: 105362 - DNA, 20 bp, synthetic construct
  source 1..20: mol_type = other DNA
atcatatcaactatcttctc

SEQ ID NO: 105363 - DNA, 20 bp, synthetic construct
  source 1..20: mol_type = other DNA
aatcatatcaactatcttct

SEQ ID NO: 105364 - DNA, 20 bp, synthetic construct
  source 1..20: mol_type = other DNA
aaatcatatcaactatcttc

SEQ ID NO: 105365 - DNA, 20 bp, synthetic construct
  source 1..20: mol_type = other DNA
aaaatcatatcaactatctt

SEQ ID NO: 105366 - DNA, 20 bp, synthetic construct
  source 1..20: mol_type = other DNA
taaaatcatatcaactatct

SEQ ID NO: 105367 - DNA, 20 bp, synthetic construct
  source 1..20: mol_type = other DNA
ttaaaatcatatcaactatc

SEQ ID NO: 105368 - DNA, 20 bp, synthetic construct
  source 1..20: mol_type = other DNA
gttaaaatcatatcaactat

SEQ ID NO: 105369 - DNA, 20 bp, synthetic construct
  source 1..20: mol_type = other DNA
agttaaaatcatatcaacta

SEQ ID NO: 105370 - DNA, 20 bp, synthetic construct
  source 1..20: mol_type = other DNA
aagttaaaatcatatcaact

SEQ ID NO: 105371 - DNA, 20 bp, synthetic construct
  source 1..20: mol_type = other DNA
aaagttaaaatcatatcaac

SEQ ID NO: 105372 - DNA, 20 bp, synthetic construct
  source 1..20: mol_type = other DNA
aaaagttaaaatcatatcaa

SEQ ID NO: 105373 - DNA, 20 bp, synthetic construct
  source 1..20: mol_type = other DNA
aaaaagttaaaatcatatca

SEQ ID NO: 105374 - DNA, 20 bp, synthetic construct
  source 1..20: mol_type = other DNA
aaaaaagttaaaatcatatc

SEQ ID NO: 105375 - DNA, 20 bp, synthetic construct
  source 1..20: mol_type = other DNA
caaaaaagttaaaatcatat

SEQ ID NO: 105376 - DNA, 20 bp, synthetic construct
  source 1..20: mol_type = other DNA
tcaaaaaagttaaaatcata

SEQ ID NO: 105377 - DNA, 20 bp, synthetic construct
  source 1..20: mol_type = other DNA
ttcaaaaaagttaaaatcat

SEQ ID NO: 105378 - DNA, 20 bp, synthetic construct
  source 1..20: mol_type = other DNA
attcaaaaaagttaaaatca

SEQ ID NO: 105379 - DNA, 20 bp, synthetic construct
  source 1..20: mol_type = other DNA
aattcaaaaaagttaaaatc

SEQ ID NO: 105380 - DNA, 20 bp, synthetic construct
  source 1..20: mol_type = other DNA
aaattcaaaaaagttaaaat

SEQ ID NO: 105381 - DNA, 20 bp, synthetic construct
  source 1..20: mol_type = other DNA
aaaattcaaaaaagttaaaa

SEQ ID NO: 105382 - DNA, 20 bp, synthetic construct
  source 1..20: mol_type = other DNA
aaaaattcaaaaaagttaaa

SEQ ID NO: 105383 - DNA, 20 bp, synthetic construct
  source 1..20: mol_type = other DNA
taaaaattcaaaaaagttaa

SEQ ID NO: 105384 - DNA, 20 bp, synthetic construct
  source 1..20: mol_type = other DNA
ataaaaattcaaaaaagtta

SEQ ID NO: 105385 - DNA, 20 bp, synthetic construct
  source 1..20: mol_type = other DNA
aataaaaattcaaaaaagtt

SEQ ID NO: 105386 - DNA, 20 bp, synthetic construct
  source 1..20: mol_type = other DNA
aaataaaaattcaaaaaagt

SEQ ID NO: 105387 - DNA, 20 bp, synthetic construct
  source 1..20: mol_type = other DNA
taaataaaaattcaaaaaag

SEQ ID NO: 105388 - DNA, 20 bp, synthetic construct
  source 1..20: mol_type = other DNA
ataaataaaaattcaaaaaa

SEQ ID NO: 105389 - DNA, 20 bp, synthetic construct
  source 1..20: mol_type = other DNA
aataaataaaaattcaaaaa

SEQ ID NO: 105390 - DNA, 20 bp, synthetic construct
  source 1..20: mol_type = other DNA
aaataaataaaaattcaaaa

SEQ ID NO: 105391 - DNA, 20 bp, synthetic construct
  source 1..20: mol_type = other DNA
taaataaataaaaattcaaa

SEQ ID NO: 105392 - DNA, 20 bp, synthetic construct
  source 1..20: mol_type = other DNA
ataaataaataaaaattcaa

SEQ ID NO: 105393 - DNA, 20 bp, synthetic construct
  source 1..20: mol_type = other DNA
aataaataaataaaaattca

SEQ ID NO: 105394 - DNA, 20 bp, synthetic construct
  source 1..20: mol_type = other DNA
aaataaataaataaaaattc

SEQ ID NO: 105395 - DNA, 20 bp, synthetic construct
  source 1..20: mol_type = other DNA
caaataaataaataaaaatt

SEQ ID NO: 105396 - DNA, 20 bp, synthetic construct
  source 1..20: mol_type = other DNA
acaaataaataaataaaaat

SEQ ID NO: 105397 - DNA, 20 bp, synthetic construct
  source 1..20: mol_type = other DNA
aacaaataaataaataaaaa

SEQ ID NO: 105398 - DNA, 20 bp, synthetic construct
  source 1..20: mol_type = other DNA
aaacaaataaataaataaaa

SEQ ID NO: 105399 - DNA, 20 bp, synthetic construct
  source 1..20: mol_type = other DNA
caaacaaataaataaataaa

SEQ ID NO: 105400 - DNA, 20 bp, synthetic construct
  source 1..20: mol_type = other DNA
acaaacaaataaataaataa

SEQ ID NO: 105401 - DNA, 20 bp, synthetic construct
  source 1..20: mol_type = other DNA
aacaaacaaataaataaata

SEQ ID NO: 105402 - DNA, 20 bp, synthetic construct
  source 1..20: mol_type = other DNA
aaacaaacaaataaataaat

SEQ ID NO: 105403 - DNA, 20 bp, synthetic construct
  source 1..20: mol_type = other DNA
caaacaaacaaataaataaa

SEQ ID NO: 105404 - DNA, 20 bp, synthetic construct
  source 1..20: mol_type = other DNA
acaaacaaacaaataaataa

SEQ ID NO: 105405 - DNA, 20 bp, synthetic construct
  source 1..20: mol_type = other DNA
aacaaacaaacaaataaata

SEQ ID NO: 105406 - DNA, 20 bp, synthetic construct
  source 1..20: mol_type = other DNA
aaacaaacaaacaaataaat

SEQ ID NO: 105407 - DNA, 20 bp, synthetic construct
  source 1..20: mol_type = other DNA
caaacaaacaaacaaataaa

SEQ ID NO: 105408 - DNA, 20 bp, synthetic construct
  source 1..20: mol_type = other DNA
acaaacaaacaaacaaataa

SEQ ID NO: 105409 - DNA, 20 bp, synthetic construct
  source 1..20: mol_type = other DNA
aacaaacaaacaaacaaata

SEQ ID NO: 105410 - DNA, 20 bp, synthetic construct
  source 1..20: mol_type = other DNA
aaacaaacaaacaaacaaat

SEQ ID NO: 105411 - DNA, 20 bp, synthetic construct
  source 1..20: mol_type = other DNA
caaacaaacaaacaaacaaa

SEQ ID NO: 105412 - DNA, 20 bp, synthetic construct
  source 1..20: mol_type = other DNA
acaaacaaacaaacaaacaa

SEQ ID NO: 105413 - DNA, 20 bp, synthetic construct
  source 1..20: mol_type = other DNA
aacaaacaaacaaacaaaca

SEQ ID NO: 105414 - DNA, 20 bp, synthetic construct
  source 1..20: mol_type = other DNA
aaacaaacaaacaaacaaac

SEQ ID NO: 105415 - DNA, 20 bp, synthetic construct
  source 1..20: mol_type = other DNA
caaacaaacaaacaaacaaa

SEQ ID NO: 105416 - DNA, 20 bp, synthetic construct
  source 1..20: mol_type = other DNA
acaaacaaacaaacaaacaa

SEQ ID NO: 105417 - DNA, 20 bp, synthetic construct
  source 1..20: mol_type = other DNA
tacaaacaaacaaacaaaca

SEQ ID NO: 105418 - DNA, 20 bp, synthetic construct
  source 1..20: mol_type = other DNA
ttacaaacaaacaaacaaac

SEQ ID NO: 105419 - DNA, 20 bp, synthetic construct
  source 1..20: mol_type = other DNA
gttacaaacaaacaaacaaa

SEQ ID NO: 105420 - DNA, 20 bp, synthetic construct
  source 1..20: mol_type = other DNA
tgttacaaacaaacaaacaa

SEQ ID NO: 105421 - DNA, 20 bp, synthetic construct
  source 1..20: mol_type = other DNA
ctgttacaaacaaacaaaca

SEQ ID NO: 105422 - DNA, 20 bp, synthetic construct
  source 1..20: mol_type = other DNA
tctgttacaaacaaacaaac

SEQ ID NO: 105423 - DNA, 20 bp, synthetic construct
  source 1..20: mol_type = other DNA
ctctgttacaaacaaacaaa

SEQ ID NO: 105424 - DNA, 20 bp, synthetic construct
  source 1..20: mol_type = other DNA
actctgttacaaacaaacaa

SEQ ID NO: 105425 - DNA, 20 bp, synthetic construct
  source 1..20: mol_type = other DNA
gactctgttacaaacaaaca

SEQ ID NO: 105426 - DNA, 20 bp, synthetic construct
  source 1..20: mol_type = other DNA
agactctgttacaaacaaac

SEQ ID NO: 105427 - DNA, 20 bp, synthetic construct
  source 1..20: mol_type = other DNA
gagactctgttacaaacaaa

SEQ ID NO: 105428 - DNA, 20 bp, synthetic construct
  source 1..20: mol_type = other DNA
tgagactctgttacaaacaa

SEQ ID NO: 105429 - DNA, 20 bp, synthetic construct
  source 1..20: mol_type = other DNA
gtgagactctgttacaaaca

SEQ ID NO: 105430 - DNA, 20 bp, synthetic construct
  source 1..20: mol_type = other DNA
agtgagactctgttacaaac

SEQ ID NO: 105431 - DNA, 20 bp, synthetic construct
  source 1..20: mol_type = other DNA
gagtgagactctgttacaaa

SEQ ID NO: 105432 - DNA, 20 bp, synthetic construct
  source 1..20: mol_type = other DNA
agagtgagactctgttacaa

SEQ ID NO: 105433 - DNA, 20 bp, synthetic construct
  source 1..20: mol_type = other DNA
cagagtgagactctgttaca

SEQ ID NO: 105434 - DNA, 20 bp, synthetic construct
  source 1..20: mol_type = other DNA
acagagtgagactctgttac

SEQ ID NO: 105435 - DNA, 20 bp, synthetic construct
  source 1..20: mol_type = other DNA
aacagagtgagactctgtta

SEQ ID NO: 105436 - DNA, 20 bp, synthetic construct
  source 1..20: mol_type = other DNA
taacagagtgagactctgtt

SEQ ID NO: 105437 - DNA, 20 bp, synthetic construct
  source 1..20: mol_type = other DNA
gtaacagagtgagactctgt

SEQ ID NO: 105438 - DNA, 20 bp, synthetic construct
  source 1..20: mol_type = other DNA
ggtaacagagtgagactctg

SEQ ID NO: 105439 - DNA, 20 bp, synthetic construct
  source 1..20: mol_type = other DNA
gggtaacagagtgagactct

SEQ ID NO: 105440 - DNA, 20 bp, synthetic construct
  source 1..20: mol_type = other DNA
tgggtaacagagtgagactc

SEQ ID NO: 105441 - DNA, 20 bp, synthetic construct
  source 1..20: mol_type = other DNA
ctgggtaacagagtgagact

SEQ ID NO: 105442 - DNA, 20 bp, synthetic construct
  source 1..20: mol_type = other DNA
cctgggtaacagagtgagac

SEQ ID NO: 105443 - DNA, 20 bp, synthetic construct
  source 1..20: mol_type = other DNA
gcctgggtaacagagtgaga

SEQ ID NO: 105444 - DNA, 20 bp, synthetic construct
  source 1..20: mol_type = other DNA
agcctgggtaacagagtgag

SEQ ID NO: 105445 - DNA, 20 bp, synthetic construct
  source 1..20: mol_type = other DNA
cagcctgggtaacagagtga

SEQ ID NO: 105446 - DNA, 20 bp, synthetic construct
  source 1..20: mol_type = other DNA
ccagcctgggtaacagagtg

SEQ ID NO: 105447 - DNA, 20 bp, synthetic construct
  source 1..20: mol_type = other DNA
tccagcctgggtaacagagt

SEQ ID NO: 105448 - DNA, 20 bp, synthetic construct
  source 1..20: mol_type = other DNA
ctccagcctgggtaacagag

SEQ ID NO: 105449 - DNA, 20 bp, synthetic construct
  source 1..20: mol_type = other DNA
actccagcctgggtaacaga

SEQ ID NO: 105450 - DNA, 20 bp, synthetic construct
  source 1..20: mol_type = other DNA
tactccagcctgggtaacag

SEQ ID NO: 105451 - DNA, 20 bp, synthetic construct
  source 1..20: mol_type = other DNA
gtactccagcctgggtaaca

SEQ ID NO: 105452 - DNA, 20 bp, synthetic construct
  source 1..20: mol_type = other DNA
tgtactccagcctgggtaac

SEQ ID NO: 105453 - DNA, 20 bp, synthetic construct
  source 1..20: mol_type = other DNA
atgtactccagcctgggtaa

SEQ ID NO: 105454 - DNA, 20 bp, synthetic construct
  source 1..20: mol_type = other DNA
catgtactccagcctgggta

SEQ ID NO: 105455 - DNA, 20 bp, synthetic construct
  source 1..20: mol_type = other DNA
acatgtactccagcctgggt

SEQ ID NO: 105456 - DNA, 20 bp, synthetic construct
  source 1..20: mol_type = other DNA
gacatgtactccagcctggg

SEQ ID NO: 105457 - DNA, 20 bp, synthetic construct
  source 1..20: mol_type = other DNA
tgacatgtactccagcctgg

SEQ ID NO: 105458 - DNA, 20 bp, synthetic construct
  source 1..20: mol_type = other DNA
atgacatgtactccagcctg

SEQ ID NO: 105459 - DNA, 20 bp, synthetic construct
  source 1..20: mol_type = other DNA
catgacatgtactccagcct

SEQ ID NO: 105460 - DNA, 20 bp, synthetic construct
  source 1..20: mol_type = other DNA
tcatgacatgtactccagcc

SEQ ID NO: 105461 - DNA, 20 bp, synthetic construct
  source 1..20: mol_type = other DNA
atcatgacatgtactccagc

SEQ ID NO: 105462 - DNA, 20 bp, synthetic construct
  source 1..20: mol_type = other DNA
gatcatgacatgtactccag

SEQ ID NO: 105463 - DNA, 20 bp, synthetic construct
  source 1..20: mol_type = other DNA
agatcatgacatgtactcca

SEQ ID NO: 105464 - DNA, 20 bp, synthetic construct
  source 1..20: mol_type = other DNA
aagatcatgacatgtactcc

SEQ ID NO: 105465 - DNA, 20 bp, synthetic construct
  source 1..20: mol_type = other DNA
caagatcatgacatgtactc

SEQ ID NO: 105466 - DNA, 20 bp, synthetic construct
  source 1..20: mol_type = other DNA
ccaagatcatgacatgtact

SEQ ID NO: 105467 - DNA, 20 bp, synthetic construct
  source 1..20: mol_type = other DNA
gccaagatcatgacatgtac

SEQ ID NO: 105468 - DNA, 20 bp, synthetic construct
  source 1..20: mol_type = other DNA
agccaagatcatgacatgta

SEQ ID NO: 105469 - DNA, 20 bp, synthetic construct
  source 1..20: mol_type = other DNA
gagccaagatcatgacatgt

SEQ ID NO: 105470 - DNA, 20 bp, synthetic construct
  source 1..20: mol_type = other DNA
tgagccaagatcatgacatg

SEQ ID NO: 105471 - DNA, 20 bp, synthetic construct
  source 1..20: mol_type = other DNA
gtgagccaagatcatgacat

SEQ ID NO: 105472 - DNA, 20 bp, synthetic construct
  source 1..20: mol_type = other DNA
ggtgagccaagatcatgaca

SEQ ID NO: 105473 - DNA, 20 bp, synthetic construct
  source 1..20: mol_type = other DNA
aggtgagccaagatcatgac

SEQ ID NO: 105474 - DNA, 20 bp, synthetic construct
  source 1..20: mol_type = other DNA
caggtgagccaagatcatga

SEQ ID NO: 105475 - DNA, 20 bp, synthetic construct
  source 1..20: mol_type = other DNA
gcaggtgagccaagatcatg

SEQ ID NO: 105476 - DNA, 20 bp, synthetic construct
  source 1..20: mol_type = other DNA
tgcaggtgagccaagatcat

SEQ ID NO: 105477 - DNA, 20 bp, synthetic construct
  source 1..20: mol_type = other DNA
ttgcaggtgagccaagatca

SEQ ID NO: 105478 - DNA, 20 bp, synthetic construct
  source 1..20: mol_type = other DNA
gttgcaggtgagccaagatc

SEQ ID NO: 105479 - DNA, 20 bp, synthetic construct
  source 1..20: mol_type = other DNA
ggttgcaggtgagccaagat

SEQ ID NO: 105480 - DNA, 20 bp, synthetic construct
  source 1..20: mol_type = other DNA
aggttgcaggtgagccaaga

SEQ ID NO: 105481 - DNA, 20 bp, synthetic construct
  source 1..20: mol_type = other DNA
gaggttgcaggtgagccaag

SEQ ID NO: 105482 - DNA, 20 bp, synthetic construct
  source 1..20: mol_type = other DNA
ggaggttgcaggtgagccaa

SEQ ID NO: 105483 - DNA, 20 bp, synthetic construct
  source 1..20: mol_type = other DNA
cggaggttgcaggtgagcca

SEQ ID NO: 105484 - DNA, 20 bp, synthetic construct
  source 1..20: mol_type = other DNA
gcggaggttgcaggtgagcc

SEQ ID NO: 105485 - DNA, 20 bp, synthetic construct
  source 1..20: mol_type = other DNA
ggcggaggttgcaggtgagc

SEQ ID NO: 105486 - DNA, 20 bp, synthetic construct
  source 1..20: mol_type = other DNA
aggcggaggttgcaggtgag

SEQ ID NO: 105487 - DNA, 20 bp, synthetic construct
  source 1..20: mol_type = other DNA
aaggcggaggttgcaggtga

SEQ ID NO: 105488 - DNA, 20 bp, synthetic construct
  source 1..20: mol_type = other DNA
gaaggcggaggttgcaggtg

SEQ ID NO: 105489 - DNA, 20 bp, synthetic construct
  source 1..20: mol_type = other DNA
ggaaggcggaggttgcaggt

SEQ ID NO: 105490 - DNA, 20 bp, synthetic construct
  source 1..20: mol_type = other DNA
aggaaggcggaggttgcagg

SEQ ID NO: 105491 - DNA, 20 bp, synthetic construct
  source 1..20: mol_type = other DNA
caggaaggcggaggttgcag

SEQ ID NO: 105492 - DNA, 20 bp, synthetic construct
  source 1..20: mol_type = other DNA
ccaggaaggcggaggttgca

SEQ ID NO: 105493 - DNA, 20 bp, synthetic construct
  source 1..20: mol_type = other DNA
gccaggaaggcggaggttgc

SEQ ID NO: 105494 - DNA, 20 bp, synthetic construct
  source 1..20: mol_type = other DNA
agccaggaaggcggaggttg

SEQ ID NO: 105495 - DNA, 20 bp, synthetic construct
  source 1..20: mol_type = other DNA
gagccaggaaggcggaggtt

SEQ ID NO: 105496 - DNA, 20 bp, synthetic construct
  source 1..20: mol_type = other DNA
tgagccaggaaggcggaggt

SEQ ID NO: 105497 - DNA, 20 bp, synthetic construct
  source 1..20: mol_type = other DNA
ttgagccaggaaggcggagg

SEQ ID NO: 105498 - DNA, 20 bp, synthetic construct
  source 1..20: mol_type = other DNA
cttgagccaggaaggcggag

SEQ ID NO: 105499 - DNA, 20 bp, synthetic construct
  source 1..20: mol_type = other DNA
gcttgagccaggaaggcgga

SEQ ID NO: 105500 - DNA, 20 bp, synthetic construct
  source 1..20: mol_type = other DNA
tgcttgagccaggaaggcgg

SEQ ID NO: 105501 - DNA, 20 bp, synthetic construct
  source 1..20: mol_type = other DNA
ttgcttgagccaggaaggcg

SEQ ID NO: 105502 - DNA, 20 bp, synthetic construct
  source 1..20: mol_type = other DNA
attgcttgagccaggaaggc

SEQ ID NO: 105503 - DNA, 20 bp, synthetic construct
  source 1..20: mol_type = other DNA
gattgcttgagccaggaagg

SEQ ID NO: 105504 - DNA, 20 bp, synthetic construct
  source 1..20: mol_type = other DNA
ggattgcttgagccaggaag

SEQ ID NO: 105505 - DNA, 20 bp, synthetic construct
  source 1..20: mol_type = other DNA
aggattgcttgagccaggaa

SEQ ID NO: 105506 - DNA, 20 bp, synthetic construct
  source 1..20: mol_type = other DNA
gaggattgcttgagccagga

SEQ ID NO: 105507 - DNA, 20 bp, synthetic construct
  source 1..20: mol_type = other DNA
ggaggattgcttgagccagg

SEQ ID NO: 105508 - DNA, 20 bp, synthetic construct
  source 1..20: mol_type = other DNA
gggaggattgcttgagccag

SEQ ID NO: 105509 - DNA, 20 bp, synthetic construct
  source 1..20: mol_type = other DNA
tgggaggattgcttgagcca

SEQ ID NO: 105510 - DNA, 20 bp, synthetic construct
  source 1..20: mol_type = other DNA
gtgggaggattgcttgagcc

SEQ ID NO: 105511 - DNA, 20 bp, synthetic construct
  source 1..20: mol_type = other DNA
ggtgggaggattgcttgagc

SEQ ID NO: 105512 - DNA, 20 bp, synthetic construct
  source 1..20: mol_type = other DNA
aggtgggaggattgcttgag

SEQ ID NO: 105513 - DNA, 20 bp, synthetic construct
  source 1..20: mol_type = other DNA
aaggtgggaggattgcttga

SEQ ID NO: 105514 - DNA, 20 bp, synthetic construct
  source 1..20: mol_type = other DNA
taaggtgggaggattgcttg

SEQ ID NO: 105515 - DNA, 20 bp, synthetic construct
  source 1..20: mol_type = other DNA
ctaaggtgggaggattgctt

SEQ ID NO: 105516 - DNA, 20 bp, synthetic construct
  source 1..20: mol_type = other DNA
gctaaggtgggaggattgct

SEQ ID NO: 105517 - DNA, 20 bp, synthetic construct
  source 1..20: mol_type = other DNA
ggctaaggtgggaggattgc

SEQ ID NO: 105518 - DNA, 20 bp, synthetic construct
  source 1..20: mol_type = other DNA
aggctaaggtgggaggattg

SEQ ID NO: 105519 - DNA, 20 bp, synthetic construct
  source 1..20: mol_type = other DNA
aaggctaaggtgggaggatt

SEQ ID NO: 105520 - DNA, 20 bp, synthetic construct
  source 1..20: mol_type = other DNA
gaaggctaaggtgggaggat

SEQ ID NO: 105521 - DNA, 20 bp, synthetic construct
  source 1..20: mol_type = other DNA
ggaaggctaaggtgggagga

SEQ ID NO: 105522 - DNA, 20 bp, synthetic construct
  source 1..20: mol_type = other DNA
tggaaggctaaggtgggagg

SEQ ID NO: 105523 - DNA, 20 bp, synthetic construct
  source 1..20: mol_type = other DNA
ttggaaggctaaggtgggag

SEQ ID NO: 105524 - DNA, 20 bp, synthetic construct
  source 1..20: mol_type = other DNA
cttggaaggctaaggtggga

SEQ ID NO: 105525 - DNA, 20 bp, synthetic construct
  source 1..20: mol_type = other DNA
acttggaaggctaaggtggg

SEQ ID NO: 105526 - DNA, 20 bp, synthetic construct
  source 1..20: mol_type = other DNA
tacttggaaggctaaggtgg

SEQ ID NO: 105527 - DNA, 20 bp, synthetic construct
  source 1..20: mol_type = other DNA
ctacttggaaggctaaggtg

SEQ ID NO: 105528 - DNA, 20 bp, synthetic construct
  source 1..20: mol_type = other DNA
gctacttggaaggctaaggt

SEQ ID NO: 105529 - DNA, 20 bp, synthetic construct
  source 1..20: mol_type = other DNA
agctacttggaaggctaagg

SEQ ID NO: 105530 - DNA, 20 bp, synthetic construct
  source 1..20: mol_type = other DNA
cagctacttggaaggctaag

SEQ ID NO: 105531 - DNA, 20 bp, synthetic construct
  source 1..20: mol_type = other DNA
ccagctacttggaaggctaa

SEQ ID NO: 105532 - DNA, 20 bp, synthetic construct
  source 1..20: mol_type = other DNA
cccagctacttggaaggcta

SEQ ID NO: 105533 - DNA, 20 bp, synthetic construct
  source 1..20: mol_type = other DNA
tcccagctacttggaaggct

SEQ ID NO: 105534 - DNA, 20 bp, synthetic construct
  source 1..20: mol_type = other DNA
gtcccagctacttggaaggc

SEQ ID NO: 105535 - DNA, 20 bp, synthetic construct
  source 1..20: mol_type = other DNA
agtcccagctacttggaagg

SEQ ID NO: 105536 - DNA, 20 bp, synthetic construct
  source 1..20: mol_type = other DNA
tagtcccagctacttggaag

SEQ ID NO: 105537 - DNA, 20 bp, synthetic construct
  source 1..20: mol_type = other DNA
gtagtcccagctacttggaa

SEQ ID NO: 105538 - DNA, 20 bp, synthetic construct
  source 1..20: mol_type = other DNA
tgtagtcccagctacttgga

SEQ ID NO: 105539 - DNA, 20 bp, synthetic construct
  source 1..20: mol_type = other DNA
ctgtagtcccagctacttgg

SEQ ID NO: 105540 - DNA, 20 bp, synthetic construct
  source 1..20: mol_type = other DNA
cctgtagtcccagctacttg

SEQ ID NO: 105541 - DNA, 20 bp, synthetic construct
  source 1..20: mol_type = other DNA
gcctgtagtcccagctactt

SEQ ID NO: 105542 - DNA, 20 bp, synthetic construct
  source 1..20: mol_type = other DNA
tgcctgtagtcccagctact

SEQ ID NO: 105543 - DNA, 20 bp, synthetic construct
  source 1..20: mol_type = other DNA
gtgcctgtagtcccagctac

SEQ ID NO: 105544 - DNA, 20 bp, synthetic construct
  source 1..20: mol_type = other DNA
tgtgcctgtagtcccagcta

SEQ ID NO: 105545 - DNA, 20 bp, synthetic construct
  source 1..20: mol_type = other DNA
atgtgcctgtagtcccagct

SEQ ID NO: 105546 - DNA, 20 bp, synthetic construct
  source 1..20: mol_type = other DNA
catgtgcctgtagtcccagc

SEQ ID NO: 105547 - DNA, 20 bp, synthetic construct
  source 1..20: mol_type = other DNA
gcatgtgcctgtagtcccag

SEQ ID NO: 105548 - DNA, 20 bp, synthetic construct
  source 1..20: mol_type = other DNA
ggcatgtgcctgtagtccca

SEQ ID NO: 105549 - DNA, 20 bp, synthetic construct
  source 1..20: mol_type = other DNA
cggcatgtgcctgtagtccc

SEQ ID NO: 105550 - DNA, 20 bp, synthetic construct
  source 1..20: mol_type = other DNA
acggcatgtgcctgtagtcc

SEQ ID NO: 105551 - DNA, 20 bp, synthetic construct
  source 1..20: mol_type = other DNA
gacggcatgtgcctgtagtc

SEQ ID NO: 105552 - DNA, 20 bp, synthetic construct
  source 1..20: mol_type = other DNA
tgacggcatgtgcctgtagt

SEQ ID NO: 105553 - DNA, 20 bp, synthetic construct
  source 1..20: mol_type = other DNA
gtgacggcatgtgcctgtag

SEQ ID NO: 105554 - DNA, 20 bp, synthetic construct
  source 1..20: mol_type = other DNA
tgtgacggcatgtgcctgta

SEQ ID NO: 105555 - DNA, 20 bp, synthetic construct
  source 1..20: mol_type = other DNA
atgtgacggcatgtgcctgt

SEQ ID NO: 105556 - DNA, 20 bp, synthetic construct
  source 1..20: mol_type = other DNA
tatgtgacggcatgtgcctg

SEQ ID NO: 105557 - DNA, 20 bp, synthetic construct
  source 1..20: mol_type = other DNA
atatgtgacggcatgtgcct

SEQ ID NO: 105558 - DNA, 20 bp, synthetic construct
  source 1..20: mol_type = other DNA
catatgtgacggcatgtgcc

SEQ ID NO: 105559 - DNA, 20 bp, synthetic construct
  source 1..20: mol_type = other DNA
ccatatgtgacggcatgtgc

SEQ ID NO: 105560 - DNA, 20 bp, synthetic construct
  source 1..20: mol_type = other DNA
gccatatgtgacggcatgtg

SEQ ID NO: 105561 - DNA, 20 bp, synthetic construct
  source 1..20: mol_type = other DNA
agccatatgtgacggcatgt

SEQ ID NO: 105562 - DNA, 20 bp, synthetic construct
  source 1..20: mol_type = other DNA
cagccatatgtgacggcatg

SEQ ID NO: 105563 - DNA, 20 bp, synthetic construct
  source 1..20: mol_type = other DNA
tcagccatatgtgacggcat

SEQ ID NO: 105564 - DNA, 20 bp, synthetic construct
  source 1..20: mol_type = other DNA
atcagccatatgtgacggca

SEQ ID NO: 105565 - DNA, 20 bp, synthetic construct
  source 1..20: mol_type = other DNA
tatcagccatatgtgacggc

SEQ ID NO: 105566 - DNA, 20 bp, synthetic construct
  source 1..20: mol_type = other DNA
atatcagccatatgtgacgg

SEQ ID NO: 105567 - DNA, 20 bp, synthetic construct
  source 1..20: mol_type = other DNA
aatatcagccatatgtgacg

SEQ ID NO: 105568 - DNA, 20 bp, synthetic construct
  source 1..20: mol_type = other DNA
aaatatcagccatatgtgac

SEQ ID NO: 105569 - DNA, 20 bp, synthetic construct
  source 1..20: mol_type = other DNA
aaaatatcagccatatgtga

SEQ ID NO: 105570 - DNA, 20 bp, synthetic construct
  source 1..20: mol_type = other DNA
aaaaatatcagccatatgtg

SEQ ID NO: 105571 - DNA, 20 bp, synthetic construct
  source 1..20: mol_type = other DNA
caaaaatatcagccatatgt

SEQ ID NO: 105572 - DNA, 20 bp, synthetic construct
  source 1..20: mol_type = other DNA
ccaaaaatatcagccatatg

SEQ ID NO: 105573 - DNA, 20 bp, synthetic construct
  source 1..20: mol_type = other DNA
tccaaaaatatcagccatat

SEQ ID NO: 105574 - DNA, 20 bp, synthetic construct
  source 1..20: mol_type = other DNA
atccaaaaatatcagccata

SEQ ID NO: 105575 - DNA, 20 bp, synthetic construct
  source 1..20: mol_type = other DNA
aatccaaaaatatcagccat

SEQ ID NO: 105576 - DNA, 20 bp, synthetic construct
  source 1..20: mol_type = other DNA
aaatccaaaaatatcagcca

SEQ ID NO: 105577 - DNA, 20 bp, synthetic construct
  source 1..20: mol_type = other DNA
aaaatccaaaaatatcagcc

SEQ ID NO: 105578 - DNA, 20 bp, synthetic construct
  source 1..20: mol_type = other DNA
aaaaatccaaaaatatcagc

SEQ ID NO: 105579 - DNA, 20 bp, synthetic construct
  source 1..20: mol_type = other DNA
aaaaaatccaaaaatatcag

SEQ ID NO: 105580 - DNA, 20 bp, synthetic construct
  source 1..20: mol_type = other DNA
aaaaaaatccaaaaatatca

SEQ ID NO: 105581 - DNA, 20 bp, synthetic construct
  source 1..20: mol_type = other DNA
aaaaaaaatccaaaaatatc

SEQ ID NO: 105582 - DNA, 20 bp, synthetic construct
  source 1..20: mol_type = other DNA
aaaaaaaaatccaaaaatat

SEQ ID NO: 105583 - DNA, 20 bp, synthetic construct
  source 1..20: mol_type = other DNA
aaaaaaaaaatccaaaaata

SEQ ID NO: 105584 - DNA, 20 bp, synthetic construct
  source 1..20: mol_type = other DNA
aaaaaaaaaaatccaaaaat

SEQ ID NO: 105585 - DNA, 20 bp, synthetic construct
  source 1..20: mol_type = other DNA
aaaaaaaaaaaatccaaaaa

SEQ ID NO: 105586 - DNA, 20 bp, synthetic construct
  source 1..20: mol_type = other DNA
aaaaaaaaaaaaatccaaaa

SEQ ID NO: 105587 - DNA, 20 bp, synthetic construct
  source 1..20: mol_type = other DNA
aaaaaaaaaaaaaatccaaa

SEQ ID NO: 105588 - DNA, 20 bp, synthetic construct
  source 1..20: mol_type = other DNA
caaaaaaaaaaaaaatccaa

SEQ ID NO: 105589 - DNA, 20 bp, synthetic construct
  source 1..20: mol_type = other DNA
acaaaaaaaaaaaaaatcca

SEQ ID NO: 105590 - DNA, 20 bp, synthetic construct
  source 1..20: mol_type = other DNA
tacaaaaaaaaaaaaaatcc

SEQ ID NO: 105591 - DNA, 20 bp, synthetic construct
  source 1..20: mol_type = other DNA
ctacaaaaaaaaaaaaaatc

SEQ ID NO: 105592 - DNA, 20 bp, synthetic construct
  source 1..20: mol_type = other DNA
tctacaaaaaaaaaaaaaat

SEQ ID NO: 105593 - DNA, 20 bp, synthetic construct
  source 1..20: mol_type = other DNA
ctctacaaaaaaaaaaaaaa

SEQ ID NO: 105594 - DNA, 20 bp, synthetic construct
  source 1..20: mol_type = other DNA
tctctacaaaaaaaaaaaaa

SEQ ID NO: 105595 - DNA, 20 bp, synthetic construct
  source 1..20: mol_type = other DNA
atctctacaaaaaaaaaaaa

SEQ ID NO: 105596 - DNA, 20 bp, synthetic construct
  source 1..20: mol_type = other DNA
catctctacaaaaaaaaaaa

SEQ ID NO: 105597 - DNA, 20 bp, synthetic construct
  source 1..20: mol_type = other DNA
ccatctctacaaaaaaaaaa

SEQ ID NO: 105598 - DNA, 20 bp, synthetic construct
  source 1..20: mol_type = other DNA
cccatctctacaaaaaaaaa

SEQ ID NO: 105599 - DNA, 20 bp, synthetic construct
  source 1..20: mol_type = other DNA
ccccatctctacaaaaaaaa

SEQ ID NO: 105600 - DNA, 20 bp, synthetic construct
  source 1..20: mol_type = other DNA
gccccatctctacaaaaaaa

SEQ ID NO: 105601 - DNA, 20 bp, synthetic construct
  source 1..20: mol_type = other DNA
agccccatctctacaaaaaa

SEQ ID NO: 105602 - DNA, 20 bp, synthetic construct
  source 1..20: mol_type = other DNA
aagccccatctctacaaaaa

SEQ ID NO: 105603 - DNA, 20 bp, synthetic construct
  source 1..20: mol_type = other DNA
aaagccccatctctacaaaa

SEQ ID NO: 105604 - DNA, 20 bp, synthetic construct
  source 1..20: mol_type = other DNA
caaagccccatctctacaaa

SEQ ID NO: 105605 - DNA, 20 bp, synthetic construct
  source 1..20: mol_type = other DNA
gcaaagccccatctctacaa

SEQ ID NO: 105606 - DNA, 20 bp, synthetic construct
  source 1..20: mol_type = other DNA
cgcaaagccccatctctaca

SEQ ID NO: 105607 - DNA, 20 bp, synthetic construct
  source 1..20: mol_type = other DNA
tcgcaaagccccatctctac

SEQ ID NO: 105608 - DNA, 20 bp, synthetic construct
  source 1..20: mol_type = other DNA
atcgcaaagccccatctcta

SEQ ID NO: 105609 - DNA, 20 bp, synthetic construct
  source 1..20: mol_type = other DNA
catcgcaaagccccatctct

SEQ ID NO: 105610 - DNA, 20 bp, synthetic construct
  source 1..20: mol_type = other DNA
acatcgcaaagccccatctc

SEQ ID NO: 105611 - DNA, 20 bp, synthetic construct
  source 1..20: mol_type = other DNA
cacatcgcaaagccccatct

SEQ ID NO: 105612 - DNA, 20 bp, synthetic construct
  source 1..20: mol_type = other DNA
acacatcgcaaagccccatc

SEQ ID NO: 105613 - DNA, 20 bp, synthetic construct
  source 1..20: mol_type = other DNA
gacacatcgcaaagccccat

SEQ ID NO: 105614 - DNA, 20 bp, synthetic construct
  source 1..20: mol_type = other DNA
ggacacatcgcaaagcccca

SEQ ID NO: 105615 - DNA, 20 bp, synthetic construct
  source 1..20: mol_type = other DNA
gggacacatcgcaaagcccc

SEQ ID NO: 105616 - DNA, 20 bp, synthetic construct
  source 1..20: mol_type = other DNA
tgggacacatcgcaaagccc

SEQ ID NO: 105617 - DNA, 20 bp, synthetic construct
  source 1..20: mol_type = other DNA
ctgggacacatcgcaaagcc

SEQ ID NO: 105618 - DNA, 20 bp, synthetic construct
  source 1..20: mol_type = other DNA
cctgggacacatcgcaaagc

SEQ ID NO: 105619 - DNA, 20 bp, synthetic construct
  source 1..20: mol_type = other DNA
ccctgggacacatcgcaaag

SEQ ID NO: 105620 - DNA, 20 bp, synthetic construct
  source 1..20: mol_type = other DNA
accctgggacacatcgcaaa

SEQ ID NO: 105621 - DNA, 20 bp, synthetic construct
  source 1..20: mol_type = other DNA
aaccctgggacacatcgcaa

SEQ ID NO: 105622 - DNA, 20 bp, synthetic construct
  source 1..20: mol_type = other DNA
caaccctgggacacatcgca

SEQ ID NO: 105623 - DNA, 20 bp, synthetic construct
  source 1..20: mol_type = other DNA
acaaccctgggacacatcgc

SEQ ID NO: 105624 - DNA, 20 bp, synthetic construct
  source 1..20: mol_type = other DNA
aacaaccctgggacacatcg

SEQ ID NO: 105625 - DNA, 20 bp, synthetic construct
  source 1..20: mol_type = other DNA
aaacaaccctgggacacatc

SEQ ID NO: 105626 - DNA, 20 bp, synthetic construct
  source 1..20: mol_type = other DNA
gaaacaaccctgggacacat

SEQ ID NO: 105627 - DNA, 20 bp, synthetic construct
  source 1..20: mol_type = other DNA
cgaaacaaccctgggacaca

SEQ ID NO: 105628 - DNA, 20 bp, synthetic construct
  source 1..20: mol_type = other DNA
tcgaaacaaccctgggacac

SEQ ID NO: 105629 - DNA, 20 bp, synthetic construct
  source 1..20: mol_type = other DNA
ttcgaaacaaccctgggaca

SEQ ID NO: 105630 - DNA, 20 bp, synthetic construct
  source 1..20: mol_type = other DNA
gttcgaaacaaccctgggac

SEQ ID NO: 105631 - DNA, 20 bp, synthetic construct
  source 1..20: mol_type = other DNA
agttcgaaacaaccctggga

SEQ ID NO: 105632 - DNA, 20 bp, synthetic construct
  source 1..20: mol_type = other DNA
gagttcgaaacaaccctggg

SEQ ID NO: 105633 - DNA, 20 bp, synthetic construct
  source 1..20: mol_type = other DNA
ggagttcgaaacaaccctgg

SEQ ID NO: 105634 - DNA, 20 bp, synthetic construct
  source 1..20: mol_type = other DNA
aggagttcgaaacaaccctg

SEQ ID NO: 105635 - DNA, 20 bp, synthetic construct
  source 1..20: mol_type = other DNA
caggagttcgaaacaaccct

SEQ ID NO: 105636 - DNA, 20 bp, synthetic construct
  source 1..20: mol_type = other DNA
tcaggagttcgaaacaaccc

SEQ ID NO: 105637 - DNA, 20 bp, synthetic construct
  source 1..20: mol_type = other DNA
ctcaggagttcgaaacaacc

SEQ ID NO: 105638 - DNA, 20 bp, synthetic construct
  source 1..20: mol_type = other DNA
gctcaggagttcgaaacaac

SEQ ID NO: 105639 - DNA, 20 bp, synthetic construct
  source 1..20: mol_type = other DNA
agctcaggagttcgaaacaa

SEQ ID NO: 105640 - DNA, 20 bp, synthetic construct
  source 1..20: mol_type = other DNA
gagctcaggagttcgaaaca

SEQ ID NO: 105641 - DNA, 20 bp, synthetic construct
  source 1..20: mol_type = other DNA
tgagctcaggagttcgaaac

SEQ ID NO: 105642 - DNA, 20 bp, synthetic construct
  source 1..20: mol_type = other DNA
ttgagctcaggagttcgaaa

SEQ ID NO: 105643 - DNA, 20 bp, synthetic construct
  source 1..20: mol_type = other DNA
cttgagctcaggagttcgaa

SEQ ID NO: 105644 - DNA, 20 bp, synthetic construct
  source 1..20: mol_type = other DNA
gcttgagctcaggagttcga

SEQ ID NO: 105645 - DNA, 20 bp, synthetic construct
  source 1..20: mol_type = other DNA
tgcttgagctcaggagttcg

SEQ ID NO: 105646 - DNA, 20 bp, synthetic construct
  source 1..20: mol_type = other DNA
ttgcttgagctcaggagttc

SEQ ID NO: 105647 - DNA, 20 bp, synthetic construct
  source 1..20: mol_type = other DNA
attgcttgagctcaggagtt

SEQ ID NO: 105648 - DNA, 20 bp, synthetic construct
  source 1..20: mol_type = other DNA
gattgcttgagctcaggagt

SEQ ID NO: 105649 - DNA, 20 bp, synthetic construct
  source 1..20: mol_type = other DNA
ggattgcttgagctcaggag

SEQ ID NO: 105650 - DNA, 20 bp, synthetic construct
  source 1..20: mol_type = other DNA
tggattgcttgagctcagga

SEQ ID NO: 105651 - DNA, 20 bp, synthetic construct
  source 1..20: mol_type = other DNA
gtggattgcttgagctcagg

SEQ ID NO: 105652 - DNA, 20 bp, synthetic construct
  source 1..20: mol_type = other DNA
ggtggattgcttgagctcag

SEQ ID NO: 105653 - DNA, 20 bp, synthetic construct
  source 1..20: mol_type = other DNA
aggtggattgcttgagctca

SEQ ID NO: 105654 - DNA, 20 bp, synthetic construct
  source 1..20: mol_type = other DNA
taggtggattgcttgagctc

SEQ ID NO: 105655 - DNA, 20 bp, synthetic construct
  source 1..20: mol_type = other DNA
ataggtggattgcttgagct

SEQ ID NO: 105656 - DNA, 20 bp, synthetic construct
  source 1..20: mol_type = other DNA
aataggtggattgcttgagc

SEQ ID NO: 105657 - DNA, 20 bp, synthetic construct
  source 1..20: mol_type = other DNA
aaataggtggattgcttgag

SEQ ID NO: 105658 - DNA, 20 bp, synthetic construct
  source 1..20: mol_type = other DNA
gaaataggtggattgcttga

SEQ ID NO: 105659 - DNA, 20 bp, synthetic construct
  source 1..20: mol_type = other DNA
cgaaataggtggattgcttg

SEQ ID NO: 105660 - DNA, 20 bp, synthetic construct
  source 1..20: mol_type = other DNA
ccgaaataggtggattgctt

SEQ ID NO: 105661 - DNA, 20 bp, synthetic construct
  source 1..20: mol_type = other DNA
gccgaaataggtggattgct

SEQ ID NO: 105662 - DNA, 20 bp, synthetic construct
  source 1..20: mol_type = other DNA
ggccgaaataggtggattgc

SEQ ID NO: 105663 - DNA, 20 bp, synthetic construct
  source 1..20: mol_type = other DNA
aggccgaaataggtggattg

SEQ ID NO: 105664 - DNA, 20 bp, synthetic construct
  source 1..20: mol_type = other DNA
gaggccgaaataggtggatt

SEQ ID NO: 105665 - DNA, 20 bp, synthetic construct
  source 1..20: mol_type = other DNA
ggaggccgaaataggtggat

SEQ ID NO: 105666 - DNA, 20 bp, synthetic construct
  source 1..20: mol_type = other DNA
gggaggccgaaataggtgga

SEQ ID NO: 105667 - DNA, 20 bp, synthetic construct
  source 1..20: mol_type = other DNA
tgggaggccgaaataggtgg

SEQ ID NO: 105668 - DNA, 20 bp, synthetic construct
  source 1..20: mol_type = other DNA
ttgggaggccgaaataggtg

SEQ ID NO: 105669 - DNA, 20 bp, synthetic construct
  source 1..20: mol_type = other DNA
cttgggaggccgaaataggt

SEQ ID NO: 105670 - DNA, 20 bp, synthetic construct
  source 1..20: mol_type = other DNA
ccttgggaggccgaaatagg

SEQ ID NO: 105671 - DNA, 20 bp, synthetic construct
  source 1..20: mol_type = other DNA
accttgggaggccgaaatag

SEQ ID NO: 105672 - DNA, 20 bp, synthetic construct
  source 1..20: mol_type = other DNA
caccttgggaggccgaaata

SEQ ID NO: 105673 - DNA, 20 bp, synthetic construct
  source 1..20: mol_type = other DNA
gcaccttgggaggccgaaat

SEQ ID NO: 105674 - DNA, 20 bp, synthetic construct
  source 1..20: mol_type = other DNA
agcaccttgggaggccgaaa

SEQ ID NO: 105675 - DNA, 20 bp, synthetic construct
  source 1..20: mol_type = other DNA
cagcaccttgggaggccgaa

SEQ ID NO: 105676 - DNA, 20 bp, synthetic construct
  source 1..20: mol_type = other DNA
ccagcaccttgggaggccga

SEQ ID NO: 105677 - DNA, 20 bp, synthetic construct
  source 1..20: mol_type = other DNA
cccagcaccttgggaggccg

SEQ ID NO: 105678 - DNA, 20 bp, synthetic construct
  source 1..20: mol_type = other DNA
tcccagcaccttgggaggcc

SEQ ID NO: 105679 - DNA, 20 bp, synthetic construct
  source 1..20: mol_type = other DNA
atcccagcaccttgggaggc

SEQ ID NO: 105680 - DNA, 20 bp, synthetic construct
  source 1..20: mol_type = other DNA
aatcccagcaccttgggagg

SEQ ID NO: 105681 - DNA, 20 bp, synthetic construct
  source 1..20: mol_type = other DNA
taatcccagcaccttgggag

SEQ ID NO: 105682 - DNA, 20 bp, synthetic construct
  source 1..20: mol_type = other DNA
gtaatcccagcaccttggga

SEQ ID NO: 105683 - DNA, 20 bp, synthetic construct
  source 1..20: mol_type = other DNA
tgtaatcccagcaccttggg

SEQ ID NO: 105684 - DNA, 20 bp, synthetic construct
  source 1..20: mol_type = other DNA
ctgtaatcccagcaccttgg

SEQ ID NO: 105685 - DNA, 20 bp, synthetic construct
  source 1..20: mol_type = other DNA
tctgtaatcccagcaccttg

SEQ ID NO: 105686 - DNA, 20 bp, synthetic construct
  source 1..20: mol_type = other DNA
gtctgtaatcccagcacctt

SEQ ID NO: 105687 - DNA, 20 bp, synthetic construct
  source 1..20: mol_type = other DNA
tgtctgtaatcccagcacct

SEQ ID NO: 105688 - DNA, 20 bp, synthetic construct
  source 1..20: mol_type = other DNA
atgtctgtaatcccagcacc

SEQ ID NO: 105689 - DNA, 20 bp, synthetic construct
  source 1..20: mol_type = other DNA
catgtctgtaatcccagcac

SEQ ID NO: 105690 - DNA, 20 bp, synthetic construct
  source 1..20: mol_type = other DNA
tcatgtctgtaatcccagca

SEQ ID NO: 105691 - DNA, 20 bp, synthetic construct
  source 1..20: mol_type = other DNA
ctcatgtctgtaatcccagc

SEQ ID NO: 105692 - DNA, 20 bp, synthetic construct
  source 1..20: mol_type = other DNA
gctcatgtctgtaatcccag

SEQ ID NO: 105693 - DNA, 20 bp, synthetic construct
  source 1..20: mol_type = other DNA
ggctcatgtctgtaatccca

SEQ ID NO: 105694 - DNA, 20 bp, synthetic construct
  source 1..20: mol_type = other DNA
tggctcatgtctgtaatccc

SEQ ID NO: 105695 - DNA, 20 bp, synthetic construct
  source 1..20: mol_type = other DNA
gtggctcatgtctgtaatcc

SEQ ID NO: 105696 - DNA, 20 bp, synthetic construct
  source 1..20: mol_type = other DNA
agtggctcatgtctgtaatc

SEQ ID NO: 105697 - DNA, 20 bp, synthetic construct
  source 1..20: mol_type = other DNA
cagtggctcatgtctgtaat

SEQ ID NO: 105698 - DNA, 20 bp, synthetic construct
  source 1..20: mol_type = other DNA
acagtggctcatgtctgtaa

SEQ ID NO: 105699 - DNA, 20 bp, synthetic construct
  source 1..20: mol_type = other DNA
cacagtggctcatgtctgta

SEQ ID NO: 105700 - DNA, 20 bp, synthetic construct
  source 1..20: mol_type = other DNA
gcacagtggctcatgtctgt

SEQ ID NO: 105701 - DNA, 20 bp, synthetic construct
  source 1..20: mol_type = other DNA
ggcacagtggctcatgtctg

SEQ ID NO: 105702 - DNA, 20 bp, synthetic construct
  source 1..20: mol_type = other DNA
tggcacagtggctcatgtct

SEQ ID NO: 105703 - DNA, 20 bp, synthetic construct
  source 1..20: mol_type = other DNA
gtggcacagtggctcatgtc

SEQ ID NO: 105704 - DNA, 20 bp, synthetic construct
  source 1..20: mol_type = other DNA
cgtggcacagtggctcatgt

SEQ ID NO: 105705 - DNA, 20 bp, synthetic construct
  source 1..20: mol_type = other DNA
acgtggcacagtggctcatg

SEQ ID NO: 105706 - DNA, 20 bp, synthetic construct
  source 1..20: mol_type = other DNA
gacgtggcacagtggctcat

SEQ ID NO: 105707 - DNA, 20 bp, synthetic construct
  source 1..20: mol_type = other DNA
tgacgtggcacagtggctca

SEQ ID NO: 105708 - DNA, 20 bp, synthetic construct
  source 1..20: mol_type = other DNA
ttgacgtggcacagtggctc

SEQ ID NO: 105709 - DNA, 20 bp, synthetic construct
  source 1..20: mol_type = other DNA
tttgacgtggcacagtggct

SEQ ID NO: 105710 - DNA, 20 bp, synthetic construct
  source 1..20: mol_type = other DNA
atttgacgtggcacagtggc

SEQ ID NO: 105711 - DNA, 20 bp, synthetic construct
  source 1..20: mol_type = other DNA
gatttgacgtggcacagtgg

SEQ ID NO: 105712 - DNA, 20 bp, synthetic construct
  source 1..20: mol_type = other DNA
agatttgacgtggcacagtg

SEQ ID NO: 105713 - DNA, 20 bp, synthetic construct
  source 1..20: mol_type = other DNA
aagatttgacgtggcacagt

SEQ ID NO: 105714 - DNA, 20 bp, synthetic construct
  source 1..20: mol_type = other DNA
aaagatttgacgtggcacag

SEQ ID NO: 105715 - DNA, 20 bp, synthetic construct
  source 1..20: mol_type = other DNA
taaagatttgacgtggcaca

SEQ ID NO: 105716 - DNA, 20 bp, synthetic construct
  source 1..20: mol_type = other DNA
ctaaagatttgacgtggcac

SEQ ID NO: 105717 - DNA, 20 bp, synthetic construct
  source 1..20: mol_type = other DNA
tctaaagatttgacgtggca

SEQ ID NO: 105718 - DNA, 20 bp, synthetic construct
  source 1..20: mol_type = other DNA
gtctaaagatttgacgtggc

SEQ ID NO: 105719 - DNA, 20 bp, synthetic construct
  source 1..20: mol_type = other DNA
agtctaaagatttgacgtgg

SEQ ID NO: 105720 - DNA, 20 bp, synthetic construct
  source 1..20: mol_type = other DNA
aagtctaaagatttgacgtg

SEQ ID NO: 105721 - DNA, 20 bp, synthetic construct
  source 1..20: mol_type = other DNA
caagtctaaagatttgacgt

SEQ ID NO: 105722 - DNA, 20 bp, synthetic construct
  source 1..20: mol_type = other DNA
acaagtctaaagatttgacg

SEQ ID NO: 105723 - DNA, 20 bp, synthetic construct
  source 1..20: mol_type = other DNA
aacaagtctaaagatttgac

SEQ ID NO: 105724 - DNA, 20 bp, synthetic construct
  source 1..20: mol_type = other DNA
aaacaagtctaaagatttga

SEQ ID NO: 105725 - DNA, 20 bp, synthetic construct
  source 1..20: mol_type = other DNA
aaaacaagtctaaagatttg

SEQ ID NO: 105726 - DNA, 20 bp, synthetic construct
  source 1..20: mol_type = other DNA
caaaacaagtctaaagattt

SEQ ID NO: 105727 - DNA, 20 bp, synthetic construct
  source 1..20: mol_type = other DNA
acaaaacaagtctaaagatt

SEQ ID NO: 105728 - DNA, 20 bp, synthetic construct
  source 1..20: mol_type = other DNA
cacaaaacaagtctaaagat

SEQ ID NO: 105729 - DNA, 20 bp, synthetic construct
  source 1..20: mol_type = other DNA
ccacaaaacaagtctaaaga

SEQ ID NO: 105730 - DNA, 20 bp, synthetic construct
  source 1..20: mol_type = other DNA
gccacaaaacaagtctaaag

SEQ ID NO: 105731 - DNA, 20 bp, synthetic construct
  source 1..20: mol_type = other DNA
agccacaaaacaagtctaaa

SEQ ID NO: 105732 - DNA, 20 bp, synthetic construct
  source 1..20: mol_type = other DNA
aagccacaaaacaagtctaa

SEQ ID NO: 105733 - DNA, 20 bp, synthetic construct
  source 1..20: mol_type = other DNA
taagccacaaaacaagtcta

SEQ ID NO: 105734 - DNA, 20 bp, synthetic construct
  source 1..20: mol_type = other DNA
ttaagccacaaaacaagtct

SEQ ID NO: 105735 - DNA, 20 bp, synthetic construct
  source 1..20: mol_type = other DNA
gttaagccacaaaacaagtc

SEQ ID NO: 105736 - DNA, 20 bp, synthetic construct
  source 1..20: mol_type = other DNA
tgttaagccacaaaacaagt

SEQ ID NO: 105737 - DNA, 20 bp, synthetic construct
  source 1..20: mol_type = other DNA
atgttaagccacaaaacaag

SEQ ID NO: 105738 - DNA, 20 bp, synthetic construct
  source 1..20: mol_type = other DNA
tatgttaagccacaaaacaa

SEQ ID NO: 105739 - DNA, 20 bp, synthetic construct
  source 1..20: mol_type = other DNA
ctatgttaagccacaaaaca

SEQ ID NO: 105740 - DNA, 20 bp, synthetic construct
  source 1..20: mol_type = other DNA
cctatgttaagccacaaaac

SEQ ID NO: 105741 - DNA, 20 bp, synthetic construct
  source 1..20: mol_type = other DNA
ccctatgttaagccacaaaa

SEQ ID NO: 105742 - DNA, 20 bp, synthetic construct
  source 1..20: mol_type = other DNA
accctatgttaagccacaaa

SEQ ID NO: 105743 - DNA, 20 bp, synthetic construct
  source 1..20: mol_type = other DNA
gaccctatgttaagccacaa

SEQ ID NO: 105744 - DNA, 20 bp, synthetic construct
  source 1..20: mol_type = other DNA
agaccctatgttaagccaca

SEQ ID NO: 105745 - DNA, 20 bp, synthetic construct
  source 1..20: mol_type = other DNA
tagaccctatgttaagccac

SEQ ID NO: 105746 - DNA, 20 bp, synthetic construct
  source 1..20: mol_type = other DNA
atagaccctatgttaagcca

SEQ ID NO: 105747 - DNA, 20 bp, synthetic construct
  source 1..20: mol_type = other DNA
gatagaccctatgttaagcc

SEQ ID NO: 105748 - DNA, 20 bp, synthetic construct
  source 1..20: mol_type = other DNA
agatagaccctatgttaagc

SEQ ID NO: 105749 - DNA, 20 bp, synthetic construct
  source 1..20: mol_type = other DNA
aagatagaccctatgttaag

SEQ ID NO: 105750 - DNA, 20 bp, synthetic construct
  source 1..20: mol_type = other DNA
aaagatagaccctatgttaa

SEQ ID NO: 105751 - DNA, 20 bp, synthetic construct
  source 1..20: mol_type = other DNA
caaagatagaccctatgtta

SEQ ID NO: 105752 - DNA, 20 bp, synthetic construct
  source 1..20: mol_type = other DNA
tcaaagatagaccctatgtt

SEQ ID NO: 105753 - DNA, 20 bp, synthetic construct
  source 1..20: mol_type = other DNA
ctcaaagatagaccctatgt

SEQ ID NO: 105754 - DNA, 20 bp, synthetic construct
  source 1..20: mol_type = other DNA
tctcaaagatagaccctatg

SEQ ID NO: 105755 - DNA, 20 bp, synthetic construct
  source 1..20: mol_type = other DNA
ctctcaaagatagaccctat

SEQ ID NO: 105756 - DNA, 20 bp, synthetic construct
  source 1..20: mol_type = other DNA
gctctcaaagatagacccta

SEQ ID NO: 105757 - DNA, 20 bp, synthetic construct
  source 1..20: mol_type = other DNA
tgctctcaaagatagaccct

SEQ ID NO: 105758 - DNA, 20 bp, synthetic construct
  source 1..20: mol_type = other DNA
ttgctctcaaagatagaccc

SEQ ID NO: 105759 - DNA, 20 bp, synthetic construct
  source 1..20: mol_type = other DNA
attgctctcaaagatagacc

SEQ ID NO: 105760 - DNA, 20 bp, synthetic construct
  source 1..20: mol_type = other DNA
gattgctctcaaagatagac

SEQ ID NO: 105761 - DNA, 20 bp, synthetic construct
  source 1..20: mol_type = other DNA
ggattgctctcaaagataga

SEQ ID NO: 105762 - DNA, 20 bp, synthetic construct
  source 1..20: mol_type = other DNA
tggattgctctcaaagatag

SEQ ID NO: 105763 - DNA, 20 bp, synthetic construct
  source 1..20: mol_type = other DNA
atggattgctctcaaagata

SEQ ID NO: 105764 - DNA, 20 bp, synthetic construct
  source 1..20: mol_type = other DNA
tatggattgctctcaaagat

SEQ ID NO: 105765 - DNA, 20 bp, synthetic construct
  source 1..20: mol_type = other DNA
atatggattgctctcaaaga

SEQ ID NO: 105766 - DNA, 20 bp, synthetic construct
  source 1..20: mol_type = other DNA
catatggattgctctcaaag

SEQ ID NO: 105767 - DNA, 20 bp, synthetic construct
  source 1..20: mol_type = other DNA
acatatggattgctctcaaa

SEQ ID NO: 105768 - DNA, 20 bp, synthetic construct
  source 1..20: mol_type = other DNA
aacatatggattgctctcaa

SEQ ID NO: 105769 - DNA, 20 bp, synthetic construct
  source 1..20: mol_type = other DNA
caacatatggattgctctca

SEQ ID NO: 105770 - DNA, 20 bp, synthetic construct
  source 1..20: mol_type = other DNA
tcaacatatggattgctctc

SEQ ID NO: 105771 - DNA, 20 bp, synthetic construct
  source 1..20: mol_type = other DNA
ctcaacatatggattgctct

SEQ ID NO: 105772 - DNA, 20 bp, synthetic construct
  source 1..20: mol_type = other DNA
cctcaacatatggattgctc

SEQ ID NO: 105773 - DNA, 20 bp, synthetic construct
  source 1..20: mol_type = other DNA
tcctcaacatatggattgct

SEQ ID NO: 105774 - DNA, 20 bp, synthetic construct
  source 1..20: mol_type = other DNA
ctcctcaacatatggattgc

SEQ ID NO: 105775 - DNA, 20 bp, synthetic construct
  source 1..20: mol_type = other DNA
tctcctcaacatatggattg

SEQ ID NO: 105776 - DNA, 20 bp, synthetic construct
  source 1..20: mol_type = other DNA
ttctcctcaacatatggatt

SEQ ID NO: 105777 - DNA, 20 bp, synthetic construct
  source 1..20: mol_type = other DNA
cttctcctcaacatatggat

SEQ ID NO: 105778 - DNA, 20 bp, synthetic construct
  source 1..20: mol_type = other DNA
tcttctcctcaacatatgga

SEQ ID NO: 105779 - DNA, 20 bp, synthetic construct
  source 1..20: mol_type = other DNA
ttcttctcctcaacatatgg

SEQ ID NO: 105780 - DNA, 20 bp, synthetic construct
  source 1..20: mol_type = other DNA
attcttctcctcaacatatg

SEQ ID NO: 105781 - DNA, 20 bp, synthetic construct
  source 1..20: mol_type = other DNA
cattcttctcctcaacatat

SEQ ID NO: 105782 - DNA, 20 bp, synthetic construct
  source 1..20: mol_type = other DNA
acattcttctcctcaacata

SEQ ID NO: 105783 - DNA, 20 bp, synthetic construct
  source 1..20: mol_type = other DNA
cacattcttctcctcaacat

SEQ ID NO: 105784 - DNA, 20 bp, synthetic construct
  source 1..20: mol_type = other DNA
acacattcttctcctcaaca

SEQ ID NO: 105785 - DNA, 20 bp, synthetic construct
  source 1..20: mol_type = other DNA
tacacattcttctcctcaac

SEQ ID NO: 105786 - DNA, 20 bp, synthetic construct
  source 1..20: mol_type = other DNA
atacacattcttctcctcaa

SEQ ID NO: 105787 - DNA, 20 bp, synthetic construct
  source 1..20: mol_type = other DNA
aatacacattcttctcctca

SEQ ID NO: 105788 - DNA, 20 bp, synthetic construct
  source 1..20: mol_type = other DNA
gaatacacattcttctcctc

SEQ ID NO: 105789 - DNA, 20 bp, synthetic construct
  source 1..20: mol_type = other DNA
agaatacacattcttctcct

SEQ ID NO: 105790 - DNA, 20 bp, synthetic construct
  source 1..20: mol_type = other DNA
tagaatacacattcttctcc

SEQ ID NO: 105791 - DNA, 20 bp, synthetic construct
  source 1..20: mol_type = other DNA
atagaatacacattcttctc

SEQ ID NO: 105792 - DNA, 20 bp, synthetic construct
  source 1..20: mol_type = other DNA
tatagaatacacattcttct

SEQ ID NO: 105793 - DNA, 20 bp, synthetic construct
  source 1..20: mol_type = other DNA
ctatagaatacacattcttc

SEQ ID NO: 105794 - DNA, 20 bp, synthetic construct
  source 1..20: mol_type = other DNA
gctatagaatacacattctt

SEQ ID NO: 105795 - DNA, 20 bp, synthetic construct
  source 1..20: mol_type = other DNA
agctatagaatacacattct

SEQ ID NO: 105796 - DNA, 20 bp, synthetic construct
  source 1..20: mol_type = other DNA
cagctatagaatacacattc

SEQ ID NO: 105797 - DNA, 20 bp, synthetic construct
  source 1..20: mol_type = other DNA
acagctatagaatacacatt

SEQ ID NO: 105798 - DNA, 20 bp, synthetic construct
  source 1..20: mol_type = other DNA
aacagctatagaatacacat

SEQ ID NO: 105799 - DNA, 20 bp, synthetic construct
  source 1..20: mol_type = other DNA
caacagctatagaatacaca

SEQ ID NO: 105800 - DNA, 20 bp, synthetic construct
  source 1..20: mol_type = other DNA
ccaacagctatagaatacac

SEQ ID NO: 105801 - DNA, 20 bp, synthetic construct
  source 1..20: mol_type = other DNA
tccaacagctatagaataca

SEQ ID NO: 105802 - DNA, 20 bp, synthetic construct
  source 1..20: mol_type = other DNA
gtccaacagctatagaatac

SEQ ID NO: 105803 - DNA, 20 bp, synthetic construct
  source 1..20: mol_type = other DNA
tgtccaacagctatagaata

SEQ ID NO: 105804 - DNA, 20 bp, synthetic construct
  source 1..20: mol_type = other DNA
gtgtccaacagctatagaat

SEQ ID NO: 105805 - DNA, 20 bp, synthetic construct
  source 1..20: mol_type = other DNA
tgtgtccaacagctatagaa

SEQ ID NO: 105806 - DNA, 20 bp, synthetic construct
  source 1..20: mol_type = other DNA
ttgtgtccaacagctataga

SEQ ID NO: 105807 - DNA, 20 bp, synthetic construct
  source 1..20: mol_type = other DNA
attgtgtccaacagctatag

SEQ ID NO: 105808 - DNA, 20 bp, synthetic construct
  source 1..20: mol_type = other DNA
cattgtgtccaacagctata

SEQ ID NO: 105809 - DNA, 20 bp, synthetic construct
  source 1..20: mol_type = other DNA
acattgtgtccaacagctat

SEQ ID NO: 105810 - DNA, 20 bp, synthetic construct
  source 1..20: mol_type = other DNA
aacattgtgtccaacagcta

SEQ ID NO: 105811 - DNA, 20 bp, synthetic construct
  source 1..20: mol_type = other DNA
gaacattgtgtccaacagct

SEQ ID NO: 105812 - DNA, 20 bp, synthetic construct
  source 1..20: mol_type = other DNA
agaacattgtgtccaacagc

SEQ ID NO: 105813 - DNA, 20 bp, synthetic construct
  source 1..20: mol_type = other DNA
cagaacattgtgtccaacag

SEQ ID NO: 105814 - DNA, 20 bp, synthetic construct
  source 1..20: mol_type = other DNA
acagaacattgtgtccaaca

SEQ ID NO: 105815 - DNA, 20 bp, synthetic construct
  source 1..20: mol_type = other DNA
tacagaacattgtgtccaac

SEQ ID NO: 105816 - DNA, 20 bp, synthetic construct
  source 1..20: mol_type = other DNA
ttacagaacattgtgtccaa

SEQ ID NO: 105817 - DNA, 20 bp, synthetic construct
  source 1..20: mol_type = other DNA
tttacagaacattgtgtcca

SEQ ID NO: 105818 - DNA, 20 bp, synthetic construct
  source 1..20: mol_type = other DNA
atttacagaacattgtgtcc

SEQ ID NO: 105819 - DNA, 20 bp, synthetic construct
  source 1..20: mol_type = other DNA
tatttacagaacattgtgtc

SEQ ID NO: 105820 - DNA, 20 bp, synthetic construct
  source 1..20: mol_type = other DNA
atatttacagaacattgtgt

SEQ ID NO: 105821 - DNA, 20 bp, synthetic construct
  source 1..20: mol_type = other DNA
catatttacagaacattgtg

SEQ ID NO: 105822 - DNA, 20 bp, synthetic construct
  source 1..20: mol_type = other DNA
acatatttacagaacattgt

SEQ ID NO: 105823 - DNA, 20 bp, synthetic construct
  source 1..20: mol_type = other DNA
tacatatttacagaacattg

SEQ ID NO: 105824 - DNA, 20 bp, synthetic construct
  source 1..20: mol_type = other DNA
atacatatttacagaacatt

SEQ ID NO: 105825 - DNA, 20 bp, synthetic construct
  source 1..20: mol_type = other DNA
aatacatatttacagaacat

SEQ ID NO: 105826 - DNA, 20 bp, synthetic construct
  source 1..20: mol_type = other DNA
caatacatatttacagaaca

SEQ ID NO: 105827 - DNA, 20 bp, synthetic construct
  source 1..20: mol_type = other DNA
ccaatacatatttacagaac

SEQ ID NO: 105828 - DNA, 20 bp, synthetic construct
  source 1..20: mol_type = other DNA
cccaatacatatttacagaa

SEQ ID NO: 105829 - DNA, 20 bp, synthetic construct
  source 1..20: mol_type = other DNA
gcccaatacatatttacaga

SEQ ID NO: 105830 - DNA, 20 bp, synthetic construct
  source 1..20: mol_type = other DNA
ggcccaatacatatttacag

SEQ ID NO: 105831 - DNA, 20 bp, synthetic construct
  source 1..20: mol_type = other DNA
aggcccaatacatatttaca

SEQ ID NO: 105832 - DNA, 20 bp, synthetic construct
  source 1..20: mol_type = other DNA
taggcccaatacatatttac

SEQ ID NO: 105833 - DNA, 20 bp, synthetic construct
  source 1..20: mol_type = other DNA
ataggcccaatacatattta

SEQ ID NO: 105834 - DNA, 20 bp, synthetic construct
  source 1..20: mol_type = other DNA
aataggcccaatacatattt

SEQ ID NO: 105835 - DNA, 20 bp, synthetic construct
  source 1..20: mol_type = other DNA
aaataggcccaatacatatt

SEQ ID NO: 105836 - DNA, 20 bp, synthetic construct
  source 1..20: mol_type = other DNA
caaataggcccaatacatat

SEQ ID NO: 105837 - DNA, 20 bp, synthetic construct
  source 1..20: mol_type = other DNA
ccaaataggcccaatacata

SEQ ID NO: 105838 - DNA, 20 bp, synthetic construct
  source 1..20: mol_type = other DNA
accaaataggcccaatacat

SEQ ID NO: 105839 - DNA, 20 bp, synthetic construct
  source 1..20: mol_type = other DNA
gaccaaataggcccaataca

SEQ ID NO: 105840 - DNA, 20 bp, synthetic construct
  source 1..20: mol_type = other DNA
agaccaaataggcccaatac

SEQ ID NO: 105841 - DNA, 20 bp, synthetic construct
  source 1..20: mol_type = other DNA
tagaccaaataggcccaata

SEQ ID NO: 105842 - DNA, 20 bp, synthetic construct
  source 1..20: mol_type = other DNA
atagaccaaataggcccaat

SEQ ID NO: 105843 - DNA, 20 bp, synthetic construct
  source 1..20: mol_type = other DNA
tatagaccaaataggcccaa

SEQ ID NO: 105844 - DNA, 20 bp, synthetic construct
  source 1..20: mol_type = other DNA
ctatagaccaaataggccca

SEQ ID NO: 105845 - DNA, 20 bp, synthetic construct
  source 1..20: mol_type = other DNA
tctatagaccaaataggccc

SEQ ID NO: 105846 - DNA, 20 bp, synthetic construct
  source 1..20: mol_type = other DNA
ctctatagaccaaataggcc

SEQ ID NO: 105847 - DNA, 20 bp, synthetic construct
  source 1..20: mol_type = other DNA
gctctatagaccaaataggc

SEQ ID NO: 105848 - DNA, 20 bp, synthetic construct
  source 1..20: mol_type = other DNA
tgctctatagaccaaatagg

SEQ ID NO: 105849 - DNA, 20 bp, synthetic construct
  source 1..20: mol_type = other DNA
ttgctctatagaccaaatag

SEQ ID NO: 105850 - DNA, 20 bp, synthetic construct
  source 1..20: mol_type = other DNA
tttgctctatagaccaaata

SEQ ID NO: 105851 - DNA, 20 bp, synthetic construct
  source 1..20: mol_type = other DNA
atttgctctatagaccaaat

SEQ ID NO: 105852 - DNA, 20 bp, synthetic construct
  source 1..20: mol_type = other DNA
aatttgctctatagaccaaa

SEQ ID NO: 105853 - DNA, 20 bp, synthetic construct
  source 1..20: mol_type = other DNA
taatttgctctatagaccaa

SEQ ID NO: 105854 - DNA, 20 bp, synthetic construct
  source 1..20: mol_type = other DNA
ctaatttgctctatagacca

SEQ ID NO: 105855 - DNA, 20 bp, synthetic construct
  source 1..20: mol_type = other DNA
cctaatttgctctatagacc

SEQ ID NO: 105856 - DNA, 20 bp, synthetic construct
  source 1..20: mol_type = other DNA
acctaatttgctctatagac

SEQ ID NO: 105857 - DNA, 20 bp, synthetic construct
  source 1..20: mol_type = other DNA
gacctaatttgctctataga

SEQ ID NO: 105858 - DNA, 20 bp, synthetic construct
  source 1..20: mol_type = other DNA
agacctaatttgctctatag

SEQ ID NO: 105859 - DNA, 20 bp, synthetic construct
  source 1..20: mol_type = other DNA
tagacctaatttgctctata

SEQ ID NO: 105860 - DNA, 20 bp, synthetic construct
  source 1..20: mol_type = other DNA
ttagacctaatttgctctat

SEQ ID NO: 105861 - DNA, 20 bp, synthetic construct
  source 1..20: mol_type = other DNA
attagacctaatttgctcta

SEQ ID NO: 105862 - DNA, 20 bp, synthetic construct
  source 1..20: mol_type = other DNA
cattagacctaatttgctct

SEQ ID NO: 105863 - DNA, 20 bp, synthetic construct
  source 1..20: mol_type = other DNA
acattagacctaatttgctc

SEQ ID NO: 105864 - DNA, 20 bp, synthetic construct
  source 1..20: mol_type = other DNA
aacattagacctaatttgct

SEQ ID NO: 105865 - DNA, 20 bp, synthetic construct
  source 1..20: mol_type = other DNA
aaacattagacctaatttgc

SEQ ID NO: 105866 - DNA, 20 bp, synthetic construct
  source 1..20: mol_type = other DNA
gaaacattagacctaatttg

SEQ ID NO: 105867 - DNA, 20 bp, synthetic construct
  source 1..20: mol_type = other DNA
agaaacattagacctaattt

SEQ ID NO: 105868 - DNA, 20 bp, synthetic construct
  source 1..20: mol_type = other DNA
aagaaacattagacctaatt

SEQ ID NO: 105869 - DNA, 20 bp, synthetic construct
  source 1..20: mol_type = other DNA
aaagaaacattagacctaat

SEQ ID NO: 105870 - DNA, 20 bp, synthetic construct
  source 1..20: mol_type = other DNA
caaagaaacattagacctaa

SEQ ID NO: 105871 - DNA, 20 bp, synthetic construct
  source 1..20: mol_type = other DNA
acaaagaaacattagaccta

SEQ ID NO: 105872 - DNA, 20 bp, synthetic construct
  source 1..20: mol_type = other DNA
aacaaagaaacattagacct

SEQ ID NO: 105873 - DNA, 20 bp, synthetic construct
  source 1..20: mol_type = other DNA
caacaaagaaacattagacc

SEQ ID NO: 105874 - DNA, 20 bp, synthetic construct
  source 1..20: mol_type = other DNA
tcaacaaagaaacattagac

SEQ ID NO: 105875 - DNA, 20 bp, synthetic construct
  source 1..20: mol_type = other DNA
atcaacaaagaaacattaga

SEQ ID NO: 105876 - DNA, 20 bp, synthetic construct
  source 1..20: mol_type = other DNA
aatcaacaaagaaacattag

SEQ ID NO: 105877 - DNA, 20 bp, synthetic construct
  source 1..20: mol_type = other DNA
aaatcaacaaagaaacatta

SEQ ID NO: 105878 - DNA, 20 bp, synthetic construct
  source 1..20: mol_type = other DNA
aaaatcaacaaagaaacatt

SEQ ID NO: 105879 - DNA, 20 bp, synthetic construct
  source 1..20: mol_type = other DNA
gaaaatcaacaaagaaacat

SEQ ID NO: 105880 - DNA, 20 bp, synthetic construct
  source 1..20: mol_type = other DNA
agaaaatcaacaaagaaaca

SEQ ID NO: 105881 - DNA, 20 bp, synthetic construct
  source 1..20: mol_type = other DNA
cagaaaatcaacaaagaaac

SEQ ID NO: 105882 - DNA, 20 bp, synthetic construct
  source 1..20: mol_type = other DNA
acagaaaatcaacaaagaaa

SEQ ID NO: 105883 - DNA, 20 bp, synthetic construct
  source 1..20: mol_type = other DNA
gacagaaaatcaacaaagaa

SEQ ID NO: 105884 - DNA, 20 bp, synthetic construct
  source 1..20: mol_type = other DNA
agacagaaaatcaacaaaga

SEQ ID NO: 105885 - DNA, 20 bp, synthetic construct
  source 1..20: mol_type = other DNA
cagacagaaaatcaacaaag

SEQ ID NO: 105886 - DNA, 20 bp, synthetic construct
  source 1..20: mol_type = other DNA
tcagacagaaaatcaacaaa

SEQ ID NO: 105887 - DNA, 20 bp, synthetic construct
  source 1..20: mol_type = other DNA
ttcagacagaaaatcaacaa

SEQ ID NO: 105888 - DNA, 20 bp, synthetic construct
  source 1..20: mol_type = other DNA
attcagacagaaaatcaaca

SEQ ID NO: 105889 - DNA, 20 bp, synthetic construct
  source 1..20: mol_type = other DNA
cattcagacagaaaatcaac

SEQ ID NO: 105890 - DNA, 20 bp, synthetic construct
  source 1..20: mol_type = other DNA
tcattcagacagaaaatcaa

SEQ ID NO: 105891 - DNA, 20 bp, synthetic construct
  source 1..20: mol_type = other DNA
atcattcagacagaaaatca

SEQ ID NO: 105892 - DNA, 20 bp, synthetic construct
  source 1..20: mol_type = other DNA
gatcattcagacagaaaatc

SEQ ID NO: 105893 - DNA, 20 bp, synthetic construct
  source 1..20: mol_type = other DNA
agatcattcagacagaaaat

SEQ ID NO: 105894 - DNA, 20 bp, synthetic construct
  source 1..20: mol_type = other DNA
cagatcattcagacagaaaa

SEQ ID NO: 105895 - DNA, 20 bp, synthetic construct
  source 1..20: mol_type = other DNA
acagatcattcagacagaaa

SEQ ID NO: 105896 - DNA, 20 bp, synthetic construct
  source 1..20: mol_type = other DNA
gacagatcattcagacagaa

SEQ ID NO: 105897 - DNA, 20 bp, synthetic construct
  source 1..20: mol_type = other DNA
ggacagatcattcagacaga

SEQ ID NO: 105898 - DNA, 20 bp, synthetic construct
  source 1..20: mol_type = other DNA
tggacagatcattcagacag

SEQ ID NO: 105899 - DNA, 20 bp, synthetic construct
  source 1..20: mol_type = other DNA
atggacagatcattcagaca

SEQ ID NO: 105900 - DNA, 20 bp, synthetic construct
  source 1..20: mol_type = other DNA
aatggacagatcattcagac

SEQ ID NO: 105901 - DNA, 20 bp, synthetic construct
  source 1..20: mol_type = other DNA
caatggacagatcattcaga

SEQ ID NO: 105902 - DNA, 20 bp, synthetic construct
  source 1..20: mol_type = other DNA
gcaatggacagatcattcag

SEQ ID NO: 105903 - DNA, 20 bp, synthetic construct
  source 1..20: mol_type = other DNA
agcaatggacagatcattca

SEQ ID NO: 105904 - DNA, 20 bp, synthetic construct
  source 1..20: mol_type = other DNA
cagcaatggacagatcattc

SEQ ID NO: 105905 - DNA, 20 bp, synthetic construct
  source 1..20: mol_type = other DNA
tcagcaatggacagatcatt

SEQ ID NO: 105906 - DNA, 20 bp, synthetic construct
  source 1..20: mol_type = other DNA
ctcagcaatggacagatcat

SEQ ID NO: 105907 - DNA, 20 bp, synthetic construct
  source 1..20: mol_type = other DNA
tctcagcaatggacagatca

SEQ ID NO: 105908 - DNA, 20 bp, synthetic construct
  source 1..20: mol_type = other DNA
ctctcagcaatggacagatc

SEQ ID NO: 105909 - DNA, 20 bp, synthetic construct
  source 1..20: mol_type = other DNA
actctcagcaatggacagat

SEQ ID NO: 105910 - DNA, 20 bp, synthetic construct
  source 1..20: mol_type = other DNA
cactctcagcaatggacaga

SEQ ID NO: 105911 - DNA, 20 bp, synthetic construct
  source 1..20: mol_type = other DNA
ccactctcagcaatggacag

SEQ ID NO: 105912 - DNA, 20 bp, synthetic construct
  source 1..20: mol_type = other DNA
cccactctcagcaatggaca

SEQ ID NO: 105913 - DNA, 20 bp, synthetic construct
  source 1..20: mol_type = other DNA
ccccactctcagcaatggac

SEQ ID NO: 105914 - DNA, 20 bp, synthetic construct
  source 1..20: mol_type = other DNA
accccactctcagcaatgga

SEQ ID NO: 105915 - DNA, 20 bp, synthetic construct
  source 1..20: mol_type = other DNA
caccccactctcagcaatgg

SEQ ID NO: 105916 - DNA, 20 bp, synthetic construct
  source 1..20: mol_type = other DNA
acaccccactctcagcaatg

SEQ ID NO: 105917 - DNA, 20 bp, synthetic construct
  source 1..20: mol_type = other DNA
aacaccccactctcagcaat

SEQ ID NO: 105918 - DNA, 20 bp, synthetic construct
  source 1..20: mol_type = other DNA
caacaccccactctcagcaa

SEQ ID NO: 105919 - DNA, 20 bp, synthetic construct
  source 1..20: mol_type = other DNA
tcaacaccccactctcagca

SEQ ID NO: 105920 - DNA, 20 bp, synthetic construct
  source 1..20: mol_type = other DNA
ttcaacaccccactctcagc

SEQ ID NO: 105921 - DNA, 20 bp, synthetic construct
  source 1..20: mol_type = other DNA
cttcaacaccccactctcag

SEQ ID NO: 105922 - DNA, 20 bp, synthetic construct
  source 1..20: mol_type = other DNA
acttcaacaccccactctca

SEQ ID NO: 105923 - DNA, 20 bp, synthetic construct
  source 1..20: mol_type = other DNA
aacttcaacaccccactctc

SEQ ID NO: 105924 - DNA, 20 bp, synthetic construct
  source 1..20: mol_type = other DNA
aaacttcaacaccccactct

SEQ ID NO: 105925 - DNA, 20 bp, synthetic construct
  source 1..20: mol_type = other DNA
gaaacttcaacaccccactc

SEQ ID NO: 105926 - DNA, 20 bp, synthetic construct
  source 1..20: mol_type = other DNA
ggaaacttcaacaccccact

SEQ ID NO: 105927 - DNA, 20 bp, synthetic construct
  source 1..20: mol_type = other DNA
cggaaacttcaacaccccac

SEQ ID NO: 105928 - DNA, 20 bp, synthetic construct
  source 1..20: mol_type = other DNA
tcggaaacttcaacacccca

SEQ ID NO: 105929 - DNA, 20 bp, synthetic construct
  source 1..20: mol_type = other DNA
gtcggaaacttcaacacccc

SEQ ID NO: 105930 - DNA, 20 bp, synthetic construct
  source 1..20: mol_type = other DNA
agtcggaaacttcaacaccc

SEQ ID NO: 105931 - DNA, 20 bp, synthetic construct
  source 1..20: mol_type = other DNA
cagtcggaaacttcaacacc

SEQ ID NO: 105932 - DNA, 20 bp, synthetic construct
  source 1..20: mol_type = other DNA
acagtcggaaacttcaacac

SEQ ID NO: 105933 - DNA, 20 bp, synthetic construct
  source 1..20: mol_type = other DNA
aacagtcggaaacttcaaca

SEQ ID NO: 105934 - DNA, 20 bp, synthetic construct
  source 1..20: mol_type = other DNA
taacagtcggaaacttcaac

SEQ ID NO: 105935 - DNA, 20 bp, synthetic construct
  source 1..20: mol_type = other DNA
gtaacagtcggaaacttcaa

SEQ ID NO: 105936 - DNA, 20 bp, synthetic construct
  source 1..20: mol_type = other DNA
agtaacagtcggaaacttca

SEQ ID NO: 105937 - DNA, 20 bp, synthetic construct
  source 1..20: mol_type = other DNA
cagtaacagtcggaaacttc

SEQ ID NO: 105938 - DNA, 20 bp, synthetic construct
  source 1..20: mol_type = other DNA
tcagtaacagtcggaaactt

SEQ ID NO: 105939 - DNA, 20 bp, synthetic construct
  source 1..20: mol_type = other DNA
ctcagtaacagtcggaaact

SEQ ID NO: 105940 - DNA, 20 bp, synthetic construct
  source 1..20: mol_type = other DNA
cctcagtaacagtcggaaac

SEQ ID NO: 105941 - DNA, 20 bp, synthetic construct
  source 1..20: mol_type = other DNA
acctcagtaacagtcggaaa

SEQ ID NO: 105942 - DNA, 20 bp, synthetic construct
  source 1..20: mol_type = other DNA
gacctcagtaacagtcggaa

SEQ ID NO: 105943 - DNA, 20 bp, synthetic construct
  source 1..20: mol_type = other DNA
agacctcagtaacagtcgga

SEQ ID NO: 105944 - DNA, 20 bp, synthetic construct
  source 1..20: mol_type = other DNA
cagacctcagtaacagtcgg

SEQ ID NO: 105945 - DNA, 20 bp, synthetic construct
  source 1..20: mol_type = other DNA
acagacctcagtaacagtcg

SEQ ID NO: 105946 - DNA, 20 bp, synthetic construct
  source 1..20: mol_type = other DNA
aacagacctcagtaacagtc

SEQ ID NO: 105947 - DNA, 20 bp, synthetic construct
  source 1..20: mol_type = other DNA
aaacagacctcagtaacagt

SEQ ID NO: 105948 - DNA, 20 bp, synthetic construct
  source 1..20: mol_type = other DNA
gaaacagacctcagtaacag

SEQ ID NO: 105949 - DNA, 20 bp, synthetic construct
  source 1..20: mol_type = other DNA
agaaacagacctcagtaaca

SEQ ID NO: 105950 - DNA, 20 bp, synthetic construct
  source 1..20: mol_type = other DNA
gagaaacagacctcagtaac

SEQ ID NO: 105951 - DNA, 20 bp, synthetic construct
  source 1..20: mol_type = other DNA
agagaaacagacctcagtaa

SEQ ID NO: 105952 - DNA, 20 bp, synthetic construct
  source 1..20: mol_type = other DNA
aagagaaacagacctcagta

SEQ ID NO: 105953 - DNA, 20 bp, synthetic construct
  source 1..20: mol_type = other DNA
aaagagaaacagacctcagt

SEQ ID NO: 105954 - DNA, 20 bp, synthetic construct
  source 1..20: mol_type = other DNA
aaaagagaaacagacctcag

SEQ ID NO: 105955 - DNA, 20 bp, synthetic construct
  source 1..20: mol_type = other DNA
aaaaagagaaacagacctca

SEQ ID NO: 105956 - DNA, 20 bp, synthetic construct
  source 1..20: mol_type = other DNA
aaaaaagagaaacagacctc

SEQ ID NO: 105957 - DNA, 20 bp, synthetic construct
  source 1..20: mol_type = other DNA
caaaaaagagaaacagacct

SEQ ID NO: 105958 - DNA, 20 bp, synthetic construct
  source 1..20: mol_type = other DNA
gcaaaaaagagaaacagacc

SEQ ID NO: 105959 - DNA, 20 bp, synthetic construct
  source 1..20: mol_type = other DNA
agcaaaaaagagaaacagac

SEQ ID NO: 105960 - DNA, 20 bp, synthetic construct
  source 1..20: mol_type = other DNA
gagcaaaaaagagaaacaga

SEQ ID NO: 105961 - DNA, 20 bp, synthetic construct
  source 1..20: mol_type = other DNA
agagcaaaaaagagaaacag

SEQ ID NO: 105962 - DNA, 20 bp, synthetic construct
  source 1..20: mol_type = other DNA
tagagcaaaaaagagaaaca

SEQ ID NO: 105963 - DNA, 20 bp, synthetic construct
  source 1..20: mol_type = other DNA
ttagagcaaaaaagagaaac

SEQ ID NO: 105964 - DNA, 20 bp, synthetic construct
  source 1..20: mol_type = other DNA
attagagcaaaaaagagaaa

SEQ ID NO: 105965 - DNA, 20 bp, synthetic construct
  source 1..20: mol_type = other DNA
tattagagcaaaaaagagaa

SEQ ID NO: 105966 - DNA, 20 bp, synthetic construct
  source 1..20: mol_type = other DNA
ttattagagcaaaaaagaga

SEQ ID NO: 105967 - DNA, 20 bp, synthetic construct
  source 1..20: mol_type = other DNA
attattagagcaaaaaagag

SEQ ID NO: 105968 - DNA, 20 bp, synthetic construct
  source 1..20: mol_type = other DNA
cattattagagcaaaaaaga

SEQ ID NO: 105969 - DNA, 20 bp, synthetic construct
  source 1..20: mol_type = other DNA
acattattagagcaaaaaag

SEQ ID NO: 105970 - DNA, 20 bp, synthetic construct
  source 1..20: mol_type = other DNA
aacattattagagcaaaaaa

SEQ ID NO: 105971 - DNA, 20 bp, synthetic construct
  source 1..20: mol_type = other DNA
aaacattattagagcaaaaa

SEQ ID NO: 105972 - DNA, 20 bp, synthetic construct
  source 1..20: mol_type = other DNA
caaacattattagagcaaaa

SEQ ID NO: 105973 - DNA, 20 bp, synthetic construct
  source 1..20: mol_type = other DNA
gcaaacattattagagcaaa

SEQ ID NO: 105974 - DNA, 20 bp, synthetic construct
  source 1..20: mol_type = other DNA
agcaaacattattagagcaa

SEQ ID NO: 105975 - DNA, 20 bp, synthetic construct
  source 1..20: mol_type = other DNA
aagcaaacattattagagca

SEQ ID NO: 105976 - DNA, 20 bp, synthetic construct
  source 1..20: mol_type = other DNA
aaagcaaacattattagagc

SEQ ID NO: 105977 - DNA, 20 bp, synthetic construct
  source 1..20: mol_type = other DNA
taaagcaaacattattagag

SEQ ID NO: 105978 - DNA, 20 bp, synthetic construct
  source 1..20: mol_type = other DNA
ataaagcaaacattattaga

SEQ ID NO: 105979 - DNA, 20 bp, synthetic construct
  source 1..20: mol_type = other DNA
tataaagcaaacattattag

SEQ ID NO: 105980 - DNA, 20 bp, synthetic construct
  source 1..20: mol_type = other DNA
atataaagcaaacattatta

SEQ ID NO: 105981 - DNA, 20 bp, synthetic construct
  source 1..20: mol_type = other DNA
tatataaagcaaacattatt

SEQ ID NO: 105982 - DNA, 20 bp, synthetic construct
  source 1..20: mol_type = other DNA
atatataaagcaaacattat

SEQ ID NO: 105983 - DNA, 20 bp, synthetic construct
  source 1..20: mol_type = other DNA
gatatataaagcaaacatta

SEQ ID NO: 105984 - DNA, 20 bp, synthetic construct
  source 1..20: mol_type = other DNA
agatatataaagcaaacatt

SEQ ID NO: 105985 - DNA, 20 bp, synthetic construct
  source 1..20: mol_type = other DNA
cagatatataaagcaaacat

SEQ ID NO: 105986 - DNA, 20 bp, synthetic construct
  source 1..20: mol_type = other DNA
ccagatatataaagcaaaca

SEQ ID NO: 105987 - DNA, 20 bp, synthetic construct
  source 1..20: mol_type = other DNA
tccagatatataaagcaaac

SEQ ID NO: 105988 - DNA, 20 bp, synthetic construct
  source 1..20: mol_type = other DNA
atccagatatataaagcaaa

SEQ ID NO: 105989 - DNA, 20 bp, synthetic construct
  source 1..20: mol_type = other DNA
catccagatatataaagcaa

SEQ ID NO: 105990 - DNA, 20 bp, synthetic construct
  source 1..20: mol_type = other DNA
gcatccagatatataaagca

SEQ ID NO: 105991 - DNA, 20 bp, synthetic construct
  source 1..20: mol_type = other DNA
agcatccagatatataaagc

SEQ ID NO: 105992 - DNA, 20 bp, synthetic construct
  source 1..20: mol_type = other DNA
gagcatccagatatataaag

SEQ ID NO: 105993 - DNA, 20 bp, synthetic construct
  source 1..20: mol_type = other DNA
ggagcatccagatatataaa

SEQ ID NO: 105994 - DNA, 20 bp, synthetic construct
  source 1..20: mol_type = other DNA
tggagcatccagatatataa

SEQ ID NO: 105995 - DNA, 20 bp, synthetic construct
  source 1..20: mol_type = other DNA
ctggagcatccagatatata

SEQ ID NO: 105996 - DNA, 20 bp, synthetic construct
  source 1..20: mol_type = other DNA
actggagcatccagatatat

SEQ ID NO: 105997 - DNA, 20 bp, synthetic construct
  source 1..20: mol_type = other DNA
tactggagcatccagatata

SEQ ID NO: 105998 - DNA, 20 bp, synthetic construct
  source 1..20: mol_type = other DNA
atactggagcatccagatat

SEQ ID NO: 105999 - DNA, 20 bp, synthetic construct
  source 1..20: mol_type = other DNA
aatactggagcatccagata

SEQ ID NO: 106000 - DNA, 20 bp, synthetic construct
  source 1..20: mol_type = other DNA
caatactggagcatccagat

SEQ ID NO: 106001 - DNA, 20 bp, synthetic construct
  source 1..20: mol_type = other DNA
ccaatactggagcatccaga

SEQ ID NO: 106002 - DNA, 20 bp, synthetic construct
  source 1..20: mol_type = other DNA
accaatactggagcatccag

SEQ ID NO: 106003 - DNA, 20 bp, synthetic construct
  source 1..20: mol_type = other DNA
aaccaatactggagcatcca

SEQ ID NO: 106004 - DNA, 20 bp, synthetic construct
  source 1..20: mol_type = other DNA
caaccaatactggagcatcc

SEQ ID NO: 106005 - DNA, 20 bp, synthetic construct
  source 1..20: mol_type = other DNA
gcaaccaatactggagcatc

SEQ ID NO: 106006 - DNA, 20 bp, synthetic construct
  source 1..20: mol_type = other DNA
tgcaaccaatactggagcat

SEQ ID NO: 106007 - DNA, 20 bp, synthetic construct
  source 1..20: mol_type = other DNA
atgcaaccaatactggagca

SEQ ID NO: 106008 - DNA, 20 bp, synthetic construct
  source 1..20: mol_type = other DNA
tatgcaaccaatactggagc

SEQ ID NO: 106009 - DNA, 20 bp, synthetic construct
  source 1..20: mol_type = other DNA
atatgcaaccaatactggag

SEQ ID NO: 106010 - DNA, 20 bp, synthetic construct
  source 1..20: mol_type = other DNA
catatgcaaccaatactgga

SEQ ID NO: 106011 - DNA, 20 bp, synthetic construct
  source 1..20: mol_type = other DNA
acatatgcaaccaatactgg

SEQ ID NO: 106012 - DNA, 20 bp, synthetic construct
  source 1..20: mol_type = other DNA
tacatatgcaaccaatactg

SEQ ID NO: 106013 - DNA, 20 bp, synthetic construct
  source 1..20: mol_type = other DNA
atacatatgcaaccaatact

SEQ ID NO: 106014 - DNA, 20 bp, synthetic construct
  source 1..20: mol_type = other DNA
aatacatatgcaaccaatac

SEQ ID NO: 106015 - DNA, 20 bp, synthetic construct
  source 1..20: mol_type = other DNA
aaatacatatgcaaccaata

SEQ ID NO: 106016 - DNA, 20 bp, synthetic construct
  source 1..20: mol_type = other DNA
taaatacatatgcaaccaat

SEQ ID NO: 106017 - DNA, 20 bp, synthetic construct
  source 1..20: mol_type = other DNA
ataaatacatatgcaaccaa

SEQ ID NO: 106018 - DNA, 20 bp, synthetic construct
  source 1..20: mol_type = other DNA
tataaatacatatgcaacca

SEQ ID NO: 106019 - DNA, 20 bp, synthetic construct
  source 1..20: mol_type = other DNA
gtataaatacatatgcaacc

SEQ ID NO: 106020 - DNA, 20 bp, synthetic construct
  source 1..20: mol_type = other DNA
agtataaatacatatgcaac

SEQ ID NO: 106021 - DNA, 20 bp, synthetic construct
  source 1..20: mol_type = other DNA
aagtataaatacatatgcaa

SEQ ID NO: 106022 - DNA, 20 bp, synthetic construct
  source 1..20: mol_type = other DNA
caagtataaatacatatgca

SEQ ID NO: 106023 - DNA, 20 bp, synthetic construct
  source 1..20: mol_type = other DNA
acaagtataaatacatatgc

SEQ ID NO: 106024 - DNA, 20 bp, synthetic construct
  source 1..20: mol_type = other DNA
aacaagtataaatacatatg

SEQ ID NO: 106025 - DNA, 20 bp, synthetic construct
  source 1..20: mol_type = other DNA
taacaagtataaatacatat

SEQ ID NO: 106026 - DNA, 20 bp, synthetic construct
  source 1..20: mol_type = other DNA
ataacaagtataaatacata

SEQ ID NO: 106027 - DNA, 20 bp, synthetic construct
  source 1..20: mol_type = other DNA
tataacaagtataaatacat

SEQ ID NO: 106028 - DNA, 20 bp, synthetic construct
  source 1..20: mol_type = other DNA
ttataacaagtataaataca

SEQ ID NO: 106029 - DNA, 20 bp, synthetic construct
  source 1..20: mol_type = other DNA
gttataacaagtataaatac

SEQ ID NO: 106030 - DNA, 20 bp, synthetic construct
  source 1..20: mol_type = other DNA
ggttataacaagtataaata

SEQ ID NO: 106031 - DNA, 20 bp, synthetic construct
  source 1..20: mol_type = other DNA
aggttataacaagtataaat

SEQ ID NO: 106032 - DNA, 20 bp, synthetic construct
  source 1..20: mol_type = other DNA
gaggttataacaagtataaa

SEQ ID NO: 106033 - DNA, 20 bp, synthetic construct
  source 1..20: mol_type = other DNA
agaggttataacaagtataa

SEQ ID NO: 106034 - DNA, 20 bp, synthetic construct
  source 1..20: mol_type = other DNA
aagaggttataacaagtata

SEQ ID NO: 106035 - DNA, 20 bp, synthetic construct
  source 1..20: mol_type = other DNA
caagaggttataacaagtat

SEQ ID NO: 106036 - DNA, 20 bp, synthetic construct
  source 1..20: mol_type = other DNA
gcaagaggttataacaagta

SEQ ID NO: 106037 - DNA, 20 bp, synthetic construct
  source 1..20: mol_type = other DNA
ggcaagaggttataacaagt

SEQ ID NO: 106038 - DNA, 20 bp, synthetic construct
  source 1..20: mol_type = other DNA
cggcaagaggttataacaag

SEQ ID NO: 106039 - DNA, 20 bp, synthetic construct
  source 1..20: mol_type = other DNA
tcggcaagaggttataacaa

SEQ ID NO: 106040 - DNA, 20 bp, synthetic construct
  source 1..20: mol_type = other DNA
ttcggcaagaggttataaca

SEQ ID NO: 106041 - DNA, 20 bp, synthetic construct
  source 1..20: mol_type = other DNA
attcggcaagaggttataac

SEQ ID NO: 106042 - DNA, 20 bp, synthetic construct
  source 1..20: mol_type = other DNA
aattcggcaagaggttataa

SEQ ID NO: 106043 - DNA, 20 bp, synthetic construct
  source 1..20: mol_type = other DNA
caattcggcaagaggttata

SEQ ID NO: 106044 - DNA, 20 bp, synthetic construct
  source 1..20: mol_type = other DNA
tcaattcggcaagaggttat

SEQ ID NO: 106045 - DNA, 20 bp, synthetic construct
  source 1..20: mol_type = other DNA
atcaattcggcaagaggtta

SEQ ID NO: 106046 - DNA, 20 bp, synthetic construct
  source 1..20: mol_type = other DNA
gatcaattcggcaagaggtt

SEQ ID NO: 106047 - DNA, 20 bp, synthetic construct
  source 1..20: mol_type = other DNA
ggatcaattcggcaagaggt

SEQ ID NO: 106048 - DNA, 20 bp, synthetic construct
  source 1..20: mol_type = other DNA
gggatcaattcggcaagagg

SEQ ID NO: 106049 - DNA, 20 bp, synthetic construct
  source 1..20: mol_type = other DNA
agggatcaattcggcaagag

SEQ ID NO: 106050 - DNA, 20 bp, synthetic construct
  source 1..20: mol_type = other DNA
aagggatcaattcggcaaga

SEQ ID NO: 106051 - DNA, 20 bp, synthetic construct
  source 1..20: mol_type = other DNA
aaagggatcaattcggcaag

SEQ ID NO: 106052 - DNA, 20 bp, synthetic construct
  source 1..20: mol_type = other DNA
taaagggatcaattcggcaa

SEQ ID NO: 106053 - DNA, 20 bp, synthetic construct
  source 1..20: mol_type = other DNA
ataaagggatcaattcggca

SEQ ID NO: 106054 - DNA, 20 bp, synthetic construct
  source 1..20: mol_type = other DNA
gataaagggatcaattcggc

SEQ ID NO: 106055 - DNA, 20 bp, synthetic construct
  source 1..20: mol_type = other DNA
tgataaagggatcaattcgg

SEQ ID NO: 106056 - DNA, 20 bp, synthetic construct
  source 1..20: mol_type = other DNA
atgataaagggatcaattcg

SEQ ID NO: 106057 - DNA, 20 bp, synthetic construct
  source 1..20: mol_type = other DNA
aatgataaagggatcaattc

SEQ ID NO: 106058 - DNA, 20 bp, synthetic construct
  source 1..20: mol_type = other DNA
taatgataaagggatcaatt

SEQ ID NO: 106059 - DNA, 20 bp, synthetic construct
  source 1..20: mol_type = other DNA
ataatgataaagggatcaat

SEQ ID NO: 106060 - DNA, 20 bp, synthetic construct
  source 1..20: mol_type = other DNA
tataatgataaagggatcaa

SEQ ID NO: 106061 - DNA, 20 bp, synthetic construct
  source 1..20: mol_type = other DNA
gtataatgataaagggatca

SEQ ID NO: 106062 - DNA, 20 bp, synthetic construct
  source 1..20: mol_type = other DNA
tgtataatgataaagggatc

SEQ ID NO: 106063 - DNA, 20 bp, synthetic construct
  source 1..20: mol_type = other DNA
ttgtataatgataaagggat

SEQ ID NO: 106064 - DNA, 20 bp, synthetic construct
  source 1..20: mol_type = other DNA
attgtataatgataaaggga

SEQ ID NO: 106065 - DNA, 20 bp, synthetic construct
  source 1..20: mol_type = other DNA
tattgtataatgataaaggg

SEQ ID NO: 106066 - DNA, 20 bp, synthetic construct
  source 1..20: mol_type = other DNA
ttattgtataatgataaagg

SEQ ID NO: 106067 - DNA, 20 bp, synthetic construct
  source 1..20: mol_type = other DNA
attattgtataatgataaag

SEQ ID NO: 106068 - DNA, 20 bp, synthetic construct
  source 1..20: mol_type = other DNA
gattattgtataatgataaa

SEQ ID NO: 106069 - DNA, 20 bp, synthetic construct
  source 1..20: mol_type = other DNA
agattattgtataatgataa

SEQ ID NO: 106070 - DNA, 20 bp, synthetic construct
  source 1..20: mol_type = other DNA
aagattattgtataatgata

SEQ ID NO: 106071 - DNA, 20 bp, synthetic construct
  source 1..20: mol_type = other DNA
gaagattattgtataatgat

SEQ ID NO: 106072 - DNA, 20 bp, synthetic construct
  source 1..20: mol_type = other DNA
agaagattattgtataatga

SEQ ID NO: 106073 - DNA, 20 bp, synthetic construct
  source 1..20: mol_type = other DNA
aagaagattattgtataatg

SEQ ID NO: 106074 - DNA, 20 bp, synthetic construct
  source 1..20: mol_type = other DNA
aaagaagattattgtataat

SEQ ID NO: 106075 - DNA, 20 bp, synthetic construct
  source 1..20: mol_type = other DNA
caaagaagattattgtataa

SEQ ID NO: 106076 - DNA, 20 bp, synthetic construct
  source 1..20: mol_type = other DNA
acaaagaagattattgtata

SEQ ID NO: 106077 - DNA, 20 bp, synthetic construct
  source 1..20: mol_type = other DNA
gacaaagaagattattgtat

SEQ ID NO: 106078 - DNA, 20 bp, synthetic construct
  source 1..20: mol_type = other DNA
agacaaagaagattattgta

SEQ ID NO: 106079 - DNA, 20 bp, synthetic construct
  source 1..20: mol_type = other DNA
cagacaaagaagattattgt

SEQ ID NO: 106080 - DNA, 20 bp, synthetic construct
  source 1..20: mol_type = other DNA
acagacaaagaagattattg

SEQ ID NO: 106081 - DNA, 20 bp, synthetic construct
  source 1..20: mol_type = other DNA
aacagacaaagaagattatt

SEQ ID NO: 106082 - DNA, 20 bp, synthetic construct
  source 1..20: mol_type = other DNA
aaacagacaaagaagattat

SEQ ID NO: 106083 - DNA, 20 bp, synthetic construct
  source 1..20: mol_type = other DNA
aaaacagacaaagaagatta

SEQ ID NO: 106084 - DNA, 20 bp, synthetic construct
  source 1..20: mol_type = other DNA
aaaaacagacaaagaagatt

SEQ ID NO: 106085 - DNA, 20 bp, synthetic construct
  source 1..20: mol_type = other DNA
taaaaacagacaaagaagat

SEQ ID NO: 106086 - DNA, 20 bp, synthetic construct
  source 1..20: mol_type = other DNA
ataaaaacagacaaagaaga

SEQ ID NO: 106087 - DNA, 20 bp, synthetic construct
  source 1..20: mol_type = other DNA
tataaaaacagacaaagaag

SEQ ID NO: 106088 - DNA, 20 bp, synthetic construct
  source 1..20: mol_type = other DNA
ctataaaaacagacaaagaa

SEQ ID NO: 106089 - DNA, 20 bp, synthetic construct
  source 1..20: mol_type = other DNA
tctataaaaacagacaaaga

SEQ ID NO: 106090 - DNA, 20 bp, synthetic construct
  source 1..20: mol_type = other DNA
gtctataaaaacagacaaag

SEQ ID NO: 106091 - DNA, 20 bp, synthetic construct
  source 1..20: mol_type = other DNA
agtctataaaaacagacaaa

SEQ ID NO: 106092 - DNA, 20 bp, synthetic construct
  source 1..20: mol_type = other DNA
aagtctataaaaacagacaa

SEQ ID NO: 106093 - DNA, 20 bp, synthetic construct
  source 1..20: mol_type = other DNA
aaagtctataaaaacagaca

SEQ ID NO: 106094 - DNA, 20 bp, synthetic construct
  source 1..20: mol_type = other DNA
caaagtctataaaaacagac

SEQ ID NO: 106095 - DNA, 20 bp, synthetic construct
  source 1..20: mol_type = other DNA
acaaagtctataaaaacaga

SEQ ID NO: 106096 - DNA, 20 bp, synthetic construct
  source 1..20: mol_type = other DNA
gacaaagtctataaaaacag

SEQ ID NO: 106097 - DNA, 20 bp, synthetic construct
  source 1..20: mol_type = other DNA
agacaaagtctataaaaaca

SEQ ID NO: 106098 - DNA, 20 bp, synthetic construct
  source 1..20: mol_type = other DNA
gagacaaagtctataaaaac

SEQ ID NO: 106099 - DNA, 20 bp, synthetic construct
  source 1..20: mol_type = other DNA
tgagacaaagtctataaaaa

SEQ ID NO: 106100 - DNA, 20 bp, synthetic construct
  source 1..20: mol_type = other DNA
ttgagacaaagtctataaaa

SEQ ID NO: 106101 - DNA, 20 bp, synthetic construct
  source 1..20: mol_type = other DNA
tttgagacaaagtctataaa

SEQ ID NO: 106102 - DNA, 20 bp, synthetic construct
  source 1..20: mol_type = other DNA
ttttgagacaaagtctataa

SEQ ID NO: 106103 - DNA, 20 bp, synthetic construct
  source 1..20: mol_type = other DNA
attttgagacaaagtctata

SEQ ID NO: 106104 - DNA, 20 bp, synthetic construct
  source 1..20: mol_type = other DNA
gattttgagacaaagtctat

SEQ ID NO: 106105 - DNA, 20 bp, synthetic construct
  source 1..20: mol_type = other DNA
agattttgagacaaagtcta

SEQ ID NO: 106106 - DNA, 20 bp, synthetic construct
  source 1..20: mol_type = other DNA
tagattttgagacaaagtct

SEQ ID NO: 106107 - DNA, 20 bp, synthetic construct
  source 1..20: mol_type = other DNA
atagattttgagacaaagtc

SEQ ID NO: 106108 - DNA, 20 bp, synthetic construct
  source 1..20: mol_type = other DNA
aatagattttgagacaaagt

SEQ ID NO: 106109 - DNA, 20 bp, synthetic construct
  source 1..20: mol_type = other DNA
aaatagattttgagacaaag

SEQ ID NO: 106110 - DNA, 20 bp, synthetic construct
  source 1..20: mol_type = other DNA
aaaatagattttgagacaaa

SEQ ID NO: 106111 - DNA, 20 bp, synthetic construct
  source 1..20: mol_type = other DNA
taaaatagattttgagacaa

SEQ ID NO: 106112 - DNA, 20 bp, synthetic construct
  source 1..20: mol_type = other DNA
ataaaatagattttgagaca

SEQ ID NO: 106113 - DNA, 20 bp, synthetic construct
  source 1..20: mol_type = other DNA
gataaaatagattttgagac

SEQ ID NO: 106114 - DNA, 20 bp, synthetic construct
  source 1..20: mol_type = other DNA
agataaaatagattttgaga

SEQ ID NO: 106115 - DNA, 20 bp, synthetic construct
  source 1..20: mol_type = other DNA
tagataaaatagattttgag

SEQ ID NO: 106116 - DNA, 20 bp, synthetic construct
  source 1..20: mol_type = other DNA
ttagataaaatagattttga

SEQ ID NO: 106117 - DNA, 20 bp, synthetic construct
  source 1..20: mol_type = other DNA
cttagataaaatagattttg

SEQ ID NO: 106118 - DNA, 20 bp, synthetic construct
  source 1..20: mol_type = other DNA
gcttagataaaatagatttt

SEQ ID NO: 106119 - DNA, 20 bp, synthetic construct
  source 1..20: mol_type = other DNA
tgcttagataaaatagattt

SEQ ID NO: 106120 - DNA, 20 bp, synthetic construct
  source 1..20: mol_type = other DNA
atgcttagataaaatagatt

SEQ ID NO: 106121 - DNA, 20 bp, synthetic construct
  source 1..20: mol_type = other DNA
tatgcttagataaaatagat

SEQ ID NO: 106122 - DNA, 20 bp, synthetic construct
  source 1..20: mol_type = other DNA
ctatgcttagataaaataga

SEQ ID NO: 106123 - DNA, 20 bp, synthetic construct
  source 1..20: mol_type = other DNA
gctatgcttagataaaatag

SEQ ID NO: 106124 - DNA, 20 bp, synthetic construct
  source 1..20: mol_type = other DNA
agctatgcttagataaaata

SEQ ID NO: 106125 - DNA, 20 bp, synthetic construct
  source 1..20: mol_type = other DNA
tagctatgcttagataaaat

SEQ ID NO: 106126 - DNA, 20 bp, synthetic construct
  source 1..20: mol_type = other DNA
gtagctatgcttagataaaa

SEQ ID NO: 106127 - DNA, 20 bp, synthetic construct
  source 1..20: mol_type = other DNA
agtagctatgcttagataaa

SEQ ID NO: 106128 - DNA, 20 bp, synthetic construct
  source 1..20: mol_type = other DNA
gagtagctatgcttagataa

SEQ ID NO: 106129 - DNA, 20 bp, synthetic construct
  source 1..20: mol_type = other DNA
ggagtagctatgcttagata

SEQ ID NO: 106130 - DNA, 20 bp, synthetic construct
  source 1..20: mol_type = other DNA
aggagtagctatgcttagat

SEQ ID NO: 106131 - DNA, 20 bp, synthetic construct
  source 1..20: mol_type = other DNA
caggagtagctatgcttaga

SEQ ID NO: 106132 - DNA, 20 bp, synthetic construct
  source 1..20: mol_type = other DNA
acaggagtagctatgcttag

SEQ ID NO: 106133 - DNA, 20 bp, synthetic construct
  source 1..20: mol_type = other DNA
aacaggagtagctatgctta

SEQ ID NO: 106134 - DNA, 20 bp, synthetic construct
  source 1..20: mol_type = other DNA
gaacaggagtagctatgctt

SEQ ID NO: 106135 - DNA, 20 bp, synthetic construct
  source 1..20: mol_type = other DNA
agaacaggagtagctatgct

SEQ ID NO: 106136 - DNA, 20 bp, synthetic construct
  source 1..20: mol_type = other DNA
aagaacaggagtagctatgc

SEQ ID NO: 106137 - DNA, 20 bp, synthetic construct
  source 1..20: mol_type = other DNA
aaagaacaggagtagctatg

SEQ ID NO: 106138 - DNA, 20 bp, synthetic construct
  source 1..20: mol_type = other DNA
aaaagaacaggagtagctat

SEQ ID NO: 106139 - DNA, 20 bp, synthetic construct
  source 1..20: mol_type = other DNA
gaaaagaacaggagtagcta

SEQ ID NO: 106140 - DNA, 20 bp, synthetic construct
  source 1..20: mol_type = other DNA
agaaaagaacaggagtagct

SEQ ID NO: 106141 - DNA, 20 bp, synthetic construct
  source 1..20: mol_type = other DNA
cagaaaagaacaggagtagc

SEQ ID NO: 106142 - DNA, 20 bp, synthetic construct
  source 1..20: mol_type = other DNA
ccagaaaagaacaggagtag

SEQ ID NO: 106143 - DNA, 20 bp, synthetic construct
  source 1..20: mol_type = other DNA
accagaaaagaacaggagta

SEQ ID NO: 106144 - DNA, 20 bp, synthetic construct
  source 1..20: mol_type = other DNA
aaccagaaaagaacaggagt

SEQ ID NO: 106145 - DNA, 20 bp, synthetic construct
  source 1..20: mol_type = other DNA
aaaccagaaaagaacaggag

SEQ ID NO: 106146 - DNA, 20 bp, synthetic construct
  source 1..20: mol_type = other DNA
gaaaccagaaaagaacagga

SEQ ID NO: 106147 - DNA, 20 bp, synthetic construct
  source 1..20: mol_type = other DNA
ggaaaccagaaaagaacagg

SEQ ID NO: 106148 - DNA, 20 bp, synthetic construct
  source 1..20: mol_type = other DNA
tggaaaccagaaaagaacag

SEQ ID NO: 106149 - DNA, 20 bp, synthetic construct
  source 1..20: mol_type = other DNA
atggaaaccagaaaagaaca

SEQ ID NO: 106150 - DNA, 20 bp, synthetic construct
  source 1..20: mol_type = other DNA
aatggaaaccagaaaagaac

SEQ ID NO: 106151 - DNA, 20 bp, synthetic construct
  source 1..20: mol_type = other DNA
aaatggaaaccagaaaagaa

SEQ ID NO: 106152 - DNA, 20 bp, synthetic construct
  source 1..20: mol_type = other DNA
caaatggaaaccagaaaaga

SEQ ID NO: 106153 - DNA, 20 bp, synthetic construct
  source 1..20: mol_type = other DNA
gcaaatggaaaccagaaaag

SEQ ID NO: 106154 - DNA, 20 bp, synthetic construct
  source 1..20: mol_type = other DNA
tgcaaatggaaaccagaaaa

SEQ ID NO: 106155 - DNA, 20 bp, synthetic construct
  source 1..20: mol_type = other DNA
atgcaaatggaaaccagaaa

SEQ ID NO: 106156 - DNA, 20 bp, synthetic construct
  source 1..20: mol_type = other DNA
catgcaaatggaaaccagaa

SEQ ID NO: 106157 - DNA, 20 bp, synthetic construct
  source 1..20: mol_type = other DNA
ccatgcaaatggaaaccaga

SEQ ID NO: 106158 - DNA, 20 bp, synthetic construct
  source 1..20: mol_type = other DNA
tccatgcaaatggaaaccag

SEQ ID NO: 106159 - DNA, 20 bp, synthetic construct
  source 1..20: mol_type = other DNA
ttccatgcaaatggaaacca

SEQ ID NO: 106160 - DNA, 20 bp, synthetic construct
  source 1..20: mol_type = other DNA
attccatgcaaatggaaacc

SEQ ID NO: 106161 - DNA, 20 bp, synthetic construct
  source 1..20: mol_type = other DNA
tattccatgcaaatggaaac

SEQ ID NO: 106162 - DNA, 20 bp, synthetic construct
  source 1..20: mol_type = other DNA
atattccatgcaaatggaaa

SEQ ID NO: 106163 - DNA, 20 bp, synthetic construct
  source 1..20: mol_type = other DNA
aatattccatgcaaatggaa

SEQ ID NO: 106164 - DNA, 20 bp, synthetic construct
  source 1..20: mol_type = other DNA
caatattccatgcaaatgga

SEQ ID NO: 106165 - DNA, 20 bp, synthetic construct
  source 1..20: mol_type = other DNA
acaatattccatgcaaatgg

SEQ ID NO: 106166 - DNA, 20 bp, synthetic construct
  source 1..20: mol_type = other DNA
aacaatattccatgcaaatg

SEQ ID NO: 106167 - DNA, 20 bp, synthetic construct
  source 1..20: mol_type = other DNA
aaacaatattccatgcaaat

SEQ ID NO: 106168 - DNA, 20 bp, synthetic construct
  source 1..20: mol_type = other DNA
aaaacaatattccatgcaaa

SEQ ID NO: 106169 - DNA, 20 bp, synthetic construct
  source 1..20: mol_type = other DNA
gaaaacaatattccatgcaa

SEQ ID NO: 106170 - DNA, 20 bp, synthetic construct
  source 1..20: mol_type = other DNA
ggaaaacaatattccatgca

SEQ ID NO: 106171 - DNA, 20 bp, synthetic construct
  source 1..20: mol_type = other DNA
tggaaaacaatattccatgc

SEQ ID NO: 106172 - DNA, 20 bp, synthetic construct
  source 1..20: mol_type = other DNA
ctggaaaacaatattccatg

SEQ ID NO: 106173 - DNA, 20 bp, synthetic construct
  source 1..20: mol_type = other DNA
gctggaaaacaatattccat

SEQ ID NO: 106174 - DNA, 20 bp, synthetic construct
  source 1..20: mol_type = other DNA
agctggaaaacaatattcca

SEQ ID NO: 106175 - DNA, 20 bp, synthetic construct
  source 1..20: mol_type = other DNA
gagctggaaaacaatattcc

SEQ ID NO: 106176 - DNA, 20 bp, synthetic construct
  source 1..20: mol_type = other DNA
agagctggaaaacaatattc

SEQ ID NO: 106177 - DNA, 20 bp, synthetic construct
  source 1..20: mol_type = other DNA
aagagctggaaaacaatatt

SEQ ID NO: 106178 - DNA, 20 bp, synthetic construct
  source 1..20: mol_type = other DNA
gaagagctggaaaacaatat

SEQ ID NO: 106179 - DNA, 20 bp, synthetic construct
  source 1..20: mol_type = other DNA
tgaagagctggaaaacaata

SEQ ID NO: 106180 - DNA, 20 bp, synthetic construct
  source 1..20: mol_type = other DNA
ttgaagagctggaaaacaat

SEQ ID NO: 106181 - DNA, 20 bp, synthetic construct
  source 1..20: mol_type = other DNA
attgaagagctggaaaacaa

SEQ ID NO: 106182 - DNA, 20 bp, synthetic construct
  source 1..20: mol_type = other DNA
aattgaagagctggaaaaca

SEQ ID NO: 106183 - DNA, 20 bp, synthetic construct
  source 1..20: mol_type = other DNA
aaattgaagagctggaaaac

SEQ ID NO: 106184 - DNA, 20 bp, synthetic construct
  source 1..20: mol_type = other DNA
aaaattgaagagctggaaaa

SEQ ID NO: 106185 - DNA, 20 bp, synthetic construct
  source 1..20: mol_type = other DNA
taaaattgaagagctggaaa

SEQ ID NO: 106186 - DNA, 20 bp, synthetic construct
  source 1..20: mol_type = other DNA
ctaaaattgaagagctggaa

SEQ ID NO: 106187 - DNA, 20 bp, synthetic construct
  source 1..20: mol_type = other DNA
actaaaattgaagagctgga

SEQ ID NO: 106188 - DNA, 20 bp, synthetic construct
  source 1..20: mol_type = other DNA
gactaaaattgaagagctgg

SEQ ID NO: 106189 - DNA, 20 bp, synthetic construct
  source 1..20: mol_type = other DNA
agactaaaattgaagagctg

SEQ ID NO: 106190 - DNA, 20 bp, synthetic construct
  source 1..20: mol_type = other DNA
tagactaaaattgaagagct

SEQ ID NO: 106191 - DNA, 20 bp, synthetic construct
  source 1..20: mol_type = other DNA
atagactaaaattgaagagc

SEQ ID NO: 106192 - DNA, 20 bp, synthetic construct
  source 1..20: mol_type = other DNA
catagactaaaattgaagag

SEQ ID NO: 106193 - DNA, 20 bp, synthetic construct
  source 1..20: mol_type = other DNA
acatagactaaaattgaaga

SEQ ID NO: 106194 - DNA, 20 bp, synthetic construct
  source 1..20: mol_type = other DNA
cacatagactaaaattgaag

SEQ ID NO: 106195 - DNA, 20 bp, synthetic construct
  source 1..20: mol_type = other DNA
acacatagactaaaattgaa

SEQ ID NO: 106196 - DNA, 20 bp, synthetic construct
  source 1..20: mol_type = other DNA
cacacatagactaaaattga

SEQ ID NO: 106197 - DNA, 20 bp, synthetic construct
  source 1..20: mol_type = other DNA
tcacacatagactaaaattg

SEQ ID NO: 106198 - DNA, 20 bp, synthetic construct
  source 1..20: mol_type = other DNA
atcacacatagactaaaatt

SEQ ID NO: 106199 - DNA, 20 bp, synthetic construct
  source 1..20: mol_type = other DNA
aatcacacatagactaaaat

SEQ ID NO: 106200 - DNA, 20 bp, synthetic construct
  source 1..20: mol_type = other DNA
aaatcacacatagactaaaa

SEQ ID NO: 106201 - DNA, 20 bp, synthetic construct
  source 1..20: mol_type = other DNA
aaaatcacacatagactaaa

SEQ ID NO: 106202 - DNA, 20 bp, synthetic construct
  source 1..20: mol_type = other DNA
taaaatcacacatagactaa

SEQ ID NO: 106203 - DNA, 20 bp, synthetic construct
  source 1..20: mol_type = other DNA
ataaaatcacacatagacta

SEQ ID NO: 106204 - DNA, 20 bp, synthetic construct
  source 1..20: mol_type = other DNA
tataaaatcacacatagact

SEQ ID NO: 106205 - DNA, 20 bp, synthetic construct
  source 1..20: mol_type = other DNA
ctataaaatcacacatagac

SEQ ID NO: 106206 - DNA, 20 bp, synthetic construct
  source 1..20: mol_type = other DNA
cctataaaatcacacataga

SEQ ID NO: 106207 - DNA, 20 bp, synthetic construct
  source 1..20: mol_type = other DNA
acctataaaatcacacatag

SEQ ID NO: 106208 - DNA, 20 bp, synthetic construct
  source 1..20: mol_type = other DNA
tacctataaaatcacacata

SEQ ID NO: 106209 - DNA, 20 bp, synthetic construct
  source 1..20: mol_type = other DNA
ttacctataaaatcacacat

SEQ ID NO: 106210 - DNA, 20 bp, synthetic construct
  source 1..20: mol_type = other DNA
tttacctataaaatcacaca

SEQ ID NO: 106211 - DNA, 20 bp, synthetic construct
  source 1..20: mol_type = other DNA
ctttacctataaaatcacac

SEQ ID NO: 106212 - DNA, 20 bp, synthetic construct
  source 1..20: mol_type = other DNA
actttacctataaaatcaca

SEQ ID NO: 106213 - DNA, 20 bp, synthetic construct
  source 1..20: mol_type = other DNA
cactttacctataaaatcac

SEQ ID NO: 106214 - DNA, 20 bp, synthetic construct
  source 1..20: mol_type = other DNA
acactttacctataaaatca

SEQ ID NO: 106215 - DNA, 20 bp, synthetic construct
  source 1..20: mol_type = other DNA
cacactttacctataaaatc

SEQ ID NO: 106216 - DNA, 20 bp, synthetic construct
  source 1..20: mol_type = other DNA
acacactttacctataaaat

SEQ ID NO: 106217 - DNA, 20 bp, synthetic construct
  source 1..20: mol_type = other DNA
aacacactttacctataaaa

SEQ ID NO: 106218 - DNA, 20 bp, synthetic construct
  source 1..20: mol_type = other DNA
aaacacactttacctataaa

SEQ ID NO: 106219 - DNA, 20 bp, synthetic construct
  source 1..20: mol_type = other DNA
gaaacacactttacctataa

SEQ ID NO: 106220 - DNA, 20 bp, synthetic construct
  source 1..20: mol_type = other DNA
agaaacacactttacctata

SEQ ID NO: 106221 - DNA, 20 bp, synthetic construct
  source 1..20: mol_type = other DNA
aagaaacacactttacctat

SEQ ID NO: 106222 - DNA, 20 bp, synthetic construct
  source 1..20: mol_type = other DNA
caagaaacacactttaccta

SEQ ID NO: 106223 - DNA, 20 bp, synthetic construct
  source 1..20: mol_type = other DNA
acaagaaacacactttacct

SEQ ID NO: 106224 - DNA, 20 bp, synthetic construct
  source 1..20: mol_type = other DNA
tacaagaaacacactttacc

SEQ ID NO: 106225 - DNA, 20 bp, synthetic construct
  source 1..20: mol_type = other DNA
ctacaagaaacacactttac

SEQ ID NO: 106226 - DNA, 20 bp, synthetic construct
  source 1..20: mol_type = other DNA
cctacaagaaacacacttta

SEQ ID NO: 106227 - DNA, 20 bp, synthetic construct
  source 1..20: mol_type = other DNA
gcctacaagaaacacacttt

SEQ ID NO: 106228 - DNA, 20 bp, synthetic construct
  source 1..20: mol_type = other DNA
tgcctacaagaaacacactt

SEQ ID NO: 106229 - DNA, 20 bp, synthetic construct
  source 1..20: mol_type = other DNA
ttgcctacaagaaacacact

SEQ ID NO: 106230 - DNA, 20 bp, synthetic construct
  source 1..20: mol_type = other DNA
attgcctacaagaaacacac

SEQ ID NO: 106231 - DNA, 20 bp, synthetic construct
  source 1..20: mol_type = other DNA
cattgcctacaagaaacaca

SEQ ID NO: 106232 - DNA, 20 bp, synthetic construct
  source 1..20: mol_type = other DNA
ccattgcctacaagaaacac

SEQ ID NO: 106233 - DNA, 20 bp, synthetic construct
  source 1..20: mol_type = other DNA
tccattgcctacaagaaaca

SEQ ID NO: 106234 - DNA, 20 bp, synthetic construct
  source 1..20: mol_type = other DNA
atccattgcctacaagaaac

SEQ ID NO: 106235 - DNA, 20 bp, synthetic construct
  source 1..20: mol_type = other DNA
gatccattgcctacaagaaa

SEQ ID NO: 106236 - DNA, 20 bp, synthetic construct
  source 1..20: mol_type = other DNA
agatccattgcctacaagaa

SEQ ID NO: 106237 - DNA, 20 bp, synthetic construct
  source 1..20: mol_type = other DNA
aagatccattgcctacaaga

SEQ ID NO: 106238 - DNA, 20 bp, synthetic construct
  source 1..20: mol_type = other DNA
aaagatccattgcctacaag

SEQ ID NO: 106239 - DNA, 20 bp, synthetic construct
  source 1..20: mol_type = other DNA
caaagatccattgcctacaa

SEQ ID NO: 106240 - DNA, 20 bp, synthetic construct
  source 1..20: mol_type = other DNA
ccaaagatccattgcctaca

SEQ ID NO: 106241 - DNA, 20 bp, synthetic construct
  source 1..20: mol_type = other DNA
accaaagatccattgcctac

SEQ ID NO: 106242 - DNA, 20 bp, synthetic construct
  source 1..20: mol_type = other DNA
aaccaaagatccattgccta

SEQ ID NO: 106243 - DNA, 20 bp, synthetic construct
  source 1..20: mol_type = other DNA
aaaccaaagatccattgcct

SEQ ID NO: 106244 - DNA, 20 bp, synthetic construct
  source 1..20: mol_type = other DNA
aaaaccaaagatccattgcc

SEQ ID NO: 106245 - DNA, 20 bp, synthetic construct
  source 1..20: mol_type = other DNA
aaaaaccaaagatccattgc

SEQ ID NO: 106246 - DNA, 20 bp, synthetic construct
  source 1..20: mol_type = other DNA
aaaaaaccaaagatccattg

SEQ ID NO: 106247 - DNA, 20 bp, synthetic construct
  source 1..20: mol_type = other DNA
aaaaaaaccaaagatccatt

SEQ ID NO: 106248 - DNA, 20 bp, synthetic construct
  source 1..20: mol_type = other DNA
aaaaaaaaccaaagatccat

SEQ ID NO: 106249 - DNA, 20 bp, synthetic construct
  source 1..20: mol_type = other DNA
aaaaaaaaaccaaagatcca

SEQ ID NO: 106250 - DNA, 20 bp, synthetic construct
  source 1..20: mol_type = other DNA
aaaaaaaaaaccaaagatcc

SEQ ID NO: 106251 - DNA, 20 bp, synthetic construct
  source 1..20: mol_type = other DNA
aaaaaaaaaaaccaaagatc

SEQ ID NO: 106252 - DNA, 20 bp, synthetic construct
  source 1..20: mol_type = other DNA
aaaaaaaaaaaaccaaagat

SEQ ID NO: 106253 - DNA, 20 bp, synthetic construct
  source 1..20: mol_type = other DNA
aaaaaaaaaaaaaccaaaga

SEQ ID NO: 106254 - DNA, 20 bp, synthetic construct
  source 1..20: mol_type = other DNA
aaaaaaaaaaaaaaccaaag

SEQ ID NO: 106255 - DNA, 20 bp, synthetic construct
  source 1..20: mol_type = other DNA
aaaaaaaaaaaaaaaccaaa

SEQ ID NO: 106256 - DNA, 20 bp, synthetic construct
  source 1..20: mol_type = other DNA
aaaaaaaaaaaaaaaaccaa

SEQ ID NO: 106257 - DNA, 20 bp, synthetic construct
  source 1..20: mol_type = other DNA
aaaaaaaaaaaaaaaaacca

SEQ ID NO: 106258 - DNA, 20 bp, synthetic construct
  source 1..20: mol_type = other DNA
aaaaaaaaaaaaaaaaaacc

SEQ ID NO: 106259 - DNA, 20 bp, synthetic construct
  source 1..20: mol_type = other DNA
aaaaaaaaaaaaaaaaaaac

SEQ ID NO: 106260 - DNA, 20 bp, synthetic construct
  source 1..20: mol_type = other DNA
caaaaaaaaaaaaaaaaaaa

SEQ ID NO: 106261 - DNA, 20 bp, synthetic construct
  source 1..20: mol_type = other DNA
tcaaaaaaaaaaaaaaaaaa

SEQ ID NO: 106262 - DNA, 20 bp, synthetic construct
  source 1..20: mol_type = other DNA
ctcaaaaaaaaaaaaaaaaa

SEQ ID NO: 106263 - DNA, 20 bp, synthetic construct
  source 1..20: mol_type = other DNA
tctcaaaaaaaaaaaaaaaa

SEQ ID NO: 106264 - DNA, 20 bp, synthetic construct
  source 1..20: mol_type = other DNA
gtctcaaaaaaaaaaaaaaa

SEQ ID NO: 106265 - DNA, 20 bp, synthetic construct
  source 1..20: mol_type = other DNA
tgtctcaaaaaaaaaaaaaa

SEQ ID NO: 106266 - DNA, 20 bp, synthetic construct
  source 1..20: mol_type = other DNA
ctgtctcaaaaaaaaaaaaa

SEQ ID NO: 106267 - DNA, 20 bp, synthetic construct
  source 1..20: mol_type = other DNA
tctgtctcaaaaaaaaaaaa

SEQ ID NO: 106268 - DNA, 20 bp, synthetic construct
  source 1..20: mol_type = other DNA
ctctgtctcaaaaaaaaaaa

SEQ ID NO: 106269 - DNA, 20 bp, synthetic construct
  source 1..20: mol_type = other DNA
actctgtctcaaaaaaaaaa

SEQ ID NO: 106270 - DNA, 20 bp, synthetic construct
  source 1..20: mol_type = other DNA
aactctgtctcaaaaaaaaa

SEQ ID NO: 106271 - DNA, 20 bp, synthetic construct
  source 1..20: mol_type = other DNA
aaactctgtctcaaaaaaaa

SEQ ID NO: 106272 - DNA, 20 bp, synthetic construct
  source 1..20: mol_type = other DNA
aaaactctgtctcaaaaaaa

SEQ ID NO: 106273 - DNA, 20 bp, synthetic construct
  source 1..20: mol_type = other DNA
caaaactctgtctcaaaaaa

SEQ ID NO: 106274 - DNA, 20 bp, synthetic construct
  source 1..20: mol_type = other DNA
gcaaaactctgtctcaaaaa

SEQ ID NO: 106275 - DNA, 20 bp, synthetic construct
  source 1..20: mol_type = other DNA
agcaaaactctgtctcaaaa

SEQ ID NO: 106276 - DNA, 20 bp, synthetic construct
  source 1..20: mol_type = other DNA
tagcaaaactctgtctcaaa

SEQ ID NO: 106277 - DNA, 20 bp, synthetic construct
  source 1..20: mol_type = other DNA
atagcaaaactctgtctcaa

SEQ ID NO: 106278 - DNA, 20 bp, synthetic construct
  source 1..20: mol_type = other DNA
aatagcaaaactctgtctca

SEQ ID NO: 106279 - DNA, 20 bp, synthetic construct
  source 1..20: mol_type = other DNA
caatagcaaaactctgtctc

SEQ ID NO: 106280 - DNA, 20 bp, synthetic construct
  source 1..20: mol_type = other DNA
acaatagcaaaactctgtct

SEQ ID NO: 106281 - DNA, 20 bp, synthetic construct
  source 1..20: mol_type = other DNA
aacaatagcaaaactctgtc

SEQ ID NO: 106282 - DNA, 20 bp, synthetic construct
  source 1..20: mol_type = other DNA
caacaatagcaaaactctgt

SEQ ID NO: 106283 - DNA, 20 bp, synthetic construct
  source 1..20: mol_type = other DNA
gcaacaatagcaaaactctg

SEQ ID NO: 106284 - DNA, 20 bp, synthetic construct
  source 1..20: mol_type = other DNA
ggcaacaatagcaaaactct

SEQ ID NO: 106285 - DNA, 20 bp, synthetic construct
  source 1..20: mol_type = other DNA
gggcaacaatagcaaaactc

SEQ ID NO: 106286 - DNA, 20 bp, synthetic construct
  source 1..20: mol_type = other DNA
tgggcaacaatagcaaaact

SEQ ID NO: 106287 - DNA, 20 bp, synthetic construct
  source 1..20: mol_type = other DNA
ctgggcaacaatagcaaaac

SEQ ID NO: 106288 - DNA, 20 bp, synthetic construct
  source 1..20: mol_type = other DNA
cctgggcaacaatagcaaaa

SEQ ID NO: 106289 - DNA, 20 bp, synthetic construct
  source 1..20: mol_type = other DNA
gcctgggcaacaatagcaaa

SEQ ID NO: 106290 - DNA, 20 bp, synthetic construct
  source 1..20: mol_type = other DNA
agcctgggcaacaatagcaa

SEQ ID NO: 106291 - DNA, 20 bp, synthetic construct
  source 1..20: mol_type = other DNA
cagcctgggcaacaatagca

SEQ ID NO: 106292 - DNA, 20 bp, synthetic construct
  source 1..20: mol_type = other DNA
ccagcctgggcaacaatagc

SEQ ID NO: 106293 - DNA, 20 bp, synthetic construct
  source 1..20: mol_type = other DNA
tccagcctgggcaacaatag

SEQ ID NO: 106294 - DNA, 20 bp, synthetic construct
  source 1..20: mol_type = other DNA
ctccagcctgggcaacaata

SEQ ID NO: 106295 - DNA, 20 bp, synthetic construct
  source 1..20: mol_type = other DNA
cctccagcctgggcaacaat

SEQ ID NO: 106296 - DNA, 20 bp, synthetic construct
  source 1..20: mol_type = other DNA
ccctccagcctgggcaacaa

SEQ ID NO: 106297 - DNA, 20 bp, synthetic construct
  source 1..20: mol_type = other DNA
gccctccagcctgggcaaca

SEQ ID NO: 106298 - DNA, 20 bp, synthetic construct
  source 1..20: mol_type = other DNA
tgccctccagcctgggcaac

SEQ ID NO: 106299 - DNA, 20 bp, synthetic construct
  source 1..20: mol_type = other DNA
ttgccctccagcctgggcaa

SEQ ID NO: 106300 - DNA, 20 bp, synthetic construct
  source 1..20: mol_type = other DNA
attgccctccagcctgggca

SEQ ID NO: 106301 - DNA, 20 bp, synthetic construct
  source 1..20: mol_type = other DNA
cattgccctccagcctgggc

SEQ ID NO: 106302 - DNA, 20 bp, synthetic construct
  source 1..20: mol_type = other DNA
ccattgccctccagcctggg

SEQ ID NO: 106303 - DNA, 20 bp, synthetic construct
  source 1..20: mol_type = other DNA
gccattgccctccagcctgg

SEQ ID NO: 106304 - DNA, 20 bp, synthetic construct
  source 1..20: mol_type = other DNA
cgccattgccctccagcctg

SEQ ID NO: 106305 - DNA, 20 bp, synthetic construct
  source 1..20: mol_type = other DNA
gcgccattgccctccagcct

SEQ ID NO: 106306 - DNA, 20 bp, synthetic construct
  source 1..20: mol_type = other DNA
agcgccattgccctccagcc

SEQ ID NO: 106307 - DNA, 20 bp, synthetic construct
  source 1..20: mol_type = other DNA
tagcgccattgccctccagc

SEQ ID NO: 106308 - DNA, 20 bp, synthetic construct
  source 1..20: mol_type = other DNA
atagcgccattgccctccag

SEQ ID NO: 106309 - DNA, 20 bp, synthetic construct
  source 1..20: mol_type = other DNA
gatagcgccattgccctcca

SEQ ID NO: 106310 - DNA, 20 bp, synthetic construct
  source 1..20: mol_type = other DNA
agatagcgccattgccctcc

SEQ ID NO: 106311 - DNA, 20 bp, synthetic construct
  source 1..20: mol_type = other DNA
gagatagcgccattgccctc

SEQ ID NO: 106312 - DNA, 20 bp, synthetic construct
  source 1..20: mol_type = other DNA
tgagatagcgccattgccct

SEQ ID NO: 106313 - DNA, 20 bp, synthetic construct
  source 1..20: mol_type = other DNA
ctgagatagcgccattgccc

SEQ ID NO: 106314 - DNA, 20 bp, synthetic construct
  source 1..20: mol_type = other DNA
gctgagatagcgccattgcc

SEQ ID NO: 106315 - DNA, 20 bp, synthetic construct
  source 1..20: mol_type = other DNA
agctgagatagcgccattgc

SEQ ID NO: 106316 - DNA, 20 bp, synthetic construct
  source 1..20: mol_type = other DNA
gagctgagatagcgccattg

SEQ ID NO: 106317 - DNA, 20 bp, synthetic construct
  source 1..20: mol_type = other DNA
tgagctgagatagcgccatt

SEQ ID NO: 106318 - DNA, 20 bp, synthetic construct
  source 1..20: mol_type = other DNA
gtgagctgagatagcgccat

SEQ ID NO: 106319 - DNA, 20 bp, synthetic construct
  source 1..20: mol_type = other DNA
agtgagctgagatagcgcca

SEQ ID NO: 106320 - DNA, 20 bp, synthetic construct
  source 1..20: mol_type = other DNA
cagtgagctgagatagcgcc

SEQ ID NO: 106321 - DNA, 20 bp, synthetic construct
  source 1..20: mol_type = other DNA
gcagtgagctgagatagcgc

SEQ ID NO: 106322 - DNA, 20 bp, synthetic construct
  source 1..20: mol_type = other DNA
tgcagtgagctgagatagcg

SEQ ID NO: 106323 - DNA, 20 bp, synthetic construct
  source 1..20: mol_type = other DNA
ttgcagtgagctgagatagc

SEQ ID NO: 106324 - DNA, 20 bp, synthetic construct
  source 1..20: mol_type = other DNA
gttgcagtgagctgagatag

SEQ ID NO: 106325 - DNA, 20 bp, synthetic construct
  source 1..20: mol_type = other DNA
ggttgcagtgagctgagata

SEQ ID NO: 106326 - DNA, 20 bp, synthetic construct
  source 1..20: mol_type = other DNA
aggttgcagtgagctgagat

SEQ ID NO: 106327 - DNA, 20 bp, synthetic construct
  source 1..20: mol_type = other DNA
gaggttgcagtgagctgaga

SEQ ID NO: 106328 - DNA, 20 bp, synthetic construct
  source 1..20: mol_type = other DNA
ggaggttgcagtgagctgag

SEQ ID NO: 106329 - DNA, 20 bp, synthetic construct
  source 1..20: mol_type = other DNA
cggaggttgcagtgagctga

SEQ ID NO: 106330 - DNA, 20 bp, synthetic construct
  source 1..20: mol_type = other DNA
gcggaggttgcagtgagctg

SEQ ID NO: 106331 - DNA, 20 bp, synthetic construct
  source 1..20: mol_type = other DNA
ggcggaggttgcagtgagct

SEQ ID NO: 106332 - DNA, 20 bp, synthetic construct
  source 1..20: mol_type = other DNA
aggcggaggttgcagtgagc

SEQ ID NO: 106333 - DNA, 20 bp, synthetic construct
  source 1..20: mol_type = other DNA
gaggcggaggttgcagtgag

SEQ ID NO: 106334 - DNA, 20 bp, synthetic construct
  source 1..20: mol_type = other DNA
ggaggcggaggttgcagtga

SEQ ID NO: 106335 - DNA, 20 bp, synthetic construct
  source 1..20: mol_type = other DNA
aggaggcggaggttgcagtg

SEQ ID NO: 106336 - DNA, 20 bp, synthetic construct
  source 1..20: mol_type = other DNA
caggaggcggaggttgcagt

SEQ ID NO: 106337 - DNA, 20 bp, synthetic construct
  source 1..20: mol_type = other DNA
tcaggaggcggaggttgcag

SEQ ID NO: 106338 - DNA, 20 bp, synthetic construct
  source 1..20: mol_type = other DNA
ctcaggaggcggaggttgca

SEQ ID NO: 106339 - DNA, 20 bp, synthetic construct
  source 1..20: mol_type = other DNA
actcaggaggcggaggttgc

SEQ ID NO: 106340 - DNA, 20 bp, synthetic construct
  source 1..20: mol_type = other DNA
aactcaggaggcggaggttg

SEQ ID NO: 106341 - DNA, 20 bp, synthetic construct
  source 1..20: mol_type = other DNA
gaactcaggaggcggaggtt

SEQ ID NO: 106342 - DNA, 20 bp, synthetic construct
  source 1..20: mol_type = other DNA
tgaactcaggaggcggaggt

SEQ ID NO: 106343 - DNA, 20 bp, synthetic construct
  source 1..20: mol_type = other DNA
ttgaactcaggaggcggagg

SEQ ID NO: 106344 - DNA, 20 bp, synthetic construct
  source 1..20: mol_type = other DNA
cttgaactcaggaggcggag

SEQ ID NO: 106345 - DNA, 20 bp, synthetic construct
  source 1..20: mol_type = other DNA
gcttgaactcaggaggcgga

SEQ ID NO: 106346 - DNA, 20 bp, synthetic construct
  source 1..20: mol_type = other DNA
cgcttgaactcaggaggcgg

SEQ ID NO: 106347 - DNA, 20 bp, synthetic construct
  source 1..20: mol_type = other DNA
tcgcttgaactcaggaggcg

SEQ ID NO: 106348 - DNA, 20 bp, synthetic construct
  source 1..20: mol_type = other DNA
atcgcttgaactcaggaggc

SEQ ID NO: 106349 - DNA, 20 bp, synthetic construct
  source 1..20: mol_type = other DNA
aatcgcttgaactcaggagg

SEQ ID NO: 106350 - DNA, 20 bp, synthetic construct
  source 1..20: mol_type = other DNA
gaatcgcttgaactcaggag

SEQ ID NO: 106351 - DNA, 20 bp, synthetic construct
  source 1..20: mol_type = other DNA
agaatcgcttgaactcagga

SEQ ID NO: 106352 - DNA, 20 bp, synthetic construct
  source 1..20: mol_type = other DNA
gagaatcgcttgaactcagg

SEQ ID NO: 106353 - DNA, 20 bp, synthetic construct
  source 1..20: mol_type = other DNA
ggagaatcgcttgaactcag

SEQ ID NO: 106354 - DNA, 20 bp, synthetic construct
  source 1..20: mol_type = other DNA
aggagaatcgcttgaactca

SEQ ID NO: 106355 - DNA, 20 bp, synthetic construct
  source 1..20: mol_type = other DNA
caggagaatcgcttgaactc

SEQ ID NO: 106356 - DNA, 20 bp, synthetic construct
  source 1..20: mol_type = other DNA
gcaggagaatcgcttgaact

SEQ ID NO: 106357 - DNA, 20 bp, synthetic construct
  source 1..20: mol_type = other DNA
ggcaggagaatcgcttgaac

SEQ ID NO: 106358 - DNA, 20 bp, synthetic construct
  source 1..20: mol_type = other DNA
aggcaggagaatcgcttgaa

SEQ ID NO: 106359 - DNA, 20 bp, synthetic construct
  source 1..20: mol_type = other DNA
gaggcaggagaatcgcttga

SEQ ID NO: 106360 - DNA, 20 bp, synthetic construct
  source 1..20: mol_type = other DNA
tgaggcaggagaatcgcttg

SEQ ID NO: 106361 - DNA, 20 bp, synthetic construct
  source 1..20: mol_type = other DNA
ctgaggcaggagaatcgctt

SEQ ID NO: 106362 - DNA, 20 bp, synthetic construct
  source 1..20: mol_type = other DNA
gctgaggcaggagaatcgct

SEQ ID NO: 106363 - DNA, 20 bp, synthetic construct
  source 1..20: mol_type = other DNA
ggctgaggcaggagaatcgc

SEQ ID NO: 106364 - DNA, 20 bp, synthetic construct
  source 1..20: mol_type = other DNA
aggctgaggcaggagaatcg

SEQ ID NO: 106365 - DNA, 20 bp, synthetic construct
  source 1..20: mol_type = other DNA
gaggctgaggcaggagaatc

SEQ ID NO: 106366 - DNA, 20 bp, synthetic construct
  source 1..20: mol_type = other DNA
ggaggctgaggcaggagaat

SEQ ID NO: 106367 - DNA, 20 bp, synthetic construct
  source 1..20: mol_type = other DNA
gggaggctgaggcaggagaa

SEQ ID NO: 106368 - DNA, 20 bp, synthetic construct
  source 1..20: mol_type = other DNA
tgggaggctgaggcaggaga

SEQ ID NO: 106369 - DNA, 20 bp, synthetic construct
  source 1..20: mol_type = other DNA
ttgggaggctgaggcaggag

SEQ ID NO: 106370 - DNA, 20 bp, synthetic construct
  source 1..20: mol_type = other DNA
cttgggaggctgaggcagga

SEQ ID NO: 106371 - DNA, 20 bp, synthetic construct
  source 1..20: mol_type = other DNA
acttgggaggctgaggcagg

SEQ ID NO: 106372 - DNA, 20 bp, synthetic construct
  source 1..20: mol_type = other DNA
tacttgggaggctgaggcag

SEQ ID NO: 106373 - DNA, 20 bp, synthetic construct
  source 1..20: mol_type = other DNA
ctacttgggaggctgaggca

SEQ ID NO: 106374 - DNA, 20 bp, synthetic construct
  source 1..20: mol_type = other DNA
gctacttgggaggctgaggc

SEQ ID NO: 106375 - DNA, 20 bp, synthetic construct
  source 1..20: mol_type = other DNA
agctacttgggaggctgagg

SEQ ID NO: 106376 - DNA, 20 bp, synthetic construct
  source 1..20: mol_type = other DNA
cagctacttgggaggctgag

SEQ ID NO: 106377 - DNA, 20 bp, synthetic construct
  source 1..20: mol_type = other DNA
ccagctacttgggaggctga

SEQ ID NO: 106378 - DNA, 20 bp, synthetic construct
  source 1..20: mol_type = other DNA
cccagctacttgggaggctg

SEQ ID NO: 106379 - DNA, 20 bp, synthetic construct
  source 1..20: mol_type = other DNA
tcccagctacttgggaggct

SEQ ID NO: 106380 - DNA, 20 bp, synthetic construct
  source 1..20: mol_type = other DNA
atcccagctacttgggaggc

SEQ ID NO: 106381 - DNA, 20 bp, synthetic construct
  source 1..20: mol_type = other DNA
aatcccagctacttgggagg

SEQ ID NO: 106382 - DNA, 20 bp, synthetic construct
  source 1..20: mol_type = other DNA
taatcccagctacttgggag

SEQ ID NO: 106383 - DNA, 20 bp, synthetic construct
  source 1..20: mol_type = other DNA
gtaatcccagctacttggga

SEQ ID NO: 106384 - DNA, 20 bp, synthetic construct
  source 1..20: mol_type = other DNA
tgtaatcccagctacttggg

SEQ ID NO: 106385 - DNA, 20 bp, synthetic construct
  source 1..20: mol_type = other DNA
ctgtaatcccagctacttgg

SEQ ID NO: 106386 - DNA, 20 bp, synthetic construct
  source 1..20: mol_type = other DNA
cctgtaatcccagctacttg

SEQ ID NO: 106387 - DNA, 20 bp, synthetic construct
  source 1..20: mol_type = other DNA
gcctgtaatcccagctactt

SEQ ID NO: 106388 - DNA, 20 bp, synthetic construct
  source 1..20: mol_type = other DNA
cgcctgtaatcccagctact

SEQ ID NO: 106389 - DNA, 20 bp, synthetic construct
  source 1..20: mol_type = other DNA
gcgcctgtaatcccagctac

SEQ ID NO: 106390 - DNA, 20 bp, synthetic construct
  source 1..20: mol_type = other DNA
ggcgcctgtaatcccagcta

SEQ ID NO: 106391 - DNA, 20 bp, synthetic construct
  source 1..20: mol_type = other DNA
aggcgcctgtaatcccagct

SEQ ID NO: 106392 - DNA, 20 bp, synthetic construct
  source 1..20: mol_type = other DNA
caggcgcctgtaatcccagc

SEQ ID NO: 106393 - DNA, 20 bp, synthetic construct
  source 1..20: mol_type = other DNA
gcaggcgcctgtaatcccag

SEQ ID NO: 106394 - DNA, 20 bp, synthetic construct
  source 1..20: mol_type = other DNA
ggcaggcgcctgtaatccca

SEQ ID NO: 106395 - DNA, 20 bp, synthetic construct
  source 1..20: mol_type = other DNA
tggcaggcgcctgtaatccc

SEQ ID NO: 106396 - DNA, 20 bp, synthetic construct
  source 1..20: mol_type = other DNA
gtggcaggcgcctgtaatcc

SEQ ID NO: 106397 - DNA, 20 bp, synthetic construct
  source 1..20: mol_type = other DNA
ggtggcaggcgcctgtaatc

SEQ ID NO: 106398 - DNA, 20 bp, synthetic construct
  source 1..20: mol_type = other DNA
tggtggcaggcgcctgtaat

SEQ ID NO: 106399 - DNA, 20 bp, synthetic construct
  source 1..20: mol_type = other DNA
ttggtggcaggcgcctgtaa

SEQ ID NO: 106400 - DNA, 20 bp, synthetic construct
  source 1..20: mol_type = other DNA
cttggtggcaggcgcctgta

SEQ ID NO: 106401 - DNA, 20 bp, synthetic construct
  source 1..20: mol_type = other DNA
gcttggtggcaggcgcctgt

SEQ ID NO: 106402 - DNA, 20 bp, synthetic construct
  source 1..20: mol_type = other DNA
ggcttggtggcaggcgcctg

SEQ ID NO: 106403 - DNA, 20 bp, synthetic construct
  source 1..20: mol_type = other DNA
gggcttggtggcaggcgcct

SEQ ID NO: 106404 - DNA, 20 bp, synthetic construct
  source 1..20: mol_type = other DNA
tgggcttggtggcaggcgcc

SEQ ID NO: 106405 - DNA, 20 bp, synthetic construct
  source 1..20: mol_type = other DNA
ctgggcttggtggcaggcgc

SEQ ID NO: 106406 - DNA, 20 bp, synthetic construct
  source 1..20: mol_type = other DNA
gctgggcttggtggcaggcg

SEQ ID NO: 106407 - DNA, 20 bp, synthetic construct
  source 1..20: mol_type = other DNA
agctgggcttggtggcaggc

SEQ ID NO: 106408 - DNA, 20 bp, synthetic construct
  source 1..20: mol_type = other DNA
tagctgggcttggtggcagg

SEQ ID NO: 106409 - DNA, 20 bp, synthetic construct
  source 1..20: mol_type = other DNA
ttagctgggcttggtggcag

SEQ ID NO: 106410 - DNA, 20 bp, synthetic construct
  source 1..20: mol_type = other DNA
tttagctgggcttggtggca

SEQ ID NO: 106411 - DNA, 20 bp, synthetic construct
  source 1..20: mol_type = other DNA
atttagctgggcttggtggc

SEQ ID NO: 106412 - DNA, 20 bp, synthetic construct
  source 1..20: mol_type = other DNA
aatttagctgggcttggtgg

SEQ ID NO: 106413 - DNA, 20 bp, synthetic construct
  source 1..20: mol_type = other DNA
aaatttagctgggcttggtg

SEQ ID NO: 106414 - DNA, 20 bp, synthetic construct
  source 1..20: mol_type = other DNA
aaaatttagctgggcttggt

SEQ ID NO: 106415 - DNA, 20 bp, synthetic construct
  source 1..20: mol_type = other DNA
aaaaatttagctgggcttgg

SEQ ID NO: 106416 - DNA, 20 bp, synthetic construct
  source 1..20: mol_type = other DNA
aaaaaatttagctgggcttg

SEQ ID NO: 106417 - DNA, 20 bp, synthetic construct
  source 1..20: mol_type = other DNA
caaaaaatttagctgggctt

SEQ ID NO: 106418 - DNA, 20 bp, synthetic construct
  source 1..20: mol_type = other DNA
acaaaaaatttagctgggct

SEQ ID NO: 106419 - DNA, 20 bp, synthetic construct
  source 1..20: mol_type = other DNA
tacaaaaaatttagctgggc

SEQ ID NO: 106420 - DNA, 20 bp, synthetic construct
  source 1..20: mol_type = other DNA
atacaaaaaatttagctggg

SEQ ID NO: 106421 - DNA, 20 bp, synthetic construct
  source 1..20: mol_type = other DNA
aatacaaaaaatttagctgg

SEQ ID NO: 106422 - DNA, 20 bp, synthetic construct
  source 1..20: mol_type = other DNA
aaatacaaaaaatttagctg

SEQ ID NO: 106423 - DNA, 20 bp, synthetic construct
  source 1..20: mol_type = other DNA
aaaatacaaaaaatttagct

SEQ ID NO: 106424 - DNA, 20 bp, synthetic construct
  source 1..20: mol_type = other DNA
gaaaatacaaaaaatttagc

SEQ ID NO: 106425 - DNA, 20 bp, synthetic construct
  source 1..20: mol_type = other DNA
tgaaaatacaaaaaatttag

SEQ ID NO: 106426 - DNA, 20 bp, synthetic construct
  source 1..20: mol_type = other DNA
ctgaaaatacaaaaaattta

SEQ ID NO: 106427 - DNA, 20 bp, synthetic construct
  source 1..20: mol_type = other DNA
actgaaaatacaaaaaattt

SEQ ID NO: 106428 - DNA, 20 bp, synthetic construct
  source 1..20: mol_type = other DNA
tactgaaaatacaaaaaatt

SEQ ID NO: 106429 - DNA, 20 bp, synthetic construct
  source 1..20: mol_type = other DNA
ctactgaaaatacaaaaaat

SEQ ID NO: 106430 - DNA, 20 bp, synthetic construct
  source 1..20: mol_type = other DNA
tctactgaaaatacaaaaaa

SEQ ID NO: 106431 - DNA, 20 bp, synthetic construct
  source 1..20: mol_type = other DNA
ctctactgaaaatacaaaaa

SEQ ID NO: 106432 - DNA, 20 bp, synthetic construct
  source 1..20: mol_type = other DNA
tctctactgaaaatacaaaa

SEQ ID NO: 106433 - DNA, 20 bp, synthetic construct
  source 1..20: mol_type = other DNA
atctctactgaaaatacaaa

SEQ ID NO: 106434 - DNA, 20 bp, synthetic construct
  source 1..20: mol_type = other DNA
catctctactgaaaatacaa

SEQ ID NO: 106435 - DNA, 20 bp, synthetic construct
  source 1..20: mol_type = other DNA
ccatctctactgaaaataca

SEQ ID NO: 106436 - DNA, 20 bp, synthetic construct
  source 1..20: mol_type = other DNA
cccatctctactgaaaatac

SEQ ID NO: 106437 - DNA, 20 bp, synthetic construct
  source 1..20: mol_type = other DNA
ccccatctctactgaaaata

SEQ ID NO: 106438 - DNA, 20 bp, synthetic construct
  source 1..20: mol_type = other DNA
accccatctctactgaaaat

SEQ ID NO: 106439 - DNA, 20 bp, synthetic construct
  source 1..20: mol_type = other DNA
aaccccatctctactgaaaa

SEQ ID NO: 106440 - DNA, 20 bp, synthetic construct
  source 1..20: mol_type = other DNA
aaaccccatctctactgaaa

SEQ ID NO: 106441 - DNA, 20 bp, synthetic construct
  source 1..20: mol_type = other DNA
gaaaccccatctctactgaa

SEQ ID NO: 106442 - DNA, 20 bp, synthetic construct
  source 1..20: mol_type = other DNA
tgaaaccccatctctactga

SEQ ID NO: 106443 - DNA, 20 bp, synthetic construct
  source 1..20: mol_type = other DNA
ctgaaaccccatctctactg

SEQ ID NO: 106444 - DNA, 20 bp, synthetic construct
  source 1..20: mol_type = other DNA
actgaaaccccatctctact

SEQ ID NO: 106445 - DNA, 20 bp, synthetic construct
  source 1..20: mol_type = other DNA
tactgaaaccccatctctac

SEQ ID NO: 106446 - DNA, 20 bp, synthetic construct
  source 1..20: mol_type = other DNA
atactgaaaccccatctcta

SEQ ID NO: 106447 - DNA, 20 bp, synthetic construct
  source 1..20: mol_type = other DNA
catactgaaaccccatctct

SEQ ID NO: 106448 - DNA, 20 bp, synthetic construct
  source 1..20: mol_type = other DNA
acatactgaaaccccatctc

SEQ ID NO: 106449 - DNA, 20 bp, synthetic construct
  source 1..20: mol_type = other DNA
aacatactgaaaccccatct

SEQ ID NO: 106450 - DNA, 20 bp, synthetic construct
  source 1..20: mol_type = other DNA
gaacatactgaaaccccatc

SEQ ID NO: 106451 - DNA, 20 bp, synthetic construct
  source 1..20: mol_type = other DNA
cgaacatactgaaaccccat

SEQ ID NO: 106452 - DNA, 20 bp, synthetic construct
  source 1..20: mol_type = other DNA
acgaacatactgaaacccca

SEQ ID NO: 106453 - DNA, 20 bp, synthetic construct
  source 1..20: mol_type = other DNA
gacgaacatactgaaacccc

SEQ ID NO: 106454 - DNA, 20 bp, synthetic construct
  source 1..20: mol_type = other DNA
tgacgaacatactgaaaccc

SEQ ID NO: 106455 - DNA, 20 bp, synthetic construct
  source 1..20: mol_type = other DNA
ctgacgaacatactgaaacc

SEQ ID NO: 106456 - DNA, 20 bp, synthetic construct
  source 1..20: mol_type = other DNA
cctgacgaacatactgaaac

SEQ ID NO: 106457 - DNA, 20 bp, synthetic construct
  source 1..20: mol_type = other DNA
gcctgacgaacatactgaaa

SEQ ID NO: 106458 - DNA, 20 bp, synthetic construct
  source 1..20: mol_type = other DNA
agcctgacgaacatactgaa

SEQ ID NO: 106459 - DNA, 20 bp, synthetic construct
  source 1..20: mol_type = other DNA
cagcctgacgaacatactga

SEQ ID NO: 106460 - DNA, 20 bp, synthetic construct
  source 1..20: mol_type = other DNA
acagcctgacgaacatactg

SEQ ID NO: 106461 - DNA, 20 bp, synthetic construct
  source 1..20: mol_type = other DNA
aacagcctgacgaacatact

SEQ ID NO: 106462 - DNA, 20 bp, synthetic construct
  source 1..20: mol_type = other DNA
gaacagcctgacgaacatac

SEQ ID NO: 106463 - DNA, 20 bp, synthetic construct
  source 1..20: mol_type = other DNA
agaacagcctgacgaacata

SEQ ID NO: 106464 - DNA, 20 bp, synthetic construct
  source 1..20: mol_type = other DNA
aagaacagcctgacgaacat

SEQ ID NO: 106465 - DNA, 20 bp, synthetic construct
  source 1..20: mol_type = other DNA
caagaacagcctgacgaaca

SEQ ID NO: 106466 - DNA, 20 bp, synthetic construct
  source 1..20: mol_type = other DNA
tcaagaacagcctgacgaac

SEQ ID NO: 106467 - DNA, 20 bp, synthetic construct
  source 1..20: mol_type = other DNA
ttcaagaacagcctgacgaa

SEQ ID NO: 106468 - DNA, 20 bp, synthetic construct
  source 1..20: mol_type = other DNA
gttcaagaacagcctgacga

SEQ ID NO: 106469 - DNA, 20 bp, synthetic construct
  source 1..20: mol_type = other DNA
agttcaagaacagcctgacg

SEQ ID NO: 106470 - DNA, 20 bp, synthetic construct
  source 1..20: mol_type = other DNA
gagttcaagaacagcctgac

SEQ ID NO: 106471 - DNA, 20 bp, synthetic construct
  source 1..20: mol_type = other DNA
ggagttcaagaacagcctga

SEQ ID NO: 106472 - DNA, 20 bp, synthetic construct
  source 1..20: mol_type = other DNA
aggagttcaagaacagcctg

SEQ ID NO: 106473 - DNA, 20 bp, synthetic construct
  source 1..20: mol_type = other DNA
taggagttcaagaacagcct

SEQ ID NO: 106474 - DNA, 20 bp, synthetic construct
  source 1..20: mol_type = other DNA
ttaggagttcaagaacagcc

SEQ ID NO: 106475 - DNA, 20 bp, synthetic construct
  source 1..20: mol_type = other DNA
gttaggagttcaagaacagc

SEQ ID NO: 106476 - DNA, 20 bp, synthetic construct
  source 1..20: mol_type = other DNA
ggttaggagttcaagaacag

SEQ ID NO: 106477 - DNA, 20 bp, synthetic construct
  source 1..20: mol_type = other DNA
aggttaggagttcaagaaca

SEQ ID NO: 106478 - DNA, 20 bp, synthetic construct
  source 1..20: mol_type = other DNA
gaggttaggagttcaagaac

SEQ ID NO: 106479 - DNA, 20 bp, synthetic construct
  source 1..20: mol_type = other DNA
tgaggttaggagttcaagaa

SEQ ID NO: 106480 - DNA, 20 bp, synthetic construct
  source 1..20: mol_type = other DNA
ctgaggttaggagttcaaga

SEQ ID NO: 106481 - DNA, 20 bp, synthetic construct
  source 1..20: mol_type = other DNA
cctgaggttaggagttcaag

SEQ ID NO: 106482 - DNA, 20 bp, synthetic construct
  source 1..20: mol_type = other DNA
acctgaggttaggagttcaa

SEQ ID NO: 106483 - DNA, 20 bp, synthetic construct
  source 1..20: mol_type = other DNA
cacctgaggttaggagttca

SEQ ID NO: 106484 - DNA, 20 bp, synthetic construct
  source 1..20: mol_type = other DNA
tcacctgaggttaggagttc

SEQ ID NO: 106485 - DNA, 20 bp, synthetic construct
  source 1..20: mol_type = other DNA
atcacctgaggttaggagtt

SEQ ID NO: 106486 - DNA, 20 bp, synthetic construct
  source 1..20: mol_type = other DNA
aatcacctgaggttaggagt

SEQ ID NO: 106487 - DNA, 20 bp, synthetic construct
  source 1..20: mol_type = other DNA
aaatcacctgaggttaggag

SEQ ID NO: 106488 - DNA, 20 bp, synthetic construct
  source 1..20: mol_type = other DNA
caaatcacctgaggttagga

SEQ ID NO: 106489 - DNA, 20 bp, synthetic construct
  source 1..20: mol_type = other DNA
gcaaatcacctgaggttagg

SEQ ID NO: 106490 - DNA, 20 bp, synthetic construct
  source 1..20: mol_type = other DNA
ggcaaatcacctgaggttag

SEQ ID NO: 106491 - DNA, 20 bp, synthetic construct
  source 1..20: mol_type = other DNA
aggcaaatcacctgaggtta

SEQ ID NO: 106492 - DNA, 20 bp, synthetic construct
  source 1..20: mol_type = other DNA
caggcaaatcacctgaggtt

SEQ ID NO: 106493 - DNA, 20 bp, synthetic construct
  source 1..20: mol_type = other DNA
gcaggcaaatcacctgaggt

SEQ ID NO: 106494 - DNA, 20 bp, synthetic construct
  source 1..20: mol_type = other DNA
ggcaggcaaatcacctgagg

SEQ ID NO: 106495 - DNA, 20 bp, synthetic construct
  source 1..20: mol_type = other DNA
aggcaggcaaatcacctgag

SEQ ID NO: 106496 - DNA, 20 bp, synthetic construct
  source 1..20: mol_type = other DNA
aaggcaggcaaatcacctga

SEQ ID NO: 106497 - DNA, 20 bp, synthetic construct
  source 1..20: mol_type = other DNA
caaggcaggcaaatcacctg

SEQ ID NO: 106498 - DNA, 20 bp, synthetic construct
  source 1..20: mol_type = other DNA
ccaaggcaggcaaatcacct

SEQ ID NO: 106499 - DNA, 20 bp, synthetic construct
  source 1..20: mol_type = other DNA
gccaaggcaggcaaatcacc

SEQ ID NO: 106500 - DNA, 20 bp, synthetic construct
  source 1..20: mol_type = other DNA
ggccaaggcaggcaaatcac

SEQ ID NO: 106501 - DNA, 20 bp, synthetic construct
  source 1..20: mol_type = other DNA
aggccaaggcaggcaaatca

SEQ ID NO: 106502 - DNA, 20 bp, synthetic construct
  source 1..20: mol_type = other DNA
gaggccaaggcaggcaaatc

SEQ ID NO: 106503 - DNA, 20 bp, synthetic construct
  source 1..20: mol_type = other DNA
ggaggccaaggcaggcaaat

SEQ ID NO: 106504 - DNA, 20 bp, synthetic construct
  source 1..20: mol_type = other DNA
gggaggccaaggcaggcaaa

SEQ ID NO: 106505 - DNA, 20 bp, synthetic construct
  source 1..20: mol_type = other DNA
tgggaggccaaggcaggcaa

SEQ ID NO: 106506 - DNA, 20 bp, synthetic construct
  source 1..20: mol_type = other DNA
ttgggaggccaaggcaggca

SEQ ID NO: 106507 - DNA, 20 bp, synthetic construct
  source 1..20: mol_type = other DNA
tttgggaggccaaggcaggc

SEQ ID NO: 106508 - DNA, 20 bp, synthetic construct
  source 1..20: mol_type = other DNA
ctttgggaggccaaggcagg

SEQ ID NO: 106509 - DNA, 20 bp, synthetic construct
  source 1..20: mol_type = other DNA
actttgggaggccaaggcag

SEQ ID NO: 106510 - DNA, 20 bp, synthetic construct
  source 1..20: mol_type = other DNA
gactttgggaggccaaggca

SEQ ID NO: 106511 - DNA, 20 bp, synthetic construct
  source 1..20: mol_type = other DNA
ggactttgggaggccaaggc

SEQ ID NO: 106512 - DNA, 20 bp, synthetic construct
  source 1..20: mol_type = other DNA
aggactttgggaggccaagg

SEQ ID NO: 106513 - DNA, 20 bp, synthetic construct
  source 1..20: mol_type = other DNA
caggactttgggaggccaag

SEQ ID NO: 106514 - DNA, 20 bp, synthetic construct
  source 1..20: mol_type = other DNA
ccaggactttgggaggccaa

SEQ ID NO: 106515 - DNA, 20 bp, synthetic construct
  source 1..20: mol_type = other DNA
cccaggactttgggaggcca

SEQ ID NO: 106516 - DNA, 20 bp, synthetic construct
  source 1..20: mol_type = other DNA
tcccaggactttgggaggcc

SEQ ID NO: 106517 - DNA, 20 bp, synthetic construct
  source 1..20: mol_type = other DNA
atcccaggactttgggaggc

SEQ ID NO: 106518 - DNA, 20 bp, synthetic construct
  source 1..20: mol_type = other DNA
aatcccaggactttgggagg

SEQ ID NO: 106519 - DNA, 20 bp, synthetic construct
  source 1..20: mol_type = other DNA
taatcccaggactttgggag

SEQ ID NO: 106520 - DNA, 20 bp, synthetic construct
  source 1..20: mol_type = other DNA
gtaatcccaggactttggga

SEQ ID NO: 106521 - DNA, 20 bp, synthetic construct
  source 1..20: mol_type = other DNA
tgtaatcccaggactttggg

SEQ ID NO: 106522 - DNA, 20 bp, synthetic construct
  source 1..20: mol_type = other DNA
ctgtaatcccaggactttgg

SEQ ID NO: 106523 - DNA, 20 bp, synthetic construct
  source 1..20: mol_type = other DNA
cctgtaatcccaggactttg

SEQ ID NO: 106524 - DNA, 20 bp, synthetic construct
  source 1..20: mol_type = other DNA
gcctgtaatcccaggacttt

SEQ ID NO: 106525 - DNA, 20 bp, synthetic construct
  source 1..20: mol_type = other DNA
cgcctgtaatcccaggactt

SEQ ID NO: 106526 - DNA, 20 bp, synthetic construct
  source 1..20: mol_type = other DNA
acgcctgtaatcccaggact

SEQ ID NO: 106527 - DNA, 20 bp, synthetic construct
  source 1..20: mol_type = other DNA
cacgcctgtaatcccaggac

SEQ ID NO: 106528 - DNA, 20 bp, synthetic construct
  source 1..20: mol_type = other DNA
tcacgcctgtaatcccagga

SEQ ID NO: 106529 - DNA, 20 bp, synthetic construct
  source 1..20: mol_type = other DNA
ctcacgcctgtaatcccagg

SEQ ID NO: 106530 - DNA, 20 bp, synthetic construct
  source 1..20: mol_type = other DNA
gctcacgcctgtaatcccag

SEQ ID NO: 106531 - DNA, 20 bp, synthetic construct
  source 1..20: mol_type = other DNA
ggctcacgcctgtaatccca

SEQ ID NO: 106532 - DNA, 20 bp, synthetic construct
  source 1..20: mol_type = other DNA
tggctcacgcctgtaatccc

SEQ ID NO: 106533 - DNA, 20 bp, synthetic construct
  source 1..20: mol_type = other DNA
gtggctcacgcctgtaatcc

SEQ ID NO: 106534 - DNA, 20 bp, synthetic construct
  source 1..20: mol_type = other DNA
ggtggctcacgcctgtaatc

SEQ ID NO: 106535 - DNA, 20 bp, synthetic construct
  source 1..20: mol_type = other DNA
cggtggctcacgcctgtaat

SEQ ID NO: 106536 - DNA, 20 bp, synthetic construct
  source 1..20: mol_type = other DNA
gcggtggctcacgcctgtaa

SEQ ID NO: 106537 - DNA, 20 bp, synthetic construct
  source 1..20: mol_type = other DNA
tgcggtggctcacgcctgta

SEQ ID NO: 106538 - DNA, 20 bp, synthetic construct
  source 1..20: mol_type = other DNA
gtgcggtggctcacgcctgt

SEQ ID NO: 106539 - DNA, 20 bp, synthetic construct
  source 1..20: mol_type = other DNA
ggtgcggtggctcacgcctg

SEQ ID NO: 106540 - DNA, 20 bp, synthetic construct
  source 1..20: mol_type = other DNA
gggtgcggtggctcacgcct

SEQ ID NO: 106541 - DNA, 20 bp, synthetic construct
  source 1..20: mol_type = other DNA
tgggtgcggtggctcacgcc

SEQ ID NO: 106542 - DNA, 20 bp, synthetic construct
  source 1..20: mol_type = other DNA
ctgggtgcggtggctcacgc

SEQ ID NO: 106543 - DNA, 20 bp, synthetic construct
  source 1..20: mol_type = other DNA
gctgggtgcggtggctcacg

SEQ ID NO: 106544 - DNA, 20 bp, synthetic construct
  source 1..20: mol_type = other DNA
ggctgggtgcggtggctcac

SEQ ID NO: 106545 - DNA, 20 bp, synthetic construct
  source 1..20: mol_type = other DNA
aggctgggtgcggtggctca

SEQ ID NO: 106546 - DNA, 20 bp, synthetic construct
  source 1..20: mol_type = other DNA
aaggctgggtgcggtggctc

SEQ ID NO: 106547 - DNA, 20 bp, synthetic construct
  source 1..20: mol_type = other DNA
aaaggctgggtgcggtggct

SEQ ID NO: 106548 - DNA, 20 bp, synthetic construct
  source 1..20: mol_type = other DNA
aaaaggctgggtgcggtggc

SEQ ID NO: 106549 - DNA, 20 bp, synthetic construct
  source 1..20: mol_type = other DNA
aaaaaggctgggtgcggtgg

SEQ ID NO: 106550 - DNA, 20 bp, synthetic construct
  source 1..20: mol_type = other DNA
aaaaaaggctgggtgcggtg

SEQ ID NO: 106551 - DNA, 20 bp, synthetic construct
  source 1..20: mol_type = other DNA
aaaaaaaggctgggtgcggt

SEQ ID NO: 106552 - DNA, 20 bp, synthetic construct
  source 1..20: mol_type = other DNA
aaaaaaaaggctgggtgcgg

SEQ ID NO: 106553 - DNA, 20 bp, synthetic construct
  source 1..20: mol_type = other DNA
taaaaaaaaggctgggtgcg

SEQ ID NO: 106554 - DNA, 20 bp, synthetic construct
  source 1..20: mol_type = other DNA
ttaaaaaaaaggctgggtgc

SEQ ID NO: 106555 - DNA, 20 bp, synthetic construct
  source 1..20: mol_type = other DNA
tttaaaaaaaaggctgggtg

SEQ ID NO: 106556 - DNA, 20 bp, synthetic construct
  source 1..20: mol_type = other DNA
atttaaaaaaaaggctgggt

SEQ ID NO: 106557 - DNA, 20 bp, synthetic construct
  source 1..20: mol_type = other DNA
gatttaaaaaaaaggctggg

SEQ ID NO: 106558 - DNA, 20 bp, synthetic construct
  source 1..20: mol_type = other DNA
ggatttaaaaaaaaggctgg

SEQ ID NO: 106559 - DNA, 20 bp, synthetic construct
  source 1..20: mol_type = other DNA
tggatttaaaaaaaaggctg

SEQ ID NO: 106560 - DNA, 20 bp, synthetic construct
  source 1..20: mol_type = other DNA
atggatttaaaaaaaaggct

SEQ ID NO: 106561 - DNA, 20 bp, synthetic construct
  source 1..20: mol_type = other DNA
aatggatttaaaaaaaaggc

SEQ ID NO: 106562 - DNA, 20 bp, synthetic construct
  source 1..20: mol_type = other DNA
aaatggatttaaaaaaaagg

SEQ ID NO: 106563 - DNA, 20 bp, synthetic construct
  source 1..20: mol_type = other DNA
taaatggatttaaaaaaaag

SEQ ID NO: 106564 - DNA, 20 bp, synthetic construct
  source 1..20: mol_type = other DNA
ctaaatggatttaaaaaaaa

SEQ ID NO: 106565 - DNA, 20 bp, synthetic construct
  source 1..20: mol_type = other DNA
gctaaatggatttaaaaaaa

SEQ ID NO: 106566 - DNA, 20 bp, synthetic construct
  source 1..20: mol_type = other DNA
ggctaaatggatttaaaaaa

SEQ ID NO: 106567 - DNA, 20 bp, synthetic construct
  source 1..20: mol_type = other DNA
tggctaaatggatttaaaaa

SEQ ID NO: 106568 - DNA, 20 bp, synthetic construct
  source 1..20: mol_type = other DNA
gtggctaaatggatttaaaa

SEQ ID NO: 106569 - DNA, 20 bp, synthetic construct
  source 1..20: mol_type = other DNA
agtggctaaatggatttaaa

SEQ ID NO: 106570 - DNA, 20 bp, synthetic construct
  source 1..20: mol_type = other DNA
gagtggctaaatggatttaa

SEQ ID NO: 106571 - DNA, 20 bp, synthetic construct
  source 1..20: mol_type = other DNA
agagtggctaaatggattta

SEQ ID NO: 106572 - DNA, 20 bp, synthetic construct
  source 1..20: mol_type = other DNA
cagagtggctaaatggattt

SEQ ID NO: 106573 - DNA, 20 bp, synthetic construct
  source 1..20: mol_type = other DNA
acagagtggctaaatggatt

SEQ ID NO: 106574 - DNA, 20 bp, synthetic construct
  source 1..20: mol_type = other DNA
tacagagtggctaaatggat

SEQ ID NO: 106575 - DNA, 20 bp, synthetic construct
  source 1..20: mol_type = other DNA
atacagagtggctaaatgga

SEQ ID NO: 106576 - DNA, 20 bp, synthetic construct
  source 1..20: mol_type = other DNA
gatacagagtggctaaatgg

SEQ ID NO: 106577 - DNA, 20 bp, synthetic construct
  source 1..20: mol_type = other DNA
agatacagagtggctaaatg

SEQ ID NO: 106578 - DNA, 20 bp, synthetic construct
  source 1..20: mol_type = other DNA
aagatacagagtggctaaat

SEQ ID NO: 106579 - DNA, 20 bp, synthetic construct
  source 1..20: mol_type = other DNA
aaagatacagagtggctaaa

SEQ ID NO: 106580 - DNA, 20 bp, synthetic construct
  source 1..20: mol_type = other DNA
aaaagatacagagtggctaa

SEQ ID NO: 106581 - DNA, 20 bp, synthetic construct
  source 1..20: mol_type = other DNA
caaaagatacagagtggcta

SEQ ID NO: 106582 - DNA, 20 bp, synthetic construct
  source 1..20: mol_type = other DNA
tcaaaagatacagagtggct

SEQ ID NO: 106583 - DNA, 20 bp, synthetic construct
  source 1..20: mol_type = other DNA
atcaaaagatacagagtggc

SEQ ID NO: 106584 - DNA, 20 bp, synthetic construct
  source 1..20: mol_type = other DNA
aatcaaaagatacagagtgg

SEQ ID NO: 106585 - DNA, 20 bp, synthetic construct
  source 1..20: mol_type = other DNA
caatcaaaagatacagagtg

SEQ ID NO: 106586 - DNA, 20 bp, synthetic construct
  source 1..20: mol_type = other DNA
ccaatcaaaagatacagagt

SEQ ID NO: 106587 - DNA, 20 bp, synthetic construct
  source 1..20: mol_type = other DNA
tccaatcaaaagatacagag

SEQ ID NO: 106588 - DNA, 20 bp, synthetic construct
  source 1..20: mol_type = other DNA
ctccaatcaaaagatacaga

SEQ ID NO: 106589 - DNA, 20 bp, synthetic construct
  source 1..20: mol_type = other DNA
tctccaatcaaaagatacag

SEQ ID NO: 106590 - DNA, 20 bp, synthetic construct
  source 1..20: mol_type = other DNA
ctctccaatcaaaagataca

SEQ ID NO: 106591 - DNA, 20 bp, synthetic construct
  source 1..20: mol_type = other DNA
actctccaatcaaaagatac

SEQ ID NO: 106592 - DNA, 20 bp, synthetic construct
  source 1..20: mol_type = other DNA
aactctccaatcaaaagata

SEQ ID NO: 106593 - DNA, 20 bp, synthetic construct
  source 1..20: mol_type = other DNA
aaactctccaatcaaaagat

SEQ ID NO: 106594 - DNA, 20 bp, synthetic construct
  source 1..20: mol_type = other DNA
taaactctccaatcaaaaga

SEQ ID NO: 106595 - DNA, 20 bp, synthetic construct
  source 1..20: mol_type = other DNA
ctaaactctccaatcaaaag

SEQ ID NO: 106596 - DNA, 20 bp, synthetic construct
  source 1..20: mol_type = other DNA
actaaactctccaatcaaaa

SEQ ID NO: 106597 - DNA, 20 bp, synthetic construct
  source 1..20: mol_type = other DNA
gactaaactctccaatcaaa

SEQ ID NO: 106598 - DNA, 20 bp, synthetic construct
  source 1..20: mol_type = other DNA
cgactaaactctccaatcaa

SEQ ID NO: 106599 - DNA, 20 bp, synthetic construct
  source 1..20: mol_type = other DNA
tcgactaaactctccaatca

SEQ ID NO: 106600 - DNA, 20 bp, synthetic construct
  source 1..20: mol_type = other DNA
atcgactaaactctccaatc

SEQ ID NO: 106601 - DNA, 20 bp, synthetic construct
  source 1..20: mol_type = other DNA
aatcgactaaactctccaat

SEQ ID NO: 106602 - DNA, 20 bp, synthetic construct
  source 1..20: mol_type = other DNA
aaatcgactaaactctccaa

SEQ ID NO: 106603 - DNA, 20 bp, synthetic construct
  source 1..20: mol_type = other DNA
taaatcgactaaactctcca

SEQ ID NO: 106604 - DNA, 20 bp, synthetic construct
  source 1..20: mol_type = other DNA
gtaaatcgactaaactctcc

SEQ ID NO: 106605 - DNA, 20 bp, synthetic construct
  source 1..20: mol_type = other DNA
tgtaaatcgactaaactctc

SEQ ID NO: 106606 - DNA, 20 bp, synthetic construct
  source 1..20: mol_type = other DNA
atgtaaatcgactaaactct

SEQ ID NO: 106607 - DNA, 20 bp, synthetic construct
  source 1..20: mol_type = other DNA
aatgtaaatcgactaaactc

SEQ ID NO: 106608 - DNA, 20 bp, synthetic construct
  source 1..20: mol_type = other DNA
gaatgtaaatcgactaaact

SEQ ID NO: 106609 - DNA, 20 bp, synthetic construct
  source 1..20: mol_type = other DNA
tgaatgtaaatcgactaaac

SEQ ID NO: 106610 - DNA, 20 bp, synthetic construct
  source 1..20: mol_type = other DNA
ctgaatgtaaatcgactaaa

SEQ ID NO: 106611 - DNA, 20 bp, synthetic construct
  source 1..20: mol_type = other DNA
actgaatgtaaatcgactaa

SEQ ID NO: 106612 - DNA, 20 bp, synthetic construct
  source 1..20: mol_type = other DNA
cactgaatgtaaatcgacta

SEQ ID NO: 106613 - DNA, 20 bp, synthetic construct
  source 1..20: mol_type = other DNA
acactgaatgtaaatcgact

SEQ ID NO: 106614 - DNA, 20 bp, synthetic construct
  source 1..20: mol_type = other DNA
aacactgaatgtaaatcgac

SEQ ID NO: 106615 - DNA, 20 bp, synthetic construct
  source 1..20: mol_type = other DNA
caacactgaatgtaaatcga

SEQ ID NO: 106616 - DNA, 20 bp, synthetic construct
  source 1..20: mol_type = other DNA
acaacactgaatgtaaatcg

SEQ ID NO: 106617 - DNA, 20 bp, synthetic construct
  source 1..20: mol_type = other DNA
aacaacactgaatgtaaatc

SEQ ID NO: 106618 - DNA, 20 bp, synthetic construct
  source 1..20: mol_type = other DNA
taacaacactgaatgtaaat

SEQ ID NO: 106619 - DNA, 20 bp, synthetic construct
  source 1..20: mol_type = other DNA
gtaacaacactgaatgtaaa

SEQ ID NO: 106620 - DNA, 20 bp, synthetic construct
  source 1..20: mol_type = other DNA
agtaacaacactgaatgtaa

SEQ ID NO: 106621 - DNA, 20 bp, synthetic construct
  source 1..20: mol_type = other DNA
cagtaacaacactgaatgta

SEQ ID NO: 106622 - DNA, 20 bp, synthetic construct
  source 1..20: mol_type = other DNA
tcagtaacaacactgaatgt

SEQ ID NO: 106623 - DNA, 20 bp, synthetic construct
  source 1..20: mol_type = other DNA
atcagtaacaacactgaatg

SEQ ID NO: 106624 - DNA, 20 bp, synthetic construct
  source 1..20: mol_type = other DNA
aatcagtaacaacactgaat

SEQ ID NO: 106625 - DNA, 20 bp, synthetic construct
  source 1..20: mol_type = other DNA
taatcagtaacaacactgaa

SEQ ID NO: 106626 - DNA, 20 bp, synthetic construct
  source 1..20: mol_type = other DNA
ctaatcagtaacaacactga

SEQ ID NO: 106627 - DNA, 20 bp, synthetic construct
  source 1..20: mol_type = other DNA
actaatcagtaacaacactg

SEQ ID NO: 106628 - DNA, 20 bp, synthetic construct
  source 1..20: mol_type = other DNA
cactaatcagtaacaacact

SEQ ID NO: 106629 - DNA, 20 bp, synthetic construct
  source 1..20: mol_type = other DNA
tcactaatcagtaacaacac

SEQ ID NO: 106630 - DNA, 20 bp, synthetic construct
  source 1..20: mol_type = other DNA
ctcactaatcagtaacaaca

SEQ ID NO: 106631 - DNA, 20 bp, synthetic construct
  source 1..20: mol_type = other DNA
cctcactaatcagtaacaac

SEQ ID NO: 106632 - DNA, 20 bp, synthetic construct
  source 1..20: mol_type = other DNA
tcctcactaatcagtaacaa

SEQ ID NO: 106633 - DNA, 20 bp, synthetic construct
  source 1..20: mol_type = other DNA
gtcctcactaatcagtaaca

SEQ ID NO: 106634 - DNA, 20 bp, synthetic construct
  source 1..20: mol_type = other DNA
agtcctcactaatcagtaac

SEQ ID NO: 106635 - DNA, 20 bp, synthetic construct
  source 1..20: mol_type = other DNA
aagtcctcactaatcagtaa

SEQ ID NO: 106636 - DNA, 20 bp, synthetic construct
  source 1..20: mol_type = other DNA
taagtcctcactaatcagta

SEQ ID NO: 106637 - DNA, 20 bp, synthetic construct
  source 1..20: mol_type = other DNA
ttaagtcctcactaatcagt

SEQ ID NO: 106638 - DNA, 20 bp, synthetic construct
  source 1..20: mol_type = other DNA
gttaagtcctcactaatcag

SEQ ID NO: 106639 - DNA, 20 bp, synthetic construct
  source 1..20: mol_type = other DNA
agttaagtcctcactaatca

SEQ ID NO: 106640 - DNA, 20 bp, synthetic construct
  source 1..20: mol_type = other DNA
tagttaagtcctcactaatc

SEQ ID NO: 106641 - DNA, 20 bp, synthetic construct
  source 1..20: mol_type = other DNA
gtagttaagtcctcactaat

SEQ ID NO: 106642 - DNA, 20 bp, synthetic construct
  source 1..20: mol_type = other DNA
agtagttaagtcctcactaa

SEQ ID NO: 106643 - DNA, 20 bp, synthetic construct
  source 1..20: mol_type = other DNA
tagtagttaagtcctcacta

SEQ ID NO: 106644 - DNA, 20 bp, synthetic construct
  source 1..20: mol_type = other DNA
gtagtagttaagtcctcact

SEQ ID NO: 106645 - DNA, 20 bp, synthetic construct
  source 1..20: mol_type = other DNA
ggtagtagttaagtcctcac

SEQ ID NO: 106646 - DNA, 20 bp, synthetic construct
  source 1..20: mol_type = other DNA
tggtagtagttaagtcctca

SEQ ID NO: 106647 - DNA, 20 bp, synthetic construct
  source 1..20: mol_type = other DNA
atggtagtagttaagtcctc

SEQ ID NO: 106648 - DNA, 20 bp, synthetic construct
  source 1..20: mol_type = other DNA
aatggtagtagttaagtcct

SEQ ID NO: 106649 - DNA, 20 bp, synthetic construct
  source 1..20: mol_type = other DNA
aaatggtagtagttaagtcc

SEQ ID NO: 106650 - DNA, 20 bp, synthetic construct
  source 1..20: mol_type = other DNA
aaaatggtagtagttaagtc

SEQ ID NO: 106651 - DNA, 20 bp, synthetic construct
  source 1..20: mol_type = other DNA
caaaatggtagtagttaagt

SEQ ID NO: 106652 - DNA, 20 bp, synthetic construct
  source 1..20: mol_type = other DNA
acaaaatggtagtagttaag

SEQ ID NO: 106653 - DNA, 20 bp, synthetic construct
  source 1..20: mol_type = other DNA
aacaaaatggtagtagttaa

SEQ ID NO: 106654 - DNA, 20 bp, synthetic construct
  source 1..20: mol_type = other DNA
taacaaaatggtagtagtta

SEQ ID NO: 106655 - DNA, 20 bp, synthetic construct
  source 1..20: mol_type = other DNA
gtaacaaaatggtagtagtt

SEQ ID NO: 106656 - DNA, 20 bp, synthetic construct
  source 1..20: mol_type = other DNA
agtaacaaaatggtagtagt

SEQ ID NO: 106657 - DNA, 20 bp, synthetic construct
  source 1..20: mol_type = other DNA
aagtaacaaaatggtagtag

SEQ ID NO: 106658 - DNA, 20 bp, synthetic construct
  source 1..20: mol_type = other DNA
taagtaacaaaatggtagta

SEQ ID NO: 106659 - DNA, 20 bp, synthetic construct
  source 1..20: mol_type = other DNA
ataagtaacaaaatggtagt

SEQ ID NO: 106660 - DNA, 20 bp, synthetic construct
  source 1..20: mol_type = other DNA
aataagtaacaaaatggtag

SEQ ID NO: 106661 - DNA, 20 bp, synthetic construct
  source 1..20: mol_type = other DNA
taataagtaacaaaatggta

SEQ ID NO: 106662 - DNA, 20 bp, synthetic construct
  source 1..20: mol_type = other DNA
ataataagtaacaaaatggt

SEQ ID NO: 106663 - DNA, 20 bp, synthetic construct
  source 1..20: mol_type = other DNA
gataataagtaacaaaatgg

SEQ ID NO: 106664 - DNA, 20 bp, synthetic construct
  source 1..20: mol_type = other DNA
agataataagtaacaaaatg

SEQ ID NO: 106665 - DNA, 20 bp, synthetic construct
  source 1..20: mol_type = other DNA
cagataataagtaacaaaat

SEQ ID NO: 106666 - DNA, 20 bp, synthetic construct
  source 1..20: mol_type = other DNA
ccagataataagtaacaaaa

SEQ ID NO: 106667 - DNA, 20 bp, synthetic construct
  source 1..20: mol_type = other DNA
accagataataagtaacaaa

SEQ ID NO: 106668 - DNA, 20 bp, synthetic construct
  source 1..20: mol_type = other DNA
aaccagataataagtaacaa

SEQ ID NO: 106669 - DNA, 20 bp, synthetic construct
  source 1..20: mol_type = other DNA
caaccagataataagtaaca

SEQ ID NO: 106670 - DNA, 20 bp, synthetic construct
  source 1..20: mol_type = other DNA
acaaccagataataagtaac

SEQ ID NO: 106671 - DNA, 20 bp, synthetic construct
  source 1..20: mol_type = other DNA
aacaaccagataataagtaa

SEQ ID NO: 106672 - DNA, 20 bp, synthetic construct
  source 1..20: mol_type = other DNA
aaacaaccagataataagta

SEQ ID NO: 106673 - DNA, 20 bp, synthetic construct
  source 1..20: mol_type = other DNA
aaaacaaccagataataagt

SEQ ID NO: 106674 - DNA, 20 bp, synthetic construct
  source 1..20: mol_type = other DNA
caaaacaaccagataataag

SEQ ID NO: 106675 - DNA, 20 bp, synthetic construct
  source 1..20: mol_type = other DNA
acaaaacaaccagataataa

SEQ ID NO: 106676 - DNA, 20 bp, synthetic construct
  source 1..20: mol_type = other DNA
tacaaaacaaccagataata

SEQ ID NO: 106677 - DNA, 20 bp, synthetic construct
  source 1..20: mol_type = other DNA
ctacaaaacaaccagataat

SEQ ID NO: 106678 - DNA, 20 bp, synthetic construct
  source 1..20: mol_type = other DNA
actacaaaacaaccagataa

SEQ ID NO: 106679 - DNA, 20 bp, synthetic construct
  source 1..20: mol_type = other DNA
gactacaaaacaaccagata

SEQ ID NO: 106680 - DNA, 20 bp, synthetic construct
  source 1..20: mol_type = other DNA
ggactacaaaacaaccagat

SEQ ID NO: 106681 - DNA, 20 bp, synthetic construct
  source 1..20: mol_type = other DNA
aggactacaaaacaaccaga

SEQ ID NO: 106682 - DNA, 20 bp, synthetic construct
  source 1..20: mol_type = other DNA
taggactacaaaacaaccag

SEQ ID NO: 106683 - DNA, 20 bp, synthetic construct
  source 1..20: mol_type = other DNA
gtaggactacaaaacaacca

SEQ ID NO: 106684 - DNA, 20 bp, synthetic construct
  source 1..20: mol_type = other DNA
agtaggactacaaaacaacc

SEQ ID NO: 106685 - DNA, 20 bp, synthetic construct
  source 1..20: mol_type = other DNA
gagtaggactacaaaacaac

SEQ ID NO: 106686 - DNA, 20 bp, synthetic construct
  source 1..20: mol_type = other DNA
ggagtaggactacaaaacaa

SEQ ID NO: 106687 - DNA, 20 bp, synthetic construct
  source 1..20: mol_type = other DNA
gggagtaggactacaaaaca

SEQ ID NO: 106688 - DNA, 20 bp, synthetic construct
  source 1..20: mol_type = other DNA
agggagtaggactacaaaac

SEQ ID NO: 106689 - DNA, 20 bp, synthetic construct
  source 1..20: mol_type = other DNA
gagggagtaggactacaaaa

SEQ ID NO: 106690 - DNA, 20 bp, synthetic construct
  source 1..20: mol_type = other DNA
ggagggagtaggactacaaa

SEQ ID NO: 106691 - DNA, 20 bp, synthetic construct
  source 1..20: mol_type = other DNA
gggagggagtaggactacaa

SEQ ID NO: 106692 - DNA, 20 bp, synthetic construct
  source 1..20: mol_type = other DNA
agggagggagtaggactaca

SEQ ID NO: 106693 - DNA, 20 bp, synthetic construct
  source 1..20: mol_type = other DNA
aagggagggagtaggactac

SEQ ID NO: 106694 - DNA, 20 bp, synthetic construct
  source 1..20: mol_type = other DNA
gaagggagggagtaggacta

SEQ ID NO: 106695 - DNA, 20 bp, synthetic construct
  source 1..20: mol_type = other DNA
ggaagggagggagtaggact

SEQ ID NO: 106696 - DNA, 20 bp, synthetic construct
  source 1..20: mol_type = other DNA
gggaagggagggagtaggac

SEQ ID NO: 106697 - DNA, 20 bp, synthetic construct
  source 1..20: mol_type = other DNA
ggggaagggagggagtagga

SEQ ID NO: 106698 - DNA, 20 bp, synthetic construct
  source 1..20: mol_type = other DNA
gggggaagggagggagtagg

SEQ ID NO: 106699 - DNA, 20 bp, synthetic construct
  source 1..20: mol_type = other DNA
agggggaagggagggagtag

SEQ ID NO: 106700 - DNA, 20 bp, synthetic construct
  source 1..20: mol_type = other DNA
aagggggaagggagggagta

SEQ ID NO: 106701 - DNA, 20 bp, synthetic construct
  source 1..20: mol_type = other DNA
gaagggggaagggagggagt

SEQ ID NO: 106702 - DNA, 20 bp, synthetic construct
  source 1..20: mol_type = other DNA
agaagggggaagggagggag

SEQ ID NO: 106703 - DNA, 20 bp, synthetic construct
  source 1..20: mol_type = other DNA
aagaagggggaagggaggga

SEQ ID NO: 106704 - DNA, 20 bp, synthetic construct
  source 1..20: mol_type = other DNA
aaagaagggggaagggaggg

SEQ ID NO: 106705 - DNA, 20 bp, synthetic construct
  source 1..20: mol_type = other DNA
aaaagaagggggaagggagg

SEQ ID NO: 106706 - DNA, 20 bp, synthetic construct
  source 1..20: mol_type = other DNA
aaaaagaagggggaagggag

SEQ ID NO: 106707 - DNA, 20 bp, synthetic construct
  source 1..20: mol_type = other DNA
aaaaaagaagggggaaggga

SEQ ID NO: 106708 - DNA, 20 bp, synthetic construct
  source 1..20: mol_type = other DNA
taaaaaagaagggggaaggg

SEQ ID NO: 106709 - DNA, 20 bp, synthetic construct
  source 1..20: mol_type = other DNA
gtaaaaaagaagggggaagg

SEQ ID NO: 106710 - DNA, 20 bp, synthetic construct
  source 1..20: mol_type = other DNA
agtaaaaaagaagggggaag

SEQ ID NO: 106711 - DNA, 20 bp, synthetic construct
  source 1..20: mol_type = other DNA
aagtaaaaaagaagggggaa

SEQ ID NO: 106712 - DNA, 20 bp, synthetic construct
  source 1..20: mol_type = other DNA
gaagtaaaaaagaaggggga

SEQ ID NO: 106713 - DNA, 20 bp, synthetic construct
  source 1..20: mol_type = other DNA
ggaagtaaaaaagaaggggg

SEQ ID NO: 106714 - DNA, 20 bp, synthetic construct
  source 1..20: mol_type = other DNA
aggaagtaaaaaagaagggg

SEQ ID NO: 106715 - DNA, 20 bp, synthetic construct
  source 1..20: mol_type = other DNA
gaggaagtaaaaaagaaggg

SEQ ID NO: 106716 - DNA, 20 bp, synthetic construct
  source 1..20: mol_type = other DNA
agaggaagtaaaaaagaagg

SEQ ID NO: 106717 - DNA, 20 bp, synthetic construct
  source 1..20: mol_type = other DNA
aagaggaagtaaaaaagaag

SEQ ID NO: 106718 - DNA, 20 bp, synthetic construct
  source 1..20: mol_type = other DNA
gaagaggaagtaaaaaagaa

SEQ ID NO: 106719 - DNA, 20 bp, synthetic construct
  source 1..20: mol_type = other DNA
cgaagaggaagtaaaaaaga

SEQ ID NO: 106720 - DNA, 20 bp, synthetic construct
  source 1..20: mol_type = other DNA
gcgaagaggaagtaaaaaag

SEQ ID NO: 106721 - DNA, 20 bp, synthetic construct
  source 1..20: mol_type = other DNA
agcgaagaggaagtaaaaaa

SEQ ID NO: 106722 - DNA, 20 bp, synthetic construct
  source 1..20: mol_type = other DNA
gagcgaagaggaagtaaaaa

SEQ ID NO: 106723 - DNA, 20 bp, synthetic construct
  source 1..20: mol_type = other DNA
ggagcgaagaggaagtaaaa

SEQ ID NO: 106724 - DNA, 20 bp, synthetic construct
  source 1..20: mol_type = other DNA
aggagcgaagaggaagtaaa

SEQ ID NO: 106725 - DNA, 20 bp, synthetic construct
  source 1..20: mol_type = other DNA
aaggagcgaagaggaagtaa

SEQ ID NO: 106726 - DNA, 20 bp, synthetic construct
  source 1..20: mol_type = other DNA
aaaggagcgaagaggaagta

SEQ ID NO: 106727 - DNA, 20 bp, synthetic construct
  source 1..20: mol_type = other DNA
aaaaggagcgaagaggaagt

SEQ ID NO: 106728 - DNA, 20 bp, synthetic construct
  source 1..20: mol_type = other DNA
aaaaaggagcgaagaggaag

SEQ ID NO: 106729 - DNA, 20 bp, synthetic construct
  source 1..20: mol_type = other DNA
aaaaaaggagcgaagaggaa

SEQ ID NO: 106730 - DNA, 20 bp, synthetic construct
  source 1..20: mol_type = other DNA
gaaaaaaggagcgaagagga

SEQ ID NO: 106731 - DNA, 20 bp, synthetic construct
  source 1..20: mol_type = other DNA
ggaaaaaaggagcgaagagg

SEQ ID NO: 106732 - DNA, 20 bp, synthetic construct
  source 1..20: mol_type = other DNA
gggaaaaaaggagcgaagag

SEQ ID NO: 106733 - DNA, 20 bp, synthetic construct
  source 1..20: mol_type = other DNA
agggaaaaaaggagcgaaga

SEQ ID NO: 106734 - DNA, 20 bp, synthetic construct
  source 1..20: mol_type = other DNA
gagggaaaaaaggagcgaag

SEQ ID NO: 106735 - DNA, 20 bp, synthetic construct
  source 1..20: mol_type = other DNA
ggagggaaaaaaggagcgaa

SEQ ID NO: 106736 - DNA, 20 bp, synthetic construct
  source 1..20: mol_type = other DNA
gggagggaaaaaaggagcga

SEQ ID NO: 106737 - DNA, 20 bp, synthetic construct
  source 1..20: mol_type = other DNA
agggagggaaaaaaggagcg

SEQ ID NO: 106738 - DNA, 20 bp, synthetic construct
  source 1..20: mol_type = other DNA
gagggagggaaaaaaggagc

SEQ ID NO: 106739 - DNA, 20 bp, synthetic construct
  source 1..20: mol_type = other DNA
ggagggagggaaaaaaggag

SEQ ID NO: 106740 - DNA, 20 bp, synthetic construct
  source 1..20: mol_type = other DNA
gggagggagggaaaaaagga

SEQ ID NO: 106741 - DNA, 20 bp, synthetic construct
  source 1..20: mol_type = other DNA
agggagggagggaaaaaagg

SEQ ID NO: 106742 - DNA, 20 bp, synthetic construct
  source 1..20: mol_type = other DNA
aagggagggagggaaaaaag

SEQ ID NO: 106743 - DNA, 20 bp, synthetic construct
  source 1..20: mol_type = other DNA
gaagggagggagggaaaaaa

SEQ ID NO: 106744 - DNA, 20 bp, synthetic construct
  source 1..20: mol_type = other DNA
ggaagggagggagggaaaaa

SEQ ID NO: 106745 - DNA, 20 bp, synthetic construct
  source 1..20: mol_type = other DNA
aggaagggagggagggaaaa

SEQ ID NO: 106746 - DNA, 20 bp, synthetic construct
  source 1..20: mol_type = other DNA
aaggaagggagggagggaaa

SEQ ID NO: 106747 - DNA, 20 bp, synthetic construct
  source 1..20: mol_type = other DNA
caaggaagggagggagggaa

SEQ ID NO: 106748 - DNA, 20 bp, synthetic construct
  source 1..20: mol_type = other DNA
acaaggaagggagggaggga

SEQ ID NO: 106749 - DNA, 20 bp, synthetic construct
  source 1..20: mol_type = other DNA
aacaaggaagggagggaggg

SEQ ID NO: 106750 - DNA, 20 bp, synthetic construct
  source 1..20: mol_type = other DNA
aaacaaggaagggagggagg

SEQ ID NO: 106751 - DNA, 20 bp, synthetic construct
  source 1..20: mol_type = other DNA
aaaacaaggaagggagggag

SEQ ID NO: 106752 - DNA, 20 bp, synthetic construct
  source 1..20: mol_type = other DNA
caaaacaaggaagggaggga

SEQ ID NO: 106753 - DNA, 20 bp, synthetic construct
  source 1..20: mol_type = other DNA
tcaaaacaaggaagggaggg

SEQ ID NO: 106754 - DNA, 20 bp, synthetic construct
  source 1..20: mol_type = other DNA
ttcaaaacaaggaagggagg

SEQ ID NO: 106755 - DNA, 20 bp, synthetic construct
  source 1..20: mol_type = other DNA
tttcaaaacaaggaagggag

SEQ ID NO: 106756 - DNA, 20 bp, synthetic construct
  source 1..20: mol_type = other DNA
ctttcaaaacaaggaaggga

SEQ ID NO: 106757 - DNA, 20 bp, synthetic construct
  source 1..20: mol_type = other DNA
actttcaaaacaaggaaggg

SEQ ID NO: 106758 - DNA, 20 bp, synthetic construct
  source 1..20: mol_type = other DNA
cactttcaaaacaaggaagg

SEQ ID NO: 106759 - DNA, 20 bp, synthetic construct
  source 1..20: mol_type = other DNA
tcactttcaaaacaaggaag

SEQ ID NO: 106760 - DNA, 20 bp, synthetic construct
  source 1..20: mol_type = other DNA
atcactttcaaaacaaggaa

SEQ ID NO: 106761 - DNA, 20 bp, synthetic construct
  source 1..20: mol_type = other DNA
aatcactttcaaaacaagga

SEQ ID NO: 106762 - DNA, 20 bp, synthetic construct
  source 1..20: mol_type = other DNA
aaatcactttcaaaacaagg

SEQ ID NO: 106763 - DNA, 20 bp, synthetic construct
  source 1..20: mol_type = other DNA
aaaatcactttcaaaacaag

SEQ ID NO: 106764 - DNA, 20 bp, synthetic construct
  source 1..20: mol_type = other DNA
gaaaatcactttcaaaacaa

SEQ ID NO: 106765 - DNA, 20 bp, synthetic construct
  source 1..20: mol_type = other DNA
agaaaatcactttcaaaaca

SEQ ID NO: 106766 - DNA, 20 bp, synthetic construct
  source 1..20: mol_type = other DNA
gagaaaatcactttcaaaac

SEQ ID NO: 106767 - DNA, 20 bp, synthetic construct
  source 1..20: mol_type = other DNA
agagaaaatcactttcaaaa

SEQ ID NO: 106768 - DNA, 20 bp, synthetic construct
  source 1..20: mol_type = other DNA
cagagaaaatcactttcaaa

SEQ ID NO: 106769 - DNA, 20 bp, synthetic construct
  source 1..20: mol_type = other DNA
ccagagaaaatcactttcaa

SEQ ID NO: 106770 - DNA, 20 bp, synthetic construct
  source 1..20: mol_type = other DNA
accagagaaaatcactttca

SEQ ID NO: 106771 - DNA, 20 bp, synthetic construct
  source 1..20: mol_type = other DNA
caccagagaaaatcactttc

SEQ ID NO: 106772 - DNA, 20 bp, synthetic construct
  source 1..20: mol_type = other DNA
ccaccagagaaaatcacttt

SEQ ID NO: 106773 - DNA, 20 bp, synthetic construct
  source 1..20: mol_type = other DNA
accaccagagaaaatcactt

SEQ ID NO: 106774 - DNA, 20 bp, synthetic construct
  source 1..20: mol_type = other DNA
taccaccagagaaaatcact

SEQ ID NO: 106775 - DNA, 20 bp, synthetic construct
  source 1..20: mol_type = other DNA
ataccaccagagaaaatcac

SEQ ID NO: 106776 - DNA, 20 bp, synthetic construct
  source 1..20: mol_type = other DNA
cataccaccagagaaaatca

SEQ ID NO: 106777 - DNA, 20 bp, synthetic construct
  source 1..20: mol_type = other DNA
acataccaccagagaaaatc

SEQ ID NO: 106778 - DNA, 20 bp, synthetic construct
  source 1..20: mol_type = other DNA
aacataccaccagagaaaat

SEQ ID NO: 106779 - DNA, 20 bp, synthetic construct
  source 1..20: mol_type = other DNA
aaacataccaccagagaaaa

SEQ ID NO: 106780 - DNA, 20 bp, synthetic construct
  source 1..20: mol_type = other DNA
aaaacataccaccagagaaa

SEQ ID NO: 106781 - DNA, 20 bp, synthetic construct
  source 1..20: mol_type = other DNA
taaaacataccaccagagaa

SEQ ID NO: 106782 - DNA, 20 bp, synthetic construct
  source 1..20: mol_type = other DNA
ttaaaacataccaccagaga

SEQ ID NO: 106783 - DNA, 20 bp, synthetic construct
  source 1..20: mol_type = other DNA
attaaaacataccaccagag

SEQ ID NO: 106784 - DNA, 20 bp, synthetic construct
  source 1..20: mol_type = other DNA
aattaaaacataccaccaga

SEQ ID NO: 106785 - DNA, 20 bp, synthetic construct
  source 1..20: mol_type = other DNA
aaattaaaacataccaccag

SEQ ID NO: 106786 - DNA, 20 bp, synthetic construct
  source 1..20: mol_type = other DNA
gaaattaaaacataccacca

SEQ ID NO: 106787 - DNA, 20 bp, synthetic construct
  source 1..20: mol_type = other DNA
ggaaattaaaacataccacc

SEQ ID NO: 106788 - DNA, 20 bp, synthetic construct
  source 1..20: mol_type = other DNA
aggaaattaaaacataccac

SEQ ID NO: 106789 - DNA, 20 bp, synthetic construct
  source 1..20: mol_type = other DNA
caggaaattaaaacatacca

SEQ ID NO: 106790 - DNA, 20 bp, synthetic construct
  source 1..20: mol_type = other DNA
gcaggaaattaaaacatacc

SEQ ID NO: 106791 - DNA, 20 bp, synthetic construct
  source 1..20: mol_type = other DNA
agcaggaaattaaaacatac

SEQ ID NO: 106792 - DNA, 20 bp, synthetic construct
  source 1..20: mol_type = other DNA
aagcaggaaattaaaacata

SEQ ID NO: 106793 - DNA, 20 bp, synthetic construct
  source 1..20: mol_type = other DNA
aaagcaggaaattaaaacat

SEQ ID NO: 106794 - DNA, 20 bp, synthetic construct
  source 1..20: mol_type = other DNA
taaagcaggaaattaaaaca

SEQ ID NO: 106795 - DNA, 20 bp, synthetic construct
  source 1..20: mol_type = other DNA
ataaagcaggaaattaaaac

SEQ ID NO: 106796 - DNA, 20 bp, synthetic construct
  source 1..20: mol_type = other DNA
tataaagcaggaaattaaaa

SEQ ID NO: 106797 - DNA, 20 bp, synthetic construct
  source 1..20: mol_type = other DNA
atataaagcaggaaattaaa

SEQ ID NO: 106798 - DNA, 20 bp, synthetic construct
  source 1..20: mol_type = other DNA
aatataaagcaggaaattaa

SEQ ID NO: 106799 - DNA, 20 bp, synthetic construct
  source 1..20: mol_type = other DNA
aaatataaagcaggaaatta

SEQ ID NO: 106800 - DNA, 20 bp, synthetic construct
  source 1..20: mol_type = other DNA
aaaatataaagcaggaaatt

SEQ ID NO: 106801 - DNA, 20 bp, synthetic construct
  source 1..20: mol_type = other DNA
aaaaatataaagcaggaaat

SEQ ID NO: 106802 - DNA, 20 bp, synthetic construct
  source 1..20: mol_type = other DNA
aaaaaatataaagcaggaaa

SEQ ID NO: 106803 - DNA, 20 bp, synthetic construct
  source 1..20: mol_type = other DNA
caaaaaatataaagcaggaa

SEQ ID NO: 106804 - DNA, 20 bp, synthetic construct
  source 1..20: mol_type = other DNA
acaaaaaatataaagcagga

SEQ ID NO: 106805 - DNA, 20 bp, synthetic construct
  source 1..20: mol_type = other DNA
cacaaaaaatataaagcagg

SEQ ID NO: 106806 - DNA, 20 bp, synthetic construct
  source 1..20: mol_type = other DNA
acacaaaaaatataaagcag

SEQ ID NO: 106807 - DNA, 20 bp, synthetic construct
  source 1..20: mol_type = other DNA
tacacaaaaaatataaagca

SEQ ID NO: 106808 - DNA, 20 bp, synthetic construct
  source 1..20: mol_type = other DNA
atacacaaaaaatataaagc

SEQ ID NO: 106809 - DNA, 20 bp, synthetic construct
  source 1..20: mol_type = other DNA
gatacacaaaaaatataaag

SEQ ID NO: 106810 - DNA, 20 bp, synthetic construct
  source 1..20: mol_type = other DNA
agatacacaaaaaatataaa

SEQ ID NO: 106811 - DNA, 20 bp, synthetic construct
  source 1..20: mol_type = other DNA
cagatacacaaaaaatataa

SEQ ID NO: 106812 - DNA, 20 bp, synthetic construct
  source 1..20: mol_type = other DNA
acagatacacaaaaaatata

SEQ ID NO: 106813 - DNA, 20 bp, synthetic construct
  source 1..20: mol_type = other DNA
aacagatacacaaaaaatat

SEQ ID NO: 106814 - DNA, 20 bp, synthetic construct
  source 1..20: mol_type = other DNA
caacagatacacaaaaaata

SEQ ID NO: 106815 - DNA, 20 bp, synthetic construct
  source 1..20: mol_type = other DNA
acaacagatacacaaaaaat

SEQ ID NO: 106816 - DNA, 20 bp, synthetic construct
  source 1..20: mol_type = other DNA
tacaacagatacacaaaaaa

SEQ ID NO: 106817 - DNA, 20 bp, synthetic construct
  source 1..20: mol_type = other DNA
ctacaacagatacacaaaaa

SEQ ID NO: 106818 - DNA, 20 bp, synthetic construct
  source 1..20: mol_type = other DNA
cctacaacagatacacaaaa

SEQ ID NO: 106819 - DNA, 20 bp, synthetic construct
  source 1..20: mol_type = other DNA
acctacaacagatacacaaa

SEQ ID NO: 106820 - DNA, 20 bp, synthetic construct
  source 1..20: mol_type = other DNA
cacctacaacagatacacaa

SEQ ID NO: 106821 - DNA, 20 bp, synthetic construct
  source 1..20: mol_type = other DNA
acacctacaacagatacaca

SEQ ID NO: 106822 - DNA, 20 bp, synthetic construct
  source 1..20: mol_type = other DNA
aacacctacaacagatacac

SEQ ID NO: 106823 - DNA, 20 bp, synthetic construct
  source 1..20: mol_type = other DNA
aaacacctacaacagataca

SEQ ID NO: 106824 - DNA, 20 bp, synthetic construct
  source 1..20: mol_type = other DNA
aaaacacctacaacagatac

SEQ ID NO: 106825 - DNA, 20 bp, synthetic construct
  source 1..20: mol_type = other DNA
aaaaacacctacaacagata

SEQ ID NO: 106826 - DNA, 20 bp, synthetic construct
  source 1..20: mol_type = other DNA
caaaaacacctacaacagat

SEQ ID NO: 106827 - DNA, 20 bp, synthetic construct
  source 1..20: mol_type = other DNA
tcaaaaacacctacaacaga

SEQ ID NO: 106828 - DNA, 20 bp, synthetic construct
  source 1..20: mol_type = other DNA
atcaaaaacacctacaacag

SEQ ID NO: 106829 - DNA, 20 bp, synthetic construct
  source 1..20: mol_type = other DNA
aatcaaaaacacctacaaca

SEQ ID NO: 106830 - DNA, 20 bp, synthetic construct
  source 1..20: mol_type = other DNA
aaatcaaaaacacctacaac

SEQ ID NO: 106831 - DNA, 20 bp, synthetic construct
  source 1..20: mol_type = other DNA
taaatcaaaaacacctacaa

SEQ ID NO: 106832 - DNA, 20 bp, synthetic construct
  source 1..20: mol_type = other DNA
ttaaatcaaaaacacctaca

SEQ ID NO: 106833 - DNA, 20 bp, synthetic construct
  source 1..20: mol_type = other DNA
cttaaatcaaaaacacctac

SEQ ID NO: 106834 - DNA, 20 bp, synthetic construct
  source 1..20: mol_type = other DNA
tcttaaatcaaaaacaccta

SEQ ID NO: 106835 - DNA, 20 bp, synthetic construct
  source 1..20: mol_type = other DNA
atcttaaatcaaaaacacct

SEQ ID NO: 106836 - DNA, 20 bp, synthetic construct
  source 1..20: mol_type = other DNA
gatcttaaatcaaaaacacc

SEQ ID NO: 106837 - DNA, 20 bp, synthetic construct
  source 1..20: mol_type = other DNA
tgatcttaaatcaaaaacac

SEQ ID NO: 106838 - DNA, 20 bp, synthetic construct
  source 1..20: mol_type = other DNA
gtgatcttaaatcaaaaaca

SEQ ID NO: 106839 - DNA, 20 bp, synthetic construct
  source 1..20: mol_type = other DNA
ggtgatcttaaatcaaaaac

SEQ ID NO: 106840 - DNA, 20 bp, synthetic construct
  source 1..20: mol_type = other DNA
tggtgatcttaaatcaaaaa

SEQ ID NO: 106841 - DNA, 20 bp, synthetic construct
  source 1..20: mol_type = other DNA
atggtgatcttaaatcaaaa

SEQ ID NO: 106842 - DNA, 20 bp, synthetic construct
  source 1..20: mol_type = other DNA
catggtgatcttaaatcaaa

SEQ ID NO: 106843 - DNA, 20 bp, synthetic construct
  source 1..20: mol_type = other DNA
tcatggtgatcttaaatcaa

SEQ ID NO: 106844 - DNA, 20 bp, synthetic construct
  source 1..20: mol_type = other DNA
gtcatggtgatcttaaatca

SEQ ID NO: 106845 - DNA, 20 bp, synthetic construct
  source 1..20: mol_type = other DNA
tgtcatggtgatcttaaatc

SEQ ID NO: 106846 - DNA, 20 bp, synthetic construct
  source 1..20: mol_type = other DNA
ctgtcatggtgatcttaaat

SEQ ID NO: 106847 - DNA, 20 bp, synthetic construct
  source 1..20: mol_type = other DNA
gctgtcatggtgatcttaaa

SEQ ID NO: 106848 - DNA, 20 bp, synthetic construct
  source 1..20: mol_type = other DNA
agctgtcatggtgatcttaa

SEQ ID NO: 106849 - DNA, 20 bp, synthetic construct
  source 1..20: mol_type = other DNA
cagctgtcatggtgatctta

SEQ ID NO: 106850 - DNA, 20 bp, synthetic construct
  source 1..20: mol_type = other DNA
ccagctgtcatggtgatctt

SEQ ID NO: 106851 - DNA, 20 bp, synthetic construct
  source 1..20: mol_type = other DNA
cccagctgtcatggtgatct

SEQ ID NO: 106852 - DNA, 20 bp, synthetic construct
  source 1..20: mol_type = other DNA
acccagctgtcatggtgatc

SEQ ID NO: 106853 - DNA, 20 bp, synthetic construct
  source 1..20: mol_type = other DNA
cacccagctgtcatggtgat

SEQ ID NO: 106854 - DNA, 20 bp, synthetic construct
  source 1..20: mol_type = other DNA
gcacccagctgtcatggtga

SEQ ID NO: 106855 - DNA, 20 bp, synthetic construct
  source 1..20: mol_type = other DNA
tgcacccagctgtcatggtg

SEQ ID NO: 106856 - DNA, 20 bp, synthetic construct
  source 1..20: mol_type = other DNA
ctgcacccagctgtcatggt

SEQ ID NO: 106857 - DNA, 20 bp, synthetic construct
  source 1..20: mol_type = other DNA
actgcacccagctgtcatgg

SEQ ID NO: 106858 - DNA, 20 bp, synthetic construct
  source 1..20: mol_type = other DNA
cactgcacccagctgtcatg

SEQ ID NO: 106859 - DNA, 20 bp, synthetic construct
  source 1..20: mol_type = other DNA
ccactgcacccagctgtcat

SEQ ID NO: 106860 - DNA, 20 bp, synthetic construct
  source 1..20: mol_type = other DNA
accactgcacccagctgtca

SEQ ID NO: 106861 - DNA, 20 bp, synthetic construct
  source 1..20: mol_type = other DNA
aaccactgcacccagctgtc

SEQ ID NO: 106862 - DNA, 20 bp, synthetic construct
  source 1..20: mol_type = other DNA
gaaccactgcacccagctgt

SEQ ID NO: 106863 - DNA, 20 bp, synthetic construct
  source 1..20: mol_type = other DNA
tgaaccactgcacccagctg

SEQ ID NO: 106864 - DNA, 20 bp, synthetic construct
  source 1..20: mol_type = other DNA
gtgaaccactgcacccagct

SEQ ID NO: 106865 - DNA, 20 bp, synthetic construct
  source 1..20: mol_type = other DNA
tgtgaaccactgcacccagc

SEQ ID NO: 106866 - DNA, 20 bp, synthetic construct
  source 1..20: mol_type = other DNA
gtgtgaaccactgcacccag

SEQ ID NO: 106867 - DNA, 20 bp, synthetic construct
  source 1..20: mol_type = other DNA
ggtgtgaaccactgcaccca

SEQ ID NO: 106868 - DNA, 20 bp, synthetic construct
  source 1..20: mol_type = other DNA
aggtgtgaaccactgcaccc

SEQ ID NO: 106869 - DNA, 20 bp, synthetic construct
  source 1..20: mol_type = other DNA
caggtgtgaaccactgcacc

SEQ ID NO: 106870 - DNA, 20 bp, synthetic construct
  source 1..20: mol_type = other DNA
acaggtgtgaaccactgcac

SEQ ID NO: 106871 - DNA, 20 bp, synthetic construct
  source 1..20: mol_type = other DNA
tacaggtgtgaaccactgca

SEQ ID NO: 106872 - DNA, 20 bp, synthetic construct
  source 1..20: mol_type = other DNA
ttacaggtgtgaaccactgc

SEQ ID NO: 106873 - DNA, 20 bp, synthetic construct
  source 1..20: mol_type = other DNA
attacaggtgtgaaccactg

SEQ ID NO: 106874 - DNA, 20 bp, synthetic construct
  source 1..20: mol_type = other DNA
gattacaggtgtgaaccact

SEQ ID NO: 106875 - DNA, 20 bp, synthetic construct
  source 1..20: mol_type = other DNA
ggattacaggtgtgaaccac

SEQ ID NO: 106876 - DNA, 20 bp, synthetic construct
  source 1..20: mol_type = other DNA
gggattacaggtgtgaacca

SEQ ID NO: 106877 - DNA, 20 bp, synthetic construct
  source 1..20: mol_type = other DNA
tgggattacaggtgtgaacc

SEQ ID NO: 106878 - DNA, 20 bp, synthetic construct
  source 1..20: mol_type = other DNA
ctgggattacaggtgtgaac

SEQ ID NO: 106879 - DNA, 20 bp, synthetic construct
  source 1..20: mol_type = other DNA
gctgggattacaggtgtgaa

SEQ ID NO: 106880 - DNA, 20 bp, synthetic construct
  source 1..20: mol_type = other DNA
tgctgggattacaggtgtga

SEQ ID NO: 106881 - DNA, 20 bp, synthetic construct
  source 1..20: mol_type = other DNA
gtgctgggattacaggtgtg

SEQ ID NO: 106882 - DNA, 20 bp, synthetic construct
  source 1..20: mol_type = other DNA
agtgctgggattacaggtgt

SEQ ID NO: 106883 - DNA, 20 bp, synthetic construct
  source 1..20: mol_type = other DNA
aagtgctgggattacaggtg

SEQ ID NO: 106884 - DNA, 20 bp, synthetic construct
  source 1..20: mol_type = other DNA
aaagtgctgggattacaggt

SEQ ID NO: 106885 - DNA, 20 bp, synthetic construct
  source 1..20: mol_type = other DNA
caaagtgctgggattacagg

SEQ ID NO: 106886 - DNA, 20 bp, synthetic construct
  source 1..20: mol_type = other DNA
ccaaagtgctgggattacag

SEQ ID NO: 106887 - DNA, 20 bp, synthetic construct
  source 1..20: mol_type = other DNA
cccaaagtgctgggattaca

SEQ ID NO: 106888 - DNA, 20 bp, synthetic construct
  source 1..20: mol_type = other DNA
tcccaaagtgctgggattac

SEQ ID NO: 106889 - DNA, 20 bp, synthetic construct
  source 1..20: mol_type = other DNA
ctcccaaagtgctgggatta

SEQ ID NO: 106890 - DNA, 20 bp, synthetic construct
  source 1..20: mol_type = other DNA
cctcccaaagtgctgggatt

SEQ ID NO: 106891 - DNA, 20 bp, synthetic construct
  source 1..20: mol_type = other DNA
gcctcccaaagtgctgggat

SEQ ID NO: 106892 - DNA, 20 bp, synthetic construct
  source 1..20: mol_type = other DNA
ggcctcccaaagtgctggga

SEQ ID NO: 106893 - DNA, 20 bp, synthetic construct
  source 1..20: mol_type = other DNA
cggcctcccaaagtgctggg

SEQ ID NO: 106894 - DNA, 20 bp, synthetic construct
  source 1..20: mol_type = other DNA
tcggcctcccaaagtgctgg

SEQ ID NO: 106895 - DNA, 20 bp, synthetic construct
  source 1..20: mol_type = other DNA
ctcggcctcccaaagtgctg

SEQ ID NO: 106896 - DNA, 20 bp, synthetic construct
  source 1..20: mol_type = other DNA
cctcggcctcccaaagtgct

SEQ ID NO: 106897 - DNA, 20 bp, synthetic construct
  source 1..20: mol_type = other DNA
acctcggcctcccaaagtgc

SEQ ID NO: 106898 - DNA, 20 bp, synthetic construct
  source 1..20: mol_type = other DNA
cacctcggcctcccaaagtg

SEQ ID NO: 106899 - DNA, 20 bp, synthetic construct
  source 1..20: mol_type = other DNA
ccacctcggcctcccaaagt

SEQ ID NO: 106900 - DNA, 20 bp, synthetic construct
  source 1..20: mol_type = other DNA
cccacctcggcctcccaaag

SEQ ID NO: 106901 - DNA, 20 bp, synthetic construct
  source 1..20: mol_type = other DNA
acccacctcggcctcccaaa

SEQ ID NO: 106902 - DNA, 20 bp, synthetic construct
  source 1..20: mol_type = other DNA
cacccacctcggcctcccaa

SEQ ID NO: 106903 - DNA, 20 bp, synthetic construct
  source 1..20: mol_type = other DNA
ccacccacctcggcctccca

SEQ ID NO: 106904 - DNA, 20 bp, synthetic construct
  source 1..20: mol_type = other DNA
tccacccacctcggcctccc

SEQ ID NO: 106905 - DNA, 20 bp, synthetic construct
  source 1..20: mol_type = other DNA
atccacccacctcggcctcc

SEQ ID NO: 106906 - DNA, 20 bp, synthetic construct
  source 1..20: mol_type = other DNA
gatccacccacctcggcctc

SEQ ID NO: 106907 - DNA, 20 bp, synthetic construct
  source 1..20: mol_type = other DNA
tgatccacccacctcggcct

SEQ ID NO: 106908 - DNA, 20 bp, synthetic construct
  source 1..20: mol_type = other DNA
ttgatccacccacctcggcc

SEQ ID NO: 106909 - DNA, 20 bp, synthetic construct
  source 1..20: mol_type = other DNA
cttgatccacccacctcggc

SEQ ID NO: 106910 - DNA, 20 bp, synthetic construct
  source 1..20: mol_type = other DNA
tcttgatccacccacctcgg

SEQ ID NO: 106911 - DNA, 20 bp, synthetic construct
  source 1..20: mol_type = other DNA
ctcttgatccacccacctcg

SEQ ID NO: 106912 - DNA, 20 bp, synthetic construct
  source 1..20: mol_type = other DNA
cctcttgatccacccacctc

SEQ ID NO: 106913 - DNA, 20 bp, synthetic construct
  source 1..20: mol_type = other DNA
acctcttgatccacccacct

SEQ ID NO: 106914 - DNA, 20 bp, synthetic construct
  source 1..20: mol_type = other DNA
gacctcttgatccacccacc

SEQ ID NO: 106915 - DNA, 20 bp, synthetic construct
  source 1..20: mol_type = other DNA
tgacctcttgatccacccac

SEQ ID NO: 106916 - DNA, 20 bp, synthetic construct
  source 1..20: mol_type = other DNA
ctgacctcttgatccaccca

SEQ ID NO: 106917 - DNA, 20 bp, synthetic construct
  source 1..20: mol_type = other DNA
cctgacctcttgatccaccc

SEQ ID NO: 106918 - DNA, 20 bp, synthetic construct
  source 1..20: mol_type = other DNA
tcctgacctcttgatccacc

SEQ ID NO: 106919 - DNA, 20 bp, synthetic construct
  source 1..20: mol_type = other DNA
ctcctgacctcttgatccac

SEQ ID NO: 106920 - DNA, 20 bp, synthetic construct
  source 1..20: mol_type = other DNA
tctcctgacctcttgatcca

SEQ ID NO: 106921 - DNA, 20 bp, synthetic construct
  source 1..20: mol_type = other DNA
atctcctgacctcttgatcc

SEQ ID NO: 106922 - DNA, 20 bp, synthetic construct
  source 1..20: mol_type = other DNA
aatctcctgacctcttgatc

SEQ ID NO: 106923 - DNA, 20 bp, synthetic construct
  source 1..20: mol_type = other DNA
caatctcctgacctcttgat

SEQ ID NO: 106924 - DNA, 20 bp, synthetic construct
  source 1..20: mol_type = other DNA
tcaatctcctgacctcttga

SEQ ID NO: 106925 - DNA, 20 bp, synthetic construct
  source 1..20: mol_type = other DNA
ctcaatctcctgacctcttg

SEQ ID NO: 106926 - DNA, 20 bp, synthetic construct
  source 1..20: mol_type = other DNA
tctcaatctcctgacctctt

SEQ ID NO: 106927 - DNA, 20 bp, synthetic construct
  source 1..20: mol_type = other DNA
gtctcaatctcctgacctct

SEQ ID NO: 106928 - DNA, 20 bp, synthetic construct
  source 1..20: mol_type = other DNA
ggtctcaatctcctgacctc

SEQ ID NO: 106929 - DNA, 20 bp, synthetic construct
  source 1..20: mol_type = other DNA
tggtctcaatctcctgacct

SEQ ID NO: 106930 - DNA, 20 bp, synthetic construct
  source 1..20: mol_type = other DNA
ctggtctcaatctcctgacc

SEQ ID NO: 106931 - DNA, 20 bp, synthetic construct
  source 1..20: mol_type = other DNA
gctggtctcaatctcctgac

SEQ ID NO: 106932 - DNA, 20 bp, synthetic construct
  source 1..20: mol_type = other DNA
ggctggtctcaatctcctga

SEQ ID NO: 106933 - DNA, 20 bp, synthetic construct
  source 1..20: mol_type = other DNA
aggctggtctcaatctcctg

SEQ ID NO: 106934 - DNA, 20 bp, synthetic construct
  source 1..20: mol_type = other DNA
caggctggtctcaatctcct

SEQ ID NO: 106935 - DNA, 20 bp, synthetic construct
  source 1..20: mol_type = other DNA
ccaggctggtctcaatctcc

SEQ ID NO: 106936 - DNA, 20 bp, synthetic construct
  source 1..20: mol_type = other DNA
gccaggctggtctcaatctc

SEQ ID NO: 106937 - DNA, 20 bp, synthetic construct
  source 1..20: mol_type = other DNA
agccaggctggtctcaatct

SEQ ID NO: 106938 - DNA, 20 bp, synthetic construct
  source 1..20: mol_type = other DNA
tagccaggctggtctcaatc

SEQ ID NO: 106939 - DNA, 20 bp, synthetic construct
  source 1..20: mol_type = other DNA
ttagccaggctggtctcaat

SEQ ID NO: 106940 - DNA, 20 bp, synthetic construct
  source 1..20: mol_type = other DNA
gttagccaggctggtctcaa

SEQ ID NO: 106941 - DNA, 20 bp, synthetic construct
  source 1..20: mol_type = other DNA
tgttagccaggctggtctca

SEQ ID NO: 106942 - DNA, 20 bp, synthetic construct
  source 1..20: mol_type = other DNA
atgttagccaggctggtctc

SEQ ID NO: 106943 - DNA, 20 bp, synthetic construct
  source 1..20: mol_type = other DNA
catgttagccaggctggtct

SEQ ID NO: 106944 - DNA, 20 bp, synthetic construct
  source 1..20: mol_type = other DNA
ccatgttagccaggctggtc

SEQ ID NO: 106945 - DNA, 20 bp, synthetic construct
  source 1..20: mol_type = other DNA
accatgttagccaggctggt

SEQ ID NO: 106946 - DNA, 20 bp, synthetic construct
  source 1..20: mol_type = other DNA
caccatgttagccaggctgg

SEQ ID NO: 106947 - DNA, 20 bp, synthetic construct
  source 1..20: mol_type = other DNA
tcaccatgttagccaggctg

SEQ ID NO: 106948 - DNA, 20 bp, synthetic construct
  source 1..20: mol_type = other DNA
ttcaccatgttagccaggct

SEQ ID NO: 106949 - DNA, 20 bp, synthetic construct
  source 1..20: mol_type = other DNA
tttcaccatgttagccaggc

SEQ ID NO: 106950 - DNA, 20 bp, synthetic construct
  source 1..20: mol_type = other DNA
gtttcaccatgttagccagg

SEQ ID NO: 106951 - DNA, 20 bp, synthetic construct
  source 1..20: mol_type = other DNA
ggtttcaccatgttagccag

SEQ ID NO: 106952 - DNA, 20 bp, synthetic construct
  source 1..20: mol_type = other DNA
gggtttcaccatgttagcca

SEQ ID NO: 106953 - DNA, 20 bp, synthetic construct
  source 1..20: mol_type = other DNA
ggggtttcaccatgttagcc

SEQ ID NO: 106954 - DNA, 20 bp, synthetic construct
  source 1..20: mol_type = other DNA
tggggtttcaccatgttagc

SEQ ID NO: 106955 - DNA, 20 bp, synthetic construct
  source 1..20: mol_type = other DNA
atggggtttcaccatgttag

SEQ ID NO: 106956 - DNA, 20 bp, synthetic construct
  source 1..20: mol_type = other DNA
gatggggtttcaccatgtta

SEQ ID NO: 106957 - DNA, 20 bp, synthetic construct
  source 1..20: mol_type = other DNA
agatggggtttcaccatgtt

SEQ ID NO: 106958 - DNA, 20 bp, synthetic construct
  source 1..20: mol_type = other DNA
gagatggggtttcaccatgt

SEQ ID NO: 106959 - DNA, 20 bp, synthetic construct
  source 1..20: mol_type = other DNA
agagatggggtttcaccatg

SEQ ID NO: 106960 - DNA, 20 bp, synthetic construct
  source 1..20: mol_type = other DNA
tagagatggggtttcaccat

SEQ ID NO: 106961 - DNA, 20 bp, synthetic construct
  source 1..20: mol_type = other DNA
gtagagatggggtttcacca

SEQ ID NO: 106962 - DNA, 20 bp, synthetic construct
  source 1..20: mol_type = other DNA
agtagagatggggtttcacc

SEQ ID NO: 106963 - DNA, 20 bp, synthetic construct
  source 1..20: mol_type = other DNA
tagtagagatggggtttcac

SEQ ID NO: 106964 - DNA, 20 bp, synthetic construct
  source 1..20: mol_type = other DNA
ttagtagagatggggtttca

SEQ ID NO: 106965 - DNA, 20 bp, synthetic construct
  source 1..20: mol_type = other DNA
tttagtagagatggggtttc

SEQ ID NO: 106966 - DNA, 20 bp, synthetic construct
  source 1..20: mol_type = other DNA
ttttagtagagatggggttt

SEQ ID NO: 106967 - DNA, 20 bp, synthetic construct
  source 1..20: mol_type = other DNA
tttttagtagagatggggtt

SEQ ID NO: 106968 - DNA, 20 bp, synthetic construct
  source 1..20: mol_type = other DNA
atttttagtagagatggggt

SEQ ID NO: 106969 - DNA, 20 bp, synthetic construct
  source 1..20: mol_type = other DNA
tatttttagtagagatgggg

SEQ ID NO: 106970 - DNA, 20 bp, synthetic construct
  source 1..20: mol_type = other DNA
gtatttttagtagagatggg

SEQ ID NO: 106971 - DNA, 20 bp, synthetic construct
  source 1..20: mol_type = other DNA
tgtatttttagtagagatgg

SEQ ID NO: 106972 - DNA, 20 bp, synthetic construct
  source 1..20: mol_type = other DNA
ttgtatttttagtagagatg

SEQ ID NO: 106973 - DNA, 20 bp, synthetic construct
  source 1..20: mol_type = other DNA
tttgtatttttagtagagat

SEQ ID NO: 106974 - DNA, 20 bp, synthetic construct
  source 1..20: mol_type = other DNA
ttttgtatttttagtagaga

SEQ ID NO: 106975 - DNA, 20 bp, synthetic construct
  source 1..20: mol_type = other DNA
gttttgtatttttagtagag

SEQ ID NO: 106976 - DNA, 20 bp, synthetic construct
  source 1..20: mol_type = other DNA
agttttgtatttttagtaga

SEQ ID NO: 106977 - DNA, 20 bp, synthetic construct
  source 1..20: mol_type = other DNA
aagttttgtatttttagtag

SEQ ID NO: 106978 - DNA, 20 bp, synthetic construct
  source 1..20: mol_type = other DNA
taagttttgtatttttagta

SEQ ID NO: 106979 - DNA, 20 bp, synthetic construct
  source 1..20: mol_type = other DNA
ctaagttttgtatttttagt

SEQ ID NO: 106980 - DNA, 20 bp, synthetic construct
  source 1..20: mol_type = other DNA
gctaagttttgtatttttag

SEQ ID NO: 106981 - DNA, 20 bp, synthetic construct
  source 1..20: mol_type = other DNA
ggctaagttttgtattttta

SEQ ID NO: 106982 - DNA, 20 bp, synthetic construct
  source 1..20: mol_type = other DNA
tggctaagttttgtattttt

SEQ ID NO: 106983 - DNA, 20 bp, synthetic construct
  source 1..20: mol_type = other DNA
ctggctaagttttgtatttt

SEQ ID NO: 106984 - DNA, 20 bp, synthetic construct
  source 1..20: mol_type = other DNA
cctggctaagttttgtattt

SEQ ID NO: 106985 - DNA, 20 bp, synthetic construct
  source 1..20: mol_type = other DNA
gcctggctaagttttgtatt

SEQ ID NO: 106986 - DNA, 20 bp, synthetic construct
  source 1..20: mol_type = other DNA
cgcctggctaagttttgtat

SEQ ID NO: 106987 - DNA, 20 bp, synthetic construct
  source 1..20: mol_type = other DNA
acgcctggctaagttttgta

SEQ ID NO: 106988 - DNA, 20 bp, synthetic construct
  source 1..20: mol_type = other DNA
cacgcctggctaagttttgt

SEQ ID NO: 106989 - DNA, 20 bp, synthetic construct
  source 1..20: mol_type = other DNA
ccacgcctggctaagttttg

SEQ ID NO: 106990 - DNA, 20 bp, synthetic construct
  source 1..20: mol_type = other DNA
tccacgcctggctaagtttt

SEQ ID NO: 106991 - DNA, 20 bp, synthetic construct
  source 1..20: mol_type = other DNA
ctccacgcctggctaagttt

SEQ ID NO: 106992 - DNA, 20 bp, synthetic construct
  source 1..20: mol_type = other DNA
cctccacgcctggctaagtt

SEQ ID NO: 106993 - DNA, 20 bp, synthetic construct
  source 1..20: mol_type = other DNA
gcctccacgcctggctaagt

SEQ ID NO: 106994 - DNA, 20 bp, synthetic construct
  source 1..20: mol_type = other DNA
tgcctccacgcctggctaag

SEQ ID NO: 106995 - DNA, 20 bp, synthetic construct
  source 1..20: mol_type = other DNA
gtgcctccacgcctggctaa

SEQ ID NO: 106996 - DNA, 20 bp, synthetic construct
  source 1..20: mol_type = other DNA
cgtgcctccacgcctggcta

SEQ ID NO: 106997 - DNA, 20 bp, synthetic construct
  source 1..20: mol_type = other DNA
acgtgcctccacgcctggct

SEQ ID NO: 106998 - DNA, 20 bp, synthetic construct
  source 1..20: mol_type = other DNA
cacgtgcctccacgcctggc

SEQ ID NO: 106999 - DNA, 20 bp, synthetic construct
  source 1..20: mol_type = other DNA
gcacgtgcctccacgcctgg

SEQ ID NO: 107000 - DNA, 20 bp, synthetic construct
  source 1..20: mol_type = other DNA
ggcacgtgcctccacgcctg

SEQ ID NO: 107001 - DNA, 20 bp, synthetic construct
  source 1..20: mol_type = other DNA
aggcacgtgcctccacgcct

SEQ ID NO: 107002 - DNA, 20 bp, synthetic construct
  source 1..20: mol_type = other DNA
caggcacgtgcctccacgcc

SEQ ID NO: 107003 - DNA, 20 bp, synthetic construct
  source 1..20: mol_type = other DNA
acaggcacgtgcctccacgc

SEQ ID NO: 107004 - DNA, 20 bp, synthetic construct
  source 1..20: mol_type = other DNA
tacaggcacgtgcctccacg

SEQ ID NO: 107005 - DNA, 20 bp, synthetic construct
  source 1..20: mol_type = other DNA
ttacaggcacgtgcctccac

SEQ ID NO: 107006 - DNA, 20 bp, synthetic construct
  source 1..20: mol_type = other DNA
attacaggcacgtgcctcca

SEQ ID NO: 107007 - DNA, 20 bp, synthetic construct
  source 1..20: mol_type = other DNA
gattacaggcacgtgcctcc

SEQ ID NO: 107008 - DNA, 20 bp, synthetic construct
  source 1..20: mol_type = other DNA
agattacaggcacgtgcctc

SEQ ID NO: 107009 - DNA, 20 bp, synthetic construct
  source 1..20: mol_type = other DNA
gagattacaggcacgtgcct

SEQ ID NO: 107010 - DNA, 20 bp, synthetic construct
  source 1..20: mol_type = other DNA
tgagattacaggcacgtgcc

SEQ ID NO: 107011 - DNA, 20 bp, synthetic construct
  source 1..20: mol_type = other DNA
ctgagattacaggcacgtgc

SEQ ID NO: 107012 - DNA, 20 bp, synthetic construct
  source 1..20: mol_type = other DNA
tctgagattacaggcacgtg

SEQ ID NO: 107013 - DNA, 20 bp, synthetic construct
  source 1..20: mol_type = other DNA
atctgagattacaggcacgt

SEQ ID NO: 107014 - DNA, 20 bp, synthetic construct
  source 1..20: mol_type = other DNA
tatctgagattacaggcacg

SEQ ID NO: 107015 - DNA, 20 bp, synthetic construct
  source 1..20: mol_type = other DNA
gtatctgagattacaggcac

SEQ ID NO: 107016 - DNA, 20 bp, synthetic construct
  source 1..20: mol_type = other DNA
agtatctgagattacaggca

SEQ ID NO: 107017 - DNA, 20 bp, synthetic construct
  source 1..20: mol_type = other DNA
gagtatctgagattacaggc

SEQ ID NO: 107018 - DNA, 20 bp, synthetic construct
  source 1..20: mol_type = other DNA
tgagtatctgagattacagg

SEQ ID NO: 107019 - DNA, 20 bp, synthetic construct
  source 1..20: mol_type = other DNA
ctgagtatctgagattacag

SEQ ID NO: 107020 - DNA, 20 bp, synthetic construct
  source 1..20: mol_type = other DNA
cctgagtatctgagattaca

SEQ ID NO: 107021 - DNA, 20 bp, synthetic construct
  source 1..20: mol_type = other DNA
tcctgagtatctgagattac

SEQ ID NO: 107022 - DNA, 20 bp, synthetic construct
  source 1..20: mol_type = other DNA
ctcctgagtatctgagatta

SEQ ID NO: 107023 - DNA, 20 bp, synthetic construct
  source 1..20: mol_type = other DNA
cctcctgagtatctgagatt

SEQ ID NO: 107024 - DNA, 20 bp, synthetic construct
  source 1..20: mol_type = other DNA
gcctcctgagtatctgagat

SEQ ID NO: 107025 - DNA, 20 bp, synthetic construct
  source 1..20: mol_type = other DNA
agcctcctgagtatctgaga

SEQ ID NO: 107026 - DNA, 20 bp, synthetic construct
  source 1..20: mol_type = other DNA
cagcctcctgagtatctgag

SEQ ID NO: 107027 - DNA, 20 bp, synthetic construct
  source 1..20: mol_type = other DNA
tcagcctcctgagtatctga

SEQ ID NO: 107028 - DNA, 20 bp, synthetic construct
  source 1..20: mol_type = other DNA
ctcagcctcctgagtatctg

SEQ ID NO: 107029 - DNA, 20 bp, synthetic construct
  source 1..20: mol_type = other DNA
cctcagcctcctgagtatct

SEQ ID NO: 107030 - DNA, 20 bp, synthetic construct
  source 1..20: mol_type = other DNA
gcctcagcctcctgagtatc

SEQ ID NO: 107031 - DNA, 20 bp, synthetic construct
  source 1..20: mol_type = other DNA
tgcctcagcctcctgagtat

SEQ ID NO: 107032 - DNA, 20 bp, synthetic construct
  source 1..20: mol_type = other DNA
ctgcctcagcctcctgagta

SEQ ID NO: 107033 - DNA, 20 bp, synthetic construct
  source 1..20: mol_type = other DNA
cctgcctcagcctcctgagt

SEQ ID NO: 107034 - DNA, 20 bp, synthetic construct
  source 1..20: mol_type = other DNA
tcctgcctcagcctcctgag

SEQ ID NO: 107035 - DNA, 20 bp, synthetic construct
  source 1..20: mol_type = other DNA
ctcctgcctcagcctcctga

SEQ ID NO: 107036 - DNA, 20 bp, synthetic construct
  source 1..20: mol_type = other DNA
tctcctgcctcagcctcctg

SEQ ID NO: 107037 - DNA, 20 bp, synthetic construct
  source 1..20: mol_type = other DNA
ttctcctgcctcagcctcct

SEQ ID NO: 107038 - DNA, 20 bp, synthetic construct
  source 1..20: mol_type = other DNA
attctcctgcctcagcctcc

SEQ ID NO: 107039 - DNA, 20 bp, synthetic construct
  source 1..20: mol_type = other DNA
aattctcctgcctcagcctc

SEQ ID NO: 107040 - DNA, 20 bp, synthetic construct
  source 1..20: mol_type = other DNA
caattctcctgcctcagcct

SEQ ID NO: 107041 - DNA, 20 bp, synthetic construct
  source 1..20: mol_type = other DNA
gcaattctcctgcctcagcc

SEQ ID NO: 107042 - DNA, 20 bp, synthetic construct
  source 1..20: mol_type = other DNA
agcaattctcctgcctcagc

SEQ ID NO: 107043 - DNA, 20 bp, synthetic construct
  source 1..20: mol_type = other DNA
aagcaattctcctgcctcag

SEQ ID NO: 107044 - DNA, 20 bp, synthetic construct
  source 1..20: mol_type = other DNA
caagcaattctcctgcctca

SEQ ID NO: 107045 - DNA, 20 bp, synthetic construct
  source 1..20: mol_type = other DNA
tcaagcaattctcctgcctc

SEQ ID NO: 107046 - DNA, 20 bp, synthetic construct
  source 1..20: mol_type = other DNA
ttcaagcaattctcctgcct

SEQ ID NO: 107047 - DNA, 20 bp, synthetic construct
  source 1..20: mol_type = other DNA
gttcaagcaattctcctgcc

SEQ ID NO: 107048 - DNA, 20 bp, synthetic construct
  source 1..20: mol_type = other DNA
ggttcaagcaattctcctgc

SEQ ID NO: 107049 - DNA, 20 bp, synthetic construct
  source 1..20: mol_type = other DNA
gggttcaagcaattctcctg

SEQ ID NO: 107050 - DNA, 20 bp, synthetic construct
  source 1..20: mol_type = other DNA
tgggttcaagcaattctcct

SEQ ID NO: 107051 - DNA, 20 bp, synthetic construct
  source 1..20: mol_type = other DNA
ctgggttcaagcaattctcc

SEQ ID NO: 107052 - DNA, 20 bp, synthetic construct
  source 1..20: mol_type = other DNA
cctgggttcaagcaattctc

SEQ ID NO: 107053 - DNA, 20 bp, synthetic construct
  source 1..20: mol_type = other DNA
tcctgggttcaagcaattct

SEQ ID NO: 107054 - DNA, 20 bp, synthetic construct
  source 1..20: mol_type = other DNA
ctcctgggttcaagcaattc

SEQ ID NO: 107055 - DNA, 20 bp, synthetic construct
  source 1..20: mol_type = other DNA
cctcctgggttcaagcaatt

SEQ ID NO: 107056 - DNA, 20 bp, synthetic construct
  source 1..20: mol_type = other DNA
gcctcctgggttcaagcaat

SEQ ID NO: 107057 - DNA, 20 bp, synthetic construct
  source 1..20: mol_type = other DNA
tgcctcctgggttcaagcaa

SEQ ID NO: 107058 - DNA, 20 bp, synthetic construct
  source 1..20: mol_type = other DNA
ctgcctcctgggttcaagca

SEQ ID NO: 107059 - DNA, 20 bp, synthetic construct
  source 1..20: mol_type = other DNA
tctgcctcctgggttcaagc

SEQ ID NO: 107060 - DNA, 20 bp, synthetic construct
  source 1..20: mol_type = other DNA
ctctgcctcctgggttcaag

SEQ ID NO: 107061 - DNA, 20 bp, synthetic construct
  source 1..20: mol_type = other DNA
cctctgcctcctgggttcaa

SEQ ID NO: 107062 - DNA, 20 bp, synthetic construct
  source 1..20: mol_type = other DNA
acctctgcctcctgggttca

SEQ ID NO: 107063 - DNA, 20 bp, synthetic construct
  source 1..20: mol_type = other DNA
aacctctgcctcctgggttc

SEQ ID NO: 107064 - DNA, 20 bp, synthetic construct
  source 1..20: mol_type = other DNA
caacctctgcctcctgggtt

SEQ ID NO: 107065 - DNA, 20 bp, synthetic construct
  source 1..20: mol_type = other DNA
gcaacctctgcctcctgggt

SEQ ID NO: 107066 - DNA, 20 bp, synthetic construct
  source 1..20: mol_type = other DNA
tgcaacctctgcctcctggg

SEQ ID NO: 107067 - DNA, 20 bp, synthetic construct
  source 1..20: mol_type = other DNA
ctgcaacctctgcctcctgg

SEQ ID NO: 107068 - DNA, 20 bp, synthetic construct
  source 1..20: mol_type = other DNA
actgcaacctctgcctcctg

SEQ ID NO: 107069 - DNA, 20 bp, synthetic construct
  source 1..20: mol_type = other DNA
cactgcaacctctgcctcct

SEQ ID NO: 107070 - DNA, 20 bp, synthetic construct
  source 1..20: mol_type = other DNA
tcactgcaacctctgcctcc

SEQ ID NO: 107071 - DNA, 20 bp, synthetic construct
  source 1..20: mol_type = other DNA
ctcactgcaacctctgcctc

SEQ ID NO: 107072 - DNA, 20 bp, synthetic construct
  source 1..20: mol_type = other DNA
actcactgcaacctctgcct

SEQ ID NO: 107073 - DNA, 20 bp, synthetic construct
  source 1..20: mol_type = other DNA
gactcactgcaacctctgcc

SEQ ID NO: 107074 - DNA, 20 bp, synthetic construct
  source 1..20: mol_type = other DNA
tgactcactgcaacctctgc

SEQ ID NO: 107075 - DNA, 20 bp, synthetic construct
  source 1..20: mol_type = other DNA
ttgactcactgcaacctctg

SEQ ID NO: 107076 - DNA, 20 bp, synthetic construct
  source 1..20: mol_type = other DNA
attgactcactgcaacctct

SEQ ID NO: 107077 - DNA, 20 bp, synthetic construct
  source 1..20: mol_type = other DNA
tattgactcactgcaacctc

SEQ ID NO: 107078 - DNA, 20 bp, synthetic construct
  source 1..20: mol_type = other DNA
atattgactcactgcaacct

SEQ ID NO: 107079 - DNA, 20 bp, synthetic construct
  source 1..20: mol_type = other DNA
aatattgactcactgcaacc

SEQ ID NO: 107080 - DNA, 20 bp, synthetic construct
  source 1..20: mol_type = other DNA
caatattgactcactgcaac

SEQ ID NO: 107081 - DNA, 20 bp, synthetic construct
  source 1..20: mol_type = other DNA
acaatattgactcactgcaa

SEQ ID NO: 107082 - DNA, 20 bp, synthetic construct
  source 1..20: mol_type = other DNA
cacaatattgactcactgca

SEQ ID NO: 107083 - DNA, 20 bp, synthetic construct
  source 1..20: mol_type = other DNA
gcacaatattgactcactgc

SEQ ID NO: 107084 - DNA, 20 bp, synthetic construct
  source 1..20: mol_type = other DNA
ggcacaatattgactcactg

SEQ ID NO: 107085 - DNA, 20 bp, synthetic construct
  source 1..20: mol_type = other DNA
tggcacaatattgactcact

SEQ ID NO: 107086 - DNA, 20 bp, synthetic construct
  source 1..20: mol_type = other DNA
gtggcacaatattgactcac

SEQ ID NO: 107087 - DNA, 20 bp, synthetic construct
  source 1..20: mol_type = other DNA
agtggcacaatattgactca

SEQ ID NO: 107088 - DNA, 20 bp, synthetic construct
  source 1..20: mol_type = other DNA
cagtggcacaatattgactc

SEQ ID NO: 107089 - DNA, 20 bp, synthetic construct
  source 1..20: mol_type = other DNA
gcagtggcacaatattgact

SEQ ID NO: 107090 - DNA, 20 bp, synthetic construct
  source 1..20: mol_type = other DNA
tgcagtggcacaatattgac

SEQ ID NO: 107091 - DNA, 20 bp, synthetic construct
  source 1..20: mol_type = other DNA
gtgcagtggcacaatattga

SEQ ID NO: 107092 - DNA, 20 bp, synthetic construct
  source 1..20: mol_type = other DNA
ggtgcagtggcacaatattg

SEQ ID NO: 107093 - DNA, 20 bp, synthetic construct
  source 1..20: mol_type = other DNA
gggtgcagtggcacaatatt

SEQ ID NO: 107094 - DNA, 20 bp, synthetic construct
  source 1..20: mol_type = other DNA
ggggtgcagtggcacaatat

SEQ ID NO: 107095 - DNA, 20 bp, synthetic construct
  source 1..20: mol_type = other DNA
tggggtgcagtggcacaata

SEQ ID NO: 107096 - DNA, 20 bp, synthetic construct
  source 1..20: mol_type = other DNA
ctggggtgcagtggcacaat

SEQ ID NO: 107097 - DNA, 20 bp, synthetic construct
  source 1..20: mol_type = other DNA
gctggggtgcagtggcacaa

SEQ ID NO: 107098 - DNA, 20 bp, synthetic construct
  source 1..20: mol_type = other DNA
ggctggggtgcagtggcaca

SEQ ID NO: 107099 - DNA, 20 bp, synthetic construct
  source 1..20: mol_type = other DNA
aggctggggtgcagtggcac

SEQ ID NO: 107100 - DNA, 20 bp, synthetic construct
  source 1..20: mol_type = other DNA
caggctggggtgcagtggca

SEQ ID NO: 107101 - DNA, 20 bp, synthetic construct
  source 1..20: mol_type = other DNA
ccaggctggggtgcagtggc

SEQ ID NO: 107102 - DNA, 20 bp, synthetic construct
  source 1..20: mol_type = other DNA
cccaggctggggtgcagtgg

SEQ ID NO: 107103 - DNA, 20 bp, synthetic construct
  source 1..20: mol_type = other DNA
gcccaggctggggtgcagtg

SEQ ID NO: 107104 - DNA, 20 bp, synthetic construct
  source 1..20: mol_type = other DNA
cgcccaggctggggtgcagt

SEQ ID NO: 107105 - DNA, 20 bp, synthetic construct
  source 1..20: mol_type = other DNA
tcgcccaggctggggtgcag

SEQ ID NO: 107106 - DNA, 20 bp, synthetic construct
  source 1..20: mol_type = other DNA
gtcgcccaggctggggtgca

SEQ ID NO: 107107 - DNA, 20 bp, synthetic construct
  source 1..20: mol_type = other DNA
tgtcgcccaggctggggtgc

SEQ ID NO: 107108 - DNA, 20 bp, synthetic construct
  source 1..20: mol_type = other DNA
ctgtcgcccaggctggggtg

SEQ ID NO: 107109 - DNA, 20 bp, synthetic construct
  source 1..20: mol_type = other DNA
tctgtcgcccaggctggggt

SEQ ID NO: 107110 - DNA, 20 bp, synthetic construct
  source 1..20: mol_type = other DNA
ctctgtcgcccaggctgggg

SEQ ID NO: 107111 - DNA, 20 bp, synthetic construct
  source 1..20: mol_type = other DNA
actctgtcgcccaggctggg

SEQ ID NO: 107112 - DNA, 20 bp, synthetic construct
  source 1..20: mol_type = other DNA
cactctgtcgcccaggctgg

SEQ ID NO: 107113 - DNA, 20 bp, synthetic construct
  source 1..20: mol_type = other DNA
tcactctgtcgcccaggctg

SEQ ID NO: 107114 - DNA, 20 bp, synthetic construct
  source 1..20: mol_type = other DNA
ctcactctgtcgcccaggct

SEQ ID NO: 107115 - DNA, 20 bp, synthetic construct
  source 1..20: mol_type = other DNA
tctcactctgtcgcccaggc

SEQ ID NO: 107116 - DNA, 20 bp, synthetic construct
  source 1..20: mol_type = other DNA
gtctcactctgtcgcccagg

SEQ ID NO: 107117 - DNA, 20 bp, synthetic construct
  source 1..20: mol_type = other DNA
agtctcactctgtcgcccag

SEQ ID NO: 107118 - DNA, 20 bp, synthetic construct
  source 1..20: mol_type = other DNA
gagtctcactctgtcgccca

SEQ ID NO: 107119 - DNA, 20 bp, synthetic construct
  source 1..20: mol_type = other DNA
ggagtctcactctgtcgccc

SEQ ID NO: 107120 - DNA, 20 bp, synthetic construct
  source 1..20: mol_type = other DNA
cggagtctcactctgtcgcc

SEQ ID NO: 107121 - DNA, 20 bp, synthetic construct
  source 1..20: mol_type = other DNA
acggagtctcactctgtcgc

SEQ ID NO: 107122 - DNA, 20 bp, synthetic construct
  source 1..20: mol_type = other DNA
gacggagtctcactctgtcg

SEQ ID NO: 107123 - DNA, 20 bp, synthetic construct
  source 1..20: mol_type = other DNA
agacggagtctcactctgtc

SEQ ID NO: 107124 - DNA, 20 bp, synthetic construct
  source 1..20: mol_type = other DNA
gagacggagtctcactctgt

SEQ ID NO: 107125 - DNA, 20 bp, synthetic construct
  source 1..20: mol_type = other DNA
tgagacggagtctcactctg

SEQ ID NO: 107126 - DNA, 20 bp, synthetic construct
  source 1..20: mol_type = other DNA
ttgagacggagtctcactct

SEQ ID NO: 107127 - DNA, 20 bp, synthetic construct
  source 1..20: mol_type = other DNA
tttgagacggagtctcactc

SEQ ID NO: 107128 - DNA, 20 bp, synthetic construct
  source 1..20: mol_type = other DNA
ttttgagacggagtctcact

SEQ ID NO: 107129 - DNA, 20 bp, synthetic construct
  source 1..20: mol_type = other DNA
tttttgagacggagtctcac

SEQ ID NO: 107130 - DNA, 20 bp, synthetic construct
  source 1..20: mol_type = other DNA
ttttttgagacggagtctca

SEQ ID NO: 107131 - DNA, 20 bp, synthetic construct
  source 1..20: mol_type = other DNA
tttttttgagacggagtctc

SEQ ID NO: 107132 - DNA, 20 bp, synthetic construct
  source 1..20: mol_type = other DNA
ttttttttgagacggagtct

SEQ ID NO: 107133 - DNA, 20 bp, synthetic construct
  source 1..20: mol_type = other DNA
tttttttttgagacggagtc

SEQ ID NO: 107134 - DNA, 20 bp, synthetic construct
  source 1..20: mol_type = other DNA
ttttttttttgagacggagt

SEQ ID NO: 107135 - DNA, 20 bp, synthetic construct
  source 1..20: mol_type = other DNA
tttttttttttgagacggag

SEQ ID NO: 107136 - DNA, 20 bp, synthetic construct
  source 1..20: mol_type = other DNA
ttttttttttttgagacgga

SEQ ID NO: 107137 - DNA, 20 bp, synthetic construct
  source 1..20: mol_type = other DNA
tttttttttttttgagacgg

SEQ ID NO: 107138 - DNA, 20 bp, synthetic construct
  source 1..20: mol_type = other DNA
ttttttttttttttgagacg

SEQ ID NO: 107139 - DNA, 20 bp, synthetic construct
  source 1..20: mol_type = other DNA
tttttttttttttttgagac

SEQ ID NO: 107140 - DNA, 20 bp, synthetic construct
  source 1..20: mol_type = other DNA
ttttttttttttttttgaga

SEQ ID NO: 107141 - DNA, 20 bp, synthetic construct
  source 1..20: mol_type = other DNA
tttttttttttttttttgag

SEQ ID NO: 107142 - DNA, 20 bp, synthetic construct
  source 1..20: mol_type = other DNA
ttttttttttttttttttga

SEQ ID NO: 107143 - DNA, 20 bp, synthetic construct
  source 1..20: mol_type = other DNA
cttttttttttttttttttg

SEQ ID NO: 107144 - DNA, 20 bp, synthetic construct
  source 1..20: mol_type = other DNA
tctttttttttttttttttt

SEQ ID NO: 107145 - DNA, 20 bp, synthetic construct
  source 1..20: mol_type = other DNA
ctcttttttttttttttttt

SEQ ID NO: 107146 - DNA, 20 bp, synthetic construct
  source 1..20: mol_type = other DNA
tctctttttttttttttttt

SEQ ID NO: 107147 - DNA, 20 bp, synthetic construct
  source 1..20: mol_type = other DNA
atctcttttttttttttttt

SEQ ID NO: 107148 - DNA, 20 bp, synthetic construct
  source 1..20: mol_type = other DNA
gatctctttttttttttttt

SEQ ID NO: 107149 - DNA, 20 bp, synthetic construct
  source 1..20: mol_type = other DNA
tgatctcttttttttttttt

SEQ ID NO: 107150 - DNA, 20 bp, synthetic construct
  source 1..20: mol_type = other DNA
gtgatctctttttttttttt

SEQ ID NO: 107151 - DNA, 20 bp, synthetic construct
  source 1..20: mol_type = other DNA
tgtgatctcttttttttttt

SEQ ID NO: 107152 - DNA, 20 bp, synthetic construct
  source 1..20: mol_type = other DNA
atgtgatctctttttttttt

SEQ ID NO: 107153 - DNA, 20 bp, synthetic construct
  source 1..20: mol_type = other DNA
tatgtgatctcttttttttt

SEQ ID NO: 107154 - DNA, 20 bp, synthetic construct
  source 1..20: mol_type = other DNA
ttatgtgatctctttttttt

SEQ ID NO: 107155 - DNA, 20 bp, synthetic construct
  source 1..20: mol_type = other DNA
cttatgtgatctcttttttt

SEQ ID NO: 107156 - DNA, 20 bp, synthetic construct
  source 1..20: mol_type = other DNA
ccttatgtgatctctttttt

SEQ ID NO: 107157 - DNA, 20 bp, synthetic construct
  source 1..20: mol_type = other DNA
cccttatgtgatctcttttt

SEQ ID NO: 107158 - DNA, 20 bp, synthetic construct
  source 1..20: mol_type = other DNA
acccttatgtgatctctttt

SEQ ID NO: 107159 - DNA, 20 bp, synthetic construct
  source 1..20: mol_type = other DNA
aacccttatgtgatctcttt

SEQ ID NO: 107160 - DNA, 20 bp, synthetic construct
  source 1..20: mol_type = other DNA
caacccttatgtgatctctt

SEQ ID NO: 107161 - DNA, 20 bp, synthetic construct
  source 1..20: mol_type = other DNA
gcaacccttatgtgatctct

SEQ ID NO: 107162 - DNA, 20 bp, synthetic construct
  source 1..20: mol_type = other DNA
tgcaacccttatgtgatctc

SEQ ID NO: 107163 - DNA, 20 bp, synthetic construct
  source 1..20: mol_type = other DNA
ttgcaacccttatgtgatct

SEQ ID NO: 107164 - DNA, 20 bp, synthetic construct
  source 1..20: mol_type = other DNA
tttgcaacccttatgtgatc

SEQ ID NO: 107165 - DNA, 20 bp, synthetic construct
  source 1..20: mol_type = other DNA
atttgcaacccttatgtgat

SEQ ID NO: 107166 - DNA, 20 bp, synthetic construct
  source 1..20: mol_type = other DNA
tatttgcaacccttatgtga

SEQ ID NO: 107167 - DNA, 20 bp, synthetic construct
  source 1..20: mol_type = other DNA
ttatttgcaacccttatgtg

SEQ ID NO: 107168 - DNA, 20 bp, synthetic construct
  source 1..20: mol_type = other DNA
gttatttgcaacccttatgt

SEQ ID NO: 107169 - DNA, 20 bp, synthetic construct
  source 1..20: mol_type = other DNA
tgttatttgcaacccttatg

SEQ ID NO: 107170 - DNA, 20 bp, synthetic construct
  source 1..20: mol_type = other DNA
atgttatttgcaacccttat

SEQ ID NO: 107171 - DNA, 20 bp, synthetic construct
  source 1..20: mol_type = other DNA
aatgttatttgcaaccctta

SEQ ID NO: 107172 - DNA, 20 bp, synthetic construct
  source 1..20: mol_type = other DNA
aaatgttatttgcaaccctt

SEQ ID NO: 107173 - DNA, 20 bp, synthetic construct
  source 1..20: mol_type = other DNA
aaaatgttatttgcaaccct

SEQ ID NO: 107174 - DNA, 20 bp, synthetic construct
  source 1..20: mol_type = other DNA
taaaatgttatttgcaaccc

SEQ ID NO: 107175 - DNA, 20 bp, synthetic construct
  source 1..20: mol_type = other DNA
ataaaatgttatttgcaacc

SEQ ID NO: 107176 - DNA, 20 bp, synthetic construct
  source 1..20: mol_type = other DNA
tataaaatgttatttgcaac

SEQ ID NO: 107177 - DNA, 20 bp, synthetic construct
  source 1..20: mol_type = other DNA
ttataaaatgttatttgcaa

SEQ ID NO: 107178 - DNA, 20 bp, synthetic construct
  source 1..20: mol_type = other DNA
gttataaaatgttatttgca

SEQ ID NO: 107179 - DNA, 20 bp, synthetic construct
  source 1..20: mol_type = other DNA
ggttataaaatgttatttgc

SEQ ID NO: 107180 - DNA, 20 bp, synthetic construct
  source 1..20: mol_type = other DNA
gggttataaaatgttatttg

SEQ ID NO: 107181 - DNA, 20 bp, synthetic construct
  source 1..20: mol_type = other DNA
tgggttataaaatgttattt

SEQ ID NO: 107182 - DNA, 20 bp, synthetic construct
  source 1..20: mol_type = other DNA
atgggttataaaatgttatt

SEQ ID NO: 107183 - DNA, 20 bp, synthetic construct
  source 1..20: mol_type = other DNA
aatgggttataaaatgttat

SEQ ID NO: 107184 - DNA, 20 bp, synthetic construct
  source 1..20: mol_type = other DNA
taatgggttataaaatgtta

SEQ ID NO: 107185 - DNA, 20 bp, synthetic construct
  source 1..20: mol_type = other DNA
ataatgggttataaaatgtt

SEQ ID NO: 107186 - DNA, 20 bp, synthetic construct
  source 1..20: mol_type = other DNA
aataatgggttataaaatgt

SEQ ID NO: 107187 - DNA, 20 bp, synthetic construct
  source 1..20: mol_type = other DNA
aaataatgggttataaaatg

SEQ ID NO: 107188 - DNA, 20 bp, synthetic construct
  source 1..20: mol_type = other DNA
aaaataatgggttataaaat

SEQ ID NO: 107189 - DNA, 20 bp, synthetic construct
  source 1..20: mol_type = other DNA
taaaataatgggttataaaa

SEQ ID NO: 107190 - DNA, 20 bp, synthetic construct
  source 1..20: mol_type = other DNA
ttaaaataatgggttataaa

SEQ ID NO: 107191 - DNA, 20 bp, synthetic construct
  source 1..20: mol_type = other DNA
tttaaaataatgggttataa

SEQ ID NO: 107192 - DNA, 20 bp, synthetic construct
  source 1..20: mol_type = other DNA
gtttaaaataatgggttata

SEQ ID NO: 107193 - DNA, 20 bp, synthetic construct
  source 1..20: mol_type = other DNA
ggtttaaaataatgggttat

SEQ ID NO: 107194 - DNA, 20 bp, synthetic construct
  source 1..20: mol_type = other DNA
tggtttaaaataatgggtta

SEQ ID NO: 107195 - DNA, 20 bp, synthetic construct
  source 1..20: mol_type = other DNA
ttggtttaaaataatgggtt

SEQ ID NO: 107196 - DNA, 20 bp, synthetic construct
  source 1..20: mol_type = other DNA
attggtttaaaataatgggt

SEQ ID NO: 107197 - DNA, 20 bp, synthetic construct
  source 1..20: mol_type = other DNA
cattggtttaaaataatggg

SEQ ID NO: 107198 - DNA, 20 bp, synthetic construct
  source 1..20: mol_type = other DNA
tcattggtttaaaataatgg

SEQ ID NO: 107199 - DNA, 20 bp, synthetic construct
  source 1..20: mol_type = other DNA
gtcattggtttaaaataatg

SEQ ID NO: 107200 - DNA, 20 bp, synthetic construct
  source 1..20: mol_type = other DNA
tgtcattggtttaaaataat

SEQ ID NO: 107201 - DNA, 20 bp, synthetic construct
  source 1..20: mol_type = other DNA
ttgtcattggtttaaaataa

SEQ ID NO: 107202 - DNA, 20 bp, synthetic construct
  source 1..20: mol_type = other DNA
gttgtcattggtttaaaata

SEQ ID NO: 107203 - DNA, 20 bp, synthetic construct
  source 1..20: mol_type = other DNA
agttgtcattggtttaaaat

SEQ ID NO: 107204 - DNA, 20 bp, synthetic construct
  source 1..20: mol_type = other DNA
aagttgtcattggtttaaaa

SEQ ID NO: 107205 - DNA, 20 bp, synthetic construct
  source 1..20: mol_type = other DNA
caagttgtcattggtttaaa

SEQ ID NO: 107206 - DNA, 20 bp, synthetic construct
  source 1..20: mol_type = other DNA
tcaagttgtcattggtttaa

SEQ ID NO: 107207 - DNA, 20 bp, synthetic construct
  source 1..20: mol_type = other DNA
ttcaagttgtcattggttta

SEQ ID NO: 107208 - DNA, 20 bp, synthetic construct
  source 1..20: mol_type = other DNA
tttcaagttgtcattggttt

SEQ ID NO: 107209 - DNA, 20 bp, synthetic construct
  source 1..20: mol_type = other DNA
gtttcaagttgtcattggtt

SEQ ID NO: 107210 - DNA, 20 bp, synthetic construct
  source 1..20: mol_type = other DNA
agtttcaagttgtcattggt

SEQ ID NO: 107211 - DNA, 20 bp, synthetic construct
  source 1..20: mol_type = other DNA
aagtttcaagttgtcattgg

SEQ ID NO: 107212 - DNA, 20 bp, synthetic construct
  source 1..20: mol_type = other DNA
aaagtttcaagttgtcattg

SEQ ID NO: 107213 - DNA, 20 bp, synthetic construct
  source 1..20: mol_type = other DNA
caaagtttcaagttgtcatt

SEQ ID NO: 107214 - DNA, 20 bp, synthetic construct
  source 1..20: mol_type = other DNA
tcaaagtttcaagttgtcat

SEQ ID NO: 107215 - DNA, 20 bp, synthetic construct
  source 1..20: mol_type = other DNA
atcaaagtttcaagttgtca

SEQ ID NO: 107216 - DNA, 20 bp, synthetic construct
  source 1..20: mol_type = other DNA
aatcaaagtttcaagttgtc

SEQ ID NO: 107217 - DNA, 20 bp, synthetic construct
  source 1..20: mol_type = other DNA
caatcaaagtttcaagttgt

SEQ ID NO: 107218 - DNA, 20 bp, synthetic construct
  source 1..20: mol_type = other DNA
gcaatcaaagtttcaagttg

SEQ ID NO: 107219 - DNA, 20 bp, synthetic construct
  source 1..20: mol_type = other DNA
tgcaatcaaagtttcaagtt

SEQ ID NO: 107220 - DNA, 20 bp, synthetic construct
  source 1..20: mol_type = other DNA
ttgcaatcaaagtttcaagt

SEQ ID NO: 107221 - DNA, 20 bp, synthetic construct
  source 1..20: mol_type = other DNA
tttgcaatcaaagtttcaag

SEQ ID NO: 107222 - DNA, 20 bp, synthetic construct
  source 1..20: mol_type = other DNA
ttttgcaatcaaagtttcaa

SEQ ID NO: 107223 - DNA, 20 bp, synthetic construct
  source 1..20: mol_type = other DNA
tttttgcaatcaaagtttca

SEQ ID NO: 107224 - DNA, 20 bp, synthetic construct
  source 1..20: mol_type = other DNA
gtttttgcaatcaaagtttc

SEQ ID NO: 107225 - DNA, 20 bp, synthetic construct
  source 1..20: mol_type = other DNA
tgtttttgcaatcaaagttt

SEQ ID NO: 107226 - DNA, 20 bp, synthetic construct
  source 1..20: mol_type = other DNA
ttgtttttgcaatcaaagtt

SEQ ID NO: 107227 - DNA, 20 bp, synthetic construct
  source 1..20: mol_type = other DNA
cttgtttttgcaatcaaagt

SEQ ID NO: 107228 - DNA, 20 bp, synthetic construct
  source 1..20: mol_type = other DNA
gcttgtttttgcaatcaaag

SEQ ID NO: 107229 - DNA, 20 bp, synthetic construct
  source 1..20: mol_type = other DNA
tgcttgtttttgcaatcaaa

SEQ ID NO: 107230 - DNA, 20 bp, synthetic construct
  source 1..20: mol_type = other DNA
ttgcttgtttttgcaatcaa

SEQ ID NO: 107231 - DNA, 20 bp, synthetic construct
  source 1..20: mol_type = other DNA
cttgcttgtttttgcaatca

SEQ ID NO: 107232 - DNA, 20 bp, synthetic construct
  source 1..20: mol_type = other DNA
gcttgcttgtttttgcaatc

SEQ ID NO: 107233 - DNA, 20 bp, synthetic construct
  source 1..20: mol_type = other DNA
tgcttgcttgtttttgcaat

SEQ ID NO: 107234 - DNA, 20 bp, synthetic construct
  source 1..20: mol_type = other DNA
ttgcttgcttgtttttgcaa

SEQ ID NO: 107235 - DNA, 20 bp, synthetic construct
  source 1..20: mol_type = other DNA
tttgcttgcttgtttttgca

SEQ ID NO: 107236 - DNA, 20 bp, synthetic construct
  source 1..20: mol_type = other DNA
ctttgcttgcttgtttttgc

SEQ ID NO: 107237 - DNA, 20 bp, synthetic construct
  source 1..20: mol_type = other DNA
tctttgcttgcttgtttttg

SEQ ID NO: 107238 - DNA, 20 bp, synthetic construct
  source 1..20: mol_type = other DNA
ctctttgcttgcttgttttt

SEQ ID NO: 107239 - DNA, 20 bp, synthetic construct
  source 1..20: mol_type = other DNA
tctctttgcttgcttgtttt

SEQ ID NO: 107240 - DNA, 20 bp, synthetic construct
  source 1..20: mol_type = other DNA
ttctctttgcttgcttgttt

SEQ ID NO: 107241 - DNA, 20 bp, synthetic construct
  source 1..20: mol_type = other DNA
tttctctttgcttgcttgtt

SEQ ID NO: 107242 - DNA, 20 bp, synthetic construct
  source 1..20: mol_type = other DNA
ttttctctttgcttgcttgt

SEQ ID NO: 107243 - DNA, 20 bp, synthetic construct
  source 1..20: mol_type = other DNA
gttttctctttgcttgcttg

SEQ ID NO: 107244 - DNA, 20 bp, synthetic construct
  source 1..20: mol_type = other DNA
agttttctctttgcttgctt

SEQ ID NO: 107245 - DNA, 20 bp, synthetic construct
  source 1..20: mol_type = other DNA
tagttttctctttgcttgct

SEQ ID NO: 107246 - DNA, 20 bp, synthetic construct
  source 1..20: mol_type = other DNA
ttagttttctctttgcttgc

SEQ ID NO: 107247 - DNA, 20 bp, synthetic construct
  source 1..20: mol_type = other DNA
attagttttctctttgcttg

SEQ ID NO: 107248 - DNA, 20 bp, synthetic construct
  source 1..20: mol_type = other DNA
tattagttttctctttgctt

SEQ ID NO: 107249 - DNA, 20 bp, synthetic construct
  source 1..20: mol_type = other DNA
ttattagttttctctttgct

SEQ ID NO: 107250 - DNA, 20 bp, synthetic construct
  source 1..20: mol_type = other DNA
tttattagttttctctttgc

SEQ ID NO: 107251 - DNA, 20 bp, synthetic construct
  source 1..20: mol_type = other DNA
ttttattagttttctctttg

SEQ ID NO: 107252 - DNA, 20 bp, synthetic construct
  source 1..20: mol_type = other DNA
tttttattagttttctcttt

SEQ ID NO: 107253 - DNA, 20 bp, synthetic construct
  source 1..20: mol_type = other DNA
gtttttattagttttctctt

SEQ ID NO: 107254 - DNA, 20 bp, synthetic construct
  source 1..20: mol_type = other DNA
agtttttattagttttctct

SEQ ID NO: 107255 - DNA, 20 bp, synthetic construct
  source 1..20: mol_type = other DNA
gagtttttattagttttctc

SEQ ID NO: 107256 - DNA, 20 bp, synthetic construct
  source 1..20: mol_type = other DNA
agagtttttattagttttct

SEQ ID NO: 107257 - DNA, 20 bp, synthetic construct
  source 1..20: mol_type = other DNA
tagagtttttattagttttc

SEQ ID NO: 107258 - DNA, 20 bp, synthetic construct
  source 1..20: mol_type = other DNA
gtagagtttttattagtttt

SEQ ID NO: 107259 - DNA, 20 bp, synthetic construct
  source 1..20: mol_type = other DNA
tgtagagtttttattagttt

SEQ ID NO: 107260 - DNA, 20 bp, synthetic construct
  source 1..20: mol_type = other DNA
gtgtagagtttttattagtt

SEQ ID NO: 107261 - DNA, 20 bp, synthetic construct
  source 1..20: mol_type = other DNA
agtgtagagtttttattagt

SEQ ID NO: 107262 - DNA, 20 bp, synthetic construct
  source 1..20: mol_type = other DNA
aagtgtagagtttttattag

SEQ ID NO: 107263 - DNA, 20 bp, synthetic construct
  source 1..20: mol_type = other DNA
gaagtgtagagtttttatta

SEQ ID NO: 107264 - DNA, 20 bp, synthetic construct
  source 1..20: mol_type = other DNA
tgaagtgtagagtttttatt

SEQ ID NO: 107265 - DNA, 20 bp, synthetic construct
  source 1..20: mol_type = other DNA
atgaagtgtagagtttttat

SEQ ID NO: 107266 - DNA, 20 bp, synthetic construct
  source 1..20: mol_type = other DNA
gatgaagtgtagagttttta

SEQ ID NO: 107267 - DNA, 20 bp, synthetic construct
  source 1..20: mol_type = other DNA
agatgaagtgtagagttttt

SEQ ID NO: 107268 - DNA, 20 bp, synthetic construct
  source 1..20: mol_type = other DNA
cagatgaagtgtagagtttt

SEQ ID NO: 107269 - DNA, 20 bp, synthetic construct
  source 1..20: mol_type = other DNA
gcagatgaagtgtagagttt

SEQ ID NO: 107270 - DNA, 20 bp, synthetic construct
  source 1..20: mol_type = other DNA
ggcagatgaagtgtagagtt

SEQ ID NO: 107271 - DNA, 20 bp, synthetic construct
  source 1..20: mol_type = other DNA
gggcagatgaagtgtagagt

SEQ ID NO: 107272 - DNA, 20 bp, synthetic construct
  source 1..20: mol_type = other DNA
cgggcagatgaagtgtagag

SEQ ID NO: 107273 - DNA, 20 bp, synthetic construct
  source 1..20: mol_type = other DNA
gcgggcagatgaagtgtaga

SEQ ID NO: 107274 - DNA, 20 bp, synthetic construct
  source 1..20: mol_type = other DNA
agcgggcagatgaagtgtag

SEQ ID NO: 107275 - DNA, 20 bp, synthetic construct
  source 1..20: mol_type = other DNA
aagcgggcagatgaagtgta

SEQ ID NO: 107276 - DNA, 20 bp, synthetic construct
  source 1..20: mol_type = other DNA
aaagcgggcagatgaagtgt

SEQ ID NO: 107277 - DNA, 20 bp, synthetic construct
  source 1..20: mol_type = other DNA
aaaagcgggcagatgaagtg

SEQ ID NO: 107278 - DNA, 20 bp, synthetic construct
  source 1..20: mol_type = other DNA
aaaaagcgggcagatgaagt

SEQ ID NO: 107279 - DNA, 20 bp, synthetic construct
  source 1..20: mol_type = other DNA
taaaaagcgggcagatgaag

SEQ ID NO: 107280 - DNA, 20 bp, synthetic construct
  source 1..20: mol_type = other DNA
ttaaaaagcgggcagatgaa

SEQ ID NO: 107281 - DNA, 20 bp, synthetic construct
  source 1..20: mol_type = other DNA
gttaaaaagcgggcagatga

SEQ ID NO: 107282 - DNA, 20 bp, synthetic construct
  source 1..20: mol_type = other DNA
agttaaaaagcgggcagatg

SEQ ID NO: 107283 - DNA, 20 bp, synthetic construct
  source 1..20: mol_type = other DNA
aagttaaaaagcgggcagat

SEQ ID NO: 107284 - DNA, 20 bp, synthetic construct
  source 1..20: mol_type = other DNA
aaagttaaaaagcgggcaga

SEQ ID NO: 107285 - DNA, 20 bp, synthetic construct
  source 1..20: mol_type = other DNA
aaaagttaaaaagcgggcag

SEQ ID NO: 107286 - DNA, 20 bp, synthetic construct
  source 1..20: mol_type = other DNA
caaaagttaaaaagcgggca

SEQ ID NO: 107287 - DNA, 20 bp, synthetic construct
  source 1..20: mol_type = other DNA
acaaaagttaaaaagcgggc

SEQ ID NO: 107288 - DNA, 20 bp, synthetic construct
  source 1..20: mol_type = other DNA
aacaaaagttaaaaagcggg

SEQ ID NO: 107289 - DNA, 20 bp, synthetic construct
  source 1..20: mol_type = other DNA
caacaaaagttaaaaagcgg

SEQ ID NO: 107290 - DNA, 20 bp, synthetic construct
  source 1..20: mol_type = other DNA
acaacaaaagttaaaaagcg

SEQ ID NO: 107291 - DNA, 20 bp, synthetic construct
  source 1..20: mol_type = other DNA
aacaacaaaagttaaaaagc

SEQ ID NO: 107292 - DNA, 20 bp, synthetic construct
  source 1..20: mol_type = other DNA
aaacaacaaaagttaaaaag

SEQ ID NO: 107293 - DNA, 20 bp, synthetic construct
  source 1..20: mol_type = other DNA
aaaacaacaaaagttaaaaa

SEQ ID NO: 107294 - DNA, 20 bp, synthetic construct
  source 1..20: mol_type = other DNA
aaaaacaacaaaagttaaaa

SEQ ID NO: 107295 - DNA, 20 bp, synthetic construct
  source 1..20: mol_type = other DNA
taaaaacaacaaaagttaaa

SEQ ID NO: 107296 - DNA, 20 bp, synthetic construct
  source 1..20: mol_type = other DNA
ataaaaacaacaaaagttaa

SEQ ID NO: 107297 - DNA, 20 bp, synthetic construct
  source 1..20: mol_type = other DNA
aataaaaacaacaaaagtta

SEQ ID NO: 107298 - DNA, 20 bp, synthetic construct
  source 1..20: mol_type = other DNA
aaataaaaacaacaaaagtt

SEQ ID NO: 107299 - DNA, 20 bp, synthetic construct
  source 1..20: mol_type = other DNA
taaataaaaacaacaaaagt

SEQ ID NO: 107300 - DNA, 20 bp, synthetic construct
  source 1..20: mol_type = other DNA
ataaataaaaacaacaaaag

SEQ ID NO: 107301 - DNA, 20 bp, synthetic construct
  source 1..20: mol_type = other DNA
tataaataaaaacaacaaaa

SEQ ID NO: 107302 - DNA, 20 bp, synthetic construct
  source 1..20: mol_type = other DNA
atataaataaaaacaacaaa

SEQ ID NO: 107303 - DNA, 20 bp, synthetic construct
  source 1..20: mol_type = other DNA
gatataaataaaaacaacaa

SEQ ID NO: 107304 - DNA, 20 bp, synthetic construct
  source 1..20: mol_type = other DNA
agatataaataaaaacaaca

SEQ ID NO: 107305 - DNA, 20 bp, synthetic construct
  source 1..20: mol_type = other DNA
aagatataaataaaaacaac

SEQ ID NO: 107306 - DNA, 20 bp, synthetic construct
  source 1..20: mol_type = other DNA
aaagatataaataaaaacaa

SEQ ID NO: 107307 - DNA, 20 bp, synthetic construct
  source 1..20: mol_type = other DNA
taaagatataaataaaaaca

SEQ ID NO: 107308 - DNA, 20 bp, synthetic construct
  source 1..20: mol_type = other DNA
ataaagatataaataaaaac

SEQ ID NO: 107309 - DNA, 20 bp, synthetic construct
  source 1..20: mol_type = other DNA
aataaagatataaataaaaa

SEQ ID NO: 107310 - DNA, 20 bp, synthetic construct
  source 1..20: mol_type = other DNA
taataaagatataaataaaa

SEQ ID NO: 107311 - DNA, 20 bp, synthetic construct
  source 1..20: mol_type = other DNA
ataataaagatataaataaa

SEQ ID NO: 107312 - DNA, 20 bp, synthetic construct
  source 1..20: mol_type = other DNA
tataataaagatataaataa

SEQ ID NO: 107313 - DNA, 20 bp, synthetic construct
  source 1..20: mol_type = other DNA
gtataataaagatataaata

SEQ ID NO: 107314 - DNA, 20 bp, synthetic construct
  source 1..20: mol_type = other DNA
agtataataaagatataaat

SEQ ID NO: 107315 - DNA, 20 bp, synthetic construct
  source 1..20: mol_type = other DNA
tagtataataaagatataaa

SEQ ID NO: 107316 - DNA, 20 bp, synthetic construct
  source 1..20: mol_type = other DNA
atagtataataaagatataa

SEQ ID NO: 107317 - DNA, 20 bp, synthetic construct
  source 1..20: mol_type = other DNA
catagtataataaagatata

SEQ ID NO: 107318 - DNA, 20 bp, synthetic construct
  source 1..20: mol_type = other DNA
acatagtataataaagatat

SEQ ID NO: 107319 - DNA, 20 bp, synthetic construct
  source 1..20: mol_type = other DNA
gacatagtataataaagata

SEQ ID NO: 107320 - DNA, 20 bp, synthetic construct
  source 1..20: mol_type = other DNA
agacatagtataataaagat

SEQ ID NO: 107321 - DNA, 20 bp, synthetic construct
  source 1..20: mol_type = other DNA
aagacatagtataataaaga

SEQ ID NO: 107322 - DNA, 20 bp, synthetic construct
  source 1..20: mol_type = other DNA
taagacatagtataataaag

SEQ ID NO: 107323 - DNA, 20 bp, synthetic construct
  source 1..20: mol_type = other DNA
ttaagacatagtataataaa

SEQ ID NO: 107324 - DNA, 20 bp, synthetic construct
  source 1..20: mol_type = other DNA
tttaagacatagtataataa

SEQ ID NO: 107325 - DNA, 20 bp, synthetic construct
  source 1..20: mol_type = other DNA
ttttaagacatagtataata

SEQ ID NO: 107326 - DNA, 20 bp, synthetic construct
  source 1..20: mol_type = other DNA
tttttaagacatagtataat

SEQ ID NO: 107327 - DNA, 20 bp, synthetic construct
  source 1..20: mol_type = other DNA
ttttttaagacatagtataa

SEQ ID NO: 107328 - DNA, 20 bp, synthetic construct
  source 1..20: mol_type = other DNA
gttttttaagacatagtata

SEQ ID NO: 107329 - DNA, 20 bp, synthetic construct
  source 1..20: mol_type = other DNA
agttttttaagacatagtat

SEQ ID NO: 107330 - DNA, 20 bp, synthetic construct
  source 1..20: mol_type = other DNA
cagttttttaagacatagta

SEQ ID NO: 107331 - DNA, 20 bp, synthetic construct
  source 1..20: mol_type = other DNA
acagttttttaagacatagt

SEQ ID NO: 107332 - DNA, 20 bp, synthetic construct
  source 1..20: mol_type = other DNA
tacagttttttaagacatag

SEQ ID NO: 107333 - DNA, 20 bp, synthetic construct
  source 1..20: mol_type = other DNA
ctacagttttttaagacata

SEQ ID NO: 107334 - DNA, 20 bp, synthetic construct
  source 1..20: mol_type = other DNA
actacagttttttaagacat

SEQ ID NO: 107335 - DNA, 20 bp, synthetic construct
  source 1..20: mol_type = other DNA
aactacagttttttaagaca

SEQ ID NO: 107336 - DNA, 20 bp, synthetic construct
  source 1..20: mol_type = other DNA
taactacagttttttaagac

SEQ ID NO: 107337 - DNA, 20 bp, synthetic construct
  source 1..20: mol_type = other DNA
ataactacagttttttaaga

SEQ ID NO: 107338 - DNA, 20 bp, synthetic construct
  source 1..20: mol_type = other DNA
tataactacagttttttaag

SEQ ID NO: 107339 - DNA, 20 bp, synthetic construct
  source 1..20: mol_type = other DNA
ttataactacagttttttaa

SEQ ID NO: 107340 - DNA, 20 bp, synthetic construct
  source 1..20: mol_type = other DNA
cttataactacagtttttta

SEQ ID NO: 107341 - DNA, 20 bp, synthetic construct
  source 1..20: mol_type = other DNA
gcttataactacagtttttt

SEQ ID NO: 107342 - DNA, 20 bp, synthetic construct
  source 1..20: mol_type = other DNA
ggcttataactacagttttt

SEQ ID NO: 107343 - DNA, 20 bp, synthetic construct
  source 1..20: mol_type = other DNA
tggcttataactacagtttt

SEQ ID NO: 107344 - DNA, 20 bp, synthetic construct
  source 1..20: mol_type = other DNA
ctggcttataactacagttt

SEQ ID NO: 107345 - DNA, 20 bp, synthetic construct
  source 1..20: mol_type = other DNA
cctggcttataactacagtt

SEQ ID NO: 107346 - DNA, 20 bp, synthetic construct
  source 1..20: mol_type = other DNA
gcctggcttataactacagt

SEQ ID NO: 107347 - DNA, 20 bp, synthetic construct
  source 1..20: mol_type = other DNA
cgcctggcttataactacag

SEQ ID NO: 107348 - DNA, 20 bp, synthetic construct
  source 1..20: mol_type = other DNA
gcgcctggcttataactaca

SEQ ID NO: 107349 - DNA, 20 bp, synthetic construct
  source 1..20: mol_type = other DNA
tgcgcctggcttataactac

SEQ ID NO: 107350 - DNA, 20 bp, synthetic construct
  source 1..20: mol_type = other DNA
ctgcgcctggcttataacta

SEQ ID NO: 107351 - DNA, 20 bp, synthetic construct
  source 1..20: mol_type = other DNA
actgcgcctggcttataact

SEQ ID NO: 107352 - DNA, 20 bp, synthetic construct
  source 1..20: mol_type = other DNA
cactgcgcctggcttataac

SEQ ID NO: 107353 - DNA, 20 bp, synthetic construct
  source 1..20: mol_type = other DNA
ccactgcgcctggcttataa

SEQ ID NO: 107354 - DNA, 20 bp, synthetic construct
  source 1..20: mol_type = other DNA
accactgcgcctggcttata

SEQ ID NO: 107355 - DNA, 20 bp, synthetic construct
  source 1..20: mol_type = other DNA
aaccactgcgcctggcttat

SEQ ID NO: 107356 - DNA, 20 bp, synthetic construct
  source 1..20: mol_type = other DNA
gaaccactgcgcctggctta

SEQ ID NO: 107357 - DNA, 20 bp, synthetic construct
  source 1..20: mol_type = other DNA
tgaaccactgcgcctggctt

SEQ ID NO: 107358 - DNA, 20 bp, synthetic construct
  source 1..20: mol_type = other DNA
gtgaaccactgcgcctggct

SEQ ID NO: 107359 - DNA, 20 bp, synthetic construct
  source 1..20: mol_type = other DNA
cgtgaaccactgcgcctggc

SEQ ID NO: 107360 - DNA, 20 bp, synthetic construct
  source 1..20: mol_type = other DNA
acgtgaaccactgcgcctgg

SEQ ID NO: 107361 - DNA, 20 bp, synthetic construct
  source 1..20: mol_type = other DNA
cacgtgaaccactgcgcctg

SEQ ID NO: 107362 - DNA, 20 bp, synthetic construct
  source 1..20: mol_type = other DNA
acacgtgaaccactgcgcct

SEQ ID NO: 107363 - DNA, 20 bp, synthetic construct
  source 1..20: mol_type = other DNA
cacacgtgaaccactgcgcc

SEQ ID NO: 107364 - DNA, 20 bp, synthetic construct
  source 1..20: mol_type = other DNA
acacacgtgaaccactgcgc

SEQ ID NO: 107365 - DNA, 20 bp, synthetic construct
  source 1..20: mol_type = other DNA
tacacacgtgaaccactgcg

SEQ ID NO: 107366 - DNA, 20 bp, synthetic construct
  source 1..20: mol_type = other DNA
ttacacacgtgaaccactgc

SEQ ID NO: 107367 - DNA, 20 bp, synthetic construct
  source 1..20: mol_type = other DNA
attacacacgtgaaccactg

SEQ ID NO: 107368 - DNA, 20 bp, synthetic construct
  source 1..20: mol_type = other DNA
gattacacacgtgaaccact

SEQ ID NO: 107369 - DNA, 20 bp, synthetic construct
  source 1..20: mol_type = other DNA
ggattacacacgtgaaccac

SEQ ID NO: 107370 - DNA, 20 bp, synthetic construct
  source 1..20: mol_type = other DNA
gggattacacacgtgaacca

SEQ ID NO: 107371 - DNA, 20 bp, synthetic construct
  source 1..20: mol_type = other DNA
tgggattacacacgtgaacc

SEQ ID NO: 107372 - DNA, 20 bp, synthetic construct
  source 1..20: mol_type = other DNA
ctgggattacacacgtgaac

SEQ ID NO: 107373 - DNA, 20 bp, synthetic construct
  source 1..20: mol_type = other DNA
gctgggattacacacgtgaa

SEQ ID NO: 107374 - DNA, 20 bp, synthetic construct
  source 1..20: mol_type = other DNA
tgctgggattacacacgtga

SEQ ID NO: 107375 - DNA, 20 bp, synthetic construct
  source 1..20: mol_type = other DNA
gtgctgggattacacacgtg

SEQ ID NO: 107376 - DNA, 20 bp, synthetic construct
  source 1..20: mol_type = other DNA
agtgctgggattacacacgt

SEQ ID NO: 107377 - DNA, 20 bp, synthetic construct
  source 1..20: mol_type = other DNA
aagtgctgggattacacacg

SEQ ID NO: 107378 - DNA, 20 bp, synthetic construct
  source 1..20: mol_type = other DNA
aaagtgctgggattacacac

SEQ ID NO: 107379 - DNA, 20 bp, synthetic construct
  source 1..20: mol_type = other DNA
caaagtgctgggattacaca

SEQ ID NO: 107380 - DNA, 20 bp, synthetic construct
  source 1..20: mol_type = other DNA
ccaaagtgctgggattacac

SEQ ID NO: 107381 - DNA, 20 bp, synthetic construct
  source 1..20: mol_type = other DNA
cccaaagtgctgggattaca

SEQ ID NO: 107382 - DNA, 20 bp, synthetic construct
  source 1..20: mol_type = other DNA
tcccaaagtgctgggattac

SEQ ID NO: 107383 - DNA, 20 bp, synthetic construct
  source 1..20: mol_type = other DNA
ctcccaaagtgctgggatta

SEQ ID NO: 107384 - DNA, 20 bp, synthetic construct
  source 1..20: mol_type = other DNA
cctcccaaagtgctgggatt

SEQ ID NO: 107385 - DNA, 20 bp, synthetic construct
  source 1..20: mol_type = other DNA
gcctcccaaagtgctgggat

SEQ ID NO: 107386 - DNA, 20 bp, synthetic construct
  source 1..20: mol_type = other DNA
agcctcccaaagtgctggga

SEQ ID NO: 107387 - DNA, 20 bp, synthetic construct
  source 1..20: mol_type = other DNA
cagcctcccaaagtgctggg

SEQ ID NO: 107388 - DNA, 20 bp, synthetic construct
  source 1..20: mol_type = other DNA
tcagcctcccaaagtgctgg

SEQ ID NO: 107389 - DNA, 20 bp, synthetic construct
  source 1..20: mol_type = other DNA
ctcagcctcccaaagtgctg

SEQ ID NO: 107390 - DNA, 20 bp, synthetic construct
  source 1..20: mol_type = other DNA
cctcagcctcccaaagtgct

SEQ ID NO: 107391 - DNA, 20 bp, synthetic construct
  source 1..20: mol_type = other DNA
acctcagcctcccaaagtgc

SEQ ID NO: 107392 - DNA, 20 bp, synthetic construct
  source 1..20: mol_type = other DNA
cacctcagcctcccaaagtg

SEQ ID NO: 107393 - DNA, 20 bp, synthetic construct
  source 1..20: mol_type = other DNA
ccacctcagcctcccaaagt

SEQ ID NO: 107394 - DNA, 20 bp, synthetic construct
  source 1..20: mol_type = other DNA
cccacctcagcctcccaaag

SEQ ID NO: 107395 - DNA, 20 bp, synthetic construct
  source 1..20: mol_type = other DNA
gcccacctcagcctcccaaa

SEQ ID NO: 107396 - DNA, 20 bp, synthetic construct
  source 1..20: mol_type = other DNA
cgcccacctcagcctcccaa

SEQ ID NO: 107397 - DNA, 20 bp, synthetic construct
  source 1..20: mol_type = other DNA
ccgcccacctcagcctccca

SEQ ID NO: 107398 - DNA, 20 bp, synthetic construct
  source 1..20: mol_type = other DNA
tccgcccacctcagcctccc

SEQ ID NO: 107399 - DNA, 20 bp, synthetic construct
  source 1..20: mol_type = other DNA
atccgcccacctcagcctcc

SEQ ID NO: 107400 - DNA, 20 bp, synthetic construct
  source 1..20: mol_type = other DNA
gatccgcccacctcagcctc

SEQ ID NO: 107401 - DNA, 20 bp, synthetic construct
  source 1..20: mol_type = other DNA
tgatccgcccacctcagcct

SEQ ID NO: 107402 - DNA, 20 bp, synthetic construct
  source 1..20: mol_type = other DNA
gtgatccgcccacctcagcc

SEQ ID NO: 107403 - DNA, 20 bp, synthetic construct
  source 1..20: mol_type = other DNA
ggtgatccgcccacctcagc

SEQ ID NO: 107404 - DNA, 20 bp, synthetic construct
  source 1..20: mol_type = other DNA
aggtgatccgcccacctcag

SEQ ID NO: 107405 - DNA, 20 bp, synthetic construct
  source 1..20: mol_type = other DNA
taggtgatccgcccacctca

SEQ ID NO: 107406 - DNA, 20 bp, synthetic construct
  source 1..20: mol_type = other DNA
ttaggtgatccgcccacctc

SEQ ID NO: 107407 - DNA, 20 bp, synthetic construct
  source 1..20: mol_type = other DNA
cttaggtgatccgcccacct

SEQ ID NO: 107408 - DNA, 20 bp, synthetic construct
  source 1..20: mol_type = other DNA
ccttaggtgatccgcccacc

SEQ ID NO: 107409 - DNA, 20 bp, synthetic construct
  source 1..20: mol_type = other DNA
accttaggtgatccgcccac

SEQ ID NO: 107410 - DNA, 20 bp, synthetic construct
  source 1..20: mol_type = other DNA
gaccttaggtgatccgccca

SEQ ID NO: 107411 - DNA, 20 bp, synthetic construct
  source 1..20: mol_type = other DNA
tgaccttaggtgatccgccc

SEQ ID NO: 107412 - DNA, 20 bp, synthetic construct
  source 1..20: mol_type = other DNA
ctgaccttaggtgatccgcc

SEQ ID NO: 107413 - DNA, 20 bp, synthetic construct
  source 1..20: mol_type = other DNA
cctgaccttaggtgatccgc

SEQ ID NO: 107414 - DNA, 20 bp, synthetic construct
  source 1..20: mol_type = other DNA
tcctgaccttaggtgatccg

SEQ ID NO: 107415 - DNA, 20 bp, synthetic construct
  source 1..20: mol_type = other DNA
ctcctgaccttaggtgatcc

SEQ ID NO: 107416 - DNA, 20 bp, synthetic construct
  source 1..20: mol_type = other DNA
actcctgaccttaggtgatc

SEQ ID NO: 107417 - DNA, 20 bp, synthetic construct
  source 1..20: mol_type = other DNA
aactcctgaccttaggtgat

SEQ ID NO: 107418 - DNA, 20 bp, synthetic construct
  source 1..20: mol_type = other DNA
gaactcctgaccttaggtga

SEQ ID NO: 107419 - DNA, 20 bp, synthetic construct
  source 1..20: mol_type = other DNA
cgaactcctgaccttaggtg

SEQ ID NO: 107420 - DNA, 20 bp, synthetic construct
  source 1..20: mol_type = other DNA
tcgaactcctgaccttaggt

SEQ ID NO: 107421 - DNA, 20 bp, synthetic construct
  source 1..20: mol_type = other DNA
ctcgaactcctgaccttagg

SEQ ID NO: 107422 - DNA, 20 bp, synthetic construct
  source 1..20: mol_type = other DNA
tctcgaactcctgaccttag

SEQ ID NO: 107423 - DNA, 20 bp, synthetic construct
  source 1..20: mol_type = other DNA
gtctcgaactcctgacctta

SEQ ID NO: 107424 - DNA, 20 bp, synthetic construct
  source 1..20: mol_type = other DNA
ggtctcgaactcctgacctt

SEQ ID NO: 107425 - DNA, 20 bp, synthetic construct
  source 1..20: mol_type = other DNA
tggtctcgaactcctgacct

SEQ ID NO: 107426 - DNA, 20 bp, synthetic construct
  source 1..20: mol_type = other DNA
ctggtctcgaactcctgacc

SEQ ID NO: 107427 - DNA, 20 bp, synthetic construct
  source 1..20: mol_type = other DNA
gctggtctcgaactcctgac

SEQ ID NO: 107428 - DNA, 20 bp, synthetic construct
  source 1..20: mol_type = other DNA
ggctggtctcgaactcctga

SEQ ID NO: 107429 - DNA, 20 bp, synthetic construct
  source 1..20: mol_type = other DNA
aggctggtctcgaactcctg

SEQ ID NO: 107430 - DNA, 20 bp, synthetic construct
  source 1..20: mol_type = other DNA
taggctggtctcgaactcct

SEQ ID NO: 107431 - DNA, 20 bp, synthetic construct
  source 1..20: mol_type = other DNA
ctaggctggtctcgaactcc

SEQ ID NO: 107432 - DNA, 20 bp, synthetic construct
  source 1..20: mol_type = other DNA
gctaggctggtctcgaactc

SEQ ID NO: 107433 - DNA, 20 bp, synthetic construct
  source 1..20: mol_type = other DNA
ggctaggctggtctcgaact

SEQ ID NO: 107434 - DNA, 20 bp, synthetic construct
  source 1..20: mol_type = other DNA
tggctaggctggtctcgaac

SEQ ID NO: 107435 - DNA, 20 bp, synthetic construct
  source 1..20: mol_type = other DNA
ttggctaggctggtctcgaa

SEQ ID NO: 107436 - DNA, 20 bp, synthetic construct
  source 1..20: mol_type = other DNA
attggctaggctggtctcga

SEQ ID NO: 107437 - DNA, 20 bp, synthetic construct
  source 1..20: mol_type = other DNA
tattggctaggctggtctcg

SEQ ID NO: 107438 - DNA, 20 bp, synthetic construct
  source 1..20: mol_type = other DNA
atattggctaggctggtctc

SEQ ID NO: 107439 - DNA, 20 bp, synthetic construct
  source 1..20: mol_type = other DNA
catattggctaggctggtct

SEQ ID NO: 107440 - DNA, 20 bp, synthetic construct
  source 1..20: mol_type = other DNA
ccatattggctaggctggtc

SEQ ID NO: 107441 - DNA, 20 bp, synthetic construct
  source 1..20: mol_type = other DNA
gccatattggctaggctggt

SEQ ID NO: 107442 - DNA, 20 bp, synthetic construct
  source 1..20: mol_type = other DNA
tgccatattggctaggctgg

SEQ ID NO: 107443 - DNA, 20 bp, synthetic construct
  source 1..20: mol_type = other DNA
ttgccatattggctaggctg

SEQ ID NO: 107444 - DNA, 20 bp, synthetic construct
  source 1..20: mol_type = other DNA
tttgccatattggctaggct

SEQ ID NO: 107445 - DNA, 20 bp, synthetic construct
  source 1..20: mol_type = other DNA
ttttgccatattggctaggc

SEQ ID NO: 107446 - DNA, 20 bp, synthetic construct
  source 1..20: mol_type = other DNA
gttttgccatattggctagg

SEQ ID NO: 107447 - DNA, 20 bp, synthetic construct
  source 1..20: mol_type = other DNA
ggttttgccatattggctag

SEQ ID NO: 107448 - DNA, 20 bp, synthetic construct
  source 1..20: mol_type = other DNA
gggttttgccatattggcta

SEQ ID NO: 107449 - DNA, 20 bp, synthetic construct
  source 1..20: mol_type = other DNA
ggggttttgccatattggct

SEQ ID NO: 107450 - DNA, 20 bp, synthetic construct
  source 1..20: mol_type = other DNA
gggggttttgccatattggc

SEQ ID NO: 107451 - DNA, 20 bp, synthetic construct
  source 1..20: mol_type = other DNA
agggggttttgccatattgg

SEQ ID NO: 107452 - DNA, 20 bp, synthetic construct
  source 1..20: mol_type = other DNA
gagggggttttgccatattg

SEQ ID NO: 107453 - DNA, 20 bp, synthetic construct
  source 1..20: mol_type = other DNA
agagggggttttgccatatt

SEQ ID NO: 107454 - DNA, 20 bp, synthetic construct
  source 1..20: mol_type = other DNA
gagagggggttttgccatat

SEQ ID NO: 107455 - DNA, 20 bp, synthetic construct
  source 1..20: mol_type = other DNA
agagagggggttttgccata

SEQ ID NO: 107456 - DNA, 20 bp, synthetic construct
  source 1..20: mol_type = other DNA
tagagagggggttttgccat

SEQ ID NO: 107457 - DNA, 20 bp, synthetic construct
  source 1..20: mol_type = other DNA
gtagagagggggttttgcca

SEQ ID NO: 107458 - DNA, 20 bp, synthetic construct
  source 1..20: mol_type = other DNA
agtagagagggggttttgcc

SEQ ID NO: 107459 - DNA, 20 bp, synthetic construct
  source 1..20: mol_type = other DNA
tagtagagagggggttttgc

SEQ ID NO: 107460 - DNA, 20 bp, synthetic construct
  source 1..20: mol_type = other DNA
ttagtagagagggggttttg

SEQ ID NO: 107461 - DNA, 20 bp, synthetic construct
  source 1..20: mol_type = other DNA
tttagtagagagggggtttt

SEQ ID NO: 107462 - DNA, 20 bp, synthetic construct
  source 1..20: mol_type = other DNA
ttttagtagagagggggttt

SEQ ID NO: 107463 - DNA, 20 bp, synthetic construct
  source 1..20: mol_type = other DNA
tttttagtagagagggggtt

SEQ ID NO: 107464 - DNA, 20 bp, synthetic construct
  source 1..20: mol_type = other DNA
atttttagtagagagggggt

SEQ ID NO: 107465 - DNA, 20 bp, synthetic construct
  source 1..20: mol_type = other DNA
tatttttagtagagaggggg

SEQ ID NO: 107466 - DNA, 20 bp, synthetic construct
  source 1..20: mol_type = other DNA
ctatttttagtagagagggg

SEQ ID NO: 107467 - DNA, 20 bp, synthetic construct
  source 1..20: mol_type = other DNA
tctatttttagtagagaggg

SEQ ID NO: 107468 - DNA, 20 bp, synthetic construct
  source 1..20: mol_type = other DNA
ttctatttttagtagagagg

SEQ ID NO: 107469 - DNA, 20 bp, synthetic construct
  source 1..20: mol_type = other DNA
tttctatttttagtagagag

SEQ ID NO: 107470 - DNA, 20 bp, synthetic construct
  source 1..20: mol_type = other DNA
ttttctatttttagtagaga

SEQ ID NO: 107471 - DNA, 20 bp, synthetic construct
  source 1..20: mol_type = other DNA
tttttctatttttagtagag

SEQ ID NO: 107472 - DNA, 20 bp, synthetic construct
  source 1..20: mol_type = other DNA
atttttctatttttagtaga

SEQ ID NO: 107473 - DNA, 20 bp, synthetic construct
  source 1..20: mol_type = other DNA
aatttttctatttttagtag

SEQ ID NO: 107474 - DNA, 20 bp, synthetic construct
  source 1..20: mol_type = other DNA
taatttttctatttttagta

SEQ ID NO: 107475 - DNA, 20 bp, synthetic construct
  source 1..20: mol_type = other DNA
ctaatttttctatttttagt

SEQ ID NO: 107476 - DNA, 20 bp, synthetic construct
  source 1..20: mol_type = other DNA
gctaatttttctatttttag

SEQ ID NO: 107477 - DNA, 20 bp, synthetic construct
  source 1..20: mol_type = other DNA
ggctaatttttctattttta

SEQ ID NO: 107478 - DNA, 20 bp, synthetic construct
  source 1..20: mol_type = other DNA
cggctaatttttctattttt

SEQ ID NO: 107479 - DNA, 20 bp, synthetic construct
  source 1..20: mol_type = other DNA
ccggctaatttttctatttt

SEQ ID NO: 107480 - DNA, 20 bp, synthetic construct
  source 1..20: mol_type = other DNA
tccggctaatttttctattt

SEQ ID NO: 107481 - DNA, 20 bp, synthetic construct
  source 1..20: mol_type = other DNA
gtccggctaatttttctatt

SEQ ID NO: 107482 - DNA, 20 bp, synthetic construct
  source 1..20: mol_type = other DNA
tgtccggctaatttttctat

SEQ ID NO: 107483 - DNA, 20 bp, synthetic construct
  source 1..20: mol_type = other DNA
atgtccggctaatttttcta

SEQ ID NO: 107484 - DNA, 20 bp, synthetic construct
  source 1..20: mol_type = other DNA
catgtccggctaatttttct

SEQ ID NO: 107485 - DNA, 20 bp, synthetic construct
  source 1..20: mol_type = other DNA
ccatgtccggctaatttttc

SEQ ID NO: 107486 - DNA, 20 bp, synthetic construct
  source 1..20: mol_type = other DNA
accatgtccggctaattttt

SEQ ID NO: 107487 - DNA, 20 bp, synthetic construct
  source 1..20: mol_type = other DNA
caccatgtccggctaatttt

SEQ ID NO: 107488 - DNA, 20 bp, synthetic construct
  source 1..20: mol_type = other DNA
ccaccatgtccggctaattt

SEQ ID NO: 107489 - DNA, 20 bp, synthetic construct
  source 1..20: mol_type = other DNA
gccaccatgtccggctaatt

SEQ ID NO: 107490 - DNA, 20 bp, synthetic construct
  source 1..20: mol_type = other DNA
cgccaccatgtccggctaat

SEQ ID NO: 107491 - DNA, 20 bp, synthetic construct
  source 1..20: mol_type = other DNA
ccgccaccatgtccggctaa

SEQ ID NO: 107492 - DNA, 20 bp, synthetic construct
  source 1..20: mol_type = other DNA
cccgccaccatgtccggcta

SEQ ID NO: 107493 - DNA, 20 bp, synthetic construct
  source 1..20: mol_type = other DNA
acccgccaccatgtccggct

SEQ ID NO: 107494 - DNA, 20 bp, synthetic construct
  source 1..20: mol_type = other DNA
cacccgccaccatgtccggc

SEQ ID NO: 107495 - DNA, 20 bp, synthetic construct
  source 1..20: mol_type = other DNA
gcacccgccaccatgtccgg

SEQ ID NO: 107496 - DNA, 20 bp, synthetic construct
  source 1..20: mol_type = other DNA
ggcacccgccaccatgtccg

SEQ ID NO: 107497 - DNA, 20 bp, synthetic construct
  source 1..20: mol_type = other DNA
aggcacccgccaccatgtcc

SEQ ID NO: 107498 - DNA, 20 bp, synthetic construct
  source 1..20: mol_type = other DNA
caggcacccgccaccatgtc

SEQ ID NO: 107499 - DNA, 20 bp, synthetic construct
  source 1..20: mol_type = other DNA
acaggcacccgccaccatgt

SEQ ID NO: 107500 - DNA, 20 bp, synthetic construct
  source 1..20: mol_type = other DNA
tacaggcacccgccaccatg

SEQ ID NO: 107501 - DNA, 20 bp, synthetic construct
  source 1..20: mol_type = other DNA
ttacaggcacccgccaccat

SEQ ID NO: 107502 - DNA, 20 bp, synthetic construct
  source 1..20: mol_type = other DNA
attacaggcacccgccacca

SEQ ID NO: 107503 - DNA, 20 bp, synthetic construct
  source 1..20: mol_type = other DNA
gattacaggcacccgccacc

SEQ ID NO: 107504 - DNA, 20 bp, synthetic construct
  source 1..20: mol_type = other DNA
ggattacaggcacccgccac

SEQ ID NO: 107505 - DNA, 20 bp, synthetic construct
  source 1..20: mol_type = other DNA
gggattacaggcacccgcca

SEQ ID NO: 107506 - DNA, 20 bp, synthetic construct
  source 1..20: mol_type = other DNA
tgggattacaggcacccgcc

SEQ ID NO: 107507 - DNA, 20 bp, synthetic construct
  source 1..20: mol_type = other DNA
ctgggattacaggcacccgc

SEQ ID NO: 107508 - DNA, 20 bp, synthetic construct
  source 1..20: mol_type = other DNA
gctgggattacaggcacccg

SEQ ID NO: 107509 - DNA, 20 bp, synthetic construct
  source 1..20: mol_type = other DNA
agctgggattacaggcaccc

SEQ ID NO: 107510 - DNA, 20 bp, synthetic construct
  source 1..20: mol_type = other DNA
tagctgggattacaggcacc

SEQ ID NO: 107511 - DNA, 20 bp, synthetic construct
  source 1..20: mol_type = other DNA
gtagctgggattacaggcac

SEQ ID NO: 107512 - DNA, 20 bp, synthetic construct
  source 1..20: mol_type = other DNA
agtagctgggattacaggca

SEQ ID NO: 107513 - DNA, 20 bp, synthetic construct
  source 1..20: mol_type = other DNA
gagtagctgggattacaggc

SEQ ID NO: 107514 - DNA, 20 bp, synthetic construct
  source 1..20: mol_type = other DNA
cgagtagctgggattacagg

SEQ ID NO: 107515 - DNA, 20 bp, synthetic construct
  source 1..20: mol_type = other DNA
ccgagtagctgggattacag

SEQ ID NO: 107516 - DNA, 20 bp, synthetic construct
  source 1..20: mol_type = other DNA
tccgagtagctgggattaca

SEQ ID NO: 107517 - DNA, 20 bp, synthetic construct
  source 1..20: mol_type = other DNA
ctccgagtagctgggattac

SEQ ID NO: 107518 - DNA, 20 bp, synthetic construct
  source 1..20: mol_type = other DNA
cctccgagtagctgggatta

SEQ ID NO: 107519 - DNA, 20 bp, synthetic construct
  source 1..20: mol_type = other DNA
gcctccgagtagctgggatt

SEQ ID NO: 107520 - DNA, 20 bp, synthetic construct
  source 1..20: mol_type = other DNA
agcctccgagtagctgggat

SEQ ID NO: 107521 - DNA, 20 bp, synthetic construct
  source 1..20: mol_type = other DNA
cagcctccgagtagctggga

SEQ ID NO: 107522 - DNA, 20 bp, synthetic construct
  source 1..20: mol_type = other DNA
tcagcctccgagtagctggg

SEQ ID NO: 107523 - DNA, 20 bp, synthetic construct
  source 1..20: mol_type = other DNA
ctcagcctccgagtagctgg

SEQ ID NO: 107524 - DNA, 20 bp, synthetic construct
  source 1..20: mol_type = other DNA
cctcagcctccgagtagctg

SEQ ID NO: 107525 - DNA, 20 bp, synthetic construct
  source 1..20: mol_type = other DNA
gcctcagcctccgagtagct

SEQ ID NO: 107526 - DNA, 20 bp, synthetic construct
  source 1..20: mol_type = other DNA
tgcctcagcctccgagtagc

SEQ ID NO: 107527 - DNA, 20 bp, synthetic construct
  source 1..20: mol_type = other DNA
ctgcctcagcctccgagtag

SEQ ID NO: 107528 - DNA, 20 bp, synthetic construct
  source 1..20: mol_type = other DNA
cctgcctcagcctccgagta

SEQ ID NO: 107529 - DNA, 20 bp, synthetic construct
  source 1..20: mol_type = other DNA
tcctgcctcagcctccgagt

SEQ ID NO: 107530 - DNA, 20 bp, synthetic construct
  source 1..20: mol_type = other DNA
ctcctgcctcagcctccgag

SEQ ID NO: 107531 - DNA, 20 bp, synthetic construct
  source 1..20: mol_type = other DNA
tctcctgcctcagcctccga

SEQ ID NO: 107532 - DNA, 20 bp, synthetic construct
  source 1..20: mol_type = other DNA
ttctcctgcctcagcctccg

SEQ ID NO: 107533 - DNA, 20 bp, synthetic construct
  source 1..20: mol_type = other DNA
attctcctgcctcagcctcc

SEQ ID NO: 107534 - DNA, 20 bp, synthetic construct
  source 1..20: mol_type = other DNA
gattctcctgcctcagcctc

SEQ ID NO: 107535 - DNA, 20 bp, synthetic construct
  source 1..20: mol_type = other DNA
tgattctcctgcctcagcct

SEQ ID NO: 107536 - DNA, 20 bp, synthetic construct
  source 1..20: mol_type = other DNA
gtgattctcctgcctcagcc

SEQ ID NO: 107537 - DNA, 20 bp, synthetic construct
  source 1..20: mol_type = other DNA
agtgattctcctgcctcagc

SEQ ID NO: 107538 - DNA, 20 bp, synthetic construct
  source 1..20: mol_type = other DNA
aagtgattctcctgcctcag

SEQ ID NO: 107539 - DNA, 20 bp, synthetic construct
  source 1..20: mol_type = other DNA
caagtgattctcctgcctca

SEQ ID NO: 107540 - DNA, 20 bp, synthetic construct
  source 1..20: mol_type = other DNA
tcaagtgattctcctgcctc

SEQ ID NO: 107541 - DNA, 20 bp, synthetic construct
  source 1..20: mol_type = other DNA
ttcaagtgattctcctgcct

SEQ ID NO: 107542 - DNA, 20 bp, synthetic construct
  source 1..20: mol_type = other DNA
gttcaagtgattctcctgcc

SEQ ID NO: 107543 - DNA, 20 bp, synthetic construct
  source 1..20: mol_type = other DNA
ggttcaagtgattctcctgc

SEQ ID NO: 107544 - DNA, 20 bp, synthetic construct
  source 1..20: mol_type = other DNA
gggttcaagtgattctcctg

SEQ ID NO: 107545 - DNA, 20 bp, synthetic construct
  source 1..20: mol_type = other DNA
tgggttcaagtgattctcct

SEQ ID NO: 107546 - DNA, 20 bp, synthetic construct
  source 1..20: mol_type = other DNA
ctgggttcaagtgattctcc

SEQ ID NO: 107547 - DNA, 20 bp, synthetic construct
  source 1..20: mol_type = other DNA
cctgggttcaagtgattctc

SEQ ID NO: 107548 - DNA, 20 bp, synthetic construct
  source 1..20: mol_type = other DNA
tcctgggttcaagtgattct

SEQ ID NO: 107549 - DNA, 20 bp, synthetic construct
  source 1..20: mol_type = other DNA
ctcctgggttcaagtgattc

SEQ ID NO: 107550 - DNA, 20 bp, synthetic construct
  source 1..20: mol_type = other DNA
cctcctgggttcaagtgatt

SEQ ID NO: 107551 - DNA, 20 bp, synthetic construct
  source 1..20: mol_type = other DNA
gcctcctgggttcaagtgat

SEQ ID NO: 107552 - DNA, 20 bp, synthetic construct
  source 1..20: mol_type = other DNA
ggcctcctgggttcaagtga

SEQ ID NO: 107553 - DNA, 20 bp, synthetic construct
  source 1..20: mol_type = other DNA
gggcctcctgggttcaagtg

SEQ ID NO: 107554 - DNA, 20 bp, synthetic construct
  source 1..20: mol_type = other DNA
tgggcctcctgggttcaagt

SEQ ID NO: 107555 - DNA, 20 bp, synthetic construct
  source 1..20: mol_type = other DNA
ctgggcctcctgggttcaag

SEQ ID NO: 107556 - DNA, 20 bp, synthetic construct
  source 1..20: mol_type = other DNA
cctgggcctcctgggttcaa

SEQ ID NO: 107557 - DNA, 20 bp, synthetic construct
  source 1..20: mol_type = other DNA
acctgggcctcctgggttca

SEQ ID NO: 107558 - DNA, 20 bp, synthetic construct
  source 1..20: mol_type = other DNA
aacctgggcctcctgggttc

SEQ ID NO: 107559 - DNA, 20 bp, synthetic construct
  source 1..20: mol_type = other DNA
caacctgggcctcctgggtt

SEQ ID NO: 107560 - DNA, 20 bp, synthetic construct
  source 1..20: mol_type = other DNA
gcaacctgggcctcctgggt

SEQ ID NO: 107561 - DNA, 20 bp, synthetic construct
  source 1..20: mol_type = other DNA
tgcaacctgggcctcctggg

SEQ ID NO: 107562 - DNA, 20 bp, synthetic construct
  source 1..20: mol_type = other DNA
ctgcaacctgggcctcctgg

SEQ ID NO: 107563 - DNA, 20 bp, synthetic construct
  source 1..20: mol_type = other DNA
actgcaacctgggcctcctg

SEQ ID NO: 107564 - DNA, 20 bp, synthetic construct
  source 1..20: mol_type = other DNA
cactgcaacctgggcctcct

SEQ ID NO: 107565 - DNA, 20 bp, synthetic construct
  source 1..20: mol_type = other DNA
tcactgcaacctgggcctcc

SEQ ID NO: 107566 - DNA, 20 bp, synthetic construct
  source 1..20: mol_type = other DNA
ctcactgcaacctgggcctc

SEQ ID NO: 107567 - DNA, 20 bp, synthetic construct
  source 1..20: mol_type = other DNA
gctcactgcaacctgggcct

SEQ ID NO: 107568 - DNA, 20 bp, synthetic construct
  source 1..20: mol_type = other DNA
ggctcactgcaacctgggcc

SEQ ID NO: 107569 - DNA, 20 bp, synthetic construct
  source 1..20: mol_type = other DNA
cggctcactgcaacctgggc

SEQ ID NO: 107570 - DNA, 20 bp, synthetic construct
  source 1..20: mol_type = other DNA
tcggctcactgcaacctggg

SEQ ID NO: 107571 - DNA, 20 bp, synthetic construct
  source 1..20: mol_type = other DNA
ctcggctcactgcaacctgg

SEQ ID NO: 107572 - DNA, 20 bp, synthetic construct
  source 1..20: mol_type = other DNA
tctcggctcactgcaacctg

SEQ ID NO: 107573 - DNA, 20 bp, synthetic construct
  source 1..20: mol_type = other DNA
ctctcggctcactgcaacct

SEQ ID NO: 107574 - DNA, 20 bp, synthetic construct
  source 1..20: mol_type = other DNA
actctcggctcactgcaacc

SEQ ID NO: 107575 - DNA, 20 bp, synthetic construct
  source 1..20: mol_type = other DNA
cactctcggctcactgcaac

SEQ ID NO: 107576 - DNA, 20 bp, synthetic construct
  source 1..20: mol_type = other DNA
gcactctcggctcactgcaa

SEQ ID NO: 107577 - DNA, 20 bp, synthetic construct
  source 1..20: mol_type = other DNA
cgcactctcggctcactgca

SEQ ID NO: 107578 - DNA, 20 bp, synthetic construct
  source 1..20: mol_type = other DNA
gcgcactctcggctcactgc

SEQ ID NO: 107579 - DNA, 20 bp, synthetic construct
  source 1..20: mol_type = other DNA
ggcgcactctcggctcactg

SEQ ID NO: 107580 - DNA, 20 bp, synthetic construct
  source 1..20: mol_type = other DNA
tggcgcactctcggctcact

SEQ ID NO: 107581 - DNA, 20 bp, synthetic construct
  source 1..20: mol_type = other DNA
gtggcgcactctcggctcac

SEQ ID NO: 107582 - DNA, 20 bp, synthetic construct
  source 1..20: mol_type = other DNA
agtggcgcactctcggctca

SEQ ID NO: 107583 - DNA, 20 bp, synthetic construct
  source 1..20: mol_type = other DNA
cagtggcgcactctcggctc

SEQ ID NO: 107584 - DNA, 20 bp, synthetic construct
  source 1..20: mol_type = other DNA
gcagtggcgcactctcggct

SEQ ID NO: 107585 - DNA, 20 bp, synthetic construct
  source 1..20: mol_type = other DNA
tgcagtggcgcactctcggc

SEQ ID NO: 107586 - DNA, 20 bp, synthetic construct
  source 1..20: mol_type = other DNA
gtgcagtggcgcactctcgg

SEQ ID NO: 107587 - DNA, 20 bp, synthetic construct
  source 1..20: mol_type = other DNA
agtgcagtggcgcactctcg

SEQ ID NO: 107588 - DNA, 20 bp, synthetic construct
  source 1..20: mol_type = other DNA
gagtgcagtggcgcactctc

SEQ ID NO: 107589 - DNA, 20 bp, synthetic construct
  source 1..20: mol_type = other DNA
ggagtgcagtggcgcactct

SEQ ID NO: 107590 - DNA, 20 bp, synthetic construct
  source 1..20: mol_type = other DNA
tggagtgcagtggcgcactc

SEQ ID NO: 107591 - DNA, 20 bp, synthetic construct
  source 1..20: mol_type = other DNA
ctggagtgcagtggcgcact

SEQ ID NO: 107592 - DNA, 20 bp, synthetic construct
  source 1..20: mol_type = other DNA
actggagtgcagtggcgcac

SEQ ID NO: 107593 - DNA, 20 bp, synthetic construct
  source 1..20: mol_type = other DNA
gactggagtgcagtggcgca

SEQ ID NO: 107594 - DNA, 20 bp, synthetic construct
  source 1..20: mol_type = other DNA
agactggagtgcagtggcgc

SEQ ID NO: 107595 - DNA, 20 bp, synthetic construct
  source 1..20: mol_type = other DNA
cagactggagtgcagtggcg

SEQ ID NO: 107596 - DNA, 20 bp, synthetic construct
  source 1..20: mol_type = other DNA
ccagactggagtgcagtggc

SEQ ID NO: 107597 - DNA, 20 bp, synthetic construct
  source 1..20: mol_type = other DNA
cccagactggagtgcagtgg

SEQ ID NO: 107598 - DNA, 20 bp, synthetic construct
  source 1..20: mol_type = other DNA
gcccagactggagtgcagtg

SEQ ID NO: 107599 - DNA, 20 bp, synthetic construct
  source 1..20: mol_type = other DNA
tgcccagactggagtgcagt

SEQ ID NO: 107600 - DNA, 20 bp, synthetic construct
  source 1..20: mol_type = other DNA
ttgcccagactggagtgcag

SEQ ID NO: 107601 - DNA, 20 bp, synthetic construct
  source 1..20: mol_type = other DNA
gttgcccagactggagtgca

SEQ ID NO: 107602 - DNA, 20 bp, synthetic construct
  source 1..20: mol_type = other DNA
tgttgcccagactggagtgc

SEQ ID NO: 107603 - DNA, 20 bp, synthetic construct
  source 1..20: mol_type = other DNA
ctgttgcccagactggagtg

SEQ ID NO: 107604 - DNA, 20 bp, synthetic construct
  source 1..20: mol_type = other DNA
tctgttgcccagactggagt

SEQ ID NO: 107605 - DNA, 20 bp, synthetic construct
  source 1..20: mol_type = other DNA
ctctgttgcccagactggag

SEQ ID NO: 107606 - DNA, 20 bp, synthetic construct
  source 1..20: mol_type = other DNA
actctgttgcccagactgga

SEQ ID NO: 107607 - DNA, 20 bp, synthetic construct
  source 1..20: mol_type = other DNA
tactctgttgcccagactgg

SEQ ID NO: 107608 - DNA, 20 bp, synthetic construct
  source 1..20: mol_type = other DNA
ttactctgttgcccagactg

SEQ ID NO: 107609 - DNA, 20 bp, synthetic construct
  source 1..20: mol_type = other DNA
cttactctgttgcccagact

SEQ ID NO: 107610 - DNA, 20 bp, synthetic construct
  source 1..20: mol_type = other DNA
tcttactctgttgcccagac

SEQ ID NO: 107611 - DNA, 20 bp, synthetic construct
  source 1..20: mol_type = other DNA
gtcttactctgttgcccaga

SEQ ID NO: 107612 - DNA, 20 bp, synthetic construct
  source 1..20: mol_type = other DNA
agtcttactctgttgcccag

SEQ ID NO: 107613 - DNA, 20 bp, synthetic construct
  source 1..20: mol_type = other DNA
cagtcttactctgttgccca

SEQ ID NO: 107614 - DNA, 20 bp, synthetic construct
  source 1..20: mol_type = other DNA
acagtcttactctgttgccc

SEQ ID NO: 107615 - DNA, 20 bp, synthetic construct
  source 1..20: mol_type = other DNA
gacagtcttactctgttgcc

SEQ ID NO: 107616 - DNA, 20 bp, synthetic construct
  source 1..20: mol_type = other DNA
agacagtcttactctgttgc

SEQ ID NO: 107617 - DNA, 20 bp, synthetic construct
  source 1..20: mol_type = other DNA
gagacagtcttactctgttg

SEQ ID NO: 107618 - DNA, 20 bp, synthetic construct
  source 1..20: mol_type = other DNA
tgagacagtcttactctgtt

SEQ ID NO: 107619 - DNA, 20 bp, synthetic construct
  source 1..20: mol_type = other DNA
ttgagacagtcttactctgt

SEQ ID NO: 107620 - DNA, 20 bp, synthetic construct
  source 1..20: mol_type = other DNA
tttgagacagtcttactctg

SEQ ID NO: 107621 - DNA, 20 bp, synthetic construct
  source 1..20: mol_type = other DNA
ttttgagacagtcttactct

SEQ ID NO: 107622 - DNA, 20 bp, synthetic construct
  source 1..20: mol_type = other DNA
tttttgagacagtcttactc

SEQ ID NO: 107623 - DNA, 20 bp, synthetic construct
  source 1..20: mol_type = other DNA
ttttttgagacagtcttact

SEQ ID NO: 107624 - DNA, 20 bp, synthetic construct
  source 1..20: mol_type = other DNA
gttttttgagacagtcttac

SEQ ID NO: 107625 - DNA, 20 bp, synthetic construct
  source 1..20: mol_type = other DNA
tgttttttgagacagtctta

SEQ ID NO: 107626 - DNA, 20 bp, synthetic construct
  source 1..20: mol_type = other DNA
ttgttttttgagacagtctt

SEQ ID NO: 107627 - DNA, 20 bp, synthetic construct
  source 1..20: mol_type = other DNA
attgttttttgagacagtct

SEQ ID NO: 107628 - DNA, 20 bp, synthetic construct
  source 1..20: mol_type = other DNA
tattgttttttgagacagtc

SEQ ID NO: 107629 - DNA, 20 bp, synthetic construct
  source 1..20: mol_type = other DNA
gtattgttttttgagacagt

SEQ ID NO: 107630 - DNA, 20 bp, synthetic construct
  source 1..20: mol_type = other DNA
tgtattgttttttgagacag

SEQ ID NO: 107631 - DNA, 20 bp, synthetic construct
  source 1..20: mol_type = other DNA
ttgtattgttttttgagaca

SEQ ID NO: 107632 - DNA, 20 bp, synthetic construct
  source 1..20: mol_type = other DNA
tttgtattgttttttgagac

SEQ ID NO: 107633 - DNA, 20 bp, synthetic construct
  source 1..20: mol_type = other DNA
ttttgtattgttttttgaga

SEQ ID NO: 107634 - DNA, 20 bp, synthetic construct
  source 1..20: mol_type = other DNA
gttttgtattgttttttgag

SEQ ID NO: 107635 - DNA, 20 bp, synthetic construct
  source 1..20: mol_type = other DNA
tgttttgtattgttttttga

SEQ ID NO: 107636 - DNA, 20 bp, synthetic construct
  source 1..20: mol_type = other DNA
ttgttttgtattgttttttg

SEQ ID NO: 107637 - DNA, 20 bp, synthetic construct
  source 1..20: mol_type = other DNA
tttgttttgtattgtttttt

SEQ ID NO: 107638 - DNA, 20 bp, synthetic construct
  source 1..20: mol_type = other DNA
ttttgttttgtattgttttt

SEQ ID NO: 107639 - DNA, 20 bp, synthetic construct
  source 1..20: mol_type = other DNA
gttttgttttgtattgtttt

SEQ ID NO: 107640 - DNA, 20 bp, synthetic construct
  source 1..20: mol_type = other DNA
tgttttgttttgtattgttt

SEQ ID NO: 107641 - DNA, 20 bp, synthetic construct
  source 1..20: mol_type = other DNA
ttgttttgttttgtattgtt

SEQ ID NO: 107642 - DNA, 20 bp, synthetic construct
  source 1..20: mol_type = other DNA
tttgttttgttttgtattgt

SEQ ID NO: 107643 - DNA, 20 bp, synthetic construct
  source 1..20: mol_type = other DNA
ttttgttttgttttgtattg

SEQ ID NO: 107644 - DNA, 20 bp, synthetic construct
  source 1..20: mol_type = other DNA
gttttgttttgttttgtatt

SEQ ID NO: 107645 - DNA, 20 bp, synthetic construct
  source 1..20: mol_type = other DNA
ggttttgttttgttttgtat

SEQ ID NO: 107646 - DNA, 20 bp, synthetic construct
  source 1..20: mol_type = other DNA
gggttttgttttgttttgta

SEQ ID NO: 107647 - DNA, 20 bp, synthetic construct
  source 1..20: mol_type = other DNA
agggttttgttttgttttgt

SEQ ID NO: 107648 - DNA, 20 bp, synthetic construct
  source 1..20: mol_type = other DNA
cagggttttgttttgttttg

SEQ ID NO: 107649 - DNA, 20 bp, synthetic construct
  source 1..20: mol_type = other DNA
ccagggttttgttttgtttt

SEQ ID NO: 107650 - DNA, 20 bp, synthetic construct
  source 1..20: mol_type = other DNA
gccagggttttgttttgttt

SEQ ID NO: 107651 - DNA, 20 bp, synthetic construct
  source 1..20: mol_type = other DNA
ggccagggttttgttttgtt

SEQ ID NO: 107652 - DNA, 20 bp, synthetic construct
  source 1..20: mol_type = other DNA
aggccagggttttgttttgt

SEQ ID NO: 107653 - DNA, 20 bp, synthetic construct
  source 1..20: mol_type = other DNA
taggccagggttttgttttg

SEQ ID NO: 107654 - DNA, 20 bp, synthetic construct
  source 1..20: mol_type = other DNA
ctaggccagggttttgtttt

SEQ ID NO: 107655 - DNA, 20 bp, synthetic construct
  source 1..20: mol_type = other DNA
actaggccagggttttgttt

SEQ ID NO: 107656 - DNA, 20 bp, synthetic construct
  source 1..20: mol_type = other DNA
cactaggccagggttttgtt

SEQ ID NO: 107657 - DNA, 20 bp, synthetic construct
  source 1..20: mol_type = other DNA
ccactaggccagggttttgt

SEQ ID NO: 107658 - DNA, 20 bp, synthetic construct
  source 1..20: mol_type = other DNA
gccactaggccagggttttg

SEQ ID NO: 107659 - DNA, 20 bp, synthetic construct
  source 1..20: mol_type = other DNA
agccactaggccagggtttt

SEQ ID NO: 107660 - DNA, 20 bp, synthetic construct
  source 1..20: mol_type = other DNA
gagccactaggccagggttt

SEQ ID NO: 107661 - DNA, 20 bp, synthetic construct
  source 1..20: mol_type = other DNA
tgagccactaggccagggtt

SEQ ID NO: 107662 - DNA, 20 bp, synthetic construct
  source 1..20: mol_type = other DNA
gtgagccactaggccagggt

SEQ ID NO: 107663 - DNA, 20 bp, synthetic construct
  source 1..20: mol_type = other DNA
cgtgagccactaggccaggg

SEQ ID NO: 107664 - DNA, 20 bp, synthetic construct
  source 1..20: mol_type = other DNA
gcgtgagccactaggccagg

SEQ ID NO: 107665 - DNA, 20 bp, synthetic construct
  source 1..20: mol_type = other DNA
ggcgtgagccactaggccag

SEQ ID NO: 107666 - DNA, 20 bp, synthetic construct
  source 1..20: mol_type = other DNA
aggcgtgagccactaggcca

SEQ ID NO: 107667 - DNA, 20 bp, synthetic construct
  source 1..20: mol_type = other DNA
taggcgtgagccactaggcc

SEQ ID NO: 107668 - DNA, 20 bp, synthetic construct
  source 1..20: mol_type = other DNA
ttaggcgtgagccactaggc

SEQ ID NO: 107669 - DNA, 20 bp, synthetic construct
  source 1..20: mol_type = other DNA
attaggcgtgagccactagg

SEQ ID NO: 107670 - DNA, 20 bp, synthetic construct
  source 1..20: mol_type = other DNA
gattaggcgtgagccactag

SEQ ID NO: 107671 - DNA, 20 bp, synthetic construct
  source 1..20: mol_type = other DNA
ggattaggcgtgagccacta

SEQ ID NO: 107672 - DNA, 20 bp, synthetic construct
  source 1..20: mol_type = other DNA
gggattaggcgtgagccact

SEQ ID NO: 107673 - DNA, 20 bp, synthetic construct
  source 1..20: mol_type = other DNA
tgggattaggcgtgagccac

SEQ ID NO: 107674 - DNA, 20 bp, synthetic construct
  source 1..20: mol_type = other DNA
ctgggattaggcgtgagcca

SEQ ID NO: 107675 - DNA, 20 bp, synthetic construct
  source 1..20: mol_type = other DNA
gctgggattaggcgtgagcc

SEQ ID NO: 107676 - DNA, 20 bp, synthetic construct
  source 1..20: mol_type = other DNA
tgctgggattaggcgtgagc

SEQ ID NO: 107677 - DNA, 20 bp, synthetic construct
  source 1..20: mol_type = other DNA
gtgctgggattaggcgtgag

SEQ ID NO: 107678 - DNA, 20 bp, synthetic construct
  source 1..20: mol_type = other DNA
agtgctgggattaggcgtga

SEQ ID NO: 107679 - DNA, 20 bp, synthetic construct
  source 1..20: mol_type = other DNA
aagtgctgggattaggcgtg

SEQ ID NO: 107680 - DNA, 20 bp, synthetic construct
  source 1..20: mol_type = other DNA
aaagtgctgggattaggcgt

SEQ ID NO: 107681 - DNA, 20 bp, synthetic construct
  source 1..20: mol_type = other DNA
caaagtgctgggattaggcg

SEQ ID NO: 107682 - DNA, 20 bp, synthetic construct
  source 1..20: mol_type = other DNA
ccaaagtgctgggattaggc

SEQ ID NO: 107683 - DNA, 20 bp, synthetic construct
  source 1..20: mol_type = other DNA
tccaaagtgctgggattagg

SEQ ID NO: 107684 - DNA, 20 bp, synthetic construct
  source 1..20: mol_type = other DNA
ttccaaagtgctgggattag

SEQ ID NO: 107685 - DNA, 20 bp, synthetic construct
  source 1..20: mol_type = other DNA
cttccaaagtgctgggatta

SEQ ID NO: 107686 - DNA, 20 bp, synthetic construct
  source 1..20: mol_type = other DNA
ccttccaaagtgctgggatt

SEQ ID NO: 107687 - DNA, 20 bp, synthetic construct
  source 1..20: mol_type = other DNA
gccttccaaagtgctgggat

SEQ ID NO: 107688 - DNA, 20 bp, synthetic construct
  source 1..20: mol_type = other DNA
tgccttccaaagtgctggga

SEQ ID NO: 107689 - DNA, 20 bp, synthetic construct
  source 1..20: mol_type = other DNA
ttgccttccaaagtgctggg

SEQ ID NO: 107690 - DNA, 20 bp, synthetic construct
  source 1..20: mol_type = other DNA
tttgccttccaaagtgctgg

SEQ ID NO: 107691 - DNA, 20 bp, synthetic construct
  source 1..20: mol_type = other DNA
ctttgccttccaaagtgctg

SEQ ID NO: 107692 - DNA, 20 bp, synthetic construct
  source 1..20: mol_type = other DNA
cctttgccttccaaagtgct

SEQ ID NO: 107693 - DNA, 20 bp, synthetic construct
  source 1..20: mol_type = other DNA
acctttgccttccaaagtgc

SEQ ID NO: 107694 - DNA, 20 bp, synthetic construct
  source 1..20: mol_type = other DNA
cacctttgccttccaaagtg

SEQ ID NO: 107695 - DNA, 20 bp, synthetic construct
  source 1..20: mol_type = other DNA
ccacctttgccttccaaagt

SEQ ID NO: 107696 - DNA, 20 bp, synthetic construct
  source 1..20: mol_type = other DNA
cccacctttgccttccaaag

SEQ ID NO: 107697 - DNA, 20 bp, synthetic construct
  source 1..20: mol_type = other DNA
ccccacctttgccttccaaa

SEQ ID NO: 107698 - DNA, 20 bp, synthetic construct
  source 1..20: mol_type = other DNA
gccccacctttgccttccaa

SEQ ID NO: 107699 - DNA, 20 bp, synthetic construct
  source 1..20: mol_type = other DNA
cgccccacctttgccttcca

SEQ ID NO: 107700 - DNA, 20 bp, synthetic construct
  source 1..20: mol_type = other DNA
tcgccccacctttgccttcc

SEQ ID NO: 107701 - DNA, 20 bp, synthetic construct
  source 1..20: mol_type = other DNA
ttcgccccacctttgccttc

SEQ ID NO: 107702 - DNA, 20 bp, synthetic construct
  source 1..20: mol_type = other DNA
attcgccccacctttgcctt

SEQ ID NO: 107703 - DNA, 20 bp, synthetic construct
  source 1..20: mol_type = other DNA
gattcgccccacctttgcct

SEQ ID NO: 107704 - DNA, 20 bp, synthetic construct
  source 1..20: mol_type = other DNA
tgattcgccccacctttgcc

SEQ ID NO: 107705 - DNA, 20 bp, synthetic construct
  source 1..20: mol_type = other DNA
gtgattcgccccacctttgc

SEQ ID NO: 107706 - DNA, 20 bp, synthetic construct
  source 1..20: mol_type = other DNA
tgtgattcgccccacctttg

SEQ ID NO: 107707 - DNA, 20 bp, synthetic construct
  source 1..20: mol_type = other DNA
ttgtgattcgccccaccttt

SEQ ID NO: 107708 - DNA, 20 bp, synthetic construct
  source 1..20: mol_type = other DNA
cttgtgattcgccccacctt

SEQ ID NO: 107709 - DNA, 20 bp, synthetic construct
  source 1..20: mol_type = other DNA
ccttgtgattcgccccacct

SEQ ID NO: 107710 - DNA, 20 bp, synthetic construct
  source 1..20: mol_type = other DNA
accttgtgattcgccccacc

SEQ ID NO: 107711 - DNA, 20 bp, synthetic construct
  source 1..20: mol_type = other DNA
aaccttgtgattcgccccac

SEQ ID NO: 107712 - DNA, 20 bp, synthetic construct
  source 1..20: mol_type = other DNA
taaccttgtgattcgcccca

SEQ ID NO: 107713 - DNA, 20 bp, synthetic construct
  source 1..20: mol_type = other DNA
ctaaccttgtgattcgcccc

SEQ ID NO: 107714 - DNA, 20 bp, synthetic construct
  source 1..20: mol_type = other DNA
cctaaccttgtgattcgccc

SEQ ID NO: 107715 - DNA, 20 bp, synthetic construct
  source 1..20: mol_type = other DNA
tcctaaccttgtgattcgcc

SEQ ID NO: 107716 - DNA, 20 bp, synthetic construct
  source 1..20: mol_type = other DNA
ctcctaaccttgtgattcgc

SEQ ID NO: 107717 - DNA, 20 bp, synthetic construct
  source 1..20: mol_type = other DNA
actcctaaccttgtgattcg

SEQ ID NO: 107718 - DNA, 20 bp, synthetic construct
  source 1..20: mol_type = other DNA
aactcctaaccttgtgattc

SEQ ID NO: 107719 - DNA, 20 bp, synthetic construct
  source 1..20: mol_type = other DNA
gaactcctaaccttgtgatt

SEQ ID NO: 107720 - DNA, 20 bp, synthetic construct
  source 1..20: mol_type = other DNA
cgaactcctaaccttgtgat

SEQ ID NO: 107721 - DNA, 20 bp, synthetic construct
  source 1..20: mol_type = other DNA
tcgaactcctaaccttgtga

SEQ ID NO: 107722 - DNA, 20 bp, synthetic construct
  source 1..20: mol_type = other DNA
ctcgaactcctaaccttgtg

SEQ ID NO: 107723 - DNA, 20 bp, synthetic construct
  source 1..20: mol_type = other DNA
tctcgaactcctaaccttgt

SEQ ID NO: 107724 - DNA, 20 bp, synthetic construct
  source 1..20: mol_type = other DNA
gtctcgaactcctaaccttg

SEQ ID NO: 107725 - DNA, 20 bp, synthetic construct
  source 1..20: mol_type = other DNA
ggtctcgaactcctaacctt

SEQ ID NO: 107726 - DNA, 20 bp, synthetic construct
  source 1..20: mol_type = other DNA
tggtctcgaactcctaacct

SEQ ID NO: 107727 - DNA, 20 bp, synthetic construct
  source 1..20: mol_type = other DNA
ctggtctcgaactcctaacc

SEQ ID NO: 107728 - DNA, 20 bp, synthetic construct
  source 1..20: mol_type = other DNA
gctggtctcgaactcctaac

SEQ ID NO: 107729 - DNA, 20 bp, synthetic construct
  source 1..20: mol_type = other DNA
ggctggtctcgaactcctaa

SEQ ID NO: 107730 - DNA, 20 bp, synthetic construct
  source 1..20: mol_type = other DNA
aggctggtctcgaactccta

SEQ ID NO: 107731 - DNA, 20 bp, synthetic construct
  source 1..20: mol_type = other DNA
caggctggtctcgaactcct

SEQ ID NO: 107732 - DNA, 20 bp, synthetic construct
  source 1..20: mol_type = other DNA
tcaggctggtctcgaactcc

SEQ ID NO: 107733 - DNA, 20 bp, synthetic construct
  source 1..20: mol_type = other DNA
gtcaggctggtctcgaactc

SEQ ID NO: 107734 - DNA, 20 bp, synthetic construct
  source 1..20: mol_type = other DNA
ggtcaggctggtctcgaact

SEQ ID NO: 107735 - DNA, 20 bp, synthetic construct
  source 1..20: mol_type = other DNA
tggtcaggctggtctcgaac

SEQ ID NO: 107736 - DNA, 20 bp, synthetic construct
  source 1..20: mol_type = other DNA
ttggtcaggctggtctcgaa

SEQ ID NO: 107737 - DNA, 20 bp, synthetic construct
  source 1..20: mol_type = other DNA
gttggtcaggctggtctcga

SEQ ID NO: 107738 - DNA, 20 bp, synthetic construct
  source 1..20: mol_type = other DNA
cgttggtcaggctggtctcg

SEQ ID NO: 107739 - DNA, 20 bp, synthetic construct
  source 1..20: mol_type = other DNA
acgttggtcaggctggtctc

SEQ ID NO: 107740 - DNA, 20 bp, synthetic construct
  source 1..20: mol_type = other DNA
cacgttggtcaggctggtct

SEQ ID NO: 107741 - DNA, 20 bp, synthetic construct
  source 1..20: mol_type = other DNA
ccacgttggtcaggctggtc

SEQ ID NO: 107742 - DNA, 20 bp, synthetic construct
  source 1..20: mol_type = other DNA
accacgttggtcaggctggt

SEQ ID NO: 107743 - DNA, 20 bp, synthetic construct
  source 1..20: mol_type = other DNA
caccacgttggtcaggctgg

SEQ ID NO: 107744 - DNA, 20 bp, synthetic construct
  source 1..20: mol_type = other DNA
tcaccacgttggtcaggctg

SEQ ID NO: 107745 - DNA, 20 bp, synthetic construct
  source 1..20: mol_type = other DNA
ttcaccacgttggtcaggct

SEQ ID NO: 107746 - DNA, 20 bp, synthetic construct
  source 1..20: mol_type = other DNA
tttcaccacgttggtcaggc

SEQ ID NO: 107747 - DNA, 20 bp, synthetic construct
  source 1..20: mol_type = other DNA
gtttcaccacgttggtcagg

SEQ ID NO: 107748 - DNA, 20 bp, synthetic construct
  source 1..20: mol_type = other DNA
agtttcaccacgttggtcag

SEQ ID NO: 107749 - DNA, 20 bp, synthetic construct
  source 1..20: mol_type = other DNA
gagtttcaccacgttggtca

SEQ ID NO: 107750 - DNA, 20 bp, synthetic construct
  source 1..20: mol_type = other DNA
agagtttcaccacgttggtc

SEQ ID NO: 107751 - DNA, 20 bp, synthetic construct
  source 1..20: mol_type = other DNA
cagagtttcaccacgttggt

SEQ ID NO: 107752 - DNA, 20 bp, synthetic construct
  source 1..20: mol_type = other DNA
acagagtttcaccacgttgg

SEQ ID NO: 107753 - DNA, 20 bp, synthetic construct
  source 1..20: mol_type = other DNA
gacagagtttcaccacgttg

SEQ ID NO: 107754 - DNA, 20 bp, synthetic construct
  source 1..20: mol_type = other DNA
agacagagtttcaccacgtt

SEQ ID NO: 107755 - DNA, 20 bp, synthetic construct
  source 1..20: mol_type = other DNA
gagacagagtttcaccacgt

SEQ ID NO: 107756 - DNA, 20 bp, synthetic construct
  source 1..20: mol_type = other DNA
agagacagagtttcaccacg

SEQ ID NO: 107757 - DNA, 20 bp, synthetic construct
  source 1..20: mol_type = other DNA
tagagacagagtttcaccac

SEQ ID NO: 107758 - DNA, 20 bp, synthetic construct
  source 1..20: mol_type = other DNA
gtagagacagagtttcacca

SEQ ID NO: 107759 - DNA, 20 bp, synthetic construct
  source 1..20: mol_type = other DNA
agtagagacagagtttcacc

SEQ ID NO: 107760 - DNA, 20 bp, synthetic construct
  source 1..20: mol_type = other DNA
tagtagagacagagtttcac

SEQ ID NO: 107761 - DNA, 20 bp, synthetic construct
  source 1..20: mol_type = other DNA
ttagtagagacagagtttca

SEQ ID NO: 107762 - DNA, 20 bp, synthetic construct
  source 1..20: mol_type = other DNA
tttagtagagacagagtttc

SEQ ID NO: 107763 - DNA, 20 bp, synthetic construct
  source 1..20: mol_type = other DNA
ttttagtagagacagagttt

SEQ ID NO: 107764 - DNA, 20 bp, synthetic construct
  source 1..20: mol_type = other DNA
tttttagtagagacagagtt

SEQ ID NO: 107765 - DNA, 20 bp, synthetic construct
  source 1..20: mol_type = other DNA
atttttagtagagacagagt

SEQ ID NO: 107766 - DNA, 20 bp, synthetic construct
  source 1..20: mol_type = other DNA
tatttttagtagagacagag

SEQ ID NO: 107767 - DNA, 20 bp, synthetic construct
  source 1..20: mol_type = other DNA
gtatttttagtagagacaga

SEQ ID NO: 107768 - DNA, 20 bp, synthetic construct
  source 1..20: mol_type = other DNA
tgtatttttagtagagacag

SEQ ID NO: 107769 - DNA, 20 bp, synthetic construct
  source 1..20: mol_type = other DNA
ttgtatttttagtagagaca

SEQ ID NO: 107770 - DNA, 20 bp, synthetic construct
  source 1..20: mol_type = other DNA
tttgtatttttagtagagac

SEQ ID NO: 107771 - DNA, 20 bp, synthetic construct
  source 1..20: mol_type = other DNA
ttttgtatttttagtagaga

SEQ ID NO: 107772 - DNA, 20 bp, synthetic construct
  source 1..20: mol_type = other DNA
tttttgtatttttagtagag

SEQ ID NO: 107773 - DNA, 20 bp, synthetic construct
  source 1..20: mol_type = other DNA
atttttgtatttttagtaga

SEQ ID NO: 107774 - DNA, 20 bp, synthetic construct
  source 1..20: mol_type = other DNA
aatttttgtatttttagtag

SEQ ID NO: 107775 - DNA, 20 bp, synthetic construct
  source 1..20: mol_type = other DNA
taatttttgtatttttagta

SEQ ID NO: 107776 - DNA, 20 bp, synthetic construct
  source 1..20: mol_type = other DNA
ctaatttttgtatttttagt

SEQ ID NO: 107777 - DNA, 20 bp, synthetic construct
  source 1..20: mol_type = other DNA
gctaatttttgtatttttag

SEQ ID NO: 107778 - DNA, 20 bp, synthetic construct
  source 1..20: mol_type = other DNA
ggctaatttttgtattttta

SEQ ID NO: 107779 - DNA, 20 bp, synthetic construct
  source 1..20: mol_type = other DNA
tggctaatttttgtattttt

SEQ ID NO: 107780 - DNA, 20 bp, synthetic construct
  source 1..20: mol_type = other DNA
ctggctaatttttgtatttt

SEQ ID NO: 107781 - DNA, 20 bp, synthetic construct
  source 1..20: mol_type = other DNA
cctggctaatttttgtattt

SEQ ID NO: 107782 - DNA, 20 bp, synthetic construct
  source 1..20: mol_type = other DNA
gcctggctaatttttgtatt

SEQ ID NO: 107783 - DNA, 20 bp, synthetic construct
  source 1..20: mol_type = other DNA
cgcctggctaatttttgtat

SEQ ID NO: 107784 - DNA, 20 bp, synthetic construct
  source 1..20: mol_type = other DNA
acgcctggctaatttttgta

SEQ ID NO: 107785 - DNA, 20 bp, synthetic construct
  source 1..20: mol_type = other DNA
cacgcctggctaatttttgt

SEQ ID NO: 107786 - DNA, 20 bp, synthetic construct
  source 1..20: mol_type = other DNA
ccacgcctggctaatttttg

SEQ ID NO: 107787 - DNA, 20 bp, synthetic construct
  source 1..20: mol_type = other DNA
accacgcctggctaattttt

SEQ ID NO: 107788 - DNA, 20 bp, synthetic construct
  source 1..20: mol_type = other DNA
caccacgcctggctaatttt

SEQ ID NO: 107789 - DNA, 20 bp, synthetic construct
  source 1..20: mol_type = other DNA
ccaccacgcctggctaattt

SEQ ID NO: 107790 - DNA, 20 bp, synthetic construct
  source 1..20: mol_type = other DNA
gccaccacgcctggctaatt

SEQ ID NO: 107791 - DNA, 20 bp, synthetic construct
  source 1..20: mol_type = other DNA
tgccaccacgcctggctaat

SEQ ID NO: 107792 - DNA, 20 bp, synthetic construct
  source 1..20: mol_type = other DNA
gtgccaccacgcctggctaa

SEQ ID NO: 107793 - DNA, 20 bp, synthetic construct
  source 1..20: mol_type = other DNA
cgtgccaccacgcctggcta

SEQ ID NO: 107794 - DNA, 20 bp, synthetic construct
  source 1..20: mol_type = other DNA
gcgtgccaccacgcctggct

SEQ ID NO: 107795 - DNA, 20 bp, synthetic construct
  source 1..20: mol_type = other DNA
tgcgtgccaccacgcctggc

SEQ ID NO: 107796 - DNA, 20 bp, synthetic construct
  source 1..20: mol_type = other DNA
gtgcgtgccaccacgcctgg

SEQ ID NO: 107797 - DNA, 20 bp, synthetic construct
  source 1..20: mol_type = other DNA
ggtgcgtgccaccacgcctg

SEQ ID NO: 107798 - DNA, 20 bp, synthetic construct
  source 1..20: mol_type = other DNA
aggtgcgtgccaccacgcct

SEQ ID NO: 107799 - DNA, 20 bp, synthetic construct
  source 1..20: mol_type = other DNA
caggtgcgtgccaccacgcc

SEQ ID NO: 107800 - DNA, 20 bp, synthetic construct
  source 1..20: mol_type = other DNA
acaggtgcgtgccaccacgc

SEQ ID NO: 107801 - DNA, 20 bp, synthetic construct
  source 1..20: mol_type = other DNA
tacaggtgcgtgccaccacg

SEQ ID NO: 107802 - DNA, 20 bp, synthetic construct
  source 1..20: mol_type = other DNA
ttacaggtgcgtgccaccac

SEQ ID NO: 107803 - DNA, 20 bp, synthetic construct
  source 1..20: mol_type = other DNA
attacaggtgcgtgccacca

SEQ ID NO: 107804 - DNA, 20 bp, synthetic construct
  source 1..20: mol_type = other DNA
gattacaggtgcgtgccacc

SEQ ID NO: 107805 - DNA, 20 bp, synthetic construct
  source 1..20: mol_type = other DNA
ggattacaggtgcgtgccac

SEQ ID NO: 107806 - DNA, 20 bp, synthetic construct
  source 1..20: mol_type = other DNA
aggattacaggtgcgtgcca

SEQ ID NO: 107807 - DNA, 20 bp, synthetic construct
  source 1..20: mol_type = other DNA
taggattacaggtgcgtgcc

SEQ ID NO: 107808 - DNA, 20 bp, synthetic construct
  source 1..20: mol_type = other DNA
ctaggattacaggtgcgtgc

SEQ ID NO: 107809 - DNA, 20 bp, synthetic construct
  source 1..20: mol_type = other DNA
gctaggattacaggtgcgtg

SEQ ID NO: 107810 - DNA, 20 bp, synthetic construct
  source 1..20: mol_type = other DNA
agctaggattacaggtgcgt

SEQ ID NO: 107811 - DNA, 20 bp, synthetic construct
  source 1..20: mol_type = other DNA
tagctaggattacaggtgcg

SEQ ID NO: 107812 - DNA, 20 bp, synthetic construct
  source 1..20: mol_type = other DNA
gtagctaggattacaggtgc

SEQ ID NO: 107813 - DNA, 20 bp, synthetic construct
  source 1..20: mol_type = other DNA
agtagctaggattacaggtg

SEQ ID NO: 107814 - DNA, 20 bp, synthetic construct
  source 1..20: mol_type = other DNA
gagtagctaggattacaggt

SEQ ID NO: 107815 - DNA, 20 bp, synthetic construct
  source 1..20: mol_type = other DNA
tgagtagctaggattacagg

SEQ ID NO: 107816 - DNA, 20 bp, synthetic construct
  source 1..20: mol_type = other DNA
ctgagtagctaggattacag

SEQ ID NO: 107817 - DNA, 20 bp, synthetic construct
  source 1..20: mol_type = other DNA
cctgagtagctaggattaca

SEQ ID NO: 107818 - DNA, 20 bp, synthetic construct
  source 1..20: mol_type = other DNA
tcctgagtagctaggattac

SEQ ID NO: 107819 - DNA, 20 bp, synthetic construct
  source 1..20: mol_type = other DNA
ctcctgagtagctaggatta

SEQ ID NO: 107820 - DNA, 20 bp, synthetic construct
  source 1..20: mol_type = other DNA
cctcctgagtagctaggatt

SEQ ID NO: 107821 - DNA, 20 bp, synthetic construct
  source 1..20: mol_type = other DNA
gcctcctgagtagctaggat

SEQ ID NO: 107822 - DNA, 20 bp, synthetic construct
  source 1..20: mol_type = other DNA
agcctcctgagtagctagga

SEQ ID NO: 107823 - DNA, 20 bp, synthetic construct
  source 1..20: mol_type = other DNA
cagcctcctgagtagctagg

SEQ ID NO: 107824 - DNA, 20 bp, synthetic construct
  source 1..20: mol_type = other DNA
tcagcctcctgagtagctag

SEQ ID NO: 107825 - DNA, 20 bp, synthetic construct
  source 1..20: mol_type = other DNA
ctcagcctcctgagtagcta

SEQ ID NO: 107826 - DNA, 20 bp, synthetic construct
  source 1..20: mol_type = other DNA
cctcagcctcctgagtagct

SEQ ID NO: 107827 - DNA, 20 bp, synthetic construct
  source 1..20: mol_type = other DNA
gcctcagcctcctgagtagc

SEQ ID NO: 107828 - DNA, 20 bp, synthetic construct
  source 1..20: mol_type = other DNA
tgcctcagcctcctgagtag

SEQ ID NO: 107829 - DNA, 20 bp, synthetic construct
  source 1..20: mol_type = other DNA
ctgcctcagcctcctgagta

SEQ ID NO: 107830 - DNA, 20 bp, synthetic construct
  source 1..20: mol_type = other DNA
cctgcctcagcctcctgagt

SEQ ID NO: 107831 - DNA, 20 bp, synthetic construct
  source 1..20: mol_type = other DNA
tcctgcctcagcctcctgag

SEQ ID NO: 107832 - DNA, 20 bp, synthetic construct
  source 1..20: mol_type = other DNA
ctcctgcctcagcctcctga

SEQ ID NO: 107833 - DNA, 20 bp, synthetic construct
  source 1..20: mol_type = other DNA
tctcctgcctcagcctcctg

SEQ ID NO: 107834 - DNA, 20 bp, synthetic construct
  source 1..20: mol_type = other DNA
ttctcctgcctcagcctcct

SEQ ID NO: 107835 - DNA, 20 bp, synthetic construct
  source 1..20: mol_type = other DNA
attctcctgcctcagcctcc

SEQ ID NO: 107836 - DNA, 20 bp, synthetic construct
  source 1..20: mol_type = other DNA
gattctcctgcctcagcctc

SEQ ID NO: 107837 - DNA, 20 bp, synthetic construct
  source 1..20: mol_type = other DNA
cgattctcctgcctcagcct

SEQ ID NO: 107838 - DNA, 20 bp, synthetic construct
  source 1..20: mol_type = other DNA
gcgattctcctgcctcagcc

SEQ ID NO: 107839 - DNA, 20 bp, synthetic construct
  source 1..20: mol_type = other DNA
agcgattctcctgcctcagc

SEQ ID NO: 107840 - DNA, 20 bp, synthetic construct
  source 1..20: mol_type = other DNA
aagcgattctcctgcctcag

SEQ ID NO: 107841 - DNA, 20 bp, synthetic construct
  source 1..20: mol_type = other DNA
caagcgattctcctgcctca

SEQ ID NO: 107842 - DNA, 20 bp, synthetic construct
  source 1..20: mol_type = other DNA
tcaagcgattctcctgcctc

SEQ ID NO: 107843 - DNA, 20 bp, synthetic construct
  source 1..20: mol_type = other DNA
ttcaagcgattctcctgcct

SEQ ID NO: 107844 - DNA, 20 bp, synthetic construct
  source 1..20: mol_type = other DNA
gttcaagcgattctcctgcc

SEQ ID NO: 107845 - DNA, 20 bp, synthetic construct
  source 1..20: mol_type = other DNA
ggttcaagcgattctcctgc

SEQ ID NO: 107846 - DNA, 20 bp, synthetic construct
  source 1..20: mol_type = other DNA
aggttcaagcgattctcctg

SEQ ID NO: 107847 - DNA, 20 bp, synthetic construct
  source 1..20: mol_type = other DNA
caggttcaagcgattctcct

SEQ ID NO: 107848 - DNA, 20 bp, synthetic construct
  source 1..20: mol_type = other DNA
ccaggttcaagcgattctcc

SEQ ID NO: 107849 - DNA, 20 bp, synthetic construct
  source 1..20: mol_type = other DNA
cccaggttcaagcgattctc

SEQ ID NO: 107850 - DNA, 20 bp, synthetic construct
  source 1..20: mol_type = other DNA
tcccaggttcaagcgattct

SEQ ID NO: 107851 - DNA, 20 bp, synthetic construct
  source 1..20: mol_type = other DNA
ctcccaggttcaagcgattc

SEQ ID NO: 107852 - DNA, 20 bp, synthetic construct
  source 1..20: mol_type = other DNA
cctcccaggttcaagcgatt

SEQ ID NO: 107853 - DNA, 20 bp, synthetic construct
  source 1..20: mol_type = other DNA
gcctcccaggttcaagcgat

SEQ ID NO: 107854 - DNA, 20 bp, synthetic construct
  source 1..20: mol_type = other DNA
cgcctcccaggttcaagcga

SEQ ID NO: 107855 - DNA, 20 bp, synthetic construct
  source 1..20: mol_type = other DNA
ccgcctcccaggttcaagcg

SEQ ID NO: 107856 - DNA, 20 bp, synthetic construct
  source 1..20: mol_type = other DNA
tccgcctcccaggttcaagc

SEQ ID NO: 107857 - DNA, 20 bp, synthetic construct
  source 1..20: mol_type = other DNA
ctccgcctcccaggttcaag

SEQ ID NO: 107858 - DNA, 20 bp, synthetic construct
  source 1..20: mol_type = other DNA
cctccgcctcccaggttcaa

SEQ ID NO: 107859 - DNA, 20 bp, synthetic construct
  source 1..20: mol_type = other DNA
acctccgcctcccaggttca

SEQ ID NO: 107860 - DNA, 20 bp, synthetic construct
  source 1..20: mol_type = other DNA
aacctccgcctcccaggttc

SEQ ID NO: 107861 - DNA, 20 bp, synthetic construct
  source 1..20: mol_type = other DNA
caacctccgcctcccaggtt

SEQ ID NO: 107862 - DNA, 20 bp, synthetic construct
  source 1..20: mol_type = other DNA
gcaacctccgcctcccaggt

SEQ ID NO: 107863 - DNA, 20 bp, synthetic construct
  source 1..20: mol_type = other DNA
tgcaacctccgcctcccagg

SEQ ID NO: 107864 - DNA, 20 bp, synthetic construct
  source 1..20: mol_type = other DNA
ctgcaacctccgcctcccag

SEQ ID NO: 107865 - DNA, 20 bp, synthetic construct
  source 1..20: mol_type = other DNA
actgcaacctccgcctccca

SEQ ID NO: 107866 - DNA, 20 bp, synthetic construct
  source 1..20: mol_type = other DNA
aactgcaacctccgcctccc

SEQ ID NO: 107867 - DNA, 20 bp, synthetic construct
  source 1..20: mol_type = other DNA
taactgcaacctccgcctcc

SEQ ID NO: 107868 - DNA, 20 bp, synthetic construct
  source 1..20: mol_type = other DNA
ctaactgcaacctccgcctc

SEQ ID NO: 107869 - DNA, 20 bp, synthetic construct
  source 1..20: mol_type = other DNA
gctaactgcaacctccgcct

SEQ ID NO: 107870 - DNA, 20 bp, synthetic construct
  source 1..20: mol_type = other DNA
ggctaactgcaacctccgcc

SEQ ID NO: 107871 - DNA, 20 bp, synthetic construct
  source 1..20: mol_type = other DNA
cggctaactgcaacctccgc

SEQ ID NO: 107872 - DNA, 20 bp, synthetic construct
  source 1..20: mol_type = other DNA
tcggctaactgcaacctccg

SEQ ID NO: 107873 - DNA, 20 bp, synthetic construct
  source 1..20: mol_type = other DNA
ctcggctaactgcaacctcc

SEQ ID NO: 107874 - DNA, 20 bp, synthetic construct
  source 1..20: mol_type = other DNA
tctcggctaactgcaacctc

SEQ ID NO: 107875 - DNA, 20 bp, synthetic construct
  source 1..20: mol_type = other DNA
atctcggctaactgcaacct

SEQ ID NO: 107876 - DNA, 20 bp, synthetic construct
  source 1..20: mol_type = other DNA
gatctcggctaactgcaacc

SEQ ID NO: 107877 - DNA, 20 bp, synthetic construct
  source 1..20: mol_type = other DNA
cgatctcggctaactgcaac

SEQ ID NO: 107878 - DNA, 20 bp, synthetic construct
  source 1..20: mol_type = other DNA
gcgatctcggctaactgcaa

SEQ ID NO: 107879 - DNA, 20 bp, synthetic construct
  source 1..20: mol_type = other DNA
cgcgatctcggctaactgca

SEQ ID NO: 107880 - DNA, 20 bp, synthetic construct
  source 1..20: mol_type = other DNA
gcgcgatctcggctaactgc

SEQ ID NO: 107881 - DNA, 20 bp, synthetic construct
  source 1..20: mol_type = other DNA
ggcgcgatctcggctaactg

SEQ ID NO: 107882 - DNA, 20 bp, synthetic construct
  source 1..20: mol_type = other DNA
tggcgcgatctcggctaact

SEQ ID NO: 107883 - DNA, 20 bp, synthetic construct
  source 1..20: mol_type = other DNA
gtggcgcgatctcggctaac

SEQ ID NO: 107884 - DNA, 20 bp, synthetic construct
  source 1..20: mol_type = other DNA
agtggcgcgatctcggctaa

SEQ ID NO: 107885 - DNA, 20 bp, synthetic construct
  source 1..20: mol_type = other DNA
cagtggcgcgatctcggcta

SEQ ID NO: 107886 - DNA, 20 bp, synthetic construct
  source 1..20: mol_type = other DNA
gcagtggcgcgatctcggct

SEQ ID NO: 107887 - DNA, 20 bp, synthetic construct
  source 1..20: mol_type = other DNA
ggcagtggcgcgatctcggc

SEQ ID NO: 107888 - DNA, 20 bp, synthetic construct
  source 1..20: mol_type = other DNA
cggcagtggcgcgatctcgg

SEQ ID NO: 107889 - DNA, 20 bp, synthetic construct
  source 1..20: mol_type = other DNA
acggcagtggcgcgatctcg

SEQ ID NO: 107890 - DNA, 20 bp, synthetic construct
  source 1..20: mol_type = other DNA
gacggcagtggcgcgatctc

SEQ ID NO: 107891 - DNA, 20 bp, synthetic construct
  source 1..20: mol_type = other DNA
ggacggcagtggcgcgatct

SEQ ID NO: 107892 - DNA, 20 bp, synthetic construct
  source 1..20: mol_type = other DNA
tggacggcagtggcgcgatc

SEQ ID NO: 107893 - DNA, 20 bp, synthetic construct
  source 1..20: mol_type = other DNA
ctggacggcagtggcgcgat

SEQ ID NO: 107894 - DNA, 20 bp, synthetic construct
  source 1..20: mol_type = other DNA
gctggacggcagtggcgcga

SEQ ID NO: 107895 - DNA, 20 bp, synthetic construct
  source 1..20: mol_type = other DNA
ggctggacggcagtggcgcg

SEQ ID NO: 107896 - DNA, 20 bp, synthetic construct
  source 1..20: mol_type = other DNA
aggctggacggcagtggcgc

SEQ ID NO: 107897 - DNA, 20 bp, synthetic construct
  source 1..20: mol_type = other DNA
caggctggacggcagtggcg

SEQ ID NO: 107898 - DNA, 20 bp, synthetic construct
  source 1..20: mol_type = other DNA
ccaggctggacggcagtggc

SEQ ID NO: 107899 - DNA, 20 bp, synthetic construct
  source 1..20: mol_type = other DNA
cccaggctggacggcagtgg

SEQ ID NO: 107900 - DNA, 20 bp, synthetic construct
  source 1..20: mol_type = other DNA
gcccaggctggacggcagtg

SEQ ID NO: 107901 - DNA, 20 bp, synthetic construct
  source 1..20: mol_type = other DNA
tgcccaggctggacggcagt

SEQ ID NO: 107902 - DNA, 20 bp, synthetic construct
  source 1..20: mol_type = other DNA
ctgcccaggctggacggcag

SEQ ID NO: 107903 - DNA, 20 bp, synthetic construct
  source 1..20: mol_type = other DNA
gctgcccaggctggacggca

SEQ ID NO: 107904 - DNA, 20 bp, synthetic construct
  source 1..20: mol_type = other DNA
tgctgcccaggctggacggc

SEQ ID NO: 107905 - DNA, 20 bp, synthetic construct
  source 1..20: mol_type = other DNA
ctgctgcccaggctggacgg

SEQ ID NO: 107906 - DNA, 20 bp, synthetic construct
  source 1..20: mol_type = other DNA
tctgctgcccaggctggacg

SEQ ID NO: 107907 - DNA, 20 bp, synthetic construct
  source 1..20: mol_type = other DNA
ctctgctgcccaggctggac

SEQ ID NO: 107908 - DNA, 20 bp, synthetic construct
  source 1..20: mol_type = other DNA
gctctgctgcccaggctgga

SEQ ID NO: 107909 - DNA, 20 bp, synthetic construct
  source 1..20: mol_type = other DNA
tgctctgctgcccaggctgg

SEQ ID NO: 107910 - DNA, 20 bp, synthetic construct
  source 1..20: mol_type = other DNA
ttgctctgctgcccaggctg

SEQ ID NO: 107911 - DNA, 20 bp, synthetic construct
  source 1..20: mol_type = other DNA
cttgctctgctgcccaggct

SEQ ID NO: 107912 - DNA, 20 bp, synthetic construct
  source 1..20: mol_type = other DNA
tcttgctctgctgcccaggc

SEQ ID NO: 107913 - DNA, 20 bp, synthetic construct
  source 1..20: mol_type = other DNA
gtcttgctctgctgcccagg

SEQ ID NO: 107914 - DNA, 20 bp, synthetic construct
  source 1..20: mol_type = other DNA
agtcttgctctgctgcccag

SEQ ID NO: 107915 - DNA, 20 bp, synthetic construct
  source 1..20: mol_type = other DNA
gagtcttgctctgctgccca

SEQ ID NO: 107916 - DNA, 20 bp, synthetic construct
  source 1..20: mol_type = other DNA
agagtcttgctctgctgccc

SEQ ID NO: 107917 - DNA, 20 bp, synthetic construct
  source 1..20: mol_type = other DNA
cagagtcttgctctgctgcc

SEQ ID NO: 107918 - DNA, 20 bp, synthetic construct
  source 1..20: mol_type = other DNA
acagagtcttgctctgctgc

SEQ ID NO: 107919 - DNA, 20 bp, synthetic construct
  source 1..20: mol_type = other DNA
gacagagtcttgctctgctg

SEQ ID NO: 107920 - DNA, 20 bp, synthetic construct
  source 1..20: mol_type = other DNA
agacagagtcttgctctgct

SEQ ID NO: 107921 - DNA, 20 bp, synthetic construct
  source 1..20: mol_type = other DNA
gagacagagtcttgctctgc

SEQ ID NO: 107922 - DNA, 20 bp, synthetic construct
  source 1..20: mol_type = other DNA
tgagacagagtcttgctctg

SEQ ID NO: 107923 - DNA, 20 bp, synthetic construct
  source 1..20: mol_type = other DNA
gtgagacagagtcttgctct

SEQ ID NO: 107924 - DNA, 20 bp, synthetic construct
  source 1..20: mol_type = other DNA
tgtgagacagagtcttgctc

SEQ ID NO: 107925 - DNA, 20 bp, synthetic construct
  source 1..20: mol_type = other DNA
ttgtgagacagagtcttgct

SEQ ID NO: 107926 - DNA, 20 bp, synthetic construct
  source 1..20: mol_type = other DNA
tttgtgagacagagtcttgc

SEQ ID NO: 107927 - DNA, 20 bp, synthetic construct
  source 1..20: mol_type = other DNA
ttttgtgagacagagtcttg

SEQ ID NO: 107928 - DNA, 20 bp, synthetic construct
  source 1..20: mol_type = other DNA
tttttgtgagacagagtctt

SEQ ID NO: 107929 - DNA, 20 bp, synthetic construct
  source 1..20: mol_type = other DNA
ttttttgtgagacagagtct

SEQ ID NO: 107930 - DNA, 20 bp, synthetic construct
  source 1..20: mol_type = other DNA
tttttttgtgagacagagtc

SEQ ID NO: 107931 - DNA, 20 bp, synthetic construct
  source 1..20: mol_type = other DNA
ttttttttgtgagacagagt

SEQ ID NO: 107932 - DNA, 20 bp, synthetic construct
  source 1..20: mol_type = other DNA
tttttttttgtgagacagag

SEQ ID NO: 107933 - DNA, 20 bp, synthetic construct
  source 1..20: mol_type = other DNA
ttttttttttgtgagacaga

SEQ ID NO: 107934 - DNA, 20 bp, synthetic construct
  source 1..20: mol_type = other DNA
tttttttttttgtgagacag

SEQ ID NO: 107935 - DNA, 20 bp, synthetic construct
  source 1..20: mol_type = other DNA
ttttttttttttgtgagaca

SEQ ID NO: 107936 - DNA, 20 bp, synthetic construct
  source 1..20: mol_type = other DNA
tttttttttttttgtgagac

SEQ ID NO: 107937 - DNA, 20 bp, synthetic construct
  source 1..20: mol_type = other DNA
ttttttttttttttgtgaga

SEQ ID NO: 107938 - DNA, 20 bp, synthetic construct
  source 1..20: mol_type = other DNA
attttttttttttttgtgag

SEQ ID NO: 107939 - DNA, 20 bp, synthetic construct
  source 1..20: mol_type = other DNA
aattttttttttttttgtga

SEQ ID NO: 107940 - DNA, 20 bp, synthetic construct
  source 1..20: mol_type = other DNA
caattttttttttttttgtg

SEQ ID NO: 107941 - DNA, 20 bp, synthetic construct
  source 1..20: mol_type = other DNA
acaattttttttttttttgt

SEQ ID NO: 107942 - DNA, 20 bp, synthetic construct
  source 1..20: mol_type = other DNA
tacaattttttttttttttg

SEQ ID NO: 107943 - DNA, 20 bp, synthetic construct
  source 1..20: mol_type = other DNA
ctacaatttttttttttttt

SEQ ID NO: 107944 - DNA, 20 bp, synthetic construct
  source 1..20: mol_type = other DNA
actacaattttttttttttt

SEQ ID NO: 107945 - DNA, 20 bp, synthetic construct
  source 1..20: mol_type = other DNA
aactacaatttttttttttt

SEQ ID NO: 107946 - DNA, 20 bp, synthetic construct
  source 1..20: mol_type = other DNA
gaactacaattttttttttt

SEQ ID NO: 107947 - DNA, 20 bp, synthetic construct
  source 1..20: mol_type = other DNA
agaactacaatttttttttt

SEQ ID NO: 107948 - DNA, 20 bp, synthetic construct
  source 1..20: mol_type = other DNA
aagaactacaattttttttt

SEQ ID NO: 107949 - DNA, 20 bp, synthetic construct
  source 1..20: mol_type = other DNA
taagaactacaatttttttt

SEQ ID NO: 107950 - DNA, 20 bp, synthetic construct
  source 1..20: mol_type = other DNA
ataagaactacaattttttt

SEQ ID NO: 107951 - DNA, 20 bp, synthetic construct
  source 1..20: mol_type = other DNA
aataagaactacaatttttt

SEQ ID NO: 107952 - DNA, 20 bp, synthetic construct
  source 1..20: mol_type = other DNA
aaataagaactacaattttt

SEQ ID NO: 107953 - DNA, 20 bp, synthetic construct
  source 1..20: mol_type = other DNA
aaaataagaactacaatttt

SEQ ID NO: 107954 - DNA, 20 bp, synthetic construct
  source 1..20: mol_type = other DNA
aaaaataagaactacaattt

SEQ ID NO: 107955 - DNA, 20 bp, synthetic construct
  source 1..20: mol_type = other DNA
caaaaataagaactacaatt

SEQ ID NO: 107956 - DNA, 20 bp, synthetic construct
  source 1..20: mol_type = other DNA
tcaaaaataagaactacaat

SEQ ID NO: 107957 - DNA, 20 bp, synthetic construct
  source 1..20: mol_type = other DNA
ttcaaaaataagaactacaa

SEQ ID NO: 107958 - DNA, 20 bp, synthetic construct
  source 1..20: mol_type = other DNA
tttcaaaaataagaactaca

SEQ ID NO: 107959 - DNA, 20 bp, synthetic construct
  source 1..20: mol_type = other DNA
ctttcaaaaataagaactac

SEQ ID NO: 107960 - DNA, 20 bp, synthetic construct
  source 1..20: mol_type = other DNA
cctttcaaaaataagaacta

SEQ ID NO: 107961 - DNA, 20 bp, synthetic construct
  source 1..20: mol_type = other DNA
acctttcaaaaataagaact

SEQ ID NO: 107962 - DNA, 20 bp, synthetic construct
  source 1..20: mol_type = other DNA
aacctttcaaaaataagaac

SEQ ID NO: 107963 - DNA, 20 bp, synthetic construct
  source 1..20: mol_type = other DNA
gaacctttcaaaaataagaa

SEQ ID NO: 107964 - DNA, 20 bp, synthetic construct
  source 1..20: mol_type = other DNA
tgaacctttcaaaaataaga

SEQ ID NO: 107965 - DNA, 20 bp, synthetic construct
  source 1..20: mol_type = other DNA
atgaacctttcaaaaataag

SEQ ID NO: 107966 - DNA, 20 bp, synthetic construct
  source 1..20: mol_type = other DNA
aatgaacctttcaaaaataa

SEQ ID NO: 107967 - DNA, 20 bp, synthetic construct
  source 1..20: mol_type = other DNA
aaatgaacctttcaaaaata

SEQ ID NO: 107968 - DNA, 20 bp, synthetic construct
  source 1..20: mol_type = other DNA
aaaatgaacctttcaaaaat

SEQ ID NO: 107969 - DNA, 20 bp, synthetic construct
  source 1..20: mol_type = other DNA
aaaaatgaacctttcaaaaa

SEQ ID NO: 107970 - DNA, 20 bp, synthetic construct
  source 1..20: mol_type = other DNA
aaaaaatgaacctttcaaaa

SEQ ID NO: 107971 - DNA, 20 bp, synthetic construct
  source 1..20: mol_type = other DNA
taaaaaatgaacctttcaaa

SEQ ID NO: 107972 - DNA, 20 bp, synthetic construct
  source 1..20: mol_type = other DNA
ataaaaaatgaacctttcaa

SEQ ID NO: 107973 - DNA, 20 bp, synthetic construct
  source 1..20: mol_type = other DNA
aataaaaaatgaacctttca

SEQ ID NO: 107974 - DNA, 20 bp, synthetic construct
  source 1..20: mol_type = other DNA
gaataaaaaatgaacctttc

SEQ ID NO: 107975 - DNA, 20 bp, synthetic construct
  source 1..20: mol_type = other DNA
agaataaaaaatgaaccttt

SEQ ID NO: 107976 - DNA, 20 bp, synthetic construct
  source 1..20: mol_type = other DNA
aagaataaaaaatgaacctt

SEQ ID NO: 107977 - DNA, 20 bp, synthetic construct
  source 1..20: mol_type = other DNA
gaagaataaaaaatgaacct

SEQ ID NO: 107978 - DNA, 20 bp, synthetic construct
  source 1..20: mol_type = other DNA
ggaagaataaaaaatgaacc

SEQ ID NO: 107979 - DNA, 20 bp, synthetic construct
  source 1..20: mol_type = other DNA
aggaagaataaaaaatgaac

SEQ ID NO: 107980 - DNA, 20 bp, synthetic construct
  source 1..20: mol_type = other DNA
caggaagaataaaaaatgaa

SEQ ID NO: 107981 - DNA, 20 bp, synthetic construct
  source 1..20: mol_type = other DNA
gcaggaagaataaaaaatga

SEQ ID NO: 107982 - DNA, 20 bp, synthetic construct
  source 1..20: mol_type = other DNA
agcaggaagaataaaaaatg

SEQ ID NO: 107983 - DNA, 20 bp, synthetic construct
  source 1..20: mol_type = other DNA
gagcaggaagaataaaaaat

SEQ ID NO: 107984 - DNA, 20 bp, synthetic construct
  source 1..20: mol_type = other DNA
tgagcaggaagaataaaaaa

SEQ ID NO: 107985 - DNA, 20 bp, synthetic construct
  source 1..20: mol_type = other DNA
ttgagcaggaagaataaaaa

SEQ ID NO: 107986 - DNA, 20 bp, synthetic construct
  source 1..20: mol_type = other DNA
tttgagcaggaagaataaaa

SEQ ID NO: 107987 - DNA, 20 bp, synthetic construct
  source 1..20: mol_type = other DNA
ttttgagcaggaagaataaa

SEQ ID NO: 107988 - DNA, 20 bp, synthetic construct
  source 1..20: mol_type = other DNA
attttgagcaggaagaataa

SEQ ID NO: 107989 - DNA, 20 bp, synthetic construct
  source 1..20: mol_type = other DNA
tattttgagcaggaagaata

SEQ ID NO: 107990 - DNA, 20 bp, synthetic construct
  source 1..20: mol_type = other DNA
atattttgagcaggaagaat

SEQ ID NO: 107991 - DNA, 20 bp, synthetic construct
  source 1..20: mol_type = other DNA
catattttgagcaggaagaa

SEQ ID NO: 107992 - DNA, 20 bp, synthetic construct
  source 1..20: mol_type = other DNA
tcatattttgagcaggaaga

SEQ ID NO: 107993 - DNA, 20 bp, synthetic construct
  source 1..20: mol_type = other DNA
ctcatattttgagcaggaag

SEQ ID NO: 107994 - DNA, 20 bp, synthetic construct
  source 1..20: mol_type = other DNA
actcatattttgagcaggaa

SEQ ID NO: 107995 - DNA, 20 bp, synthetic construct
  source 1..20: mol_type = other DNA
tactcatattttgagcagga

SEQ ID NO: 107996 - DNA, 20 bp, synthetic construct
  source 1..20: mol_type = other DNA
ctactcatattttgagcagg

SEQ ID NO: 107997 - DNA, 20 bp, synthetic construct
  source 1..20: mol_type = other DNA
actactcatattttgagcag

SEQ ID NO: 107998 - DNA, 20 bp, synthetic construct
  source 1..20: mol_type = other DNA
tactactcatattttgagca

SEQ ID NO: 107999 - DNA, 20 bp, synthetic construct
  source 1..20: mol_type = other DNA
ctactactcatattttgagc

SEQ ID NO: 108000 - DNA, 20 bp, synthetic construct
  source 1..20: mol_type = other DNA
actactactcatattttgag

SEQ ID NO: 108001 - DNA, 20 bp, synthetic construct
  source 1..20: mol_type = other DNA
aactactactcatattttga

SEQ ID NO: 108002 - DNA, 20 bp, synthetic construct
  source 1..20: mol_type = other DNA
aaactactactcatattttg

SEQ ID NO: 108003 - DNA, 20 bp, synthetic construct
  source 1..20: mol_type = other DNA
taaactactactcatatttt

SEQ ID NO: 108004 - DNA, 20 bp, synthetic construct
  source 1..20: mol_type = other DNA
ataaactactactcatattt

SEQ ID NO: 108005 - DNA, 20 bp, synthetic construct
  source 1..20: mol_type = other DNA
tataaactactactcatatt

SEQ ID NO: 108006 - DNA, 20 bp, synthetic construct
  source 1..20: mol_type = other DNA
gtataaactactactcatat

SEQ ID NO: 108007 - DNA, 20 bp, synthetic construct
  source 1..20: mol_type = other DNA
tgtataaactactactcata

SEQ ID NO: 108008 - DNA, 20 bp, synthetic construct
  source 1..20: mol_type = other DNA
gtgtataaactactactcat

SEQ ID NO: 108009 - DNA, 20 bp, synthetic construct
  source 1..20: mol_type = other DNA
ggtgtataaactactactca

SEQ ID NO: 108010 - DNA, 20 bp, synthetic construct
  source 1..20: mol_type = other DNA
tggtgtataaactactactc

SEQ ID NO: 108011 - DNA, 20 bp, synthetic construct
  source 1..20: mol_type = other DNA
gtggtgtataaactactact

SEQ ID NO: 108012 - DNA, 20 bp, synthetic construct
  source 1..20: mol_type = other DNA
tgtggtgtataaactactac

SEQ ID NO: 108013 - DNA, 20 bp, synthetic construct
  source 1..20: mol_type = other DNA
ttgtggtgtataaactacta

SEQ ID NO: 108014 - DNA, 20 bp, synthetic construct
  source 1..20: mol_type = other DNA
attgtggtgtataaactact

SEQ ID NO: 108015 - DNA, 20 bp, synthetic construct
  source 1..20: mol_type = other DNA
aattgtggtgtataaactac

SEQ ID NO: 108016 - DNA, 20 bp, synthetic construct
  source 1..20: mol_type = other DNA
taattgtggtgtataaacta

SEQ ID NO: 108017 - DNA, 20 bp, synthetic construct
  source 1..20: mol_type = other DNA
gtaattgtggtgtataaact

SEQ ID NO: 108018 - DNA, 20 bp, synthetic construct
  source 1..20: mol_type = other DNA
tgtaattgtggtgtataaac

SEQ ID NO: 108019 - DNA, 20 bp, synthetic construct
  source 1..20: mol_type = other DNA
ctgtaattgtggtgtataaa

SEQ ID NO: 108020 - DNA, 20 bp, synthetic construct
  source 1..20: mol_type = other DNA
actgtaattgtggtgtataa

SEQ ID NO: 108021 - DNA, 20 bp, synthetic construct
  source 1..20: mol_type = other DNA
cactgtaattgtggtgtata

SEQ ID NO: 108022 - DNA, 20 bp, synthetic construct
  source 1..20: mol_type = other DNA
acactgtaattgtggtgtat

SEQ ID NO: 108023 - DNA, 20 bp, synthetic construct
  source 1..20: mol_type = other DNA
aacactgtaattgtggtgta

SEQ ID NO: 108024 - DNA, 20 bp, synthetic construct
  source 1..20: mol_type = other DNA
taacactgtaattgtggtgt

SEQ ID NO: 108025 - DNA, 20 bp, synthetic construct
  source 1..20: mol_type = other DNA
gtaacactgtaattgtggtg

SEQ ID NO: 108026 - DNA, 20 bp, synthetic construct
  source 1..20: mol_type = other DNA
tgtaacactgtaattgtggt

SEQ ID NO: 108027 - DNA, 20 bp, synthetic construct
  source 1..20: mol_type = other DNA
ttgtaacactgtaattgtgg

SEQ ID NO: 108028 - DNA, 20 bp, synthetic construct
  source 1..20: mol_type = other DNA
attgtaacactgtaattgtg

SEQ ID NO: 108029 - DNA, 20 bp, synthetic construct
  source 1..20: mol_type = other DNA
tattgtaacactgtaattgt

SEQ ID NO: 108030 - DNA, 20 bp, synthetic construct
  source 1..20: mol_type = other DNA
atattgtaacactgtaattg

SEQ ID NO: 108031 - DNA, 20 bp, synthetic construct
  source 1..20: mol_type = other DNA
aatattgtaacactgtaatt

SEQ ID NO: 108032 - DNA, 20 bp, synthetic construct
  source 1..20: mol_type = other DNA
gaatattgtaacactgtaat

SEQ ID NO: 108033 - DNA, 20 bp, synthetic construct
  source 1..20: mol_type = other DNA
agaatattgtaacactgtaa

SEQ ID NO: 108034 - DNA, 20 bp, synthetic construct
  source 1..20: mol_type = other DNA
cagaatattgtaacactgta

SEQ ID NO: 108035 - DNA, 20 bp, synthetic construct
  source 1..20: mol_type = other DNA
acagaatattgtaacactgt

SEQ ID NO: 108036 - DNA, 20 bp, synthetic construct
  source 1..20: mol_type = other DNA
tacagaatattgtaacactg

SEQ ID NO: 108037 - DNA, 20 bp, synthetic construct
  source 1..20: mol_type = other DNA
atacagaatattgtaacact

SEQ ID NO: 108038 - DNA, 20 bp, synthetic construct
  source 1..20: mol_type = other DNA
aatacagaatattgtaacac

SEQ ID NO: 108039 - DNA, 20 bp, synthetic construct
  source 1..20: mol_type = other DNA
aaatacagaatattgtaaca

SEQ ID NO: 108040 - DNA, 20 bp, synthetic construct
  source 1..20: mol_type = other DNA
aaaatacagaatattgtaac

SEQ ID NO: 108041 - DNA, 20 bp, synthetic construct
  source 1..20: mol_type = other DNA
aaaaatacagaatattgtaa

SEQ ID NO: 108042 - DNA, 20 bp, synthetic construct
  source 1..20: mol_type = other DNA
gaaaaatacagaatattgta

SEQ ID NO: 108043 - DNA, 20 bp, synthetic construct
  source 1..20: mol_type = other DNA
agaaaaatacagaatattgt

SEQ ID NO: 108044 - DNA, 20 bp, synthetic construct
  source 1..20: mol_type = other DNA
cagaaaaatacagaatattg

SEQ ID NO: 108045 - DNA, 20 bp, synthetic construct
  source 1..20: mol_type = other DNA
acagaaaaatacagaatatt

SEQ ID NO: 108046 - DNA, 20 bp, synthetic construct
  source 1..20: mol_type = other DNA
cacagaaaaatacagaatat

SEQ ID NO: 108047 - DNA, 20 bp, synthetic construct
  source 1..20: mol_type = other DNA
acacagaaaaatacagaata

SEQ ID NO: 108048 - DNA, 20 bp, synthetic construct
  source 1..20: mol_type = other DNA
tacacagaaaaatacagaat

SEQ ID NO: 108049 - DNA, 20 bp, synthetic construct
  source 1..20: mol_type = other DNA
gtacacagaaaaatacagaa

SEQ ID NO: 108050 - DNA, 20 bp, synthetic construct
  source 1..20: mol_type = other DNA
agtacacagaaaaatacaga

SEQ ID NO: 108051 - DNA, 20 bp, synthetic construct
  source 1..20: mol_type = other DNA
aagtacacagaaaaatacag

SEQ ID NO: 108052 - DNA, 20 bp, synthetic construct
  source 1..20: mol_type = other DNA
caagtacacagaaaaataca

SEQ ID NO: 108053 - DNA, 20 bp, synthetic construct
  source 1..20: mol_type = other DNA
acaagtacacagaaaaatac

SEQ ID NO: 108054 - DNA, 20 bp, synthetic construct
  source 1..20: mol_type = other DNA
aacaagtacacagaaaaata

SEQ ID NO: 108055 - DNA, 20 bp, synthetic construct
  source 1..20: mol_type = other DNA
taacaagtacacagaaaaat

SEQ ID NO: 108056 - DNA, 20 bp, synthetic construct
  source 1..20: mol_type = other DNA
gtaacaagtacacagaaaaa

SEQ ID NO: 108057 - DNA, 20 bp, synthetic construct
  source 1..20: mol_type = other DNA
ggtaacaagtacacagaaaa

SEQ ID NO: 108058 - DNA, 20 bp, synthetic construct
  source 1..20: mol_type = other DNA
tggtaacaagtacacagaaa

SEQ ID NO: 108059 - DNA, 20 bp, synthetic construct
  source 1..20: mol_type = other DNA
ctggtaacaagtacacagaa

SEQ ID NO: 108060 - DNA, 20 bp, synthetic construct
  source 1..20: mol_type = other DNA
actggtaacaagtacacaga

SEQ ID NO: 108061 - DNA, 20 bp, synthetic construct
  source 1..20: mol_type = other DNA
cactggtaacaagtacacag

SEQ ID NO: 108062 - DNA, 20 bp, synthetic construct
  source 1..20: mol_type = other DNA
tcactggtaacaagtacaca

SEQ ID NO: 108063 - DNA, 20 bp, synthetic construct
  source 1..20: mol_type = other DNA
ctcactggtaacaagtacac

SEQ ID NO: 108064 - DNA, 20 bp, synthetic construct
  source 1..20: mol_type = other DNA
actcactggtaacaagtaca

SEQ ID NO: 108065 - DNA, 20 bp, synthetic construct
  source 1..20: mol_type = other DNA
aactcactggtaacaagtac

SEQ ID NO: 108066 - DNA, 20 bp, synthetic construct
  source 1..20: mol_type = other DNA
aaactcactggtaacaagta

SEQ ID NO: 108067 - DNA, 20 bp, synthetic construct
  source 1..20: mol_type = other DNA
aaaactcactggtaacaagt

SEQ ID NO: 108068 - DNA, 20 bp, synthetic construct
  source 1..20: mol_type = other DNA
aaaaactcactggtaacaag

SEQ ID NO: 108069 - DNA, 20 bp, synthetic construct
  source 1..20: mol_type = other DNA
caaaaactcactggtaacaa

SEQ ID NO: 108070 - DNA, 20 bp, synthetic construct
  source 1..20: mol_type = other DNA
gcaaaaactcactggtaaca

SEQ ID NO: 108071 - DNA, 20 bp, synthetic construct
  source 1..20: mol_type = other DNA
tgcaaaaactcactggtaac

SEQ ID NO: 108072 - DNA, 20 bp, synthetic construct
  source 1..20: mol_type = other DNA
gtgcaaaaactcactggtaa

SEQ ID NO: 108073 - DNA, 20 bp, synthetic construct
  source 1..20: mol_type = other DNA
ggtgcaaaaactcactggta

SEQ ID NO: 108074 - DNA, 20 bp, synthetic construct
  source 1..20: mol_type = other DNA
aggtgcaaaaactcactggt

SEQ ID NO: 108075 - DNA, 20 bp, synthetic construct
  source 1..20: mol_type = other DNA
aaggtgcaaaaactcactgg

SEQ ID NO: 108076 - DNA, 20 bp, synthetic construct
  source 1..20: mol_type = other DNA
gaaggtgcaaaaactcactg

SEQ ID NO: 108077 - DNA, 20 bp, synthetic construct
  source 1..20: mol_type = other DNA
tgaaggtgcaaaaactcact

SEQ ID NO: 108078 - DNA, 20 bp, synthetic construct
  source 1..20: mol_type = other DNA
ctgaaggtgcaaaaactcac

SEQ ID NO: 108079 - DNA, 20 bp, synthetic construct
  source 1..20: mol_type = other DNA
cctgaaggtgcaaaaactca

SEQ ID NO: 108080 - DNA, 20 bp, synthetic construct
  source 1..20: mol_type = other DNA
acctgaaggtgcaaaaactc

SEQ ID NO: 108081 - DNA, 20 bp, synthetic construct
  source 1..20: mol_type = other DNA
cacctgaaggtgcaaaaact

SEQ ID NO: 108082 - DNA, 20 bp, synthetic construct
  source 1..20: mol_type = other DNA
tcacctgaaggtgcaaaaac

SEQ ID NO: 108083 - DNA, 20 bp, synthetic construct
  source 1..20: mol_type = other DNA
atcacctgaaggtgcaaaaa

SEQ ID NO: 108084 - DNA, 20 bp, synthetic construct
  source 1..20: mol_type = other DNA
aatcacctgaaggtgcaaaa

SEQ ID NO: 108085 - DNA, 20 bp, synthetic construct
  source 1..20: mol_type = other DNA
aaatcacctgaaggtgcaaa

SEQ ID NO: 108086 - DNA, 20 bp, synthetic construct
  source 1..20: mol_type = other DNA
taaatcacctgaaggtgcaa

SEQ ID NO: 108087 - DNA, 20 bp, synthetic construct
  source 1..20: mol_type = other DNA
ataaatcacctgaaggtgca

SEQ ID NO: 108088 - DNA, 20 bp, synthetic construct
  source 1..20: mol_type = other DNA
aataaatcacctgaaggtgc

SEQ ID NO: 108089 - DNA, 20 bp, synthetic construct
  source 1..20: mol_type = other DNA
taataaatcacctgaaggtg

SEQ ID NO: 108090 - DNA, 20 bp, synthetic construct
  source 1..20: mol_type = other DNA
ataataaatcacctgaaggt

SEQ ID NO: 108091 - DNA, 20 bp, synthetic construct
  source 1..20: mol_type = other DNA
aataataaatcacctgaagg

SEQ ID NO: 108092 - DNA, 20 bp, synthetic construct
  source 1..20: mol_type = other DNA
caataataaatcacctgaag

SEQ ID NO: 108093 - DNA, 20 bp, synthetic construct
  source 1..20: mol_type = other DNA
acaataataaatcacctgaa

SEQ ID NO: 108094 - DNA, 20 bp, synthetic construct
  source 1..20: mol_type = other DNA
aacaataataaatcacctga

SEQ ID NO: 108095 - DNA, 20 bp, synthetic construct
  source 1..20: mol_type = other DNA
aaacaataataaatcacctg

SEQ ID NO: 108096 - DNA, 20 bp, synthetic construct
  source 1..20: mol_type = other DNA
caaacaataataaatcacct

SEQ ID NO: 108097 - DNA, 20 bp, synthetic construct
  source 1..20: mol_type = other DNA
acaaacaataataaatcacc

SEQ ID NO: 108098 - DNA, 20 bp, synthetic construct
  source 1..20: mol_type = other DNA
aacaaacaataataaatcac

SEQ ID NO: 108099 - DNA, 20 bp, synthetic construct
  source 1..20: mol_type = other DNA
taacaaacaataataaatca

SEQ ID NO: 108100 - DNA, 20 bp, synthetic construct
  source 1..20: mol_type = other DNA
ttaacaaacaataataaatc

SEQ ID NO: 108101 - DNA, 20 bp, synthetic construct
  source 1..20: mol_type = other DNA
gttaacaaacaataataaat

SEQ ID NO: 108102 - DNA, 20 bp, synthetic construct
  source 1..20: mol_type = other DNA
tgttaacaaacaataataaa

SEQ ID NO: 108103 - DNA, 20 bp, synthetic construct
  source 1..20: mol_type = other DNA
atgttaacaaacaataataa

SEQ ID NO: 108104 - DNA, 20 bp, synthetic construct
  source 1..20: mol_type = other DNA
gatgttaacaaacaataata

SEQ ID NO: 108105 - DNA, 20 bp, synthetic construct
  source 1..20: mol_type = other DNA
ggatgttaacaaacaataat

SEQ ID NO: 108106 - DNA, 20 bp, synthetic construct
  source 1..20: mol_type = other DNA
aggatgttaacaaacaataa

SEQ ID NO: 108107 - DNA, 20 bp, synthetic construct
  source 1..20: mol_type = other DNA
aaggatgttaacaaacaata

SEQ ID NO: 108108 - DNA, 20 bp, synthetic construct
  source 1..20: mol_type = other DNA
aaaggatgttaacaaacaat

SEQ ID NO: 108109 - DNA, 20 bp, synthetic construct
  source 1..20: mol_type = other DNA
aaaaggatgttaacaaacaa

SEQ ID NO: 108110 - DNA, 20 bp, synthetic construct
  source 1..20: mol_type = other DNA
gaaaaggatgttaacaaaca

SEQ ID NO: 108111 - DNA, 20 bp, synthetic construct
  source 1..20: mol_type = other DNA
agaaaaggatgttaacaaac

SEQ ID NO: 108112 - DNA, 20 bp, synthetic construct
  source 1..20: mol_type = other DNA
aagaaaaggatgttaacaaa

SEQ ID NO: 108113 - DNA, 20 bp, synthetic construct
  source 1..20: mol_type = other DNA
caagaaaaggatgttaacaa

SEQ ID NO: 108114 - DNA, 20 bp, synthetic construct
  source 1..20: mol_type = other DNA
gcaagaaaaggatgttaaca

SEQ ID NO: 108115 - DNA, 20 bp, synthetic construct
  source 1..20: mol_type = other DNA
tgcaagaaaaggatgttaac

SEQ ID NO: 108116 - DNA, 20 bp, synthetic construct
  source 1..20: mol_type = other DNA
ctgcaagaaaaggatgttaa

SEQ ID NO: 108117 - DNA, 20 bp, synthetic construct
  source 1..20: mol_type = other DNA
tctgcaagaaaaggatgtta

SEQ ID NO: 108118 - DNA, 20 bp, synthetic construct
  source 1..20: mol_type = other DNA
atctgcaagaaaaggatgtt

SEQ ID NO: 108119 - DNA, 20 bp, synthetic construct
  source 1..20: mol_type = other DNA
aatctgcaagaaaaggatgt

SEQ ID NO: 108120 - DNA, 20 bp, synthetic construct
  source 1..20: mol_type = other DNA
caatctgcaagaaaaggatg

SEQ ID NO: 108121 - DNA, 20 bp, synthetic construct
  source 1..20: mol_type = other DNA
tcaatctgcaagaaaaggat

SEQ ID NO: 108122 - DNA, 20 bp, synthetic construct
  source 1..20: mol_type = other DNA
ttcaatctgcaagaaaagga

SEQ ID NO: 108123 - DNA, 20 bp, synthetic construct
  source 1..20: mol_type = other DNA
cttcaatctgcaagaaaagg

SEQ ID NO: 108124 - DNA, 20 bp, synthetic construct
  source 1..20: mol_type = other DNA
tcttcaatctgcaagaaaag

SEQ ID NO: 108125 - DNA, 20 bp, synthetic construct
  source 1..20: mol_type = other DNA
ttcttcaatctgcaagaaaa

SEQ ID NO: 108126 - DNA, 20 bp, synthetic construct
  source 1..20: mol_type = other DNA
gttcttcaatctgcaagaaa

SEQ ID NO: 108127 - DNA, 20 bp, synthetic construct
  source 1..20: mol_type = other DNA
agttcttcaatctgcaagaa

SEQ ID NO: 108128 - DNA, 20 bp, synthetic construct
  source 1..20: mol_type = other DNA
aagttcttcaatctgcaaga

SEQ ID NO: 108129 - DNA, 20 bp, synthetic construct
  source 1..20: mol_type = other DNA
aaagttcttcaatctgcaag

SEQ ID NO: 108130 - DNA, 20 bp, synthetic construct
  source 1..20: mol_type = other DNA
aaaagttcttcaatctgcaa

SEQ ID NO: 108131 - DNA, 20 bp, synthetic construct
  source 1..20: mol_type = other DNA
aaaaagttcttcaatctgca

SEQ ID NO: 108132 - DNA, 20 bp, synthetic construct
  source 1..20: mol_type = other DNA
aaaaaagttcttcaatctgc

SEQ ID NO: 108133 - DNA, 20 bp, synthetic construct
  source 1..20: mol_type = other DNA
aaaaaaagttcttcaatctg

SEQ ID NO: 108134 - DNA, 20 bp, synthetic construct
  source 1..20: mol_type = other DNA
aaaaaaaagttcttcaatct

SEQ ID NO: 108135 - DNA, 20 bp, synthetic construct
  source 1..20: mol_type = other DNA
aaaaaaaaagttcttcaatc

SEQ ID NO: 108136 - DNA, 20 bp, synthetic construct
  source 1..20: mol_type = other DNA
aaaaaaaaaagttcttcaat

SEQ ID NO: 108137 - DNA, 20 bp, synthetic construct
  source 1..20: mol_type = other DNA
aaaaaaaaaaagttcttcaa

SEQ ID NO: 108138 - DNA, 20 bp, synthetic construct
  source 1..20: mol_type = other DNA
aaaaaaaaaaaagttcttca

SEQ ID NO: 108139 - DNA, 20 bp, synthetic construct
  source 1..20: mol_type = other DNA
aaaaaaaaaaaaagttcttc

SEQ ID NO: 108140 - DNA, 20 bp, synthetic construct
  source 1..20: mol_type = other DNA
aaaaaaaaaaaaaagttctt

SEQ ID NO: 108141 - DNA, 20 bp, synthetic construct
  source 1..20: mol_type = other DNA
aaaaaaaaaaaaaaagttct

SEQ ID NO: 108142 - DNA, 20 bp, synthetic construct
  source 1..20: mol_type = other DNA
aaaaaaaaaaaaaaaagttc

SEQ ID NO: 108143 - DNA, 20 bp, synthetic construct
  source 1..20: mol_type = other DNA
aaaaaaaaaaaaaaaaagtt

SEQ ID NO: 108144 - DNA, 20 bp, synthetic construct
  source 1..20: mol_type = other DNA
aaaaaaaaaaaaaaaaaagt

SEQ ID NO: 108145 - DNA, 20 bp, synthetic construct
  source 1..20: mol_type = other DNA
aaaaaaaaaaaaaaaaaaag

SEQ ID NO: 108146 - DNA, 20 bp, synthetic construct
  source 1..20: mol_type = other DNA
aaaaaaaaaaaaaaaaaaaa

SEQ ID NO: 108147 - DNA, 20 bp, synthetic construct
  source 1..20: mol_type = other DNA
aaaaaaaaaaaaaaaaaaaa

SEQ ID NO: 108148 - DNA, 20 bp, synthetic construct
  source 1..20: mol_type = other DNA
aaaaaaaaaaaaaaaaaaaa

SEQ ID NO: 108149 - DNA, 20 bp, synthetic construct
  source 1..20: mol_type = other DNA
aaaaaaaaaaaaaaaaaaaa

SEQ ID NO: 108150 - DNA, 20 bp, synthetic construct
  source 1..20: mol_type = other DNA
caaaaaaaaaaaaaaaaaaa

SEQ ID NO: 108151 - DNA, 20 bp, synthetic construct
  source 1..20: mol_type = other DNA
tcaaaaaaaaaaaaaaaaaa

SEQ ID NO: 108152 - DNA, 20 bp, synthetic construct
  source 1..20: mol_type = other DNA
ctcaaaaaaaaaaaaaaaaa

SEQ ID NO: 108153 - DNA, 20 bp, synthetic construct
  source 1..20: mol_type = other DNA
tctcaaaaaaaaaaaaaaaa

SEQ ID NO: 108154 - DNA, 20 bp, synthetic construct
  source 1..20: mol_type = other DNA
gtctcaaaaaaaaaaaaaaa

SEQ ID NO: 108155 - DNA, 20 bp, synthetic construct
  source 1..20: mol_type = other DNA
tgtctcaaaaaaaaaaaaaa

SEQ ID NO: 108156 - DNA, 20 bp, synthetic construct
  source 1..20: mol_type = other DNA
ctgtctcaaaaaaaaaaaaa

SEQ ID NO: 108157 - DNA, 20 bp, synthetic construct
  source 1..20: mol_type = other DNA
tctgtctcaaaaaaaaaaaa

SEQ ID NO: 108158 - DNA, 20 bp, synthetic construct
  source 1..20: mol_type = other DNA
ctctgtctcaaaaaaaaaaa

SEQ ID NO: 108159 - DNA, 20 bp, synthetic construct
  source 1..20: mol_type = other DNA
actctgtctcaaaaaaaaaa

SEQ ID NO: 108160 - DNA, 20 bp, synthetic construct
  source 1..20: mol_type = other DNA
gactctgtctcaaaaaaaaa

SEQ ID NO: 108161 - DNA, 20 bp, synthetic construct
  source 1..20: mol_type = other DNA
tgactctgtctcaaaaaaaa

SEQ ID NO: 108162 - DNA, 20 bp, synthetic construct
  source 1..20: mol_type = other DNA
atgactctgtctcaaaaaaa

SEQ ID NO: 108163 - DNA, 20 bp, synthetic construct
  source 1..20: mol_type = other DNA
catgactctgtctcaaaaaa

SEQ ID NO: 108164 - DNA, 20 bp, synthetic construct
  source 1..20: mol_type = other DNA
gcatgactctgtctcaaaaa

SEQ ID NO: 108165 - DNA, 20 bp, synthetic construct
  source 1..20: mol_type = other DNA
agcatgactctgtctcaaaa

SEQ ID NO: 108166 - DNA, 20 bp, synthetic construct
  source 1..20: mol_type = other DNA
gagcatgactctgtctcaaa

SEQ ID NO: 108167 - DNA, 20 bp, synthetic construct
  source 1..20: mol_type = other DNA
agagcatgactctgtctcaa

SEQ ID NO: 108168 - DNA, 20 bp, synthetic construct
  source 1..20: mol_type = other DNA
cagagcatgactctgtctca

SEQ ID NO: 108169 - DNA, 20 bp, synthetic construct
  source 1..20: mol_type = other DNA
acagagcatgactctgtctc

SEQ ID NO: 108170 - DNA, 20 bp, synthetic construct
  source 1..20: mol_type = other DNA
aacagagcatgactctgtct

SEQ ID NO: 108171 - DNA, 20 bp, synthetic construct
  source 1..20: mol_type = other DNA
taacagagcatgactctgtc

SEQ ID NO: 108172 - DNA, 20 bp, synthetic construct
  source 1..20: mol_type = other DNA
gtaacagagcatgactctgt

SEQ ID NO: 108173 - DNA, 20 bp, synthetic construct
  source 1..20: mol_type = other DNA
ggtaacagagcatgactctg

SEQ ID NO: 108174 - DNA, 20 bp, synthetic construct
  source 1..20: mol_type = other DNA
tggtaacagagcatgactct

SEQ ID NO: 108175 - DNA, 20 bp, synthetic construct
  source 1..20: mol_type = other DNA
ctggtaacagagcatgactc

SEQ ID NO: 108176 - DNA, 20 bp, synthetic construct
  source 1..20: mol_type = other DNA
gctggtaacagagcatgact

SEQ ID NO: 108177 - DNA, 20 bp, synthetic construct
  source 1..20: mol_type = other DNA
ggctggtaacagagcatgac

SEQ ID NO: 108178 - DNA, 20 bp, synthetic construct
  source 1..20: mol_type = other DNA
aggctggtaacagagcatga

SEQ ID NO: 108179 - DNA, 20 bp, synthetic construct
  source 1..20: mol_type = other DNA
caggctggtaacagagcatg

SEQ ID NO: 108180 - DNA, 20 bp, synthetic construct
  source 1..20: mol_type = other DNA
ccaggctggtaacagagcat

SEQ ID NO: 108181 - DNA, 20 bp, synthetic construct
  source 1..20: mol_type = other DNA
tccaggctggtaacagagca

SEQ ID NO: 108182 - DNA, 20 bp, synthetic construct
  source 1..20: mol_type = other DNA
ctccaggctggtaacagagc

SEQ ID NO: 108183 - DNA, 20 bp, synthetic construct
  source 1..20: mol_type = other DNA
actccaggctggtaacagag

SEQ ID NO: 108184 - DNA, 20 bp, synthetic construct
  source 1..20: mol_type = other DNA
cactccaggctggtaacaga

SEQ ID NO: 108185 - DNA, 20 bp, synthetic construct
  source 1..20: mol_type = other DNA
gcactccaggctggtaacag

SEQ ID NO: 108186 - DNA, 20 bp, synthetic construct
  source 1..20: mol_type = other DNA
tgcactccaggctggtaaca

SEQ ID NO: 108187 - DNA, 20 bp, synthetic construct
  source 1..20: mol_type = other DNA
ctgcactccaggctggtaac

SEQ ID NO: 108188 - DNA, 20 bp, synthetic construct
  source 1..20: mol_type = other DNA
actgcactccaggctggtaa

SEQ ID NO: 108189 - DNA, 20 bp, synthetic construct
  source 1..20: mol_type = other DNA
cactgcactccaggctggta

SEQ ID NO: 108190 - DNA, 20 bp, synthetic construct
  source 1..20: mol_type = other DNA
ccactgcactccaggctggt

SEQ ID NO: 108191 - DNA, 20 bp, synthetic construct
  source 1..20: mol_type = other DNA
accactgcactccaggctgg

SEQ ID NO: 108192 - DNA, 20 bp, synthetic construct
  source 1..20: mol_type = other DNA
caccactgcactccaggctg

SEQ ID NO: 108193 - DNA, 20 bp, synthetic construct
  source 1..20: mol_type = other DNA
gcaccactgcactccaggct

SEQ ID NO: 108194 - DNA, 20 bp, synthetic construct
  source 1..20: mol_type = other DNA
ggcaccactgcactccaggc

SEQ ID NO: 108195 - DNA, 20 bp, synthetic construct
  source 1..20: mol_type = other DNA
tggcaccactgcactccagg

SEQ ID NO: 108196 - DNA, 20 bp, synthetic construct
  source 1..20: mol_type = other DNA
atggcaccactgcactccag

SEQ ID NO: 108197 - DNA, 20 bp, synthetic construct
  source 1..20: mol_type = other DNA
gatggcaccactgcactcca

SEQ ID NO: 108198 - DNA, 20 bp, synthetic construct
  source 1..20: mol_type = other DNA
agatggcaccactgcactcc

SEQ ID NO: 108199 - DNA, 20 bp, synthetic construct
  source 1..20: mol_type = other DNA
aagatggcaccactgcactc

SEQ ID NO: 108200 - DNA, 20 bp, synthetic construct
  source 1..20: mol_type = other DNA
caagatggcaccactgcact

SEQ ID NO: 108201 - DNA, 20 bp, synthetic construct
  source 1..20: mol_type = other DNA
ccaagatggcaccactgcac

SEQ ID NO: 108202 - DNA, 20 bp, synthetic construct
  source 1..20: mol_type = other DNA
gccaagatggcaccactgca

SEQ ID NO: 108203 - DNA, 20 bp, synthetic construct
  source 1..20: mol_type = other DNA
agccaagatggcaccactgc

SEQ ID NO: 108204 - DNA, 20 bp, synthetic construct
  source 1..20: mol_type = other DNA
gagccaagatggcaccactg

SEQ ID NO: 108205 - DNA, 20 bp, synthetic construct
  source 1..20: mol_type = other DNA
tgagccaagatggcaccact

SEQ ID NO: 108206 - DNA, 20 bp, synthetic construct
  source 1..20: mol_type = other DNA
gtgagccaagatggcaccac

SEQ ID NO: 108207 - DNA, 20 bp, synthetic construct
  source 1..20: mol_type = other DNA
agtgagccaagatggcacca

SEQ ID NO: 108208 - DNA, 20 bp, synthetic construct
  source 1..20: mol_type = other DNA
tagtgagccaagatggcacc

SEQ ID NO: 108209 - DNA, 20 bp, synthetic construct
  source 1..20: mol_type = other DNA
gtagtgagccaagatggcac

SEQ ID NO: 108210 - DNA, 20 bp, synthetic construct
  source 1..20: mol_type = other DNA
tgtagtgagccaagatggca

SEQ ID NO: 108211 - DNA, 20 bp, synthetic construct
  source 1..20: mol_type = other DNA
ttgtagtgagccaagatggc

SEQ ID NO: 108212 - DNA, 20 bp, synthetic construct
  source 1..20: mol_type = other DNA
gttgtagtgagccaagatgg

SEQ ID NO: 108213 - DNA, 20 bp, synthetic construct
  source 1..20: mol_type = other DNA
ggttgtagtgagccaagatg

SEQ ID NO: 108214 - DNA, 20 bp, synthetic construct
  source 1..20: mol_type = other DNA
aggttgtagtgagccaagat

SEQ ID NO: 108215 - DNA, 20 bp, synthetic construct
  source 1..20: mol_type = other DNA
gaggttgtagtgagccaaga

SEQ ID NO: 108216 - DNA, 20 bp, synthetic construct
  source 1..20: mol_type = other DNA
ggaggttgtagtgagccaag

SEQ ID NO: 108217 - DNA, 20 bp, synthetic construct
  source 1..20: mol_type = other DNA
tggaggttgtagtgagccaa

SEQ ID NO: 108218 - DNA, 20 bp, synthetic construct
  source 1..20: mol_type = other DNA
ttggaggttgtagtgagcca

SEQ ID NO: 108219 - DNA, 20 bp, synthetic construct
  source 1..20: mol_type = other DNA
gttggaggttgtagtgagcc

SEQ ID NO: 108220 - DNA, 20 bp, synthetic construct
  source 1..20: mol_type = other DNA
agttggaggttgtagtgagc

SEQ ID NO: 108221 - DNA, 20 bp, synthetic construct
  source 1..20: mol_type = other DNA
gagttggaggttgtagtgag

SEQ ID NO: 108222 - DNA, 20 bp, synthetic construct
  source 1..20: mol_type = other DNA
ggagttggaggttgtagtga

SEQ ID NO: 108223 - DNA, 20 bp, synthetic construct
  source 1..20: mol_type = other DNA
gggagttggaggttgtagtg

SEQ ID NO: 108224 - DNA, 20 bp, synthetic construct
  source 1..20: mol_type = other DNA
tgggagttggaggttgtagt

SEQ ID NO: 108225 - DNA, 20 bp, synthetic construct
  source 1..20: mol_type = other DNA
ctgggagttggaggttgtag

SEQ ID NO: 108226 - DNA, 20 bp, synthetic construct
  source 1..20: mol_type = other DNA
cctgggagttggaggttgta

SEQ ID NO: 108227 - DNA, 20 bp, synthetic construct
  source 1..20: mol_type = other DNA
acctgggagttggaggttgt

SEQ ID NO: 108228 - DNA, 20 bp, synthetic construct
  source 1..20: mol_type = other DNA
aacctgggagttggaggttg

SEQ ID NO: 108229 - DNA, 20 bp, synthetic construct
  source 1..20: mol_type = other DNA
gaacctgggagttggaggtt

SEQ ID NO: 108230 - DNA, 20 bp, synthetic construct
  source 1..20: mol_type = other DNA
tgaacctgggagttggaggt

SEQ ID NO: 108231 - DNA, 20 bp, synthetic construct
  source 1..20: mol_type = other DNA
ttgaacctgggagttggagg

SEQ ID NO: 108232 - DNA, 20 bp, synthetic construct
  source 1..20: mol_type = other DNA
cttgaacctgggagttggag

SEQ ID NO: 108233 - DNA, 20 bp, synthetic construct
  source 1..20: mol_type = other DNA
gcttgaacctgggagttgga

SEQ ID NO: 108234 - DNA, 20 bp, synthetic construct
  source 1..20: mol_type = other DNA
cgcttgaacctgggagttgg

SEQ ID NO: 108235 - DNA, 20 bp, synthetic construct
  source 1..20: mol_type = other DNA
tcgcttgaacctgggagttg

SEQ ID NO: 108236 - DNA, 20 bp, synthetic construct
  source 1..20: mol_type = other DNA
atcgcttgaacctgggagtt

SEQ ID NO: 108237 - DNA, 20 bp, synthetic construct
  source 1..20: mol_type = other DNA
aatcgcttgaacctgggagt

SEQ ID NO: 108238 - DNA, 20 bp, synthetic construct
  source 1..20: mol_type = other DNA
gaatcgcttgaacctgggag

SEQ ID NO: 108239 - DNA, 20 bp, synthetic construct
  source 1..20: mol_type = other DNA
agaatcgcttgaacctggga

SEQ ID NO: 108240 - DNA, 20 bp, synthetic construct
  source 1..20: mol_type = other DNA
aagaatcgcttgaacctggg

SEQ ID NO: 108241 - DNA, 20 bp, synthetic construct
  source 1..20: mol_type = other DNA
gaagaatcgcttgaacctgg

SEQ ID NO: 108242 - DNA, 20 bp, synthetic construct
  source 1..20: mol_type = other DNA
agaagaatcgcttgaacctg

SEQ ID NO: 108243 - DNA, 20 bp, synthetic construct
  source 1..20: mol_type = other DNA
cagaagaatcgcttgaacct

SEQ ID NO: 108244 - DNA, 20 bp, synthetic construct
  source 1..20: mol_type = other DNA
gcagaagaatcgcttgaacc

SEQ ID NO: 108245 - DNA, 20 bp, synthetic construct
  source 1..20: mol_type = other DNA
ggcagaagaatcgcttgaac

SEQ ID NO: 108246 - DNA, 20 bp, synthetic construct
  source 1..20: mol_type = other DNA
aggcagaagaatcgcttgaa

SEQ ID NO: 108247 - DNA, 20 bp, synthetic construct
  source 1..20: mol_type = other DNA
gaggcagaagaatcgcttga

SEQ ID NO: 108248 - DNA, 20 bp, synthetic construct
  source 1..20: mol_type = other DNA
tgaggcagaagaatcgcttg

SEQ ID NO: 108249 - DNA, 20 bp, synthetic construct
  source 1..20: mol_type = other DNA
ctgaggcagaagaatcgctt

SEQ ID NO: 108250 - DNA, 20 bp, synthetic construct
  source 1..20: mol_type = other DNA
gctgaggcagaagaatcgct

SEQ ID NO: 108251 - DNA, 20 bp, synthetic construct
  source 1..20: mol_type = other DNA
ggctgaggcagaagaatcgc

SEQ ID NO: 108252 - DNA, 20 bp, synthetic construct
  source 1..20: mol_type = other DNA
aggctgaggcagaagaatcg

SEQ ID NO: 108253 - DNA, 20 bp, synthetic construct
  source 1..20: mol_type = other DNA
gaggctgaggcagaagaatc

SEQ ID NO: 108254 - DNA, 20 bp, synthetic construct
  source 1..20: mol_type = other DNA
ggaggctgaggcagaagaat

SEQ ID NO: 108255 - DNA, 20 bp, synthetic construct
  source 1..20: mol_type = other DNA
gggaggctgaggcagaagaa

SEQ ID NO: 108256 - DNA, 20 bp, synthetic construct
  source 1..20: mol_type = other DNA
tgggaggctgaggcagaaga

SEQ ID NO: 108257 - DNA, 20 bp, synthetic construct
  source 1..20: mol_type = other DNA
ttgggaggctgaggcagaag

SEQ ID NO: 108258 - DNA, 20 bp, synthetic construct
  source 1..20: mol_type = other DNA
cttgggaggctgaggcagaa

SEQ ID NO: 108259 - DNA, 20 bp, synthetic construct
  source 1..20: mol_type = other DNA
acttgggaggctgaggcaga

SEQ ID NO: 108260 - DNA, 20 bp, synthetic construct
  source 1..20: mol_type = other DNA
tacttgggaggctgaggcag

SEQ ID NO: 108261 - DNA, 20 bp, synthetic construct
  source 1..20: mol_type = other DNA
ctacttgggaggctgaggca

SEQ ID NO: 108262 - DNA, 20 bp, synthetic construct
  source 1..20: mol_type = other DNA
gctacttgggaggctgaggc

SEQ ID NO: 108263 - DNA, 20 bp, synthetic construct
  source 1..20: mol_type = other DNA
agctacttgggaggctgagg

SEQ ID NO: 108264 - DNA, 20 bp, synthetic construct
  source 1..20: mol_type = other DNA
cagctacttgggaggctgag

SEQ ID NO: 108265 - DNA, 20 bp, synthetic construct
  source 1..20: mol_type = other DNA
ccagctacttgggaggctga

SEQ ID NO: 108266 - DNA, 20 bp, synthetic construct
  source 1..20: mol_type = other DNA
cccagctacttgggaggctg

SEQ ID NO: 108267 - DNA, 20 bp, synthetic construct
  source 1..20: mol_type = other DNA
tcccagctacttgggaggct

SEQ ID NO: 108268 - DNA, 20 bp, synthetic construct
  source 1..20: mol_type = other DNA
atcccagctacttgggaggc

SEQ ID NO: 108269 - DNA, 20 bp, synthetic construct
  source 1..20: mol_type = other DNA
aatcccagctacttgggagg

SEQ ID NO: 108270 - DNA, 20 bp, synthetic construct
  source 1..20: mol_type = other DNA
taatcccagctacttgggag

SEQ ID NO: 108271 - DNA, 20 bp, synthetic construct
  source 1..20: mol_type = other DNA
gtaatcccagctacttggga

SEQ ID NO: 108272 - DNA, 20 bp, synthetic construct
  source 1..20: mol_type = other DNA
tgtaatcccagctacttggg

SEQ ID NO: 108273 - DNA, 20 bp, synthetic construct
  source 1..20: mol_type = other DNA
ttgtaatcccagctacttgg

SEQ ID NO: 108274 - DNA, 20 bp, synthetic construct
  source 1..20: mol_type = other DNA
cttgtaatcccagctacttg

SEQ ID NO: 108275 - DNA, 20 bp, synthetic construct
  source 1..20: mol_type = other DNA
gcttgtaatcccagctactt

SEQ ID NO: 108276 - DNA, 20 bp, synthetic construct
  source 1..20: mol_type = other DNA
tgcttgtaatcccagctact

SEQ ID NO: 108277 - DNA, 20 bp, synthetic construct
  source 1..20: mol_type = other DNA
atgcttgtaatcccagctac

SEQ ID NO: 108278 - DNA, 20 bp, synthetic construct
  source 1..20: mol_type = other DNA
catgcttgtaatcccagcta

SEQ ID NO: 108279 - DNA, 20 bp, synthetic construct
  source 1..20: mol_type = other DNA
acatgcttgtaatcccagct

SEQ ID NO: 108280 - DNA, 20 bp, synthetic construct
  source 1..20: mol_type = other DNA
cacatgcttgtaatcccagc

SEQ ID NO: 108281 - DNA, 20 bp, synthetic construct
  source 1..20: mol_type = other DNA
gcacatgcttgtaatcccag

SEQ ID NO: 108282 - DNA, 20 bp, synthetic construct
  source 1..20: mol_type = other DNA
ggcacatgcttgtaatccca

SEQ ID NO: 108283 - DNA, 20 bp, synthetic construct
  source 1..20: mol_type = other DNA
tggcacatgcttgtaatccc

SEQ ID NO: 108284 - DNA, 20 bp, synthetic construct
  source 1..20: mol_type = other DNA
gtggcacatgcttgtaatcc

SEQ ID NO: 108285 - DNA, 20 bp, synthetic construct
  source 1..20: mol_type = other DNA
ggtggcacatgcttgtaatc

SEQ ID NO: 108286 - DNA, 20 bp, synthetic construct
  source 1..20: mol_type = other DNA
tggtggcacatgcttgtaat

SEQ ID NO: 108287 - DNA, 20 bp, synthetic construct
  source 1..20: mol_type = other DNA
gtggtggcacatgcttgtaa

SEQ ID NO: 108288 - DNA, 20 bp, synthetic construct
  source 1..20: mol_type = other DNA
cgtggtggcacatgcttgta

SEQ ID NO: 108289 - DNA, 20 bp, synthetic construct
  source 1..20: mol_type = other DNA
gcgtggtggcacatgcttgt

SEQ ID NO: 108290 - DNA, 20 bp, synthetic construct
  source 1..20: mol_type = other DNA
ggcgtggtggcacatgcttg

SEQ ID NO: 108291 - DNA, 20 bp, synthetic construct
  source 1..20: mol_type = other DNA
gggcgtggtggcacatgctt

SEQ ID NO: 108292 - DNA, 20 bp, synthetic construct
  source 1..20: mol_type = other DNA
tgggcgtggtggcacatgct

SEQ ID NO: 108293 - DNA, 20 bp, synthetic construct
  source 1..20: mol_type = other DNA
ctgggcgtggtggcacatgc

SEQ ID NO: 108294 - DNA, 20 bp, synthetic construct
  source 1..20: mol_type = other DNA
gctgggcgtggtggcacatg

SEQ ID NO: 108295 - DNA, 20 bp, synthetic construct
  source 1..20: mol_type = other DNA
agctgggcgtggtggcacat

SEQ ID NO: 108296 - DNA, 20 bp, synthetic construct
  source 1..20: mol_type = other DNA
tagctgggcgtggtggcaca

SEQ ID NO: 108297 - DNA, 20 bp, synthetic construct
  source 1..20: mol_type = other DNA
gtagctgggcgtggtggcac

SEQ ID NO: 108298 - DNA, 20 bp, synthetic construct
  source 1..20: mol_type = other DNA
agtagctgggcgtggtggca

SEQ ID NO: 108299 - DNA, 20 bp, synthetic construct
  source 1..20: mol_type = other DNA
aagtagctgggcgtggtggc

SEQ ID NO: 108300 - DNA, 20 bp, synthetic construct
  source 1..20: mol_type = other DNA
aaagtagctgggcgtggtgg

SEQ ID NO: 108301 - DNA, 20 bp, synthetic construct
  source 1..20: mol_type = other DNA
aaaagtagctgggcgtggtg

SEQ ID NO: 108302 - DNA, 20 bp, synthetic construct
  source 1..20: mol_type = other DNA
aaaaagtagctgggcgtggt

SEQ ID NO: 108303 - DNA, 20 bp, synthetic construct
  source 1..20: mol_type = other DNA
caaaaagtagctgggcgtgg

SEQ ID NO: 108304 - DNA, 20 bp, synthetic construct
  source 1..20: mol_type = other DNA
acaaaaagtagctgggcgtg

SEQ ID NO: 108305 - DNA, 20 bp, synthetic construct
  source 1..20: mol_type = other DNA
tacaaaaagtagctgggcgt

SEQ ID NO: 108306 - DNA, 20 bp, synthetic construct
  source 1..20: mol_type = other DNA
atacaaaaagtagctgggcg

SEQ ID NO: 108307 - DNA, 20 bp, synthetic construct
  source 1..20: mol_type = other DNA
aatacaaaaagtagctgggc

SEQ ID NO: 108308 - DNA, 20 bp, synthetic construct
  source 1..20: mol_type = other DNA
aaatacaaaaagtagctggg

SEQ ID NO: 108309 - DNA, 20 bp, synthetic construct
  source 1..20: mol_type = other DNA
aaaatacaaaaagtagctgg

SEQ ID NO: 108310 - DNA, 20 bp, synthetic construct
  source 1..20: mol_type = other DNA
aaaaatacaaaaagtagctg

SEQ ID NO: 108311 - DNA, 20 bp, synthetic construct
  source 1..20: mol_type = other DNA
taaaaatacaaaaagtagct

SEQ ID NO: 108312 - DNA, 20 bp, synthetic construct
  source 1..20: mol_type = other DNA
ctaaaaatacaaaaagtagc

SEQ ID NO: 108313 - DNA, 20 bp, synthetic construct
  source 1..20: mol_type = other DNA
actaaaaatacaaaaagtag

SEQ ID NO: 108314 - DNA, 20 bp, synthetic construct
  source 1..20: mol_type = other DNA
tactaaaaatacaaaaagta

SEQ ID NO: 108315 - DNA, 20 bp, synthetic construct
  source 1..20: mol_type = other DNA
ttactaaaaatacaaaaagt

SEQ ID NO: 108316 - DNA, 20 bp, synthetic construct
  source 1..20: mol_type = other DNA
tttactaaaaatacaaaaag

SEQ ID NO: 108317 - DNA, 20 bp, synthetic construct
  source 1..20: mol_type = other DNA
ctttactaaaaatacaaaaa

SEQ ID NO: 108318 - DNA, 20 bp, synthetic construct
  source 1..20: mol_type = other DNA
tctttactaaaaatacaaaa

SEQ ID NO: 108319 - DNA, 20 bp, synthetic construct
  source 1..20: mol_type = other DNA
gtctttactaaaaatacaaa

SEQ ID NO: 108320 - DNA, 20 bp, synthetic construct
  source 1..20: mol_type = other DNA
cgtctttactaaaaatacaa

SEQ ID NO: 108321 - DNA, 20 bp, synthetic construct
  source 1..20: mol_type = other DNA
ccgtctttactaaaaataca

SEQ ID NO: 108322 - DNA, 20 bp, synthetic construct
  source 1..20: mol_type = other DNA
cccgtctttactaaaaatac

SEQ ID NO: 108323 - DNA, 20 bp, synthetic construct
  source 1..20: mol_type = other DNA
ccccgtctttactaaaaata

SEQ ID NO: 108324 - DNA, 20 bp, synthetic construct
  source 1..20: mol_type = other DNA
accccgtctttactaaaaat

SEQ ID NO: 108325 - DNA, 20 bp, synthetic construct
  source 1..20: mol_type = other DNA
aaccccgtctttactaaaaa

SEQ ID NO: 108326 - DNA, 20 bp, synthetic construct
  source 1..20: mol_type = other DNA
aaaccccgtctttactaaaa

SEQ ID NO: 108327 - DNA, 20 bp, synthetic construct
  source 1..20: mol_type = other DNA
aaaaccccgtctttactaaa

SEQ ID NO: 108328 - DNA, 20 bp, synthetic construct
  source 1..20: mol_type = other DNA
caaaaccccgtctttactaa

SEQ ID NO: 108329 - DNA, 20 bp, synthetic construct
  source 1..20: mol_type = other DNA
gcaaaaccccgtctttacta

SEQ ID NO: 108330 - DNA, 20 bp, synthetic construct
  source 1..20: mol_type = other DNA
ggcaaaaccccgtctttact

SEQ ID NO: 108331 - DNA, 20 bp, synthetic construct
  source 1..20: mol_type = other DNA
tggcaaaaccccgtctttac

SEQ ID NO: 108332 - DNA, 20 bp, synthetic construct
  source 1..20: mol_type = other DNA
atggcaaaaccccgtcttta

SEQ ID NO: 108333 - DNA, 20 bp, synthetic construct
  source 1..20: mol_type = other DNA
tatggcaaaaccccgtcttt

SEQ ID NO: 108334 - DNA, 20 bp, synthetic construct
  source 1..20: mol_type = other DNA
atatggcaaaaccccgtctt

SEQ ID NO: 108335 - DNA, 20 bp, synthetic construct
  source 1..20: mol_type = other DNA
aatatggcaaaaccccgtct

SEQ ID NO: 108336 - DNA, 20 bp, synthetic construct
  source 1..20: mol_type = other DNA
aaatatggcaaaaccccgtc

SEQ ID NO: 108337 - DNA, 20 bp, synthetic construct
  source 1..20: mol_type = other DNA
caaatatggcaaaaccccgt

SEQ ID NO: 108338 - DNA, 20 bp, synthetic construct
  source 1..20: mol_type = other DNA
gcaaatatggcaaaaccccg

SEQ ID NO: 108339 - DNA, 20 bp, synthetic construct
  source 1..20: mol_type = other DNA
ggcaaatatggcaaaacccc

SEQ ID NO: 108340 - DNA, 20 bp, synthetic construct
  source 1..20: mol_type = other DNA
tggcaaatatggcaaaaccc

SEQ ID NO: 108341 - DNA, 20 bp, synthetic construct
  source 1..20: mol_type = other DNA
ctggcaaatatggcaaaacc

SEQ ID NO: 108342 - DNA, 20 bp, synthetic construct
  source 1..20: mol_type = other DNA
cctggcaaatatggcaaaac

SEQ ID NO: 108343 - DNA, 20 bp, synthetic construct
  source 1..20: mol_type = other DNA
gcctggcaaatatggcaaaa

SEQ ID NO: 108344 - DNA, 20 bp, synthetic construct
  source 1..20: mol_type = other DNA
agcctggcaaatatggcaaa

SEQ ID NO: 108345 - DNA, 20 bp, synthetic construct
  source 1..20: mol_type = other DNA
cagcctggcaaatatggcaa

SEQ ID NO: 108346 - DNA, 20 bp, synthetic construct
  source 1..20: mol_type = other DNA
ccagcctggcaaatatggca

SEQ ID NO: 108347 - DNA, 20 bp, synthetic construct
  source 1..20: mol_type = other DNA
accagcctggcaaatatggc

SEQ ID NO: 108348 - DNA, 20 bp, synthetic construct
  source 1..20: mol_type = other DNA
gaccagcctggcaaatatgg

SEQ ID NO: 108349 - DNA, 20 bp, synthetic construct
  source 1..20: mol_type = other DNA
agaccagcctggcaaatatg

SEQ ID NO: 108350 - DNA, 20 bp, synthetic construct
  source 1..20: mol_type = other DNA
aagaccagcctggcaaatat

SEQ ID NO: 108351 - DNA, 20 bp, synthetic construct
  source 1..20: mol_type = other DNA
caagaccagcctggcaaata

SEQ ID NO: 108352 - DNA, 20 bp, synthetic construct
  source 1..20: mol_type = other DNA
tcaagaccagcctggcaaat

SEQ ID NO: 108353 - DNA, 20 bp, synthetic construct
  source 1..20: mol_type = other DNA
ctcaagaccagcctggcaaa

SEQ ID NO: 108354 - DNA, 20 bp, synthetic construct
  source 1..20: mol_type = other DNA
gctcaagaccagcctggcaa

SEQ ID NO: 108355 - DNA, 20 bp, synthetic construct
  source 1..20: mol_type = other DNA
agctcaagaccagcctggca

SEQ ID NO: 108356 - DNA, 20 bp, synthetic construct
  source 1..20: mol_type = other DNA
gagctcaagaccagcctggc

SEQ ID NO: 108357 - DNA, 20 bp, synthetic construct
  source 1..20: mol_type = other DNA
ggagctcaagaccagcctgg

SEQ ID NO: 108358 - DNA, 20 bp, synthetic construct
  source 1..20: mol_type = other DNA
aggagctcaagaccagcctg

SEQ ID NO: 108359 - DNA, 20 bp, synthetic construct
  source 1..20: mol_type = other DNA
caggagctcaagaccagcct

SEQ ID NO: 108360 - DNA, 20 bp, synthetic construct
  source 1..20: mol_type = other DNA
tcaggagctcaagaccagcc

SEQ ID NO: 108361 - DNA, 20 bp, synthetic construct
  source 1..20: mol_type = other DNA
gtcaggagctcaagaccagc

SEQ ID NO: 108362 - DNA, 20 bp, synthetic construct
  source 1..20: mol_type = other DNA
ggtcaggagctcaagaccag

SEQ ID NO: 108363 - DNA, 20 bp, synthetic construct
  source 1..20: mol_type = other DNA
aggtcaggagctcaagacca

SEQ ID NO: 108364 - DNA, 20 bp, synthetic construct
  source 1..20: mol_type = other DNA
gaggtcaggagctcaagacc

SEQ ID NO: 108365 - DNA, 20 bp, synthetic construct
  source 1..20: mol_type = other DNA
tgaggtcaggagctcaagac

SEQ ID NO: 108366 - DNA, 20 bp, synthetic construct
  source 1..20: mol_type = other DNA
ctgaggtcaggagctcaaga

SEQ ID NO: 108367 - DNA, 20 bp, synthetic construct
  source 1..20: mol_type = other DNA
cctgaggtcaggagctcaag

SEQ ID NO: 108368 - DNA, 20 bp, synthetic construct
  source 1..20: mol_type = other DNA
ccctgaggtcaggagctcaa

SEQ ID NO: 108369 - DNA, 20 bp, synthetic construct
  source 1..20: mol_type = other DNA
accctgaggtcaggagctca

SEQ ID NO: 108370 - DNA, 20 bp, synthetic construct
  source 1..20: mol_type = other DNA
caccctgaggtcaggagctc

SEQ ID NO: 108371 - DNA, 20 bp, synthetic construct
  source 1..20: mol_type = other DNA
tcaccctgaggtcaggagct

SEQ ID NO: 108372 - DNA, 20 bp, synthetic construct
  source 1..20: mol_type = other DNA
atcaccctgaggtcaggagc

SEQ ID NO: 108373 - DNA, 20 bp, synthetic construct
  source 1..20: mol_type = other DNA
gatcaccctgaggtcaggag

SEQ ID NO: 108374 - DNA, 20 bp, synthetic construct
  source 1..20: mol_type = other DNA
ggatcaccctgaggtcagga

SEQ ID NO: 108375 - DNA, 20 bp, synthetic construct
  source 1..20: mol_type = other DNA
cggatcaccctgaggtcagg

SEQ ID NO: 108376 - DNA, 20 bp, synthetic construct
  source 1..20: mol_type = other DNA
gcggatcaccctgaggtcag

SEQ ID NO: 108377 - DNA, 20 bp, synthetic construct
  source 1..20: mol_type = other DNA
ggcggatcaccctgaggtca

SEQ ID NO: 108378 - DNA, 20 bp, synthetic construct
  source 1..20: mol_type = other DNA
gggcggatcaccctgaggtc

SEQ ID NO: 108379 - DNA, 20 bp, synthetic construct
  source 1..20: mol_type = other DNA
cgggcggatcaccctgaggt

SEQ ID NO: 108380 - DNA, 20 bp, synthetic construct
  source 1..20: mol_type = other DNA
gcgggcggatcaccctgagg

SEQ ID NO: 108381 - DNA, 20 bp, synthetic construct
  source 1..20: mol_type = other DNA
ggcgggcggatcaccctgag

SEQ ID NO: 108382 - DNA, 20 bp, synthetic construct
  source 1..20: mol_type = other DNA
aggcgggcggatcaccctga

SEQ ID NO: 108383 - DNA, 20 bp, synthetic construct
  source 1..20: mol_type = other DNA
aaggcgggcggatcaccctg

SEQ ID NO: 108384 - DNA, 20 bp, synthetic construct
  source 1..20: mol_type = other DNA
caaggcgggcggatcaccct

SEQ ID NO: 108385 - DNA, 20 bp, synthetic construct
  source 1..20: mol_type = other DNA
ccaaggcgggcggatcaccc

SEQ ID NO: 108386 - DNA, 20 bp, synthetic construct
  source 1..20: mol_type = other DNA
gccaaggcgggcggatcacc

SEQ ID NO: 108387 - DNA, 20 bp, synthetic construct
  source 1..20: mol_type = other DNA
tgccaaggcgggcggatcac

SEQ ID NO: 108388 - DNA, 20 bp, synthetic construct
  source 1..20: mol_type = other DNA
atgccaaggcgggcggatca

SEQ ID NO: 108389 - DNA, 20 bp, synthetic construct
  source 1..20: mol_type = other DNA
gatgccaaggcgggcggatc

SEQ ID NO: 108390 - DNA, 20 bp, synthetic construct
  source 1..20: mol_type = other DNA
ggatgccaaggcgggcggat

SEQ ID NO: 108391 - DNA, 20 bp, synthetic construct
  source 1..20: mol_type = other DNA
aggatgccaaggcgggcgga

SEQ ID NO: 108392 - DNA, 20 bp, synthetic construct
  source 1..20: mol_type = other DNA
taggatgccaaggcgggcgg

SEQ ID NO: 108393 - DNA, 20 bp, synthetic construct
  source 1..20: mol_type = other DNA
ttaggatgccaaggcgggcg

SEQ ID NO: 108394 - DNA, 20 bp, synthetic construct
  source 1..20: mol_type = other DNA
tttaggatgccaaggcgggc

SEQ ID NO: 108395 - DNA, 20 bp, synthetic construct
  source 1..20: mol_type = other DNA
ctttaggatgccaaggcggg

SEQ ID NO: 108396 - DNA, 20 bp, synthetic construct
  source 1..20: mol_type = other DNA
actttaggatgccaaggcgg

SEQ ID NO: 108397 - DNA, 20 bp, synthetic construct
  source 1..20: mol_type = other DNA
cactttaggatgccaaggcg

SEQ ID NO: 108398 - DNA, 20 bp, synthetic construct
  source 1..20: mol_type = other DNA
gcactttaggatgccaaggc

SEQ ID NO: 108399 - DNA, 20 bp, synthetic construct
  source 1..20: mol_type = other DNA
agcactttaggatgccaagg

SEQ ID NO: 108400 - DNA, 20 bp, synthetic construct
  source 1..20: mol_type = other DNA
tagcactttaggatgccaag

SEQ ID NO: 108401 - DNA, 20 bp, synthetic construct
  source 1..20: mol_type = other DNA
ctagcactttaggatgccaa

SEQ ID NO: 108402 - DNA, 20 bp, synthetic construct
  source 1..20: mol_type = other DNA
cctagcactttaggatgcca

SEQ ID NO: 108403 - DNA, 20 bp, synthetic construct
  source 1..20: mol_type = other DNA
tcctagcactttaggatgcc

SEQ ID NO: 108404 - DNA, 20 bp, synthetic construct
  source 1..20: mol_type = other DNA
atcctagcactttaggatgc

SEQ ID NO: 108405 - DNA, 20 bp, synthetic construct
  source 1..20: mol_type = other DNA
aatcctagcactttaggatg

SEQ ID NO: 108406 - DNA, 20 bp, synthetic construct
  source 1..20: mol_type = other DNA
taatcctagcactttaggat

SEQ ID NO: 108407 - DNA, 20 bp, synthetic construct
  source 1..20: mol_type = other DNA
ataatcctagcactttagga

SEQ ID NO: 108408 - DNA, 20 bp, synthetic construct
  source 1..20: mol_type = other DNA
tataatcctagcactttagg

SEQ ID NO: 108409 - DNA, 20 bp, synthetic construct
  source 1..20: mol_type = other DNA
ttataatcctagcactttag

SEQ ID NO: 108410 - DNA, 20 bp, synthetic construct
  source 1..20: mol_type = other DNA
cttataatcctagcacttta

SEQ ID NO: 108411 - DNA, 20 bp, synthetic construct
  source 1..20: mol_type = other DNA
gcttataatcctagcacttt

SEQ ID NO: 108412 - DNA, 20 bp, synthetic construct
  source 1..20: mol_type = other DNA
cgcttataatcctagcactt

SEQ ID NO: 108413 - DNA, 20 bp, synthetic construct
  source 1..20: mol_type = other DNA
acgcttataatcctagcact

SEQ ID NO: 108414 - DNA, 20 bp, synthetic construct
  source 1..20: mol_type = other DNA
cacgcttataatcctagcac

SEQ ID NO: 108415 - DNA, 20 bp, synthetic construct
  source 1..20: mol_type = other DNA
tcacgcttataatcctagca

SEQ ID NO: 108416 - DNA, 20 bp, synthetic construct
  source 1..20: mol_type = other DNA
ctcacgcttataatcctagc

SEQ ID NO: 108417 - DNA, 20 bp, synthetic construct
  source 1..20: mol_type = other DNA
actcacgcttataatcctag

SEQ ID NO: 108418 - DNA, 20 bp, synthetic construct
  source 1..20: mol_type = other DNA
gactcacgcttataatccta

SEQ ID NO: 108419 - DNA, 20 bp, synthetic construct
  source 1..20: mol_type = other DNA
tgactcacgcttataatcct

SEQ ID NO: 108420 - DNA, 20 bp, synthetic construct
  source 1..20: mol_type = other DNA
atgactcacgcttataatcc

SEQ ID NO: 108421 - DNA, 20 bp, synthetic construct
  source 1..20: mol_type = other DNA
gatgactcacgcttataatc

SEQ ID NO: 108422 - DNA, 20 bp, synthetic construct
  source 1..20: mol_type = other DNA
cgatgactcacgcttataat

SEQ ID NO: 108423 - DNA, 20 bp, synthetic construct
  source 1..20: mol_type = other DNA
acgatgactcacgcttataa

SEQ ID NO: 108424 - DNA, 20 bp, synthetic construct
  source 1..20: mol_type = other DNA
cacgatgactcacgcttata

SEQ ID NO: 108425 - DNA, 20 bp, synthetic construct
  source 1..20: mol_type = other DNA
gcacgatgactcacgcttat

SEQ ID NO: 108426 - DNA, 20 bp, synthetic construct
  source 1..20: mol_type = other DNA
ggcacgatgactcacgctta

SEQ ID NO: 108427 - DNA, 20 bp, synthetic construct
  source 1..20: mol_type = other DNA
gggcacgatgactcacgctt

SEQ ID NO: 108428 - DNA, 20 bp, synthetic construct
  source 1..20: mol_type = other DNA
tgggcacgatgactcacgct

SEQ ID NO: 108429 - DNA, 20 bp, synthetic construct
  source 1..20: mol_type = other DNA
ttgggcacgatgactcacgc

SEQ ID NO: 108430 - DNA, 20 bp, synthetic construct
  source 1..20: mol_type = other DNA
gttgggcacgatgactcacg

SEQ ID NO: 108431 - DNA, 20 bp, synthetic construct
  source 1..20: mol_type = other DNA
agttgggcacgatgactcac

SEQ ID NO: 108432 - DNA, 20 bp, synthetic construct
  source 1..20: mol_type = other DNA
aagttgggcacgatgactca

SEQ ID NO: 108433 - DNA, 20 bp, synthetic construct
  source 1..20: mol_type = other DNA
caagttgggcacgatgactc

SEQ ID NO: 108434 - DNA, 20 bp, synthetic construct
  source 1..20: mol_type = other DNA
ccaagttgggcacgatgact

SEQ ID NO: 108435 - DNA, 20 bp, synthetic construct
  source 1..20: mol_type = other DNA
accaagttgggcacgatgac

SEQ ID NO: 108436 - DNA, 20 bp, synthetic construct
  source 1..20: mol_type = other DNA
aaccaagttgggcacgatga

SEQ ID NO: 108437 - DNA, 20 bp, synthetic construct
  source 1..20: mol_type = other DNA
caaccaagttgggcacgatg

SEQ ID NO: 108438 - DNA, 20 bp, synthetic construct
  source 1..20: mol_type = other DNA
acaaccaagttgggcacgat

SEQ ID NO: 108439 - DNA, 20 bp, synthetic construct
  source 1..20: mol_type = other DNA
aacaaccaagttgggcacga

SEQ ID NO: 108440 - DNA, 20 bp, synthetic construct
  source 1..20: mol_type = other DNA
aaacaaccaagttgggcacg

SEQ ID NO: 108441 - DNA, 20 bp, synthetic construct
  source 1..20: mol_type = other DNA
taaacaaccaagttgggcac

SEQ ID NO: 108442 - DNA, 20 bp, synthetic construct
  source 1..20: mol_type = other DNA
ataaacaaccaagttgggca

SEQ ID NO: 108443 - DNA, 20 bp, synthetic construct
  source 1..20: mol_type = other DNA
aataaacaaccaagttgggc

SEQ ID NO: 108444 - DNA, 20 bp, synthetic construct
  source 1..20: mol_type = other DNA
aaataaacaaccaagttggg

SEQ ID NO: 108445 - DNA, 20 bp, synthetic construct
  source 1..20: mol_type = other DNA
aaaataaacaaccaagttgg

SEQ ID NO: 108446 - DNA, 20 bp, synthetic construct
  source 1..20: mol_type = other DNA
gaaaataaacaaccaagttg

SEQ ID NO: 108447 - DNA, 20 bp, synthetic construct
  source 1..20: mol_type = other DNA
tgaaaataaacaaccaagtt

SEQ ID NO: 108448 - DNA, 20 bp, synthetic construct
  source 1..20: mol_type = other DNA
ttgaaaataaacaaccaagt

SEQ ID NO: 108449 - DNA, 20 bp, synthetic construct
  source 1..20: mol_type = other DNA
tttgaaaataaacaaccaag

SEQ ID NO: 108450 - DNA, 20 bp, synthetic construct
  source 1..20: mol_type = other DNA
atttgaaaataaacaaccaa

SEQ ID NO: 108451 - DNA, 20 bp, synthetic construct
  source 1..20: mol_type = other DNA
tatttgaaaataaacaacca

SEQ ID NO: 108452 - DNA, 20 bp, synthetic construct
  source 1..20: mol_type = other DNA
ctatttgaaaataaacaacc

SEQ ID NO: 108453 - DNA, 20 bp, synthetic construct
  source 1..20: mol_type = other DNA
gctatttgaaaataaacaac

SEQ ID NO: 108454 - DNA, 20 bp, synthetic construct
  source 1..20: mol_type = other DNA
ggctatttgaaaataaacaa

SEQ ID NO: 108455 - DNA, 20 bp, synthetic construct
  source 1..20: mol_type = other DNA
aggctatttgaaaataaaca

SEQ ID NO: 108456 - DNA, 20 bp, synthetic construct
  source 1..20: mol_type = other DNA
caggctatttgaaaataaac

SEQ ID NO: 108457 - DNA, 20 bp, synthetic construct
  source 1..20: mol_type = other DNA
tcaggctatttgaaaataaa

SEQ ID NO: 108458 - DNA, 20 bp, synthetic construct
  source 1..20: mol_type = other DNA
ttcaggctatttgaaaataa

SEQ ID NO: 108459 - DNA, 20 bp, synthetic construct
  source 1..20: mol_type = other DNA
attcaggctatttgaaaata

SEQ ID NO: 108460 - DNA, 20 bp, synthetic construct
  source 1..20: mol_type = other DNA
aattcaggctatttgaaaat

SEQ ID NO: 108461 - DNA, 20 bp, synthetic construct
  source 1..20: mol_type = other DNA
gaattcaggctatttgaaaa

SEQ ID NO: 108462 - DNA, 20 bp, synthetic construct
  source 1..20: mol_type = other DNA
tgaattcaggctatttgaaa

SEQ ID NO: 108463 - DNA, 20 bp, synthetic construct
  source 1..20: mol_type = other DNA
ttgaattcaggctatttgaa

SEQ ID NO: 108464 - DNA, 20 bp, synthetic construct
  source 1..20: mol_type = other DNA
cttgaattcaggctatttga

SEQ ID NO: 108465 - DNA, 20 bp, synthetic construct
  source 1..20: mol_type = other DNA
gcttgaattcaggctatttg

SEQ ID NO: 108466 - DNA, 20 bp, synthetic construct
  source 1..20: mol_type = other DNA
agcttgaattcaggctattt

SEQ ID NO: 108467 - DNA, 20 bp, synthetic construct
  source 1..20: mol_type = other DNA
gagcttgaattcaggctatt

SEQ ID NO: 108468 - DNA, 20 bp, synthetic construct
  source 1..20: mol_type = other DNA
tgagcttgaattcaggctat

SEQ ID NO: 108469 - DNA, 20 bp, synthetic construct
  source 1..20: mol_type = other DNA
gtgagcttgaattcaggcta

SEQ ID NO: 108470 - DNA, 20 bp, synthetic construct
  source 1..20: mol_type = other DNA
agtgagcttgaattcaggct

SEQ ID NO: 108471 - DNA, 20 bp, synthetic construct
  source 1..20: mol_type = other DNA
tagtgagcttgaattcaggc

SEQ ID NO: 108472 - DNA, 20 bp, synthetic construct
  source 1..20: mol_type = other DNA
ttagtgagcttgaattcagg

SEQ ID NO: 108473 - DNA, 20 bp, synthetic construct
  source 1..20: mol_type = other DNA
attagtgagcttgaattcag

SEQ ID NO: 108474 - DNA, 20 bp, synthetic construct
  source 1..20: mol_type = other DNA
cattagtgagcttgaattca

SEQ ID NO: 108475 - DNA, 20 bp, synthetic construct
  source 1..20: mol_type = other DNA
acattagtgagcttgaattc

SEQ ID NO: 108476 - DNA, 20 bp, synthetic construct
  source 1..20: mol_type = other DNA
aacattagtgagcttgaatt

SEQ ID NO: 108477 - DNA, 20 bp, synthetic construct
  source 1..20: mol_type = other DNA
aaacattagtgagcttgaat

SEQ ID NO: 108478 - DNA, 20 bp, synthetic construct
  source 1..20: mol_type = other DNA
aaaacattagtgagcttgaa

SEQ ID NO: 108479 - DNA, 20 bp, synthetic construct
  source 1..20: mol_type = other DNA
gaaaacattagtgagcttga

SEQ ID NO: 108480 - DNA, 20 bp, synthetic construct
  source 1..20: mol_type = other DNA
agaaaacattagtgagcttg

SEQ ID NO: 108481 - DNA, 20 bp, synthetic construct
  source 1..20: mol_type = other DNA
cagaaaacattagtgagctt

SEQ ID NO: 108482 - DNA, 20 bp, synthetic construct
  source 1..20: mol_type = other DNA
gcagaaaacattagtgagct

SEQ ID NO: 108483 - DNA, 20 bp, synthetic construct
  source 1..20: mol_type = other DNA
agcagaaaacattagtgagc

SEQ ID NO: 108484 - DNA, 20 bp, synthetic construct
  source 1..20: mol_type = other DNA
cagcagaaaacattagtgag

SEQ ID NO: 108485 - DNA, 20 bp, synthetic construct
  source 1..20: mol_type = other DNA
gcagcagaaaacattagtga

SEQ ID NO: 108486 - DNA, 20 bp, synthetic construct
  source 1..20: mol_type = other DNA
agcagcagaaaacattagtg

SEQ ID NO: 108487 - DNA, 20 bp, synthetic construct
  source 1..20: mol_type = other DNA
aagcagcagaaaacattagt

SEQ ID NO: 108488 - DNA, 20 bp, synthetic construct
  source 1..20: mol_type = other DNA
caagcagcagaaaacattag

SEQ ID NO: 108489 - DNA, 20 bp, synthetic construct
  source 1..20: mol_type = other DNA
tcaagcagcagaaaacatta

SEQ ID NO: 108490 - DNA, 20 bp, synthetic construct
  source 1..20: mol_type = other DNA
atcaagcagcagaaaacatt

SEQ ID NO: 108491 - DNA, 20 bp, synthetic construct
  source 1..20: mol_type = other DNA
tatcaagcagcagaaaacat

SEQ ID NO: 108492 - DNA, 20 bp, synthetic construct
  source 1..20: mol_type = other DNA
gtatcaagcagcagaaaaca

SEQ ID NO: 108493 - DNA, 20 bp, synthetic construct
  source 1..20: mol_type = other DNA
tgtatcaagcagcagaaaac

SEQ ID NO: 108494 - DNA, 20 bp, synthetic construct
  source 1..20: mol_type = other DNA
atgtatcaagcagcagaaaa

SEQ ID NO: 108495 - DNA, 20 bp, synthetic construct
  source 1..20: mol_type = other DNA
aatgtatcaagcagcagaaa

SEQ ID NO: 108496 - DNA, 20 bp, synthetic construct
  source 1..20: mol_type = other DNA
aaatgtatcaagcagcagaa

SEQ ID NO: 108497 - DNA, 20 bp, synthetic construct
  source 1..20: mol_type = other DNA
gaaatgtatcaagcagcaga

SEQ ID NO: 108498 - DNA, 20 bp, synthetic construct
  source 1..20: mol_type = other DNA
agaaatgtatcaagcagcag

SEQ ID NO: 108499 - DNA, 20 bp, synthetic construct
  source 1..20: mol_type = other DNA
cagaaatgtatcaagcagca

SEQ ID NO: 108500 - DNA, 20 bp, synthetic construct
  source 1..20: mol_type = other DNA
gcagaaatgtatcaagcagc

SEQ ID NO: 108501 - DNA, 20 bp, synthetic construct
  source 1..20: mol_type = other DNA
agcagaaatgtatcaagcag

SEQ ID NO: 108502 - DNA, 20 bp, synthetic construct
  source 1..20: mol_type = other DNA
tagcagaaatgtatcaagca

SEQ ID NO: 108503 - DNA, 20 bp, synthetic construct
  source 1..20: mol_type = other DNA
atagcagaaatgtatcaagc

SEQ ID NO: 108504 - DNA, 20 bp, synthetic construct
  source 1..20: mol_type = other DNA
aatagcagaaatgtatcaag

SEQ ID NO: 108505 - DNA, 20 bp, synthetic construct
  source 1..20: mol_type = other DNA
caatagcagaaatgtatcaa

SEQ ID NO: 108506 - DNA, 20 bp, synthetic construct
  source 1..20: mol_type = other DNA
tcaatagcagaaatgtatca

SEQ ID NO: 108507 - DNA, 20 bp, synthetic construct
  source 1..20: mol_type = other DNA
ctcaatagcagaaatgtatc

SEQ ID NO: 108508 - DNA, 20 bp, synthetic construct
  source 1..20: mol_type = other DNA
tctcaatagcagaaatgtat

SEQ ID NO: 108509 - DNA, 20 bp, synthetic construct
  source 1..20: mol_type = other DNA
ctctcaatagcagaaatgta

SEQ ID NO: 108510 - DNA, 20 bp, synthetic construct
  source 1..20: mol_type = other DNA
tctctcaatagcagaaatgt

SEQ ID NO: 108511 - DNA, 20 bp, synthetic construct
  source 1..20: mol_type = other DNA
gtctctcaatagcagaaatg

SEQ ID NO: 108512 - DNA, 20 bp, synthetic construct
  source 1..20: mol_type = other DNA
agtctctcaatagcagaaat

SEQ ID NO: 108513 - DNA, 20 bp, synthetic construct
  source 1..20: mol_type = other DNA
cagtctctcaatagcagaaa

SEQ ID NO: 108514 - DNA, 20 bp, synthetic construct
  source 1..20: mol_type = other DNA
tcagtctctcaatagcagaa

SEQ ID NO: 108515 - DNA, 20 bp, synthetic construct
  source 1..20: mol_type = other DNA
atcagtctctcaatagcaga

SEQ ID NO: 108516 - DNA, 20 bp, synthetic construct
  source 1..20: mol_type = other DNA
catcagtctctcaatagcag

SEQ ID NO: 108517 - DNA, 20 bp, synthetic construct
  source 1..20: mol_type = other DNA
gcatcagtctctcaatagca

SEQ ID NO: 108518 - DNA, 20 bp, synthetic construct
  source 1..20: mol_type = other DNA
tgcatcagtctctcaatagc

SEQ ID NO: 108519 - DNA, 20 bp, synthetic construct
  source 1..20: mol_type = other DNA
atgcatcagtctctcaatag

SEQ ID NO: 108520 - DNA, 20 bp, synthetic construct
  source 1..20: mol_type = other DNA
aatgcatcagtctctcaata

SEQ ID NO: 108521 - DNA, 20 bp, synthetic construct
  source 1..20: mol_type = other DNA
aaatgcatcagtctctcaat

SEQ ID NO: 108522 - DNA, 20 bp, synthetic construct
  source 1..20: mol_type = other DNA
aaaatgcatcagtctctcaa

SEQ ID NO: 108523 - DNA, 20 bp, synthetic construct
  source 1..20: mol_type = other DNA
aaaaatgcatcagtctctca

SEQ ID NO: 108524 - DNA, 20 bp, synthetic construct
  source 1..20: mol_type = other DNA
gaaaaatgcatcagtctctc

SEQ ID NO: 108525 - DNA, 20 bp, synthetic construct
  source 1..20: mol_type = other DNA
tgaaaaatgcatcagtctct

SEQ ID NO: 108526 - DNA, 20 bp, synthetic construct
  source 1..20: mol_type = other DNA
ctgaaaaatgcatcagtctc

SEQ ID NO: 108527 - DNA, 20 bp, synthetic construct
  source 1..20: mol_type = other DNA
actgaaaaatgcatcagtct

SEQ ID NO: 108528 - DNA, 20 bp, synthetic construct
  source 1..20: mol_type = other DNA
aactgaaaaatgcatcagtc

SEQ ID NO: 108529 - DNA, 20 bp, synthetic construct
  source 1..20: mol_type = other DNA
aaactgaaaaatgcatcagt

SEQ ID NO: 108530 - DNA, 20 bp, synthetic construct
  source 1..20: mol_type = other DNA
caaactgaaaaatgcatcag

SEQ ID NO: 108531 - DNA, 20 bp, synthetic construct
  source 1..20: mol_type = other DNA
acaaactgaaaaatgcatca

SEQ ID NO: 108532 - DNA, 20 bp, synthetic construct
  source 1..20: mol_type = other DNA
gacaaactgaaaaatgcatc

SEQ ID NO: 108533 - DNA, 20 bp, synthetic construct
  source 1..20: mol_type = other DNA
tgacaaactgaaaaatgcat

SEQ ID NO: 108534 - DNA, 20 bp, synthetic construct
  source 1..20: mol_type = other DNA
ttgacaaactgaaaaatgca

SEQ ID NO: 108535 - DNA, 20 bp, synthetic construct
  source 1..20: mol_type = other DNA
attgacaaactgaaaaatgc

SEQ ID NO: 108536 - DNA, 20 bp, synthetic construct
  source 1..20: mol_type = other DNA
aattgacaaactgaaaaatg

SEQ ID NO: 108537 - DNA, 20 bp, synthetic construct
  source 1..20: mol_type = other DNA
caattgacaaactgaaaaat

SEQ ID NO: 108538 - DNA, 20 bp, synthetic construct
  source 1..20: mol_type = other DNA
tcaattgacaaactgaaaaa

SEQ ID NO: 108539 - DNA, 20 bp, synthetic construct
  source 1..20: mol_type = other DNA
ttcaattgacaaactgaaaa

SEQ ID NO: 108540 - DNA, 20 bp, synthetic construct
  source 1..20: mol_type = other DNA
attcaattgacaaactgaaa

SEQ ID NO: 108541 - DNA, 20 bp, synthetic construct
  source 1..20: mol_type = other DNA
aattcaattgacaaactgaa

SEQ ID NO: 108542 - DNA, 20 bp, synthetic construct
  source 1..20: mol_type = other DNA
aaattcaattgacaaactga

SEQ ID NO: 108543 - DNA, 20 bp, synthetic construct
  source 1..20: mol_type = other DNA
aaaattcaattgacaaactg

SEQ ID NO: 108544 - DNA, 20 bp, synthetic construct
  source 1..20: mol_type = other DNA
aaaaattcaattgacaaact

SEQ ID NO: 108545 - DNA, 20 bp, synthetic construct
  source 1..20: mol_type = other DNA
gaaaaattcaattgacaaac

SEQ ID NO: 108546 - DNA, 20 bp, synthetic construct
  source 1..20: mol_type = other DNA
ggaaaaattcaattgacaaa

SEQ ID NO: 108547 - DNA, 20 bp, synthetic construct
  source 1..20: mol_type = other DNA
tggaaaaattcaattgacaa

SEQ ID NO: 108548 - DNA, 20 bp, synthetic construct
  source 1..20: mol_type = other DNA
gtggaaaaattcaattgaca

SEQ ID NO: 108549 - DNA, 20 bp, synthetic construct
  source 1..20: mol_type = other DNA
agtggaaaaattcaattgac

SEQ ID NO: 108550 - DNA, 20 bp, synthetic construct
  source 1..20: mol_type = other DNA
aagtggaaaaattcaattga

SEQ ID NO: 108551 - DNA, 20 bp, synthetic construct
  source 1..20: mol_type = other DNA
aaagtggaaaaattcaattg

SEQ ID NO: 108552 - DNA, 20 bp, synthetic construct
  source 1..20: mol_type = other DNA
caaagtggaaaaattcaatt

SEQ ID NO: 108553 - DNA, 20 bp, synthetic construct
  source 1..20: mol_type = other DNA
ccaaagtggaaaaattcaat

SEQ ID NO: 108554 - DNA, 20 bp, synthetic construct
  source 1..20: mol_type = other DNA
cccaaagtggaaaaattcaa

SEQ ID NO: 108555 - DNA, 20 bp, synthetic construct
  source 1..20: mol_type = other DNA
tcccaaagtggaaaaattca

SEQ ID NO: 108556 - DNA, 20 bp, synthetic construct
  source 1..20: mol_type = other DNA
atcccaaagtggaaaaattc

SEQ ID NO: 108557 - DNA, 20 bp, synthetic construct
  source 1..20: mol_type = other DNA
aatcccaaagtggaaaaatt

SEQ ID NO: 108558 - DNA, 20 bp, synthetic construct
  source 1..20: mol_type = other DNA
aaatcccaaagtggaaaaat

SEQ ID NO: 108559 - DNA, 20 bp, synthetic construct
  source 1..20: mol_type = other DNA
gaaatcccaaagtggaaaaa

SEQ ID NO: 108560 - DNA, 20 bp, synthetic construct
  source 1..20: mol_type = other DNA
agaaatcccaaagtggaaaa

SEQ ID NO: 108561 - DNA, 20 bp, synthetic construct
  source 1..20: mol_type = other DNA
cagaaatcccaaagtggaaa

SEQ ID NO: 108562 - DNA, 20 bp, synthetic construct
  source 1..20: mol_type = other DNA
gcagaaatcccaaagtggaa

SEQ ID NO: 108563 - DNA, 20 bp, synthetic construct
  source 1..20: mol_type = other DNA
agcagaaatcccaaagtgga

SEQ ID NO: 108564 - DNA, 20 bp, synthetic construct
  source 1..20: mol_type = other DNA
aagcagaaatcccaaagtgg

SEQ ID NO: 108565 - DNA, 20 bp, synthetic construct
  source 1..20: mol_type = other DNA
caagcagaaatcccaaagtg

SEQ ID NO: 108566 - DNA, 20 bp, synthetic construct
  source 1..20: mol_type = other DNA
tcaagcagaaatcccaaagt

SEQ ID NO: 108567 - DNA, 20 bp, synthetic construct
  source 1..20: mol_type = other DNA
atcaagcagaaatcccaaag

SEQ ID NO: 108568 - DNA, 20 bp, synthetic construct
  source 1..20: mol_type = other DNA
aatcaagcagaaatcccaaa

SEQ ID NO: 108569 - DNA, 20 bp, synthetic construct
  source 1..20: mol_type = other DNA
gaatcaagcagaaatcccaa

SEQ ID NO: 108570 - DNA, 20 bp, synthetic construct
  source 1..20: mol_type = other DNA
agaatcaagcagaaatccca

SEQ ID NO: 108571 - DNA, 20 bp, synthetic construct
  source 1..20: mol_type = other DNA
aagaatcaagcagaaatccc

SEQ ID NO: 108572 - DNA, 20 bp, synthetic construct
  source 1..20: mol_type = other DNA
aaagaatcaagcagaaatcc

SEQ ID NO: 108573 - DNA, 20 bp, synthetic construct
  source 1..20: mol_type = other DNA
aaaagaatcaagcagaaatc

SEQ ID NO: 108574 - DNA, 20 bp, synthetic construct
  source 1..20: mol_type = other DNA
aaaaagaatcaagcagaaat

SEQ ID NO: 108575 - DNA, 20 bp, synthetic construct
  source 1..20: mol_type = other DNA
taaaaagaatcaagcagaaa

SEQ ID NO: 108576 - DNA, 20 bp, synthetic construct
  source 1..20: mol_type = other DNA
gtaaaaagaatcaagcagaa

SEQ ID NO: 108577 - DNA, 20 bp, synthetic construct
  source 1..20: mol_type = other DNA
agtaaaaagaatcaagcaga

SEQ ID NO: 108578 - DNA, 20 bp, synthetic construct
  source 1..20: mol_type = other DNA
tagtaaaaagaatcaagcag

SEQ ID NO: 108579 - DNA, 20 bp, synthetic construct
  source 1..20: mol_type = other DNA
ttagtaaaaagaatcaagca

SEQ ID NO: 108580 - DNA, 20 bp, synthetic construct
  source 1..20: mol_type = other DNA
attagtaaaaagaatcaagc

SEQ ID NO: 108581 - DNA, 20 bp, synthetic construct
  source 1..20: mol_type = other DNA
tattagtaaaaagaatcaag

SEQ ID NO: 108582 - DNA, 20 bp, synthetic construct
  source 1..20: mol_type = other DNA
ttattagtaaaaagaatcaa

SEQ ID NO: 108583 - DNA, 20 bp, synthetic construct
  source 1..20: mol_type = other DNA
attattagtaaaaagaatca

SEQ ID NO: 108584 - DNA, 20 bp, synthetic construct
  source 1..20: mol_type = other DNA
aattattagtaaaaagaatc

SEQ ID NO: 108585 - DNA, 20 bp, synthetic construct
  source 1..20: mol_type = other DNA
taattattagtaaaaagaat

SEQ ID NO: 108586 - DNA, 20 bp, synthetic construct
  source 1..20: mol_type = other DNA
ataattattagtaaaaagaa

SEQ ID NO: 108587 - DNA, 20 bp, synthetic construct
  source 1..20: mol_type = other DNA
aataattattagtaaaaaga

SEQ ID NO: 108588 - DNA, 20 bp, synthetic construct
  source 1..20: mol_type = other DNA
caataattattagtaaaaag

SEQ ID NO: 108589 - DNA, 20 bp, synthetic construct
  source 1..20: mol_type = other DNA
gcaataattattagtaaaaa

SEQ ID NO: 108590 - DNA, 20 bp, synthetic construct
  source 1..20: mol_type = other DNA
tgcaataattattagtaaaa

SEQ ID NO: 108591 - DNA, 20 bp, synthetic construct
  source 1..20: mol_type = other DNA
ctgcaataattattagtaaa

SEQ ID NO: 108592 - DNA, 20 bp, synthetic construct
  source 1..20: mol_type = other DNA
actgcaataattattagtaa

SEQ ID NO: 108593 - DNA, 20 bp, synthetic construct
  source 1..20: mol_type = other DNA
gactgcaataattattagta

SEQ ID NO: 108594 - DNA, 20 bp, synthetic construct
  source 1..20: mol_type = other DNA
agactgcaataattattagt

SEQ ID NO: 108595 - DNA, 20 bp, synthetic construct
  source 1..20: mol_type = other DNA
gagactgcaataattattag

SEQ ID NO: 108596 - DNA, 20 bp, synthetic construct
  source 1..20: mol_type = other DNA
agagactgcaataattatta

SEQ ID NO: 108597 - DNA, 20 bp, synthetic construct
  source 1..20: mol_type = other DNA
aagagactgcaataattatt

SEQ ID NO: 108598 - DNA, 20 bp, synthetic construct
  source 1..20: mol_type = other DNA
aaagagactgcaataattat

SEQ ID NO: 108599 - DNA, 20 bp, synthetic construct
  source 1..20: mol_type = other DNA
aaaagagactgcaataatta

SEQ ID NO: 108600 - DNA, 20 bp, synthetic construct
  source 1..20: mol_type = other DNA
aaaaagagactgcaataatt

SEQ ID NO: 108601 - DNA, 20 bp, synthetic construct
  source 1..20: mol_type = other DNA
aaaaaagagactgcaataat

SEQ ID NO: 108602 - DNA, 20 bp, synthetic construct
  source 1..20: mol_type = other DNA
taaaaaagagactgcaataa

SEQ ID NO: 108603 - DNA, 20 bp, synthetic construct
  source 1..20: mol_type = other DNA
ttaaaaaagagactgcaata

SEQ ID NO: 108604 - DNA, 20 bp, synthetic construct
  source 1..20: mol_type = other DNA
tttaaaaaagagactgcaat

SEQ ID NO: 108605 - DNA, 20 bp, synthetic construct
  source 1..20: mol_type = other DNA
atttaaaaaagagactgcaa

SEQ ID NO: 108606 - DNA, 20 bp, synthetic construct
  source 1..20: mol_type = other DNA
aatttaaaaaagagactgca

SEQ ID NO: 108607 - DNA, 20 bp, synthetic construct
  source 1..20: mol_type = other DNA
aaatttaaaaaagagactgc

SEQ ID NO: 108608 - DNA, 20 bp, synthetic construct
  source 1..20: mol_type = other DNA
taaatttaaaaaagagactg

SEQ ID NO: 108609 - DNA, 20 bp, synthetic construct
  source 1..20: mol_type = other DNA
ataaatttaaaaaagagact

SEQ ID NO: 108610 - DNA, 20 bp, synthetic construct
  source 1..20: mol_type = other DNA
tataaatttaaaaaagagac

SEQ ID NO: 108611 - DNA, 20 bp, synthetic construct
  source 1..20: mol_type = other DNA
ctataaatttaaaaaagaga

SEQ ID NO: 108612 - DNA, 20 bp, synthetic construct
  source 1..20: mol_type = other DNA
cctataaatttaaaaaagag

SEQ ID NO: 108613 - DNA, 20 bp, synthetic construct
  source 1..20: mol_type = other DNA
tcctataaatttaaaaaaga

SEQ ID NO: 108614 - DNA, 20 bp, synthetic construct
  source 1..20: mol_type = other DNA
atcctataaatttaaaaaag

SEQ ID NO: 108615 - DNA, 20 bp, synthetic construct
  source 1..20: mol_type = other DNA
aatcctataaatttaaaaaa

SEQ ID NO: 108616 - DNA, 20 bp, synthetic construct
  source 1..20: mol_type = other DNA
gaatcctataaatttaaaaa

SEQ ID NO: 108617 - DNA, 20 bp, synthetic construct
  source 1..20: mol_type = other DNA
agaatcctataaatttaaaa

SEQ ID NO: 108618 - DNA, 20 bp, synthetic construct
  source 1..20: mol_type = other DNA
cagaatcctataaatttaaa

SEQ ID NO: 108619 - DNA, 20 bp, synthetic construct
  source 1..20: mol_type = other DNA
tcagaatcctataaatttaa

SEQ ID NO: 108620 - DNA, 20 bp, synthetic construct
  source 1..20: mol_type = other DNA
ttcagaatcctataaattta

SEQ ID NO: 108621 - DNA, 20 bp, synthetic construct
  source 1..20: mol_type = other DNA
attcagaatcctataaattt

SEQ ID NO: 108622 - DNA, 20 bp, synthetic construct
  source 1..20: mol_type = other DNA
aattcagaatcctataaatt

SEQ ID NO: 108623 - DNA, 20 bp, synthetic construct
  source 1..20: mol_type = other DNA
aaattcagaatcctataaat

SEQ ID NO: 108624 - DNA, 20 bp, synthetic construct
  source 1..20: mol_type = other DNA
caaattcagaatcctataaa

SEQ ID NO: 108625 - DNA, 20 bp, synthetic construct
  source 1..20: mol_type = other DNA
acaaattcagaatcctataa

SEQ ID NO: 108626 - DNA, 20 bp, synthetic construct
  source 1..20: mol_type = other DNA
aacaaattcagaatcctata

SEQ ID NO: 108627 - DNA, 20 bp, synthetic construct
  source 1..20: mol_type = other DNA
gaacaaattcagaatcctat

SEQ ID NO: 108628 - DNA, 20 bp, synthetic construct
  source 1..20: mol_type = other DNA
agaacaaattcagaatccta

SEQ ID NO: 108629 - DNA, 20 bp, synthetic construct
  source 1..20: mol_type = other DNA
gagaacaaattcagaatcct

SEQ ID NO: 108630 - DNA, 20 bp, synthetic construct
  source 1..20: mol_type = other DNA
agagaacaaattcagaatcc

SEQ ID NO: 108631 - DNA, 20 bp, synthetic construct
  source 1..20: mol_type = other DNA
cagagaacaaattcagaatc

SEQ ID NO: 108632 - DNA, 20 bp, synthetic construct
  source 1..20: mol_type = other DNA
acagagaacaaattcagaat

SEQ ID NO: 108633 - DNA, 20 bp, synthetic construct
  source 1..20: mol_type = other DNA
tacagagaacaaattcagaa

SEQ ID NO: 108634 - DNA, 20 bp, synthetic construct
  source 1..20: mol_type = other DNA
atacagagaacaaattcaga

SEQ ID NO: 108635 - DNA, 20 bp, synthetic construct
  source 1..20: mol_type = other DNA
aatacagagaacaaattcag

SEQ ID NO: 108636 - DNA, 20 bp, synthetic construct
  source 1..20: mol_type = other DNA
taatacagagaacaaattca

SEQ ID NO: 108637 - DNA, 20 bp, synthetic construct
  source 1..20: mol_type = other DNA
ataatacagagaacaaattc

SEQ ID NO: 108638 - DNA, 20 bp, synthetic construct
  source 1..20: mol_type = other DNA
gataatacagagaacaaatt

SEQ ID NO: 108639 - DNA, 20 bp, synthetic construct
  source 1..20: mol_type = other DNA
agataatacagagaacaaat

SEQ ID NO: 108640 - DNA, 20 bp, synthetic construct
  source 1..20: mol_type = other DNA
aagataatacagagaacaaa

SEQ ID NO: 108641 - DNA, 20 bp, synthetic construct
  source 1..20: mol_type = other DNA
caagataatacagagaacaa

SEQ ID NO: 108642 - DNA, 20 bp, synthetic construct
  source 1..20: mol_type = other DNA
ccaagataatacagagaaca

SEQ ID NO: 108643 - DNA, 20 bp, synthetic construct
  source 1..20: mol_type = other DNA
tccaagataatacagagaac

SEQ ID NO: 108644 - DNA, 20 bp, synthetic construct
  source 1..20: mol_type = other DNA
atccaagataatacagagaa

SEQ ID NO: 108645 - DNA, 20 bp, synthetic construct
  source 1..20: mol_type = other DNA
aatccaagataatacagaga

SEQ ID NO: 108646 - DNA, 20 bp, synthetic construct
  source 1..20: mol_type = other DNA
aaatccaagataatacagag

SEQ ID NO: 108647 - DNA, 20 bp, synthetic construct
  source 1..20: mol_type = other DNA
gaaatccaagataatacaga

SEQ ID NO: 108648 - DNA, 20 bp, synthetic construct
  source 1..20: mol_type = other DNA
cgaaatccaagataatacag

SEQ ID NO: 108649 - DNA, 20 bp, synthetic construct
  source 1..20: mol_type = other DNA
acgaaatccaagataataca

SEQ ID NO: 108650 - DNA, 20 bp, synthetic construct
  source 1..20: mol_type = other DNA
aacgaaatccaagataatac

SEQ ID NO: 108651 - DNA, 20 bp, synthetic construct
  source 1..20: mol_type = other DNA
caacgaaatccaagataata

SEQ ID NO: 108652 - DNA, 20 bp, synthetic construct
  source 1..20: mol_type = other DNA
tcaacgaaatccaagataat

SEQ ID NO: 108653 - DNA, 20 bp, synthetic construct
  source 1..20: mol_type = other DNA
ttcaacgaaatccaagataa

SEQ ID NO: 108654 - DNA, 20 bp, synthetic construct
  source 1..20: mol_type = other DNA
gttcaacgaaatccaagata

SEQ ID NO: 108655 - DNA, 20 bp, synthetic construct
  source 1..20: mol_type = other DNA
agttcaacgaaatccaagat

SEQ ID NO: 108656 - DNA, 20 bp, synthetic construct
  source 1..20: mol_type = other DNA
aagttcaacgaaatccaaga

SEQ ID NO: 108657 - DNA, 20 bp, synthetic construct
  source 1..20: mol_type = other DNA
aaagttcaacgaaatccaag

SEQ ID NO: 108658 - DNA, 20 bp, synthetic construct
  source 1..20: mol_type = other DNA
gaaagttcaacgaaatccaa

SEQ ID NO: 108659 - DNA, 20 bp, synthetic construct
  source 1..20: mol_type = other DNA
agaaagttcaacgaaatcca

SEQ ID NO: 108660 - DNA, 20 bp, synthetic construct
  source 1..20: mol_type = other DNA
gagaaagttcaacgaaatcc

SEQ ID NO: 108661 - DNA, 20 bp, synthetic construct
  source 1..20: mol_type = other DNA
tgagaaagttcaacgaaatc

SEQ ID NO: 108662 - DNA, 20 bp, synthetic construct
  source 1..20: mol_type = other DNA
ttgagaaagttcaacgaaat

SEQ ID NO: 108663 - DNA, 20 bp, synthetic construct
  source 1..20: mol_type = other DNA
tttgagaaagttcaacgaaa

SEQ ID NO: 108664 - DNA, 20 bp, synthetic construct
  source 1..20: mol_type = other DNA
ctttgagaaagttcaacgaa

SEQ ID NO: 108665 - DNA, 20 bp, synthetic construct
  source 1..20: mol_type = other DNA
gctttgagaaagttcaacga

SEQ ID NO: 108666 - DNA, 20 bp, synthetic construct
  source 1..20: mol_type = other DNA
tgctttgagaaagttcaacg

SEQ ID NO: 108667 - DNA, 20 bp, synthetic construct
  source 1..20: mol_type = other DNA
atgctttgagaaagttcaac

SEQ ID NO: 108668 - DNA, 20 bp, synthetic construct
  source 1..20: mol_type = other DNA
aatgctttgagaaagttcaa

SEQ ID NO: 108669 - DNA, 20 bp, synthetic construct
  source 1..20: mol_type = other DNA
gaatgctttgagaaagttca

SEQ ID NO: 108670 - DNA, 20 bp, synthetic construct
  source 1..20: mol_type = other DNA
tgaatgctttgagaaagttc

SEQ ID NO: 108671 - DNA, 20 bp, synthetic construct
  source 1..20: mol_type = other DNA
ctgaatgctttgagaaagtt

SEQ ID NO: 108672 - DNA, 20 bp, synthetic construct
  source 1..20: mol_type = other DNA
gctgaatgctttgagaaagt

SEQ ID NO: 108673 - DNA, 20 bp, synthetic construct
  source 1..20: mol_type = other DNA
agctgaatgctttgagaaag

SEQ ID NO: 108674 - DNA, 20 bp, synthetic construct
  source 1..20: mol_type = other DNA
aagctgaatgctttgagaaa

SEQ ID NO: 108675 - DNA, 20 bp, synthetic construct
  source 1..20: mol_type = other DNA
caagctgaatgctttgagaa

SEQ ID NO: 108676 - DNA, 20 bp, synthetic construct
  source 1..20: mol_type = other DNA
tcaagctgaatgctttgaga

SEQ ID NO: 108677 - DNA, 20 bp, synthetic construct
  source 1..20: mol_type = other DNA
ttcaagctgaatgctttgag

SEQ ID NO: 108678 - DNA, 20 bp, synthetic construct
  source 1..20: mol_type = other DNA
attcaagctgaatgctttga

SEQ ID NO: 108679 - DNA, 20 bp, synthetic construct
  source 1..20: mol_type = other DNA
aattcaagctgaatgctttg

SEQ ID NO: 108680 - DNA, 20 bp, synthetic construct
  source 1..20: mol_type = other DNA
gaattcaagctgaatgcttt

SEQ ID NO: 108681 - DNA, 20 bp, synthetic construct
  source 1..20: mol_type = other DNA
agaattcaagctgaatgctt

SEQ ID NO: 108682 - DNA, 20 bp, synthetic construct
  source 1..20: mol_type = other DNA
cagaattcaagctgaatgct

SEQ ID NO: 108683 - DNA, 20 bp, synthetic construct
  source 1..20: mol_type = other DNA
acagaattcaagctgaatgc

SEQ ID NO: 108684 - DNA, 20 bp, synthetic construct
  source 1..20: mol_type = other DNA
gacagaattcaagctgaatg

SEQ ID NO: 108685 - DNA, 20 bp, synthetic construct
  source 1..20: mol_type = other DNA
agacagaattcaagctgaat

SEQ ID NO: 108686 - DNA, 20 bp, synthetic construct
  source 1..20: mol_type = other DNA
cagacagaattcaagctgaa

SEQ ID NO: 108687 - DNA, 20 bp, synthetic construct
  source 1..20: mol_type = other DNA
tcagacagaattcaagctga

SEQ ID NO: 108688 - DNA, 20 bp, synthetic construct
  source 1..20: mol_type = other DNA
ttcagacagaattcaagctg

SEQ ID NO: 108689 - DNA, 20 bp, synthetic construct
  source 1..20: mol_type = other DNA
tttcagacagaattcaagct

SEQ ID NO: 108690 - DNA, 20 bp, synthetic construct
  source 1..20: mol_type = other DNA
ctttcagacagaattcaagc

SEQ ID NO: 108691 - DNA, 20 bp, synthetic construct
  source 1..20: mol_type = other DNA
actttcagacagaattcaag

SEQ ID NO: 108692 - DNA, 20 bp, synthetic construct
  source 1..20: mol_type = other DNA
aactttcagacagaattcaa

SEQ ID NO: 108693 - DNA, 20 bp, synthetic construct
  source 1..20: mol_type = other DNA
gaactttcagacagaattca

SEQ ID NO: 108694 - DNA, 20 bp, synthetic construct
  source 1..20: mol_type = other DNA
tgaactttcagacagaattc

SEQ ID NO: 108695 - DNA, 20 bp, synthetic construct
  source 1..20: mol_type = other DNA
gtgaactttcagacagaatt

SEQ ID NO: 108696 - DNA, 20 bp, synthetic construct
  source 1..20: mol_type = other DNA
tgtgaactttcagacagaat

SEQ ID NO: 108697 - DNA, 20 bp, synthetic construct
  source 1..20: mol_type = other DNA
atgtgaactttcagacagaa

SEQ ID NO: 108698 - DNA, 20 bp, synthetic construct
  source 1..20: mol_type = other DNA
tatgtgaactttcagacaga

SEQ ID NO: 108699 - DNA, 20 bp, synthetic construct
  source 1..20: mol_type = other DNA
atatgtgaactttcagacag

SEQ ID NO: 108700 - DNA, 20 bp, synthetic construct
  source 1..20: mol_type = other DNA
gatatgtgaactttcagaca

SEQ ID NO: 108701 - DNA, 20 bp, synthetic construct
  source 1..20: mol_type = other DNA
agatatgtgaactttcagac

SEQ ID NO: 108702 - DNA, 20 bp, synthetic construct
  source 1..20: mol_type = other DNA
gagatatgtgaactttcaga

SEQ ID NO: 108703 - DNA, 20 bp, synthetic construct
  source 1..20: mol_type = other DNA
agagatatgtgaactttcag

SEQ ID NO: 108704 - DNA, 20 bp, synthetic construct
  source 1..20: mol_type = other DNA
aagagatatgtgaactttca

SEQ ID NO: 108705 - DNA, 20 bp, synthetic construct
  source 1..20: mol_type = other DNA
taagagatatgtgaactttc

SEQ ID NO: 108706 - DNA, 20 bp, synthetic construct
  source 1..20: mol_type = other DNA
ataagagatatgtgaacttt

SEQ ID NO: 108707 - DNA, 20 bp, synthetic construct
  source 1..20: mol_type = other DNA
gataagagatatgtgaactt

SEQ ID NO: 108708 - DNA, 20 bp, synthetic construct
  source 1..20: mol_type = other DNA
tgataagagatatgtgaact

SEQ ID NO: 108709 - DNA, 20 bp, synthetic construct
  source 1..20: mol_type = other DNA
gtgataagagatatgtgaac

SEQ ID NO: 108710 - DNA, 20 bp, synthetic construct
  source 1..20: mol_type = other DNA
agtgataagagatatgtgaa

SEQ ID NO: 108711 - DNA, 20 bp, synthetic construct
  source 1..20: mol_type = other DNA
aagtgataagagatatgtga

SEQ ID NO: 108712 - DNA, 20 bp, synthetic construct
  source 1..20: mol_type = other DNA
caagtgataagagatatgtg

SEQ ID NO: 108713 - DNA, 20 bp, synthetic construct
  source 1..20: mol_type = other DNA
ccaagtgataagagatatgt

SEQ ID NO: 108714 - DNA, 20 bp, synthetic construct
  source 1..20: mol_type = other DNA
cccaagtgataagagatatg

SEQ ID NO: 108715 - DNA, 20 bp, synthetic construct
  source 1..20: mol_type = other DNA
tcccaagtgataagagatat

SEQ ID NO: 108716 - DNA, 20 bp, synthetic construct
  source 1..20: mol_type = other DNA
ttcccaagtgataagagata

SEQ ID NO: 108717 - DNA, 20 bp, synthetic construct
  source 1..20: mol_type = other DNA
attcccaagtgataagagat

SEQ ID NO: 108718 - DNA, 20 bp, synthetic construct
  source 1..20: mol_type = other DNA
aattcccaagtgataagaga

SEQ ID NO: 108719 - DNA, 20 bp, synthetic construct
  source 1..20: mol_type = other DNA
caattcccaagtgataagag

SEQ ID NO: 108720 - DNA, 20 bp, synthetic construct
  source 1..20: mol_type = other DNA
ccaattcccaagtgataaga

SEQ ID NO: 108721 - DNA, 20 bp, synthetic construct
  source 1..20: mol_type = other DNA
accaattcccaagtgataag

SEQ ID NO: 108722 - DNA, 20 bp, synthetic construct
  source 1..20: mol_type = other DNA
gaccaattcccaagtgataa

SEQ ID NO: 108723 - DNA, 20 bp, synthetic construct
  source 1..20: mol_type = other DNA
tgaccaattcccaagtgata

SEQ ID NO: 108724 - DNA, 20 bp, synthetic construct
  source 1..20: mol_type = other DNA
gtgaccaattcccaagtgat

SEQ ID NO: 108725 - DNA, 20 bp, synthetic construct
  source 1..20: mol_type = other DNA
agtgaccaattcccaagtga

SEQ ID NO: 108726 - DNA, 20 bp, synthetic construct
  source 1..20: mol_type = other DNA
cagtgaccaattcccaagtg

SEQ ID NO: 108727 - DNA, 20 bp, synthetic construct
  source 1..20: mol_type = other DNA
ccagtgaccaattcccaagt

SEQ ID NO: 108728 - DNA, 20 bp, synthetic construct
  source 1..20: mol_type = other DNA
accagtgaccaattcccaag

SEQ ID NO: 108729 - DNA, 20 bp, synthetic construct
  source 1..20: mol_type = other DNA
caccagtgaccaattcccaa

SEQ ID NO: 108730 - DNA, 20 bp, synthetic construct
  source 1..20: mol_type = other DNA
acaccagtgaccaattccca

SEQ ID NO: 108731 - DNA, 20 bp, synthetic construct
  source 1..20: mol_type = other DNA
gacaccagtgaccaattccc

SEQ ID NO: 108732 - DNA, 20 bp, synthetic construct
  source 1..20: mol_type = other DNA
ggacaccagtgaccaattcc

SEQ ID NO: 108733 - DNA, 20 bp, synthetic construct
  source 1..20: mol_type = other DNA
aggacaccagtgaccaattc

SEQ ID NO: 108734 - DNA, 20 bp, synthetic construct
  source 1..20: mol_type = other DNA
aaggacaccagtgaccaatt

SEQ ID NO: 108735 - DNA, 20 bp, synthetic construct
  source 1..20: mol_type = other DNA
aaaggacaccagtgaccaat

SEQ ID NO: 108736 - DNA, 20 bp, synthetic construct
  source 1..20: mol_type = other DNA
taaaggacaccagtgaccaa

SEQ ID NO: 108737 - DNA, 20 bp, synthetic construct
  source 1..20: mol_type = other DNA
ataaaggacaccagtgacca

SEQ ID NO: 108738 - DNA, 20 bp, synthetic construct
  source 1..20: mol_type = other DNA
aataaaggacaccagtgacc

SEQ ID NO: 108739 - DNA, 20 bp, synthetic construct
  source 1..20: mol_type = other DNA
aaataaaggacaccagtgac

SEQ ID NO: 108740 - DNA, 20 bp, synthetic construct
  source 1..20: mol_type = other DNA
aaaataaaggacaccagtga

SEQ ID NO: 108741 - DNA, 20 bp, synthetic construct
  source 1..20: mol_type = other DNA
aaaaataaaggacaccagtg

SEQ ID NO: 108742 - DNA, 20 bp, synthetic construct
  source 1..20: mol_type = other DNA
taaaaataaaggacaccagt

SEQ ID NO: 108743 - DNA, 20 bp, synthetic construct
  source 1..20: mol_type = other DNA
ctaaaaataaaggacaccag

SEQ ID NO: 108744 - DNA, 20 bp, synthetic construct
  source 1..20: mol_type = other DNA
actaaaaataaaggacacca

SEQ ID NO: 108745 - DNA, 20 bp, synthetic construct
  source 1..20: mol_type = other DNA
aactaaaaataaaggacacc

SEQ ID NO: 108746 - DNA, 20 bp, synthetic construct
  source 1..20: mol_type = other DNA
gaactaaaaataaaggacac

SEQ ID NO: 108747 - DNA, 20 bp, synthetic construct
  source 1..20: mol_type = other DNA
tgaactaaaaataaaggaca

SEQ ID NO: 108748 - DNA, 20 bp, synthetic construct
  source 1..20: mol_type = other DNA
atgaactaaaaataaaggac

SEQ ID NO: 108749 - DNA, 20 bp, synthetic construct
  source 1..20: mol_type = other DNA
aatgaactaaaaataaagga

SEQ ID NO: 108750 - DNA, 20 bp, synthetic construct
  source 1..20: mol_type = other DNA
aaatgaactaaaaataaagg

SEQ ID NO: 108751 - DNA, 20 bp, synthetic construct
  source 1..20: mol_type = other DNA
caaatgaactaaaaataaag

SEQ ID NO: 108752 - DNA, 20 bp, synthetic construct
  source 1..20: mol_type = other DNA
ccaaatgaactaaaaataaa

SEQ ID NO: 108753 - DNA, 20 bp, synthetic construct
  source 1..20: mol_type = other DNA
accaaatgaactaaaaataa

SEQ ID NO: 108754 - DNA, 20 bp, synthetic construct
  source 1..20: mol_type = other DNA
caccaaatgaactaaaaata

SEQ ID NO: 108755 - DNA, 20 bp, synthetic construct
  source 1..20: mol_type = other DNA
tcaccaaatgaactaaaaat

SEQ ID NO: 108756 - DNA, 20 bp, synthetic construct
  source 1..20: mol_type = other DNA
ctcaccaaatgaactaaaaa

SEQ ID NO: 108757 - DNA, 20 bp, synthetic construct
  source 1..20: mol_type = other DNA
cctcaccaaatgaactaaaa

SEQ ID NO: 108758 - DNA, 20 bp, synthetic construct
  source 1..20: mol_type = other DNA
acctcaccaaatgaactaaa

SEQ ID NO: 108759 - DNA, 20 bp, synthetic construct
  source 1..20: mol_type = other DNA
gacctcaccaaatgaactaa

SEQ ID NO: 108760 - DNA, 20 bp, synthetic construct
  source 1..20: mol_type = other DNA
tgacctcaccaaatgaacta

SEQ ID NO: 108761 - DNA, 20 bp, synthetic construct
  source 1..20: mol_type = other DNA
atgacctcaccaaatgaact

SEQ ID NO: 108762 - DNA, 20 bp, synthetic construct
  source 1..20: mol_type = other DNA
catgacctcaccaaatgaac

SEQ ID NO: 108763 - DNA, 20 bp, synthetic construct
  source 1..20: mol_type = other DNA
acatgacctcaccaaatgaa

SEQ ID NO: 108764 - DNA, 20 bp, synthetic construct
  source 1..20: mol_type = other DNA
aacatgacctcaccaaatga

SEQ ID NO: 108765 - DNA, 20 bp, synthetic construct
  source 1..20: mol_type = other DNA
aaacatgacctcaccaaatg

SEQ ID NO: 108766 - DNA, 20 bp, synthetic construct
  source 1..20: mol_type = other DNA
aaaacatgacctcaccaaat

SEQ ID NO: 108767 - DNA, 20 bp, synthetic construct
  source 1..20: mol_type = other DNA
gaaaacatgacctcaccaaa

SEQ ID NO: 108768 - DNA, 20 bp, synthetic construct
  source 1..20: mol_type = other DNA
agaaaacatgacctcaccaa

SEQ ID NO: 108769 - DNA, 20 bp, synthetic construct
  source 1..20: mol_type = other DNA
gagaaaacatgacctcacca

SEQ ID NO: 108770 - DNA, 20 bp, synthetic construct
  source 1..20: mol_type = other DNA
tgagaaaacatgacctcacc

SEQ ID NO: 108771 - DNA, 20 bp, synthetic construct
  source 1..20: mol_type = other DNA
ctgagaaaacatgacctcac

SEQ ID NO: 108772 - DNA, 20 bp, synthetic construct
  source 1..20: mol_type = other DNA
tctgagaaaacatgacctca

SEQ ID NO: 108773 - DNA, 20 bp, synthetic construct
  source 1..20: mol_type = other DNA
atctgagaaaacatgacctc

SEQ ID NO: 108774 - DNA, 20 bp, synthetic construct
  source 1..20: mol_type = other DNA
catctgagaaaacatgacct

SEQ ID NO: 108775 - DNA, 20 bp, synthetic construct
  source 1..20: mol_type = other DNA
ccatctgagaaaacatgacc

SEQ ID NO: 108776 - DNA, 20 bp, synthetic construct
  source 1..20: mol_type = other DNA
gccatctgagaaaacatgac

SEQ ID NO: 108777 - DNA, 20 bp, synthetic construct
  source 1..20: mol_type = other DNA
ggccatctgagaaaacatga

SEQ ID NO: 108778 - DNA, 20 bp, synthetic construct
  source 1..20: mol_type = other DNA
aggccatctgagaaaacatg

SEQ ID NO: 108779 - DNA, 20 bp, synthetic construct
  source 1..20: mol_type = other DNA
aaggccatctgagaaaacat

SEQ ID NO: 108780 - DNA, 20 bp, synthetic construct
  source 1..20: mol_type = other DNA
caaggccatctgagaaaaca

SEQ ID NO: 108781 - DNA, 20 bp, synthetic construct
  source 1..20: mol_type = other DNA
tcaaggccatctgagaaaac

SEQ ID NO: 108782 - DNA, 20 bp, synthetic construct
  source 1..20: mol_type = other DNA
atcaaggccatctgagaaaa

SEQ ID NO: 108783 - DNA, 20 bp, synthetic construct
  source 1..20: mol_type = other DNA
catcaaggccatctgagaaa

SEQ ID NO: 108784 - DNA, 20 bp, synthetic construct
  source 1..20: mol_type = other DNA
gcatcaaggccatctgagaa

SEQ ID NO: 108785 - DNA, 20 bp, synthetic construct
  source 1..20: mol_type = other DNA
agcatcaaggccatctgaga

SEQ ID NO: 108786 - DNA, 20 bp, synthetic construct
  source 1..20: mol_type = other DNA
aagcatcaaggccatctgag

SEQ ID NO: 108787 - DNA, 20 bp, synthetic construct
  source 1..20: mol_type = other DNA
caagcatcaaggccatctga

SEQ ID NO: 108788 - DNA, 20 bp, synthetic construct
  source 1..20: mol_type = other DNA
acaagcatcaaggccatctg

SEQ ID NO: 108789 - DNA, 20 bp, synthetic construct
  source 1..20: mol_type = other DNA
cacaagcatcaaggccatct

SEQ ID NO: 108790 - DNA, 20 bp, synthetic construct
  source 1..20: mol_type = other DNA
ccacaagcatcaaggccatc

SEQ ID NO: 108791 - DNA, 20 bp, synthetic construct
  source 1..20: mol_type = other DNA
tccacaagcatcaaggccat

SEQ ID NO: 108792 - DNA, 20 bp, synthetic construct
  source 1..20: mol_type = other DNA
atccacaagcatcaaggcca

SEQ ID NO: 108793 - DNA, 20 bp, synthetic construct
  source 1..20: mol_type = other DNA
catccacaagcatcaaggcc

SEQ ID NO: 108794 - DNA, 20 bp, synthetic construct
  source 1..20: mol_type = other DNA
acatccacaagcatcaaggc

SEQ ID NO: 108795 - DNA, 20 bp, synthetic construct
  source 1..20: mol_type = other DNA
aacatccacaagcatcaagg

SEQ ID NO: 108796 - DNA, 20 bp, synthetic construct
  source 1..20: mol_type = other DNA
gaacatccacaagcatcaag

SEQ ID NO: 108797 - DNA, 20 bp, synthetic construct
  source 1..20: mol_type = other DNA
tgaacatccacaagcatcaa

SEQ ID NO: 108798 - DNA, 20 bp, synthetic construct
  source 1..20: mol_type = other DNA
atgaacatccacaagcatca

SEQ ID NO: 108799 - DNA, 20 bp, synthetic construct
  source 1..20: mol_type = other DNA
gatgaacatccacaagcatc

SEQ ID NO: 108800 - DNA, 20 bp, synthetic construct
  source 1..20: mol_type = other DNA
tgatgaacatccacaagcat

SEQ ID NO: 108801 - DNA, 20 bp, synthetic construct
  source 1..20: mol_type = other DNA
ctgatgaacatccacaagca

SEQ ID NO: 108802 - DNA, 20 bp, synthetic construct
  source 1..20: mol_type = other DNA
actgatgaacatccacaagc

SEQ ID NO: 108803 - DNA, 20 bp, synthetic construct
  source 1..20: mol_type = other DNA
cactgatgaacatccacaag

SEQ ID NO: 108804 - DNA, 20 bp, synthetic construct
  source 1..20: mol_type = other DNA
acactgatgaacatccacaa

SEQ ID NO: 108805 - DNA, 20 bp, synthetic construct
  source 1..20: mol_type = other DNA
gacactgatgaacatccaca

SEQ ID NO: 108806 - DNA, 20 bp, synthetic construct
  source 1..20: mol_type = other DNA
agacactgatgaacatccac

SEQ ID NO: 108807 - DNA, 20 bp, synthetic construct
  source 1..20: mol_type = other DNA
cagacactgatgaacatcca

SEQ ID NO: 108808 - DNA, 20 bp, synthetic construct
  source 1..20: mol_type = other DNA
ccagacactgatgaacatcc

SEQ ID NO: 108809 - DNA, 20 bp, synthetic construct
  source 1..20: mol_type = other DNA
cccagacactgatgaacatc

SEQ ID NO: 108810 - DNA, 20 bp, synthetic construct
  source 1..20: mol_type = other DNA
gcccagacactgatgaacat

SEQ ID NO: 108811 - DNA, 20 bp, synthetic construct
  source 1..20: mol_type = other DNA
tgcccagacactgatgaaca

SEQ ID NO: 108812 - DNA, 20 bp, synthetic construct
  source 1..20: mol_type = other DNA
atgcccagacactgatgaac

SEQ ID NO: 108813 - DNA, 20 bp, synthetic construct
  source 1..20: mol_type = other DNA
aatgcccagacactgatgaa

SEQ ID NO: 108814 - DNA, 20 bp, synthetic construct
  source 1..20: mol_type = other DNA
caatgcccagacactgatga

SEQ ID NO: 108815 - DNA, 20 bp, synthetic construct
  source 1..20: mol_type = other DNA
tcaatgcccagacactgatg

SEQ ID NO: 108816 - DNA, 20 bp, synthetic construct
  source 1..20: mol_type = other DNA
ttcaatgcccagacactgat

SEQ ID NO: 108817 - DNA, 20 bp, synthetic construct
  source 1..20: mol_type = other DNA
cttcaatgcccagacactga

SEQ ID NO: 108818 - DNA, 20 bp, synthetic construct
  source 1..20: mol_type = other DNA
tcttcaatgcccagacactg

SEQ ID NO: 108819 - DNA, 20 bp, synthetic construct
  source 1..20: mol_type = other DNA
ctcttcaatgcccagacact

SEQ ID NO: 108820 - DNA, 20 bp, synthetic construct
  source 1..20: mol_type = other DNA
actcttcaatgcccagacac

SEQ ID NO: 108821 - DNA, 20 bp, synthetic construct
  source 1..20: mol_type = other DNA
aactcttcaatgcccagaca

SEQ ID NO: 108822 - DNA, 20 bp, synthetic construct
  source 1..20: mol_type = other DNA
caactcttcaatgcccagac

SEQ ID NO: 108823 - DNA, 20 bp, synthetic construct
  source 1..20: mol_type = other DNA
ccaactcttcaatgcccaga

SEQ ID NO: 108824 - DNA, 20 bp, synthetic construct
  source 1..20: mol_type = other DNA
cccaactcttcaatgcccag

SEQ ID NO: 108825 - DNA, 20 bp, synthetic construct
  source 1..20: mol_type = other DNA
acccaactcttcaatgccca

SEQ ID NO: 108826 - DNA, 20 bp, synthetic construct
  source 1..20: mol_type = other DNA
tacccaactcttcaatgccc

SEQ ID NO: 108827 - DNA, 20 bp, synthetic construct
  source 1..20: mol_type = other DNA
atacccaactcttcaatgcc

SEQ ID NO: 108828 - DNA, 20 bp, synthetic construct
  source 1..20: mol_type = other DNA
aatacccaactcttcaatgc

SEQ ID NO: 108829 - DNA, 20 bp, synthetic construct
  source 1..20: mol_type = other DNA
gaatacccaactcttcaatg

SEQ ID NO: 108830 - DNA, 20 bp, synthetic construct
  source 1..20: mol_type = other DNA
agaatacccaactcttcaat

SEQ ID NO: 108831 - DNA, 20 bp, synthetic construct
  source 1..20: mol_type = other DNA
cagaatacccaactcttcaa

SEQ ID NO: 108832 - DNA, 20 bp, synthetic construct
  source 1..20: mol_type = other DNA
acagaatacccaactcttca

SEQ ID NO: 108833 - DNA, 20 bp, synthetic construct
  source 1..20: mol_type = other DNA
aacagaatacccaactcttc

SEQ ID NO: 108834 - DNA, 20 bp, synthetic construct
  source 1..20: mol_type = other DNA
gaacagaatacccaactctt

SEQ ID NO: 108835 - DNA, 20 bp, synthetic construct
  source 1..20: mol_type = other DNA
agaacagaatacccaactct

SEQ ID NO: 108836 - DNA, 20 bp, synthetic construct
  source 1..20: mol_type = other DNA
aagaacagaatacccaactc

SEQ ID NO: 108837 - DNA, 20 bp, synthetic construct
  source 1..20: mol_type = other DNA
aaagaacagaatacccaact

SEQ ID NO: 108838 - DNA, 20 bp, synthetic construct
  source 1..20: mol_type = other DNA
caaagaacagaatacccaac

SEQ ID NO: 108839 - DNA, 20 bp, synthetic construct
  source 1..20: mol_type = other DNA
acaaagaacagaatacccaa

SEQ ID NO: 108840 - DNA, 20 bp, synthetic construct
  source 1..20: mol_type = other DNA
tacaaagaacagaataccca

SEQ ID NO: 108841 - DNA, 20 bp, synthetic construct
  source 1..20: mol_type = other DNA
ctacaaagaacagaataccc

SEQ ID NO: 108842 - DNA, 20 bp, synthetic construct
  source 1..20: mol_type = other DNA
actacaaagaacagaatacc

SEQ ID NO: 108843 - DNA, 20 bp, synthetic construct
  source 1..20: mol_type = other DNA
gactacaaagaacagaatac

SEQ ID NO: 108844 - DNA, 20 bp, synthetic construct
  source 1..20: mol_type = other DNA
agactacaaagaacagaata

SEQ ID NO: 108845 - DNA, 20 bp, synthetic construct
  source 1..20: mol_type = other DNA
cagactacaaagaacagaat

SEQ ID NO: 108846 - DNA, 20 bp, synthetic construct
  source 1..20: mol_type = other DNA
ccagactacaaagaacagaa

SEQ ID NO: 108847 - DNA, 20 bp, synthetic construct
  source 1..20: mol_type = other DNA
accagactacaaagaacaga

SEQ ID NO: 108848 - DNA, 20 bp, synthetic construct
  source 1..20: mol_type = other DNA
aaccagactacaaagaacag

SEQ ID NO: 108849 - DNA, 20 bp, synthetic construct
  source 1..20: mol_type = other DNA
aaaccagactacaaagaaca

SEQ ID NO: 108850 - DNA, 20 bp, synthetic construct
  source 1..20: mol_type = other DNA
aaaaccagactacaaagaac

SEQ ID NO: 108851 - DNA, 20 bp, synthetic construct
  source 1..20: mol_type = other DNA
caaaaccagactacaaagaa

SEQ ID NO: 108852 - DNA, 20 bp, synthetic construct
  source 1..20: mol_type = other DNA
acaaaaccagactacaaaga

SEQ ID NO: 108853 - DNA, 20 bp, synthetic construct
  source 1..20: mol_type = other DNA
aacaaaaccagactacaaag

SEQ ID NO: 108854 - DNA, 20 bp, synthetic construct
  source 1..20: mol_type = other DNA
aaacaaaaccagactacaaa

SEQ ID NO: 108855 - DNA, 20 bp, synthetic construct
  source 1..20: mol_type = other DNA
caaacaaaaccagactacaa

SEQ ID NO: 108856 - DNA, 20 bp, synthetic construct
  source 1..20: mol_type = other DNA
acaaacaaaaccagactaca

SEQ ID NO: 108857 - DNA, 20 bp, synthetic construct
  source 1..20: mol_type = other DNA
tacaaacaaaaccagactac

SEQ ID NO: 108858 - DNA, 20 bp, synthetic construct
  source 1..20: mol_type = other DNA
gtacaaacaaaaccagacta

SEQ ID NO: 108859 - DNA, 20 bp, synthetic construct
  source 1..20: mol_type = other DNA
cgtacaaacaaaaccagact

SEQ ID NO: 108860 - DNA, 20 bp, synthetic construct
  source 1..20: mol_type = other DNA
gcgtacaaacaaaaccagac

SEQ ID NO: 108861 - DNA, 20 bp, synthetic construct
  source 1..20: mol_type = other DNA
tgcgtacaaacaaaaccaga

SEQ ID NO: 108862 - DNA, 20 bp, synthetic construct
  source 1..20: mol_type = other DNA
atgcgtacaaacaaaaccag

SEQ ID NO: 108863 - DNA, 20 bp, synthetic construct
  source 1..20: mol_type = other DNA
aatgcgtacaaacaaaacca

SEQ ID NO: 108864 - DNA, 20 bp, synthetic construct
  source 1..20: mol_type = other DNA
gaatgcgtacaaacaaaacc

SEQ ID NO: 108865 - DNA, 20 bp, synthetic construct
  source 1..20: mol_type = other DNA
agaatgcgtacaaacaaaac

SEQ ID NO: 108866 - DNA, 20 bp, synthetic construct
  source 1..20: mol_type = other DNA
aagaatgcgtacaaacaaaa

SEQ ID NO: 108867 - DNA, 20 bp, synthetic construct
  source 1..20: mol_type = other DNA
aaagaatgcgtacaaacaaa

SEQ ID NO: 108868 - DNA, 20 bp, synthetic construct
  source 1..20: mol_type = other DNA
aaaagaatgcgtacaaacaa

SEQ ID NO: 108869 - DNA, 20 bp, synthetic construct
  source 1..20: mol_type = other DNA
aaaaagaatgcgtacaaaca

SEQ ID NO: 108870 - DNA, 20 bp, synthetic construct
  source 1..20: mol_type = other DNA
aaaaaagaatgcgtacaaac

SEQ ID NO: 108871 - DNA, 20 bp, synthetic construct
  source 1..20: mol_type = other DNA
aaaaaaagaatgcgtacaaa

SEQ ID NO: 108872 - DNA, 20 bp, synthetic construct
  source 1..20: mol_type = other DNA
aaaaaaaagaatgcgtacaa

SEQ ID NO: 108873 - DNA, 20 bp, synthetic construct
  source 1..20: mol_type = other DNA
aaaaaaaaagaatgcgtaca

SEQ ID NO: 108874 - DNA, 20 bp, synthetic construct
  source 1..20: mol_type = other DNA
aaaaaaaaaagaatgcgtac

SEQ ID NO: 108875 - DNA, 20 bp, synthetic construct
  source 1..20: mol_type = other DNA
aaaaaaaaaaagaatgcgta

SEQ ID NO: 108876 - DNA, 20 bp, synthetic construct
  source 1..20: mol_type = other DNA
aaaaaaaaaaaagaatgcgt

SEQ ID NO: 108877 - DNA, 20 bp, synthetic construct
  source 1..20: mol_type = other DNA
aaaaaaaaaaaaagaatgcg

SEQ ID NO: 108878 - DNA, 20 bp, synthetic construct
  source 1..20: mol_type = other DNA
aaaaaaaaaaaaaagaatgc

SEQ ID NO: 108879 - DNA, 20 bp, synthetic construct
  source 1..20: mol_type = other DNA
gaaaaaaaaaaaaaagaatg

SEQ ID NO: 108880 - DNA, 20 bp, synthetic construct
  source 1..20: mol_type = other DNA
agaaaaaaaaaaaaaagaat

SEQ ID NO: 108881 - DNA, 20 bp, synthetic construct
  source 1..20: mol_type = other DNA
cagaaaaaaaaaaaaaagaa

SEQ ID NO: 108882 - DNA, 20 bp, synthetic construct
  source 1..20: mol_type = other DNA
acagaaaaaaaaaaaaaaga

SEQ ID NO: 108883 - DNA, 20 bp, synthetic construct
  source 1..20: mol_type = other DNA
aacagaaaaaaaaaaaaaag

SEQ ID NO: 108884 - DNA, 20 bp, synthetic construct
  source 1..20: mol_type = other DNA
aaacagaaaaaaaaaaaaaa

SEQ ID NO: 108885 - DNA, 20 bp, synthetic construct
  source 1..20: mol_type = other DNA
aaaacagaaaaaaaaaaaaa

SEQ ID NO: 108886 - DNA, 20 bp, synthetic construct
  source 1..20: mol_type = other DNA
aaaaacagaaaaaaaaaaaa

SEQ ID NO: 108887 - DNA, 20 bp, synthetic construct
  source 1..20: mol_type = other DNA
caaaaacagaaaaaaaaaaa

SEQ ID NO: 108888 - DNA, 20 bp, synthetic construct
  source 1..20: mol_type = other DNA
tcaaaaacagaaaaaaaaaa

SEQ ID NO: 108889 - DNA, 20 bp, synthetic construct
  source 1..20: mol_type = other DNA
ctcaaaaacagaaaaaaaaa

SEQ ID NO: 108890 - DNA, 20 bp, synthetic construct
  source 1..20: mol_type = other DNA
tctcaaaaacagaaaaaaaa

SEQ ID NO: 108891 - DNA, 20 bp, synthetic construct
  source 1..20: mol_type = other DNA
gtctcaaaaacagaaaaaaa

SEQ ID NO: 108892 - DNA, 20 bp, synthetic construct
  source 1..20: mol_type = other DNA
tgtctcaaaaacagaaaaaa

SEQ ID NO: 108893 - DNA, 20 bp, synthetic construct
  source 1..20: mol_type = other DNA
ctgtctcaaaaacagaaaaa

SEQ ID NO: 108894 - DNA, 20 bp, synthetic construct
  source 1..20: mol_type = other DNA
tctgtctcaaaaacagaaaa

SEQ ID NO: 108895 - DNA, 20 bp, synthetic construct
  source 1..20: mol_type = other DNA
ctctgtctcaaaaacagaaa

SEQ ID NO: 108896 - DNA, 20 bp, synthetic construct
  source 1..20: mol_type = other DNA
actctgtctcaaaaacagaa

SEQ ID NO: 108897 - DNA, 20 bp, synthetic construct
  source 1..20: mol_type = other DNA
gactctgtctcaaaaacaga

SEQ ID NO: 108898 - DNA, 20 bp, synthetic construct
  source 1..20: mol_type = other DNA
agactctgtctcaaaaacag

SEQ ID NO: 108899 - DNA, 20 bp, synthetic construct
  source 1..20: mol_type = other DNA
gagactctgtctcaaaaaca

SEQ ID NO: 108900 - DNA, 20 bp, synthetic construct
  source 1..20: mol_type = other DNA
cgagactctgtctcaaaaac

SEQ ID NO: 108901 - DNA, 20 bp, synthetic construct
  source 1..20: mol_type = other DNA
gcgagactctgtctcaaaaa

SEQ ID NO: 108902 - DNA, 20 bp, synthetic construct
  source 1..20: mol_type = other DNA
agcgagactctgtctcaaaa

SEQ ID NO: 108903 - DNA, 20 bp, synthetic construct
  source 1..20: mol_type = other DNA
gagcgagactctgtctcaaa

SEQ ID NO: 108904 - DNA, 20 bp, synthetic construct
  source 1..20: mol_type = other DNA
agagcgagactctgtctcaa

SEQ ID NO: 108905 - DNA, 20 bp, synthetic construct
  source 1..20: mol_type = other DNA
cagagcgagactctgtctca

SEQ ID NO: 108906 - DNA, 20 bp, synthetic construct
  source 1..20: mol_type = other DNA
acagagcgagactctgtctc

SEQ ID NO: 108907 - DNA, 20 bp, synthetic construct
  source 1..20: mol_type = other DNA
gacagagcgagactctgtct

SEQ ID NO: 108908 - DNA, 20 bp, synthetic construct
  source 1..20: mol_type = other DNA
cgacagagcgagactctgtc

SEQ ID NO: 108909 - DNA, 20 bp, synthetic construct
  source 1..20: mol_type = other DNA
gcgacagagcgagactctgt

SEQ ID NO: 108910 - DNA, 20 bp, synthetic construct
  source 1..20: mol_type = other DNA
ggcgacagagcgagactctg

SEQ ID NO: 108911 - DNA, 20 bp, synthetic construct
  source 1..20: mol_type = other DNA
gggcgacagagcgagactct

SEQ ID NO: 108912 - DNA, 20 bp, synthetic construct
  source 1..20: mol_type = other DNA
tgggcgacagagcgagactc

SEQ ID NO: 108913 - DNA, 20 bp, synthetic construct
  source 1..20: mol_type = other DNA
ctgggcgacagagcgagact

SEQ ID NO: 108914 - DNA, 20 bp, synthetic construct
  source 1..20: mol_type = other DNA
cctgggcgacagagcgagac

SEQ ID NO: 108915 - DNA, 20 bp, synthetic construct
  source 1..20: mol_type = other DNA
gcctgggcgacagagcgaga

SEQ ID NO: 108916 - DNA, 20 bp, synthetic construct
  source 1..20: mol_type = other DNA
agcctgggcgacagagcgag

SEQ ID NO: 108917 - DNA, 20 bp, synthetic construct
  source 1..20: mol_type = other DNA
cagcctgggcgacagagcga

SEQ ID NO: 108918 - DNA, 20 bp, synthetic construct
  source 1..20: mol_type = other DNA
ccagcctgggcgacagagcg

SEQ ID NO: 108919 - DNA, 20 bp, synthetic construct
  source 1..20: mol_type = other DNA
tccagcctgggcgacagagc

SEQ ID NO: 108920 - DNA, 20 bp, synthetic construct
  source 1..20: mol_type = other DNA
ctccagcctgggcgacagag

SEQ ID NO: 108921 - DNA, 20 bp, synthetic construct
  source 1..20: mol_type = other DNA
actccagcctgggcgacaga

SEQ ID NO: 108922 - DNA, 20 bp, synthetic construct
  source 1..20: mol_type = other DNA
cactccagcctgggcgacag

SEQ ID NO: 108923 - DNA, 20 bp, synthetic construct
  source 1..20: mol_type = other DNA
gcactccagcctgggcgaca

SEQ ID NO: 108924 - DNA, 20 bp, synthetic construct
  source 1..20: mol_type = other DNA
tgcactccagcctgggcgac

SEQ ID NO: 108925 - DNA, 20 bp, synthetic construct
  source 1..20: mol_type = other DNA
ctgcactccagcctgggcga

SEQ ID NO: 108926 - DNA, 20 bp, synthetic construct
  source 1..20: mol_type = other DNA
actgcactccagcctgggcg

SEQ ID NO: 108927 - DNA, 20 bp, synthetic construct
  source 1..20: mol_type = other DNA
cactgcactccagcctgggc

SEQ ID NO: 108928 - DNA, 20 bp, synthetic construct
  source 1..20: mol_type = other DNA
ccactgcactccagcctggg

SEQ ID NO: 108929 - DNA, 20 bp, synthetic construct
  source 1..20: mol_type = other DNA
gccactgcactccagcctgg

SEQ ID NO: 108930 - DNA, 20 bp, synthetic construct
  source 1..20: mol_type = other DNA
tgccactgcactccagcctg

SEQ ID NO: 108931 - DNA, 20 bp, synthetic construct
  source 1..20: mol_type = other DNA
gtgccactgcactccagcct

SEQ ID NO: 108932 - DNA, 20 bp, synthetic construct
  source 1..20: mol_type = other DNA
tgtgccactgcactccagcc

SEQ ID NO: 108933 - DNA, 20 bp, synthetic construct
  source 1..20: mol_type = other DNA
ctgtgccactgcactccagc

SEQ ID NO: 108934 - DNA, 20 bp, synthetic construct
  source 1..20: mol_type = other DNA
actgtgccactgcactccag

SEQ ID NO: 108935 - DNA, 20 bp, synthetic construct
  source 1..20: mol_type = other DNA
gactgtgccactgcactcca

SEQ ID NO: 108936 - DNA, 20 bp, synthetic construct
  source 1..20: mol_type = other DNA
agactgtgccactgcactcc

SEQ ID NO: 108937 - DNA, 20 bp, synthetic construct
  source 1..20: mol_type = other DNA
aagactgtgccactgcactc

SEQ ID NO: 108938 - DNA, 20 bp, synthetic construct
  source 1..20: mol_type = other DNA
aaagactgtgccactgcact

SEQ ID NO: 108939 - DNA, 20 bp, synthetic construct
  source 1..20: mol_type = other DNA
caaagactgtgccactgcac

SEQ ID NO: 108940 - DNA, 20 bp, synthetic construct
  source 1..20: mol_type = other DNA
gcaaagactgtgccactgca

SEQ ID NO: 108941 - DNA, 20 bp, synthetic construct
  source 1..20: mol_type = other DNA
agcaaagactgtgccactgc

SEQ ID NO: 108942 - DNA, 20 bp, synthetic construct
  source 1..20: mol_type = other DNA
gagcaaagactgtgccactg

SEQ ID NO: 108943 - DNA, 20 bp, synthetic construct
  source 1..20: mol_type = other DNA
tgagcaaagactgtgccact

SEQ ID NO: 108944 - DNA, 20 bp, synthetic construct
  source 1..20: mol_type = other DNA
gtgagcaaagactgtgccac

SEQ ID NO: 108945 - DNA, 20 bp, synthetic construct
  source 1..20: mol_type = other DNA
ggtgagcaaagactgtgcca

SEQ ID NO: 108946 - DNA, 20 bp, synthetic construct
  source 1..20: mol_type = other DNA
cggtgagcaaagactgtgcc

SEQ ID NO: 108947 - DNA, 20 bp, synthetic construct
  source 1..20: mol_type = other DNA
gcggtgagcaaagactgtgc

SEQ ID NO: 108948 - DNA, 20 bp, synthetic construct
  source 1..20: mol_type = other DNA
tgcggtgagcaaagactgtg

SEQ ID NO: 108949 - DNA, 20 bp, synthetic construct
  source 1..20: mol_type = other DNA
ttgcggtgagcaaagactgt

SEQ ID NO: 108950 - DNA, 20 bp, synthetic construct
  source 1..20: mol_type = other DNA
gttgcggtgagcaaagactg

SEQ ID NO: 108951 - DNA, 20 bp, synthetic construct
  source 1..20: mol_type = other DNA
ggttgcggtgagcaaagact

SEQ ID NO: 108952 - DNA, 20 bp, synthetic construct
  source 1..20: mol_type = other DNA
aggttgcggtgagcaaagac

SEQ ID NO: 108953 - DNA, 20 bp, synthetic construct
  source 1..20: mol_type = other DNA
gaggttgcggtgagcaaaga

SEQ ID NO: 108954 - DNA, 20 bp, synthetic construct
  source 1..20: mol_type = other DNA
ggaggttgcggtgagcaaag

SEQ ID NO: 108955 - DNA, 20 bp, synthetic construct
  source 1..20: mol_type = other DNA
cggaggttgcggtgagcaaa

SEQ ID NO: 108956 - DNA, 20 bp, synthetic construct
  source 1..20: mol_type = other DNA
acggaggttgcggtgagcaa

SEQ ID NO: 108957 - DNA, 20 bp, synthetic construct
  source 1..20: mol_type = other DNA
gacggaggttgcggtgagca

SEQ ID NO: 108958 - DNA, 20 bp, synthetic construct
  source 1..20: mol_type = other DNA
agacggaggttgcggtgagc

SEQ ID NO: 108959 - DNA, 20 bp, synthetic construct
  source 1..20: mol_type = other DNA
gagacggaggttgcggtgag

SEQ ID NO: 108960 - DNA, 20 bp, synthetic construct
  source 1..20: mol_type = other DNA
ggagacggaggttgcggtga

SEQ ID NO: 108961 - DNA, 20 bp, synthetic construct
  source 1..20: mol_type = other DNA
gggagacggaggttgcggtg

SEQ ID NO: 108962 - DNA, 20 bp, synthetic construct
  source 1..20: mol_type = other DNA
cgggagacggaggttgcggt

SEQ ID NO: 108963 - DNA, 20 bp, synthetic construct
  source 1..20: mol_type = other DNA
ccgggagacggaggttgcgg

SEQ ID NO: 108964 - DNA, 20 bp, synthetic construct
  source 1..20: mol_type = other DNA
tccgggagacggaggttgcg

SEQ ID NO: 108965 - DNA, 20 bp, synthetic construct
  source 1..20: mol_type = other DNA
atccgggagacggaggttgc

SEQ ID NO: 108966 - DNA, 20 bp, synthetic construct
  source 1..20: mol_type = other DNA
aatccgggagacggaggttg

SEQ ID NO: 108967 - DNA, 20 bp, synthetic construct
  source 1..20: mol_type = other DNA
gaatccgggagacggaggtt

SEQ ID NO: 108968 - DNA, 20 bp, synthetic construct
  source 1..20: mol_type = other DNA
tgaatccgggagacggaggt

SEQ ID NO: 108969 - DNA, 20 bp, synthetic construct
  source 1..20: mol_type = other DNA
ttgaatccgggagacggagg

SEQ ID NO: 108970 - DNA, 20 bp, synthetic construct
  source 1..20: mol_type = other DNA
cttgaatccgggagacggag

SEQ ID NO: 108971 - DNA, 20 bp, synthetic construct
  source 1..20: mol_type = other DNA
gcttgaatccgggagacgga

SEQ ID NO: 108972 - DNA, 20 bp, synthetic construct
  source 1..20: mol_type = other DNA
tgcttgaatccgggagacgg

SEQ ID NO: 108973 - DNA, 20 bp, synthetic construct
  source 1..20: mol_type = other DNA
ttgcttgaatccgggagacg

SEQ ID NO: 108974 - DNA, 20 bp, synthetic construct
  source 1..20: mol_type = other DNA
attgcttgaatccgggagac

SEQ ID NO: 108975 - DNA, 20 bp, synthetic construct
  source 1..20: mol_type = other DNA
aattgcttgaatccgggaga

SEQ ID NO: 108976 - DNA, 20 bp, synthetic construct
  source 1..20: mol_type = other DNA
gaattgcttgaatccgggag

SEQ ID NO: 108977 - DNA, 20 bp, synthetic construct
  source 1..20: mol_type = other DNA
agaattgcttgaatccggga

SEQ ID NO: 108978 - DNA, 20 bp, synthetic construct
  source 1..20: mol_type = other DNA
gagaattgcttgaatccggg

SEQ ID NO: 108979 - DNA, 20 bp, synthetic construct
  source 1..20: mol_type = other DNA
ggagaattgcttgaatccgg

SEQ ID NO: 108980 - DNA, 20 bp, synthetic construct
  source 1..20: mol_type = other DNA
aggagaattgcttgaatccg

SEQ ID NO: 108981 - DNA, 20 bp, synthetic construct
  source 1..20: mol_type = other DNA
caggagaattgcttgaatcc

SEQ ID NO: 108982 - DNA, 20 bp, synthetic construct
  source 1..20: mol_type = other DNA
gcaggagaattgcttgaatc

SEQ ID NO: 108983 - DNA, 20 bp, synthetic construct
  source 1..20: mol_type = other DNA
ggcaggagaattgcttgaat

SEQ ID NO: 108984 - DNA, 20 bp, synthetic construct
  source 1..20: mol_type = other DNA
aggcaggagaattgcttgaa

SEQ ID NO: 108985 - DNA, 20 bp, synthetic construct
  source 1..20: mol_type = other DNA
gaggcaggagaattgcttga

SEQ ID NO: 108986 - DNA, 20 bp, synthetic construct
  source 1..20: mol_type = other DNA
tgaggcaggagaattgcttg

SEQ ID NO: 108987 - DNA, 20 bp, synthetic construct
  source 1..20: mol_type = other DNA
ctgaggcaggagaattgctt

SEQ ID NO: 108988 - DNA, 20 bp, synthetic construct
  source 1..20: mol_type = other DNA
gctgaggcaggagaattgct

SEQ ID NO: 108989 - DNA, 20 bp, synthetic construct
  source 1..20: mol_type = other DNA
ggctgaggcaggagaattgc

SEQ ID NO: 108990 - DNA, 20 bp, synthetic construct
  source 1..20: mol_type = other DNA
aggctgaggcaggagaattg

SEQ ID NO: 108991 - DNA, 20 bp, synthetic construct
  source 1..20: mol_type = other DNA
gaggctgaggcaggagaatt

SEQ ID NO: 108992 - DNA, 20 bp, synthetic construct
  source 1..20: mol_type = other DNA
ggaggctgaggcaggagaat

SEQ ID NO: 108993 - DNA, 20 bp, synthetic construct
  source 1..20: mol_type = other DNA
aggaggctgaggcaggagaa

SEQ ID NO: 108994 - DNA, 20 bp, synthetic construct
  source 1..20: mol_type = other DNA
caggaggctgaggcaggaga

SEQ ID NO: 108995 - DNA, 20 bp, synthetic construct
  source 1..20: mol_type = other DNA
tcaggaggctgaggcaggag

SEQ ID NO: 108996 - DNA, 20 bp, synthetic construct
  source 1..20: mol_type = other DNA
ctcaggaggctgaggcagga

SEQ ID NO: 108997 - DNA, 20 bp, synthetic construct
  source 1..20: mol_type = other DNA
actcaggaggctgaggcagg

SEQ ID NO: 108998 - DNA, 20 bp, synthetic construct
  source 1..20: mol_type = other DNA
tactcaggaggctgaggcag

SEQ ID NO: 108999 - DNA, 20 bp, synthetic construct
  source 1..20: mol_type = other DNA
ctactcaggaggctgaggca

SEQ ID NO: 109000 - DNA, 20 bp, synthetic construct
  source 1..20: mol_type = other DNA
gctactcaggaggctgaggc

SEQ ID NO: 109001 - DNA, 20 bp, synthetic construct
  source 1..20: mol_type = other DNA
agctactcaggaggctgagg

SEQ ID NO: 109002 - DNA, 20 bp, synthetic construct
  source 1..20: mol_type = other DNA
cagctactcaggaggctgag

SEQ ID NO: 109003 - DNA, 20 bp, synthetic construct
  source 1..20: mol_type = other DNA
ccagctactcaggaggctga

SEQ ID NO: 109004 - DNA, 20 bp, synthetic construct
  source 1..20: mol_type = other DNA
cccagctactcaggaggctg

SEQ ID NO: 109005 - DNA, 20 bp, synthetic construct
  source 1..20: mol_type = other DNA
tcccagctactcaggaggct

SEQ ID NO: 109006 - DNA, 20 bp, synthetic construct
  source 1..20: mol_type = other DNA
atcccagctactcaggaggc

SEQ ID NO: 109007 - DNA, 20 bp, synthetic construct
  source 1..20: mol_type = other DNA
aatcccagctactcaggagg

SEQ ID NO: 109008 - DNA, 20 bp, synthetic construct
  source 1..20: mol_type = other DNA
taatcccagctactcaggag

SEQ ID NO: 109009 - DNA, 20 bp, synthetic construct
  source 1..20: mol_type = other DNA
gtaatcccagctactcagga

SEQ ID NO: 109010 - DNA, 20 bp, synthetic construct
  source 1..20: mol_type = other DNA
tgtaatcccagctactcagg

SEQ ID NO: 109011 - DNA, 20 bp, synthetic construct
  source 1..20: mol_type = other DNA
ctgtaatcccagctactcag

SEQ ID NO: 109012 - DNA, 20 bp, synthetic construct
  source 1..20: mol_type = other DNA
cctgtaatcccagctactca

SEQ ID NO: 109013 - DNA, 20 bp, synthetic construct
  source 1..20: mol_type = other DNA
acctgtaatcccagctactc

SEQ ID NO: 109014 - DNA, 20 bp, synthetic construct
  source 1..20: mol_type = other DNA
cacctgtaatcccagctact

SEQ ID NO: 109015 - DNA, 20 bp, synthetic construct
  source 1..20: mol_type = other DNA
gcacctgtaatcccagctac

SEQ ID NO: 109016 - DNA, 20 bp, synthetic construct
  source 1..20: mol_type = other DNA
cgcacctgtaatcccagcta

SEQ ID NO: 109017 - DNA, 20 bp, synthetic construct
  source 1..20: mol_type = other DNA
acgcacctgtaatcccagct

SEQ ID NO: 109018 - DNA, 20 bp, synthetic construct
  source 1..20: mol_type = other DNA
cacgcacctgtaatcccagc

SEQ ID NO: 109019 - DNA, 20 bp, synthetic construct
  source 1..20: mol_type = other DNA
gcacgcacctgtaatcccag

SEQ ID NO: 109020 - DNA, 20 bp, synthetic construct
  source 1..20: mol_type = other DNA
ggcacgcacctgtaatccca

SEQ ID NO: 109021 - DNA, 20 bp, synthetic construct
  source 1..20: mol_type = other DNA
tggcacgcacctgtaatccc

SEQ ID NO: 109022 - DNA, 20 bp, synthetic construct
  source 1..20: mol_type = other DNA
gtggcacgcacctgtaatcc

SEQ ID NO: 109023 - DNA, 20 bp, synthetic construct
  source 1..20: mol_type = other DNA
ggtggcacgcacctgtaatc

SEQ ID NO: 109024 - DNA, 20 bp, synthetic construct
  source 1..20: mol_type = other DNA
tggtggcacgcacctgtaat

SEQ ID NO: 109025 - DNA, 20 bp, synthetic construct
  source 1..20: mol_type = other DNA
gtggtggcacgcacctgtaa

SEQ ID NO: 109026 - DNA, 20 bp, synthetic construct
  source 1..20: mol_type = other DNA
cgtggtggcacgcacctgta

SEQ ID NO: 109027 - DNA, 20 bp, synthetic construct
  source 1..20: mol_type = other DNA
gcgtggtggcacgcacctgt

SEQ ID NO: 109028 - DNA, 20 bp, synthetic construct
  source 1..20: mol_type = other DNA
ggcgtggtggcacgcacctg

SEQ ID NO: 109029 - DNA, 20 bp, synthetic construct
  source 1..20: mol_type = other DNA
aggcgtggtggcacgcacct

SEQ ID NO: 109030 - DNA, 20 bp, synthetic construct
  source 1..20: mol_type = other DNA
caggcgtggtggcacgcacc

SEQ ID NO: 109031 - DNA, 20 bp, synthetic construct
  source 1..20: mol_type = other DNA
ccaggcgtggtggcacgcac

SEQ ID NO: 109032 - DNA, 20 bp, synthetic construct
  source 1..20: mol_type = other DNA
gccaggcgtggtggcacgca

SEQ ID NO: 109033 - DNA, 20 bp, synthetic construct
  source 1..20: mol_type = other DNA
agccaggcgtggtggcacgc

SEQ ID NO: 109034 - DNA, 20 bp, synthetic construct
  source 1..20: mol_type = other DNA
tagccaggcgtggtggcacg

SEQ ID NO: 109035 - DNA, 20 bp, synthetic construct
  source 1..20: mol_type = other DNA
ttagccaggcgtggtggcac

SEQ ID NO: 109036 - DNA, 20 bp, synthetic construct
  source 1..20: mol_type = other DNA
attagccaggcgtggtggca

SEQ ID NO: 109037 - DNA, 20 bp, synthetic construct
  source 1..20: mol_type = other DNA
aattagccaggcgtggtggc

SEQ ID NO: 109038 - DNA, 20 bp, synthetic construct
  source 1..20: mol_type = other DNA
aaattagccaggcgtggtgg

SEQ ID NO: 109039 - DNA, 20 bp, synthetic construct
  source 1..20: mol_type = other DNA
aaaattagccaggcgtggtg

SEQ ID NO: 109040 - DNA, 20 bp, synthetic construct
  source 1..20: mol_type = other DNA
aaaaattagccaggcgtggt

SEQ ID NO: 109041 - DNA, 20 bp, synthetic construct
  source 1..20: mol_type = other DNA
caaaaattagccaggcgtgg

SEQ ID NO: 109042 - DNA, 20 bp, synthetic construct
  source 1..20: mol_type = other DNA
acaaaaattagccaggcgtg

SEQ ID NO: 109043 - DNA, 20 bp, synthetic construct
  source 1..20: mol_type = other DNA
tacaaaaattagccaggcgt

SEQ ID NO: 109044 - DNA, 20 bp, synthetic construct
  source 1..20: mol_type = other DNA
atacaaaaattagccaggcg

SEQ ID NO: 109045 - DNA, 20 bp, synthetic construct
  source 1..20: mol_type = other DNA
aatacaaaaattagccaggc

SEQ ID NO: 109046 - DNA, 20 bp, synthetic construct
  source 1..20: mol_type = other DNA
aaatacaaaaattagccagg

SEQ ID NO: 109047 - DNA, 20 bp, synthetic construct
  source 1..20: mol_type = other DNA
aaaatacaaaaattagccag

SEQ ID NO: 109048 - DNA, 20 bp, synthetic construct
  source 1..20: mol_type = other DNA
aaaaatacaaaaattagcca

SEQ ID NO: 109049 - DNA, 20 bp, synthetic construct
  source 1..20: mol_type = other DNA
taaaaatacaaaaattagcc

SEQ ID NO: 109050 - DNA, 20 bp, synthetic construct
  source 1..20: mol_type = other DNA
ctaaaaatacaaaaattagc

SEQ ID NO: 109051 - DNA, 20 bp, synthetic construct
  source 1..20: mol_type = other DNA
actaaaaatacaaaaattag

SEQ ID NO: 109052 - DNA, 20 bp, synthetic construct
  source 1..20: mol_type = other DNA
tactaaaaatacaaaaatta

SEQ ID NO: 109053 - DNA, 20 bp, synthetic construct
  source 1..20: mol_type = other DNA
ttactaaaaatacaaaaatt

SEQ ID NO: 109054 - DNA, 20 bp, synthetic construct
  source 1..20: mol_type = other DNA
tttactaaaaatacaaaaat

SEQ ID NO: 109055 - DNA, 20 bp, synthetic construct
  source 1..20: mol_type = other DNA
atttactaaaaatacaaaaa

SEQ ID NO: 109056 - DNA, 20 bp, synthetic construct
  source 1..20: mol_type = other DNA
tatttactaaaaatacaaaa

SEQ ID NO: 109057 - DNA, 20 bp, synthetic construct
  source 1..20: mol_type = other DNA
atatttactaaaaatacaaa

SEQ ID NO: 109058 - DNA, 20 bp, synthetic construct
  source 1..20: mol_type = other DNA
catatttactaaaaatacaa

SEQ ID NO: 109059 - DNA, 20 bp, synthetic construct
  source 1..20: mol_type = other DNA
ccatatttactaaaaataca

SEQ ID NO: 109060 - DNA, 20 bp, synthetic construct
  source 1..20: mol_type = other DNA
accatatttactaaaaatac

SEQ ID NO: 109061 - DNA, 20 bp, synthetic construct
  source 1..20: mol_type = other DNA
caccatatttactaaaaata

SEQ ID NO: 109062 - DNA, 20 bp, synthetic construct
  source 1..20: mol_type = other DNA
acaccatatttactaaaaat

SEQ ID NO: 109063 - DNA, 20 bp, synthetic construct
  source 1..20: mol_type = other DNA
aacaccatatttactaaaaa

SEQ ID NO: 109064 - DNA, 20 bp, synthetic construct
  source 1..20: mol_type = other DNA
aaacaccatatttactaaaa

SEQ ID NO: 109065 - DNA, 20 bp, synthetic construct
  source 1..20: mol_type = other DNA
gaaacaccatatttactaaa

SEQ ID NO: 109066 - DNA, 20 bp, synthetic construct
  source 1..20: mol_type = other DNA
tgaaacaccatatttactaa

SEQ ID NO: 109067 - DNA, 20 bp, synthetic construct
  source 1..20: mol_type = other DNA
gtgaaacaccatatttacta

SEQ ID NO: 109068 - DNA, 20 bp, synthetic construct
  source 1..20: mol_type = other DNA
ggtgaaacaccatatttact

SEQ ID NO: 109069 - DNA, 20 bp, synthetic construct
  source 1..20: mol_type = other DNA
tggtgaaacaccatatttac

SEQ ID NO: 109070 - DNA, 20 bp, synthetic construct
  source 1..20: mol_type = other DNA
atggtgaaacaccatattta

SEQ ID NO: 109071 - DNA, 20 bp, synthetic construct
  source 1..20: mol_type = other DNA
catggtgaaacaccatattt

SEQ ID NO: 109072 - DNA, 20 bp, synthetic construct
  source 1..20: mol_type = other DNA
acatggtgaaacaccatatt

SEQ ID NO: 109073 - DNA, 20 bp, synthetic construct
  source 1..20: mol_type = other DNA
aacatggtgaaacaccatat

SEQ ID NO: 109074 - DNA, 20 bp, synthetic construct
  source 1..20: mol_type = other DNA
caacatggtgaaacaccata

SEQ ID NO: 109075 - DNA, 20 bp, synthetic construct
  source 1..20: mol_type = other DNA
ccaacatggtgaaacaccat

SEQ ID NO: 109076 - DNA, 20 bp, synthetic construct
  source 1..20: mol_type = other DNA
accaacatggtgaaacacca

SEQ ID NO: 109077 - DNA, 20 bp, synthetic construct
  source 1..20: mol_type = other DNA
gaccaacatggtgaaacacc

SEQ ID NO: 109078 - DNA, 20 bp, synthetic construct
  source 1..20: mol_type = other DNA
tgaccaacatggtgaaacac

SEQ ID NO: 109079 - DNA, 20 bp, synthetic construct
  source 1..20: mol_type = other DNA
ctgaccaacatggtgaaaca

SEQ ID NO: 109080 - DNA, 20 bp, synthetic construct
  source 1..20: mol_type = other DNA
cctgaccaacatggtgaaac

SEQ ID NO: 109081 - DNA, 20 bp, synthetic construct
  source 1..20: mol_type = other DNA
gcctgaccaacatggtgaaa

SEQ ID NO: 109082 - DNA, 20 bp, synthetic construct
  source 1..20: mol_type = other DNA
agcctgaccaacatggtgaa

SEQ ID NO: 109083 - DNA, 20 bp, synthetic construct
  source 1..20: mol_type = other DNA
cagcctgaccaacatggtga

SEQ ID NO: 109084 - DNA, 20 bp, synthetic construct
  source 1..20: mol_type = other DNA
ccagcctgaccaacatggtg

SEQ ID NO: 109085 - DNA, 20 bp, synthetic construct
  source 1..20: mol_type = other DNA
accagcctgaccaacatggt

SEQ ID NO: 109086 - DNA, 20 bp, synthetic construct
  source 1..20: mol_type = other DNA
gaccagcctgaccaacatgg

SEQ ID NO: 109087 - DNA, 20 bp, synthetic construct
  source 1..20: mol_type = other DNA
agaccagcctgaccaacatg

SEQ ID NO: 109088 - DNA, 20 bp, synthetic construct
  source 1..20: mol_type = other DNA
gagaccagcctgaccaacat

SEQ ID NO: 109089 - DNA, 20 bp, synthetic construct
  source 1..20: mol_type = other DNA
cgagaccagcctgaccaaca

SEQ ID NO: 109090 - DNA, 20 bp, synthetic construct
  source 1..20: mol_type = other DNA
tcgagaccagcctgaccaac

SEQ ID NO: 109091 - DNA, 20 bp, synthetic construct
  source 1..20: mol_type = other DNA
ttcgagaccagcctgaccaa

SEQ ID NO: 109092 - DNA, 20 bp, synthetic construct
  source 1..20: mol_type = other DNA
gttcgagaccagcctgacca

SEQ ID NO: 109093 - DNA, 20 bp, synthetic construct
  source 1..20: mol_type = other DNA
agttcgagaccagcctgacc

SEQ ID NO: 109094 - DNA, 20 bp, synthetic construct
  source 1..20: mol_type = other DNA
gagttcgagaccagcctgac

SEQ ID NO: 109095 - DNA, 20 bp, synthetic construct
  source 1..20: mol_type = other DNA
ggagttcgagaccagcctga

SEQ ID NO: 109096 - DNA, 20 bp, synthetic construct
  source 1..20: mol_type = other DNA
aggagttcgagaccagcctg

SEQ ID NO: 109097 - DNA, 20 bp, synthetic construct
  source 1..20: mol_type = other DNA
taggagttcgagaccagcct

SEQ ID NO: 109098 - DNA, 20 bp, synthetic construct
  source 1..20: mol_type = other DNA
ttaggagttcgagaccagcc

SEQ ID NO: 109099 - DNA, 20 bp, synthetic construct
  source 1..20: mol_type = other DNA
gttaggagttcgagaccagc

SEQ ID NO: 109100 - DNA, 20 bp, synthetic construct
  source 1..20: mol_type = other DNA
ggttaggagttcgagaccag

SEQ ID NO: 109101 - DNA, 20 bp, synthetic construct
  source 1..20: mol_type = other DNA
aggttaggagttcgagacca

SEQ ID NO: 109102 - DNA, 20 bp, synthetic construct
  source 1..20: mol_type = other DNA
gaggttaggagttcgagacc

SEQ ID NO: 109103 - DNA, 20 bp, synthetic construct
  source 1..20: mol_type = other DNA
cgaggttaggagttcgagac

SEQ ID NO: 109104 - DNA, 20 bp, synthetic construct
  source 1..20: mol_type = other DNA
acgaggttaggagttcgaga

SEQ ID NO: 109105 - DNA, 20 bp, synthetic construct
  source 1..20: mol_type = other DNA
cacgaggttaggagttcgag

SEQ ID NO: 109106 - DNA, 20 bp, synthetic construct
  source 1..20: mol_type = other DNA
tcacgaggttaggagttcga

SEQ ID NO: 109107 - DNA, 20 bp, synthetic construct
  source 1..20: mol_type = other DNA
atcacgaggttaggagttcg

SEQ ID NO: 109108 - DNA, 20 bp, synthetic construct
  source 1..20: mol_type = other DNA
gatcacgaggttaggagttc

SEQ ID NO: 109109 - DNA, 20 bp, synthetic construct
  source 1..20: mol_type = other DNA
agatcacgaggttaggagtt

SEQ ID NO: 109110 - DNA, 20 bp, synthetic construct
  source 1..20: mol_type = other DNA
cagatcacgaggttaggagt

SEQ ID NO: 109111 - DNA, 20 bp, synthetic construct
  source 1..20: mol_type = other DNA
acagatcacgaggttaggag

SEQ ID NO: 109112 - DNA, 20 bp, synthetic construct
  source 1..20: mol_type = other DNA
gacagatcacgaggttagga

SEQ ID NO: 109113 - DNA, 20 bp, synthetic construct
  source 1..20: mol_type = other DNA
ggacagatcacgaggttagg

SEQ ID NO: 109114 - DNA, 20 bp, synthetic construct
  source 1..20: mol_type = other DNA
cggacagatcacgaggttag

SEQ ID NO: 109115 - DNA, 20 bp, synthetic construct
  source 1..20: mol_type = other DNA
gcggacagatcacgaggtta

SEQ ID NO: 109116 - DNA, 20 bp, synthetic construct
  source 1..20: mol_type = other DNA
ggcggacagatcacgaggtt

SEQ ID NO: 109117 - DNA, 20 bp, synthetic construct
  source 1..20: mol_type = other DNA
aggcggacagatcacgaggt

SEQ ID NO: 109118 - DNA, 20 bp, synthetic construct
  source 1..20: mol_type = other DNA
aaggcggacagatcacgagg

SEQ ID NO: 109119 - DNA, 20 bp, synthetic construct
  source 1..20: mol_type = other DNA
caaggcggacagatcacgag

SEQ ID NO: 109120 - DNA, 20 bp, synthetic construct
  source 1..20: mol_type = other DNA
ccaaggcggacagatcacga

SEQ ID NO: 109121 - DNA, 20 bp, synthetic construct
  source 1..20: mol_type = other DNA
gccaaggcggacagatcacg

SEQ ID NO: 109122 - DNA, 20 bp, synthetic construct
  source 1..20: mol_type = other DNA
ggccaaggcggacagatcac

SEQ ID NO: 109123 - DNA, 20 bp, synthetic construct
  source 1..20: mol_type = other DNA
aggccaaggcggacagatca

SEQ ID NO: 109124 - DNA, 20 bp, synthetic construct
  source 1..20: mol_type = other DNA
gaggccaaggcggacagatc

SEQ ID NO: 109125 - DNA, 20 bp, synthetic construct
  source 1..20: mol_type = other DNA
agaggccaaggcggacagat

SEQ ID NO: 109126 - DNA, 20 bp, synthetic construct
  source 1..20: mol_type = other DNA
gagaggccaaggcggacaga

SEQ ID NO: 109127 - DNA, 20 bp, synthetic construct
  source 1..20: mol_type = other DNA
tgagaggccaaggcggacag

SEQ ID NO: 109128 - DNA, 20 bp, synthetic construct
  source 1..20: mol_type = other DNA
ctgagaggccaaggcggaca

SEQ ID NO: 109129 - DNA, 20 bp, synthetic construct
  source 1..20: mol_type = other DNA
tctgagaggccaaggcggac

SEQ ID NO: 109130 - DNA, 20 bp, synthetic construct
  source 1..20: mol_type = other DNA
ctctgagaggccaaggcgga

SEQ ID NO: 109131 - DNA, 20 bp, synthetic construct
  source 1..20: mol_type = other DNA
actctgagaggccaaggcgg

SEQ ID NO: 109132 - DNA, 20 bp, synthetic construct
  source 1..20: mol_type = other DNA
cactctgagaggccaaggcg

SEQ ID NO: 109133 - DNA, 20 bp, synthetic construct
  source 1..20: mol_type = other DNA
acactctgagaggccaaggc

SEQ ID NO: 109134 - DNA, 20 bp, synthetic construct
  source 1..20: mol_type = other DNA
aacactctgagaggccaagg

SEQ ID NO: 109135 - DNA, 20 bp, synthetic construct
  source 1..20: mol_type = other DNA
caacactctgagaggccaag

SEQ ID NO: 109136 - DNA, 20 bp, synthetic construct
  source 1..20: mol_type = other DNA
ccaacactctgagaggccaa

SEQ ID NO: 109137 - DNA, 20 bp, synthetic construct
  source 1..20: mol_type = other DNA
cccaacactctgagaggcca

SEQ ID NO: 109138 - DNA, 20 bp, synthetic construct
  source 1..20: mol_type = other DNA
tcccaacactctgagaggcc

SEQ ID NO: 109139 - DNA, 20 bp, synthetic construct
  source 1..20: mol_type = other DNA
atcccaacactctgagaggc

SEQ ID NO: 109140 - DNA, 20 bp, synthetic construct
  source 1..20: mol_type = other DNA
aatcccaacactctgagagg

SEQ ID NO: 109141 - DNA, 20 bp, synthetic construct
  source 1..20: mol_type = other DNA
taatcccaacactctgagag

SEQ ID NO: 109142 - DNA, 20 bp, synthetic construct
  source 1..20: mol_type = other DNA
gtaatcccaacactctgaga

SEQ ID NO: 109143 - DNA, 20 bp, synthetic construct
  source 1..20: mol_type = other DNA
tgtaatcccaacactctgag

SEQ ID NO: 109144 - DNA, 20 bp, synthetic construct
  source 1..20: mol_type = other DNA
ctgtaatcccaacactctga

SEQ ID NO: 109145 - DNA, 20 bp, synthetic construct
  source 1..20: mol_type = other DNA
cctgtaatcccaacactctg

SEQ ID NO: 109146 - DNA, 20 bp, synthetic construct
  source 1..20: mol_type = other DNA
gcctgtaatcccaacactct

SEQ ID NO: 109147 - DNA, 20 bp, synthetic construct
  source 1..20: mol_type = other DNA
cgcctgtaatcccaacactc

SEQ ID NO: 109148 - DNA, 20 bp, synthetic construct
  source 1..20: mol_type = other DNA
acgcctgtaatcccaacact

SEQ ID NO: 109149 - DNA, 20 bp, synthetic construct
  source 1..20: mol_type = other DNA
aacgcctgtaatcccaacac

SEQ ID NO: 109150 - DNA, 20 bp, synthetic construct
  source 1..20: mol_type = other DNA
taacgcctgtaatcccaaca

SEQ ID NO: 109151 - DNA, 20 bp, synthetic construct
  source 1..20: mol_type = other DNA
ctaacgcctgtaatcccaac

SEQ ID NO: 109152 - DNA, 20 bp, synthetic construct
  source 1..20: mol_type = other DNA
gctaacgcctgtaatcccaa

SEQ ID NO: 109153 - DNA, 20 bp, synthetic construct
  source 1..20: mol_type = other DNA
ggctaacgcctgtaatccca

SEQ ID NO: 109154 - DNA, 20 bp, synthetic construct
  source 1..20: mol_type = other DNA
tggctaacgcctgtaatccc

SEQ ID NO: 109155 - DNA, 20 bp, synthetic construct
  source 1..20: mol_type = other DNA
gtggctaacgcctgtaatcc

SEQ ID NO: 109156 - DNA, 20 bp, synthetic construct
  source 1..20: mol_type = other DNA
agtggctaacgcctgtaatc

SEQ ID NO: 109157 - DNA, 20 bp, synthetic construct
  source 1..20: mol_type = other DNA
cagtggctaacgcctgtaat

SEQ ID NO: 109158 - DNA, 20 bp, synthetic construct
  source 1..20: mol_type = other DNA
gcagtggctaacgcctgtaa

SEQ ID NO: 109159 - DNA, 20 bp, synthetic construct
  source 1..20: mol_type = other DNA
tgcagtggctaacgcctgta

SEQ ID NO: 109160 - DNA, 20 bp, synthetic construct
  source 1..20: mol_type = other DNA
atgcagtggctaacgcctgt

SEQ ID NO: 109161 - DNA, 20 bp, synthetic construct
  source 1..20: mol_type = other DNA
gatgcagtggctaacgcctg

SEQ ID NO: 109162 - DNA, 20 bp, synthetic construct
  source 1..20: mol_type = other DNA
ggatgcagtggctaacgcct

SEQ ID NO: 109163 - DNA, 20 bp, synthetic construct
  source 1..20: mol_type = other DNA
cggatgcagtggctaacgcc

SEQ ID NO: 109164 - DNA, 20 bp, synthetic construct
  source 1..20: mol_type = other DNA
ccggatgcagtggctaacgc

SEQ ID NO: 109165 - DNA, 20 bp, synthetic construct
  source 1..20: mol_type = other DNA
gccggatgcagtggctaacg

SEQ ID NO: 109166 - DNA, 20 bp, synthetic construct
  source 1..20: mol_type = other DNA
agccggatgcagtggctaac

SEQ ID NO: 109167 - DNA, 20 bp, synthetic construct
  source 1..20: mol_type = other DNA
gagccggatgcagtggctaa

SEQ ID NO: 109168 - DNA, 20 bp, synthetic construct
  source 1..20: mol_type = other DNA
ggagccggatgcagtggcta

SEQ ID NO: 109169 - DNA, 20 bp, synthetic construct
  source 1..20: mol_type = other DNA
gggagccggatgcagtggct

SEQ ID NO: 109170 - DNA, 20 bp, synthetic construct
  source 1..20: mol_type = other DNA
tgggagccggatgcagtggc

SEQ ID NO: 109171 - DNA, 20 bp, synthetic construct
  source 1..20: mol_type = other DNA
atgggagccggatgcagtgg

SEQ ID NO: 109172 - DNA, 20 bp, synthetic construct
  source 1..20: mol_type = other DNA
aatgggagccggatgcagtg

SEQ ID NO: 109173 - DNA, 20 bp, synthetic construct
  source 1..20: mol_type = other DNA
gaatgggagccggatgcagt

SEQ ID NO: 109174 - DNA, 20 bp, synthetic construct
  source 1..20: mol_type = other DNA
agaatgggagccggatgcag

SEQ ID NO: 109175 - DNA, 20 bp, synthetic construct
  source 1..20: mol_type = other DNA
aagaatgggagccggatgca

SEQ ID NO: 109176 - DNA, 20 bp, synthetic construct
  source 1..20: mol_type = other DNA
gaagaatgggagccggatgc

SEQ ID NO: 109177 - DNA, 20 bp, synthetic construct
  source 1..20: mol_type = other DNA
agaagaatgggagccggatg

SEQ ID NO: 109178 - DNA, 20 bp, synthetic construct
  source 1..20: mol_type = other DNA
aagaagaatgggagccggat

SEQ ID NO: 109179 - DNA, 20 bp, synthetic construct
  source 1..20: mol_type = other DNA
caagaagaatgggagccgga

SEQ ID NO: 109180 - DNA, 20 bp, synthetic construct
  source 1..20: mol_type = other DNA
tcaagaagaatgggagccgg

SEQ ID NO: 109181 - DNA, 20 bp, synthetic construct
  source 1..20: mol_type = other DNA
ctcaagaagaatgggagccg

SEQ ID NO: 109182 - DNA, 20 bp, synthetic construct
  source 1..20: mol_type = other DNA
tctcaagaagaatgggagcc

SEQ ID NO: 109183 - DNA, 20 bp, synthetic construct
  source 1..20: mol_type = other DNA
ttctcaagaagaatgggagc

SEQ ID NO: 109184 - DNA, 20 bp, synthetic construct
  source 1..20: mol_type = other DNA
cttctcaagaagaatgggag

SEQ ID NO: 109185 - DNA, 20 bp, synthetic construct
  source 1..20: mol_type = other DNA
ccttctcaagaagaatggga

SEQ ID NO: 109186 - DNA, 20 bp, synthetic construct
  source 1..20: mol_type = other DNA
accttctcaagaagaatggg

SEQ ID NO: 109187 - DNA, 20 bp, synthetic construct
  source 1..20: mol_type = other DNA
aaccttctcaagaagaatgg

SEQ ID NO: 109188 - DNA, 20 bp, synthetic construct
  source 1..20: mol_type = other DNA
aaaccttctcaagaagaatg

SEQ ID NO: 109189 - DNA, 20 bp, synthetic construct
  source 1..20: mol_type = other DNA
aaaaccttctcaagaagaat

SEQ ID NO: 109190 - DNA, 20 bp, synthetic construct
  source 1..20: mol_type = other DNA
aaaaaccttctcaagaagaa

SEQ ID NO: 109191 - DNA, 20 bp, synthetic construct
  source 1..20: mol_type = other DNA
gaaaaaccttctcaagaaga

SEQ ID NO: 109192 - DNA, 20 bp, synthetic construct
  source 1..20: mol_type = other DNA
tgaaaaaccttctcaagaag

SEQ ID NO: 109193 - DNA, 20 bp, synthetic construct
  source 1..20: mol_type = other DNA
ttgaaaaaccttctcaagaa

SEQ ID NO: 109194 - DNA, 20 bp, synthetic construct
  source 1..20: mol_type = other DNA
cttgaaaaaccttctcaaga

SEQ ID NO: 109195 - DNA, 20 bp, synthetic construct
  source 1..20: mol_type = other DNA
acttgaaaaaccttctcaag

SEQ ID NO: 109196 - DNA, 20 bp, synthetic construct
  source 1..20: mol_type = other DNA
tacttgaaaaaccttctcaa

SEQ ID NO: 109197 - DNA, 20 bp, synthetic construct
  source 1..20: mol_type = other DNA
atacttgaaaaaccttctca

SEQ ID NO: 109198 - DNA, 20 bp, synthetic construct
  source 1..20: mol_type = other DNA
aatacttgaaaaaccttctc

SEQ ID NO: 109199 - DNA, 20 bp, synthetic construct
  source 1..20: mol_type = other DNA
gaatacttgaaaaaccttct

SEQ ID NO: 109200 - DNA, 20 bp, synthetic construct
  source 1..20: mol_type = other DNA
tgaatacttgaaaaaccttc

SEQ ID NO: 109201 - DNA, 20 bp, synthetic construct
  source 1..20: mol_type = other DNA
ttgaatacttgaaaaacctt

SEQ ID NO: 109202 - DNA, 20 bp, synthetic construct
  source 1..20: mol_type = other DNA
tttgaatacttgaaaaacct

SEQ ID NO: 109203 - DNA, 20 bp, synthetic construct
  source 1..20: mol_type = other DNA
ctttgaatacttgaaaaacc

SEQ ID NO: 109204 - DNA, 20 bp, synthetic construct
  source 1..20: mol_type = other DNA
cctttgaatacttgaaaaac

SEQ ID NO: 109205 - DNA, 20 bp, synthetic construct
  source 1..20: mol_type = other DNA
ccctttgaatacttgaaaaa

SEQ ID NO: 109206 - DNA, 20 bp, synthetic construct
  source 1..20: mol_type = other DNA
tccctttgaatacttgaaaa

SEQ ID NO: 109207 - DNA, 20 bp, synthetic construct
  source 1..20: mol_type = other DNA
ttccctttgaatacttgaaa

SEQ ID NO: 109208 - DNA, 20 bp, synthetic construct
  source 1..20: mol_type = other DNA
attccctttgaatacttgaa

SEQ ID NO: 109209 - DNA, 20 bp, synthetic construct
  source 1..20: mol_type = other DNA
aattccctttgaatacttga

SEQ ID NO: 109210 - DNA, 20 bp, synthetic construct
  source 1..20: mol_type = other DNA
taattccctttgaatacttg

SEQ ID NO: 109211 - DNA, 20 bp, synthetic construct
  source 1..20: mol_type = other DNA
ttaattccctttgaatactt

SEQ ID NO: 109212 - DNA, 20 bp, synthetic construct
  source 1..20: mol_type = other DNA
cttaattccctttgaatact

SEQ ID NO: 109213 - DNA, 20 bp, synthetic construct
  source 1..20: mol_type = other DNA
acttaattccctttgaatac

SEQ ID NO: 109214 - DNA, 20 bp, synthetic construct
  source 1..20: mol_type = other DNA
cacttaattccctttgaata

SEQ ID NO: 109215 - DNA, 20 bp, synthetic construct
  source 1..20: mol_type = other DNA
acacttaattccctttgaat

SEQ ID NO: 109216 - DNA, 20 bp, synthetic construct
  source 1..20: mol_type = other DNA
aacacttaattccctttgaa

SEQ ID NO: 109217 - DNA, 20 bp, synthetic construct
  source 1..20: mol_type = other DNA
caacacttaattccctttga

SEQ ID NO: 109218 - DNA, 20 bp, synthetic construct
  source 1..20: mol_type = other DNA
acaacacttaattccctttg

SEQ ID NO: 109219 - DNA, 20 bp, synthetic construct
  source 1..20: mol_type = other DNA
gacaacacttaattcccttt

SEQ ID NO: 109220 - DNA, 20 bp, synthetic construct
  source 1..20: mol_type = other DNA
tgacaacacttaattccctt

SEQ ID NO: 109221 - DNA, 20 bp, synthetic construct
  source 1..20: mol_type = other DNA
atgacaacacttaattccct

SEQ ID NO: 109222 - DNA, 20 bp, synthetic construct
  source 1..20: mol_type = other DNA
gatgacaacacttaattccc

SEQ ID NO: 109223 - DNA, 20 bp, synthetic construct
  source 1..20: mol_type = other DNA
agatgacaacacttaattcc

SEQ ID NO: 109224 - DNA, 20 bp, synthetic construct
  source 1..20: mol_type = other DNA
tagatgacaacacttaattc

SEQ ID NO: 109225 - DNA, 20 bp, synthetic construct
  source 1..20: mol_type = other DNA
ttagatgacaacacttaatt

SEQ ID NO: 109226 - DNA, 20 bp, synthetic construct
  source 1..20: mol_type = other DNA
cttagatgacaacacttaat

SEQ ID NO: 109227 - DNA, 20 bp, synthetic construct
  source 1..20: mol_type = other DNA
acttagatgacaacacttaa

SEQ ID NO: 109228 - DNA, 20 bp, synthetic construct
  source 1..20: mol_type = other DNA
gacttagatgacaacactta

SEQ ID NO: 109229 - DNA, 20 bp, synthetic construct
  source 1..20: mol_type = other DNA
agacttagatgacaacactt

SEQ ID NO: 109230 - DNA, 20 bp, synthetic construct
  source 1..20: mol_type = other DNA
aagacttagatgacaacact

SEQ ID NO: 109231 - DNA, 20 bp, synthetic construct
  source 1..20: mol_type = other DNA
gaagacttagatgacaacac

SEQ ID NO: 109232 - DNA, 20 bp, synthetic construct
  source 1..20: mol_type = other DNA
cgaagacttagatgacaaca

SEQ ID NO: 109233 - DNA, 20 bp, synthetic construct
  source 1..20: mol_type = other DNA
gcgaagacttagatgacaac

SEQ ID NO: 109234 - DNA, 20 bp, synthetic construct
  source 1..20: mol_type = other DNA
agcgaagacttagatgacaa

SEQ ID NO: 109235 - DNA, 20 bp, synthetic construct
  source 1..20: mol_type = other DNA
gagcgaagacttagatgaca

SEQ ID NO: 109236 - DNA, 20 bp, synthetic construct
  source 1..20: mol_type = other DNA
tgagcgaagacttagatgac

SEQ ID NO: 109237 - DNA, 20 bp, synthetic construct
  source 1..20: mol_type = other DNA
gtgagcgaagacttagatga

SEQ ID NO: 109238 - DNA, 20 bp, synthetic construct
  source 1..20: mol_type = other DNA
agtgagcgaagacttagatg

SEQ ID NO: 109239 - DNA, 20 bp, synthetic construct
  source 1..20: mol_type = other DNA
cagtgagcgaagacttagat

SEQ ID NO: 109240 - DNA, 20 bp, synthetic construct
  source 1..20: mol_type = other DNA
gcagtgagcgaagacttaga

SEQ ID NO: 109241 - DNA, 20 bp, synthetic construct
  source 1..20: mol_type = other DNA
tgcagtgagcgaagacttag

SEQ ID NO: 109242 - DNA, 20 bp, synthetic construct
  source 1..20: mol_type = other DNA
ctgcagtgagcgaagactta

SEQ ID NO: 109243 - DNA, 20 bp, synthetic construct
  source 1..20: mol_type = other DNA
gctgcagtgagcgaagactt

SEQ ID NO: 109244 - DNA, 20 bp, synthetic construct
  source 1..20: mol_type = other DNA
ggctgcagtgagcgaagact

SEQ ID NO: 109245 - DNA, 20 bp, synthetic construct
  source 1..20: mol_type = other DNA
tggctgcagtgagcgaagac

SEQ ID NO: 109246 - DNA, 20 bp, synthetic construct
  source 1..20: mol_type = other DNA
atggctgcagtgagcgaaga

SEQ ID NO: 109247 - DNA, 20 bp, synthetic construct
  source 1..20: mol_type = other DNA
tatggctgcagtgagcgaag

SEQ ID NO: 109248 - DNA, 20 bp, synthetic construct
  source 1..20: mol_type = other DNA
gtatggctgcagtgagcgaa

SEQ ID NO: 109249 - DNA, 20 bp, synthetic construct
  source 1..20: mol_type = other DNA
tgtatggctgcagtgagcga

SEQ ID NO: 109250 - DNA, 20 bp, synthetic construct
  source 1..20: mol_type = other DNA
atgtatggctgcagtgagcg

SEQ ID NO: 109251 - DNA, 20 bp, synthetic construct
  source 1..20: mol_type = other DNA
catgtatggctgcagtgagc

SEQ ID NO: 109252 - DNA, 20 bp, synthetic construct
  source 1..20: mol_type = other DNA
gcatgtatggctgcagtgag

SEQ ID NO: 109253 - DNA, 20 bp, synthetic construct
  source 1..20: mol_type = other DNA
tgcatgtatggctgcagtga

SEQ ID NO: 109254 - DNA, 20 bp, synthetic construct
  source 1..20: mol_type = other DNA
atgcatgtatggctgcagtg

SEQ ID NO: 109255 - DNA, 20 bp, synthetic construct
  source 1..20: mol_type = other DNA
aatgcatgtatggctgcagt

SEQ ID NO: 109256 - DNA, 20 bp, synthetic construct
  source 1..20: mol_type = other DNA
taatgcatgtatggctgcag

SEQ ID NO: 109257 - DNA, 20 bp, synthetic construct
  source 1..20: mol_type = other DNA
ctaatgcatgtatggctgca

SEQ ID NO: 109258 - DNA, 20 bp, synthetic construct
  source 1..20: mol_type = other DNA
tctaatgcatgtatggctgc

SEQ ID NO: 109259 - DNA, 20 bp, synthetic construct
  source 1..20: mol_type = other DNA
ctctaatgcatgtatggctg

SEQ ID NO: 109260 - DNA, 20 bp, synthetic construct
  source 1..20: mol_type = other DNA
cctctaatgcatgtatggct

SEQ ID NO: 109261 - DNA, 20 bp, synthetic construct
  source 1..20: mol_type = other DNA
ccctctaatgcatgtatggc

SEQ ID NO: 109262 - DNA, 20 bp, synthetic construct
  source 1..20: mol_type = other DNA
gccctctaatgcatgtatgg

SEQ ID NO: 109263 - DNA, 20 bp, synthetic construct
  source 1..20: mol_type = other DNA
tgccctctaatgcatgtatg

SEQ ID NO: 109264 - DNA, 20 bp, synthetic construct
  source 1..20: mol_type = other DNA
gtgccctctaatgcatgtat

SEQ ID NO: 109265 - DNA, 20 bp, synthetic construct
  source 1..20: mol_type = other DNA
ggtgccctctaatgcatgta

SEQ ID NO: 109266 - DNA, 20 bp, synthetic construct
  source 1..20: mol_type = other DNA
gggtgccctctaatgcatgt

SEQ ID NO: 109267 - DNA, 20 bp, synthetic construct
  source 1..20: mol_type = other DNA
ggggtgccctctaatgcatg

SEQ ID NO: 109268 - DNA, 20 bp, synthetic construct
  source 1..20: mol_type = other DNA
tggggtgccctctaatgcat

SEQ ID NO: 109269 - DNA, 20 bp, synthetic construct
  source 1..20: mol_type = other DNA
ttggggtgccctctaatgca

SEQ ID NO: 109270 - DNA, 20 bp, synthetic construct
  source 1..20: mol_type = other DNA
cttggggtgccctctaatgc

SEQ ID NO: 109271 - DNA, 20 bp, synthetic construct
  source 1..20: mol_type = other DNA
tcttggggtgccctctaatg

SEQ ID NO: 109272 - DNA, 20 bp, synthetic construct
  source 1..20: mol_type = other DNA
gtcttggggtgccctctaat

SEQ ID NO: 109273 - DNA, 20 bp, synthetic construct
  source 1..20: mol_type = other DNA
agtcttggggtgccctctaa

SEQ ID NO: 109274 - DNA, 20 bp, synthetic construct
  source 1..20: mol_type = other DNA
tagtcttggggtgccctcta

SEQ ID NO: 109275 - DNA, 20 bp, synthetic construct
  source 1..20: mol_type = other DNA
ctagtcttggggtgccctct

SEQ ID NO: 109276 - DNA, 20 bp, synthetic construct
  source 1..20: mol_type = other DNA
actagtcttggggtgccctc

SEQ ID NO: 109277 - DNA, 20 bp, synthetic construct
  source 1..20: mol_type = other DNA
tactagtcttggggtgccct

SEQ ID NO: 109278 - DNA, 20 bp, synthetic construct
  source 1..20: mol_type = other DNA
ttactagtcttggggtgccc

SEQ ID NO: 109279 - DNA, 20 bp, synthetic construct
  source 1..20: mol_type = other DNA
attactagtcttggggtgcc

SEQ ID NO: 109280 - DNA, 20 bp, synthetic construct
  source 1..20: mol_type = other DNA
cattactagtcttggggtgc

SEQ ID NO: 109281 - DNA, 20 bp, synthetic construct
  source 1..20: mol_type = other DNA
acattactagtcttggggtg

SEQ ID NO: 109282 - DNA, 20 bp, synthetic construct
  source 1..20: mol_type = other DNA
aacattactagtcttggggt

SEQ ID NO: 109283 - DNA, 20 bp, synthetic construct
  source 1..20: mol_type = other DNA
caacattactagtcttgggg

SEQ ID NO: 109284 - DNA, 20 bp, synthetic construct
  source 1..20: mol_type = other DNA
acaacattactagtcttggg

SEQ ID NO: 109285 - DNA, 20 bp, synthetic construct
  source 1..20: mol_type = other DNA
cacaacattactagtcttgg

SEQ ID NO: 109286 - DNA, 20 bp, synthetic construct
  source 1..20: mol_type = other DNA
tcacaacattactagtcttg

SEQ ID NO: 109287 - DNA, 20 bp, synthetic construct
  source 1..20: mol_type = other DNA
gtcacaacattactagtctt

SEQ ID NO: 109288 - DNA, 20 bp, synthetic construct
  source 1..20: mol_type = other DNA
agtcacaacattactagtct

SEQ ID NO: 109289 - DNA, 20 bp, synthetic construct
  source 1..20: mol_type = other DNA
gagtcacaacattactagtc

SEQ ID NO: 109290 - DNA, 20 bp, synthetic construct
  source 1..20: mol_type = other DNA
agagtcacaacattactagt

SEQ ID NO: 109291 - DNA, 20 bp, synthetic construct
  source 1..20: mol_type = other DNA
cagagtcacaacattactag

SEQ ID NO: 109292 - DNA, 20 bp, synthetic construct
  source 1..20: mol_type = other DNA
acagagtcacaacattacta

SEQ ID NO: 109293 - DNA, 20 bp, synthetic construct
  source 1..20: mol_type = other DNA
tacagagtcacaacattact

SEQ ID NO: 109294 - DNA, 20 bp, synthetic construct
  source 1..20: mol_type = other DNA
ctacagagtcacaacattac

SEQ ID NO: 109295 - DNA, 20 bp, synthetic construct
  source 1..20: mol_type = other DNA
tctacagagtcacaacatta

SEQ ID NO: 109296 - DNA, 20 bp, synthetic construct
  source 1..20: mol_type = other DNA
ctctacagagtcacaacatt

SEQ ID NO: 109297 - DNA, 20 bp, synthetic construct
  source 1..20: mol_type = other DNA
cctctacagagtcacaacat

SEQ ID NO: 109298 - DNA, 20 bp, synthetic construct
  source 1..20: mol_type = other DNA
acctctacagagtcacaaca

SEQ ID NO: 109299 - DNA, 20 bp, synthetic construct
  source 1..20: mol_type = other DNA
tacctctacagagtcacaac

SEQ ID NO: 109300 - DNA, 20 bp, synthetic construct
  source 1..20: mol_type = other DNA
atacctctacagagtcacaa

SEQ ID NO: 109301 - DNA, 20 bp, synthetic construct
  source 1..20: mol_type = other DNA
gatacctctacagagtcaca

SEQ ID NO: 109302 - DNA, 20 bp, synthetic construct
  source 1..20: mol_type = other DNA
tgatacctctacagagtcac

SEQ ID NO: 109303 - DNA, 20 bp, synthetic construct
  source 1..20: mol_type = other DNA
gtgatacctctacagagtca

SEQ ID NO: 109304 - DNA, 20 bp, synthetic construct
  source 1..20: mol_type = other DNA
ggtgatacctctacagagtc

SEQ ID NO: 109305 - DNA, 20 bp, synthetic construct
  source 1..20: mol_type = other DNA
aggtgatacctctacagagt

SEQ ID NO: 109306 - DNA, 20 bp, synthetic construct
  source 1..20: mol_type = other DNA
aaggtgatacctctacagag

SEQ ID NO: 109307 - DNA, 20 bp, synthetic construct
  source 1..20: mol_type = other DNA
caaggtgatacctctacaga

SEQ ID NO: 109308 - DNA, 20 bp, synthetic construct
  source 1..20: mol_type = other DNA
ccaaggtgatacctctacag

SEQ ID NO: 109309 - DNA, 20 bp, synthetic construct
  source 1..20: mol_type = other DNA
accaaggtgatacctctaca

SEQ ID NO: 109310 - DNA, 20 bp, synthetic construct
  source 1..20: mol_type = other DNA
taccaaggtgatacctctac

SEQ ID NO: 109311 - DNA, 20 bp, synthetic construct
  source 1..20: mol_type = other DNA
ctaccaaggtgatacctcta

SEQ ID NO: 109312 - DNA, 20 bp, synthetic construct
  source 1..20: mol_type = other DNA
actaccaaggtgatacctct

SEQ ID NO: 109313 - DNA, 20 bp, synthetic construct
  source 1..20: mol_type = other DNA
gactaccaaggtgatacctc

SEQ ID NO: 109314 - DNA, 20 bp, synthetic construct
  source 1..20: mol_type = other DNA
agactaccaaggtgatacct

SEQ ID NO: 109315 - DNA, 20 bp, synthetic construct
  source 1..20: mol_type = other DNA
aagactaccaaggtgatacc

SEQ ID NO: 109316 - DNA, 20 bp, synthetic construct
  source 1..20: mol_type = other DNA
caagactaccaaggtgatac

SEQ ID NO: 109317 - DNA, 20 bp, synthetic construct
  source 1..20: mol_type = other DNA
ccaagactaccaaggtgata

SEQ ID NO: 109318 - DNA, 20 bp, synthetic construct
  source 1..20: mol_type = other DNA
cccaagactaccaaggtgat

SEQ ID NO: 109319 - DNA, 20 bp, synthetic construct
  source 1..20: mol_type = other DNA
ccccaagactaccaaggtga

SEQ ID NO: 109320 - DNA, 20 bp, synthetic construct
  source 1..20: mol_type = other DNA
tccccaagactaccaaggtg

SEQ ID NO: 109321 - DNA, 20 bp, synthetic construct
  source 1..20: mol_type = other DNA
ttccccaagactaccaaggt

SEQ ID NO: 109322 - DNA, 20 bp, synthetic construct
  source 1..20: mol_type = other DNA
cttccccaagactaccaagg

SEQ ID NO: 109323 - DNA, 20 bp, synthetic construct
  source 1..20: mol_type = other DNA
tcttccccaagactaccaag

SEQ ID NO: 109324 - DNA, 20 bp, synthetic construct
  source 1..20: mol_type = other DNA
atcttccccaagactaccaa

SEQ ID NO: 109325 - DNA, 20 bp, synthetic construct
  source 1..20: mol_type = other DNA
gatcttccccaagactacca

SEQ ID NO: 109326 - DNA, 20 bp, synthetic construct
  source 1..20: mol_type = other DNA
agatcttccccaagactacc

SEQ ID NO: 109327 - DNA, 20 bp, synthetic construct
  source 1..20: mol_type = other DNA
cagatcttccccaagactac

SEQ ID NO: 109328 - DNA, 20 bp, synthetic construct
  source 1..20: mol_type = other DNA
ccagatcttccccaagacta

SEQ ID NO: 109329 - DNA, 20 bp, synthetic construct
  source 1..20: mol_type = other DNA
cccagatcttccccaagact

SEQ ID NO: 109330 - DNA, 20 bp, synthetic construct
  source 1..20: mol_type = other DNA
tcccagatcttccccaagac

SEQ ID NO: 109331 - DNA, 20 bp, synthetic construct
  source 1..20: mol_type = other DNA
ctcccagatcttccccaaga

SEQ ID NO: 109332 - DNA, 20 bp, synthetic construct
  source 1..20: mol_type = other DNA
tctcccagatcttccccaag

SEQ ID NO: 109333 - DNA, 20 bp, synthetic construct
  source 1..20: mol_type = other DNA
ttctcccagatcttccccaa

SEQ ID NO: 109334 - DNA, 20 bp, synthetic construct
  source 1..20: mol_type = other DNA
attctcccagatcttcccca

SEQ ID NO: 109335 - DNA, 20 bp, synthetic construct
  source 1..20: mol_type = other DNA
aattctcccagatcttcccc

SEQ ID NO: 109336 - DNA, 20 bp, synthetic construct
  source 1..20: mol_type = other DNA
gaattctcccagatcttccc

SEQ ID NO: 109337 - DNA, 20 bp, synthetic construct
  source 1..20: mol_type = other DNA
ggaattctcccagatcttcc

SEQ ID NO: 109338 - DNA, 20 bp, synthetic construct
  source 1..20: mol_type = other DNA
gggaattctcccagatcttc

SEQ ID NO: 109339 - DNA, 20 bp, synthetic construct
  source 1..20: mol_type = other DNA
agggaattctcccagatctt

SEQ ID NO: 109340 - DNA, 20 bp, synthetic construct
  source 1..20: mol_type = other DNA
cagggaattctcccagatct

SEQ ID NO: 109341 - DNA, 20 bp, synthetic construct
  source 1..20: mol_type = other DNA
acagggaattctcccagatc

SEQ ID NO: 109342 - DNA, 20 bp, synthetic construct
  source 1..20: mol_type = other DNA
tacagggaattctcccagat

SEQ ID NO: 109343 - DNA, 20 bp, synthetic construct
  source 1..20: mol_type = other DNA
atacagggaattctcccaga

SEQ ID NO: 109344 - DNA, 20 bp, synthetic construct
  source 1..20: mol_type = other DNA
aatacagggaattctcccag

SEQ ID NO: 109345 - DNA, 20 bp, synthetic construct
  source 1..20: mol_type = other DNA
taatacagggaattctccca

SEQ ID NO: 109346 - DNA, 20 bp, synthetic construct
  source 1..20: mol_type = other DNA
gtaatacagggaattctccc

SEQ ID NO: 109347 - DNA, 20 bp, synthetic construct
  source 1..20: mol_type = other DNA
ggtaatacagggaattctcc

SEQ ID NO: 109348 - DNA, 20 bp, synthetic construct
  source 1..20: mol_type = other DNA
tggtaatacagggaattctc

SEQ ID NO: 109349 - DNA, 20 bp, synthetic construct
  source 1..20: mol_type = other DNA
ctggtaatacagggaattct

SEQ ID NO: 109350 - DNA, 20 bp, synthetic construct
  source 1..20: mol_type = other DNA
cctggtaatacagggaattc

SEQ ID NO: 109351 - DNA, 20 bp, synthetic construct
  source 1..20: mol_type = other DNA
gcctggtaatacagggaatt

SEQ ID NO: 109352 - DNA, 20 bp, synthetic construct
  source 1..20: mol_type = other DNA
tgcctggtaatacagggaat

SEQ ID NO: 109353 - DNA, 20 bp, synthetic construct
  source 1..20: mol_type = other DNA
ctgcctggtaatacagggaa

SEQ ID NO: 109354 - DNA, 20 bp, synthetic construct
  source 1..20: mol_type = other DNA
actgcctggtaatacaggga

SEQ ID NO: 109355 - DNA, 20 bp, synthetic construct
  source 1..20: mol_type = other DNA
gactgcctggtaatacaggg

SEQ ID NO: 109356 - DNA, 20 bp, synthetic construct
  source 1..20: mol_type = other DNA
agactgcctggtaatacagg

SEQ ID NO: 109357 - DNA, 20 bp, synthetic construct
  source 1..20: mol_type = other DNA
gagactgcctggtaatacag

SEQ ID NO: 109358 - DNA, 20 bp, synthetic construct
  source 1..20: mol_type = other DNA
agagactgcctggtaataca

SEQ ID NO: 109359 - DNA, 20 bp, synthetic construct
  source 1..20: mol_type = other DNA
aagagactgcctggtaatac

SEQ ID NO: 109360 - DNA, 20 bp, synthetic construct
  source 1..20: mol_type = other DNA
caagagactgcctggtaata

SEQ ID NO: 109361 - DNA, 20 bp, synthetic construct
  source 1..20: mol_type = other DNA
acaagagactgcctggtaat

SEQ ID NO: 109362 - DNA, 20 bp, synthetic construct
  source 1..20: mol_type = other DNA
gacaagagactgcctggtaa

SEQ ID NO: 109363 - DNA, 20 bp, synthetic construct
  source 1..20: mol_type = other DNA
ggacaagagactgcctggta

SEQ ID NO: 109364 - DNA, 20 bp, synthetic construct
  source 1..20: mol_type = other DNA
aggacaagagactgcctggt

SEQ ID NO: 109365 - DNA, 20 bp, synthetic construct
  source 1..20: mol_type = other DNA
gaggacaagagactgcctgg

SEQ ID NO: 109366 - DNA, 20 bp, synthetic construct
  source 1..20: mol_type = other DNA
agaggacaagagactgcctg

SEQ ID NO: 109367 - DNA, 20 bp, synthetic construct
  source 1..20: mol_type = other DNA
aagaggacaagagactgcct

SEQ ID NO: 109368 - DNA, 20 bp, synthetic construct
  source 1..20: mol_type = other DNA
taagaggacaagagactgcc

SEQ ID NO: 109369 - DNA, 20 bp, synthetic construct
  source 1..20: mol_type = other DNA
gtaagaggacaagagactgc

SEQ ID NO: 109370 - DNA, 20 bp, synthetic construct
  source 1..20: mol_type = other DNA
tgtaagaggacaagagactg

SEQ ID NO: 109371 - DNA, 20 bp, synthetic construct
  source 1..20: mol_type = other DNA
atgtaagaggacaagagact

SEQ ID NO: 109372 - DNA, 20 bp, synthetic construct
  source 1..20: mol_type = other DNA
aatgtaagaggacaagagac

SEQ ID NO: 109373 - DNA, 20 bp, synthetic construct
  source 1..20: mol_type = other DNA
aaatgtaagaggacaagaga

SEQ ID NO: 109374 - DNA, 20 bp, synthetic construct
  source 1..20: mol_type = other DNA
gaaatgtaagaggacaagag

SEQ ID NO: 109375 - DNA, 20 bp, synthetic construct
  source 1..20: mol_type = other DNA
agaaatgtaagaggacaaga

SEQ ID NO: 109376 - DNA, 20 bp, synthetic construct
  source 1..20: mol_type = other DNA
gagaaatgtaagaggacaag

SEQ ID NO: 109377 - DNA, 20 bp, synthetic construct
  source 1..20: mol_type = other DNA
ggagaaatgtaagaggacaa

SEQ ID NO: 109378 - DNA, 20 bp, synthetic construct
  source 1..20: mol_type = other DNA
tggagaaatgtaagaggaca

SEQ ID NO: 109379 - DNA, 20 bp, synthetic construct
  source 1..20: mol_type = other DNA
ttggagaaatgtaagaggac

SEQ ID NO: 109380 - DNA, 20 bp, synthetic construct
  source 1..20: mol_type = other DNA
tttggagaaatgtaagagga

SEQ ID NO: 109381 - DNA, 20 bp, synthetic construct
  source 1..20: mol_type = other DNA
gtttggagaaatgtaagagg

SEQ ID NO: 109382 - DNA, 20 bp, synthetic construct
  source 1..20: mol_type = other DNA
tgtttggagaaatgtaagag

SEQ ID NO: 109383 - DNA, 20 bp, synthetic construct
  source 1..20: mol_type = other DNA
ttgtttggagaaatgtaaga

SEQ ID NO: 109384 - DNA, 20 bp, synthetic construct
  source 1..20: mol_type = other DNA
tttgtttggagaaatgtaag

SEQ ID NO: 109385 - DNA, 20 bp, synthetic construct
  source 1..20: mol_type = other DNA
atttgtttggagaaatgtaa

SEQ ID NO: 109386 - DNA, 20 bp, synthetic construct
  source 1..20: mol_type = other DNA
catttgtttggagaaatgta

SEQ ID NO: 109387 - DNA, 20 bp, synthetic construct
  source 1..20: mol_type = other DNA
ccatttgtttggagaaatgt

SEQ ID NO: 109388 - DNA, 20 bp, synthetic construct
  source 1..20: mol_type = other DNA
tccatttgtttggagaaatg

SEQ ID NO: 109389 - DNA, 20 bp, synthetic construct
  source 1..20: mol_type = other DNA
ctccatttgtttggagaaat

SEQ ID NO: 109390 - DNA, 20 bp, synthetic construct
  source 1..20: mol_type = other DNA
actccatttgtttggagaaa

SEQ ID NO: 109391 - DNA, 20 bp, synthetic construct
  source 1..20: mol_type = other DNA
gactccatttgtttggagaa

SEQ ID NO: 109392 - DNA, 20 bp, synthetic construct
  source 1..20: mol_type = other DNA
agactccatttgtttggaga

SEQ ID NO: 109393 - DNA, 20 bp, synthetic construct
  source 1..20: mol_type = other DNA
gagactccatttgtttggag

SEQ ID NO: 109394 - DNA, 20 bp, synthetic construct
  source 1..20: mol_type = other DNA
agagactccatttgtttgga

SEQ ID NO: 109395 - DNA, 20 bp, synthetic construct
  source 1..20: mol_type = other DNA
gagagactccatttgtttgg

SEQ ID NO: 109396 - DNA, 20 bp, synthetic construct
  source 1..20: mol_type = other DNA
agagagactccatttgtttg

SEQ ID NO: 109397 - DNA, 20 bp, synthetic construct
  source 1..20: mol_type = other DNA
aagagagactccatttgttt

SEQ ID NO: 109398 - DNA, 20 bp, synthetic construct
  source 1..20: mol_type = other DNA
aaagagagactccatttgtt

SEQ ID NO: 109399 - DNA, 20 bp, synthetic construct
  source 1..20: mol_type = other DNA
caaagagagactccatttgt

SEQ ID NO: 109400 - DNA, 20 bp, synthetic construct
  source 1..20: mol_type = other DNA
acaaagagagactccatttg

SEQ ID NO: 109401 - DNA, 20 bp, synthetic construct
  source 1..20: mol_type = other DNA
cacaaagagagactccattt

SEQ ID NO: 109402 - DNA, 20 bp, synthetic construct
  source 1..20: mol_type = other DNA
gcacaaagagagactccatt

SEQ ID NO: 109403 - DNA, 20 bp, synthetic construct
  source 1..20: mol_type = other DNA
agcacaaagagagactccat

SEQ ID NO: 109404 - DNA, 20 bp, synthetic construct
  source 1..20: mol_type = other DNA
cagcacaaagagagactcca

SEQ ID NO: 109405 - DNA, 20 bp, synthetic construct
  source 1..20: mol_type = other DNA
tcagcacaaagagagactcc

SEQ ID NO: 109406 - DNA, 20 bp, synthetic construct
  source 1..20: mol_type = other DNA
ctcagcacaaagagagactc

SEQ ID NO: 109407 - DNA, 20 bp, synthetic construct
  source 1..20: mol_type = other DNA
gctcagcacaaagagagact

SEQ ID NO: 109408 - DNA, 20 bp, synthetic construct
  source 1..20: mol_type = other DNA
agctcagcacaaagagagac

SEQ ID NO: 109409 - DNA, 20 bp, synthetic construct
  source 1..20: mol_type = other DNA
cagctcagcacaaagagaga

SEQ ID NO: 109410 - DNA, 20 bp, synthetic construct
  source 1..20: mol_type = other DNA
gcagctcagcacaaagagag

SEQ ID NO: 109411 - DNA, 20 bp, synthetic construct
  source 1..20: mol_type = other DNA
agcagctcagcacaaagaga

SEQ ID NO: 109412 - DNA, 20 bp, synthetic construct
  source 1..20: mol_type = other DNA
aagcagctcagcacaaagag

SEQ ID NO: 109413 - DNA, 20 bp, synthetic construct
  source 1..20: mol_type = other DNA
caagcagctcagcacaaaga

SEQ ID NO: 109414 - DNA, 20 bp, synthetic construct
  source 1..20: mol_type = other DNA
ccaagcagctcagcacaaag

SEQ ID NO: 109415 - DNA, 20 bp, synthetic construct
  source 1..20: mol_type = other DNA
tccaagcagctcagcacaaa

SEQ ID NO: 109416 - DNA, 20 bp, synthetic construct
  source 1..20: mol_type = other DNA
ctccaagcagctcagcacaa

SEQ ID NO: 109417 - DNA, 20 bp, synthetic construct
  source 1..20: mol_type = other DNA
actccaagcagctcagcaca

SEQ ID NO: 109418 - DNA, 20 bp, synthetic construct
  source 1..20: mol_type = other DNA
aactccaagcagctcagcac

SEQ ID NO: 109419 - DNA, 20 bp, synthetic construct
  source 1..20: mol_type = other DNA
aaactccaagcagctcagca

SEQ ID NO: 109420 - DNA, 20 bp, synthetic construct
  source 1..20: mol_type = other DNA
caaactccaagcagctcagc

SEQ ID NO: 109421 - DNA, 20 bp, synthetic construct
  source 1..20: mol_type = other DNA
ccaaactccaagcagctcag

SEQ ID NO: 109422 - DNA, 20 bp, synthetic construct
  source 1..20: mol_type = other DNA
cccaaactccaagcagctca

SEQ ID NO: 109423 - DNA, 20 bp, synthetic construct
  source 1..20: mol_type = other DNA
ccccaaactccaagcagctc

SEQ ID NO: 109424 - DNA, 20 bp, synthetic construct
  source 1..20: mol_type = other DNA
tccccaaactccaagcagct

SEQ ID NO: 109425 - DNA, 20 bp, synthetic construct
  source 1..20: mol_type = other DNA
ttccccaaactccaagcagc

SEQ ID NO: 109426 - DNA, 20 bp, synthetic construct
  source 1..20: mol_type = other DNA
cttccccaaactccaagcag

SEQ ID NO: 109427 - DNA, 20 bp, synthetic construct
  source 1..20: mol_type = other DNA
ccttccccaaactccaagca

SEQ ID NO: 109428 - DNA, 20 bp, synthetic construct
  source 1..20: mol_type = other DNA
cccttccccaaactccaagc

SEQ ID NO: 109429 - DNA, 20 bp, synthetic construct
  source 1..20: mol_type = other DNA
acccttccccaaactccaag

SEQ ID NO: 109430 - DNA, 20 bp, synthetic construct
  source 1..20: mol_type = other DNA
cacccttccccaaactccaa

SEQ ID NO: 109431 - DNA, 20 bp, synthetic construct
  source 1..20: mol_type = other DNA
tcacccttccccaaactcca

SEQ ID NO: 109432 - DNA, 20 bp, synthetic construct
  source 1..20: mol_type = other DNA
gtcacccttccccaaactcc

SEQ ID NO: 109433 - DNA, 20 bp, synthetic construct
  source 1..20: mol_type = other DNA
tgtcacccttccccaaactc

SEQ ID NO: 109434 - DNA, 20 bp, synthetic construct
  source 1..20: mol_type = other DNA
gtgtcacccttccccaaact

SEQ ID NO: 109435 - DNA, 20 bp, synthetic construct
  source 1..20: mol_type = other DNA
tgtgtcacccttccccaaac

SEQ ID NO: 109436 - DNA, 20 bp, synthetic construct
  source 1..20: mol_type = other DNA
ttgtgtcacccttccccaaa

SEQ ID NO: 109437 - DNA, 20 bp, synthetic construct
  source 1..20: mol_type = other DNA
cttgtgtcacccttccccaa

SEQ ID NO: 109438 - DNA, 20 bp, synthetic construct
  source 1..20: mol_type = other DNA
gcttgtgtcacccttcccca

SEQ ID NO: 109439 - DNA, 20 bp, synthetic construct
  source 1..20: mol_type = other DNA
tgcttgtgtcacccttcccc

SEQ ID NO: 109440 - DNA, 20 bp, synthetic construct
  source 1..20: mol_type = other DNA
gtgcttgtgtcacccttccc

SEQ ID NO: 109441 - DNA, 20 bp, synthetic construct
  source 1..20: mol_type = other DNA
agtgcttgtgtcacccttcc

SEQ ID NO: 109442 - DNA, 20 bp, synthetic construct
  source 1..20: mol_type = other DNA
cagtgcttgtgtcacccttc

SEQ ID NO: 109443 - DNA, 20 bp, synthetic construct
  source 1..20: mol_type = other DNA
gcagtgcttgtgtcaccctt

SEQ ID NO: 109444 - DNA, 20 bp, synthetic construct
  source 1..20: mol_type = other DNA
ggcagtgcttgtgtcaccct

SEQ ID NO: 109445 - DNA, 20 bp, synthetic construct
  source 1..20: mol_type = other DNA
tggcagtgcttgtgtcaccc

SEQ ID NO: 109446 - DNA, 20 bp, synthetic construct
  source 1..20: mol_type = other DNA
atggcagtgcttgtgtcacc

SEQ ID NO: 109447 - DNA, 20 bp, synthetic construct
  source 1..20: mol_type = other DNA
catggcagtgcttgtgtcac

SEQ ID NO: 109448 - DNA, 20 bp, synthetic construct
  source 1..20: mol_type = other DNA
ccatggcagtgcttgtgtca

SEQ ID NO: 109449 - DNA, 20 bp, synthetic construct
  source 1..20: mol_type = other DNA
gccatggcagtgcttgtgtc

SEQ ID NO: 109450 - DNA, 20 bp, synthetic construct
  source 1..20: mol_type = other DNA
ggccatggcagtgcttgtgt

SEQ ID NO: 109451 - DNA, 20 bp, synthetic construct
  source 1..20: mol_type = other DNA
tggccatggcagtgcttgtg

SEQ ID NO: 109452 - DNA, 20 bp, synthetic construct
  source 1..20: mol_type = other DNA
gtggccatggcagtgcttgt

SEQ ID NO: 109453 - DNA, 20 bp, synthetic construct
  source 1..20: mol_type = other DNA
ggtggccatggcagtgcttg

SEQ ID NO: 109454 - DNA, 20 bp, synthetic construct
  source 1..20: mol_type = other DNA
cggtggccatggcagtgctt

SEQ ID NO: 109455 - DNA, 20 bp, synthetic construct
  source 1..20: mol_type = other DNA
acggtggccatggcagtgct

SEQ ID NO: 109456 - DNA, 20 bp, synthetic construct
  source 1..20: mol_type = other DNA
gacggtggccatggcagtgc

SEQ ID NO: 109457 - DNA, 20 bp, synthetic construct
  source 1..20: mol_type = other DNA
tgacggtggccatggcagtg

SEQ ID NO: 109458 - DNA, 20 bp, synthetic construct
  source 1..20: mol_type = other DNA
gtgacggtggccatggcagt

SEQ ID NO: 109459 - DNA, 20 bp, synthetic construct
  source 1..20: mol_type = other DNA
agtgacggtggccatggcag

SEQ ID NO: 109460 - DNA, 20 bp, synthetic construct
  source 1..20: mol_type = other DNA
cagtgacggtggccatggca

SEQ ID NO: 109461 - DNA, 20 bp, synthetic construct
  source 1..20: mol_type = other DNA
ccagtgacggtggccatggc

SEQ ID NO: 109462 - DNA, 20 bp, synthetic construct
  source 1..20: mol_type = other DNA
tccagtgacggtggccatgg

SEQ ID NO: 109463 - DNA, 20 bp, synthetic construct
  source 1..20: mol_type = other DNA
ttccagtgacggtggccatg

SEQ ID NO: 109464 - DNA, 20 bp, synthetic construct
  source 1..20: mol_type = other DNA
gttccagtgacggtggccat

SEQ ID NO: 109465 - DNA, 20 bp, synthetic construct
  source 1..20: mol_type = other DNA
agttccagtgacggtggcca

SEQ ID NO: 109466 - DNA, 20 bp, synthetic construct
  source 1..20: mol_type = other DNA
cagttccagtgacggtggcc

SEQ ID NO: 109467 - DNA, 20 bp, synthetic construct
  source 1..20: mol_type = other DNA
acagttccagtgacggtggc

SEQ ID NO: 109468 - DNA, 20 bp, synthetic construct
  source 1..20: mol_type = other DNA
tacagttccagtgacggtgg

SEQ ID NO: 109469 - DNA, 20 bp, synthetic construct
  source 1..20: mol_type = other DNA
gtacagttccagtgacggtg

SEQ ID NO: 109470 - DNA, 20 bp, synthetic construct
  source 1..20: mol_type = other DNA
agtacagttccagtgacggt

SEQ ID NO: 109471 - DNA, 20 bp, synthetic construct
  source 1..20: mol_type = other DNA
aagtacagttccagtgacgg

SEQ ID NO: 109472 - DNA, 20 bp, synthetic construct
  source 1..20: mol_type = other DNA
caagtacagttccagtgacg

SEQ ID NO: 109473 - DNA, 20 bp, synthetic construct
  source 1..20: mol_type = other DNA
ccaagtacagttccagtgac

SEQ ID NO: 109474 - DNA, 20 bp, synthetic construct
  source 1..20: mol_type = other DNA
accaagtacagttccagtga

SEQ ID NO: 109475 - DNA, 20 bp, synthetic construct
  source 1..20: mol_type = other DNA
gaccaagtacagttccagtg

SEQ ID NO: 109476 - DNA, 20 bp, synthetic construct
  source 1..20: mol_type = other DNA
agaccaagtacagttccagt

SEQ ID NO: 109477 - DNA, 20 bp, synthetic construct
  source 1..20: mol_type = other DNA
gagaccaagtacagttccag

SEQ ID NO: 109478 - DNA, 20 bp, synthetic construct
  source 1..20: mol_type = other DNA
tgagaccaagtacagttcca

SEQ ID NO: 109479 - DNA, 20 bp, synthetic construct
  source 1..20: mol_type = other DNA
gtgagaccaagtacagttcc

SEQ ID NO: 109480 - DNA, 20 bp, synthetic construct
  source 1..20: mol_type = other DNA
ggtgagaccaagtacagttc

SEQ ID NO: 109481 - DNA, 20 bp, synthetic construct
  source 1..20: mol_type = other DNA
gggtgagaccaagtacagtt

SEQ ID NO: 109482 - DNA, 20 bp, synthetic construct
  source 1..20: mol_type = other DNA
tgggtgagaccaagtacagt

SEQ ID NO: 109483 - DNA, 20 bp, synthetic construct
  source 1..20: mol_type = other DNA
ttgggtgagaccaagtacag

SEQ ID NO: 109484 - DNA, 20 bp, synthetic construct
  source 1..20: mol_type = other DNA
cttgggtgagaccaagtaca

SEQ ID NO: 109485 - DNA, 20 bp, synthetic construct
  source 1..20: mol_type = other DNA
ccttgggtgagaccaagtac

SEQ ID NO: 109486 - DNA, 20 bp, synthetic construct
  source 1..20: mol_type = other DNA
gccttgggtgagaccaagta

SEQ ID NO: 109487 - DNA, 20 bp, synthetic construct
  source 1..20: mol_type = other DNA
ggccttgggtgagaccaagt

SEQ ID NO: 109488 - DNA, 20 bp, synthetic construct
  source 1..20: mol_type = other DNA
aggccttgggtgagaccaag

SEQ ID NO: 109489 - DNA, 20 bp, synthetic construct
  source 1..20: mol_type = other DNA
caggccttgggtgagaccaa

SEQ ID NO: 109490 - DNA, 20 bp, synthetic construct
  source 1..20: mol_type = other DNA
acaggccttgggtgagacca

SEQ ID NO: 109491 - DNA, 20 bp, synthetic construct
  source 1..20: mol_type = other DNA
cacaggccttgggtgagacc

SEQ ID NO: 109492 - DNA, 20 bp, synthetic construct
  source 1..20: mol_type = other DNA
ccacaggccttgggtgagac

SEQ ID NO: 109493 - DNA, 20 bp, synthetic construct
  source 1..20: mol_type = other DNA
gccacaggccttgggtgaga

SEQ ID NO: 109494 - DNA, 20 bp, synthetic construct
  source 1..20: mol_type = other DNA
tgccacaggccttgggtgag

SEQ ID NO: 109495 - DNA, 20 bp, synthetic construct
  source 1..20: mol_type = other DNA
ctgccacaggccttgggtga

SEQ ID NO: 109496 - DNA, 20 bp, synthetic construct
  source 1..20: mol_type = other DNA
gctgccacaggccttgggtg

SEQ ID NO: 109497 - DNA, 20 bp, synthetic construct
  source 1..20: mol_type = other DNA
agctgccacaggccttgggt

SEQ ID NO: 109498 - DNA, 20 bp, synthetic construct
  source 1..20: mol_type = other DNA
tagctgccacaggccttggg

SEQ ID NO: 109499 - DNA, 20 bp, synthetic construct
  source 1..20: mol_type = other DNA
atagctgccacaggccttgg

SEQ ID NO: 109500 - DNA, 20 bp, synthetic construct
  source 1..20: mol_type = other DNA
aatagctgccacaggccttg

SEQ ID NO: 109501 - DNA, 20 bp, synthetic construct
  source 1..20: mol_type = other DNA
aaatagctgccacaggcctt

SEQ ID NO: 109502 - DNA, 20 bp, synthetic construct
  source 1..20: mol_type = other DNA
aaaatagctgccacaggcct

SEQ ID NO: 109503 - DNA, 20 bp, synthetic construct
  source 1..20: mol_type = other DNA
gaaaatagctgccacaggcc

SEQ ID NO: 109504 - DNA, 20 bp, synthetic construct
  source 1..20: mol_type = other DNA
agaaaatagctgccacaggc

SEQ ID NO: 109505 - DNA, 20 bp, synthetic construct
  source 1..20: mol_type = other DNA
cagaaaatagctgccacagg

SEQ ID NO: 109506 - DNA, 20 bp, synthetic construct
  source 1..20: mol_type = other DNA
ccagaaaatagctgccacag

SEQ ID NO: 109507 - DNA, 20 bp, synthetic construct
  source 1..20: mol_type = other DNA
gccagaaaatagctgccaca

SEQ ID NO: 109508 - DNA, 20 bp, synthetic construct
  source 1..20: mol_type = other DNA
ggccagaaaatagctgccac

SEQ ID NO: 109509 - DNA, 20 bp, synthetic construct
  source 1..20: mol_type = other DNA
tggccagaaaatagctgcca

SEQ ID NO: 109510 - DNA, 20 bp, synthetic construct
  source 1..20: mol_type = other DNA
gtggccagaaaatagctgcc

SEQ ID NO: 109511 - DNA, 20 bp, synthetic construct
  source 1..20: mol_type = other DNA
ggtggccagaaaatagctgc

SEQ ID NO: 109512 - DNA, 20 bp, synthetic construct
  source 1..20: mol_type = other DNA
tggtggccagaaaatagctg

SEQ ID NO: 109513 - DNA, 20 bp, synthetic construct
  source 1..20: mol_type = other DNA
gtggtggccagaaaatagct

SEQ ID NO: 109514 - DNA, 20 bp, synthetic construct
  source 1..20: mol_type = other DNA
agtggtggccagaaaatagc

SEQ ID NO: 109515 - DNA, 20 bp, synthetic construct
  source 1..20: mol_type = other DNA
cagtggtggccagaaaatag

SEQ ID NO: 109516 - DNA, 20 bp, synthetic construct
  source 1..20: mol_type = other DNA
tcagtggtggccagaaaata

SEQ ID NO: 109517 - DNA, 20 bp, synthetic construct
  source 1..20: mol_type = other DNA
atcagtggtggccagaaaat

SEQ ID NO: 109518 - DNA, 20 bp, synthetic construct
  source 1..20: mol_type = other DNA
catcagtggtggccagaaaa

SEQ ID NO: 109519 - DNA, 20 bp, synthetic construct
  source 1..20: mol_type = other DNA
acatcagtggtggccagaaa

SEQ ID NO: 109520 - DNA, 20 bp, synthetic construct
  source 1..20: mol_type = other DNA
aacatcagtggtggccagaa

SEQ ID NO: 109521 - DNA, 20 bp, synthetic construct
  source 1..20: mol_type = other DNA
taacatcagtggtggccaga

SEQ ID NO: 109522 - DNA, 20 bp, synthetic construct
  source 1..20: mol_type = other DNA
ttaacatcagtggtggccag

SEQ ID NO: 109523 - DNA, 20 bp, synthetic construct
  source 1..20: mol_type = other DNA
attaacatcagtggtggcca

SEQ ID NO: 109524 - DNA, 20 bp, synthetic construct
  source 1..20: mol_type = other DNA
aattaacatcagtggtggcc

SEQ ID NO: 109525 - DNA, 20 bp, synthetic construct
  source 1..20: mol_type = other DNA
aaattaacatcagtggtggc

SEQ ID NO: 109526 - DNA, 20 bp, synthetic construct
  source 1..20: mol_type = other DNA
taaattaacatcagtggtgg

SEQ ID NO: 109527 - DNA, 20 bp, synthetic construct
  source 1..20: mol_type = other DNA
ttaaattaacatcagtggtg

SEQ ID NO: 109528 - DNA, 20 bp, synthetic construct
  source 1..20: mol_type = other DNA
cttaaattaacatcagtggt

SEQ ID NO: 109529 - DNA, 20 bp, synthetic construct
  source 1..20: mol_type = other DNA
ccttaaattaacatcagtgg

SEQ ID NO: 109530 - DNA, 20 bp, synthetic construct
  source 1..20: mol_type = other DNA
gccttaaattaacatcagtg

SEQ ID NO: 109531 - DNA, 20 bp, synthetic construct
  source 1..20: mol_type = other DNA
ggccttaaattaacatcagt

SEQ ID NO: 109532 - DNA, 20 bp, synthetic construct
  source 1..20: mol_type = other DNA
gggccttaaattaacatcag

SEQ ID NO: 109533 - DNA, 20 bp, synthetic construct
  source 1..20: mol_type = other DNA
tgggccttaaattaacatca

SEQ ID NO: 109534 - DNA, 20 bp, synthetic construct
  source 1..20: mol_type = other DNA
ttgggccttaaattaacatc

SEQ ID NO: 109535 - DNA, 20 bp, synthetic construct
  source 1..20: mol_type = other DNA
cttgggccttaaattaacat

SEQ ID NO: 109536 - DNA, 20 bp, synthetic construct
  source 1..20: mol_type = other DNA
ccttgggccttaaattaaca

SEQ ID NO: 109537 - DNA, 20 bp, synthetic construct
  source 1..20: mol_type = other DNA
cccttgggccttaaattaac

SEQ ID NO: 109538 - DNA, 20 bp, synthetic construct
  source 1..20: mol_type = other DNA
acccttgggccttaaattaa

SEQ ID NO: 109539 - DNA, 20 bp, synthetic construct
  source 1..20: mol_type = other DNA
cacccttgggccttaaatta

SEQ ID NO: 109540 - DNA, 20 bp, synthetic construct
  source 1..20: mol_type = other DNA
gcacccttgggccttaaatt

SEQ ID NO: 109541 - DNA, 20 bp, synthetic construct
  source 1..20: mol_type = other DNA
agcacccttgggccttaaat

SEQ ID NO: 109542 - DNA, 20 bp, synthetic construct
  source 1..20: mol_type = other DNA
aagcacccttgggccttaaa

SEQ ID NO: 109543 - DNA, 20 bp, synthetic construct
  source 1..20: mol_type = other DNA
aaagcacccttgggccttaa

SEQ ID NO: 109544 - DNA, 20 bp, synthetic construct
  source 1..20: mol_type = other DNA
taaagcacccttgggcctta

SEQ ID NO: 109545 - DNA, 20 bp, synthetic construct
  source 1..20: mol_type = other DNA
ctaaagcacccttgggcctt

SEQ ID NO: 109546 - DNA, 20 bp, synthetic construct
  source 1..20: mol_type = other DNA
actaaagcacccttgggcct

SEQ ID NO: 109547 - DNA, 20 bp, synthetic construct
  source 1..20: mol_type = other DNA
gactaaagcacccttgggcc

SEQ ID NO: 109548 - DNA, 20 bp, synthetic construct
  source 1..20: mol_type = other DNA
tgactaaagcacccttgggc

SEQ ID NO: 109549 - DNA, 20 bp, synthetic construct
  source 1..20: mol_type = other DNA
ctgactaaagcacccttggg

SEQ ID NO: 109550 - DNA, 20 bp, synthetic construct
  source 1..20: mol_type = other DNA
actgactaaagcacccttgg

SEQ ID NO: 109551 - DNA, 20 bp, synthetic construct
  source 1..20: mol_type = other DNA
tactgactaaagcacccttg

SEQ ID NO: 109552 - DNA, 20 bp, synthetic construct
  source 1..20: mol_type = other DNA
ctactgactaaagcaccctt

SEQ ID NO: 109553 - DNA, 20 bp, synthetic construct
  source 1..20: mol_type = other DNA
cctactgactaaagcaccct

SEQ ID NO: 109554 - DNA, 20 bp, synthetic construct
  source 1..20: mol_type = other DNA
acctactgactaaagcaccc

SEQ ID NO: 109555 - DNA, 20 bp, synthetic construct
  source 1..20: mol_type = other DNA
cacctactgactaaagcacc

SEQ ID NO: 109556 - DNA, 20 bp, synthetic construct
  source 1..20: mol_type = other DNA
tcacctactgactaaagcac

SEQ ID NO: 109557 - DNA, 20 bp, synthetic construct
  source 1..20: mol_type = other DNA
ttcacctactgactaaagca

SEQ ID NO: 109558 - DNA, 20 bp, synthetic construct
  source 1..20: mol_type = other DNA
cttcacctactgactaaagc

SEQ ID NO: 109559 - DNA, 20 bp, synthetic construct
  source 1..20: mol_type = other DNA
tcttcacctactgactaaag

SEQ ID NO: 109560 - DNA, 20 bp, synthetic construct
  source 1..20: mol_type = other DNA
ttcttcacctactgactaaa

SEQ ID NO: 109561 - DNA, 20 bp, synthetic construct
  source 1..20: mol_type = other DNA
attcttcacctactgactaa

SEQ ID NO: 109562 - DNA, 20 bp, synthetic construct
  source 1..20: mol_type = other DNA
gattcttcacctactgacta

SEQ ID NO: 109563 - DNA, 20 bp, synthetic construct
  source 1..20: mol_type = other DNA
ggattcttcacctactgact

SEQ ID NO: 109564 - DNA, 20 bp, synthetic construct
  source 1..20: mol_type = other DNA
aggattcttcacctactgac

SEQ ID NO: 109565 - DNA, 20 bp, synthetic construct
  source 1..20: mol_type = other DNA
caggattcttcacctactga

SEQ ID NO: 109566 - DNA, 20 bp, synthetic construct
  source 1..20: mol_type = other DNA
gcaggattcttcacctactg

SEQ ID NO: 109567 - DNA, 20 bp, synthetic construct
  source 1..20: mol_type = other DNA
tgcaggattcttcacctact

SEQ ID NO: 109568 - DNA, 20 bp, synthetic construct
  source 1..20: mol_type = other DNA
ttgcaggattcttcacctac

SEQ ID NO: 109569 - DNA, 20 bp, synthetic construct
  source 1..20: mol_type = other DNA
cttgcaggattcttcaccta

SEQ ID NO: 109570 - DNA, 20 bp, synthetic construct
  source 1..20: mol_type = other DNA
tcttgcaggattcttcacct

SEQ ID NO: 109571 - DNA, 20 bp, synthetic construct
  source 1..20: mol_type = other DNA
ttcttgcaggattcttcacc

SEQ ID NO: 109572 - DNA, 20 bp, synthetic construct
  source 1..20: mol_type = other DNA
gttcttgcaggattcttcac

SEQ ID NO: 109573 - DNA, 20 bp, synthetic construct
  source 1..20: mol_type = other DNA
agttcttgcaggattcttca

SEQ ID NO: 109574 - DNA, 20 bp, synthetic construct
  source 1..20: mol_type = other DNA
cagttcttgcaggattcttc

SEQ ID NO: 109575 - DNA, 20 bp, synthetic construct
  source 1..20: mol_type = other DNA
ccagttcttgcaggattctt

SEQ ID NO: 109576 - DNA, 20 bp, synthetic construct
  source 1..20: mol_type = other DNA
cccagttcttgcaggattct

SEQ ID NO: 109577 - DNA, 20 bp, synthetic construct
  source 1..20: mol_type = other DNA
acccagttcttgcaggattc

SEQ ID NO: 109578 - DNA, 20 bp, synthetic construct
  source 1..20: mol_type = other DNA
gacccagttcttgcaggatt

SEQ ID NO: 109579 - DNA, 20 bp, synthetic construct
  source 1..20: mol_type = other DNA
agacccagttcttgcaggat

SEQ ID NO: 109580 - DNA, 20 bp, synthetic construct
  source 1..20: mol_type = other DNA
aagacccagttcttgcagga

SEQ ID NO: 109581 - DNA, 20 bp, synthetic construct
  source 1..20: mol_type = other DNA
aaagacccagttcttgcagg

SEQ ID NO: 109582 - DNA, 20 bp, synthetic construct
  source 1..20: mol_type = other DNA
taaagacccagttcttgcag

SEQ ID NO: 109583 - DNA, 20 bp, synthetic construct
  source 1..20: mol_type = other DNA
gtaaagacccagttcttgca

SEQ ID NO: 109584 - DNA, 20 bp, synthetic construct
  source 1..20: mol_type = other DNA
agtaaagacccagttcttgc

SEQ ID NO: 109585 - DNA, 20 bp, synthetic construct
  source 1..20: mol_type = other DNA
aagtaaagacccagttcttg

SEQ ID NO: 109586 - DNA, 20 bp, synthetic construct
  source 1..20: mol_type = other DNA
aaagtaaagacccagttctt

SEQ ID NO: 109587 - DNA, 20 bp, synthetic construct
  source 1..20: mol_type = other DNA
gaaagtaaagacccagttct

SEQ ID NO: 109588 - DNA, 20 bp, synthetic construct
  source 1..20: mol_type = other DNA
tgaaagtaaagacccagttc

SEQ ID NO: 109589 - DNA, 20 bp, synthetic construct
  source 1..20: mol_type = other DNA
ctgaaagtaaagacccagtt

SEQ ID NO: 109590 - DNA, 20 bp, synthetic construct
  source 1..20: mol_type = other DNA
actgaaagtaaagacccagt

SEQ ID NO: 109591 - DNA, 20 bp, synthetic construct
  source 1..20: mol_type = other DNA
cactgaaagtaaagacccag

SEQ ID NO: 109592 - DNA, 20 bp, synthetic construct
  source 1..20: mol_type = other DNA
gcactgaaagtaaagaccca

SEQ ID NO: 109593 - DNA, 20 bp, synthetic construct
  source 1..20: mol_type = other DNA
tgcactgaaagtaaagaccc

SEQ ID NO: 109594 - DNA, 20 bp, synthetic construct
  source 1..20: mol_type = other DNA
ctgcactgaaagtaaagacc

SEQ ID NO: 109595 - DNA, 20 bp, synthetic construct
  source 1..20: mol_type = other DNA
gctgcactgaaagtaaagac

SEQ ID NO: 109596 - DNA, 20 bp, synthetic construct
  source 1..20: mol_type = other DNA
tgctgcactgaaagtaaaga

SEQ ID NO: 109597 - DNA, 20 bp, synthetic construct
  source 1..20: mol_type = other DNA
ctgctgcactgaaagtaaag

SEQ ID NO: 109598 - DNA, 20 bp, synthetic construct
  source 1..20: mol_type = other DNA
cctgctgcactgaaagtaaa

SEQ ID NO: 109599 - DNA, 20 bp, synthetic construct
  source 1..20: mol_type = other DNA
acctgctgcactgaaagtaa

SEQ ID NO: 109600 - DNA, 20 bp, synthetic construct
  source 1..20: mol_type = other DNA
aacctgctgcactgaaagta

SEQ ID NO: 109601 - DNA, 20 bp, synthetic construct
  source 1..20: mol_type = other DNA
gaacctgctgcactgaaagt

SEQ ID NO: 109602 - DNA, 20 bp, synthetic construct
  source 1..20: mol_type = other DNA
ggaacctgctgcactgaaag

SEQ ID NO: 109603 - DNA, 20 bp, synthetic construct
  source 1..20: mol_type = other DNA
gggaacctgctgcactgaaa

SEQ ID NO: 109604 - DNA, 20 bp, synthetic construct
  source 1..20: mol_type = other DNA
agggaacctgctgcactgaa

SEQ ID NO: 109605 - DNA, 20 bp, synthetic construct
  source 1..20: mol_type = other DNA
aagggaacctgctgcactga

SEQ ID NO: 109606 - DNA, 20 bp, synthetic construct
  source 1..20: mol_type = other DNA
gaagggaacctgctgcactg

SEQ ID NO: 109607 - DNA, 20 bp, synthetic construct
  source 1..20: mol_type = other DNA
agaagggaacctgctgcact

SEQ ID NO: 109608 - DNA, 20 bp, synthetic construct
  source 1..20: mol_type = other DNA
cagaagggaacctgctgcac

SEQ ID NO: 109609 - DNA, 20 bp, synthetic construct
  source 1..20: mol_type = other DNA
ccagaagggaacctgctgca

SEQ ID NO: 109610 - DNA, 20 bp, synthetic construct
  source 1..20: mol_type = other DNA
gccagaagggaacctgctgc

SEQ ID NO: 109611 - DNA, 20 bp, synthetic construct
  source 1..20: mol_type = other DNA
ggccagaagggaacctgctg

SEQ ID NO: 109612 - DNA, 20 bp, synthetic construct
  source 1..20: mol_type = other DNA
gggccagaagggaacctgct

SEQ ID NO: 109613 - DNA, 20 bp, synthetic construct
  source 1..20: mol_type = other DNA
tgggccagaagggaacctgc

SEQ ID NO: 109614 - DNA, 20 bp, synthetic construct
  source 1..20: mol_type = other DNA
ctgggccagaagggaacctg

SEQ ID NO: 109615 - DNA, 20 bp, synthetic construct
  source 1..20: mol_type = other DNA
cctgggccagaagggaacct

SEQ ID NO: 109616 - DNA, 20 bp, synthetic construct
  source 1..20: mol_type = other DNA
ccctgggccagaagggaacc

SEQ ID NO: 109617 - DNA, 20 bp, synthetic construct
  source 1..20: mol_type = other DNA
accctgggccagaagggaac

SEQ ID NO: 109618 - DNA, 20 bp, synthetic construct
  source 1..20: mol_type = other DNA
caccctgggccagaagggaa

SEQ ID NO: 109619 - DNA, 20 bp, synthetic construct
  source 1..20: mol_type = other DNA
acaccctgggccagaaggga

SEQ ID NO: 109620 - DNA, 20 bp, synthetic construct
  source 1..20: mol_type = other DNA
cacaccctgggccagaaggg

SEQ ID NO: 109621 - DNA, 20 bp, synthetic construct
  source 1..20: mol_type = other DNA
acacaccctgggccagaagg

SEQ ID NO: 109622 - DNA, 20 bp, synthetic construct
  source 1..20: mol_type = other DNA
gacacaccctgggccagaag

SEQ ID NO: 109623 - DNA, 20 bp, synthetic construct
  source 1..20: mol_type = other DNA
agacacaccctgggccagaa

SEQ ID NO: 109624 - DNA, 20 bp, synthetic construct
  source 1..20: mol_type = other DNA
tagacacaccctgggccaga

SEQ ID NO: 109625 - DNA, 20 bp, synthetic construct
  source 1..20: mol_type = other DNA
ctagacacaccctgggccag

SEQ ID NO: 109626 - DNA, 20 bp, synthetic construct
  source 1..20: mol_type = other DNA
tctagacacaccctgggcca

SEQ ID NO: 109627 - DNA, 20 bp, synthetic construct
  source 1..20: mol_type = other DNA
ttctagacacaccctgggcc

SEQ ID NO: 109628 - DNA, 20 bp, synthetic construct
  source 1..20: mol_type = other DNA
tttctagacacaccctgggc

SEQ ID NO: 109629 - DNA, 20 bp, synthetic construct
  source 1..20: mol_type = other DNA
atttctagacacaccctggg

SEQ ID NO: 109630 - DNA, 20 bp, synthetic construct
  source 1..20: mol_type = other DNA
catttctagacacaccctgg

SEQ ID NO: 109631 - DNA, 20 bp, synthetic construct
  source 1..20: mol_type = other DNA
gcatttctagacacaccctg

SEQ ID NO: 109632 - DNA, 20 bp, synthetic construct
  source 1..20: mol_type = other DNA
agcatttctagacacaccct

SEQ ID NO: 109633 - DNA, 20 bp, synthetic construct
  source 1..20: mol_type = other DNA
cagcatttctagacacaccc

SEQ ID NO: 109634 - DNA, 20 bp, synthetic construct
  source 1..20: mol_type = other DNA
gcagcatttctagacacacc

SEQ ID NO: 109635 - DNA, 20 bp, synthetic construct
  source 1..20: mol_type = other DNA
ggcagcatttctagacacac

SEQ ID NO: 109636 - DNA, 20 bp, synthetic construct
  source 1..20: mol_type = other DNA
gggcagcatttctagacaca

SEQ ID NO: 109637 - DNA, 20 bp, synthetic construct
  source 1..20: mol_type = other DNA
tgggcagcatttctagacac

SEQ ID NO: 109638 - DNA, 20 bp, synthetic construct
  source 1..20: mol_type = other DNA
ctgggcagcatttctagaca

SEQ ID NO: 109639 - DNA, 20 bp, synthetic construct
  source 1..20: mol_type = other DNA
cctgggcagcatttctagac

SEQ ID NO: 109640 - DNA, 20 bp, synthetic construct
  source 1..20: mol_type = other DNA
tcctgggcagcatttctaga

SEQ ID NO: 109641 - DNA, 20 bp, synthetic construct
  source 1..20: mol_type = other DNA
ctcctgggcagcatttctag

SEQ ID NO: 109642 - DNA, 20 bp, synthetic construct
  source 1..20: mol_type = other DNA
gctcctgggcagcatttcta

SEQ ID NO: 109643 - DNA, 20 bp, synthetic construct
  source 1..20: mol_type = other DNA
ggctcctgggcagcatttct

SEQ ID NO: 109644 - DNA, 20 bp, synthetic construct
  source 1..20: mol_type = other DNA
tggctcctgggcagcatttc

SEQ ID NO: 109645 - DNA, 20 bp, synthetic construct
  source 1..20: mol_type = other DNA
ctggctcctgggcagcattt

SEQ ID NO: 109646 - DNA, 20 bp, synthetic construct
  source 1..20: mol_type = other DNA
cctggctcctgggcagcatt

SEQ ID NO: 109647 - DNA, 20 bp, synthetic construct
  source 1..20: mol_type = other DNA
ccctggctcctgggcagcat

SEQ ID NO: 109648 - DNA, 20 bp, synthetic construct
  source 1..20: mol_type = other DNA
gccctggctcctgggcagca

SEQ ID NO: 109649 - DNA, 20 bp, synthetic construct
  source 1..20: mol_type = other DNA
ggccctggctcctgggcagc

SEQ ID NO: 109650 - DNA, 20 bp, synthetic construct
  source 1..20: mol_type = other DNA
aggccctggctcctgggcag

SEQ ID NO: 109651 - DNA, 20 bp, synthetic construct
  source 1..20: mol_type = other DNA
caggccctggctcctgggca

SEQ ID NO: 109652 - DNA, 20 bp, synthetic construct
  source 1..20: mol_type = other DNA
ccaggccctggctcctgggc

SEQ ID NO: 109653 - DNA, 20 bp, synthetic construct
  source 1..20: mol_type = other DNA
cccaggccctggctcctggg

SEQ ID NO: 109654 - DNA, 20 bp, synthetic construct
  source 1..20: mol_type = other DNA
tcccaggccctggctcctgg

SEQ ID NO: 109655 - DNA, 20 bp, synthetic construct
  source 1..20: mol_type = other DNA
atcccaggccctggctcctg

SEQ ID NO: 109656 - DNA, 20 bp, synthetic construct
  source 1..20: mol_type = other DNA
gatcccaggccctggctcct

SEQ ID NO: 109657 - DNA, 20 bp, synthetic construct
  source 1..20: mol_type = other DNA
cgatcccaggccctggctcc

SEQ ID NO: 109658 - DNA, 20 bp, synthetic construct
  source 1..20: mol_type = other DNA
ccgatcccaggccctggctc

SEQ ID NO: 109659 - DNA, 20 bp, synthetic construct
  source 1..20: mol_type = other DNA
cccgatcccaggccctggct

SEQ ID NO: 109660 - DNA, 20 bp, synthetic construct
  source 1..20: mol_type = other DNA
tcccgatcccaggccctggc

SEQ ID NO: 109661 - DNA, 20 bp, synthetic construct
  source 1..20: mol_type = other DNA
ctcccgatcccaggccctgg

SEQ ID NO: 109662 - DNA, 20 bp, synthetic construct
  source 1..20: mol_type = other DNA
gctcccgatcccaggccctg

SEQ ID NO: 109663 - DNA, 20 bp, synthetic construct
  source 1..20: mol_type = other DNA
agctcccgatcccaggccct

SEQ ID NO: 109664 - DNA, 20 bp, synthetic construct
  source 1..20: mol_type = other DNA
aagctcccgatcccaggccc

SEQ ID NO: 109665 - DNA, 20 bp, synthetic construct
  source 1..20: mol_type = other DNA
aaagctcccgatcccaggcc

SEQ ID NO: 109666 - DNA, 20 bp, synthetic construct
  source 1..20: mol_type = other DNA
taaagctcccgatcccaggc

SEQ ID NO: 109667 - DNA, 20 bp, synthetic construct
  source 1..20: mol_type = other DNA
ctaaagctcccgatcccagg

SEQ ID NO: 109668 - DNA, 20 bp, synthetic construct
  source 1..20: mol_type = other DNA
cctaaagctcccgatcccag

SEQ ID NO: 109669 - DNA, 20 bp, synthetic construct
  source 1..20: mol_type = other DNA
tcctaaagctcccgatccca

SEQ ID NO: 109670 - DNA, 20 bp, synthetic construct
  source 1..20: mol_type = other DNA
ttcctaaagctcccgatccc

SEQ ID NO: 109671 - DNA, 20 bp, synthetic construct
  source 1..20: mol_type = other DNA
attcctaaagctcccgatcc

SEQ ID NO: 109672 - DNA, 20 bp, synthetic construct
  source 1..20: mol_type = other DNA
gattcctaaagctcccgatc

SEQ ID NO: 109673 - DNA, 20 bp, synthetic construct
  source 1..20: mol_type = other DNA
agattcctaaagctcccgat

SEQ ID NO: 109674 - DNA, 20 bp, synthetic construct
  source 1..20: mol_type = other DNA
cagattcctaaagctcccga

SEQ ID NO: 109675 - DNA, 20 bp, synthetic construct
  source 1..20: mol_type = other DNA
gcagattcctaaagctcccg

SEQ ID NO: 109676 - DNA, 20 bp, synthetic construct
  source 1..20: mol_type = other DNA
agcagattcctaaagctccc

SEQ ID NO: 109677 - DNA, 20 bp, synthetic construct
  source 1..20: mol_type = other DNA
aagcagattcctaaagctcc

SEQ ID NO: 109678 - DNA, 20 bp, synthetic construct
  source 1..20: mol_type = other DNA
aaagcagattcctaaagctc

SEQ ID NO: 109679 - DNA, 20 bp, synthetic construct
  source 1..20: mol_type = other DNA
taaagcagattcctaaagct

SEQ ID NO: 109680 - DNA, 20 bp, synthetic construct
  source 1..20: mol_type = other DNA
ataaagcagattcctaaagc

SEQ ID NO: 109681 - DNA, 20 bp, synthetic construct
  source 1..20: mol_type = other DNA
aataaagcagattcctaaag

SEQ ID NO: 109682 - DNA, 20 bp, synthetic construct
  source 1..20: mol_type = other DNA
caataaagcagattcctaaa

SEQ ID NO: 109683 - DNA, 20 bp, synthetic construct
  source 1..20: mol_type = other DNA
acaataaagcagattcctaa

SEQ ID NO: 109684 - DNA, 20 bp, synthetic construct
  source 1..20: mol_type = other DNA
tacaataaagcagattccta

SEQ ID NO: 109685 - DNA, 20 bp, synthetic construct
  source 1..20: mol_type = other DNA
gtacaataaagcagattcct

SEQ ID NO: 109686 - DNA, 20 bp, synthetic construct
  source 1..20: mol_type = other DNA
agtacaataaagcagattcc

SEQ ID NO: 109687 - DNA, 20 bp, synthetic construct
  source 1..20: mol_type = other DNA
cagtacaataaagcagattc

SEQ ID NO: 109688 - DNA, 20 bp, synthetic construct
  source 1..20: mol_type = other DNA
ccagtacaataaagcagatt

SEQ ID NO: 109689 - DNA, 20 bp, synthetic construct
  source 1..20: mol_type = other DNA
cccagtacaataaagcagat

SEQ ID NO: 109690 - DNA, 20 bp, synthetic construct
  source 1..20: mol_type = other DNA
ccccagtacaataaagcaga

SEQ ID NO: 109691 - DNA, 20 bp, synthetic construct
  source 1..20: mol_type = other DNA
gccccagtacaataaagcag

SEQ ID NO: 109692 - DNA, 20 bp, synthetic construct
  source 1..20: mol_type = other DNA
agccccagtacaataaagca

SEQ ID NO: 109693 - DNA, 20 bp, synthetic construct
  source 1..20: mol_type = other DNA
cagccccagtacaataaagc

SEQ ID NO: 109694 - DNA, 20 bp, synthetic construct
  source 1..20: mol_type = other DNA
tcagccccagtacaataaag

SEQ ID NO: 109695 - DNA, 20 bp, synthetic construct
  source 1..20: mol_type = other DNA
ctcagccccagtacaataaa

SEQ ID NO: 109696 - DNA, 20 bp, synthetic construct
  source 1..20: mol_type = other DNA
gctcagccccagtacaataa

SEQ ID NO: 109697 - DNA, 20 bp, synthetic construct
  source 1..20: mol_type = other DNA
agctcagccccagtacaata

SEQ ID NO: 109698 - DNA, 20 bp, synthetic construct
  source 1..20: mol_type = other DNA
cagctcagccccagtacaat

SEQ ID NO: 109699 - DNA, 20 bp, synthetic construct
  source 1..20: mol_type = other DNA
ccagctcagccccagtacaa

SEQ ID NO: 109700 - DNA, 20 bp, synthetic construct
  source 1..20: mol_type = other DNA
gccagctcagccccagtaca

SEQ ID NO: 109701 - DNA, 20 bp, synthetic construct
  source 1..20: mol_type = other DNA
tgccagctcagccccagtac

SEQ ID NO: 109702 - DNA, 20 bp, synthetic construct
  source 1..20: mol_type = other DNA
gtgccagctcagccccagta

SEQ ID NO: 109703 - DNA, 20 bp, synthetic construct
  source 1..20: mol_type = other DNA
ggtgccagctcagccccagt

SEQ ID NO: 109704 - DNA, 20 bp, synthetic construct
  source 1..20: mol_type = other DNA
gggtgccagctcagccccag

SEQ ID NO: 109705 - DNA, 20 bp, synthetic construct
  source 1..20: mol_type = other DNA
tgggtgccagctcagcccca

SEQ ID NO: 109706 - DNA, 20 bp, synthetic construct
  source 1..20: mol_type = other DNA
gtgggtgccagctcagcccc

SEQ ID NO: 109707 - DNA, 20 bp, synthetic construct
  source 1..20: mol_type = other DNA
agtgggtgccagctcagccc

SEQ ID NO: 109708 - DNA, 20 bp, synthetic construct
  source 1..20: mol_type = other DNA
aagtgggtgccagctcagcc

SEQ ID NO: 109709 - DNA, 20 bp, synthetic construct
  source 1..20: mol_type = other DNA
caagtgggtgccagctcagc

SEQ ID NO: 109710 - DNA, 20 bp, synthetic construct
  source 1..20: mol_type = other DNA
gcaagtgggtgccagctcag

SEQ ID NO: 109711 - DNA, 20 bp, synthetic construct
  source 1..20: mol_type = other DNA
tgcaagtgggtgccagctca

SEQ ID NO: 109712 - DNA, 20 bp, synthetic construct
  source 1..20: mol_type = other DNA
ttgcaagtgggtgccagctc

SEQ ID NO: 109713 - DNA, 20 bp, synthetic construct
  source 1..20: mol_type = other DNA
cttgcaagtgggtgccagct

SEQ ID NO: 109714 - DNA, 20 bp, synthetic construct
  source 1..20: mol_type = other DNA
tcttgcaagtgggtgccagc

SEQ ID NO: 109715 - DNA, 20 bp, synthetic construct
  source 1..20: mol_type = other DNA
atcttgcaagtgggtgccag

SEQ ID NO: 109716 - DNA, 20 bp, synthetic construct
  source 1..20: mol_type = other DNA
tatcttgcaagtgggtgcca

SEQ ID NO: 109717 - DNA, 20 bp, synthetic construct
  source 1..20: mol_type = other DNA
ttatcttgcaagtgggtgcc

SEQ ID NO: 109718 - DNA, 20 bp, synthetic construct
  source 1..20: mol_type = other DNA
tttatcttgcaagtgggtgc

SEQ ID NO: 109719 - DNA, 20 bp, synthetic construct
  source 1..20: mol_type = other DNA
ctttatcttgcaagtgggtg

SEQ ID NO: 109720 - DNA, 20 bp, synthetic construct
  source 1..20: mol_type = other DNA
actttatcttgcaagtgggt

SEQ ID NO: 109721 - DNA, 20 bp, synthetic construct
  source 1..20: mol_type = other DNA
gactttatcttgcaagtggg

SEQ ID NO: 109722 - DNA, 20 bp, synthetic construct
  source 1..20: mol_type = other DNA
ggactttatcttgcaagtgg

SEQ ID NO: 109723 - DNA, 20 bp, synthetic construct
  source 1..20: mol_type = other DNA
aggactttatcttgcaagtg

SEQ ID NO: 109724 - DNA, 20 bp, synthetic construct
  source 1..20: mol_type = other DNA
aaggactttatcttgcaagt

SEQ ID NO: 109725 - DNA, 20 bp, synthetic construct
  source 1..20: mol_type = other DNA
aaaggactttatcttgcaag

SEQ ID NO: 109726 - DNA, 20 bp, synthetic construct
  source 1..20: mol_type = other DNA
aaaaggactttatcttgcaa

SEQ ID NO: 109727 - DNA, 20 bp, synthetic construct
  source 1..20: mol_type = other DNA
aaaaaggactttatcttgca

SEQ ID NO: 109728 - DNA, 20 bp, synthetic construct
  source 1..20: mol_type = other DNA
taaaaaggactttatcttgc

SEQ ID NO: 109729 - DNA, 20 bp, synthetic construct
  source 1..20: mol_type = other DNA
gtaaaaaggactttatcttg

SEQ ID NO: 109730 - DNA, 20 bp, synthetic construct
  source 1..20: mol_type = other DNA
agtaaaaaggactttatctt

SEQ ID NO: 109731 - DNA, 20 bp, synthetic construct
  source 1..20: mol_type = other DNA
gagtaaaaaggactttatct

SEQ ID NO: 109732 - DNA, 20 bp, synthetic construct
  source 1..20: mol_type = other DNA
agagtaaaaaggactttatc

SEQ ID NO: 109733 - DNA, 20 bp, synthetic construct
  source 1..20: mol_type = other DNA
aagagtaaaaaggactttat

SEQ ID NO: 109734 - DNA, 20 bp, synthetic construct
  source 1..20: mol_type = other DNA
gaagagtaaaaaggacttta

SEQ ID NO: 109735 - DNA, 20 bp, synthetic construct
  source 1..20: mol_type = other DNA
agaagagtaaaaaggacttt

SEQ ID NO: 109736 - DNA, 20 bp, synthetic construct
  source 1..20: mol_type = other DNA
gagaagagtaaaaaggactt

SEQ ID NO: 109737 - DNA, 20 bp, synthetic construct
  source 1..20: mol_type = other DNA
agagaagagtaaaaaggact

SEQ ID NO: 109738 - DNA, 20 bp, synthetic construct
  source 1..20: mol_type = other DNA
gagagaagagtaaaaaggac

SEQ ID NO: 109739 - DNA, 20 bp, synthetic construct
  source 1..20: mol_type = other DNA
tgagagaagagtaaaaagga

SEQ ID NO: 109740 - DNA, 20 bp, synthetic construct
  source 1..20: mol_type = other DNA
gtgagagaagagtaaaaagg

SEQ ID NO: 109741 - DNA, 20 bp, synthetic construct
  source 1..20: mol_type = other DNA
ggtgagagaagagtaaaaag

SEQ ID NO: 109742 - DNA, 20 bp, synthetic construct
  source 1..20: mol_type = other DNA
aggtgagagaagagtaaaaa

SEQ ID NO: 109743 - DNA, 20 bp, synthetic construct
  source 1..20: mol_type = other DNA
gaggtgagagaagagtaaaa

SEQ ID NO: 109744 - DNA, 20 bp, synthetic construct
  source 1..20: mol_type = other DNA
tgaggtgagagaagagtaaa

SEQ ID NO: 109745 - DNA, 20 bp, synthetic construct
  source 1..20: mol_type = other DNA
ttgaggtgagagaagagtaa

SEQ ID NO: 109746 - DNA, 20 bp, synthetic construct
  source 1..20: mol_type = other DNA
cttgaggtgagagaagagta

SEQ ID NO: 109747 - DNA, 20 bp, synthetic construct
  source 1..20: mol_type = other DNA
gcttgaggtgagagaagagt

SEQ ID NO: 109748 - DNA, 20 bp, synthetic construct
  source 1..20: mol_type = other DNA
tgcttgaggtgagagaagag

SEQ ID NO: 109749 - DNA, 20 bp, synthetic construct
  source 1..20: mol_type = other DNA
ctgcttgaggtgagagaaga

SEQ ID NO: 109750 - DNA, 20 bp, synthetic construct
  source 1..20: mol_type = other DNA
cctgcttgaggtgagagaag

SEQ ID NO: 109751 - DNA, 20 bp, synthetic construct
  source 1..20: mol_type = other DNA
acctgcttgaggtgagagaa

SEQ ID NO: 109752 - DNA, 20 bp, synthetic construct
  source 1..20: mol_type = other DNA
cacctgcttgaggtgagaga

SEQ ID NO: 109753 - DNA, 20 bp, synthetic construct
  source 1..20: mol_type = other DNA
ccacctgcttgaggtgagag

SEQ ID NO: 109754 - DNA, 20 bp, synthetic construct
  source 1..20: mol_type = other DNA
cccacctgcttgaggtgaga

SEQ ID NO: 109755 - DNA, 20 bp, synthetic construct
  source 1..20: mol_type = other DNA
acccacctgcttgaggtgag

SEQ ID NO: 109756 - DNA, 20 bp, synthetic construct
  source 1..20: mol_type = other DNA
gacccacctgcttgaggtga

SEQ ID NO: 109757 - DNA, 20 bp, synthetic construct
  source 1..20: mol_type = other DNA
agacccacctgcttgaggtg

SEQ ID NO: 109758 - DNA, 20 bp, synthetic construct
  source 1..20: mol_type = other DNA
gagacccacctgcttgaggt

SEQ ID NO: 109759 - DNA, 20 bp, synthetic construct
  source 1..20: mol_type = other DNA
ggagacccacctgcttgagg

SEQ ID NO: 109760 - DNA, 20 bp, synthetic construct
  source 1..20: mol_type = other DNA
gggagacccacctgcttgag

SEQ ID NO: 109761 - DNA, 20 bp, synthetic construct
  source 1..20: mol_type = other DNA
ggggagacccacctgcttga

SEQ ID NO: 109762 - DNA, 20 bp, synthetic construct
  source 1..20: mol_type = other DNA
tggggagacccacctgcttg

SEQ ID NO: 109763 - DNA, 20 bp, synthetic construct
  source 1..20: mol_type = other DNA
atggggagacccacctgctt

SEQ ID NO: 109764 - DNA, 20 bp, synthetic construct
  source 1..20: mol_type = other DNA
catggggagacccacctgct

SEQ ID NO: 109765 - DNA, 20 bp, synthetic construct
  source 1..20: mol_type = other DNA
ccatggggagacccacctgc

SEQ ID NO: 109766 - DNA, 20 bp, synthetic construct
  source 1..20: mol_type = other DNA
tccatggggagacccacctg

SEQ ID NO: 109767 - DNA, 20 bp, synthetic construct
  source 1..20: mol_type = other DNA
gtccatggggagacccacct

SEQ ID NO: 109768 - DNA, 20 bp, synthetic construct
  source 1..20: mol_type = other DNA
tgtccatggggagacccacc

SEQ ID NO: 109769 - DNA, 20 bp, synthetic construct
  source 1..20: mol_type = other DNA
gtgtccatggggagacccac

SEQ ID NO: 109770 - DNA, 20 bp, synthetic construct
  source 1..20: mol_type = other DNA
ggtgtccatggggagaccca

SEQ ID NO: 109771 - DNA, 20 bp, synthetic construct
  source 1..20: mol_type = other DNA
tggtgtccatggggagaccc

SEQ ID NO: 109772 - DNA, 20 bp, synthetic construct
  source 1..20: mol_type = other DNA
gtggtgtccatggggagacc

SEQ ID NO: 109773 - DNA, 20 bp, synthetic construct
  source 1..20: mol_type = other DNA
tgtggtgtccatggggagac

SEQ ID NO: 109774 - DNA, 20 bp, synthetic construct
  source 1..20: mol_type = other DNA
ctgtggtgtccatggggaga

SEQ ID NO: 109775 - DNA, 20 bp, synthetic construct
  source 1..20: mol_type = other DNA
gctgtggtgtccatggggag

SEQ ID NO: 109776 - DNA, 20 bp, synthetic construct
  source 1..20: mol_type = other DNA
agctgtggtgtccatgggga

SEQ ID NO: 109777 - DNA, 20 bp, synthetic construct
  source 1..20: mol_type = other DNA
cagctgtggtgtccatgggg

SEQ ID NO: 109778 - DNA, 20 bp, synthetic construct
  source 1..20: mol_type = other DNA
acagctgtggtgtccatggg

SEQ ID NO: 109779 - DNA, 20 bp, synthetic construct
  source 1..20: mol_type = other DNA
cacagctgtggtgtccatgg

SEQ ID NO: 109780 - DNA, 20 bp, synthetic construct
  source 1..20: mol_type = other DNA
tcacagctgtggtgtccatg

SEQ ID NO: 109781 - DNA, 20 bp, synthetic construct
  source 1..20: mol_type = other DNA
ttcacagctgtggtgtccat

SEQ ID NO: 109782 - DNA, 20 bp, synthetic construct
  source 1..20: mol_type = other DNA
attcacagctgtggtgtcca

SEQ ID NO: 109783 - DNA, 20 bp, synthetic construct
  source 1..20: mol_type = other DNA
cattcacagctgtggtgtcc

SEQ ID NO: 109784 - DNA, 20 bp, synthetic construct
  source 1..20: mol_type = other DNA
acattcacagctgtggtgtc

SEQ ID NO: 109785 - DNA, 20 bp, synthetic construct
  source 1..20: mol_type = other DNA
cacattcacagctgtggtgt

SEQ ID NO: 109786 - DNA, 20 bp, synthetic construct
  source 1..20: mol_type = other DNA
gcacattcacagctgtggtg

SEQ ID NO: 109787 - DNA, 20 bp, synthetic construct
  source 1..20: mol_type = other DNA
cgcacattcacagctgtggt

SEQ ID NO: 109788 - DNA, 20 bp, synthetic construct
  source 1..20: mol_type = other DNA
ccgcacattcacagctgtgg

SEQ ID NO: 109789 - DNA, 20 bp, synthetic construct
  source 1..20: mol_type = other DNA
cccgcacattcacagctgtg

SEQ ID NO: 109790 - DNA, 20 bp, synthetic construct
  source 1..20: mol_type = other DNA
ccccgcacattcacagctgt

SEQ ID NO: 109791 - DNA, 20 bp, synthetic construct
  source 1..20: mol_type = other DNA
accccgcacattcacagctg

SEQ ID NO: 109792 - DNA, 20 bp, synthetic construct
  source 1..20: mol_type = other DNA
gaccccgcacattcacagct

SEQ ID NO: 109793 - DNA, 20 bp, synthetic construct
  source 1..20: mol_type = other DNA
tgaccccgcacattcacagc

SEQ ID NO: 109794 - DNA, 20 bp, synthetic construct
  source 1..20: mol_type = other DNA
atgaccccgcacattcacag

SEQ ID NO: 109795 - DNA, 20 bp, synthetic construct
  source 1..20: mol_type = other DNA
tatgaccccgcacattcaca

SEQ ID NO: 109796 - DNA, 20 bp, synthetic construct
  source 1..20: mol_type = other DNA
atatgaccccgcacattcac

SEQ ID NO: 109797 - DNA, 20 bp, synthetic construct
  source 1..20: mol_type = other DNA
gatatgaccccgcacattca

SEQ ID NO: 109798 - DNA, 20 bp, synthetic construct
  source 1..20: mol_type = other DNA
agatatgaccccgcacattc

SEQ ID NO: 109799 - DNA, 20 bp, synthetic construct
  source 1..20: mol_type = other DNA
cagatatgaccccgcacatt

SEQ ID NO: 109800 - DNA, 20 bp, synthetic construct
  source 1..20: mol_type = other DNA
tcagatatgaccccgcacat

SEQ ID NO: 109801 - DNA, 20 bp, synthetic construct
  source 1..20: mol_type = other DNA
ttcagatatgaccccgcaca

SEQ ID NO: 109802 - DNA, 20 bp, synthetic construct
  source 1..20: mol_type = other DNA
cttcagatatgaccccgcac

SEQ ID NO: 109803 - DNA, 20 bp, synthetic construct
  source 1..20: mol_type = other DNA
gcttcagatatgaccccgca

SEQ ID NO: 109804 - DNA, 20 bp, synthetic construct
  source 1..20: mol_type = other DNA
agcttcagatatgaccccgc

SEQ ID NO: 109805 - DNA, 20 bp, synthetic construct
  source 1..20: mol_type = other DNA
cagcttcagatatgaccccg

SEQ ID NO: 109806 - DNA, 20 bp, synthetic construct
  source 1..20: mol_type = other DNA
ccagcttcagatatgacccc

SEQ ID NO: 109807 - DNA, 20 bp, synthetic construct
  source 1..20: mol_type = other DNA
gccagcttcagatatgaccc

SEQ ID NO: 109808 - DNA, 20 bp, synthetic construct
  source 1..20: mol_type = other DNA
tgccagcttcagatatgacc

SEQ ID NO: 109809 - DNA, 20 bp, synthetic construct
  source 1..20: mol_type = other DNA
gtgccagcttcagatatgac

SEQ ID NO: 109810 - DNA, 20 bp, synthetic construct
  source 1..20: mol_type = other DNA
tgtgccagcttcagatatga

SEQ ID NO: 109811 - DNA, 20 bp, synthetic construct
  source 1..20: mol_type = other DNA
ttgtgccagcttcagatatg

SEQ ID NO: 109812 - DNA, 20 bp, synthetic construct
  source 1..20: mol_type = other DNA
attgtgccagcttcagatat

SEQ ID NO: 109813 - DNA, 20 bp, synthetic construct
  source 1..20: mol_type = other DNA
tattgtgccagcttcagata

SEQ ID NO: 109814 - DNA, 20 bp, synthetic construct
  source 1..20: mol_type = other DNA
gtattgtgccagcttcagat

SEQ ID NO: 109815 - DNA, 20 bp, synthetic construct
  source 1..20: mol_type = other DNA
cgtattgtgccagcttcaga

SEQ ID NO: 109816 - DNA, 20 bp, synthetic construct
  source 1..20: mol_type = other DNA
tcgtattgtgccagcttcag

SEQ ID NO: 109817 - DNA, 20 bp, synthetic construct
  source 1..20: mol_type = other DNA
gtcgtattgtgccagcttca

SEQ ID NO: 109818 - DNA, 20 bp, synthetic construct
  source 1..20: mol_type = other DNA
tgtcgtattgtgccagcttc

SEQ ID NO: 109819 - DNA, 20 bp, synthetic construct
  source 1..20: mol_type = other DNA
atgtcgtattgtgccagctt

SEQ ID NO: 109820 - DNA, 20 bp, synthetic construct
  source 1..20: mol_type = other DNA
catgtcgtattgtgccagct

SEQ ID NO: 109821 - DNA, 20 bp, synthetic construct
  source 1..20: mol_type = other DNA
ccatgtcgtattgtgccagc

SEQ ID NO: 109822 - DNA, 20 bp, synthetic construct
  source 1..20: mol_type = other DNA
gccatgtcgtattgtgccag

SEQ ID NO: 109823 - DNA, 20 bp, synthetic construct
  source 1..20: mol_type = other DNA
tgccatgtcgtattgtgcca

SEQ ID NO: 109824 - DNA, 20 bp, synthetic construct
  source 1..20: mol_type = other DNA
gtgccatgtcgtattgtgcc

SEQ ID NO: 109825 - DNA, 20 bp, synthetic construct
  source 1..20: mol_type = other DNA
ggtgccatgtcgtattgtgc

SEQ ID NO: 109826 - DNA, 20 bp, synthetic construct
  source 1..20: mol_type = other DNA
aggtgccatgtcgtattgtg

SEQ ID NO: 109827 - DNA, 20 bp, synthetic construct
  source 1..20: mol_type = other DNA
aaggtgccatgtcgtattgt

SEQ ID NO: 109828 - DNA, 20 bp, synthetic construct
  source 1..20: mol_type = other DNA
caaggtgccatgtcgtattg

SEQ ID NO: 109829 - DNA, 20 bp, synthetic construct
  source 1..20: mol_type = other DNA
acaaggtgccatgtcgtatt

SEQ ID NO: 109830 - DNA, 20 bp, synthetic construct
  source 1..20: mol_type = other DNA
aacaaggtgccatgtcgtat

SEQ ID NO: 109831 - DNA, 20 bp, synthetic construct
  source 1..20: mol_type = other DNA
aaacaaggtgccatgtcgta

SEQ ID NO: 109832 - DNA, 20 bp, synthetic construct
  source 1..20: mol_type = other DNA
aaaacaaggtgccatgtcgt

SEQ ID NO: 109833 - DNA, 20 bp, synthetic construct
  source 1..20: mol_type = other DNA
aaaaacaaggtgccatgtcg

SEQ ID NO: 109834 - DNA, 20 bp, synthetic construct
  source 1..20: mol_type = other DNA
aaaaaacaaggtgccatgtc

SEQ ID NO: 109835 - DNA, 20 bp, synthetic construct
  source 1..20: mol_type = other DNA
taaaaaacaaggtgccatgt

SEQ ID NO: 109836 - DNA, 20 bp, synthetic construct
  source 1..20: mol_type = other DNA
ataaaaaacaaggtgccatg

SEQ ID NO: 109837 - DNA, 20 bp, synthetic construct
  source 1..20: mol_type = other DNA
aataaaaaacaaggtgccat

SEQ ID NO: 109838 - DNA, 20 bp, synthetic construct
  source 1..20: mol_type = other DNA
gaataaaaaacaaggtgcca

SEQ ID NO: 109839 - DNA, 20 bp, synthetic construct
  source 1..20: mol_type = other DNA
tgaataaaaaacaaggtgcc

SEQ ID NO: 109840 - DNA, 20 bp, synthetic construct
  source 1..20: mol_type = other DNA
ttgaataaaaaacaaggtgc

SEQ ID NO: 109841 - DNA, 20 bp, synthetic construct
  source 1..20: mol_type = other DNA
cttgaataaaaaacaaggtg

SEQ ID NO: 109842 - DNA, 20 bp, synthetic construct
  source 1..20: mol_type = other DNA
ccttgaataaaaaacaaggt

SEQ ID NO: 109843 - DNA, 20 bp, synthetic construct
  source 1..20: mol_type = other DNA
gccttgaataaaaaacaagg

SEQ ID NO: 109844 - DNA, 20 bp, synthetic construct
  source 1..20: mol_type = other DNA
tgccttgaataaaaaacaag

SEQ ID NO: 109845 - DNA, 20 bp, synthetic construct
  source 1..20: mol_type = other DNA
gtgccttgaataaaaaacaa

SEQ ID NO: 109846 - DNA, 20 bp, synthetic construct
  source 1..20: mol_type = other DNA
tgtgccttgaataaaaaaca

SEQ ID NO: 109847 - DNA, 20 bp, synthetic construct
  source 1..20: mol_type = other DNA
ttgtgccttgaataaaaaac

SEQ ID NO: 109848 - DNA, 20 bp, synthetic construct
  source 1..20: mol_type = other DNA
cttgtgccttgaataaaaaa

SEQ ID NO: 109849 - DNA, 20 bp, synthetic construct
  source 1..20: mol_type = other DNA
ccttgtgccttgaataaaaa

SEQ ID NO: 109850 - DNA, 20 bp, synthetic construct
  source 1..20: mol_type = other DNA
cccttgtgccttgaataaaa

SEQ ID NO: 109851 - DNA, 20 bp, synthetic construct
  source 1..20: mol_type = other DNA
gcccttgtgccttgaataaa

SEQ ID NO: 109852 - DNA, 20 bp, synthetic construct
  source 1..20: mol_type = other DNA
agcccttgtgccttgaataa

SEQ ID NO: 109853 - DNA, 20 bp, synthetic construct
  source 1..20: mol_type = other DNA
gagcccttgtgccttgaata

SEQ ID NO: 109854 - DNA, 20 bp, synthetic construct
  source 1..20: mol_type = other DNA
agagcccttgtgccttgaat

SEQ ID NO: 109855 - DNA, 20 bp, synthetic construct
  source 1..20: mol_type = other DNA
aagagcccttgtgccttgaa

SEQ ID NO: 109856 - DNA, 20 bp, synthetic construct
  source 1..20: mol_type = other DNA
aaagagcccttgtgccttga

SEQ ID NO: 109857 - DNA, 20 bp, synthetic construct
  source 1..20: mol_type = other DNA
taaagagcccttgtgccttg

SEQ ID NO: 109858 - DNA, 20 bp, synthetic construct
  source 1..20: mol_type = other DNA
ctaaagagcccttgtgcctt

SEQ ID NO: 109859 - DNA, 20 bp, synthetic construct
  source 1..20: mol_type = other DNA
actaaagagcccttgtgcct

SEQ ID NO: 109860 - DNA, 20 bp, synthetic construct
  source 1..20: mol_type = other DNA
gactaaagagcccttgtgcc

SEQ ID NO: 109861 - DNA, 20 bp, synthetic construct
  source 1..20: mol_type = other DNA
tgactaaagagcccttgtgc

SEQ ID NO: 109862 - DNA, 20 bp, synthetic construct
  source 1..20: mol_type = other DNA
ctgactaaagagcccttgtg

SEQ ID NO: 109863 - DNA, 20 bp, synthetic construct
  source 1..20: mol_type = other DNA
gctgactaaagagcccttgt

SEQ ID NO: 109864 - DNA, 20 bp, synthetic construct
  source 1..20: mol_type = other DNA
agctgactaaagagcccttg

SEQ ID NO: 109865 - DNA, 20 bp, synthetic construct
  source 1..20: mol_type = other DNA
cagctgactaaagagccctt

SEQ ID NO: 109866 - DNA, 20 bp, synthetic construct
  source 1..20: mol_type = other DNA
ccagctgactaaagagccct

SEQ ID NO: 109867 - DNA, 20 bp, synthetic construct
  source 1..20: mol_type = other DNA
accagctgactaaagagccc

SEQ ID NO: 109868 - DNA, 20 bp, synthetic construct
  source 1..20: mol_type = other DNA
caccagctgactaaagagcc

SEQ ID NO: 109869 - DNA, 20 bp, synthetic construct
  source 1..20: mol_type = other DNA
ccaccagctgactaaagagc

SEQ ID NO: 109870 - DNA, 20 bp, synthetic construct
  source 1..20: mol_type = other DNA
accaccagctgactaaagag

SEQ ID NO: 109871 - DNA, 20 bp, synthetic construct
  source 1..20: mol_type = other DNA
caccaccagctgactaaaga

SEQ ID NO: 109872 - DNA, 20 bp, synthetic construct
  source 1..20: mol_type = other DNA
tcaccaccagctgactaaag

SEQ ID NO: 109873 - DNA, 20 bp, synthetic construct
  source 1..20: mol_type = other DNA
ttcaccaccagctgactaaa

SEQ ID NO: 109874 - DNA, 20 bp, synthetic construct
  source 1..20: mol_type = other DNA
attcaccaccagctgactaa

SEQ ID NO: 109875 - DNA, 20 bp, synthetic construct
  source 1..20: mol_type = other DNA
gattcaccaccagctgacta

SEQ ID NO: 109876 - DNA, 20 bp, synthetic construct
  source 1..20: mol_type = other DNA
ggattcaccaccagctgact

SEQ ID NO: 109877 - DNA, 20 bp, synthetic construct
  source 1..20: mol_type = other DNA
aggattcaccaccagctgac

SEQ ID NO: 109878 - DNA, 20 bp, synthetic construct
  source 1..20: mol_type = other DNA
taggattcaccaccagctga

SEQ ID NO: 109879 - DNA, 20 bp, synthetic construct
  source 1..20: mol_type = other DNA
gtaggattcaccaccagctg

SEQ ID NO: 109880 - DNA, 20 bp, synthetic construct
  source 1..20: mol_type = other DNA
agtaggattcaccaccagct

SEQ ID NO: 109881 - DNA, 20 bp, synthetic construct
  source 1..20: mol_type = other DNA
tagtaggattcaccaccagc

SEQ ID NO: 109882 - DNA, 20 bp, synthetic construct
  source 1..20: mol_type = other DNA
ctagtaggattcaccaccag

SEQ ID NO: 109883 - DNA, 20 bp, synthetic construct
  source 1..20: mol_type = other DNA
cctagtaggattcaccacca

SEQ ID NO: 109884 - DNA, 20 bp, synthetic construct
  source 1..20: mol_type = other DNA
tcctagtaggattcaccacc

SEQ ID NO: 109885 - DNA, 20 bp, synthetic construct
  source 1..20: mol_type = other DNA
gtcctagtaggattcaccac

SEQ ID NO: 109886 - DNA, 20 bp, synthetic construct
  source 1..20: mol_type = other DNA
agtcctagtaggattcacca

SEQ ID NO: 109887 - DNA, 20 bp, synthetic construct
  source 1..20: mol_type = other DNA
tagtcctagtaggattcacc

SEQ ID NO: 109888 - DNA, 20 bp, synthetic construct
  source 1..20: mol_type = other DNA
ctagtcctagtaggattcac

SEQ ID NO: 109889 - DNA, 20 bp, synthetic construct
  source 1..20: mol_type = other DNA
cctagtcctagtaggattca

SEQ ID NO: 109890 - DNA, 20 bp, synthetic construct
  source 1..20: mol_type = other DNA
acctagtcctagtaggattc

SEQ ID NO: 109891 - DNA, 20 bp, synthetic construct
  source 1..20: mol_type = other DNA
tacctagtcctagtaggatt

SEQ ID NO: 109892 - DNA, 20 bp, synthetic construct
  source 1..20: mol_type = other DNA
atacctagtcctagtaggat

SEQ ID NO: 109893 - DNA, 20 bp, synthetic construct
  source 1..20: mol_type = other DNA
aatacctagtcctagtagga

SEQ ID NO: 109894 - DNA, 20 bp, synthetic construct
  source 1..20: mol_type = other DNA
aaatacctagtcctagtagg

SEQ ID NO: 109895 - DNA, 20 bp, synthetic construct
  source 1..20: mol_type = other DNA
gaaatacctagtcctagtag

SEQ ID NO: 109896 - DNA, 20 bp, synthetic construct
  source 1..20: mol_type = other DNA
ggaaatacctagtcctagta

SEQ ID NO: 109897 - DNA, 20 bp, synthetic construct
  source 1..20: mol_type = other DNA
gggaaatacctagtcctagt

SEQ ID NO: 109898 - DNA, 20 bp, synthetic construct
  source 1..20: mol_type = other DNA
agggaaatacctagtcctag

SEQ ID NO: 109899 - DNA, 20 bp, synthetic construct
  source 1..20: mol_type = other DNA
aagggaaatacctagtccta

SEQ ID NO: 109900 - DNA, 20 bp, synthetic construct
  source 1..20: mol_type = other DNA
gaagggaaatacctagtcct

SEQ ID NO: 109901 - DNA, 20 bp, synthetic construct
  source 1..20: mol_type = other DNA
tgaagggaaatacctagtcc

SEQ ID NO: 109902 - DNA, 20 bp, synthetic construct
  source 1..20: mol_type = other DNA
ttgaagggaaatacctagtc

SEQ ID NO: 109903 - DNA, 20 bp, synthetic construct
  source 1..20: mol_type = other DNA
cttgaagggaaatacctagt

SEQ ID NO: 109904 - DNA, 20 bp, synthetic construct
  source 1..20: mol_type = other DNA
ccttgaagggaaatacctag

SEQ ID NO: 109905 - DNA, 20 bp, synthetic construct
  source 1..20: mol_type = other DNA
gccttgaagggaaataccta

SEQ ID NO: 109906 - DNA, 20 bp, synthetic construct
  source 1..20: mol_type = other DNA
tgccttgaagggaaatacct

SEQ ID NO: 109907 - DNA, 20 bp, synthetic construct
  source 1..20: mol_type = other DNA
ttgccttgaagggaaatacc

SEQ ID NO: 109908 - DNA, 20 bp, synthetic construct
  source 1..20: mol_type = other DNA
attgccttgaagggaaatac

SEQ ID NO: 109909 - DNA, 20 bp, synthetic construct
  source 1..20: mol_type = other DNA
cattgccttgaagggaaata

SEQ ID NO: 109910 - DNA, 20 bp, synthetic construct
  source 1..20: mol_type = other DNA
ccattgccttgaagggaaat

SEQ ID NO: 109911 - DNA, 20 bp, synthetic construct
  source 1..20: mol_type = other DNA
cccattgccttgaagggaaa

SEQ ID NO: 109912 - DNA, 20 bp, synthetic construct
  source 1..20: mol_type = other DNA
acccattgccttgaagggaa

SEQ ID NO: 109913 - DNA, 20 bp, synthetic construct
  source 1..20: mol_type = other DNA
aacccattgccttgaaggga

SEQ ID NO: 109914 - DNA, 20 bp, synthetic construct
  source 1..20: mol_type = other DNA
gaacccattgccttgaaggg

SEQ ID NO: 109915 - DNA, 20 bp, synthetic construct
  source 1..20: mol_type = other DNA
ggaacccattgccttgaagg

SEQ ID NO: 109916 - DNA, 20 bp, synthetic construct
  source 1..20: mol_type = other DNA
gggaacccattgccttgaag

SEQ ID NO: 109917 - DNA, 20 bp, synthetic construct
  source 1..20: mol_type = other DNA
agggaacccattgccttgaa

SEQ ID NO: 109918 - DNA, 20 bp, synthetic construct
  source 1..20: mol_type = other DNA
aagggaacccattgccttga

SEQ ID NO: 109919 - DNA, 20 bp, synthetic construct
  source 1..20: mol_type = other DNA
gaagggaacccattgccttg

SEQ ID NO: 109920 - DNA, 20 bp, synthetic construct
  source 1..20: mol_type = other DNA
agaagggaacccattgcctt

SEQ ID NO: 109921 - DNA, 20 bp, synthetic construct
  source 1..20: mol_type = other DNA
cagaagggaacccattgcct

SEQ ID NO: 109922 - DNA, 20 bp, synthetic construct
  source 1..20: mol_type = other DNA
ccagaagggaacccattgcc

SEQ ID NO: 109923 - DNA, 20 bp, synthetic construct
  source 1..20: mol_type = other DNA
accagaagggaacccattgc

SEQ ID NO: 109924 - DNA, 20 bp, synthetic construct
  source 1..20: mol_type = other DNA
gaccagaagggaacccattg

SEQ ID NO: 109925 - DNA, 20 bp, synthetic construct
  source 1..20: mol_type = other DNA
ggaccagaagggaacccatt

SEQ ID NO: 109926 - DNA, 20 bp, synthetic construct
  source 1..20: mol_type = other DNA
tggaccagaagggaacccat

SEQ ID NO: 109927 - DNA, 20 bp, synthetic construct
  source 1..20: mol_type = other DNA
ctggaccagaagggaaccca

SEQ ID NO: 109928 - DNA, 20 bp, synthetic construct
  source 1..20: mol_type = other DNA
tctggaccagaagggaaccc

SEQ ID NO: 109929 - DNA, 20 bp, synthetic construct
  source 1..20: mol_type = other DNA
ttctggaccagaagggaacc

SEQ ID NO: 109930 - DNA, 20 bp, synthetic construct
  source 1..20: mol_type = other DNA
attctggaccagaagggaac

SEQ ID NO: 109931 - DNA, 20 bp, synthetic construct
  source 1..20: mol_type = other DNA
tattctggaccagaagggaa

SEQ ID NO: 109932 - DNA, 20 bp, synthetic construct
  source 1..20: mol_type = other DNA
atattctggaccagaaggga

SEQ ID NO: 109933 - DNA, 20 bp, synthetic construct
  source 1..20: mol_type = other DNA
catattctggaccagaaggg

SEQ ID NO: 109934 - DNA, 20 bp, synthetic construct
  source 1..20: mol_type = other DNA
acatattctggaccagaagg

SEQ ID NO: 109935 - DNA, 20 bp, synthetic construct
  source 1..20: mol_type = other DNA
gacatattctggaccagaag

SEQ ID NO: 109936 - DNA, 20 bp, synthetic construct
  source 1..20: mol_type = other DNA
agacatattctggaccagaa

SEQ ID NO: 109937 - DNA, 20 bp, synthetic construct
  source 1..20: mol_type = other DNA
tagacatattctggaccaga

SEQ ID NO: 109938 - DNA, 20 bp, synthetic construct
  source 1..20: mol_type = other DNA
ctagacatattctggaccag

SEQ ID NO: 109939 - DNA, 20 bp, synthetic construct
  source 1..20: mol_type = other DNA
tctagacatattctggacca

SEQ ID NO: 109940 - DNA, 20 bp, synthetic construct
  source 1..20: mol_type = other DNA
ttctagacatattctggacc

SEQ ID NO: 109941 - DNA, 20 bp, synthetic construct
  source 1..20: mol_type = other DNA
tttctagacatattctggac

SEQ ID NO: 109942 - DNA, 20 bp, synthetic construct
  source 1..20: mol_type = other DNA
atttctagacatattctgga

SEQ ID NO: 109943 - DNA, 20 bp, synthetic construct
  source 1..20: mol_type = other DNA
catttctagacatattctgg

SEQ ID NO: 109944 - DNA, 20 bp, synthetic construct
  source 1..20: mol_type = other DNA
acatttctagacatattctg

SEQ ID NO: 109945 - DNA, 20 bp, synthetic construct
  source 1..20: mol_type = other DNA
gacatttctagacatattct

SEQ ID NO: 109946 - DNA, 20 bp, synthetic construct
  source 1..20: mol_type = other DNA
tgacatttctagacatattc

SEQ ID NO: 109947 - DNA, 20 bp, synthetic construct
  source 1..20: mol_type = other DNA
atgacatttctagacatatt

SEQ ID NO: 109948 - DNA, 20 bp, synthetic construct
  source 1..20: mol_type = other DNA
gatgacatttctagacatat

SEQ ID NO: 109949 - DNA, 20 bp, synthetic construct
  source 1..20: mol_type = other DNA
agatgacatttctagacata

SEQ ID NO: 109950 - DNA, 20 bp, synthetic construct
  source 1..20: mol_type = other DNA
cagatgacatttctagacat

SEQ ID NO: 109951 - DNA, 20 bp, synthetic construct
  source 1..20: mol_type = other DNA
ccagatgacatttctagaca

SEQ ID NO: 109952 - DNA, 20 bp, synthetic construct
  source 1..20: mol_type = other DNA
cccagatgacatttctagac

SEQ ID NO: 109953 - DNA, 20 bp, synthetic construct
  source 1..20: mol_type = other DNA
tcccagatgacatttctaga

SEQ ID NO: 109954 - DNA, 20 bp, synthetic construct
  source 1..20: mol_type = other DNA
ctcccagatgacatttctag

SEQ ID NO: 109955 - DNA, 20 bp, synthetic construct
  source 1..20: mol_type = other DNA
gctcccagatgacatttcta

SEQ ID NO: 109956 - DNA, 20 bp, synthetic construct
  source 1..20: mol_type = other DNA
agctcccagatgacatttct

SEQ ID NO: 109957 - DNA, 20 bp, synthetic construct
  source 1..20: mol_type = other DNA
tagctcccagatgacatttc

SEQ ID NO: 109958 - DNA, 20 bp, synthetic construct
  source 1..20: mol_type = other DNA
atagctcccagatgacattt

SEQ ID NO: 109959 - DNA, 20 bp, synthetic construct
  source 1..20: mol_type = other DNA
catagctcccagatgacatt

SEQ ID NO: 109960 - DNA, 20 bp, synthetic construct
  source 1..20: mol_type = other DNA
ccatagctcccagatgacat

SEQ ID NO: 109961 - DNA, 20 bp, synthetic construct
  source 1..20: mol_type = other DNA
gccatagctcccagatgaca

SEQ ID NO: 109962 - DNA, 20 bp, synthetic construct
  source 1..20: mol_type = other DNA
ggccatagctcccagatgac

SEQ ID NO: 109963 - DNA, 20 bp, synthetic construct
  source 1..20: mol_type = other DNA
aggccatagctcccagatga

SEQ ID NO: 109964 - DNA, 20 bp, synthetic construct
  source 1..20: mol_type = other DNA
taggccatagctcccagatg

SEQ ID NO: 109965 - DNA, 20 bp, synthetic construct
  source 1..20: mol_type = other DNA
ctaggccatagctcccagat

SEQ ID NO: 109966 - DNA, 20 bp, synthetic construct
  source 1..20: mol_type = other DNA
tctaggccatagctcccaga

SEQ ID NO: 109967 - DNA, 20 bp, synthetic construct
  source 1..20: mol_type = other DNA
ttctaggccatagctcccag

SEQ ID NO: 109968 - DNA, 20 bp, synthetic construct
  source 1..20: mol_type = other DNA
attctaggccatagctccca

SEQ ID NO: 109969 - DNA, 20 bp, synthetic construct
  source 1..20: mol_type = other DNA
aattctaggccatagctccc

SEQ ID NO: 109970 - DNA, 20 bp, synthetic construct
  source 1..20: mol_type = other DNA
caattctaggccatagctcc

SEQ ID NO: 109971 - DNA, 20 bp, synthetic construct
  source 1..20: mol_type = other DNA
tcaattctaggccatagctc

SEQ ID NO: 109972 - DNA, 20 bp, synthetic construct
  source 1..20: mol_type = other DNA
ctcaattctaggccatagct

SEQ ID NO: 109973 - DNA, 20 bp, synthetic construct
  source 1..20: mol_type = other DNA
cctcaattctaggccatagc

SEQ ID NO: 109974 - DNA, 20 bp, synthetic construct
  source 1..20: mol_type = other DNA
gcctcaattctaggccatag

SEQ ID NO: 109975 - DNA, 20 bp, synthetic construct
  source 1..20: mol_type = other DNA
agcctcaattctaggccata

SEQ ID NO: 109976 - DNA, 20 bp, synthetic construct
  source 1..20: mol_type = other DNA
aagcctcaattctaggccat

SEQ ID NO: 109977 - DNA, 20 bp, synthetic construct
  source 1..20: mol_type = other DNA
gaagcctcaattctaggcca

SEQ ID NO: 109978 - DNA, 20 bp, synthetic construct
  source 1..20: mol_type = other DNA
tgaagcctcaattctaggcc

SEQ ID NO: 109979 - DNA, 20 bp, synthetic construct
  source 1..20: mol_type = other DNA
ctgaagcctcaattctaggc

SEQ ID NO: 109980 - DNA, 20 bp, synthetic construct
  source 1..20: mol_type = other DNA
tctgaagcctcaattctagg

SEQ ID NO: 109981 - DNA, 20 bp, synthetic construct
  source 1..20: mol_type = other DNA
ttctgaagcctcaattctag

SEQ ID NO: 109982 - DNA, 20 bp, synthetic construct
  source 1..20: mol_type = other DNA
gttctgaagcctcaattcta

SEQ ID NO: 109983 - DNA, 20 bp, synthetic construct
  source 1..20: mol_type = other DNA
agttctgaagcctcaattct

SEQ ID NO: 109984 - DNA, 20 bp, synthetic construct
  source 1..20: mol_type = other DNA
tagttctgaagcctcaattc

SEQ ID NO: 109985 - DNA, 20 bp, synthetic construct
  source 1..20: mol_type = other DNA
atagttctgaagcctcaatt

SEQ ID NO: 109986 - DNA, 20 bp, synthetic construct
  source 1..20: mol_type = other DNA
catagttctgaagcctcaat

SEQ ID NO: 109987 - DNA, 20 bp, synthetic construct
  source 1..20: mol_type = other DNA
gcatagttctgaagcctcaa

SEQ ID NO: 109988 - DNA, 20 bp, synthetic construct
  source 1..20: mol_type = other DNA
agcatagttctgaagcctca

SEQ ID NO: 109989 - DNA, 20 bp, synthetic construct
  source 1..20: mol_type = other DNA
aagcatagttctgaagcctc

SEQ ID NO: 109990 - DNA, 20 bp, synthetic construct
  source 1..20: mol_type = other DNA
caagcatagttctgaagcct

SEQ ID NO: 109991 - DNA, 20 bp, synthetic construct
  source 1..20: mol_type = other DNA
ccaagcatagttctgaagcc

SEQ ID NO: 109992 - DNA, 20 bp, synthetic construct
  source 1..20: mol_type = other DNA
accaagcatagttctgaagc

SEQ ID NO: 109993 - DNA, 20 bp, synthetic construct
  source 1..20: mol_type = other DNA
caccaagcatagttctgaag

SEQ ID NO: 109994 - DNA, 20 bp, synthetic construct
  source 1..20: mol_type = other DNA
gcaccaagcatagttctgaa

SEQ ID NO: 109995 - DNA, 20 bp, synthetic construct
  source 1..20: mol_type = other DNA
agcaccaagcatagttctga

SEQ ID NO: 109996 - DNA, 20 bp, synthetic construct
  source 1..20: mol_type = other DNA
aagcaccaagcatagttctg

SEQ ID NO: 109997 - DNA, 20 bp, synthetic construct
  source 1..20: mol_type = other DNA
aaagcaccaagcatagttct

SEQ ID NO: 109998 - DNA, 20 bp, synthetic construct
  source 1..20: mol_type = other DNA
taaagcaccaagcatagttc

SEQ ID NO: 109999 - DNA, 20 bp, synthetic construct
  source 1..20: mol_type = other DNA
ataaagcaccaagcatagtt

SEQ ID NO: 110000 - DNA, 20 bp, synthetic construct
  source 1..20: mol_type = other DNA
aataaagcaccaagcatagt

SEQ ID NO: 110001 - DNA, 20 bp, synthetic construct
  source 1..20: mol_type = other DNA
aaataaagcaccaagcatag

SEQ ID NO: 110002 - DNA, 20 bp, synthetic construct
  source 1..20: mol_type = other DNA
aaaataaagcaccaagcata

SEQ ID NO: 110003 - DNA, 20 bp, synthetic construct
  source 1..20: mol_type = other DNA
taaaataaagcaccaagcat

SEQ ID NO: 110004 - DNA, 20 bp, synthetic construct
  source 1..20: mol_type = other DNA
gtaaaataaagcaccaagca

SEQ ID NO: 110005 - DNA, 20 bp, synthetic construct
  source 1..20: mol_type = other DNA
agtaaaataaagcaccaagc

SEQ ID NO: 110006 - DNA, 20 bp, synthetic construct
  source 1..20: mol_type = other DNA
cagtaaaataaagcaccaag

SEQ ID NO: 110007 - DNA, 20 bp, synthetic construct
  source 1..20: mol_type = other DNA
acagtaaaataaagcaccaa

SEQ ID NO: 110008 - DNA, 20 bp, synthetic construct
  source 1..20: mol_type = other DNA
cacagtaaaataaagcacca

SEQ ID NO: 110009 - DNA, 20 bp, synthetic construct
  source 1..20: mol_type = other DNA
ccacagtaaaataaagcacc

SEQ ID NO: 110010 - DNA, 20 bp, synthetic construct
  source 1..20: mol_type = other DNA
gccacagtaaaataaagcac

SEQ ID NO: 110011 - DNA, 20 bp, synthetic construct
  source 1..20: mol_type = other DNA
agccacagtaaaataaagca

SEQ ID NO: 110012 - DNA, 20 bp, synthetic construct
  source 1..20: mol_type = other DNA
cagccacagtaaaataaagc

SEQ ID NO: 110013 - DNA, 20 bp, synthetic construct
  source 1..20: mol_type = other DNA
tcagccacagtaaaataaag

SEQ ID NO: 110014 - DNA, 20 bp, synthetic construct
  source 1..20: mol_type = other DNA
ttcagccacagtaaaataaa

SEQ ID NO: 110015 - DNA, 20 bp, synthetic construct
  source 1..20: mol_type = other DNA
gttcagccacagtaaaataa

SEQ ID NO: 110016 - DNA, 20 bp, synthetic construct
  source 1..20: mol_type = other DNA
agttcagccacagtaaaata

SEQ ID NO: 110017 - DNA, 20 bp, synthetic construct
  source 1..20: mol_type = other DNA
tagttcagccacagtaaaat

SEQ ID NO: 110018 - DNA, 20 bp, synthetic construct
  source 1..20: mol_type = other DNA
ctagttcagccacagtaaaa

SEQ ID NO: 110019 - DNA, 20 bp, synthetic construct
  source 1..20: mol_type = other DNA
actagttcagccacagtaaa

SEQ ID NO: 110020 - DNA, 20 bp, synthetic construct
  source 1..20: mol_type = other DNA
tactagttcagccacagtaa

SEQ ID NO: 110021 - DNA, 20 bp, synthetic construct
  source 1..20: mol_type = other DNA
atactagttcagccacagta

SEQ ID NO: 110022 - DNA, 20 bp, synthetic construct
  source 1..20: mol_type = other DNA
gatactagttcagccacagt

SEQ ID NO: 110023 - DNA, 20 bp, synthetic construct
  source 1..20: mol_type = other DNA
ggatactagttcagccacag

SEQ ID NO: 110024 - DNA, 20 bp, synthetic construct
  source 1..20: mol_type = other DNA
tggatactagttcagccaca

SEQ ID NO: 110025 - DNA, 20 bp, synthetic construct
  source 1..20: mol_type = other DNA
gtggatactagttcagccac

SEQ ID NO: 110026 - DNA, 20 bp, synthetic construct
  source 1..20: mol_type = other DNA
tgtggatactagttcagcca

SEQ ID NO: 110027 - DNA, 20 bp, synthetic construct
  source 1..20: mol_type = other DNA
atgtggatactagttcagcc

SEQ ID NO: 110028 - DNA, 20 bp, synthetic construct
  source 1..20: mol_type = other DNA
aatgtggatactagttcagc

SEQ ID NO: 110029 - DNA, 20 bp, synthetic construct
  source 1..20: mol_type = other DNA
caatgtggatactagttcag

SEQ ID NO: 110030 - DNA, 20 bp, synthetic construct
  source 1..20: mol_type = other DNA
gcaatgtggatactagttca

SEQ ID NO: 110031 - DNA, 20 bp, synthetic construct
  source 1..20: mol_type = other DNA
tgcaatgtggatactagttc

SEQ ID NO: 110032 - DNA, 20 bp, synthetic construct
  source 1..20: mol_type = other DNA
ttgcaatgtggatactagtt

SEQ ID NO: 110033 - DNA, 20 bp, synthetic construct
  source 1..20: mol_type = other DNA
cttgcaatgtggatactagt

SEQ ID NO: 110034 - DNA, 20 bp, synthetic construct
  source 1..20: mol_type = other DNA
tcttgcaatgtggatactag

SEQ ID NO: 110035 - DNA, 20 bp, synthetic construct
  source 1..20: mol_type = other DNA
gtcttgcaatgtggatacta

SEQ ID NO: 110036 - DNA, 20 bp, synthetic construct
  source 1..20: mol_type = other DNA
tgtcttgcaatgtggatact

SEQ ID NO: 110037 - DNA, 20 bp, synthetic construct
  source 1..20: mol_type = other DNA
ttgtcttgcaatgtggatac

SEQ ID NO: 110038 - DNA, 20 bp, synthetic construct
  source 1..20: mol_type = other DNA
tttgtcttgcaatgtggata

SEQ ID NO: 110039 - DNA, 20 bp, synthetic construct
  source 1..20: mol_type = other DNA
ctttgtcttgcaatgtggat

SEQ ID NO: 110040 - DNA, 20 bp, synthetic construct
  source 1..20: mol_type = other DNA
actttgtcttgcaatgtgga

SEQ ID NO: 110041 - DNA, 20 bp, synthetic construct
  source 1..20: mol_type = other DNA
gactttgtcttgcaatgtgg

SEQ ID NO: 110042 - DNA, 20 bp, synthetic construct
  source 1..20: mol_type = other DNA
ggactttgtcttgcaatgtg

SEQ ID NO: 110043 - DNA, 20 bp, synthetic construct
  source 1..20: mol_type = other DNA
aggactttgtcttgcaatgt

SEQ ID NO: 110044 - DNA, 20 bp, synthetic construct
  source 1..20: mol_type = other DNA
gaggactttgtcttgcaatg

SEQ ID NO: 110045 - DNA, 20 bp, synthetic construct
  source 1..20: mol_type = other DNA
ggaggactttgtcttgcaat

SEQ ID NO: 110046 - DNA, 20 bp, synthetic construct
  source 1..20: mol_type = other DNA
gggaggactttgtcttgcaa

SEQ ID NO: 110047 - DNA, 20 bp, synthetic construct
  source 1..20: mol_type = other DNA
agggaggactttgtcttgca

SEQ ID NO: 110048 - DNA, 20 bp, synthetic construct
  source 1..20: mol_type = other DNA
tagggaggactttgtcttgc

SEQ ID NO: 110049 - DNA, 20 bp, synthetic construct
  source 1..20: mol_type = other DNA
gtagggaggactttgtcttg

SEQ ID NO: 110050 - DNA, 20 bp, synthetic construct
  source 1..20: mol_type = other DNA
agtagggaggactttgtctt

SEQ ID NO: 110051 - DNA, 20 bp, synthetic construct
  source 1..20: mol_type = other DNA
gagtagggaggactttgtct

SEQ ID NO: 110052 - DNA, 20 bp, synthetic construct
  source 1..20: mol_type = other DNA
agagtagggaggactttgtc

SEQ ID NO: 110053 - DNA, 20 bp, synthetic construct
  source 1..20: mol_type = other DNA
aagagtagggaggactttgt

SEQ ID NO: 110054 - DNA, 20 bp, synthetic construct
  source 1..20: mol_type = other DNA
gaagagtagggaggactttg

SEQ ID NO: 110055 - DNA, 20 bp, synthetic construct
  source 1..20: mol_type = other DNA
ggaagagtagggaggacttt

SEQ ID NO: 110056 - DNA, 20 bp, synthetic construct
  source 1..20: mol_type = other DNA
gggaagagtagggaggactt

SEQ ID NO: 110057 - DNA, 20 bp, synthetic construct
  source 1..20: mol_type = other DNA
agggaagagtagggaggact

SEQ ID NO: 110058 - DNA, 20 bp, synthetic construct
  source 1..20: mol_type = other DNA
gagggaagagtagggaggac

SEQ ID NO: 110059 - DNA, 20 bp, synthetic construct
  source 1..20: mol_type = other DNA
agagggaagagtagggagga

SEQ ID NO: 110060 - DNA, 20 bp, synthetic construct
  source 1..20: mol_type = other DNA
gagagggaagagtagggagg

SEQ ID NO: 110061 - DNA, 20 bp, synthetic construct
  source 1..20: mol_type = other DNA
ggagagggaagagtagggag

SEQ ID NO: 110062 - DNA, 20 bp, synthetic construct
  source 1..20: mol_type = other DNA
aggagagggaagagtaggga

SEQ ID NO: 110063 - DNA, 20 bp, synthetic construct
  source 1..20: mol_type = other DNA
gaggagagggaagagtaggg

SEQ ID NO: 110064 - DNA, 20 bp, synthetic construct
  source 1..20: mol_type = other DNA
ggaggagagggaagagtagg

SEQ ID NO: 110065 - DNA, 20 bp, synthetic construct
  source 1..20: mol_type = other DNA
gggaggagagggaagagtag

SEQ ID NO: 110066 - DNA, 20 bp, synthetic construct
  source 1..20: mol_type = other DNA
tgggaggagagggaagagta

SEQ ID NO: 110067 - DNA, 20 bp, synthetic construct
  source 1..20: mol_type = other DNA
ctgggaggagagggaagagt

SEQ ID NO: 110068 - DNA, 20 bp, synthetic construct
  source 1..20: mol_type = other DNA
tctgggaggagagggaagag

SEQ ID NO: 110069 - DNA, 20 bp, synthetic construct
  source 1..20: mol_type = other DNA
ctctgggaggagagggaaga

SEQ ID NO: 110070 - DNA, 20 bp, synthetic construct
  source 1..20: mol_type = other DNA
gctctgggaggagagggaag

SEQ ID NO: 110071 - DNA, 20 bp, synthetic construct
  source 1..20: mol_type = other DNA
agctctgggaggagagggaa

SEQ ID NO: 110072 - DNA, 20 bp, synthetic construct
  source 1..20: mol_type = other DNA
cagctctgggaggagaggga

SEQ ID NO: 110073 - DNA, 20 bp, synthetic construct
  source 1..20: mol_type = other DNA
acagctctgggaggagaggg

SEQ ID NO: 110074 - DNA, 20 bp, synthetic construct
  source 1..20: mol_type = other DNA
cacagctctgggaggagagg

SEQ ID NO: 110075 - DNA, 20 bp, synthetic construct
  source 1..20: mol_type = other DNA
tcacagctctgggaggagag

SEQ ID NO: 110076 - DNA, 20 bp, synthetic construct
  source 1..20: mol_type = other DNA
ctcacagctctgggaggaga

SEQ ID NO: 110077 - DNA, 20 bp, synthetic construct
  source 1..20: mol_type = other DNA
gctcacagctctgggaggag

SEQ ID NO: 110078 - DNA, 20 bp, synthetic construct
  source 1..20: mol_type = other DNA
agctcacagctctgggagga

SEQ ID NO: 110079 - DNA, 20 bp, synthetic construct
  source 1..20: mol_type = other DNA
cagctcacagctctgggagg

SEQ ID NO: 110080 - DNA, 20 bp, synthetic construct
  source 1..20: mol_type = other DNA
acagctcacagctctgggag

SEQ ID NO: 110081 - DNA, 20 bp, synthetic construct
  source 1..20: mol_type = other DNA
cacagctcacagctctggga

SEQ ID NO: 110082 - DNA, 20 bp, synthetic construct
  source 1..20: mol_type = other DNA
ccacagctcacagctctggg

SEQ ID NO: 110083 - DNA, 20 bp, synthetic construct
  source 1..20: mol_type = other DNA
accacagctcacagctctgg

SEQ ID NO: 110084 - DNA, 20 bp, synthetic construct
  source 1..20: mol_type = other DNA
taccacagctcacagctctg

SEQ ID NO: 110085 - DNA, 20 bp, synthetic construct
  source 1..20: mol_type = other DNA
gtaccacagctcacagctct

SEQ ID NO: 110086 - DNA, 20 bp, synthetic construct
  source 1..20: mol_type = other DNA
ggtaccacagctcacagctc

SEQ ID NO: 110087 - DNA, 20 bp, synthetic construct
  source 1..20: mol_type = other DNA
aggtaccacagctcacagct

SEQ ID NO: 110088 - DNA, 20 bp, synthetic construct
  source 1..20: mol_type = other DNA
caggtaccacagctcacagc

SEQ ID NO: 110089 - DNA, 20 bp, synthetic construct
  source 1..20: mol_type = other DNA
ccaggtaccacagctcacag

SEQ ID NO: 110090 - DNA, 20 bp, synthetic construct
  source 1..20: mol_type = other DNA
tccaggtaccacagctcaca

SEQ ID NO: 110091 - DNA, 20 bp, synthetic construct
  source 1..20: mol_type = other DNA
ctccaggtaccacagctcac

SEQ ID NO: 110092 - DNA, 20 bp, synthetic construct
  source 1..20: mol_type = other DNA
actccaggtaccacagctca

SEQ ID NO: 110093 - DNA, 20 bp, synthetic construct
  source 1..20: mol_type = other DNA
aactccaggtaccacagctc

SEQ ID NO: 110094 - DNA, 20 bp, synthetic construct
  source 1..20: mol_type = other DNA
caactccaggtaccacagct

SEQ ID NO: 110095 - DNA, 20 bp, synthetic construct
  source 1..20: mol_type = other DNA
ccaactccaggtaccacagc

SEQ ID NO: 110096 - DNA, 20 bp, synthetic construct
  source 1..20: mol_type = other DNA
cccaactccaggtaccacag

SEQ ID NO: 110097 - DNA, 20 bp, synthetic construct
  source 1..20: mol_type = other DNA
ccccaactccaggtaccaca

SEQ ID NO: 110098 - DNA, 20 bp, synthetic construct
  source 1..20: mol_type = other DNA
cccccaactccaggtaccac

SEQ ID NO: 110099 - DNA, 20 bp, synthetic construct
  source 1..20: mol_type = other DNA
tcccccaactccaggtacca

SEQ ID NO: 110100 - DNA, 20 bp, synthetic construct
  source 1..20: mol_type = other DNA
ttcccccaactccaggtacc

SEQ ID NO: 110101 - DNA, 20 bp, synthetic construct
  source 1..20: mol_type = other DNA
cttcccccaactccaggtac

SEQ ID NO: 110102 - DNA, 20 bp, synthetic construct
  source 1..20: mol_type = other DNA
ccttcccccaactccaggta

SEQ ID NO: 110103 - DNA, 20 bp, synthetic construct
  source 1..20: mol_type = other DNA
gccttcccccaactccaggt

SEQ ID NO: 110104 - DNA, 20 bp, synthetic construct
  source 1..20: mol_type = other DNA
agccttcccccaactccagg

SEQ ID NO: 110105 - DNA, 20 bp, synthetic construct
  source 1..20: mol_type = other DNA
cagccttcccccaactccag

SEQ ID NO: 110106 - DNA, 20 bp, synthetic construct
  source 1..20: mol_type = other DNA
ccagccttcccccaactcca

SEQ ID NO: 110107 - DNA, 20 bp, synthetic construct
  source 1..20: mol_type = other DNA
gccagccttcccccaactcc

SEQ ID NO: 110108 - DNA, 20 bp, synthetic construct
  source 1..20: mol_type = other DNA
tgccagccttcccccaactc

SEQ ID NO: 110109 - DNA, 20 bp, synthetic construct
  source 1..20: mol_type = other DNA
gtgccagccttcccccaact

SEQ ID NO: 110110 - DNA, 20 bp, synthetic construct
  source 1..20: mol_type = other DNA
tgtgccagccttcccccaac

SEQ ID NO: 110111 - DNA, 20 bp, synthetic construct
  source 1..20: mol_type = other DNA
ttgtgccagccttcccccaa

SEQ ID NO: 110112 - DNA, 20 bp, synthetic construct
  source 1..20: mol_type = other DNA
cttgtgccagccttccccca

SEQ ID NO: 110113 - DNA, 20 bp, synthetic construct
  source 1..20: mol_type = other DNA
gcttgtgccagccttccccc

SEQ ID NO: 110114 - DNA, 20 bp, synthetic construct
  source 1..20: mol_type = other DNA
tgcttgtgccagccttcccc

SEQ ID NO: 110115 - DNA, 20 bp, synthetic construct
  source 1..20: mol_type = other DNA
gtgcttgtgccagccttccc

SEQ ID NO: 110116 - DNA, 20 bp, synthetic construct
  source 1..20: mol_type = other DNA
agtgcttgtgccagccttcc

SEQ ID NO: 110117 - DNA, 20 bp, synthetic construct
  source 1..20: mol_type = other DNA
gagtgcttgtgccagccttc

SEQ ID NO: 110118 - DNA, 20 bp, synthetic construct
  source 1..20: mol_type = other DNA
ggagtgcttgtgccagcctt

SEQ ID NO: 110119 - DNA, 20 bp, synthetic construct
  source 1..20: mol_type = other DNA
gggagtgcttgtgccagcct

SEQ ID NO: 110120 - DNA, 20 bp, synthetic construct
  source 1..20: mol_type = other DNA
agggagtgcttgtgccagcc

SEQ ID NO: 110121 - DNA, 20 bp, synthetic construct
  source 1..20: mol_type = other DNA
aagggagtgcttgtgccagc

SEQ ID NO: 110122 - DNA, 20 bp, synthetic construct
  source 1..20: mol_type = other DNA
caagggagtgcttgtgccag

SEQ ID NO: 110123 - DNA, 20 bp, synthetic construct
  source 1..20: mol_type = other DNA
ccaagggagtgcttgtgcca

SEQ ID NO: 110124 - DNA, 20 bp, synthetic construct
  source 1..20: mol_type = other DNA
gccaagggagtgcttgtgcc

SEQ ID NO: 110125 - DNA, 20 bp, synthetic construct
  source 1..20: mol_type = other DNA
ggccaagggagtgcttgtgc

SEQ ID NO: 110126 - DNA, 20 bp, synthetic construct
  source 1..20: mol_type = other DNA
tggccaagggagtgcttgtg

SEQ ID NO: 110127 - DNA, 20 bp, synthetic construct
  source 1..20: mol_type = other DNA
gtggccaagggagtgcttgt

SEQ ID NO: 110128 - DNA, 20 bp, synthetic construct
  source 1..20: mol_type = other DNA
ggtggccaagggagtgcttg

SEQ ID NO: 110129 - DNA, 20 bp, synthetic construct
  source 1..20: mol_type = other DNA
gggtggccaagggagtgctt

SEQ ID NO: 110130 - DNA, 20 bp, synthetic construct
  source 1..20: mol_type = other DNA
agggtggccaagggagtgct

SEQ ID NO: 110131 - DNA, 20 bp, synthetic construct
  source 1..20: mol_type = other DNA
tagggtggccaagggagtgc

SEQ ID NO: 110132 - DNA, 20 bp, synthetic construct
  source 1..20: mol_type = other DNA
ctagggtggccaagggagtg

SEQ ID NO: 110133 - DNA, 20 bp, synthetic construct
  source 1..20: mol_type = other DNA
gctagggtggccaagggagt

SEQ ID NO: 110134 - DNA, 20 bp, synthetic construct
  source 1..20: mol_type = other DNA
agctagggtggccaagggag

SEQ ID NO: 110135 - DNA, 20 bp, synthetic construct
  source 1..20: mol_type = other DNA
cagctagggtggccaaggga

SEQ ID NO: 110136 - DNA, 20 bp, synthetic construct
  source 1..20: mol_type = other DNA
ccagctagggtggccaaggg

SEQ ID NO: 110137 - DNA, 20 bp, synthetic construct
  source 1..20: mol_type = other DNA
accagctagggtggccaagg

SEQ ID NO: 110138 - DNA, 20 bp, synthetic construct
  source 1..20: mol_type = other DNA
caccagctagggtggccaag

SEQ ID NO: 110139 - DNA, 20 bp, synthetic construct
  source 1..20: mol_type = other DNA
acaccagctagggtggccaa

SEQ ID NO: 110140 - DNA, 20 bp, synthetic construct
  source 1..20: mol_type = other DNA
gacaccagctagggtggcca

SEQ ID NO: 110141 - DNA, 20 bp, synthetic construct
  source 1..20: mol_type = other DNA
agacaccagctagggtggcc

SEQ ID NO: 110142 - DNA, 20 bp, synthetic construct
  source 1..20: mol_type = other DNA
gagacaccagctagggtggc

SEQ ID NO: 110143 - DNA, 20 bp, synthetic construct
  source 1..20: mol_type = other DNA
tgagacaccagctagggtgg

SEQ ID NO: 110144 - DNA, 20 bp, synthetic construct
  source 1..20: mol_type = other DNA
ctgagacaccagctagggtg

SEQ ID NO: 110145 - DNA, 20 bp, synthetic construct
  source 1..20: mol_type = other DNA
actgagacaccagctagggt

SEQ ID NO: 110146 - DNA, 20 bp, synthetic construct
  source 1..20: mol_type = other DNA
cactgagacaccagctaggg

SEQ ID NO: 110147 - DNA, 20 bp, synthetic construct
  source 1..20: mol_type = other DNA
ccactgagacaccagctagg

SEQ ID NO: 110148 - DNA, 20 bp, synthetic construct
  source 1..20: mol_type = other DNA
cccactgagacaccagctag

SEQ ID NO: 110149 - DNA, 20 bp, synthetic construct
  source 1..20: mol_type = other DNA
acccactgagacaccagcta

SEQ ID NO: 110150 - DNA, 20 bp, synthetic construct
  source 1..20: mol_type = other DNA
gacccactgagacaccagct

SEQ ID NO: 110151 - DNA, 20 bp, synthetic construct
  source 1..20: mol_type = other DNA
tgacccactgagacaccagc

SEQ ID NO: 110152 - DNA, 20 bp, synthetic construct
  source 1..20: mol_type = other DNA
gtgacccactgagacaccag

SEQ ID NO: 110153 - DNA, 20 bp, synthetic construct
  source 1..20: mol_type = other DNA
tgtgacccactgagacacca

SEQ ID NO: 110154 - DNA, 20 bp, synthetic construct
  source 1..20: mol_type = other DNA
atgtgacccactgagacacc

SEQ ID NO: 110155 - DNA, 20 bp, synthetic construct
  source 1..20: mol_type = other DNA
catgtgacccactgagacac

SEQ ID NO: 110156 - DNA, 20 bp, synthetic construct
  source 1..20: mol_type = other DNA
acatgtgacccactgagaca

SEQ ID NO: 110157 - DNA, 20 bp, synthetic construct
  source 1..20: mol_type = other DNA
tacatgtgacccactgagac

SEQ ID NO: 110158 - DNA, 20 bp, synthetic construct
  source 1..20: mol_type = other DNA
gtacatgtgacccactgaga

SEQ ID NO: 110159 - DNA, 20 bp, synthetic construct
  source 1..20: mol_type = other DNA
ggtacatgtgacccactgag

SEQ ID NO: 110160 - DNA, 20 bp, synthetic construct
  source 1..20: mol_type = other DNA
gggtacatgtgacccactga

SEQ ID NO: 110161 - DNA, 20 bp, synthetic construct
  source 1..20: mol_type = other DNA
ggggtacatgtgacccactg

SEQ ID NO: 110162 - DNA, 20 bp, synthetic construct
  source 1..20: mol_type = other DNA
tggggtacatgtgacccact

SEQ ID NO: 110163 - DNA, 20 bp, synthetic construct
  source 1..20: mol_type = other DNA
ttggggtacatgtgacccac

SEQ ID NO: 110164 - DNA, 20 bp, synthetic construct
  source 1..20: mol_type = other DNA
cttggggtacatgtgaccca

SEQ ID NO: 110165 - DNA, 20 bp, synthetic construct
  source 1..20: mol_type = other DNA
acttggggtacatgtgaccc

SEQ ID NO: 110166 - DNA, 20 bp, synthetic construct
  source 1..20: mol_type = other DNA
gacttggggtacatgtgacc

SEQ ID NO: 110167 - DNA, 20 bp, synthetic construct
  source 1..20: mol_type = other DNA
ggacttggggtacatgtgac

SEQ ID NO: 110168 - DNA, 20 bp, synthetic construct
  source 1..20: mol_type = other DNA
tggacttggggtacatgtga

SEQ ID NO: 110169 - DNA, 20 bp, synthetic construct
  source 1..20: mol_type = other DNA
gtggacttggggtacatgtg

SEQ ID NO: 110170 - DNA, 20 bp, synthetic construct
  source 1..20: mol_type = other DNA
agtggacttggggtacatgt

SEQ ID NO: 110171 - DNA, 20 bp, synthetic construct
  source 1..20: mol_type = other DNA
cagtggacttggggtacatg

SEQ ID NO: 110172 - DNA, 20 bp, synthetic construct
  source 1..20: mol_type = other DNA
tcagtggacttggggtacat

SEQ ID NO: 110173 - DNA, 20 bp, synthetic construct
  source 1..20: mol_type = other DNA
gtcagtggacttggggtaca

SEQ ID NO: 110174 - DNA, 20 bp, synthetic construct
  source 1..20: mol_type = other DNA
agtcagtggacttggggtac

SEQ ID NO: 110175 - DNA, 20 bp, synthetic construct
  source 1..20: mol_type = other DNA
tagtcagtggacttggggta

SEQ ID NO: 110176 - DNA, 20 bp, synthetic construct
  source 1..20: mol_type = other DNA
atagtcagtggacttggggt

SEQ ID NO: 110177 - DNA, 20 bp, synthetic construct
  source 1..20: mol_type = other DNA
catagtcagtggacttgggg

SEQ ID NO: 110178 - DNA, 20 bp, synthetic construct
  source 1..20: mol_type = other DNA
tcatagtcagtggacttggg

SEQ ID NO: 110179 - DNA, 20 bp, synthetic construct
  source 1..20: mol_type = other DNA
ctcatagtcagtggacttgg

SEQ ID NO: 110180 - DNA, 20 bp, synthetic construct
  source 1..20: mol_type = other DNA
gctcatagtcagtggacttg

SEQ ID NO: 110181 - DNA, 20 bp, synthetic construct
  source 1..20: mol_type = other DNA
ggctcatagtcagtggactt

SEQ ID NO: 110182 - DNA, 20 bp, synthetic construct
  source 1..20: mol_type = other DNA
gggctcatagtcagtggact

SEQ ID NO: 110183 - DNA, 20 bp, synthetic construct
  source 1..20: mol_type = other DNA
tgggctcatagtcagtggac

SEQ ID NO: 110184 - DNA, 20 bp, synthetic construct
  source 1..20: mol_type = other DNA
ctgggctcatagtcagtgga

SEQ ID NO: 110185 - DNA, 20 bp, synthetic construct
  source 1..20: mol_type = other DNA
gctgggctcatagtcagtgg

SEQ ID NO: 110186 - DNA, 20 bp, synthetic construct
  source 1..20: mol_type = other DNA
tgctgggctcatagtcagtg

SEQ ID NO: 110187 - DNA, 20 bp, synthetic construct
  source 1..20: mol_type = other DNA
gtgctgggctcatagtcagt

SEQ ID NO: 110188 - DNA, 20 bp, synthetic construct
  source 1..20: mol_type = other DNA
tgtgctgggctcatagtcag

SEQ ID NO: 110189 - DNA, 20 bp, synthetic construct
  source 1..20: mol_type = other DNA
ctgtgctgggctcatagtca

SEQ ID NO: 110190 - DNA, 20 bp, synthetic construct
  source 1..20: mol_type = other DNA
actgtgctgggctcatagtc

SEQ ID NO: 110191 - DNA, 20 bp, synthetic construct
  source 1..20: mol_type = other DNA
tactgtgctgggctcatagt

SEQ ID NO: 110192 - DNA, 20 bp, synthetic construct
  source 1..20: mol_type = other DNA
gtactgtgctgggctcatag

SEQ ID NO: 110193 - DNA, 20 bp, synthetic construct
  source 1..20: mol_type = other DNA
ggtactgtgctgggctcata

SEQ ID NO: 110194 - DNA, 20 bp, synthetic construct
  source 1..20: mol_type = other DNA
tggtactgtgctgggctcat

SEQ ID NO: 110195 - DNA, 20 bp, synthetic construct
  source 1..20: mol_type = other DNA
atggtactgtgctgggctca

SEQ ID NO: 110196 - DNA, 20 bp, synthetic construct
  source 1..20: mol_type = other DNA
catggtactgtgctgggctc

SEQ ID NO: 110197 - DNA, 20 bp, synthetic construct
  source 1..20: mol_type = other DNA
tcatggtactgtgctgggct

SEQ ID NO: 110198 - DNA, 20 bp, synthetic construct
  source 1..20: mol_type = other DNA
gtcatggtactgtgctgggc

SEQ ID NO: 110199 - DNA, 20 bp, synthetic construct
  source 1..20: mol_type = other DNA
agtcatggtactgtgctggg

SEQ ID NO: 110200 - DNA, 20 bp, synthetic construct
  source 1..20: mol_type = other DNA
aagtcatggtactgtgctgg

SEQ ID NO: 110201 - DNA, 20 bp, synthetic construct
  source 1..20: mol_type = other DNA
caagtcatggtactgtgctg

SEQ ID NO: 110202 - DNA, 20 bp, synthetic construct
  source 1..20: mol_type = other DNA
acaagtcatggtactgtgct

SEQ ID NO: 110203 - DNA, 20 bp, synthetic construct
  source 1..20: mol_type = other DNA
gacaagtcatggtactgtgc

SEQ ID NO: 110204 - DNA, 20 bp, synthetic construct
  source 1..20: mol_type = other DNA
ggacaagtcatggtactgtg

SEQ ID NO: 110205 - DNA, 20 bp, synthetic construct
  source 1..20: mol_type = other DNA
tggacaagtcatggtactgt

SEQ ID NO: 110206 - DNA, 20 bp, synthetic construct
  source 1..20: mol_type = other DNA
ctggacaagtcatggtactg

SEQ ID NO: 110207 - DNA, 20 bp, synthetic construct
  source 1..20: mol_type = other DNA
cctggacaagtcatggtact

SEQ ID NO: 110208 - DNA, 20 bp, synthetic construct
  source 1..20: mol_type = other DNA
tcctggacaagtcatggtac

SEQ ID NO: 110209 - DNA, 20 bp, synthetic construct
  source 1..20: mol_type = other DNA
ttcctggacaagtcatggta

SEQ ID NO: 110210 - DNA, 20 bp, synthetic construct
  source 1..20: mol_type = other DNA
attcctggacaagtcatggt

SEQ ID NO: 110211 - DNA, 20 bp, synthetic construct
  source 1..20: mol_type = other DNA
aattcctggacaagtcatgg

SEQ ID NO: 110212 - DNA, 20 bp, synthetic construct
  source 1..20: mol_type = other DNA
caattcctggacaagtcatg

SEQ ID NO: 110213 - DNA, 20 bp, synthetic construct
  source 1..20: mol_type = other DNA
gcaattcctggacaagtcat

SEQ ID NO: 110214 - DNA, 20 bp, synthetic construct
  source 1..20: mol_type = other DNA
tgcaattcctggacaagtca

SEQ ID NO: 110215 - DNA, 20 bp, synthetic construct
  source 1..20: mol_type = other DNA
ctgcaattcctggacaagtc

SEQ ID NO: 110216 - DNA, 20 bp, synthetic construct
  source 1..20: mol_type = other DNA
actgcaattcctggacaagt

SEQ ID NO: 110217 - DNA, 20 bp, synthetic construct
  source 1..20: mol_type = other DNA
gactgcaattcctggacaag

SEQ ID NO: 110218 - DNA, 20 bp, synthetic construct
  source 1..20: mol_type = other DNA
ggactgcaattcctggacaa

SEQ ID NO: 110219 - DNA, 20 bp, synthetic construct
  source 1..20: mol_type = other DNA
aggactgcaattcctggaca

SEQ ID NO: 110220 - DNA, 20 bp, synthetic construct
  source 1..20: mol_type = other DNA
aaggactgcaattcctggac

SEQ ID NO: 110221 - DNA, 20 bp, synthetic construct
  source 1..20: mol_type = other DNA
gaaggactgcaattcctgga

SEQ ID NO: 110222 - DNA, 20 bp, synthetic construct
  source 1..20: mol_type = other DNA
agaaggactgcaattcctgg

SEQ ID NO: 110223 - DNA, 20 bp, synthetic construct
  source 1..20: mol_type = other DNA
cagaaggactgcaattcctg

SEQ ID NO: 110224 - DNA, 20 bp, synthetic construct
  source 1..20: mol_type = other DNA
ccagaaggactgcaattcct

SEQ ID NO: 110225 - DNA, 20 bp, synthetic construct
  source 1..20: mol_type = other DNA
accagaaggactgcaattcc

SEQ ID NO: 110226 - DNA, 20 bp, synthetic construct
  source 1..20: mol_type = other DNA
gaccagaaggactgcaattc

SEQ ID NO: 110227 - DNA, 20 bp, synthetic construct
  source 1..20: mol_type = other DNA
agaccagaaggactgcaatt

SEQ ID NO: 110228 - DNA, 20 bp, synthetic construct
  source 1..20: mol_type = other DNA
tagaccagaaggactgcaat

SEQ ID NO: 110229 - DNA, 20 bp, synthetic construct
  source 1..20: mol_type = other DNA
ctagaccagaaggactgcaa

SEQ ID NO: 110230 - DNA, 20 bp, synthetic construct
  source 1..20: mol_type = other DNA
tctagaccagaaggactgca

SEQ ID NO: 110231 - DNA, 20 bp, synthetic construct
  source 1..20: mol_type = other DNA
gtctagaccagaaggactgc

SEQ ID NO: 110232 - DNA, 20 bp, synthetic construct
  source 1..20: mol_type = other DNA
agtctagaccagaaggactg

SEQ ID NO: 110233 - DNA, 20 bp, synthetic construct
  source 1..20: mol_type = other DNA
cagtctagaccagaaggact

SEQ ID NO: 110234 - DNA, 20 bp, synthetic construct
  source 1..20: mol_type = other DNA
gcagtctagaccagaaggac

SEQ ID NO: 110235 - DNA, 20 bp, synthetic construct
  source 1..20: mol_type = other DNA
ggcagtctagaccagaagga

SEQ ID NO: 110236 - DNA, 20 bp, synthetic construct
  source 1..20: mol_type = other DNA
aggcagtctagaccagaagg

SEQ ID NO: 110237 - DNA, 20 bp, synthetic construct
  source 1..20: mol_type = other DNA
aaggcagtctagaccagaag

SEQ ID NO: 110238 - DNA, 20 bp, synthetic construct
  source 1..20: mol_type = other DNA
aaaggcagtctagaccagaa

SEQ ID NO: 110239 - DNA, 20 bp, synthetic construct
  source 1..20: mol_type = other DNA
gaaaggcagtctagaccaga

SEQ ID NO: 110240 - DNA, 20 bp, synthetic construct
  source 1..20: mol_type = other DNA
tgaaaggcagtctagaccag

SEQ ID NO: 110241 - DNA, 20 bp, synthetic construct
  source 1..20: mol_type = other DNA
ttgaaaggcagtctagacca

SEQ ID NO: 110242 - DNA, 20 bp, synthetic construct
  source 1..20: mol_type = other DNA
cttgaaaggcagtctagacc

SEQ ID NO: 110243 - DNA, 20 bp, synthetic construct
  source 1..20: mol_type = other DNA
acttgaaaggcagtctagac

SEQ ID NO: 110244 - DNA, 20 bp, synthetic construct
  source 1..20: mol_type = other DNA
aacttgaaaggcagtctaga

SEQ ID NO: 110245 - DNA, 20 bp, synthetic construct
  source 1..20: mol_type = other DNA
aaacttgaaaggcagtctag

SEQ ID NO: 110246 - DNA, 20 bp, synthetic construct
  source 1..20: mol_type = other DNA
taaacttgaaaggcagtcta

SEQ ID NO: 110247 - DNA, 20 bp, synthetic construct
  source 1..20: mol_type = other DNA
ataaacttgaaaggcagtct

SEQ ID NO: 110248 - DNA, 20 bp, synthetic construct
  source 1..20: mol_type = other DNA
aataaacttgaaaggcagtc

SEQ ID NO: 110249 - DNA, 20 bp, synthetic construct
  source 1..20: mol_type = other DNA
aaataaacttgaaaggcagt

SEQ ID NO: 110250 - DNA, 20 bp, synthetic construct
  source 1..20: mol_type = other DNA
taaataaacttgaaaggcag

SEQ ID NO: 110251 - DNA, 20 bp, synthetic construct
  source 1..20: mol_type = other DNA
ctaaataaacttgaaaggca

SEQ ID NO: 110252 - DNA, 20 bp, synthetic construct
  source 1..20: mol_type = other DNA
cctaaataaacttgaaaggc

SEQ ID NO: 110253 - DNA, 20 bp, synthetic construct
  source 1..20: mol_type = other DNA
tcctaaataaacttgaaagg

SEQ ID NO: 110254 - DNA, 20 bp, synthetic construct
  source 1..20: mol_type = other DNA
gtcctaaataaacttgaaag

SEQ ID NO: 110255 - DNA, 20 bp, synthetic construct
  source 1..20: mol_type = other DNA
ggtcctaaataaacttgaaa

SEQ ID NO: 110256 - DNA, 20 bp, synthetic construct
  source 1..20: mol_type = other DNA
gggtcctaaataaacttgaa

SEQ ID NO: 110257 - DNA, 20 bp, synthetic construct
  source 1..20: mol_type = other DNA
ggggtcctaaataaacttga

SEQ ID NO: 110258 - DNA, 20 bp, synthetic construct
  source 1..20: mol_type = other DNA
tggggtcctaaataaacttg

SEQ ID NO: 110259 - DNA, 20 bp, synthetic construct
  source 1..20: mol_type = other DNA
ctggggtcctaaataaactt

SEQ ID NO: 110260 - DNA, 20 bp, synthetic construct
  source 1..20: mol_type = other DNA
tctggggtcctaaataaact

SEQ ID NO: 110261 - DNA, 20 bp, synthetic construct
  source 1..20: mol_type = other DNA
ctctggggtcctaaataaac

SEQ ID NO: 110262 - DNA, 20 bp, synthetic construct
  source 1..20: mol_type = other DNA
cctctggggtcctaaataaa

SEQ ID NO: 110263 - DNA, 20 bp, synthetic construct
  source 1..20: mol_type = other DNA
tcctctggggtcctaaataa

SEQ ID NO: 110264 - DNA, 20 bp, synthetic construct
  source 1..20: mol_type = other DNA
gtcctctggggtcctaaata

SEQ ID NO: 110265 - DNA, 20 bp, synthetic construct
  source 1..20: mol_type = other DNA
agtcctctggggtcctaaat

SEQ ID NO: 110266 - DNA, 20 bp, synthetic construct
  source 1..20: mol_type = other DNA
aagtcctctggggtcctaaa

SEQ ID NO: 110267 - DNA, 20 bp, synthetic construct
  source 1..20: mol_type = other DNA
aaagtcctctggggtcctaa

SEQ ID NO: 110268 - DNA, 20 bp, synthetic construct
  source 1..20: mol_type = other DNA
taaagtcctctggggtccta

SEQ ID NO: 110269 - DNA, 20 bp, synthetic construct
  source 1..20: mol_type = other DNA
gtaaagtcctctggggtcct

SEQ ID NO: 110270 - DNA, 20 bp, synthetic construct
  source 1..20: mol_type = other DNA
ggtaaagtcctctggggtcc

SEQ ID NO: 110271 - DNA, 20 bp, synthetic construct
  source 1..20: mol_type = other DNA
gggtaaagtcctctggggtc

SEQ ID NO: 110272 - DNA, 20 bp, synthetic construct
  source 1..20: mol_type = other DNA
tgggtaaagtcctctggggt

SEQ ID NO: 110273 - DNA, 20 bp, synthetic construct
  source 1..20: mol_type = other DNA
gtgggtaaagtcctctgggg

SEQ ID NO: 110274 - DNA, 20 bp, synthetic construct
  source 1..20: mol_type = other DNA
cgtgggtaaagtcctctggg

SEQ ID NO: 110275 - DNA, 20 bp, synthetic construct
  source 1..20: mol_type = other DNA
ccgtgggtaaagtcctctgg

SEQ ID NO: 110276 - DNA, 20 bp, synthetic construct
  source 1..20: mol_type = other DNA
accgtgggtaaagtcctctg

SEQ ID NO: 110277 - DNA, 20 bp, synthetic construct
  source 1..20: mol_type = other DNA
caccgtgggtaaagtcctct

SEQ ID NO: 110278 - DNA, 20 bp, synthetic construct
  source 1..20: mol_type = other DNA
ccaccgtgggtaaagtcctc

SEQ ID NO: 110279 - DNA, 20 bp, synthetic construct
  source 1..20: mol_type = other DNA
accaccgtgggtaaagtcct

SEQ ID NO: 110280 - DNA, 20 bp, synthetic construct
  source 1..20: mol_type = other DNA
caccaccgtgggtaaagtcc

SEQ ID NO: 110281 - DNA, 20 bp, synthetic construct
  source 1..20: mol_type = other DNA
ccaccaccgtgggtaaagtc

SEQ ID NO: 110282 - DNA, 20 bp, synthetic construct
  source 1..20: mol_type = other DNA
cccaccaccgtgggtaaagt

SEQ ID NO: 110283 - DNA, 20 bp, synthetic construct
  source 1..20: mol_type = other DNA
ccccaccaccgtgggtaaag

SEQ ID NO: 110284 - DNA, 20 bp, synthetic construct
  source 1..20: mol_type = other DNA
gccccaccaccgtgggtaaa

SEQ ID NO: 110285 - DNA, 20 bp, synthetic construct
  source 1..20: mol_type = other DNA
agccccaccaccgtgggtaa

SEQ ID NO: 110286 - DNA, 20 bp, synthetic construct
  source 1..20: mol_type = other DNA
aagccccaccaccgtgggta

SEQ ID NO: 110287 - DNA, 20 bp, synthetic construct
  source 1..20: mol_type = other DNA
taagccccaccaccgtgggt

SEQ ID NO: 110288 - DNA, 20 bp, synthetic construct
  source 1..20: mol_type = other DNA
gtaagccccaccaccgtggg

SEQ ID NO: 110289 - DNA, 20 bp, synthetic construct
  source 1..20: mol_type = other DNA
ggtaagccccaccaccgtgg

SEQ ID NO: 110290 - DNA, 20 bp, synthetic construct
  source 1..20: mol_type = other DNA
tggtaagccccaccaccgtg

SEQ ID NO: 110291 - DNA, 20 bp, synthetic construct
  source 1..20: mol_type = other DNA
ttggtaagccccaccaccgt

SEQ ID NO: 110292 - DNA, 20 bp, synthetic construct
  source 1..20: mol_type = other DNA
tttggtaagccccaccaccg

SEQ ID NO: 110293 - DNA, 20 bp, synthetic construct
  source 1..20: mol_type = other DNA
ttttggtaagccccaccacc

SEQ ID NO: 110294 - DNA, 20 bp, synthetic construct
  source 1..20: mol_type = other DNA
attttggtaagccccaccac

SEQ ID NO: 110295 - DNA, 20 bp, synthetic construct
  source 1..20: mol_type = other DNA
aattttggtaagccccacca

SEQ ID NO: 110296 - DNA, 20 bp, synthetic construct
  source 1..20: mol_type = other DNA
taattttggtaagccccacc

SEQ ID NO: 110297 - DNA, 20 bp, synthetic construct
  source 1..20: mol_type = other DNA
ttaattttggtaagccccac

SEQ ID NO: 110298 - DNA, 20 bp, synthetic construct
  source 1..20: mol_type = other DNA
cttaattttggtaagcccca

SEQ ID NO: 110299 - DNA, 20 bp, synthetic construct
  source 1..20: mol_type = other DNA
tcttaattttggtaagcccc

SEQ ID NO: 110300 - DNA, 20 bp, synthetic construct
  source 1..20: mol_type = other DNA
atcttaattttggtaagccc

SEQ ID NO: 110301 - DNA, 20 bp, synthetic construct
  source 1..20: mol_type = other DNA
aatcttaattttggtaagcc

SEQ ID NO: 110302 - DNA, 20 bp, synthetic construct
  source 1..20: mol_type = other DNA
gaatcttaattttggtaagc

SEQ ID NO: 110303 - DNA, 20 bp, synthetic construct
  source 1..20: mol_type = other DNA
agaatcttaattttggtaag

SEQ ID NO: 110304 - DNA, 20 bp, synthetic construct
  source 1..20: mol_type = other DNA
aagaatcttaattttggtaa

SEQ ID NO: 110305 - DNA, 20 bp, synthetic construct
  source 1..20: mol_type = other DNA
aaagaatcttaattttggta

SEQ ID NO: 110306 - DNA, 20 bp, synthetic construct
  source 1..20: mol_type = other DNA
aaaagaatcttaattttggt

SEQ ID NO: 110307 - DNA, 20 bp, synthetic construct
  source 1..20: mol_type = other DNA
caaaagaatcttaattttgg

SEQ ID NO: 110308 - DNA, 20 bp, synthetic construct
  source 1..20: mol_type = other DNA
ccaaaagaatcttaattttg

SEQ ID NO: 110309 - DNA, 20 bp, synthetic construct
  source 1..20: mol_type = other DNA
accaaaagaatcttaatttt

SEQ ID NO: 110310 - DNA, 20 bp, synthetic construct
  source 1..20: mol_type = other DNA
aaccaaaagaatcttaattt

SEQ ID NO: 110311 - DNA, 20 bp, synthetic construct
  source 1..20: mol_type = other DNA
aaaccaaaagaatcttaatt

SEQ ID NO: 110312 - DNA, 20 bp, synthetic construct
  source 1..20: mol_type = other DNA
aaaaccaaaagaatcttaat

SEQ ID NO: 110313 - DNA, 20 bp, synthetic construct
  source 1..20: mol_type = other DNA
aaaaaccaaaagaatcttaa

SEQ ID NO: 110314 - DNA, 20 bp, synthetic construct
  source 1..20: mol_type = other DNA
aaaaaaccaaaagaatctta

SEQ ID NO: 110315 - DNA, 20 bp, synthetic construct
  source 1..20: mol_type = other DNA
aaaaaaaccaaaagaatctt

SEQ ID NO: 110316 - DNA, 20 bp, synthetic construct
  source 1..20: mol_type = other DNA
aaaaaaaaccaaaagaatct

SEQ ID NO: 110317 - DNA, 20 bp, synthetic construct
  source 1..20: mol_type = other DNA
caaaaaaaaccaaaagaatc

SEQ ID NO: 110318 - DNA, 20 bp, synthetic construct
  source 1..20: mol_type = other DNA
ccaaaaaaaaccaaaagaat

SEQ ID NO: 110319 - DNA, 20 bp, synthetic construct
  source 1..20: mol_type = other DNA
gccaaaaaaaaccaaaagaa

SEQ ID NO: 110320 - DNA, 20 bp, synthetic construct
  source 1..20: mol_type = other DNA
tgccaaaaaaaaccaaaaga

SEQ ID NO: 110321 - DNA, 20 bp, synthetic construct
  source 1..20: mol_type = other DNA
ctgccaaaaaaaaccaaaag

SEQ ID NO: 110322 - DNA, 20 bp, synthetic construct
  source 1..20: mol_type = other DNA
tctgccaaaaaaaaccaaaa

SEQ ID NO: 110323 - DNA, 20 bp, synthetic construct
  source 1..20: mol_type = other DNA
ctctgccaaaaaaaaccaaa

SEQ ID NO: 110324 - DNA, 20 bp, synthetic construct
  source 1..20: mol_type = other DNA
actctgccaaaaaaaaccaa

SEQ ID NO: 110325 - DNA, 20 bp, synthetic construct
  source 1..20: mol_type = other DNA
aactctgccaaaaaaaacca

SEQ ID NO: 110326 - DNA, 20 bp, synthetic construct
  source 1..20: mol_type = other DNA
aaactctgccaaaaaaaacc

SEQ ID NO: 110327 - DNA, 20 bp, synthetic construct
  source 1..20: mol_type = other DNA
gaaactctgccaaaaaaaac

SEQ ID NO: 110328 - DNA, 20 bp, synthetic construct
  source 1..20: mol_type = other DNA
cgaaactctgccaaaaaaaa

SEQ ID NO: 110329 - DNA, 20 bp, synthetic construct
  source 1..20: mol_type = other DNA
gcgaaactctgccaaaaaaa

SEQ ID NO: 110330 - DNA, 20 bp, synthetic construct
  source 1..20: mol_type = other DNA
agcgaaactctgccaaaaaa

SEQ ID NO: 110331 - DNA, 20 bp, synthetic construct
  source 1..20: mol_type = other DNA
gagcgaaactctgccaaaaa

SEQ ID NO: 110332 - DNA, 20 bp, synthetic construct
  source 1..20: mol_type = other DNA
agagcgaaactctgccaaaa

SEQ ID NO: 110333 - DNA, 20 bp, synthetic construct
  source 1..20: mol_type = other DNA
aagagcgaaactctgccaaa

SEQ ID NO: 110334 - DNA, 20 bp, synthetic construct
  source 1..20: mol_type = other DNA
taagagcgaaactctgccaa

SEQ ID NO: 110335 - DNA, 20 bp, synthetic construct
  source 1..20: mol_type = other DNA
ataagagcgaaactctgcca

SEQ ID NO: 110336 - DNA, 20 bp, synthetic construct
  source 1..20: mol_type = other DNA
aataagagcgaaactctgcc

SEQ ID NO: 110337 - DNA, 20 bp, synthetic construct
  source 1..20: mol_type = other DNA
caataagagcgaaactctgc

SEQ ID NO: 110338 - DNA, 20 bp, synthetic construct
  source 1..20: mol_type = other DNA
gcaataagagcgaaactctg

SEQ ID NO: 110339 - DNA, 20 bp, synthetic construct
  source 1..20: mol_type = other DNA
ggcaataagagcgaaactct

SEQ ID NO: 110340 - DNA, 20 bp, synthetic construct
  source 1..20: mol_type = other DNA
gggcaataagagcgaaactc

SEQ ID NO: 110341 - DNA, 20 bp, synthetic construct
  source 1..20: mol_type = other DNA
tgggcaataagagcgaaact

SEQ ID NO: 110342 - DNA, 20 bp, synthetic construct
  source 1..20: mol_type = other DNA
ctgggcaataagagcgaaac

SEQ ID NO: 110343 - DNA, 20 bp, synthetic construct
  source 1..20: mol_type = other DNA
cctgggcaataagagcgaaa

SEQ ID NO: 110344 - DNA, 20 bp, synthetic construct
  source 1..20: mol_type = other DNA
gcctgggcaataagagcgaa

SEQ ID NO: 110345 - DNA, 20 bp, synthetic construct
  source 1..20: mol_type = other DNA
agcctgggcaataagagcga

SEQ ID NO: 110346 - DNA, 20 bp, synthetic construct
  source 1..20: mol_type = other DNA
cagcctgggcaataagagcg

SEQ ID NO: 110347 - DNA, 20 bp, synthetic construct
  source 1..20: mol_type = other DNA
ccagcctgggcaataagagc

SEQ ID NO: 110348 - DNA, 20 bp, synthetic construct
  source 1..20: mol_type = other DNA
tccagcctgggcaataagag

SEQ ID NO: 110349 - DNA, 20 bp, synthetic construct
  source 1..20: mol_type = other DNA
ctccagcctgggcaataaga

SEQ ID NO: 110350 - DNA, 20 bp, synthetic construct
  source 1..20: mol_type = other DNA
actccagcctgggcaataag

SEQ ID NO: 110351 - DNA, 20 bp, synthetic construct
  source 1..20: mol_type = other DNA
tactccagcctgggcaataa

SEQ ID NO: 110352 - DNA, 20 bp, synthetic construct
  source 1..20: mol_type = other DNA
atactccagcctgggcaata

SEQ ID NO: 110353 - DNA, 20 bp, synthetic construct
  source 1..20: mol_type = other DNA
tatactccagcctgggcaat

SEQ ID NO: 110354 - DNA, 20 bp, synthetic construct
  source 1..20: mol_type = other DNA
ctatactccagcctgggcaa

SEQ ID NO: 110355 - DNA, 20 bp, synthetic construct
  source 1..20: mol_type = other DNA
actatactccagcctgggca

SEQ ID NO: 110356 - DNA, 20 bp, synthetic construct
  source 1..20: mol_type = other DNA
cactatactccagcctgggc

SEQ ID NO: 110357 - DNA, 20 bp, synthetic construct
  source 1..20: mol_type = other DNA
tcactatactccagcctggg

SEQ ID NO: 110358 - DNA, 20 bp, synthetic construct
  source 1..20: mol_type = other DNA
gtcactatactccagcctgg

SEQ ID NO: 110359 - DNA, 20 bp, synthetic construct
  source 1..20: mol_type = other DNA
cgtcactatactccagcctg

SEQ ID NO: 110360 - DNA, 20 bp, synthetic construct
  source 1..20: mol_type = other DNA
gcgtcactatactccagcct

SEQ ID NO: 110361 - DNA, 20 bp, synthetic construct
  source 1..20: mol_type = other DNA
tgcgtcactatactccagcc

SEQ ID NO: 110362 - DNA, 20 bp, synthetic construct
  source 1..20: mol_type = other DNA
ttgcgtcactatactccagc

SEQ ID NO: 110363 - DNA, 20 bp, synthetic construct
  source 1..20: mol_type = other DNA
attgcgtcactatactccag

SEQ ID NO: 110364 - DNA, 20 bp, synthetic construct
  source 1..20: mol_type = other DNA
gattgcgtcactatactcca

SEQ ID NO: 110365 - DNA, 20 bp, synthetic construct
  source 1..20: mol_type = other DNA
agattgcgtcactatactcc

SEQ ID NO: 110366 - DNA, 20 bp, synthetic construct
  source 1..20: mol_type = other DNA
gagattgcgtcactatactc

SEQ ID NO: 110367 - DNA, 20 bp, synthetic construct
  source 1..20: mol_type = other DNA
tgagattgcgtcactatact

SEQ ID NO: 110368 - DNA, 20 bp, synthetic construct
  source 1..20: mol_type = other DNA
ctgagattgcgtcactatac

SEQ ID NO: 110369 - DNA, 20 bp, synthetic construct
  source 1..20: mol_type = other DNA
gctgagattgcgtcactata

SEQ ID NO: 110370 - DNA, 20 bp, synthetic construct
  source 1..20: mol_type = other DNA
agctgagattgcgtcactat

SEQ ID NO: 110371 - DNA, 20 bp, synthetic construct
  source 1..20: mol_type = other DNA
gagctgagattgcgtcacta

SEQ ID NO: 110372 - DNA, 20 bp, synthetic construct
  source 1..20: mol_type = other DNA
tgagctgagattgcgtcact

SEQ ID NO: 110373 - DNA, 20 bp, synthetic construct
  source 1..20: mol_type = other DNA
gtgagctgagattgcgtcac

SEQ ID NO: 110374 - DNA, 20 bp, synthetic construct
  source 1..20: mol_type = other DNA
ggtgagctgagattgcgtca

SEQ ID NO: 110375 - DNA, 20 bp, synthetic construct
  source 1..20: mol_type = other DNA
tggtgagctgagattgcgtc

SEQ ID NO: 110376 - DNA, 20 bp, synthetic construct
  source 1..20: mol_type = other DNA
gtggtgagctgagattgcgt

SEQ ID NO: 110377 - DNA, 20 bp, synthetic construct
  source 1..20: mol_type = other DNA
tgtggtgagctgagattgcg

SEQ ID NO: 110378 - DNA, 20 bp, synthetic construct
  source 1..20: mol_type = other DNA
ttgtggtgagctgagattgc

SEQ ID NO: 110379 - DNA, 20 bp, synthetic construct
  source 1..20: mol_type = other DNA
gttgtggtgagctgagattg

SEQ ID NO: 110380 - DNA, 20 bp, synthetic construct
  source 1..20: mol_type = other DNA
ggttgtggtgagctgagatt

SEQ ID NO: 110381 - DNA, 20 bp, synthetic construct
  source 1..20: mol_type = other DNA
aggttgtggtgagctgagat

SEQ ID NO: 110382 - DNA, 20 bp, synthetic construct
  source 1..20: mol_type = other DNA
gaggttgtggtgagctgaga

SEQ ID NO: 110383 - DNA, 20 bp, synthetic construct
  source 1..20: mol_type = other DNA
ggaggttgtggtgagctgag

SEQ ID NO: 110384 - DNA, 20 bp, synthetic construct
  source 1..20: mol_type = other DNA
cggaggttgtggtgagctga

SEQ ID NO: 110385 - DNA, 20 bp, synthetic construct
  source 1..20: mol_type = other DNA
gcggaggttgtggtgagctg

SEQ ID NO: 110386 - DNA, 20 bp, synthetic construct
  source 1..20: mol_type = other DNA
ggcggaggttgtggtgagct

SEQ ID NO: 110387 - DNA, 20 bp, synthetic construct
  source 1..20: mol_type = other DNA
aggcggaggttgtggtgagc

SEQ ID NO: 110388 - DNA, 20 bp, synthetic construct
  source 1..20: mol_type = other DNA
gaggcggaggttgtggtgag

SEQ ID NO: 110389 - DNA, 20 bp, synthetic construct
  source 1..20: mol_type = other DNA
ggaggcggaggttgtggtga

SEQ ID NO: 110390 - DNA, 20 bp, synthetic construct
  source 1..20: mol_type = other DNA
gggaggcggaggttgtggtg

SEQ ID NO: 110391 - DNA, 20 bp, synthetic construct
  source 1..20: mol_type = other DNA
cgggaggcggaggttgtggt

SEQ ID NO: 110392 - DNA, 20 bp, synthetic construct
  source 1..20: mol_type = other DNA
ccgggaggcggaggttgtgg

SEQ ID NO: 110393 - DNA, 20 bp, synthetic construct
  source 1..20: mol_type = other DNA
cccgggaggcggaggttgtg

SEQ ID NO: 110394 - DNA, 20 bp, synthetic construct
  source 1..20: mol_type = other DNA
acccgggaggcggaggttgt

SEQ ID NO: 110395 - DNA, 20 bp, synthetic construct
  source 1..20: mol_type = other DNA
aacccgggaggcggaggttg

SEQ ID NO: 110396 - DNA, 20 bp, synthetic construct
  source 1..20: mol_type = other DNA
gaacccgggaggcggaggtt

SEQ ID NO: 110397 - DNA, 20 bp, synthetic construct
  source 1..20: mol_type = other DNA
tgaacccgggaggcggaggt

SEQ ID NO: 110398 - DNA, 20 bp, synthetic construct
  source 1..20: mol_type = other DNA
ttgaacccgggaggcggagg

SEQ ID NO: 110399 - DNA, 20 bp, synthetic construct
  source 1..20: mol_type = other DNA
tttgaacccgggaggcggag

SEQ ID NO: 110400 - DNA, 20 bp, synthetic construct
  source 1..20: mol_type = other DNA
atttgaacccgggaggcgga

SEQ ID NO: 110401 - DNA, 20 bp, synthetic construct
  source 1..20: mol_type = other DNA
tatttgaacccgggaggcgg

SEQ ID NO: 110402 - DNA, 20 bp, synthetic construct
  source 1..20: mol_type = other DNA
ttatttgaacccgggaggcg

SEQ ID NO: 110403 - DNA, 20 bp, synthetic construct
  source 1..20: mol_type = other DNA
attatttgaacccgggaggc

SEQ ID NO: 110404 - DNA, 20 bp, synthetic construct
  source 1..20: mol_type = other DNA
aattatttgaacccgggagg

SEQ ID NO: 110405 - DNA, 20 bp, synthetic construct
  source 1..20: mol_type = other DNA
gaattatttgaacccgggag

SEQ ID NO: 110406 - DNA, 20 bp, synthetic construct
  source 1..20: mol_type = other DNA
agaattatttgaacccggga

SEQ ID NO: 110407 - DNA, 20 bp, synthetic construct
  source 1..20: mol_type = other DNA
gagaattatttgaacccggg

SEQ ID NO: 110408 - DNA, 20 bp, synthetic construct
  source 1..20: mol_type = other DNA
ggagaattatttgaacccgg

SEQ ID NO: 110409 - DNA, 20 bp, synthetic construct
  source 1..20: mol_type = other DNA
aggagaattatttgaacccg

SEQ ID NO: 110410 - DNA, 20 bp, synthetic construct
  source 1..20: mol_type = other DNA
taggagaattatttgaaccc

SEQ ID NO: 110411 - DNA, 20 bp, synthetic construct
  source 1..20: mol_type = other DNA
gtaggagaattatttgaacc

SEQ ID NO: 110412 - DNA, 20 bp, synthetic construct
  source 1..20: mol_type = other DNA
ggtaggagaattatttgaac

SEQ ID NO: 110413 - DNA, 20 bp, synthetic construct
  source 1..20: mol_type = other DNA
aggtaggagaattatttgaa

SEQ ID NO: 110414 - DNA, 20 bp, synthetic construct
  source 1..20: mol_type = other DNA
gaggtaggagaattatttga

SEQ ID NO: 110415 - DNA, 20 bp, synthetic construct
  source 1..20: mol_type = other DNA
tgaggtaggagaattatttg

SEQ ID NO: 110416 - DNA, 20 bp, synthetic construct
  source 1..20: mol_type = other DNA
ctgaggtaggagaattattt

SEQ ID NO: 110417 - DNA, 20 bp, synthetic construct
  source 1..20: mol_type = other DNA
gctgaggtaggagaattatt

SEQ ID NO: 110418 - DNA, 20 bp, synthetic construct
  source 1..20: mol_type = other DNA
ggctgaggtaggagaattat

SEQ ID NO: 110419 - DNA, 20 bp, synthetic construct
  source 1..20: mol_type = other DNA
aggctgaggtaggagaatta

SEQ ID NO: 110420 - DNA, 20 bp, synthetic construct
  source 1..20: mol_type = other DNA
gaggctgaggtaggagaatt

SEQ ID NO: 110421 - DNA, 20 bp, synthetic construct
  source 1..20: mol_type = other DNA
ggaggctgaggtaggagaat

SEQ ID NO: 110422 - DNA, 20 bp, synthetic construct
  source 1..20: mol_type = other DNA
aggaggctgaggtaggagaa

SEQ ID NO: 110423 - DNA, 20 bp, synthetic construct
  source 1..20: mol_type = other DNA
caggaggctgaggtaggaga

SEQ ID NO: 110424 - DNA, 20 bp, synthetic construct
  source 1..20: mol_type = other DNA
tcaggaggctgaggtaggag

SEQ ID NO: 110425 - DNA, 20 bp, synthetic construct
  source 1..20: mol_type = other DNA
ctcaggaggctgaggtagga

SEQ ID NO: 110426 - DNA, 20 bp, synthetic construct
  source 1..20: mol_type = other DNA
actcaggaggctgaggtagg

SEQ ID NO: 110427 - DNA, 20 bp, synthetic construct
  source 1..20: mol_type = other DNA
tactcaggaggctgaggtag

SEQ ID NO: 110428 - DNA, 20 bp, synthetic construct
  source 1..20: mol_type = other DNA
ctactcaggaggctgaggta

SEQ ID NO: 110429 - DNA, 20 bp, synthetic construct
  source 1..20: mol_type = other DNA
gctactcaggaggctgaggt

SEQ ID NO: 110430 - DNA, 20 bp, synthetic construct
  source 1..20: mol_type = other DNA
agctactcaggaggctgagg

SEQ ID NO: 110431 - DNA, 20 bp, synthetic construct
  source 1..20: mol_type = other DNA
cagctactcaggaggctgag

SEQ ID NO: 110432 - DNA, 20 bp, synthetic construct
  source 1..20: mol_type = other DNA
ccagctactcaggaggctga

SEQ ID NO: 110433 - DNA, 20 bp, synthetic construct
  source 1..20: mol_type = other DNA
cccagctactcaggaggctg

SEQ ID NO: 110434 - DNA, 20 bp, synthetic construct
  source 1..20: mol_type = other DNA
tcccagctactcaggaggct

SEQ ID NO: 110435 - DNA, 20 bp, synthetic construct
  source 1..20: mol_type = other DNA
atcccagctactcaggaggc

SEQ ID NO: 110436 - DNA, 20 bp, synthetic construct
  source 1..20: mol_type = other DNA
aatcccagctactcaggagg

SEQ ID NO: 110437 - DNA, 20 bp, synthetic construct
  source 1..20: mol_type = other DNA
taatcccagctactcaggag

SEQ ID NO: 110438 - DNA, 20 bp, synthetic construct
  source 1..20: mol_type = other DNA
gtaatcccagctactcagga

SEQ ID NO: 110439 - DNA, 20 bp, synthetic construct
  source 1..20: mol_type = other DNA
ggtaatcccagctactcagg

SEQ ID NO: 110440 - DNA, 20 bp, synthetic construct
  source 1..20: mol_type = other DNA
cggtaatcccagctactcag

SEQ ID NO: 110441 - DNA, 20 bp, synthetic construct
  source 1..20: mol_type = other DNA
ccggtaatcccagctactca

SEQ ID NO: 110442 - DNA, 20 bp, synthetic construct
  source 1..20: mol_type = other DNA
gccggtaatcccagctactc

SEQ ID NO: 110443 - DNA, 20 bp, synthetic construct
  source 1..20: mol_type = other DNA
tgccggtaatcccagctact

SEQ ID NO: 110444 - DNA, 20 bp, synthetic construct
  source 1..20: mol_type = other DNA
atgccggtaatcccagctac

SEQ ID NO: 110445 - DNA, 20 bp, synthetic construct
  source 1..20: mol_type = other DNA
catgccggtaatcccagcta

SEQ ID NO: 110446 - DNA, 20 bp, synthetic construct
  source 1..20: mol_type = other DNA
gcatgccggtaatcccagct

SEQ ID NO: 110447 - DNA, 20 bp, synthetic construct
  source 1..20: mol_type = other DNA
cgcatgccggtaatcccagc

SEQ ID NO: 110448 - DNA, 20 bp, synthetic construct
  source 1..20: mol_type = other DNA
gcgcatgccggtaatcccag

SEQ ID NO: 110449 - DNA, 20 bp, synthetic construct
  source 1..20: mol_type = other DNA
agcgcatgccggtaatccca

SEQ ID NO: 110450 - DNA, 20 bp, synthetic construct
  source 1..20: mol_type = other DNA
tagcgcatgccggtaatccc

SEQ ID NO: 110451 - DNA, 20 bp, synthetic construct
  source 1..20: mol_type = other DNA
gtagcgcatgccggtaatcc

SEQ ID NO: 110452 - DNA, 20 bp, synthetic construct
  source 1..20: mol_type = other DNA
ggtagcgcatgccggtaatc

SEQ ID NO: 110453 - DNA, 20 bp, synthetic construct
  source 1..20: mol_type = other DNA
tggtagcgcatgccggtaat

SEQ ID NO: 110454 - DNA, 20 bp, synthetic construct
  source 1..20: mol_type = other DNA
gtggtagcgcatgccggtaa

SEQ ID NO: 110455 - DNA, 20 bp, synthetic construct
  source 1..20: mol_type = other DNA
ggtggtagcgcatgccggta

SEQ ID NO: 110456 - DNA, 20 bp, synthetic construct
  source 1..20: mol_type = other DNA
aggtggtagcgcatgccggt

SEQ ID NO: 110457 - DNA, 20 bp, synthetic construct
  source 1..20: mol_type = other DNA
gaggtggtagcgcatgccgg

SEQ ID NO: 110458 - DNA, 20 bp, synthetic construct
  source 1..20: mol_type = other DNA
agaggtggtagcgcatgccg

SEQ ID NO: 110459 - DNA, 20 bp, synthetic construct
  source 1..20: mol_type = other DNA
cagaggtggtagcgcatgcc

SEQ ID NO: 110460 - DNA, 20 bp, synthetic construct
  source 1..20: mol_type = other DNA
ccagaggtggtagcgcatgc

SEQ ID NO: 110461 - DNA, 20 bp, synthetic construct
  source 1..20: mol_type = other DNA
gccagaggtggtagcgcatg

SEQ ID NO: 110462 - DNA, 20 bp, synthetic construct
  source 1..20: mol_type = other DNA
agccagaggtggtagcgcat

SEQ ID NO: 110463 - DNA, 20 bp, synthetic construct
  source 1..20: mol_type = other DNA
tagccagaggtggtagcgca

SEQ ID NO: 110464 - DNA, 20 bp, synthetic construct
  source 1..20: mol_type = other DNA
ttagccagaggtggtagcgc

SEQ ID NO: 110465 - DNA, 20 bp, synthetic construct
  source 1..20: mol_type = other DNA
attagccagaggtggtagcg

SEQ ID NO: 110466 - DNA, 20 bp, synthetic construct
  source 1..20: mol_type = other DNA
aattagccagaggtggtagc

SEQ ID NO: 110467 - DNA, 20 bp, synthetic construct
  source 1..20: mol_type = other DNA
aaattagccagaggtggtag

SEQ ID NO: 110468 - DNA, 20 bp, synthetic construct
  source 1..20: mol_type = other DNA
aaaattagccagaggtggta

SEQ ID NO: 110469 - DNA, 20 bp, synthetic construct
  source 1..20: mol_type = other DNA
aaaaattagccagaggtggt

SEQ ID NO: 110470 - DNA, 20 bp, synthetic construct
  source 1..20: mol_type = other DNA
aaaaaattagccagaggtgg

SEQ ID NO: 110471 - DNA, 20 bp, synthetic construct
  source 1..20: mol_type = other DNA
aaaaaaattagccagaggtg

SEQ ID NO: 110472 - DNA, 20 bp, synthetic construct
  source 1..20: mol_type = other DNA
caaaaaaattagccagaggt

SEQ ID NO: 110473 - DNA, 20 bp, synthetic construct
  source 1..20: mol_type = other DNA
acaaaaaaattagccagagg

SEQ ID NO: 110474 - DNA, 20 bp, synthetic construct
  source 1..20: mol_type = other DNA
aacaaaaaaattagccagag

SEQ ID NO: 110475 - DNA, 20 bp, synthetic construct
  source 1..20: mol_type = other DNA
aaacaaaaaaattagccaga

SEQ ID NO: 110476 - DNA, 20 bp, synthetic construct
  source 1..20: mol_type = other DNA
aaaacaaaaaaattagccag

SEQ ID NO: 110477 - DNA, 20 bp, synthetic construct
  source 1..20: mol_type = other DNA
aaaaacaaaaaaattagcca

SEQ ID NO: 110478 - DNA, 20 bp, synthetic construct
  source 1..20: mol_type = other DNA
aaaaaacaaaaaaattagcc

SEQ ID NO: 110479 - DNA, 20 bp, synthetic construct
  source 1..20: mol_type = other DNA
taaaaaacaaaaaaattagc

SEQ ID NO: 110480 - DNA, 20 bp, synthetic construct
  source 1..20: mol_type = other DNA
ctaaaaaacaaaaaaattag

SEQ ID NO: 110481 - DNA, 20 bp, synthetic construct
  source 1..20: mol_type = other DNA
actaaaaaacaaaaaaatta

SEQ ID NO: 110482 - DNA, 20 bp, synthetic construct
  source 1..20: mol_type = other DNA
tactaaaaaacaaaaaaatt

SEQ ID NO: 110483 - DNA, 20 bp, synthetic construct
  source 1..20: mol_type = other DNA
ctactaaaaaacaaaaaaat

SEQ ID NO: 110484 - DNA, 20 bp, synthetic construct
  source 1..20: mol_type = other DNA
tctactaaaaaacaaaaaaa

SEQ ID NO: 110485 - DNA, 20 bp, synthetic construct
  source 1..20: mol_type = other DNA
ctctactaaaaaacaaaaaa

SEQ ID NO: 110486 - DNA, 20 bp, synthetic construct
  source 1..20: mol_type = other DNA
tctctactaaaaaacaaaaa

SEQ ID NO: 110487 - DNA, 20 bp, synthetic construct
  source 1..20: mol_type = other DNA
atctctactaaaaaacaaaa

SEQ ID NO: 110488 - DNA, 20 bp, synthetic construct
  source 1..20: mol_type = other DNA
catctctactaaaaaacaaa

SEQ ID NO: 110489 - DNA, 20 bp, synthetic construct
  source 1..20: mol_type = other DNA
tcatctctactaaaaaacaa

SEQ ID NO: 110490 - DNA, 20 bp, synthetic construct
  source 1..20: mol_type = other DNA
ctcatctctactaaaaaaca

SEQ ID NO: 110491 - DNA, 20 bp, synthetic construct
  source 1..20: mol_type = other DNA
cctcatctctactaaaaaac

SEQ ID NO: 110492 - DNA, 20 bp, synthetic construct
  source 1..20: mol_type = other DNA
acctcatctctactaaaaaa

SEQ ID NO: 110493 - DNA, 20 bp, synthetic construct
  source 1..20: mol_type = other DNA
aacctcatctctactaaaaa

SEQ ID NO: 110494 - DNA, 20 bp, synthetic construct
  source 1..20: mol_type = other DNA
aaacctcatctctactaaaa

SEQ ID NO: 110495 - DNA, 20 bp, synthetic construct
  source 1..20: mol_type = other DNA
gaaacctcatctctactaaa

SEQ ID NO: 110496 - DNA, 20 bp, synthetic construct
  source 1..20: mol_type = other DNA
agaaacctcatctctactaa

SEQ ID NO: 110497 - DNA, 20 bp, synthetic construct
  source 1..20: mol_type = other DNA
gagaaacctcatctctacta

SEQ ID NO: 110498 - DNA, 20 bp, synthetic construct
  source 1..20: mol_type = other DNA
ggagaaacctcatctctact

SEQ ID NO: 110499 - DNA, 20 bp, synthetic construct
  source 1..20: mol_type = other DNA
tggagaaacctcatctctac

SEQ ID NO: 110500 - DNA, 20 bp, synthetic construct
  source 1..20: mol_type = other DNA
atggagaaacctcatctcta

SEQ ID NO: 110501 - DNA, 20 bp, synthetic construct
  source 1..20: mol_type = other DNA
catggagaaacctcatctct

SEQ ID NO: 110502 - DNA, 20 bp, synthetic construct
  source 1..20: mol_type = other DNA
acatggagaaacctcatctc

SEQ ID NO: 110503 - DNA, 20 bp, synthetic construct
  source 1..20: mol_type = other DNA
aacatggagaaacctcatct

SEQ ID NO: 110504 - DNA, 20 bp, synthetic construct
  source 1..20: mol_type = other DNA
caacatggagaaacctcatc

SEQ ID NO: 110505 - DNA, 20 bp, synthetic construct
  source 1..20: mol_type = other DNA
ccaacatggagaaacctcat

SEQ ID NO: 110506 - DNA, 20 bp, synthetic construct
  source 1..20: mol_type = other DNA
accaacatggagaaacctca

SEQ ID NO: 110507 - DNA, 20 bp, synthetic construct
  source 1..20: mol_type = other DNA
gaccaacatggagaaacctc

SEQ ID NO: 110508 - DNA, 20 bp, synthetic construct
  source 1..20: mol_type = other DNA
tgaccaacatggagaaacct

SEQ ID NO: 110509 - DNA, 20 bp, synthetic construct
  source 1..20: mol_type = other DNA
ctgaccaacatggagaaacc

SEQ ID NO: 110510 - DNA, 20 bp, synthetic construct
  source 1..20: mol_type = other DNA
cctgaccaacatggagaaac

SEQ ID NO: 110511 - DNA, 20 bp, synthetic construct
  source 1..20: mol_type = other DNA
gcctgaccaacatggagaaa

SEQ ID NO: 110512 - DNA, 20 bp, synthetic construct
  source 1..20: mol_type = other DNA
agcctgaccaacatggagaa

SEQ ID NO: 110513 - DNA, 20 bp, synthetic construct
  source 1..20: mol_type = other DNA
cagcctgaccaacatggaga

SEQ ID NO: 110514 - DNA, 20 bp, synthetic construct
  source 1..20: mol_type = other DNA
ccagcctgaccaacatggag

SEQ ID NO: 110515 - DNA, 20 bp, synthetic construct
  source 1..20: mol_type = other DNA
accagcctgaccaacatgga

SEQ ID NO: 110516 - DNA, 20 bp, synthetic construct
  source 1..20: mol_type = other DNA
gaccagcctgaccaacatgg

SEQ ID NO: 110517 - DNA, 20 bp, synthetic construct
  source 1..20: mol_type = other DNA
agaccagcctgaccaacatg

SEQ ID NO: 110518 - DNA, 20 bp, synthetic construct
  source 1..20: mol_type = other DNA
aagaccagcctgaccaacat

SEQ ID NO: 110519 - DNA, 20 bp, synthetic construct
  source 1..20: mol_type = other DNA
caagaccagcctgaccaaca

SEQ ID NO: 110520 - DNA, 20 bp, synthetic construct
  source 1..20: mol_type = other DNA
tcaagaccagcctgaccaac

SEQ ID NO: 110521 - DNA, 20 bp, synthetic construct
  source 1..20: mol_type = other DNA
ttcaagaccagcctgaccaa

SEQ ID NO: 110522 - DNA, 20 bp, synthetic construct
  source 1..20: mol_type = other DNA
gttcaagaccagcctgacca

SEQ ID NO: 110523 - DNA, 20 bp, synthetic construct
  source 1..20: mol_type = other DNA
agttcaagaccagcctgacc

SEQ ID NO: 110524 - DNA, 20 bp, synthetic construct
  source 1..20: mol_type = other DNA
gagttcaagaccagcctgac

SEQ ID NO: 110525 - DNA, 20 bp, synthetic construct
  source 1..20: mol_type = other DNA
ggagttcaagaccagcctga

SEQ ID NO: 110526 - DNA, 20 bp, synthetic construct
  source 1..20: mol_type = other DNA
gggagttcaagaccagcctg

SEQ ID NO: 110527 - DNA, 20 bp, synthetic construct
  source 1..20: mol_type = other DNA
cgggagttcaagaccagcct

SEQ ID NO: 110528 - DNA, 20 bp, synthetic construct
  source 1..20: mol_type = other DNA
tcgggagttcaagaccagcc

SEQ ID NO: 110529 - DNA, 20 bp, synthetic construct
  source 1..20: mol_type = other DNA
gtcgggagttcaagaccagc

SEQ ID NO: 110530 - DNA, 20 bp, synthetic construct
  source 1..20: mol_type = other DNA
ggtcgggagttcaagaccag

SEQ ID NO: 110531 - DNA, 20 bp, synthetic construct
  source 1..20: mol_type = other DNA
aggtcgggagttcaagacca

SEQ ID NO: 110532 - DNA, 20 bp, synthetic construct
  source 1..20: mol_type = other DNA
gaggtcgggagttcaagacc

SEQ ID NO: 110533 - DNA, 20 bp, synthetic construct
  source 1..20: mol_type = other DNA
tgaggtcgggagttcaagac

SEQ ID NO: 110534 - DNA, 20 bp, synthetic construct
  source 1..20: mol_type = other DNA
ctgaggtcgggagttcaaga

SEQ ID NO: 110535 - DNA, 20 bp, synthetic construct
  source 1..20: mol_type = other DNA
cctgaggtcgggagttcaag

SEQ ID NO: 110536 - DNA, 20 bp, synthetic construct
  source 1..20: mol_type = other DNA
acctgaggtcgggagttcaa

SEQ ID NO: 110537 - DNA, 20 bp, synthetic construct
  source 1..20: mol_type = other DNA
aacctgaggtcgggagttca

SEQ ID NO: 110538 - DNA, 20 bp, synthetic construct
  source 1..20: mol_type = other DNA
taacctgaggtcgggagttc

SEQ ID NO: 110539 - DNA, 20 bp, synthetic construct
  source 1..20: mol_type = other DNA
ataacctgaggtcgggagtt

SEQ ID NO: 110540 - DNA, 20 bp, synthetic construct
  source 1..20: mol_type = other DNA
gataacctgaggtcgggagt

SEQ ID NO: 110541 - DNA, 20 bp, synthetic construct
  source 1..20: mol_type = other DNA
ggataacctgaggtcgggag

SEQ ID NO: 110542 - DNA, 20 bp, synthetic construct
  source 1..20: mol_type = other DNA
cggataacctgaggtcggga

SEQ ID NO: 110543 - DNA, 20 bp, synthetic construct
  source 1..20: mol_type = other DNA
acggataacctgaggtcggg

SEQ ID NO: 110544 - DNA, 20 bp, synthetic construct
  source 1..20: mol_type = other DNA
gacggataacctgaggtcgg

SEQ ID NO: 110545 - DNA, 20 bp, synthetic construct
  source 1..20: mol_type = other DNA
ggacggataacctgaggtcg

SEQ ID NO: 110546 - DNA, 20 bp, synthetic construct
  source 1..20: mol_type = other DNA
cggacggataacctgaggtc

SEQ ID NO: 110547 - DNA, 20 bp, synthetic construct
  source 1..20: mol_type = other DNA
gcggacggataacctgaggt

SEQ ID NO: 110548 - DNA, 20 bp, synthetic construct
  source 1..20: mol_type = other DNA
ggcggacggataacctgagg

SEQ ID NO: 110549 - DNA, 20 bp, synthetic construct
  source 1..20: mol_type = other DNA
aggcggacggataacctgag

SEQ ID NO: 110550 - DNA, 20 bp, synthetic construct
  source 1..20: mol_type = other DNA
gaggcggacggataacctga

SEQ ID NO: 110551 - DNA, 20 bp, synthetic construct
  source 1..20: mol_type = other DNA
cgaggcggacggataacctg

SEQ ID NO: 110552 - DNA, 20 bp, synthetic construct
  source 1..20: mol_type = other DNA
ccgaggcggacggataacct

SEQ ID NO: 110553 - DNA, 20 bp, synthetic construct
  source 1..20: mol_type = other DNA
gccgaggcggacggataacc

SEQ ID NO: 110554 - DNA, 20 bp, synthetic construct
  source 1..20: mol_type = other DNA
ggccgaggcggacggataac

SEQ ID NO: 110555 - DNA, 20 bp, synthetic construct
  source 1..20: mol_type = other DNA
aggccgaggcggacggataa

SEQ ID NO: 110556 - DNA, 20 bp, synthetic construct
  source 1..20: mol_type = other DNA
gaggccgaggcggacggata

SEQ ID NO: 110557 - DNA, 20 bp, synthetic construct
  source 1..20: mol_type = other DNA
ggaggccgaggcggacggat

SEQ ID NO: 110558 - DNA, 20 bp, synthetic construct
  source 1..20: mol_type = other DNA
gggaggccgaggcggacgga

SEQ ID NO: 110559 - DNA, 20 bp, synthetic construct
  source 1..20: mol_type = other DNA
tgggaggccgaggcggacgg

SEQ ID NO: 110560 - DNA, 20 bp, synthetic construct
  source 1..20: mol_type = other DNA
ttgggaggccgaggcggacg

SEQ ID NO: 110561 - DNA, 20 bp, synthetic construct
  source 1..20: mol_type = other DNA
tttgggaggccgaggcggac

SEQ ID NO: 110562 - DNA, 20 bp, synthetic construct
  source 1..20: mol_type = other DNA
ctttgggaggccgaggcgga

SEQ ID NO: 110563 - DNA, 20 bp, synthetic construct
  source 1..20: mol_type = other DNA
actttgggaggccgaggcgg

SEQ ID NO: 110564 - DNA, 20 bp, synthetic construct
  source 1..20: mol_type = other DNA
cactttgggaggccgaggcg

SEQ ID NO: 110565 - DNA, 20 bp, synthetic construct
  source 1..20: mol_type = other DNA
gcactttgggaggccgaggc

SEQ ID NO: 110566 - DNA, 20 bp, synthetic construct
  source 1..20: mol_type = other DNA
agcactttgggaggccgagg

SEQ ID NO: 110567 - DNA, 20 bp, synthetic construct
  source 1..20: mol_type = other DNA
cagcactttgggaggccgag

SEQ ID NO: 110568 - DNA, 20 bp, synthetic construct
  source 1..20: mol_type = other DNA
ccagcactttgggaggccga

SEQ ID NO: 110569 - DNA, 20 bp, synthetic construct
  source 1..20: mol_type = other DNA
cccagcactttgggaggccg

SEQ ID NO: 110570 - DNA, 20 bp, synthetic construct
  source 1..20: mol_type = other DNA
tcccagcactttgggaggcc

SEQ ID NO: 110571 - DNA, 20 bp, synthetic construct
  source 1..20: mol_type = other DNA
atcccagcactttgggaggc

SEQ ID NO: 110572 - DNA, 20 bp, synthetic construct
  source 1..20: mol_type = other DNA
aatcccagcactttgggagg

SEQ ID NO: 110573 - DNA, 20 bp, synthetic construct
  source 1..20: mol_type = other DNA
taatcccagcactttgggag

SEQ ID NO: 110574 - DNA, 20 bp, synthetic construct
  source 1..20: mol_type = other DNA
gtaatcccagcactttggga

SEQ ID NO: 110575 - DNA, 20 bp, synthetic construct
  source 1..20: mol_type = other DNA
tgtaatcccagcactttggg

SEQ ID NO: 110576 - DNA, 20 bp, synthetic construct
  source 1..20: mol_type = other DNA
ctgtaatcccagcactttgg

SEQ ID NO: 110577 - DNA, 20 bp, synthetic construct
  source 1..20: mol_type = other DNA
tctgtaatcccagcactttg

SEQ ID NO: 110578 - DNA, 20 bp, synthetic construct
  source 1..20: mol_type = other DNA
gtctgtaatcccagcacttt

SEQ ID NO: 110579 - DNA, 20 bp, synthetic construct
  source 1..20: mol_type = other DNA
ggtctgtaatcccagcactt

SEQ ID NO: 110580 - DNA, 20 bp, synthetic construct
  source 1..20: mol_type = other DNA
tggtctgtaatcccagcact

SEQ ID NO: 110581 - DNA, 20 bp, synthetic construct
  source 1..20: mol_type = other DNA
atggtctgtaatcccagcac

SEQ ID NO: 110582 - DNA, 20 bp, synthetic construct
  source 1..20: mol_type = other DNA
tatggtctgtaatcccagca

SEQ ID NO: 110583 - DNA, 20 bp, synthetic construct
  source 1..20: mol_type = other DNA
ctatggtctgtaatcccagc

SEQ ID NO: 110584 - DNA, 20 bp, synthetic construct
  source 1..20: mol_type = other DNA
actatggtctgtaatcccag

SEQ ID NO: 110585 - DNA, 20 bp, synthetic construct
  source 1..20: mol_type = other DNA
cactatggtctgtaatccca

SEQ ID NO: 110586 - DNA, 20 bp, synthetic construct
  source 1..20: mol_type = other DNA
gcactatggtctgtaatccc

SEQ ID NO: 110587 - DNA, 20 bp, synthetic construct
  source 1..20: mol_type = other DNA
ggcactatggtctgtaatcc

SEQ ID NO: 110588 - DNA, 20 bp, synthetic construct
  source 1..20: mol_type = other DNA
gggcactatggtctgtaatc

SEQ ID NO: 110589 - DNA, 20 bp, synthetic construct
  source 1..20: mol_type = other DNA
tgggcactatggtctgtaat

SEQ ID NO: 110590 - DNA, 20 bp, synthetic construct
  source 1..20: mol_type = other DNA
ctgggcactatggtctgtaa

SEQ ID NO: 110591 - DNA, 20 bp, synthetic construct
  source 1..20: mol_type = other DNA
gctgggcactatggtctgta

SEQ ID NO: 110592 - DNA, 20 bp, synthetic construct
  source 1..20: mol_type = other DNA
ggctgggcactatggtctgt

SEQ ID NO: 110593 - DNA, 20 bp, synthetic construct
  source 1..20: mol_type = other DNA
gggctgggcactatggtctg

SEQ ID NO: 110594 - DNA, 20 bp, synthetic construct
  source 1..20: mol_type = other DNA
cgggctgggcactatggtct

SEQ ID NO: 110595 - DNA, 20 bp, synthetic construct
  source 1..20: mol_type = other DNA
tcgggctgggcactatggtc

SEQ ID NO: 110596 - DNA, 20 bp, synthetic construct
  source 1..20: mol_type = other DNA
ttcgggctgggcactatggt

SEQ ID NO: 110597 - DNA, 20 bp, synthetic construct
  source 1..20: mol_type = other DNA
tttcgggctgggcactatgg

SEQ ID NO: 110598 - DNA, 20 bp, synthetic construct
  source 1..20: mol_type = other DNA
atttcgggctgggcactatg

SEQ ID NO: 110599 - DNA, 20 bp, synthetic construct
  source 1..20: mol_type = other DNA
aatttcgggctgggcactat

SEQ ID NO: 110600 - DNA, 20 bp, synthetic construct
  source 1..20: mol_type = other DNA
gaatttcgggctgggcacta

SEQ ID NO: 110601 - DNA, 20 bp, synthetic construct
  source 1..20: mol_type = other DNA
tgaatttcgggctgggcact

SEQ ID NO: 110602 - DNA, 20 bp, synthetic construct
  source 1..20: mol_type = other DNA
ctgaatttcgggctgggcac

SEQ ID NO: 110603 - DNA, 20 bp, synthetic construct
  source 1..20: mol_type = other DNA
tctgaatttcgggctgggca

SEQ ID NO: 110604 - DNA, 20 bp, synthetic construct
  source 1..20: mol_type = other DNA
atctgaatttcgggctgggc

SEQ ID NO: 110605 - DNA, 20 bp, synthetic construct
  source 1..20: mol_type = other DNA
aatctgaatttcgggctggg

SEQ ID NO: 110606 - DNA, 20 bp, synthetic construct
  source 1..20: mol_type = other DNA
gaatctgaatttcgggctgg

SEQ ID NO: 110607 - DNA, 20 bp, synthetic construct
  source 1..20: mol_type = other DNA
agaatctgaatttcgggctg

SEQ ID NO: 110608 - DNA, 20 bp, synthetic construct
  source 1..20: mol_type = other DNA
tagaatctgaatttcgggct

SEQ ID NO: 110609 - DNA, 20 bp, synthetic construct
  source 1..20: mol_type = other DNA
ttagaatctgaatttcgggc

SEQ ID NO: 110610 - DNA, 20 bp, synthetic construct
  source 1..20: mol_type = other DNA
attagaatctgaatttcggg

SEQ ID NO: 110611 - DNA, 20 bp, synthetic construct
  source 1..20: mol_type = other DNA
gattagaatctgaatttcgg

SEQ ID NO: 110612 - DNA, 20 bp, synthetic construct
  source 1..20: mol_type = other DNA
tgattagaatctgaatttcg

SEQ ID NO: 110613 - DNA, 20 bp, synthetic construct
  source 1..20: mol_type = other DNA
gtgattagaatctgaatttc

SEQ ID NO: 110614 - DNA, 20 bp, synthetic construct
  source 1..20: mol_type = other DNA
agtgattagaatctgaattt

SEQ ID NO: 110615 - DNA, 20 bp, synthetic construct
  source 1..20: mol_type = other DNA
cagtgattagaatctgaatt

SEQ ID NO: 110616 - DNA, 20 bp, synthetic construct
  source 1..20: mol_type = other DNA
ccagtgattagaatctgaat

SEQ ID NO: 110617 - DNA, 20 bp, synthetic construct
  source 1..20: mol_type = other DNA
cccagtgattagaatctgaa

SEQ ID NO: 110618 - DNA, 20 bp, synthetic construct
  source 1..20: mol_type = other DNA
tcccagtgattagaatctga

SEQ ID NO: 110619 - DNA, 20 bp, synthetic construct
  source 1..20: mol_type = other DNA
atcccagtgattagaatctg

SEQ ID NO: 110620 - DNA, 20 bp, synthetic construct
  source 1..20: mol_type = other DNA
catcccagtgattagaatct

SEQ ID NO: 110621 - DNA, 20 bp, synthetic construct
  source 1..20: mol_type = other DNA
ccatcccagtgattagaatc

SEQ ID NO: 110622 - DNA, 20 bp, synthetic construct
  source 1..20: mol_type = other DNA
tccatcccagtgattagaat

SEQ ID NO: 110623 - DNA, 20 bp, synthetic construct
  source 1..20: mol_type = other DNA
gtccatcccagtgattagaa

SEQ ID NO: 110624 - DNA, 20 bp, synthetic construct
  source 1..20: mol_type = other DNA
tgtccatcccagtgattaga

SEQ ID NO: 110625 - DNA, 20 bp, synthetic construct
  source 1..20: mol_type = other DNA
ttgtccatcccagtgattag

SEQ ID NO: 110626 - DNA, 20 bp, synthetic construct
  source 1..20: mol_type = other DNA
attgtccatcccagtgatta

SEQ ID NO: 110627 - DNA, 20 bp, synthetic construct
  source 1..20: mol_type = other DNA
aattgtccatcccagtgatt

SEQ ID NO: 110628 - DNA, 20 bp, synthetic construct
  source 1..20: mol_type = other DNA
gaattgtccatcccagtgat

SEQ ID NO: 110629 - DNA, 20 bp, synthetic construct
  source 1..20: mol_type = other DNA
ggaattgtccatcccagtga

SEQ ID NO: 110630 - DNA, 20 bp, synthetic construct
  source 1..20: mol_type = other DNA
gggaattgtccatcccagtg

SEQ ID NO: 110631 - DNA, 20 bp, synthetic construct
  source 1..20: mol_type = other DNA
ggggaattgtccatcccagt

SEQ ID NO: 110632 - DNA, 20 bp, synthetic construct
  source 1..20: mol_type = other DNA
aggggaattgtccatcccag

SEQ ID NO: 110633 - DNA, 20 bp, synthetic construct
  source 1..20: mol_type = other DNA
gaggggaattgtccatccca

SEQ ID NO: 110634 - DNA, 20 bp, synthetic construct
  source 1..20: mol_type = other DNA
agaggggaattgtccatccc

SEQ ID NO: 110635 - DNA, 20 bp, synthetic construct
  source 1..20: mol_type = other DNA
cagaggggaattgtccatcc

SEQ ID NO: 110636 - DNA, 20 bp, synthetic construct
  source 1..20: mol_type = other DNA
tcagaggggaattgtccatc

SEQ ID NO: 110637 - DNA, 20 bp, synthetic construct
  source 1..20: mol_type = other DNA
gtcagaggggaattgtccat

SEQ ID NO: 110638 - DNA, 20 bp, synthetic construct
  source 1..20: mol_type = other DNA
agtcagaggggaattgtcca

SEQ ID NO: 110639 - DNA, 20 bp, synthetic construct
  source 1..20: mol_type = other DNA
tagtcagaggggaattgtcc

SEQ ID NO: 110640 - DNA, 20 bp, synthetic construct
  source 1..20: mol_type = other DNA
ctagtcagaggggaattgtc

SEQ ID NO: 110641 - DNA, 20 bp, synthetic construct
  source 1..20: mol_type = other DNA
cctagtcagaggggaattgt

SEQ ID NO: 110642 - DNA, 20 bp, synthetic construct
  source 1..20: mol_type = other DNA
ccctagtcagaggggaattg

SEQ ID NO: 110643 - DNA, 20 bp, synthetic construct
  source 1..20: mol_type = other DNA
gccctagtcagaggggaatt

SEQ ID NO: 110644 - DNA, 20 bp, synthetic construct
  source 1..20: mol_type = other DNA
agccctagtcagaggggaat

SEQ ID NO: 110645 - DNA, 20 bp, synthetic construct
  source 1..20: mol_type = other DNA
tagccctagtcagaggggaa

SEQ ID NO: 110646 - DNA, 20 bp, synthetic construct
  source 1..20: mol_type = other DNA
ctagccctagtcagagggga

SEQ ID NO: 110647 - DNA, 20 bp, synthetic construct
  source 1..20: mol_type = other DNA
actagccctagtcagagggg

SEQ ID NO: 110648 - DNA, 20 bp, synthetic construct
  source 1..20: mol_type = other DNA
gactagccctagtcagaggg

SEQ ID NO: 110649 - DNA, 20 bp, synthetic construct
  source 1..20: mol_type = other DNA
agactagccctagtcagagg

SEQ ID NO: 110650 - DNA, 20 bp, synthetic construct
  source 1..20: mol_type = other DNA
tagactagccctagtcagag

SEQ ID NO: 110651 - DNA, 20 bp, synthetic construct
  source 1..20: mol_type = other DNA
ttagactagccctagtcaga

SEQ ID NO: 110652 - DNA, 20 bp, synthetic construct
  source 1..20: mol_type = other DNA
tttagactagccctagtcag

SEQ ID NO: 110653 - DNA, 20 bp, synthetic construct
  source 1..20: mol_type = other DNA
atttagactagccctagtca

SEQ ID NO: 110654 - DNA, 20 bp, synthetic construct
  source 1..20: mol_type = other DNA
tatttagactagccctagtc

SEQ ID NO: 110655 - DNA, 20 bp, synthetic construct
  source 1..20: mol_type = other DNA
gtatttagactagccctagt

SEQ ID NO: 110656 - DNA, 20 bp, synthetic construct
  source 1..20: mol_type = other DNA
agtatttagactagccctag

SEQ ID NO: 110657 - DNA, 20 bp, synthetic construct
  source 1..20: mol_type = other DNA
gagtatttagactagcccta

SEQ ID NO: 110658 - DNA, 20 bp, synthetic construct
  source 1..20: mol_type = other DNA
ggagtatttagactagccct

SEQ ID NO: 110659 - DNA, 20 bp, synthetic construct
  source 1..20: mol_type = other DNA
gggagtatttagactagccc

SEQ ID NO: 110660 - DNA, 20 bp, synthetic construct
  source 1..20: mol_type = other DNA
agggagtatttagactagcc

SEQ ID NO: 110661 - DNA, 20 bp, synthetic construct
  source 1..20: mol_type = other DNA
gagggagtatttagactagc

SEQ ID NO: 110662 - DNA, 20 bp, synthetic construct
  source 1..20: mol_type = other DNA
agagggagtatttagactag

SEQ ID NO: 110663 - DNA, 20 bp, synthetic construct
  source 1..20: mol_type = other DNA
cagagggagtatttagacta

SEQ ID NO: 110664 - DNA, 20 bp, synthetic construct
  source 1..20: mol_type = other DNA
acagagggagtatttagact

SEQ ID NO: 110665 - DNA, 20 bp, synthetic construct
  source 1..20: mol_type = other DNA
cacagagggagtatttagac

SEQ ID NO: 110666 - DNA, 20 bp, synthetic construct
  source 1..20: mol_type = other DNA
ccacagagggagtatttaga

SEQ ID NO: 110667 - DNA, 20 bp, synthetic construct
  source 1..20: mol_type = other DNA
cccacagagggagtatttag

SEQ ID NO: 110668 - DNA, 20 bp, synthetic construct
  source 1..20: mol_type = other DNA
acccacagagggagtattta

SEQ ID NO: 110669 - DNA, 20 bp, synthetic construct
  source 1..20: mol_type = other DNA
cacccacagagggagtattt

SEQ ID NO: 110670 - DNA, 20 bp, synthetic construct
  source 1..20: mol_type = other DNA
gcacccacagagggagtatt

SEQ ID NO: 110671 - DNA, 20 bp, synthetic construct
  source 1..20: mol_type = other DNA
agcacccacagagggagtat

SEQ ID NO: 110672 - DNA, 20 bp, synthetic construct
  source 1..20: mol_type = other DNA
cagcacccacagagggagta

SEQ ID NO: 110673 - DNA, 20 bp, synthetic construct
  source 1..20: mol_type = other DNA
ccagcacccacagagggagt

SEQ ID NO: 110674 - DNA, 20 bp, synthetic construct
  source 1..20: mol_type = other DNA
gccagcacccacagagggag

SEQ ID NO: 110675 - DNA, 20 bp, synthetic construct
  source 1..20: mol_type = other DNA
agccagcacccacagaggga

SEQ ID NO: 110676 - DNA, 20 bp, synthetic construct
  source 1..20: mol_type = other DNA
cagccagcacccacagaggg

SEQ ID NO: 110677 - DNA, 20 bp, synthetic construct
  source 1..20: mol_type = other DNA
tcagccagcacccacagagg

SEQ ID NO: 110678 - DNA, 20 bp, synthetic construct
  source 1..20: mol_type = other DNA
ttcagccagcacccacagag

SEQ ID NO: 110679 - DNA, 20 bp, synthetic construct
  source 1..20: mol_type = other DNA
attcagccagcacccacaga

SEQ ID NO: 110680 - DNA, 20 bp, synthetic construct
  source 1..20: mol_type = other DNA
aattcagccagcacccacag

SEQ ID NO: 110681 - DNA, 20 bp, synthetic construct
  source 1..20: mol_type = other DNA
gaattcagccagcacccaca

SEQ ID NO: 110682 - DNA, 20 bp, synthetic construct
  source 1..20: mol_type = other DNA
agaattcagccagcacccac

SEQ ID NO: 110683 - DNA, 20 bp, synthetic construct
  source 1..20: mol_type = other DNA
cagaattcagccagcaccca

SEQ ID NO: 110684 - DNA, 20 bp, synthetic construct
  source 1..20: mol_type = other DNA
acagaattcagccagcaccc

SEQ ID NO: 110685 - DNA, 20 bp, synthetic construct
  source 1..20: mol_type = other DNA
gacagaattcagccagcacc

SEQ ID NO: 110686 - DNA, 20 bp, synthetic construct
  source 1..20: mol_type = other DNA
ggacagaattcagccagcac

SEQ ID NO: 110687 - DNA, 20 bp, synthetic construct
  source 1..20: mol_type = other DNA
aggacagaattcagccagca

SEQ ID NO: 110688 - DNA, 20 bp, synthetic construct
  source 1..20: mol_type = other DNA
taggacagaattcagccagc

SEQ ID NO: 110689 - DNA, 20 bp, synthetic construct
  source 1..20: mol_type = other DNA
ataggacagaattcagccag

SEQ ID NO: 110690 - DNA, 20 bp, synthetic construct
  source 1..20: mol_type = other DNA
cataggacagaattcagcca

SEQ ID NO: 110691 - DNA, 20 bp, synthetic construct
  source 1..20: mol_type = other DNA
gcataggacagaattcagcc

SEQ ID NO: 110692 - DNA, 20 bp, synthetic construct
  source 1..20: mol_type = other DNA
agcataggacagaattcagc

SEQ ID NO: 110693 - DNA, 20 bp, synthetic construct
  source 1..20: mol_type = other DNA
cagcataggacagaattcag

SEQ ID NO: 110694 - DNA, 20 bp, synthetic construct
  source 1..20: mol_type = other DNA
gcagcataggacagaattca

SEQ ID NO: 110695 - DNA, 20 bp, synthetic construct
  source 1..20: mol_type = other DNA
agcagcataggacagaattc

SEQ ID NO: 110696 - DNA, 20 bp, synthetic construct
  source 1..20: mol_type = other DNA
aagcagcataggacagaatt

SEQ ID NO: 110697 - DNA, 20 bp, synthetic construct
  source 1..20: mol_type = other DNA
aaagcagcataggacagaat

SEQ ID NO: 110698 - DNA, 20 bp, synthetic construct
  source 1..20: mol_type = other DNA
gaaagcagcataggacagaa

SEQ ID NO: 110699 - DNA, 20 bp, synthetic construct
  source 1..20: mol_type = other DNA
ggaaagcagcataggacaga

SEQ ID NO: 110700 - DNA, 20 bp, synthetic construct
  source 1..20: mol_type = other DNA
tggaaagcagcataggacag

SEQ ID NO: 110701 - DNA, 20 bp, synthetic construct
  source 1..20: mol_type = other DNA
gtggaaagcagcataggaca

SEQ ID NO: 110702 - DNA, 20 bp, synthetic construct
  source 1..20: mol_type = other DNA
agtggaaagcagcataggac

SEQ ID NO: 110703 - DNA, 20 bp, synthetic construct
  source 1..20: mol_type = other DNA
cagtggaaagcagcatagga

SEQ ID NO: 110704 - DNA, 20 bp, synthetic construct
  source 1..20: mol_type = other DNA
acagtggaaagcagcatagg

SEQ ID NO: 110705 - DNA, 20 bp, synthetic construct
  source 1..20: mol_type = other DNA
cacagtggaaagcagcatag

SEQ ID NO: 110706 - DNA, 20 bp, synthetic construct
  source 1..20: mol_type = other DNA
tcacagtggaaagcagcata

SEQ ID NO: 110707 - DNA, 20 bp, synthetic construct
  source 1..20: mol_type = other DNA
gtcacagtggaaagcagcat

SEQ ID NO: 110708 - DNA, 20 bp, synthetic construct
  source 1..20: mol_type = other DNA
tgtcacagtggaaagcagca

SEQ ID NO: 110709 - DNA, 20 bp, synthetic construct
  source 1..20: mol_type = other DNA
ctgtcacagtggaaagcagc

SEQ ID NO: 110710 - DNA, 20 bp, synthetic construct
  source 1..20: mol_type = other DNA
cctgtcacagtggaaagcag

SEQ ID NO: 110711 - DNA, 20 bp, synthetic construct
  source 1..20: mol_type = other DNA
ccctgtcacagtggaaagca

SEQ ID NO: 110712 - DNA, 20 bp, synthetic construct
  source 1..20: mol_type = other DNA
gccctgtcacagtggaaagc

SEQ ID NO: 110713 - DNA, 20 bp, synthetic construct
  source 1..20: mol_type = other DNA
tgccctgtcacagtggaaag

SEQ ID NO: 110714 - DNA, 20 bp, synthetic construct
  source 1..20: mol_type = other DNA
ctgccctgtcacagtggaaa

SEQ ID NO: 110715 - DNA, 20 bp, synthetic construct
  source 1..20: mol_type = other DNA
gctgccctgtcacagtggaa

SEQ ID NO: 110716 - DNA, 20 bp, synthetic construct
  source 1..20: mol_type = other DNA
tgctgccctgtcacagtgga

SEQ ID NO: 110717 - DNA, 20 bp, synthetic construct
  source 1..20: mol_type = other DNA
gtgctgccctgtcacagtgg

SEQ ID NO: 110718 - DNA, 20 bp, synthetic construct
  source 1..20: mol_type = other DNA
agtgctgccctgtcacagtg

SEQ ID NO: 110719 - DNA, 20 bp, synthetic construct
  source 1..20: mol_type = other DNA
cagtgctgccctgtcacagt

SEQ ID NO: 110720 - DNA, 20 bp, synthetic construct
  source 1..20: mol_type = other DNA
tcagtgctgccctgtcacag

SEQ ID NO: 110721 - DNA, 20 bp, synthetic construct
  source 1..20: mol_type = other DNA
ctcagtgctgccctgtcaca

SEQ ID NO: 110722 - DNA, 20 bp, synthetic construct
  source 1..20: mol_type = other DNA
actcagtgctgccctgtcac

SEQ ID NO: 110723 - DNA, 20 bp, synthetic construct
  source 1..20: mol_type = other DNA
aactcagtgctgccctgtca

SEQ ID NO: 110724 - DNA, 20 bp, synthetic construct
  source 1..20: mol_type = other DNA
aaactcagtgctgccctgtc

SEQ ID NO: 110725 - DNA, 20 bp, synthetic construct
  source 1..20: mol_type = other DNA
gaaactcagtgctgccctgt

SEQ ID NO: 110726 - DNA, 20 bp, synthetic construct
  source 1..20: mol_type = other DNA
tgaaactcagtgctgccctg

SEQ ID NO: 110727 - DNA, 20 bp, synthetic construct
  source 1..20: mol_type = other DNA
ttgaaactcagtgctgccct

SEQ ID NO: 110728 - DNA, 20 bp, synthetic construct
  source 1..20: mol_type = other DNA
attgaaactcagtgctgccc

SEQ ID NO: 110729 - DNA, 20 bp, synthetic construct
  source 1..20: mol_type = other DNA
cattgaaactcagtgctgcc

SEQ ID NO: 110730 - DNA, 20 bp, synthetic construct
  source 1..20: mol_type = other DNA
gcattgaaactcagtgctgc

SEQ ID NO: 110731 - DNA, 20 bp, synthetic construct
  source 1..20: mol_type = other DNA
tgcattgaaactcagtgctg

SEQ ID NO: 110732 - DNA, 20 bp, synthetic construct
  source 1..20: mol_type = other DNA
ttgcattgaaactcagtgct

SEQ ID NO: 110733 - DNA, 20 bp, synthetic construct
  source 1..20: mol_type = other DNA
tttgcattgaaactcagtgc

SEQ ID NO: 110734 - DNA, 20 bp, synthetic construct
  source 1..20: mol_type = other DNA
ttttgcattgaaactcagtg

SEQ ID NO: 110735 - DNA, 20 bp, synthetic construct
  source 1..20: mol_type = other DNA
attttgcattgaaactcagt

SEQ ID NO: 110736 - DNA, 20 bp, synthetic construct
  source 1..20: mol_type = other DNA
gattttgcattgaaactcag

SEQ ID NO: 110737 - DNA, 20 bp, synthetic construct
  source 1..20: mol_type = other DNA
ggattttgcattgaaactca

SEQ ID NO: 110738 - DNA, 20 bp, synthetic construct
  source 1..20: mol_type = other DNA
gggattttgcattgaaactc

SEQ ID NO: 110739 - DNA, 20 bp, synthetic construct
  source 1..20: mol_type = other DNA
tgggattttgcattgaaact

SEQ ID NO: 110740 - DNA, 20 bp, synthetic construct
  source 1..20: mol_type = other DNA
gtgggattttgcattgaaac

SEQ ID NO: 110741 - DNA, 20 bp, synthetic construct
  source 1..20: mol_type = other DNA
tgtgggattttgcattgaaa

SEQ ID NO: 110742 - DNA, 20 bp, synthetic construct
  source 1..20: mol_type = other DNA
ctgtgggattttgcattgaa

SEQ ID NO: 110743 - DNA, 20 bp, synthetic construct
  source 1..20: mol_type = other DNA
actgtgggattttgcattga

SEQ ID NO: 110744 - DNA, 20 bp, synthetic construct
  source 1..20: mol_type = other DNA
gactgtgggattttgcattg

SEQ ID NO: 110745 - DNA, 20 bp, synthetic construct
  source 1..20: mol_type = other DNA
tgactgtgggattttgcatt

SEQ ID NO: 110746 - DNA, 20 bp, synthetic construct
  source 1..20: mol_type = other DNA
atgactgtgggattttgcat

SEQ ID NO: 110747 - DNA, 20 bp, synthetic construct
  source 1..20: mol_type = other DNA
aatgactgtgggattttgca

SEQ ID NO: 110748 - DNA, 20 bp, synthetic construct
  source 1..20: mol_type = other DNA
aaatgactgtgggattttgc

SEQ ID NO: 110749 - DNA, 20 bp, synthetic construct
  source 1..20: mol_type = other DNA
gaaatgactgtgggattttg

SEQ ID NO: 110750 - DNA, 20 bp, synthetic construct
  source 1..20: mol_type = other DNA
agaaatgactgtgggatttt

SEQ ID NO: 110751 - DNA, 20 bp, synthetic construct
  source 1..20: mol_type = other DNA
gagaaatgactgtgggattt

SEQ ID NO: 110752 - DNA, 20 bp, synthetic construct
  source 1..20: mol_type = other DNA
agagaaatgactgtgggatt

SEQ ID NO: 110753 - DNA, 20 bp, synthetic construct
  source 1..20: mol_type = other DNA
gagagaaatgactgtgggat

SEQ ID NO: 110754 - DNA, 20 bp, synthetic construct
  source 1..20: mol_type = other DNA
agagagaaatgactgtggga

SEQ ID NO: 110755 - DNA, 20 bp, synthetic construct
  source 1..20: mol_type = other DNA
gagagagaaatgactgtggg

SEQ ID NO: 110756 - DNA, 20 bp, synthetic construct
  source 1..20: mol_type = other DNA
agagagagaaatgactgtgg

SEQ ID NO: 110757 - DNA, 20 bp, synthetic construct
  source 1..20: mol_type = other DNA
gagagagagaaatgactgtg

SEQ ID NO: 110758 - DNA, 20 bp, synthetic construct
  source 1..20: mol_type = other DNA
agagagagagaaatgactgt

SEQ ID NO: 110759 - DNA, 20 bp, synthetic construct
  source 1..20: mol_type = other DNA
gagagagagagaaatgactg

SEQ ID NO: 110760 - DNA, 20 bp, synthetic construct
  source 1..20: mol_type = other DNA
ggagagagagagaaatgact

SEQ ID NO: 110761 - DNA, 20 bp, synthetic construct
  source 1..20: mol_type = other DNA
gggagagagagagaaatgac

SEQ ID NO: 110762 - DNA, 20 bp, synthetic construct
  source 1..20: mol_type = other DNA
ggggagagagagagaaatga

SEQ ID NO: 110763 - DNA, 20 bp, synthetic construct
  source 1..20: mol_type = other DNA
gggggagagagagagaaatg

SEQ ID NO: 110764 - DNA, 20 bp, synthetic construct
  source 1..20: mol_type = other DNA
cgggggagagagagagaaat

SEQ ID NO: 110765 - DNA, 20 bp, synthetic construct
  source 1..20: mol_type = other DNA
tcgggggagagagagagaaa

SEQ ID NO: 110766 - DNA, 20 bp, synthetic construct
  source 1..20: mol_type = other DNA
ctcgggggagagagagagaa

SEQ ID NO: 110767 - DNA, 20 bp, synthetic construct
  source 1..20: mol_type = other DNA
gctcgggggagagagagaga

SEQ ID NO: 110768 - DNA, 20 bp, synthetic construct
  source 1..20: mol_type = other DNA
tgctcgggggagagagagag

SEQ ID NO: 110769 - DNA, 20 bp, synthetic construct
  source 1..20: mol_type = other DNA
gtgctcgggggagagagaga

SEQ ID NO: 110770 - DNA, 20 bp, synthetic construct
  source 1..20: mol_type = other DNA
tgtgctcgggggagagagag

SEQ ID NO: 110771 - DNA, 20 bp, synthetic construct
  source 1..20: mol_type = other DNA
gtgtgctcgggggagagaga

SEQ ID NO: 110772 - DNA, 20 bp, synthetic construct
  source 1..20: mol_type = other DNA
tgtgtgctcgggggagagag

SEQ ID NO: 110773 - DNA, 20 bp, synthetic construct
  source 1..20: mol_type = other DNA
ctgtgtgctcgggggagaga

SEQ ID NO: 110774 - DNA, 20 bp, synthetic construct
  source 1..20: mol_type = other DNA
tctgtgtgctcgggggagag

SEQ ID NO: 110775 - DNA, 20 bp, synthetic construct
  source 1..20: mol_type = other DNA
atctgtgtgctcgggggaga

SEQ ID NO: 110776 - DNA, 20 bp, synthetic construct
  source 1..20: mol_type = other DNA
aatctgtgtgctcgggggag

SEQ ID NO: 110777 - DNA, 20 bp, synthetic construct
  source 1..20: mol_type = other DNA
gaatctgtgtgctcggggga

SEQ ID NO: 110778 - DNA, 20 bp, synthetic construct
  source 1..20: mol_type = other DNA
agaatctgtgtgctcggggg

SEQ ID NO: 110779 - DNA, 20 bp, synthetic construct
  source 1..20: mol_type = other DNA
aagaatctgtgtgctcgggg

SEQ ID NO: 110780 - DNA, 20 bp, synthetic construct
  source 1..20: mol_type = other DNA
aaagaatctgtgtgctcggg

SEQ ID NO: 110781 - DNA, 20 bp, synthetic construct
  source 1..20: mol_type = other DNA
gaaagaatctgtgtgctcgg

SEQ ID NO: 110782 - DNA, 20 bp, synthetic construct
  source 1..20: mol_type = other DNA
agaaagaatctgtgtgctcg

SEQ ID NO: 110783 - DNA, 20 bp, synthetic construct
  source 1..20: mol_type = other DNA
gagaaagaatctgtgtgctc

SEQ ID NO: 110784 - DNA, 20 bp, synthetic construct
  source 1..20: mol_type = other DNA
ggagaaagaatctgtgtgct

SEQ ID NO: 110785 - DNA, 20 bp, synthetic construct
  source 1..20: mol_type = other DNA
tggagaaagaatctgtgtgc

SEQ ID NO: 110786 - DNA, 20 bp, synthetic construct
  source 1..20: mol_type = other DNA
gtggagaaagaatctgtgtg

SEQ ID NO: 110787 - DNA, 20 bp, synthetic construct
  source 1..20: mol_type = other DNA
ggtggagaaagaatctgtgt

SEQ ID NO: 110788 - DNA, 20 bp, synthetic construct
  source 1..20: mol_type = other DNA
gggtggagaaagaatctgtg

SEQ ID NO: 110789 - DNA, 20 bp, synthetic construct
  source 1..20: mol_type = other DNA
ggggtggagaaagaatctgt

SEQ ID NO: 110790 - DNA, 20 bp, synthetic construct
  source 1..20: mol_type = other DNA
tggggtggagaaagaatctg

SEQ ID NO: 110791 - DNA, 20 bp, synthetic construct
  source 1..20: mol_type = other DNA
gtggggtggagaaagaatct

SEQ ID NO: 110792 - DNA, 20 bp, synthetic construct
  source 1..20: mol_type = other DNA
tgtggggtggagaaagaatc

SEQ ID NO: 110793 - DNA, 20 bp, synthetic construct
  source 1..20: mol_type = other DNA
gtgtggggtggagaaagaat

SEQ ID NO: 110794 - DNA, 20 bp, synthetic construct
  source 1..20: mol_type = other DNA
agtgtggggtggagaaagaa

SEQ ID NO: 110795 - DNA, 20 bp, synthetic construct
  source 1..20: mol_type = other DNA
cagtgtggggtggagaaaga

SEQ ID NO: 110796 - DNA, 20 bp, synthetic construct
  source 1..20: mol_type = other DNA
gcagtgtggggtggagaaag

SEQ ID NO: 110797 - DNA, 20 bp, synthetic construct
  source 1..20: mol_type = other DNA
tgcagtgtggggtggagaaa

SEQ ID NO: 110798 - DNA, 20 bp, synthetic construct
  source 1..20: mol_type = other DNA
atgcagtgtggggtggagaa

SEQ ID NO: 110799 - DNA, 20 bp, synthetic construct
  source 1..20: mol_type = other DNA
aatgcagtgtggggtggaga

SEQ ID NO: 110800 - DNA, 20 bp, synthetic construct
  source 1..20: mol_type = other DNA
caatgcagtgtggggtggag

SEQ ID NO: 110801 - DNA, 20 bp, synthetic construct
  source 1..20: mol_type = other DNA
acaatgcagtgtggggtgga

SEQ ID NO: 110802 - DNA, 20 bp, synthetic construct
  source 1..20: mol_type = other DNA
cacaatgcagtgtggggtgg

SEQ ID NO: 110803 - DNA, 20 bp, synthetic construct
  source 1..20: mol_type = other DNA
ccacaatgcagtgtggggtg

SEQ ID NO: 110804 - DNA, 20 bp, synthetic construct
  source 1..20: mol_type = other DNA
cccacaatgcagtgtggggt

SEQ ID NO: 110805 - DNA, 20 bp, synthetic construct
  source 1..20: mol_type = other DNA
ccccacaatgcagtgtgggg

SEQ ID NO: 110806 - DNA, 20 bp, synthetic construct
  source 1..20: mol_type = other DNA
cccccacaatgcagtgtggg

SEQ ID NO: 110807 - DNA, 20 bp, synthetic construct
  source 1..20: mol_type = other DNA
tcccccacaatgcagtgtgg

SEQ ID NO: 110808 - DNA, 20 bp, synthetic construct
  source 1..20: mol_type = other DNA
ttcccccacaatgcagtgtg

SEQ ID NO: 110809 - DNA, 20 bp, synthetic construct
  source 1..20: mol_type = other DNA
attcccccacaatgcagtgt

SEQ ID NO: 110810 - DNA, 20 bp, synthetic construct
  source 1..20: mol_type = other DNA
cattcccccacaatgcagtg

SEQ ID NO: 110811 - DNA, 20 bp, synthetic construct
  source 1..20: mol_type = other DNA
acattcccccacaatgcagt

SEQ ID NO: 110812 - DNA, 20 bp, synthetic construct
  source 1..20: mol_type = other DNA
gacattcccccacaatgcag

SEQ ID NO: 110813 - DNA, 20 bp, synthetic construct
  source 1..20: mol_type = other DNA
tgacattcccccacaatgca

SEQ ID NO: 110814 - DNA, 20 bp, synthetic construct
  source 1..20: mol_type = other DNA
ctgacattcccccacaatgc

SEQ ID NO: 110815 - DNA, 20 bp, synthetic construct
  source 1..20: mol_type = other DNA
cctgacattcccccacaatg

SEQ ID NO: 110816 - DNA, 20 bp, synthetic construct
  source 1..20: mol_type = other DNA
ccctgacattcccccacaat

SEQ ID NO: 110817 - DNA, 20 bp, synthetic construct
  source 1..20: mol_type = other DNA
cccctgacattcccccacaa

SEQ ID NO: 110818 - DNA, 20 bp, synthetic construct
  source 1..20: mol_type = other DNA
acccctgacattcccccaca

SEQ ID NO: 110819 - DNA, 20 bp, synthetic construct
  source 1..20: mol_type = other DNA
cacccctgacattcccccac

SEQ ID NO: 110820 - DNA, 20 bp, synthetic construct
  source 1..20: mol_type = other DNA
acacccctgacattccccca

SEQ ID NO: 110821 - DNA, 20 bp, synthetic construct
  source 1..20: mol_type = other DNA
aacacccctgacattccccc

SEQ ID NO: 110822 - DNA, 20 bp, synthetic construct
  source 1..20: mol_type = other DNA
caacacccctgacattcccc

SEQ ID NO: 110823 - DNA, 20 bp, synthetic construct
  source 1..20: mol_type = other DNA
ccaacacccctgacattccc

SEQ ID NO: 110824 - DNA, 20 bp, synthetic construct
  source 1..20: mol_type = other DNA
tccaacacccctgacattcc

SEQ ID NO: 110825 - DNA, 20 bp, synthetic construct
  source 1..20: mol_type = other DNA
ctccaacacccctgacattc

SEQ ID NO: 110826 - DNA, 20 bp, synthetic construct
  source 1..20: mol_type = other DNA
cctccaacacccctgacatt

SEQ ID NO: 110827 - DNA, 20 bp, synthetic construct
  source 1..20: mol_type = other DNA
ccctccaacacccctgacat

SEQ ID NO: 110828 - DNA, 20 bp, synthetic construct
  source 1..20: mol_type = other DNA
cccctccaacacccctgaca

SEQ ID NO: 110829 - DNA, 20 bp, synthetic construct
  source 1..20: mol_type = other DNA
gcccctccaacacccctgac

SEQ ID NO: 110830 - DNA, 20 bp, synthetic construct
  source 1..20: mol_type = other DNA
tgcccctccaacacccctga

SEQ ID NO: 110831 - DNA, 20 bp, synthetic construct
  source 1..20: mol_type = other DNA
ctgcccctccaacacccctg

SEQ ID NO: 110832 - DNA, 20 bp, synthetic construct
  source 1..20: mol_type = other DNA
actgcccctccaacacccct

SEQ ID NO: 110833 - DNA, 20 bp, synthetic construct
  source 1..20: mol_type = other DNA
aactgcccctccaacacccc

SEQ ID NO: 110834 - DNA, 20 bp, synthetic construct
  source 1..20: mol_type = other DNA
gaactgcccctccaacaccc

SEQ ID NO: 110835 - DNA, 20 bp, synthetic construct
  source 1..20: mol_type = other DNA
tgaactgcccctccaacacc

SEQ ID NO: 110836 - DNA, 20 bp, synthetic construct
  source 1..20: mol_type = other DNA
ttgaactgcccctccaacac

SEQ ID NO: 110837 - DNA, 20 bp, synthetic construct
  source 1..20: mol_type = other DNA
cttgaactgcccctccaaca

SEQ ID NO: 110838 - DNA, 20 bp, synthetic construct
  source 1..20: mol_type = other DNA
tcttgaactgcccctccaac

SEQ ID NO: 110839 - DNA, 20 bp, synthetic construct
  source 1..20: mol_type = other DNA
gtcttgaactgcccctccaa

SEQ ID NO: 110840 - DNA, 20 bp, synthetic construct
  source 1..20: mol_type = other DNA
agtcttgaactgcccctcca

SEQ ID NO: 110841 - DNA, 20 bp, synthetic construct
  source 1..20: mol_type = other DNA
tagtcttgaactgcccctcc

SEQ ID NO: 110842 - DNA, 20 bp, synthetic construct
  source 1..20: mol_type = other DNA
atagtcttgaactgcccctc

SEQ ID NO: 110843 - DNA, 20 bp, synthetic construct
  source 1..20: mol_type = other DNA
gatagtcttgaactgcccct

SEQ ID NO: 110844 - DNA, 20 bp, synthetic construct
  source 1..20: mol_type = other DNA
agatagtcttgaactgcccc

SEQ ID NO: 110845 - DNA, 20 bp, synthetic construct
  source 1..20: mol_type = other DNA
aagatagtcttgaactgccc

SEQ ID NO: 110846 - DNA, 20 bp, synthetic construct
  source 1..20: mol_type = other DNA
gaagatagtcttgaactgcc

SEQ ID NO: 110847 - DNA, 20 bp, synthetic construct
  source 1..20: mol_type = other DNA
ggaagatagtcttgaactgc

SEQ ID NO: 110848 - DNA, 20 bp, synthetic construct
  source 1..20: mol_type = other DNA
aggaagatagtcttgaactg

SEQ ID NO: 110849 - DNA, 20 bp, synthetic construct
  source 1..20: mol_type = other DNA
aaggaagatagtcttgaact

SEQ ID NO: 110850 - DNA, 20 bp, synthetic construct
  source 1..20: mol_type = other DNA
taaggaagatagtcttgaac

SEQ ID NO: 110851 - DNA, 20 bp, synthetic construct
  source 1..20: mol_type = other DNA
ataaggaagatagtcttgaa

SEQ ID NO: 110852 - DNA, 20 bp, synthetic construct
  source 1..20: mol_type = other DNA
gataaggaagatagtcttga

SEQ ID NO: 110853 - DNA, 20 bp, synthetic construct
  source 1..20: mol_type = other DNA
agataaggaagatagtcttg

SEQ ID NO: 110854 - DNA, 20 bp, synthetic construct
  source 1..20: mol_type = other DNA
aagataaggaagatagtctt

SEQ ID NO: 110855 - DNA, 20 bp, synthetic construct
  source 1..20: mol_type = other DNA
aaagataaggaagatagtct

SEQ ID NO: 110856 - DNA, 20 bp, synthetic construct
  source 1..20: mol_type = other DNA
aaaagataaggaagatagtc

SEQ ID NO: 110857 - DNA, 20 bp, synthetic construct
  source 1..20: mol_type = other DNA
aaaaagataaggaagatagt

SEQ ID NO: 110858 - DNA, 20 bp, synthetic construct
  source 1..20: mol_type = other DNA
aaaaaagataaggaagatag

SEQ ID NO: 110859 - DNA, 20 bp, synthetic construct
  source 1..20: mol_type = other DNA
caaaaaagataaggaagata

SEQ ID NO: 110860 - DNA, 20 bp, synthetic construct
  source 1..20: mol_type = other DNA
ccaaaaaagataaggaagat

SEQ ID NO: 110861 - DNA, 20 bp, synthetic construct
  source 1..20: mol_type = other DNA
accaaaaaagataaggaaga

SEQ ID NO: 110862 - DNA, 20 bp, synthetic construct
  source 1..20: mol_type = other DNA
caccaaaaaagataaggaag

SEQ ID NO: 110863 - DNA, 20 bp, synthetic construct
  source 1..20: mol_type = other DNA
acaccaaaaaagataaggaa

SEQ ID NO: 110864 - DNA, 20 bp, synthetic construct
  source 1..20: mol_type = other DNA
gacaccaaaaaagataagga

SEQ ID NO: 110865 - DNA, 20 bp, synthetic construct
  source 1..20: mol_type = other DNA
agacaccaaaaaagataagg

SEQ ID NO: 110866 - DNA, 20 bp, synthetic construct
  source 1..20: mol_type = other DNA
aagacaccaaaaaagataag

SEQ ID NO: 110867 - DNA, 20 bp, synthetic construct
  source 1..20: mol_type = other DNA
aaagacaccaaaaaagataa

SEQ ID NO: 110868 - DNA, 20 bp, synthetic construct
  source 1..20: mol_type = other DNA
aaaagacaccaaaaaagata

SEQ ID NO: 110869 - DNA, 20 bp, synthetic construct
  source 1..20: mol_type = other DNA
aaaaagacaccaaaaaagat

SEQ ID NO: 110870 - DNA, 20 bp, synthetic construct
  source 1..20: mol_type = other DNA
gaaaaagacaccaaaaaaga

SEQ ID NO: 110871 - DNA, 20 bp, synthetic construct
  source 1..20: mol_type = other DNA
ggaaaaagacaccaaaaaag

SEQ ID NO: 110872 - DNA, 20 bp, synthetic construct
  source 1..20: mol_type = other DNA
aggaaaaagacaccaaaaaa

SEQ ID NO: 110873 - DNA, 20 bp, synthetic construct
  source 1..20: mol_type = other DNA
aaggaaaaagacaccaaaaa

SEQ ID NO: 110874 - DNA, 20 bp, synthetic construct
  source 1..20: mol_type = other DNA
caaggaaaaagacaccaaaa

SEQ ID NO: 110875 - DNA, 20 bp, synthetic construct
  source 1..20: mol_type = other DNA
tcaaggaaaaagacaccaaa

SEQ ID NO: 110876 - DNA, 20 bp, synthetic construct
  source 1..20: mol_type = other DNA
atcaaggaaaaagacaccaa

SEQ ID NO: 110877 - DNA, 20 bp, synthetic construct
  source 1..20: mol_type = other DNA
tatcaaggaaaaagacacca

SEQ ID NO: 110878 - DNA, 20 bp, synthetic construct
  source 1..20: mol_type = other DNA
ctatcaaggaaaaagacacc

SEQ ID NO: 110879 - DNA, 20 bp, synthetic construct
  source 1..20: mol_type = other DNA
cctatcaaggaaaaagacac

SEQ ID NO: 110880 - DNA, 20 bp, synthetic construct
  source 1..20: mol_type = other DNA
tcctatcaaggaaaaagaca

SEQ ID NO: 110881 - DNA, 20 bp, synthetic construct
  source 1..20: mol_type = other DNA
atcctatcaaggaaaaagac

SEQ ID NO: 110882 - DNA, 20 bp, synthetic construct
  source 1..20: mol_type = other DNA
catcctatcaaggaaaaaga

SEQ ID NO: 110883 - DNA, 20 bp, synthetic construct
  source 1..20: mol_type = other DNA
acatcctatcaaggaaaaag

SEQ ID NO: 110884 - DNA, 20 bp, synthetic construct
  source 1..20: mol_type = other DNA
gacatcctatcaaggaaaaa

SEQ ID NO: 110885 - DNA, 20 bp, synthetic construct
  source 1..20: mol_type = other DNA
tgacatcctatcaaggaaaa

SEQ ID NO: 110886 - DNA, 20 bp, synthetic construct
  source 1..20: mol_type = other DNA
ttgacatcctatcaaggaaa

SEQ ID NO: 110887 - DNA, 20 bp, synthetic construct
  source 1..20: mol_type = other DNA
tttgacatcctatcaaggaa

SEQ ID NO: 110888 - DNA, 20 bp, synthetic construct
  source 1..20: mol_type = other DNA
ttttgacatcctatcaagga

SEQ ID NO: 110889 - DNA, 20 bp, synthetic construct
  source 1..20: mol_type = other DNA
gttttgacatcctatcaagg

SEQ ID NO: 110890 - DNA, 20 bp, synthetic construct
  source 1..20: mol_type = other DNA
agttttgacatcctatcaag

SEQ ID NO: 110891 - DNA, 20 bp, synthetic construct
  source 1..20: mol_type = other DNA
cagttttgacatcctatcaa

SEQ ID NO: 110892 - DNA, 20 bp, synthetic construct
  source 1..20: mol_type = other DNA
ccagttttgacatcctatca

SEQ ID NO: 110893 - DNA, 20 bp, synthetic construct
  source 1..20: mol_type = other DNA
cccagttttgacatcctatc

SEQ ID NO: 110894 - DNA, 20 bp, synthetic construct
  source 1..20: mol_type = other DNA
acccagttttgacatcctat

SEQ ID NO: 110895 - DNA, 20 bp, synthetic construct
  source 1..20: mol_type = other DNA
tacccagttttgacatccta

SEQ ID NO: 110896 - DNA, 20 bp, synthetic construct
  source 1..20: mol_type = other DNA
gtacccagttttgacatcct

SEQ ID NO: 110897 - DNA, 20 bp, synthetic construct
  source 1..20: mol_type = other DNA
agtacccagttttgacatcc

SEQ ID NO: 110898 - DNA, 20 bp, synthetic construct
  source 1..20: mol_type = other DNA
cagtacccagttttgacatc

SEQ ID NO: 110899 - DNA, 20 bp, synthetic construct
  source 1..20: mol_type = other DNA
acagtacccagttttgacat

SEQ ID NO: 110900 - DNA, 20 bp, synthetic construct
  source 1..20: mol_type = other DNA
cacagtacccagttttgaca

SEQ ID NO: 110901 - DNA, 20 bp, synthetic construct
  source 1..20: mol_type = other DNA
tcacagtacccagttttgac

SEQ ID NO: 110902 - DNA, 20 bp, synthetic construct
  source 1..20: mol_type = other DNA
atcacagtacccagttttga

SEQ ID NO: 110903 - DNA, 20 bp, synthetic construct
  source 1..20: mol_type = other DNA
gatcacagtacccagttttg

SEQ ID NO: 110904 - DNA, 20 bp, synthetic construct
  source 1..20: mol_type = other DNA
cgatcacagtacccagtttt

SEQ ID NO: 110905 - DNA, 20 bp, synthetic construct
  source 1..20: mol_type = other DNA
gcgatcacagtacccagttt

SEQ ID NO: 110906 - DNA, 20 bp, synthetic construct
  source 1..20: mol_type = other DNA
agcgatcacagtacccagtt

SEQ ID NO: 110907 - DNA, 20 bp, synthetic construct
  source 1..20: mol_type = other DNA
aagcgatcacagtacccagt

SEQ ID NO: 110908 - DNA, 20 bp, synthetic construct
  source 1..20: mol_type = other DNA
taagcgatcacagtacccag

SEQ ID NO: 110909 - DNA, 20 bp, synthetic construct
  source 1..20: mol_type = other DNA
gtaagcgatcacagtaccca

SEQ ID NO: 110910 - DNA, 20 bp, synthetic construct
  source 1..20: mol_type = other DNA
ggtaagcgatcacagtaccc

SEQ ID NO: 110911 - DNA, 20 bp, synthetic construct
  source 1..20: mol_type = other DNA
aggtaagcgatcacagtacc

SEQ ID NO: 110912 - DNA, 20 bp, synthetic construct
  source 1..20: mol_type = other DNA
taggtaagcgatcacagtac

SEQ ID NO: 110913 - DNA, 20 bp, synthetic construct
  source 1..20: mol_type = other DNA
ttaggtaagcgatcacagta

SEQ ID NO: 110914 - DNA, 20 bp, synthetic construct
  source 1..20: mol_type = other DNA
attaggtaagcgatcacagt

SEQ ID NO: 110915 - DNA, 20 bp, synthetic construct
  source 1..20: mol_type = other DNA
aattaggtaagcgatcacag

SEQ ID NO: 110916 - DNA, 20 bp, synthetic construct
  source 1..20: mol_type = other DNA
aaattaggtaagcgatcaca

SEQ ID NO: 110917 - DNA, 20 bp, synthetic construct
  source 1..20: mol_type = other DNA
aaaattaggtaagcgatcac

SEQ ID NO: 110918 - DNA, 20 bp, synthetic construct
  source 1..20: mol_type = other DNA
aaaaattaggtaagcgatca

SEQ ID NO: 110919 - DNA, 20 bp, synthetic construct
  source 1..20: mol_type = other DNA
caaaaattaggtaagcgatc

SEQ ID NO: 110920 - DNA, 20 bp, synthetic construct
  source 1..20: mol_type = other DNA
ccaaaaattaggtaagcgat

SEQ ID NO: 110921 - DNA, 20 bp, synthetic construct
  source 1..20: mol_type = other DNA
accaaaaattaggtaagcga

SEQ ID NO: 110922 - DNA, 20 bp, synthetic construct
  source 1..20: mol_type = other DNA
aaccaaaaattaggtaagcg

SEQ ID NO: 110923 - DNA, 20 bp, synthetic construct
  source 1..20: mol_type = other DNA
gaaccaaaaattaggtaagc

SEQ ID NO: 110924 - DNA, 20 bp, synthetic construct
  source 1..20: mol_type = other DNA
agaaccaaaaattaggtaag

SEQ ID NO: 110925 - DNA, 20 bp, synthetic construct
  source 1..20: mol_type = other DNA
aagaaccaaaaattaggtaa

SEQ ID NO: 110926 - DNA, 20 bp, synthetic construct
  source 1..20: mol_type = other DNA
taagaaccaaaaattaggta

SEQ ID NO: 110927 - DNA, 20 bp, synthetic construct
  source 1..20: mol_type = other DNA
ataagaaccaaaaattaggt

SEQ ID NO: 110928 - DNA, 20 bp, synthetic construct
  source 1..20: mol_type = other DNA
cataagaaccaaaaattagg

SEQ ID NO: 110929 - DNA, 20 bp, synthetic construct
  source 1..20: mol_type = other DNA
tcataagaaccaaaaattag

SEQ ID NO: 110930 - DNA, 20 bp, synthetic construct
  source 1..20: mol_type = other DNA
ttcataagaaccaaaaatta

SEQ ID NO: 110931 - DNA, 20 bp, synthetic construct
  source 1..20: mol_type = other DNA
cttcataagaaccaaaaatt

SEQ ID NO: 110932 - DNA, 20 bp, synthetic construct
  source 1..20: mol_type = other DNA
ccttcataagaaccaaaaat

SEQ ID NO: 110933 - DNA, 20 bp, synthetic construct
  source 1..20: mol_type = other DNA
accttcataagaaccaaaaa

SEQ ID NO: 110934 - DNA, 20 bp, synthetic construct
  source 1..20: mol_type = other DNA
caccttcataagaaccaaaa

SEQ ID NO: 110935 - DNA, 20 bp, synthetic construct
  source 1..20: mol_type = other DNA
gcaccttcataagaaccaaa

SEQ ID NO: 110936 - DNA, 20 bp, synthetic construct
  source 1..20: mol_type = other DNA
agcaccttcataagaaccaa

SEQ ID NO: 110937 - DNA, 20 bp, synthetic construct
  source 1..20: mol_type = other DNA
aagcaccttcataagaacca

SEQ ID NO: 110938 - DNA, 20 bp, synthetic construct
  source 1..20: mol_type = other DNA
aaagcaccttcataagaacc

SEQ ID NO: 110939 - DNA, 20 bp, synthetic construct
  source 1..20: mol_type = other DNA
gaaagcaccttcataagaac

SEQ ID NO: 110940 - DNA, 20 bp, synthetic construct
  source 1..20: mol_type = other DNA
agaaagcaccttcataagaa

SEQ ID NO: 110941 - DNA, 20 bp, synthetic construct
  source 1..20: mol_type = other DNA
aagaaagcaccttcataaga

SEQ ID NO: 110942 - DNA, 20 bp, synthetic construct
  source 1..20: mol_type = other DNA
caagaaagcaccttcataag

SEQ ID NO: 110943 - DNA, 20 bp, synthetic construct
  source 1..20: mol_type = other DNA
acaagaaagcaccttcataa

SEQ ID NO: 110944 - DNA, 20 bp, synthetic construct
  source 1..20: mol_type = other DNA
cacaagaaagcaccttcata

SEQ ID NO: 110945 - DNA, 20 bp, synthetic construct
  source 1..20: mol_type = other DNA
acacaagaaagcaccttcat

SEQ ID NO: 110946 - DNA, 20 bp, synthetic construct
  source 1..20: mol_type = other DNA
cacacaagaaagcaccttca

SEQ ID NO: 110947 - DNA, 20 bp, synthetic construct
  source 1..20: mol_type = other DNA
ccacacaagaaagcaccttc

SEQ ID NO: 110948 - DNA, 20 bp, synthetic construct
  source 1..20: mol_type = other DNA
tccacacaagaaagcacctt

SEQ ID NO: 110949 - DNA, 20 bp, synthetic construct
  source 1..20: mol_type = other DNA
atccacacaagaaagcacct

SEQ ID NO: 110950 - DNA, 20 bp, synthetic construct
  source 1..20: mol_type = other DNA
tatccacacaagaaagcacc

SEQ ID NO: 110951 - DNA, 20 bp, synthetic construct
  source 1..20: mol_type = other DNA
ctatccacacaagaaagcac

SEQ ID NO: 110952 - DNA, 20 bp, synthetic construct
  source 1..20: mol_type = other DNA
actatccacacaagaaagca

SEQ ID NO: 110953 - DNA, 20 bp, synthetic construct
  source 1..20: mol_type = other DNA
aactatccacacaagaaagc

SEQ ID NO: 110954 - DNA, 20 bp, synthetic construct
  source 1..20: mol_type = other DNA
caactatccacacaagaaag

SEQ ID NO: 110955 - DNA, 20 bp, synthetic construct
  source 1..20: mol_type = other DNA
acaactatccacacaagaaa

SEQ ID NO: 110956 - DNA, 20 bp, synthetic construct
  source 1..20: mol_type = other DNA
aacaactatccacacaagaa

SEQ ID NO: 110957 - DNA, 20 bp, synthetic construct
  source 1..20: mol_type = other DNA
gaacaactatccacacaaga

SEQ ID NO: 110958 - DNA, 20 bp, synthetic construct
  source 1..20: mol_type = other DNA
tgaacaactatccacacaag

SEQ ID NO: 110959 - DNA, 20 bp, synthetic construct
  source 1..20: mol_type = other DNA
ttgaacaactatccacacaa

SEQ ID NO: 110960 - DNA, 20 bp, synthetic construct
  source 1..20: mol_type = other DNA
attgaacaactatccacaca

SEQ ID NO: 110961 - DNA, 20 bp, synthetic construct
  source 1..20: mol_type = other DNA
aattgaacaactatccacac

SEQ ID NO: 110962 - DNA, 20 bp, synthetic construct
  source 1..20: mol_type = other DNA
aaattgaacaactatccaca

SEQ ID NO: 110963 - DNA, 20 bp, synthetic construct
  source 1..20: mol_type = other DNA
caaattgaacaactatccac

SEQ ID NO: 110964 - DNA, 20 bp, synthetic construct
  source 1..20: mol_type = other DNA
ccaaattgaacaactatcca

SEQ ID NO: 110965 - DNA, 20 bp, synthetic construct
  source 1..20: mol_type = other DNA
accaaattgaacaactatcc

SEQ ID NO: 110966 - DNA, 20 bp, synthetic construct
  source 1..20: mol_type = other DNA
caccaaattgaacaactatc

SEQ ID NO: 110967 - DNA, 20 bp, synthetic construct
  source 1..20: mol_type = other DNA
gcaccaaattgaacaactat

SEQ ID NO: 110968 - DNA, 20 bp, synthetic construct
  source 1..20: mol_type = other DNA
agcaccaaattgaacaacta

SEQ ID NO: 110969 - DNA, 20 bp, synthetic construct
  source 1..20: mol_type = other DNA
gagcaccaaattgaacaact

SEQ ID NO: 110970 - DNA, 20 bp, synthetic construct
  source 1..20: mol_type = other DNA
ggagcaccaaattgaacaac

SEQ ID NO: 110971 - DNA, 20 bp, synthetic construct
  source 1..20: mol_type = other DNA
aggagcaccaaattgaacaa

SEQ ID NO: 110972 - DNA, 20 bp, synthetic construct
  source 1..20: mol_type = other DNA
aaggagcaccaaattgaaca

SEQ ID NO: 110973 - DNA, 20 bp, synthetic construct
  source 1..20: mol_type = other DNA
caaggagcaccaaattgaac

SEQ ID NO: 110974 - DNA, 20 bp, synthetic construct
  source 1..20: mol_type = other DNA
acaaggagcaccaaattgaa

SEQ ID NO: 110975 - DNA, 20 bp, synthetic construct
  source 1..20: mol_type = other DNA
aacaaggagcaccaaattga

SEQ ID NO: 110976 - DNA, 20 bp, synthetic construct
  source 1..20: mol_type = other DNA
caacaaggagcaccaaattg

SEQ ID NO: 110977 - DNA, 20 bp, synthetic construct
  source 1..20: mol_type = other DNA
ccaacaaggagcaccaaatt

SEQ ID NO: 110978 - DNA, 20 bp, synthetic construct
  source 1..20: mol_type = other DNA
cccaacaaggagcaccaaat

SEQ ID NO: 110979 - DNA, 20 bp, synthetic construct
  source 1..20: mol_type = other DNA
ccccaacaaggagcaccaaa

SEQ ID NO: 110980 - DNA, 20 bp, synthetic construct
  source 1..20: mol_type = other DNA
tccccaacaaggagcaccaa

SEQ ID NO: 110981 - DNA, 20 bp, synthetic construct
  source 1..20: mol_type = other DNA
atccccaacaaggagcacca

SEQ ID NO: 110982 - DNA, 20 bp, synthetic construct
  source 1..20: mol_type = other DNA
catccccaacaaggagcacc

SEQ ID NO: 110983 - DNA, 20 bp, synthetic construct
  source 1..20: mol_type = other DNA
tcatccccaacaaggagcac

SEQ ID NO: 110984 - DNA, 20 bp, synthetic construct
  source 1..20: mol_type = other DNA
atcatccccaacaaggagca

SEQ ID NO: 110985 - DNA, 20 bp, synthetic construct
  source 1..20: mol_type = other DNA
gatcatccccaacaaggagc

SEQ ID NO: 110986 - DNA, 20 bp, synthetic construct
  source 1..20: mol_type = other DNA
tgatcatccccaacaaggag

SEQ ID NO: 110987 - DNA, 20 bp, synthetic construct
  source 1..20: mol_type = other DNA
gtgatcatccccaacaagga

SEQ ID NO: 110988 - DNA, 20 bp, synthetic construct
  source 1..20: mol_type = other DNA
agtgatcatccccaacaagg

SEQ ID NO: 110989 - DNA, 20 bp, synthetic construct
  source 1..20: mol_type = other DNA
cagtgatcatccccaacaag

SEQ ID NO: 110990 - DNA, 20 bp, synthetic construct
  source 1..20: mol_type = other DNA
ccagtgatcatccccaacaa

SEQ ID NO: 110991 - DNA, 20 bp, synthetic construct
  source 1..20: mol_type = other DNA
tccagtgatcatccccaaca

SEQ ID NO: 110992 - DNA, 20 bp, synthetic construct
  source 1..20: mol_type = other DNA
ttccagtgatcatccccaac

SEQ ID NO: 110993 - DNA, 20 bp, synthetic construct
  source 1..20: mol_type = other DNA
cttccagtgatcatccccaa

SEQ ID NO: 110994 - DNA, 20 bp, synthetic construct
  source 1..20: mol_type = other DNA
ccttccagtgatcatcccca

SEQ ID NO: 110995 - DNA, 20 bp, synthetic construct
  source 1..20: mol_type = other DNA
accttccagtgatcatcccc

SEQ ID NO: 110996 - DNA, 20 bp, synthetic construct
  source 1..20: mol_type = other DNA
aaccttccagtgatcatccc

SEQ ID NO: 110997 - DNA, 20 bp, synthetic construct
  source 1..20: mol_type = other DNA
gaaccttccagtgatcatcc

SEQ ID NO: 110998 - DNA, 20 bp, synthetic construct
  source 1..20: mol_type = other DNA
agaaccttccagtgatcatc

SEQ ID NO: 110999 - DNA, 20 bp, synthetic construct
  source 1..20: mol_type = other DNA
cagaaccttccagtgatcat

SEQ ID NO: 111000 - DNA, 20 bp, synthetic construct
  source 1..20: mol_type = other DNA
acagaaccttccagtgatca

SEQ ID NO: 111001 - DNA, 20 bp, synthetic construct
  source 1..20: mol_type = other DNA
aacagaaccttccagtgatc

SEQ ID NO: 111002 - DNA, 20 bp, synthetic construct
  source 1..20: mol_type = other DNA
aaacagaaccttccagtgat

SEQ ID NO: 111003 - DNA, 20 bp, synthetic construct
  source 1..20: mol_type = other DNA
caaacagaaccttccagtga

SEQ ID NO: 111004 - DNA, 20 bp, synthetic construct
  source 1..20: mol_type = other DNA
ccaaacagaaccttccagtg

SEQ ID NO: 111005 - DNA, 20 bp, synthetic construct
  source 1..20: mol_type = other DNA
gccaaacagaaccttccagt

SEQ ID NO: 111006 - DNA, 20 bp, synthetic construct
  source 1..20: mol_type = other DNA
ggccaaacagaaccttccag

SEQ ID NO: 111007 - DNA, 20 bp, synthetic construct
  source 1..20: mol_type = other DNA
tggccaaacagaaccttcca

SEQ ID NO: 111008 - DNA, 20 bp, synthetic construct
  source 1..20: mol_type = other DNA
gtggccaaacagaaccttcc

SEQ ID NO: 111009 - DNA, 20 bp, synthetic construct
  source 1..20: mol_type = other DNA
ggtggccaaacagaaccttc

SEQ ID NO: 111010 - DNA, 20 bp, synthetic construct
  source 1..20: mol_type = other DNA
tggtggccaaacagaacctt

SEQ ID NO: 111011 - DNA, 20 bp, synthetic construct
  source 1..20: mol_type = other DNA
atggtggccaaacagaacct

SEQ ID NO: 111012 - DNA, 20 bp, synthetic construct
  source 1..20: mol_type = other DNA
catggtggccaaacagaacc

SEQ ID NO: 111013 - DNA, 20 bp, synthetic construct
  source 1..20: mol_type = other DNA
gcatggtggccaaacagaac

SEQ ID NO: 111014 - DNA, 20 bp, synthetic construct
  source 1..20: mol_type = other DNA
agcatggtggccaaacagaa

SEQ ID NO: 111015 - DNA, 20 bp, synthetic construct
  source 1..20: mol_type = other DNA
gagcatggtggccaaacaga

SEQ ID NO: 111016 - DNA, 20 bp, synthetic construct
  source 1..20: mol_type = other DNA
agagcatggtggccaaacag

SEQ ID NO: 111017 - DNA, 20 bp, synthetic construct
  source 1..20: mol_type = other DNA
cagagcatggtggccaaaca

SEQ ID NO: 111018 - DNA, 20 bp, synthetic construct
  source 1..20: mol_type = other DNA
acagagcatggtggccaaac

SEQ ID NO: 111019 - DNA, 20 bp, synthetic construct
  source 1..20: mol_type = other DNA
gacagagcatggtggccaaa

SEQ ID NO: 111020 - DNA, 20 bp, synthetic construct
  source 1..20: mol_type = other DNA
agacagagcatggtggccaa

SEQ ID NO: 111021 - DNA, 20 bp, synthetic construct
  source 1..20: mol_type = other DNA
gagacagagcatggtggcca

SEQ ID NO: 111022 - DNA, 20 bp, synthetic construct
  source 1..20: mol_type = other DNA
agagacagagcatggtggcc

SEQ ID NO: 111023 - DNA, 20 bp, synthetic construct
  source 1..20: mol_type = other DNA
aagagacagagcatggtggc

SEQ ID NO: 111024 - DNA, 20 bp, synthetic construct
  source 1..20: mol_type = other DNA
gaagagacagagcatggtgg

SEQ ID NO: 111025 - DNA, 20 bp, synthetic construct
  source 1..20: mol_type = other DNA
agaagagacagagcatggtg

SEQ ID NO: 111026 - DNA, 20 bp, synthetic construct
  source 1..20: mol_type = other DNA
gagaagagacagagcatggt

SEQ ID NO: 111027 - DNA, 20 bp, synthetic construct
  source 1..20: mol_type = other DNA
ggagaagagacagagcatgg

SEQ ID NO: 111028 - DNA, 20 bp, synthetic construct
  source 1..20: mol_type = other DNA
gggagaagagacagagcatg

SEQ ID NO: 111029 - DNA, 20 bp, synthetic construct
  source 1..20: mol_type = other DNA
ggggagaagagacagagcat

SEQ ID NO: 111030 - DNA, 20 bp, synthetic construct
  source 1..20: mol_type = other DNA
aggggagaagagacagagca

SEQ ID NO: 111031 - DNA, 20 bp, synthetic construct
  source 1..20: mol_type = other DNA
caggggagaagagacagagc

SEQ ID NO: 111032 - DNA, 20 bp, synthetic construct
  source 1..20: mol_type = other DNA
gcaggggagaagagacagag

SEQ ID NO: 111033 - DNA, 20 bp, synthetic construct
  source 1..20: mol_type = other DNA
ggcaggggagaagagacaga

SEQ ID NO: 111034 - DNA, 20 bp, synthetic construct
  source 1..20: mol_type = other DNA
tggcaggggagaagagacag

SEQ ID NO: 111035 - DNA, 20 bp, synthetic construct
  source 1..20: mol_type = other DNA
atggcaggggagaagagaca

SEQ ID NO: 111036 - DNA, 20 bp, synthetic construct
  source 1..20: mol_type = other DNA
gatggcaggggagaagagac

SEQ ID NO: 111037 - DNA, 20 bp, synthetic construct
  source 1..20: mol_type = other DNA
agatggcaggggagaagaga

SEQ ID NO: 111038 - DNA, 20 bp, synthetic construct
  source 1..20: mol_type = other DNA
gagatggcaggggagaagag

SEQ ID NO: 111039 - DNA, 20 bp, synthetic construct
  source 1..20: mol_type = other DNA
ggagatggcaggggagaaga

SEQ ID NO: 111040 - DNA, 20 bp, synthetic construct
  source 1..20: mol_type = other DNA
aggagatggcaggggagaag

SEQ ID NO: 111041 - DNA, 20 bp, synthetic construct
  source 1..20: mol_type = other DNA
aaggagatggcaggggagaa

SEQ ID NO: 111042 - DNA, 20 bp, synthetic construct
  source 1..20: mol_type = other DNA
aaaggagatggcaggggaga

SEQ ID NO: 111043 - DNA, 20 bp, synthetic construct
  source 1..20: mol_type = other DNA
aaaaggagatggcaggggag

SEQ ID NO: 111044 - DNA, 20 bp, synthetic construct
  source 1..20: mol_type = other DNA
aaaaaggagatggcagggga

SEQ ID NO: 111045 - DNA, 20 bp, synthetic construct
  source 1..20: mol_type = other DNA
aaaaaaggagatggcagggg

SEQ ID NO: 111046 - DNA, 20 bp, synthetic construct
  source 1..20: mol_type = other DNA
aaaaaaaggagatggcaggg

SEQ ID NO: 111047 - DNA, 20 bp, synthetic construct
  source 1..20: mol_type = other DNA
taaaaaaaggagatggcagg

SEQ ID NO: 111048 - DNA, 20 bp, synthetic construct
  source 1..20: mol_type = other DNA
gtaaaaaaaggagatggcag

SEQ ID NO: 111049 - DNA, 20 bp, synthetic construct
  source 1..20: mol_type = other DNA
agtaaaaaaaggagatggca

SEQ ID NO: 111050 - DNA, 20 bp, synthetic construct
  source 1..20: mol_type = other DNA
aagtaaaaaaaggagatggc

SEQ ID NO: 111051 - DNA, 20 bp, synthetic construct
  source 1..20: mol_type = other DNA
taagtaaaaaaaggagatgg

SEQ ID NO: 111052 - DNA, 20 bp, synthetic construct
  source 1..20: mol_type = other DNA
ctaagtaaaaaaaggagatg

SEQ ID NO: 111053 - DNA, 20 bp, synthetic construct
  source 1..20: mol_type = other DNA
cctaagtaaaaaaaggagat

SEQ ID NO: 111054 - DNA, 20 bp, synthetic construct
  source 1..20: mol_type = other DNA
ccctaagtaaaaaaaggaga

SEQ ID NO: 111055 - DNA, 20 bp, synthetic construct
  source 1..20: mol_type = other DNA
cccctaagtaaaaaaaggag

SEQ ID NO: 111056 - DNA, 20 bp, synthetic construct
  source 1..20: mol_type = other DNA
acccctaagtaaaaaaagga

SEQ ID NO: 111057 - DNA, 20 bp, synthetic construct
  source 1..20: mol_type = other DNA
aacccctaagtaaaaaaagg

SEQ ID NO: 111058 - DNA, 20 bp, synthetic construct
  source 1..20: mol_type = other DNA
aaacccctaagtaaaaaaag

SEQ ID NO: 111059 - DNA, 20 bp, synthetic construct
  source 1..20: mol_type = other DNA
taaacccctaagtaaaaaaa

SEQ ID NO: 111060 - DNA, 20 bp, synthetic construct
  source 1..20: mol_type = other DNA
ctaaacccctaagtaaaaaa

SEQ ID NO: 111061 - DNA, 20 bp, synthetic construct
  source 1..20: mol_type = other DNA
tctaaacccctaagtaaaaa

SEQ ID NO: 111062 - DNA, 20 bp, synthetic construct
  source 1..20: mol_type = other DNA
ttctaaacccctaagtaaaa

SEQ ID NO: 111063 - DNA, 20 bp, synthetic construct
  source 1..20: mol_type = other DNA
attctaaacccctaagtaaa

SEQ ID NO: 111064 - DNA, 20 bp, synthetic construct
  source 1..20: mol_type = other DNA
cattctaaacccctaagtaa

SEQ ID NO: 111065 - DNA, 20 bp, synthetic construct
  source 1..20: mol_type = other DNA
acattctaaacccctaagta

SEQ ID NO: 111066 - DNA, 20 bp, synthetic construct
  source 1..20: mol_type = other DNA
gacattctaaacccctaagt

SEQ ID NO: 111067 - DNA, 20 bp, synthetic construct
  source 1..20: mol_type = other DNA
agacattctaaacccctaag

SEQ ID NO: 111068 - DNA, 20 bp, synthetic construct
  source 1..20: mol_type = other DNA
tagacattctaaacccctaa

SEQ ID NO: 111069 - DNA, 20 bp, synthetic construct
  source 1..20: mol_type = other DNA
ttagacattctaaaccccta

SEQ ID NO: 111070 - DNA, 20 bp, synthetic construct
  source 1..20: mol_type = other DNA
gttagacattctaaacccct

SEQ ID NO: 111071 - DNA, 20 bp, synthetic construct
  source 1..20: mol_type = other DNA
agttagacattctaaacccc

SEQ ID NO: 111072 - DNA, 20 bp, synthetic construct
  source 1..20: mol_type = other DNA
cagttagacattctaaaccc

SEQ ID NO: 111073 - DNA, 20 bp, synthetic construct
  source 1..20: mol_type = other DNA
tcagttagacattctaaacc

SEQ ID NO: 111074 - DNA, 20 bp, synthetic construct
  source 1..20: mol_type = other DNA
gtcagttagacattctaaac

SEQ ID NO: 111075 - DNA, 20 bp, synthetic construct
  source 1..20: mol_type = other DNA
ggtcagttagacattctaaa

SEQ ID NO: 111076 - DNA, 20 bp, synthetic construct
  source 1..20: mol_type = other DNA
tggtcagttagacattctaa

SEQ ID NO: 111077 - DNA, 20 bp, synthetic construct
  source 1..20: mol_type = other DNA
ttggtcagttagacattcta

SEQ ID NO: 111078 - DNA, 20 bp, synthetic construct
  source 1..20: mol_type = other DNA
attggtcagttagacattct

SEQ ID NO: 111079 - DNA, 20 bp, synthetic construct
  source 1..20: mol_type = other DNA
tattggtcagttagacattc

SEQ ID NO: 111080 - DNA, 20 bp, synthetic construct
  source 1..20: mol_type = other DNA
atattggtcagttagacatt

SEQ ID NO: 111081 - DNA, 20 bp, synthetic construct
  source 1..20: mol_type = other DNA
catattggtcagttagacat

SEQ ID NO: 111082 - DNA, 20 bp, synthetic construct
  source 1..20: mol_type = other DNA
acatattggtcagttagaca

SEQ ID NO: 111083 - DNA, 20 bp, synthetic construct
  source 1..20: mol_type = other DNA
tacatattggtcagttagac

SEQ ID NO: 111084 - DNA, 20 bp, synthetic construct
  source 1..20: mol_type = other DNA
gtacatattggtcagttaga

SEQ ID NO: 111085 - DNA, 20 bp, synthetic construct
  source 1..20: mol_type = other DNA
tgtacatattggtcagttag

SEQ ID NO: 111086 - DNA, 20 bp, synthetic construct
  source 1..20: mol_type = other DNA
ctgtacatattggtcagtta

SEQ ID NO: 111087 - DNA, 20 bp, synthetic construct
  source 1..20: mol_type = other DNA
actgtacatattggtcagtt

SEQ ID NO: 111088 - DNA, 20 bp, synthetic construct
  source 1..20: mol_type = other DNA
gactgtacatattggtcagt

SEQ ID NO: 111089 - DNA, 20 bp, synthetic construct
  source 1..20: mol_type = other DNA
tgactgtacatattggtcag

SEQ ID NO: 111090 - DNA, 20 bp, synthetic construct
  source 1..20: mol_type = other DNA
ctgactgtacatattggtca

SEQ ID NO: 111091 - DNA, 20 bp, synthetic construct
  source 1..20: mol_type = other DNA
cctgactgtacatattggtc

SEQ ID NO: 111092 - DNA, 20 bp, synthetic construct
  source 1..20: mol_type = other DNA
acctgactgtacatattggt

SEQ ID NO: 111093 - DNA, 20 bp, synthetic construct
  source 1..20: mol_type = other DNA
gacctgactgtacatattgg

SEQ ID NO: 111094 - DNA, 20 bp, synthetic construct
  source 1..20: mol_type = other DNA
agacctgactgtacatattg

SEQ ID NO: 111095 - DNA, 20 bp, synthetic construct
  source 1..20: mol_type = other DNA
gagacctgactgtacatatt

SEQ ID NO: 111096 - DNA, 20 bp, synthetic construct
  source 1..20: mol_type = other DNA
tgagacctgactgtacatat

SEQ ID NO: 111097 - DNA, 20 bp, synthetic construct
  source 1..20: mol_type = other DNA
atgagacctgactgtacata

SEQ ID NO: 111098 - DNA, 20 bp, synthetic construct
  source 1..20: mol_type = other DNA
aatgagacctgactgtacat

SEQ ID NO: 111099 - DNA, 20 bp, synthetic construct
  source 1..20: mol_type = other DNA
gaatgagacctgactgtaca

SEQ ID NO: 111100 - DNA, 20 bp, synthetic construct
  source 1..20: mol_type = other DNA
agaatgagacctgactgtac

SEQ ID NO: 111101 - DNA, 20 bp, synthetic construct
  source 1..20: mol_type = other DNA
cagaatgagacctgactgta

SEQ ID NO: 111102 - DNA, 20 bp, synthetic construct
  source 1..20: mol_type = other DNA
tcagaatgagacctgactgt

SEQ ID NO: 111103 - DNA, 20 bp, synthetic construct
  source 1..20: mol_type = other DNA
ttcagaatgagacctgactg

SEQ ID NO: 111104 - DNA, 20 bp, synthetic construct
  source 1..20: mol_type = other DNA
attcagaatgagacctgact

SEQ ID NO: 111105 - DNA, 20 bp, synthetic construct
  source 1..20: mol_type = other DNA
aattcagaatgagacctgac

SEQ ID NO: 111106 - DNA, 20 bp, synthetic construct
  source 1..20: mol_type = other DNA
gaattcagaatgagacctga

SEQ ID NO: 111107 - DNA, 20 bp, synthetic construct
  source 1..20: mol_type = other DNA
tgaattcagaatgagacctg

SEQ ID NO: 111108 - DNA, 20 bp, synthetic construct
  source 1..20: mol_type = other DNA
gtgaattcagaatgagacct

SEQ ID NO: 111109 - DNA, 20 bp, synthetic construct
  source 1..20: mol_type = other DNA
ggtgaattcagaatgagacc

SEQ ID NO: 111110 - DNA, 20 bp, synthetic construct
  source 1..20: mol_type = other DNA
aggtgaattcagaatgagac

SEQ ID NO: 111111 - DNA, 20 bp, synthetic construct
  source 1..20: mol_type = other DNA
taggtgaattcagaatgaga

SEQ ID NO: 111112 - DNA, 20 bp, synthetic construct
  source 1..20: mol_type = other DNA
gtaggtgaattcagaatgag

SEQ ID NO: 111113 - DNA, 20 bp, synthetic construct
  source 1..20: mol_type = other DNA
agtaggtgaattcagaatga

SEQ ID NO: 111114 - DNA, 20 bp, synthetic construct
  source 1..20: mol_type = other DNA
aagtaggtgaattcagaatg

SEQ ID NO: 111115 - DNA, 20 bp, synthetic construct
  source 1..20: mol_type = other DNA
taagtaggtgaattcagaat

SEQ ID NO: 111116 - DNA, 20 bp, synthetic construct
  source 1..20: mol_type = other DNA
ttaagtaggtgaattcagaa

SEQ ID NO: 111117 - DNA, 20 bp, synthetic construct
  source 1..20: mol_type = other DNA
attaagtaggtgaattcaga

SEQ ID NO: 111118 - DNA, 20 bp, synthetic construct
  source 1..20: mol_type = other DNA
cattaagtaggtgaattcag

SEQ ID NO: 111119 - DNA, 20 bp, synthetic construct
  source 1..20: mol_type = other DNA
tcattaagtaggtgaattca

SEQ ID NO: 111120 - DNA, 20 bp, synthetic construct
  source 1..20: mol_type = other DNA
gtcattaagtaggtgaattc

SEQ ID NO: 111121 - DNA, 20 bp, synthetic construct
  source 1..20: mol_type = other DNA
ggtcattaagtaggtgaatt

SEQ ID NO: 111122 - DNA, 20 bp, synthetic construct
  source 1..20: mol_type = other DNA
aggtcattaagtaggtgaat

SEQ ID NO: 111123 - DNA, 20 bp, synthetic construct
  source 1..20: mol_type = other DNA
aaggtcattaagtaggtgaa

SEQ ID NO: 111124 - DNA, 20 bp, synthetic construct
  source 1..20: mol_type = other DNA
gaaggtcattaagtaggtga

SEQ ID NO: 111125 - DNA, 20 bp, synthetic construct
  source 1..20: mol_type = other DNA
ggaaggtcattaagtaggtg

SEQ ID NO: 111126 - DNA, 20 bp, synthetic construct
  source 1..20: mol_type = other DNA
tggaaggtcattaagtaggt

SEQ ID NO: 111127 - DNA, 20 bp, synthetic construct
  source 1..20: mol_type = other DNA
ttggaaggtcattaagtagg

SEQ ID NO: 111128 - DNA, 20 bp, synthetic construct
  source 1..20: mol_type = other DNA
cttggaaggtcattaagtag

SEQ ID NO: 111129 - DNA, 20 bp, synthetic construct
  source 1..20: mol_type = other DNA
gcttggaaggtcattaagta

SEQ ID NO: 111130 - DNA, 20 bp, synthetic construct
  source 1..20: mol_type = other DNA
agcttggaaggtcattaagt

SEQ ID NO: 111131 - DNA, 20 bp, synthetic construct
  source 1..20: mol_type = other DNA
cagcttggaaggtcattaag

SEQ ID NO: 111132 - DNA, 20 bp, synthetic construct
  source 1..20: mol_type = other DNA
tcagcttggaaggtcattaa

SEQ ID NO: 111133 - DNA, 20 bp, synthetic construct
  source 1..20: mol_type = other DNA
gtcagcttggaaggtcatta

SEQ ID NO: 111134 - DNA, 20 bp, synthetic construct
  source 1..20: mol_type = other DNA
agtcagcttggaaggtcatt

SEQ ID NO: 111135 - DNA, 20 bp, synthetic construct
  source 1..20: mol_type = other DNA
tagtcagcttggaaggtcat

SEQ ID NO: 111136 - DNA, 20 bp, synthetic construct
  source 1..20: mol_type = other DNA
ctagtcagcttggaaggtca

SEQ ID NO: 111137 - DNA, 20 bp, synthetic construct
  source 1..20: mol_type = other DNA
cctagtcagcttggaaggtc

SEQ ID NO: 111138 - DNA, 20 bp, synthetic construct
  source 1..20: mol_type = other DNA
gcctagtcagcttggaaggt

SEQ ID NO: 111139 - DNA, 20 bp, synthetic construct
  source 1..20: mol_type = other DNA
ggcctagtcagcttggaagg

SEQ ID NO: 111140 - DNA, 20 bp, synthetic construct
  source 1..20: mol_type = other DNA
gggcctagtcagcttggaag

SEQ ID NO: 111141 - DNA, 20 bp, synthetic construct
  source 1..20: mol_type = other DNA
tgggcctagtcagcttggaa

SEQ ID NO: 111142 - DNA, 20 bp, synthetic construct
  source 1..20: mol_type = other DNA
ctgggcctagtcagcttgga

SEQ ID NO: 111143 - DNA, 20 bp, synthetic construct
  source 1..20: mol_type = other DNA
gctgggcctagtcagcttgg

SEQ ID NO: 111144 - DNA, 20 bp, synthetic construct
  source 1..20: mol_type = other DNA
cgctgggcctagtcagcttg

SEQ ID NO: 111145 - DNA, 20 bp, synthetic construct
  source 1..20: mol_type = other DNA
gcgctgggcctagtcagctt

SEQ ID NO: 111146 - DNA, 20 bp, synthetic construct
  source 1..20: mol_type = other DNA
agcgctgggcctagtcagct

SEQ ID NO: 111147 - DNA, 20 bp, synthetic construct
  source 1..20: mol_type = other DNA
aagcgctgggcctagtcagc

SEQ ID NO: 111148 - DNA, 20 bp, synthetic construct
  source 1..20: mol_type = other DNA
taagcgctgggcctagtcag

SEQ ID NO: 111149 - DNA, 20 bp, synthetic construct
  source 1..20: mol_type = other DNA
ctaagcgctgggcctagtca

SEQ ID NO: 111150 - DNA, 20 bp, synthetic construct
  source 1..20: mol_type = other DNA
actaagcgctgggcctagtc

SEQ ID NO: 111151 - DNA, 20 bp, synthetic construct
  source 1..20: mol_type = other DNA
gactaagcgctgggcctagt

SEQ ID NO: 111152 - DNA, 20 bp, synthetic construct
  source 1..20: mol_type = other DNA
ggactaagcgctgggcctag

SEQ ID NO: 111153 - DNA, 20 bp, synthetic construct
  source 1..20: mol_type = other DNA
tggactaagcgctgggccta

SEQ ID NO: 111154 - DNA, 20 bp, synthetic construct
  source 1..20: mol_type = other DNA
ctggactaagcgctgggcct

SEQ ID NO: 111155 - DNA, 20 bp, synthetic construct
  source 1..20: mol_type = other DNA
gctggactaagcgctgggcc

SEQ ID NO: 111156 - DNA, 20 bp, synthetic construct
  source 1..20: mol_type = other DNA
ggctggactaagcgctgggc

SEQ ID NO: 111157 - DNA, 20 bp, synthetic construct
  source 1..20: mol_type = other DNA
aggctggactaagcgctggg

SEQ ID NO: 111158 - DNA, 20 bp, synthetic construct
  source 1..20: mol_type = other DNA
gaggctggactaagcgctgg

SEQ ID NO: 111159 - DNA, 20 bp, synthetic construct
  source 1..20: mol_type = other DNA
ggaggctggactaagcgctg

SEQ ID NO: 111160 - DNA, 20 bp, synthetic construct
  source 1..20: mol_type = other DNA
tggaggctggactaagcgct

SEQ ID NO: 111161 - DNA, 20 bp, synthetic construct
  source 1..20: mol_type = other DNA
atggaggctggactaagcgc

SEQ ID NO: 111162 - DNA, 20 bp, synthetic construct
  source 1..20: mol_type = other DNA
catggaggctggactaagcg

SEQ ID NO: 111163 - DNA, 20 bp, synthetic construct
  source 1..20: mol_type = other DNA
tcatggaggctggactaagc

SEQ ID NO: 111164 - DNA, 20 bp, synthetic construct
  source 1..20: mol_type = other DNA
gtcatggaggctggactaag

SEQ ID NO: 111165 - DNA, 20 bp, synthetic construct
  source 1..20: mol_type = other DNA
cgtcatggaggctggactaa

SEQ ID NO: 111166 - DNA, 20 bp, synthetic construct
  source 1..20: mol_type = other DNA
ccgtcatggaggctggacta

SEQ ID NO: 111167 - DNA, 20 bp, synthetic construct
  source 1..20: mol_type = other DNA
accgtcatggaggctggact

SEQ ID NO: 111168 - DNA, 20 bp, synthetic construct
  source 1..20: mol_type = other DNA
gaccgtcatggaggctggac

SEQ ID NO: 111169 - DNA, 20 bp, synthetic construct
  source 1..20: mol_type = other DNA
ggaccgtcatggaggctgga

SEQ ID NO: 111170 - DNA, 20 bp, synthetic construct
  source 1..20: mol_type = other DNA
gggaccgtcatggaggctgg

SEQ ID NO: 111171 - DNA, 20 bp, synthetic construct
  source 1..20: mol_type = other DNA
agggaccgtcatggaggctg

SEQ ID NO: 111172 - DNA, 20 bp, synthetic construct
  source 1..20: mol_type = other DNA
gagggaccgtcatggaggct

SEQ ID NO: 111173 - DNA, 20 bp, synthetic construct
  source 1..20: mol_type = other DNA
ggagggaccgtcatggaggc

SEQ ID NO: 111174 - DNA, 20 bp, synthetic construct
  source 1..20: mol_type = other DNA
tggagggaccgtcatggagg

SEQ ID NO: 111175 - DNA, 20 bp, synthetic construct
  source 1..20: mol_type = other DNA
gtggagggaccgtcatggag

SEQ ID NO: 111176 - DNA, 20 bp, synthetic construct
  source 1..20: mol_type = other DNA
tgtggagggaccgtcatgga

SEQ ID NO: 111177 - DNA, 20 bp, synthetic construct
  source 1..20: mol_type = other DNA
atgtggagggaccgtcatgg

SEQ ID NO: 111178 - DNA, 20 bp, synthetic construct
  source 1..20: mol_type = other DNA
gatgtggagggaccgtcatg

SEQ ID NO: 111179 - DNA, 20 bp, synthetic construct
  source 1..20: mol_type = other DNA
ggatgtggagggaccgtcat

SEQ ID NO: 111180 - DNA, 20 bp, synthetic construct
  source 1..20: mol_type = other DNA
aggatgtggagggaccgtca

SEQ ID NO: 111181 - DNA, 20 bp, synthetic construct
  source 1..20: mol_type = other DNA
taggatgtggagggaccgtc

SEQ ID NO: 111182 - DNA, 20 bp, synthetic construct
  source 1..20: mol_type = other DNA
ttaggatgtggagggaccgt

SEQ ID NO: 111183 - DNA, 20 bp, synthetic construct
  source 1..20: mol_type = other DNA
attaggatgtggagggaccg

SEQ ID NO: 111184 - DNA, 20 bp, synthetic construct
  source 1..20: mol_type = other DNA
aattaggatgtggagggacc

SEQ ID NO: 111185 - DNA, 20 bp, synthetic construct
  source 1..20: mol_type = other DNA
taattaggatgtggagggac

SEQ ID NO: 111186 - DNA, 20 bp, synthetic construct
  source 1..20: mol_type = other DNA
ctaattaggatgtggaggga

SEQ ID NO: 111187 - DNA, 20 bp, synthetic construct
  source 1..20: mol_type = other DNA
gctaattaggatgtggaggg

SEQ ID NO: 111188 - DNA, 20 bp, synthetic construct
  source 1..20: mol_type = other DNA
ggctaattaggatgtggagg

SEQ ID NO: 111189 - DNA, 20 bp, synthetic construct
  source 1..20: mol_type = other DNA
aggctaattaggatgtggag

SEQ ID NO: 111190 - DNA, 20 bp, synthetic construct
  source 1..20: mol_type = other DNA
gaggctaattaggatgtgga

SEQ ID NO: 111191 - DNA, 20 bp, synthetic construct
  source 1..20: mol_type = other DNA
ggaggctaattaggatgtgg

SEQ ID NO: 111192 - DNA, 20 bp, synthetic construct
  source 1..20: mol_type = other DNA
gggaggctaattaggatgtg

SEQ ID NO: 111193 - DNA, 20 bp, synthetic construct
  source 1..20: mol_type = other DNA
agggaggctaattaggatgt

SEQ ID NO: 111194 - DNA, 20 bp, synthetic construct
  source 1..20: mol_type = other DNA
gagggaggctaattaggatg

SEQ ID NO: 111195 - DNA, 20 bp, synthetic construct
  source 1..20: mol_type = other DNA
ggagggaggctaattaggat

SEQ ID NO: 111196 - DNA, 20 bp, synthetic construct
  source 1..20: mol_type = other DNA
tggagggaggctaattagga

SEQ ID NO: 111197 - DNA, 20 bp, synthetic construct
  source 1..20: mol_type = other DNA
ctggagggaggctaattagg

SEQ ID NO: 111198 - DNA, 20 bp, synthetic construct
  source 1..20: mol_type = other DNA
actggagggaggctaattag

SEQ ID NO: 111199 - DNA, 20 bp, synthetic construct
  source 1..20: mol_type = other DNA
aactggagggaggctaatta

SEQ ID NO: 111200 - DNA, 20 bp, synthetic construct
  source 1..20: mol_type = other DNA
gaactggagggaggctaatt

SEQ ID NO: 111201 - DNA, 20 bp, synthetic construct
  source 1..20: mol_type = other DNA
tgaactggagggaggctaat

SEQ ID NO: 111202 - DNA, 20 bp, synthetic construct
  source 1..20: mol_type = other DNA
atgaactggagggaggctaa

SEQ ID NO: 111203 - DNA, 20 bp, synthetic construct
  source 1..20: mol_type = other DNA
aatgaactggagggaggcta

SEQ ID NO: 111204 - DNA, 20 bp, synthetic construct
  source 1..20: mol_type = other DNA
aaatgaactggagggaggct

SEQ ID NO: 111205 - DNA, 20 bp, synthetic construct
  source 1..20: mol_type = other DNA
gaaatgaactggagggaggc

SEQ ID NO: 111206 - DNA, 20 bp, synthetic construct
  source 1..20: mol_type = other DNA
tgaaatgaactggagggagg

SEQ ID NO: 111207 - DNA, 20 bp, synthetic construct
  source 1..20: mol_type = other DNA
gtgaaatgaactggagggag

SEQ ID NO: 111208 - DNA, 20 bp, synthetic construct
  source 1..20: mol_type = other DNA
tgtgaaatgaactggaggga

SEQ ID NO: 111209 - DNA, 20 bp, synthetic construct
  source 1..20: mol_type = other DNA
gtgtgaaatgaactggaggg

SEQ ID NO: 111210 - DNA, 20 bp, synthetic construct
  source 1..20: mol_type = other DNA
tgtgtgaaatgaactggagg

SEQ ID NO: 111211 - DNA, 20 bp, synthetic construct
  source 1..20: mol_type = other DNA
ttgtgtgaaatgaactggag

SEQ ID NO: 111212 - DNA, 20 bp, synthetic construct
  source 1..20: mol_type = other DNA
tttgtgtgaaatgaactgga

SEQ ID NO: 111213 - DNA, 20 bp, synthetic construct
  source 1..20: mol_type = other DNA
ctttgtgtgaaatgaactgg

SEQ ID NO: 111214 - DNA, 20 bp, synthetic construct
  source 1..20: mol_type = other DNA
gctttgtgtgaaatgaactg

SEQ ID NO: 111215 - DNA, 20 bp, synthetic construct
  source 1..20: mol_type = other DNA
agctttgtgtgaaatgaact

SEQ ID NO: 111216 - DNA, 20 bp, synthetic construct
  source 1..20: mol_type = other DNA
cagctttgtgtgaaatgaac

SEQ ID NO: 111217 - DNA, 20 bp, synthetic construct
  source 1..20: mol_type = other DNA
gcagctttgtgtgaaatgaa

SEQ ID NO: 111218 - DNA, 20 bp, synthetic construct
  source 1..20: mol_type = other DNA
agcagctttgtgtgaaatga

SEQ ID NO: 111219 - DNA, 20 bp, synthetic construct
  source 1..20: mol_type = other DNA
cagcagctttgtgtgaaatg

SEQ ID NO: 111220 - DNA, 20 bp, synthetic construct
  source 1..20: mol_type = other DNA
acagcagctttgtgtgaaat

SEQ ID NO: 111221 - DNA, 20 bp, synthetic construct
  source 1..20: mol_type = other DNA
cacagcagctttgtgtgaaa

SEQ ID NO: 111222 - DNA, 20 bp, synthetic construct
  source 1..20: mol_type = other DNA
acacagcagctttgtgtgaa

SEQ ID NO: 111223 - DNA, 20 bp, synthetic construct
  source 1..20: mol_type = other DNA
aacacagcagctttgtgtga

SEQ ID NO: 111224 - DNA, 20 bp, synthetic construct
  source 1..20: mol_type = other DNA
gaacacagcagctttgtgtg

SEQ ID NO: 111225 - DNA, 20 bp, synthetic construct
  source 1..20: mol_type = other DNA
tgaacacagcagctttgtgt

SEQ ID NO: 111226 - DNA, 20 bp, synthetic construct
  source 1..20: mol_type = other DNA
gtgaacacagcagctttgtg

SEQ ID NO: 111227 - DNA, 20 bp, synthetic construct
  source 1..20: mol_type = other DNA
ggtgaacacagcagctttgt

SEQ ID NO: 111228 - DNA, 20 bp, synthetic construct
  source 1..20: mol_type = other DNA
aggtgaacacagcagctttg

SEQ ID NO: 111229 - DNA, 20 bp, synthetic construct
  source 1..20: mol_type = other DNA
aaggtgaacacagcagcttt

SEQ ID NO: 111230 - DNA, 20 bp, synthetic construct
  source 1..20: mol_type = other DNA
aaaggtgaacacagcagctt

SEQ ID NO: 111231 - DNA, 20 bp, synthetic construct
  source 1..20: mol_type = other DNA
gaaaggtgaacacagcagct

SEQ ID NO: 111232 - DNA, 20 bp, synthetic construct
  source 1..20: mol_type = other DNA
agaaaggtgaacacagcagc

SEQ ID NO: 111233 - DNA, 20 bp, synthetic construct
  source 1..20: mol_type = other DNA
cagaaaggtgaacacagcag

SEQ ID NO: 111234 - DNA, 20 bp, synthetic construct
  source 1..20: mol_type = other DNA
tcagaaaggtgaacacagca

SEQ ID NO: 111235 - DNA, 20 bp, synthetic construct
  source 1..20: mol_type = other DNA
ttcagaaaggtgaacacagc

SEQ ID NO: 111236 - DNA, 20 bp, synthetic construct
  source 1..20: mol_type = other DNA
gttcagaaaggtgaacacag

SEQ ID NO: 111237 - DNA, 20 bp, synthetic construct
  source 1..20: mol_type = other DNA
agttcagaaaggtgaacaca

SEQ ID NO: 111238 - DNA, 20 bp, synthetic construct
  source 1..20: mol_type = other DNA
tagttcagaaaggtgaacac

SEQ ID NO: 111239 - DNA, 20 bp, synthetic construct
  source 1..20: mol_type = other DNA
atagttcagaaaggtgaaca

SEQ ID NO: 111240 - DNA, 20 bp, synthetic construct
  source 1..20: mol_type = other DNA
tatagttcagaaaggtgaac

SEQ ID NO: 111241 - DNA, 20 bp, synthetic construct
  source 1..20: mol_type = other DNA
ttatagttcagaaaggtgaa

SEQ ID NO: 111242 - DNA, 20 bp, synthetic construct
  source 1..20: mol_type = other DNA
tttatagttcagaaaggtga

SEQ ID NO: 111243 - DNA, 20 bp, synthetic construct
  source 1..20: mol_type = other DNA
atttatagttcagaaaggtg

SEQ ID NO: 111244 - DNA, 20 bp, synthetic construct
  source 1..20: mol_type = other DNA
gatttatagttcagaaaggt

SEQ ID NO: 111245 - DNA, 20 bp, synthetic construct
  source 1..20: mol_type = other DNA
agatttatagttcagaaagg

SEQ ID NO: 111246 - DNA, 20 bp, synthetic construct
  source 1..20: mol_type = other DNA
cagatttatagttcagaaag

SEQ ID NO: 111247 - DNA, 20 bp, synthetic construct
  source 1..20: mol_type = other DNA
gcagatttatagttcagaaa

SEQ ID NO: 111248 - DNA, 20 bp, synthetic construct
  source 1..20: mol_type = other DNA
ggcagatttatagttcagaa

SEQ ID NO: 111249 - DNA, 20 bp, synthetic construct
  source 1..20: mol_type = other DNA
gggcagatttatagttcaga

SEQ ID NO: 111250 - DNA, 20 bp, synthetic construct
  source 1..20: mol_type = other DNA
tgggcagatttatagttcag

SEQ ID NO: 111251 - DNA, 20 bp, synthetic construct
  source 1..20: mol_type = other DNA
ctgggcagatttatagttca

SEQ ID NO: 111252 - DNA, 20 bp, synthetic construct
  source 1..20: mol_type = other DNA
actgggcagatttatagttc

SEQ ID NO: 111253 - DNA, 20 bp, synthetic construct
  source 1..20: mol_type = other DNA
tactgggcagatttatagtt

SEQ ID NO: 111254 - DNA, 20 bp, synthetic construct
  source 1..20: mol_type = other DNA
gtactgggcagatttatagt

SEQ ID NO: 111255 - DNA, 20 bp, synthetic construct
  source 1..20: mol_type = other DNA
agtactgggcagatttatag

SEQ ID NO: 111256 - DNA, 20 bp, synthetic construct
  source 1..20: mol_type = other DNA
gagtactgggcagatttata

SEQ ID NO: 111257 - DNA, 20 bp, synthetic construct
  source 1..20: mol_type = other DNA
agagtactgggcagatttat

SEQ ID NO: 111258 - DNA, 20 bp, synthetic construct
  source 1..20: mol_type = other DNA
tagagtactgggcagattta

SEQ ID NO: 111259 - DNA, 20 bp, synthetic construct
  source 1..20: mol_type = other DNA
gtagagtactgggcagattt

SEQ ID NO: 111260 - DNA, 20 bp, synthetic construct
  source 1..20: mol_type = other DNA
ggtagagtactgggcagatt

SEQ ID NO: 111261 - DNA, 20 bp, synthetic construct
  source 1..20: mol_type = other DNA
gggtagagtactgggcagat

SEQ ID NO: 111262 - DNA, 20 bp, synthetic construct
  source 1..20: mol_type = other DNA
agggtagagtactgggcaga

SEQ ID NO: 111263 - DNA, 20 bp, synthetic construct
  source 1..20: mol_type = other DNA
tagggtagagtactgggcag

SEQ ID NO: 111264 - DNA, 20 bp, synthetic construct
  source 1..20: mol_type = other DNA
gtagggtagagtactgggca

SEQ ID NO: 111265 - DNA, 20 bp, synthetic construct
  source 1..20: mol_type = other DNA
agtagggtagagtactgggc

SEQ ID NO: 111266 - DNA, 20 bp, synthetic construct
  source 1..20: mol_type = other DNA
aagtagggtagagtactggg

SEQ ID NO: 111267 - DNA, 20 bp, synthetic construct
  source 1..20: mol_type = other DNA
taagtagggtagagtactgg

SEQ ID NO: 111268 - DNA, 20 bp, synthetic construct
  source 1..20: mol_type = other DNA
ttaagtagggtagagtactg

SEQ ID NO: 111269 - DNA, 20 bp, synthetic construct
  source 1..20: mol_type = other DNA
tttaagtagggtagagtact

SEQ ID NO: 111270 - DNA, 20 bp, synthetic construct
  source 1..20: mol_type = other DNA
ttttaagtagggtagagtac

SEQ ID NO: 111271 - DNA, 20 bp, synthetic construct
  source 1..20: mol_type = other DNA
attttaagtagggtagagta

SEQ ID NO: 111272 - DNA, 20 bp, synthetic construct
  source 1..20: mol_type = other DNA
aattttaagtagggtagagt

SEQ ID NO: 111273 - DNA, 20 bp, synthetic construct
  source 1..20: mol_type = other DNA
gaattttaagtagggtagag

SEQ ID NO: 111274 - DNA, 20 bp, synthetic construct
  source 1..20: mol_type = other DNA
ggaattttaagtagggtaga

SEQ ID NO: 111275 - DNA, 20 bp, synthetic construct
  source 1..20: mol_type = other DNA
cggaattttaagtagggtag

SEQ ID NO: 111276 - DNA, 20 bp, synthetic construct
  source 1..20: mol_type = other DNA
acggaattttaagtagggta

SEQ ID NO: 111277 - DNA, 20 bp, synthetic construct
  source 1..20: mol_type = other DNA
tacggaattttaagtagggt

SEQ ID NO: 111278 - DNA, 20 bp, synthetic construct
  source 1..20: mol_type = other DNA
atacggaattttaagtaggg

SEQ ID NO: 111279 - DNA, 20 bp, synthetic construct
  source 1..20: mol_type = other DNA
tatacggaattttaagtagg

SEQ ID NO: 111280 - DNA, 20 bp, synthetic construct
  source 1..20: mol_type = other DNA
ctatacggaattttaagtag

SEQ ID NO: 111281 - DNA, 20 bp, synthetic construct
  source 1..20: mol_type = other DNA
tctatacggaattttaagta

SEQ ID NO: 111282 - DNA, 20 bp, synthetic construct
  source 1..20: mol_type = other DNA
gtctatacggaattttaagt

SEQ ID NO: 111283 - DNA, 20 bp, synthetic construct
  source 1..20: mol_type = other DNA
agtctatacggaattttaag

SEQ ID NO: 111284 - DNA, 20 bp, synthetic construct
  source 1..20: mol_type = other DNA
cagtctatacggaattttaa

SEQ ID NO: 111285 - DNA, 20 bp, synthetic construct
  source 1..20: mol_type = other DNA
gcagtctatacggaatttta

SEQ ID NO: 111286 - DNA, 20 bp, synthetic construct
  source 1..20: mol_type = other DNA
ggcagtctatacggaatttt

SEQ ID NO: 111287 - DNA, 20 bp, synthetic construct
  source 1..20: mol_type = other DNA
gggcagtctatacggaattt

SEQ ID NO: 111288 - DNA, 20 bp, synthetic construct
  source 1..20: mol_type = other DNA
tgggcagtctatacggaatt

SEQ ID NO: 111289 - DNA, 20 bp, synthetic construct
  source 1..20: mol_type = other DNA
atgggcagtctatacggaat

SEQ ID NO: 111290 - DNA, 20 bp, synthetic construct
  source 1..20: mol_type = other DNA
aatgggcagtctatacggaa

SEQ ID NO: 111291 - DNA, 20 bp, synthetic construct
  source 1..20: mol_type = other DNA
aaatgggcagtctatacgga

SEQ ID NO: 111292 - DNA, 20 bp, synthetic construct
  source 1..20: mol_type = other DNA
caaatgggcagtctatacgg

SEQ ID NO: 111293 - DNA, 20 bp, synthetic construct
  source 1..20: mol_type = other DNA
gcaaatgggcagtctatacg

SEQ ID NO: 111294 - DNA, 20 bp, synthetic construct
  source 1..20: mol_type = other DNA
ggcaaatgggcagtctatac

SEQ ID NO: 111295 - DNA, 20 bp, synthetic construct
  source 1..20: mol_type = other DNA
gggcaaatgggcagtctata

SEQ ID NO: 111296 - DNA, 20 bp, synthetic construct
  source 1..20: mol_type = other DNA
agggcaaatgggcagtctat

SEQ ID NO: 111297 - DNA, 20 bp, synthetic construct
  source 1..20: mol_type = other DNA
cagggcaaatgggcagtcta

SEQ ID NO: 111298 - DNA, 20 bp, synthetic construct
  source 1..20: mol_type = other DNA
tcagggcaaatgggcagtct

SEQ ID NO: 111299 - DNA, 20 bp, synthetic construct
  source 1..20: mol_type = other DNA
ctcagggcaaatgggcagtc

SEQ ID NO: 111300 - DNA, 20 bp, synthetic construct
  source 1..20: mol_type = other DNA
tctcagggcaaatgggcagt

SEQ ID NO: 111301 - DNA, 20 bp, synthetic construct
  source 1..20: mol_type = other DNA
ttctcagggcaaatgggcag

SEQ ID NO: 111302 - DNA, 20 bp, synthetic construct
  source 1..20: mol_type = other DNA
attctcagggcaaatgggca

SEQ ID NO: 111303 - DNA, 20 bp, synthetic construct
  source 1..20: mol_type = other DNA
aattctcagggcaaatgggc

SEQ ID NO: 111304 - DNA, 20 bp, synthetic construct
  source 1..20: mol_type = other DNA
taattctcagggcaaatggg

SEQ ID NO: 111305 - DNA, 20 bp, synthetic construct
  source 1..20: mol_type = other DNA
ttaattctcagggcaaatgg

SEQ ID NO: 111306 - DNA, 20 bp, synthetic construct
  source 1..20: mol_type = other DNA
tttaattctcagggcaaatg

SEQ ID NO: 111307 - DNA, 20 bp, synthetic construct
  source 1..20: mol_type = other DNA
ttttaattctcagggcaaat

SEQ ID NO: 111308 - DNA, 20 bp, synthetic construct
  source 1..20: mol_type = other DNA
cttttaattctcagggcaaa

SEQ ID NO: 111309 - DNA, 20 bp, synthetic construct
  source 1..20: mol_type = other DNA
gcttttaattctcagggcaa

SEQ ID NO: 111310 - DNA, 20 bp, synthetic construct
  source 1..20: mol_type = other DNA
ggcttttaattctcagggca

SEQ ID NO: 111311 - DNA, 20 bp, synthetic construct
  source 1..20: mol_type = other DNA
tggcttttaattctcagggc

SEQ ID NO: 111312 - DNA, 20 bp, synthetic construct
  source 1..20: mol_type = other DNA
ttggcttttaattctcaggg

SEQ ID NO: 111313 - DNA, 20 bp, synthetic construct
  source 1..20: mol_type = other DNA
tttggcttttaattctcagg

SEQ ID NO: 111314 - DNA, 20 bp, synthetic construct
  source 1..20: mol_type = other DNA
ctttggcttttaattctcag

SEQ ID NO: 111315 - DNA, 20 bp, synthetic construct
  source 1..20: mol_type = other DNA
actttggcttttaattctca

SEQ ID NO: 111316 - DNA, 20 bp, synthetic construct
  source 1..20: mol_type = other DNA
gactttggcttttaattctc

SEQ ID NO: 111317 - DNA, 20 bp, synthetic construct
  source 1..20: mol_type = other DNA
ggactttggcttttaattct

SEQ ID NO: 111318 - DNA, 20 bp, synthetic construct
  source 1..20: mol_type = other DNA
aggactttggcttttaattc

SEQ ID NO: 111319 - DNA, 20 bp, synthetic construct
  source 1..20: mol_type = other DNA
taggactttggcttttaatt

SEQ ID NO: 111320 - DNA, 20 bp, synthetic construct
  source 1..20: mol_type = other DNA
ttaggactttggcttttaat

SEQ ID NO: 111321 - DNA, 20 bp, synthetic construct
  source 1..20: mol_type = other DNA
tttaggactttggcttttaa

SEQ ID NO: 111322 - DNA, 20 bp, synthetic construct
  source 1..20: mol_type = other DNA
gtttaggactttggctttta

SEQ ID NO: 111323 - DNA, 20 bp, synthetic construct
  source 1..20: mol_type = other DNA
cgtttaggactttggctttt

SEQ ID NO: 111324 - DNA, 20 bp, synthetic construct
  source 1..20: mol_type = other DNA
acgtttaggactttggcttt

SEQ ID NO: 111325 - DNA, 20 bp, synthetic construct
  source 1..20: mol_type = other DNA
tacgtttaggactttggctt

SEQ ID NO: 111326 - DNA, 20 bp, synthetic construct
  source 1..20: mol_type = other DNA
ctacgtttaggactttggct

SEQ ID NO: 111327 - DNA, 20 bp, synthetic construct
  source 1..20: mol_type = other DNA
gctacgtttaggactttggc

SEQ ID NO: 111328 - DNA, 20 bp, synthetic construct
  source 1..20: mol_type = other DNA
agctacgtttaggactttgg

SEQ ID NO: 111329 - DNA, 20 bp, synthetic construct
  source 1..20: mol_type = other DNA
aagctacgtttaggactttg

SEQ ID NO: 111330 - DNA, 20 bp, synthetic construct
  source 1..20: mol_type = other DNA
aaagctacgtttaggacttt

SEQ ID NO: 111331 - DNA, 20 bp, synthetic construct
  source 1..20: mol_type = other DNA
aaaagctacgtttaggactt

SEQ ID NO: 111332 - DNA, 20 bp, synthetic construct
  source 1..20: mol_type = other DNA
aaaaagctacgtttaggact

SEQ ID NO: 111333 - DNA, 20 bp, synthetic construct
  source 1..20: mol_type = other DNA
taaaaagctacgtttaggac

SEQ ID NO: 111334 - DNA, 20 bp, synthetic construct
  source 1..20: mol_type = other DNA
ttaaaaagctacgtttagga

SEQ ID NO: 111335 - DNA, 20 bp, synthetic construct
  source 1..20: mol_type = other DNA
tttaaaaagctacgtttagg

SEQ ID NO: 111336 - DNA, 20 bp, synthetic construct
  source 1..20: mol_type = other DNA
ttttaaaaagctacgtttag

SEQ ID NO: 111337 - DNA, 20 bp, synthetic construct
  source 1..20: mol_type = other DNA
gttttaaaaagctacgttta

SEQ ID NO: 111338 - DNA, 20 bp, synthetic construct
  source 1..20: mol_type = other DNA
agttttaaaaagctacgttt

SEQ ID NO: 111339 - DNA, 20 bp, synthetic construct
  source 1..20: mol_type = other DNA
aagttttaaaaagctacgtt

SEQ ID NO: 111340 - DNA, 20 bp, synthetic construct
  source 1..20: mol_type = other DNA
aaagttttaaaaagctacgt

SEQ ID NO: 111341 - DNA, 20 bp, synthetic construct
  source 1..20: mol_type = other DNA
aaaagttttaaaaagctacg

SEQ ID NO: 111342 - DNA, 20 bp, synthetic construct
  source 1..20: mol_type = other DNA
aaaaagttttaaaaagctac

SEQ ID NO: 111343 - DNA, 20 bp, synthetic construct
  source 1..20: mol_type = other DNA
aaaaaagttttaaaaagcta

SEQ ID NO: 111344 - DNA, 20 bp, synthetic construct
  source 1..20: mol_type = other DNA
aaaaaaagttttaaaaagct

SEQ ID NO: 111345 - DNA, 20 bp, synthetic construct
  source 1..20: mol_type = other DNA
aaaaaaaagttttaaaaagc

SEQ ID NO: 111346 - DNA, 20 bp, synthetic construct
  source 1..20: mol_type = other DNA
aaaaaaaaagttttaaaaag

SEQ ID NO: 111347 - DNA, 20 bp, synthetic construct
  source 1..20: mol_type = other DNA
aaaaaaaaaagttttaaaaa

SEQ ID NO: 111348 - DNA, 20 bp, synthetic construct
  source 1..20: mol_type = other DNA
aaaaaaaaaaagttttaaaa

SEQ ID NO: 111349 - DNA, 20 bp, synthetic construct
  source 1..20: mol_type = other DNA
aaaaaaaaaaaagttttaaa

SEQ ID NO: 111350 - DNA, 20 bp, synthetic construct
  source 1..20: mol_type = other DNA
aaaaaaaaaaaaagttttaa

SEQ ID NO: 111351 - DNA, 20 bp, synthetic construct
  source 1..20: mol_type = other DNA
aaaaaaaaaaaaaagtttta

SEQ ID NO: 111352 - DNA, 20 bp, synthetic construct
  source 1..20: mol_type = other DNA
aaaaaaaaaaaaaaagtttt

SEQ ID NO: 111353 - DNA, 20 bp, synthetic construct
  source 1..20: mol_type = other DNA
aaaaaaaaaaaaaaaagttt

SEQ ID NO: 111354 - DNA, 20 bp, synthetic construct
  source 1..20: mol_type = other DNA
aaaaaaaaaaaaaaaaagtt

SEQ ID NO: 111355 - DNA, 20 bp, synthetic construct
  source 1..20: mol_type = other DNA
aaaaaaaaaaaaaaaaaagt

SEQ ID NO: 111356 - DNA, 20 bp, synthetic construct
  source 1..20: mol_type = other DNA
taaaaaaaaaaaaaaaaaag

SEQ ID NO: 111357 - DNA, 20 bp, synthetic construct
  source 1..20: mol_type = other DNA
ttaaaaaaaaaaaaaaaaaa

SEQ ID NO: 111358 - DNA, 20 bp, synthetic construct
  source 1..20: mol_type = other DNA
attaaaaaaaaaaaaaaaaa

SEQ ID NO: 111359 - DNA, 20 bp, synthetic construct
  source 1..20: mol_type = other DNA
aattaaaaaaaaaaaaaaaa

SEQ ID NO: 111360 - DNA, 20 bp, synthetic construct
  source 1..20: mol_type = other DNA
aaattaaaaaaaaaaaaaaa

SEQ ID NO: 111361 - DNA, 20 bp, synthetic construct
  source 1..20: mol_type = other DNA
aaaattaaaaaaaaaaaaaa

SEQ ID NO: 111362 - DNA, 20 bp, synthetic construct
  source 1..20: mol_type = other DNA
aaaaattaaaaaaaaaaaaa

SEQ ID NO: 111363 - DNA, 20 bp, synthetic construct
  source 1..20: mol_type = other DNA
taaaaattaaaaaaaaaaaa

SEQ ID NO: 111364 - DNA, 20 bp, synthetic construct
  source 1..20: mol_type = other DNA
ctaaaaattaaaaaaaaaaa

SEQ ID NO: 111365 - DNA, 20 bp, synthetic construct
  source 1..20: mol_type = other DNA
tctaaaaattaaaaaaaaaa

SEQ ID NO: 111366 - DNA, 20 bp, synthetic construct
  source 1..20: mol_type = other DNA
atctaaaaattaaaaaaaaa

SEQ ID NO: 111367 - DNA, 20 bp, synthetic construct
  source 1..20: mol_type = other DNA
catctaaaaattaaaaaaaa

SEQ ID NO: 111368 - DNA, 20 bp, synthetic construct
  source 1..20: mol_type = other DNA
ccatctaaaaattaaaaaaa

SEQ ID NO: 111369 - DNA, 20 bp, synthetic construct
  source 1..20: mol_type = other DNA
tccatctaaaaattaaaaaa

SEQ ID NO: 111370 - DNA, 20 bp, synthetic construct
  source 1..20: mol_type = other DNA
ctccatctaaaaattaaaaa

SEQ ID NO: 111371 - DNA, 20 bp, synthetic construct
  source 1..20: mol_type = other DNA
actccatctaaaaattaaaa

SEQ ID NO: 111372 - DNA, 20 bp, synthetic construct
  source 1..20: mol_type = other DNA
gactccatctaaaaattaaa

SEQ ID NO: 111373 - DNA, 20 bp, synthetic construct
  source 1..20: mol_type = other DNA
agactccatctaaaaattaa

SEQ ID NO: 111374 - DNA, 20 bp, synthetic construct
  source 1..20: mol_type = other DNA
aagactccatctaaaaatta

SEQ ID NO: 111375 - DNA, 20 bp, synthetic construct
  source 1..20: mol_type = other DNA
caagactccatctaaaaatt

SEQ ID NO: 111376 - DNA, 20 bp, synthetic construct
  source 1..20: mol_type = other DNA
gcaagactccatctaaaaat

SEQ ID NO: 111377 - DNA, 20 bp, synthetic construct
  source 1..20: mol_type = other DNA
agcaagactccatctaaaaa

SEQ ID NO: 111378 - DNA, 20 bp, synthetic construct
  source 1..20: mol_type = other DNA
gagcaagactccatctaaaa

SEQ ID NO: 111379 - DNA, 20 bp, synthetic construct
  source 1..20: mol_type = other DNA
agagcaagactccatctaaa

SEQ ID NO: 111380 - DNA, 20 bp, synthetic construct
  source 1..20: mol_type = other DNA
cagagcaagactccatctaa

SEQ ID NO: 111381 - DNA, 20 bp, synthetic construct
  source 1..20: mol_type = other DNA
acagagcaagactccatcta

SEQ ID NO: 111382 - DNA, 20 bp, synthetic construct
  source 1..20: mol_type = other DNA
gacagagcaagactccatct

SEQ ID NO: 111383 - DNA, 20 bp, synthetic construct
  source 1..20: mol_type = other DNA
tgacagagcaagactccatc

SEQ ID NO: 111384 - DNA, 20 bp, synthetic construct
  source 1..20: mol_type = other DNA
gtgacagagcaagactccat

SEQ ID NO: 111385 - DNA, 20 bp, synthetic construct
  source 1..20: mol_type = other DNA
ggtgacagagcaagactcca

SEQ ID NO: 111386 - DNA, 20 bp, synthetic construct
  source 1..20: mol_type = other DNA
gggtgacagagcaagactcc

SEQ ID NO: 111387 - DNA, 20 bp, synthetic construct
  source 1..20: mol_type = other DNA
tgggtgacagagcaagactc

SEQ ID NO: 111388 - DNA, 20 bp, synthetic construct
  source 1..20: mol_type = other DNA
ctgggtgacagagcaagact

SEQ ID NO: 111389 - DNA, 20 bp, synthetic construct
  source 1..20: mol_type = other DNA
cctgggtgacagagcaagac

SEQ ID NO: 111390 - DNA, 20 bp, synthetic construct
  source 1..20: mol_type = other DNA
gcctgggtgacagagcaaga

SEQ ID NO: 111391 - DNA, 20 bp, synthetic construct
  source 1..20: mol_type = other DNA
agcctgggtgacagagcaag

SEQ ID NO: 111392 - DNA, 20 bp, synthetic construct
  source 1..20: mol_type = other DNA
cagcctgggtgacagagcaa

SEQ ID NO: 111393 - DNA, 20 bp, synthetic construct
  source 1..20: mol_type = other DNA
ccagcctgggtgacagagca

SEQ ID NO: 111394 - DNA, 20 bp, synthetic construct
  source 1..20: mol_type = other DNA
tccagcctgggtgacagagc

SEQ ID NO: 111395 - DNA, 20 bp, synthetic construct
  source 1..20: mol_type = other DNA
ctccagcctgggtgacagag

SEQ ID NO: 111396 - DNA, 20 bp, synthetic construct
  source 1..20: mol_type = other DNA
actccagcctgggtgacaga

SEQ ID NO: 111397 - DNA, 20 bp, synthetic construct
  source 1..20: mol_type = other DNA
cactccagcctgggtgacag

SEQ ID NO: 111398 - DNA, 20 bp, synthetic construct
  source 1..20: mol_type = other DNA
gcactccagcctgggtgaca

SEQ ID NO: 111399 - DNA, 20 bp, synthetic construct
  source 1..20: mol_type = other DNA
tgcactccagcctgggtgac

SEQ ID NO: 111400 - DNA, 20 bp, synthetic construct
  source 1..20: mol_type = other DNA
ctgcactccagcctgggtga

SEQ ID NO: 111401 - DNA, 20 bp, synthetic construct
  source 1..20: mol_type = other DNA
actgcactccagcctgggtg

SEQ ID NO: 111402 - DNA, 20 bp, synthetic construct
  source 1..20: mol_type = other DNA
cactgcactccagcctgggt

SEQ ID NO: 111403 - DNA, 20 bp, synthetic construct
  source 1..20: mol_type = other DNA
ccactgcactccagcctggg

SEQ ID NO: 111404 - DNA, 20 bp, synthetic construct
  source 1..20: mol_type = other DNA
accactgcactccagcctgg

SEQ ID NO: 111405 - DNA, 20 bp, synthetic construct
  source 1..20: mol_type = other DNA
caccactgcactccagcctg

SEQ ID NO: 111406 - DNA, 20 bp, synthetic construct
  source 1..20: mol_type = other DNA
acaccactgcactccagcct

SEQ ID NO: 111407 - DNA, 20 bp, synthetic construct
  source 1..20: mol_type = other DNA
cacaccactgcactccagcc

SEQ ID NO: 111408 - DNA, 20 bp, synthetic construct
  source 1..20: mol_type = other DNA
tcacaccactgcactccagc

SEQ ID NO: 111409 - DNA, 20 bp, synthetic construct
  source 1..20: mol_type = other DNA
atcacaccactgcactccag

SEQ ID NO: 111410 - DNA, 20 bp, synthetic construct
  source 1..20: mol_type = other DNA
gatcacaccactgcactcca

SEQ ID NO: 111411 - DNA, 20 bp, synthetic construct
  source 1..20: mol_type = other DNA
agatcacaccactgcactcc

SEQ ID NO: 111412 - DNA, 20 bp, synthetic construct
  source 1..20: mol_type = other DNA
aagatcacaccactgcactc

SEQ ID NO: 111413 - DNA, 20 bp, synthetic construct
  source 1..20: mol_type = other DNA
caagatcacaccactgcact

SEQ ID NO: 111414 - DNA, 20 bp, synthetic construct
  source 1..20: mol_type = other DNA
ccaagatcacaccactgcac

SEQ ID NO: 111415 - DNA, 20 bp, synthetic construct
  source 1..20: mol_type = other DNA
gccaagatcacaccactgca

SEQ ID NO: 111416 - DNA, 20 bp, synthetic construct
  source 1..20: mol_type = other DNA
agccaagatcacaccactgc

SEQ ID NO: 111417 - DNA, 20 bp, synthetic construct
  source 1..20: mol_type = other DNA
gagccaagatcacaccactg

SEQ ID NO: 111418 - DNA, 20 bp, synthetic construct
  source 1..20: mol_type = other DNA
tgagccaagatcacaccact

SEQ ID NO: 111419 - DNA, 20 bp, synthetic construct
  source 1..20: mol_type = other DNA
gtgagccaagatcacaccac

SEQ ID NO: 111420 - DNA, 20 bp, synthetic construct
  source 1..20: mol_type = other DNA
agtgagccaagatcacacca

SEQ ID NO: 111421 - DNA, 20 bp, synthetic construct
  source 1..20: mol_type = other DNA
cagtgagccaagatcacacc

SEQ ID NO: 111422 - DNA, 20 bp, synthetic construct
  source 1..20: mol_type = other DNA
gcagtgagccaagatcacac

SEQ ID NO: 111423 - DNA, 20 bp, synthetic construct
  source 1..20: mol_type = other DNA
tgcagtgagccaagatcaca

SEQ ID NO: 111424 - DNA, 20 bp, synthetic construct
  source 1..20: mol_type = other DNA
ttgcagtgagccaagatcac

SEQ ID NO: 111425 - DNA, 20 bp, synthetic construct
  source 1..20: mol_type = other DNA
gttgcagtgagccaagatca

SEQ ID NO: 111426 - DNA, 20 bp, synthetic construct
  source 1..20: mol_type = other DNA
ggttgcagtgagccaagatc

SEQ ID NO: 111427 - DNA, 20 bp, synthetic construct
  source 1..20: mol_type = other DNA
aggttgcagtgagccaagat

SEQ ID NO: 111428 - DNA, 20 bp, synthetic construct
  source 1..20: mol_type = other DNA
gaggttgcagtgagccaaga

SEQ ID NO: 111429 - DNA, 20 bp, synthetic construct
  source 1..20: mol_type = other DNA
ggaggttgcagtgagccaag

SEQ ID NO: 111430 - DNA, 20 bp, synthetic construct
  source 1..20: mol_type = other DNA
cggaggttgcagtgagccaa

SEQ ID NO: 111431 - DNA, 20 bp, synthetic construct
  source 1..20: mol_type = other DNA
gcggaggttgcagtgagcca

SEQ ID NO: 111432 - DNA, 20 bp, synthetic construct
  source 1..20: mol_type = other DNA
ggcggaggttgcagtgagcc

SEQ ID NO: 111433 - DNA, 20 bp, synthetic construct
  source 1..20: mol_type = other DNA
aggcggaggttgcagtgagc

SEQ ID NO: 111434 - DNA, 20 bp, synthetic construct
  source 1..20: mol_type = other DNA
gaggcggaggttgcagtgag

SEQ ID NO: 111435 - DNA, 20 bp, synthetic construct
  source 1..20: mol_type = other DNA
ggaggcggaggttgcagtga

SEQ ID NO: 111436 - DNA, 20 bp, synthetic construct
  source 1..20: mol_type = other DNA
aggaggcggaggttgcagtg

SEQ ID NO: 111437 - DNA, 20 bp, synthetic construct
  source 1..20: mol_type = other DNA
caggaggcggaggttgcagt

SEQ ID NO: 111438 - DNA, 20 bp, synthetic construct
  source 1..20: mol_type = other DNA
ccaggaggcggaggttgcag

SEQ ID NO: 111439 - DNA, 20 bp, synthetic construct
  source 1..20: mol_type = other DNA
cccaggaggcggaggttgca

SEQ ID NO: 111440 - DNA, 20 bp, synthetic construct
  source 1..20: mol_type = other DNA
acccaggaggcggaggttgc

SEQ ID NO: 111441 - DNA, 20 bp, synthetic construct
  source 1..20: mol_type = other DNA
aacccaggaggcggaggttg

SEQ ID NO: 111442 - DNA, 20 bp, synthetic construct
  source 1..20: mol_type = other DNA
gaacccaggaggcggaggtt

SEQ ID NO: 111443 - DNA, 20 bp, synthetic construct
  source 1..20: mol_type = other DNA
tgaacccaggaggcggaggt

SEQ ID NO: 111444 - DNA, 20 bp, synthetic construct
  source 1..20: mol_type = other DNA
ttgaacccaggaggcggagg

SEQ ID NO: 111445 - DNA, 20 bp, synthetic construct
  source 1..20: mol_type = other DNA
cttgaacccaggaggcggag

SEQ ID NO: 111446 - DNA, 20 bp, synthetic construct
  source 1..20: mol_type = other DNA
gcttgaacccaggaggcgga

SEQ ID NO: 111447 - DNA, 20 bp, synthetic construct
  source 1..20: mol_type = other DNA
tgcttgaacccaggaggcgg

SEQ ID NO: 111448 - DNA, 20 bp, synthetic construct
  source 1..20: mol_type = other DNA
ttgcttgaacccaggaggcg

SEQ ID NO: 111449 - DNA, 20 bp, synthetic construct
  source 1..20: mol_type = other DNA
attgcttgaacccaggaggc

SEQ ID NO: 111450 - DNA, 20 bp, synthetic construct
  source 1..20: mol_type = other DNA
aattgcttgaacccaggagg

SEQ ID NO: 111451 - DNA, 20 bp, synthetic construct
  source 1..20: mol_type = other DNA
gaattgcttgaacccaggag

SEQ ID NO: 111452 - DNA, 20 bp, synthetic construct
  source 1..20: mol_type = other DNA
agaattgcttgaacccagga

SEQ ID NO: 111453 - DNA, 20 bp, synthetic construct
  source 1..20: mol_type = other DNA
gagaattgcttgaacccagg

SEQ ID NO: 111454 - DNA, 20 bp, synthetic construct
  source 1..20: mol_type = other DNA
tgagaattgcttgaacccag

SEQ ID NO: 111455 - DNA, 20 bp, synthetic construct
  source 1..20: mol_type = other DNA
atgagaattgcttgaaccca

SEQ ID NO: 111456 - DNA, 20 bp, synthetic construct
  source 1..20: mol_type = other DNA
tatgagaattgcttgaaccc

SEQ ID NO: 111457 - DNA, 20 bp, synthetic construct
  source 1..20: mol_type = other DNA
atatgagaattgcttgaacc

SEQ ID NO: 111458 - DNA, 20 bp, synthetic construct
  source 1..20: mol_type = other DNA
catatgagaattgcttgaac

SEQ ID NO: 111459 - DNA, 20 bp, synthetic construct
  source 1..20: mol_type = other DNA
acatatgagaattgcttgaa

SEQ ID NO: 111460 - DNA, 20 bp, synthetic construct
  source 1..20: mol_type = other DNA
gacatatgagaattgcttga

SEQ ID NO: 111461 - DNA, 20 bp, synthetic construct
  source 1..20: mol_type = other DNA
tgacatatgagaattgcttg

SEQ ID NO: 111462 - DNA, 20 bp, synthetic construct
  source 1..20: mol_type = other DNA
ctgacatatgagaattgctt

SEQ ID NO: 111463 - DNA, 20 bp, synthetic construct
  source 1..20: mol_type = other DNA
gctgacatatgagaattgct

SEQ ID NO: 111464 - DNA, 20 bp, synthetic construct
  source 1..20: mol_type = other DNA
ggctgacatatgagaattgc

SEQ ID NO: 111465 - DNA, 20 bp, synthetic construct
  source 1..20: mol_type = other DNA
aggctgacatatgagaattg

SEQ ID NO: 111466 - DNA, 20 bp, synthetic construct
  source 1..20: mol_type = other DNA
gaggctgacatatgagaatt

SEQ ID NO: 111467 - DNA, 20 bp, synthetic construct
  source 1..20: mol_type = other DNA
ggaggctgacatatgagaat

SEQ ID NO: 111468 - DNA, 20 bp, synthetic construct
  source 1..20: mol_type = other DNA
gggaggctgacatatgagaa

SEQ ID NO: 111469 - DNA, 20 bp, synthetic construct
  source 1..20: mol_type = other DNA
tgggaggctgacatatgaga

SEQ ID NO: 111470 - DNA, 20 bp, synthetic construct
  source 1..20: mol_type = other DNA
ttgggaggctgacatatgag

SEQ ID NO: 111471 - DNA, 20 bp, synthetic construct
  source 1..20: mol_type = other DNA
cttgggaggctgacatatga

SEQ ID NO: 111472 - DNA, 20 bp, synthetic construct
  source 1..20: mol_type = other DNA
acttgggaggctgacatatg

SEQ ID NO: 111473 - DNA, 20 bp, synthetic construct
  source 1..20: mol_type = other DNA
tacttgggaggctgacatat

SEQ ID NO: 111474 - DNA, 20 bp, synthetic construct
  source 1..20: mol_type = other DNA
ctacttgggaggctgacata

SEQ ID NO: 111475 - DNA, 20 bp, synthetic construct
  source 1..20: mol_type = other DNA
gctacttgggaggctgacat

SEQ ID NO: 111476 - DNA, 20 bp, synthetic construct
  source 1..20: mol_type = other DNA
agctacttgggaggctgaca

SEQ ID NO: 111477 - DNA, 20 bp, synthetic construct
  source 1..20: mol_type = other DNA
cagctacttgggaggctgac

SEQ ID NO: 111478 - DNA, 20 bp, synthetic construct
  source 1..20: mol_type = other DNA
ccagctacttgggaggctga

SEQ ID NO: 111479 - DNA, 20 bp, synthetic construct
  source 1..20: mol_type = other DNA
cccagctacttgggaggctg

SEQ ID NO: 111480 - DNA, 20 bp, synthetic construct
  source 1..20: mol_type = other DNA
tcccagctacttgggaggct

SEQ ID NO: 111481 - DNA, 20 bp, synthetic construct
  source 1..20: mol_type = other DNA
atcccagctacttgggaggc

SEQ ID NO: 111482 - DNA, 20 bp, synthetic construct
  source 1..20: mol_type = other DNA
aatcccagctacttgggagg

SEQ ID NO: 111483 - DNA, 20 bp, synthetic construct
  source 1..20: mol_type = other DNA
aaatcccagctacttgggag

SEQ ID NO: 111484 - DNA, 20 bp, synthetic construct
  source 1..20: mol_type = other DNA
taaatcccagctacttggga

SEQ ID NO: 111485 - DNA, 20 bp, synthetic construct
  source 1..20: mol_type = other DNA
gtaaatcccagctacttggg

SEQ ID NO: 111486 - DNA, 20 bp, synthetic construct
  source 1..20: mol_type = other DNA
tgtaaatcccagctacttgg

SEQ ID NO: 111487 - DNA, 20 bp, synthetic construct
  source 1..20: mol_type = other DNA
gtgtaaatcccagctacttg

SEQ ID NO: 111488 - DNA, 20 bp, synthetic construct
  source 1..20: mol_type = other DNA
cgtgtaaatcccagctactt

SEQ ID NO: 111489 - DNA, 20 bp, synthetic construct
  source 1..20: mol_type = other DNA
acgtgtaaatcccagctact

SEQ ID NO: 111490 - DNA, 20 bp, synthetic construct
  source 1..20: mol_type = other DNA
cacgtgtaaatcccagctac

SEQ ID NO: 111491 - DNA, 20 bp, synthetic construct
  source 1..20: mol_type = other DNA
acacgtgtaaatcccagcta

SEQ ID NO: 111492 - DNA, 20 bp, synthetic construct
  source 1..20: mol_type = other DNA
cacacgtgtaaatcccagct

SEQ ID NO: 111493 - DNA, 20 bp, synthetic construct
  source 1..20: mol_type = other DNA
gcacacgtgtaaatcccagc

SEQ ID NO: 111494 - DNA, 20 bp, synthetic construct
  source 1..20: mol_type = other DNA
ggcacacgtgtaaatcccag

SEQ ID NO: 111495 - DNA, 20 bp, synthetic construct
  source 1..20: mol_type = other DNA
tggcacacgtgtaaatccca

SEQ ID NO: 111496 - DNA, 20 bp, synthetic construct
  source 1..20: mol_type = other DNA
atggcacacgtgtaaatccc

SEQ ID NO: 111497 - DNA, 20 bp, synthetic construct
  source 1..20: mol_type = other DNA
gatggcacacgtgtaaatcc

SEQ ID NO: 111498 - DNA, 20 bp, synthetic construct
  source 1..20: mol_type = other DNA
tgatggcacacgtgtaaatc

SEQ ID NO: 111499 - DNA, 20 bp, synthetic construct
  source 1..20: mol_type = other DNA
gtgatggcacacgtgtaaat

SEQ ID NO: 111500 - DNA, 20 bp, synthetic construct
  source 1..20: mol_type = other DNA
cgtgatggcacacgtgtaaa

SEQ ID NO: 111501 - DNA, 20 bp, synthetic construct
  source 1..20: mol_type = other DNA
gcgtgatggcacacgtgtaa

SEQ ID NO: 111502 - DNA, 20 bp, synthetic construct
  source 1..20: mol_type = other DNA
ggcgtgatggcacacgtgta

SEQ ID NO: 111503 - DNA, 20 bp, synthetic construct
  source 1..20: mol_type = other DNA
aggcgtgatggcacacgtgt

SEQ ID NO: 111504 - DNA, 20 bp, synthetic construct
  source 1..20: mol_type = other DNA
caggcgtgatggcacacgtg

SEQ ID NO: 111505 - DNA, 20 bp, synthetic construct
  source 1..20: mol_type = other DNA
ccaggcgtgatggcacacgt

SEQ ID NO: 111506 - DNA, 20 bp, synthetic construct
  source 1..20: mol_type = other DNA
gccaggcgtgatggcacacg

SEQ ID NO: 111507 - DNA, 20 bp, synthetic construct
  source 1..20: mol_type = other DNA
agccaggcgtgatggcacac

SEQ ID NO: 111508 - DNA, 20 bp, synthetic construct
  source 1..20: mol_type = other DNA
tagccaggcgtgatggcaca

SEQ ID NO: 111509 - DNA, 20 bp, synthetic construct
  source 1..20: mol_type = other DNA
ttagccaggcgtgatggcac

SEQ ID NO: 111510 - DNA, 20 bp, synthetic construct
  source 1..20: mol_type = other DNA
attagccaggcgtgatggca

SEQ ID NO: 111511 - DNA, 20 bp, synthetic construct
  source 1..20: mol_type = other DNA
aattagccaggcgtgatggc

SEQ ID NO: 111512 - DNA, 20 bp, synthetic construct
  source 1..20: mol_type = other DNA
aaattagccaggcgtgatgg

SEQ ID NO: 111513 - DNA, 20 bp, synthetic construct
  source 1..20: mol_type = other DNA
aaaattagccaggcgtgatg

SEQ ID NO: 111514 - DNA, 20 bp, synthetic construct
  source 1..20: mol_type = other DNA
aaaaattagccaggcgtgat

SEQ ID NO: 111515 - DNA, 20 bp, synthetic construct
  source 1..20: mol_type = other DNA
aaaaaattagccaggcgtga

SEQ ID NO: 111516 - DNA, 20 bp, synthetic construct
  source 1..20: mol_type = other DNA
aaaaaaattagccaggcgtg

SEQ ID NO: 111517 - DNA, 20 bp, synthetic construct
  source 1..20: mol_type = other DNA
aaaaaaaattagccaggcgt

SEQ ID NO: 111518 - DNA, 20 bp, synthetic construct
  source 1..20: mol_type = other DNA
aaaaaaaaattagccaggcg

SEQ ID NO: 111519 - DNA, 20 bp, synthetic construct
  source 1..20: mol_type = other DNA
aaaaaaaaaattagccaggc

SEQ ID NO: 111520 - DNA, 20 bp, synthetic construct
  source 1..20: mol_type = other DNA
aaaaaaaaaaattagccagg

SEQ ID NO: 111521 - DNA, 20 bp, synthetic construct
  source 1..20: mol_type = other DNA
aaaaaaaaaaaattagccag

SEQ ID NO: 111522 - DNA, 20 bp, synthetic construct
  source 1..20: mol_type = other DNA
taaaaaaaaaaaattagcca

SEQ ID NO: 111523 - DNA, 20 bp, synthetic construct
  source 1..20: mol_type = other DNA
ataaaaaaaaaaaattagcc

SEQ ID NO: 111524 - DNA, 20 bp, synthetic construct
  source 1..20: mol_type = other DNA
gataaaaaaaaaaaattagc

SEQ ID NO: 111525 - DNA, 20 bp, synthetic construct
  source 1..20: mol_type = other DNA
agataaaaaaaaaaaattag

SEQ ID NO: 111526 - DNA, 20 bp, synthetic construct
  source 1..20: mol_type = other DNA
aagataaaaaaaaaaaatta

SEQ ID NO: 111527 - DNA, 20 bp, synthetic construct
  source 1..20: mol_type = other DNA
aaagataaaaaaaaaaaatt

SEQ ID NO: 111528 - DNA, 20 bp, synthetic construct
  source 1..20: mol_type = other DNA
taaagataaaaaaaaaaaat

SEQ ID NO: 111529 - DNA, 20 bp, synthetic construct
  source 1..20: mol_type = other DNA
ctaaagataaaaaaaaaaaa

SEQ ID NO: 111530 - DNA, 20 bp, synthetic construct
  source 1..20: mol_type = other DNA
actaaagataaaaaaaaaaa

SEQ ID NO: 111531 - DNA, 20 bp, synthetic construct
  source 1..20: mol_type = other DNA
tactaaagataaaaaaaaaa

SEQ ID NO: 111532 - DNA, 20 bp, synthetic construct
  source 1..20: mol_type = other DNA
ctactaaagataaaaaaaaa

SEQ ID NO: 111533 - DNA, 20 bp, synthetic construct
  source 1..20: mol_type = other DNA
tctactaaagataaaaaaaa

SEQ ID NO: 111534 - DNA, 20 bp, synthetic construct
  source 1..20: mol_type = other DNA
ctctactaaagataaaaaaa

SEQ ID NO: 111535 - DNA, 20 bp, synthetic construct
  source 1..20: mol_type = other DNA
tctctactaaagataaaaaa

SEQ ID NO: 111536 - DNA, 20 bp, synthetic construct
  source 1..20: mol_type = other DNA
gtctctactaaagataaaaa

SEQ ID NO: 111537 - DNA, 20 bp, synthetic construct
  source 1..20: mol_type = other DNA
cgtctctactaaagataaaa

SEQ ID NO: 111538 - DNA, 20 bp, synthetic construct
  source 1..20: mol_type = other DNA
ccgtctctactaaagataaa

SEQ ID NO: 111539 - DNA, 20 bp, synthetic construct
  source 1..20: mol_type = other DNA
tccgtctctactaaagataa

SEQ ID NO: 111540 - DNA, 20 bp, synthetic construct
  source 1..20: mol_type = other DNA
ctccgtctctactaaagata

SEQ ID NO: 111541 - DNA, 20 bp, synthetic construct
  source 1..20: mol_type = other DNA
actccgtctctactaaagat

SEQ ID NO: 111542 - DNA, 20 bp, synthetic construct
  source 1..20: mol_type = other DNA
aactccgtctctactaaaga

SEQ ID NO: 111543 - DNA, 20 bp, synthetic construct
  source 1..20: mol_type = other DNA
aaactccgtctctactaaag

SEQ ID NO: 111544 - DNA, 20 bp, synthetic construct
  source 1..20: mol_type = other DNA
gaaactccgtctctactaaa

SEQ ID NO: 111545 - DNA, 20 bp, synthetic construct
  source 1..20: mol_type = other DNA
tgaaactccgtctctactaa

SEQ ID NO: 111546 - DNA, 20 bp, synthetic construct
  source 1..20: mol_type = other DNA
gtgaaactccgtctctacta

SEQ ID NO: 111547 - DNA, 20 bp, synthetic construct
  source 1..20: mol_type = other DNA
ggtgaaactccgtctctact

SEQ ID NO: 111548 - DNA, 20 bp, synthetic construct
  source 1..20: mol_type = other DNA
tggtgaaactccgtctctac

SEQ ID NO: 111549 - DNA, 20 bp, synthetic construct
  source 1..20: mol_type = other DNA
atggtgaaactccgtctcta

SEQ ID NO: 111550 - DNA, 20 bp, synthetic construct
  source 1..20: mol_type = other DNA
catggtgaaactccgtctct

SEQ ID NO: 111551 - DNA, 20 bp, synthetic construct
  source 1..20: mol_type = other DNA
acatggtgaaactccgtctc

SEQ ID NO: 111552 - DNA, 20 bp, synthetic construct
  source 1..20: mol_type = other DNA
aacatggtgaaactccgtct

SEQ ID NO: 111553 - DNA, 20 bp, synthetic construct
  source 1..20: mol_type = other DNA
caacatggtgaaactccgtc

SEQ ID NO: 111554 - DNA, 20 bp, synthetic construct
  source 1..20: mol_type = other DNA
ccaacatggtgaaactccgt

SEQ ID NO: 111555 - DNA, 20 bp, synthetic construct
  source 1..20: mol_type = other DNA
gccaacatggtgaaactccg

SEQ ID NO: 111556 - DNA, 20 bp, synthetic construct
  source 1..20: mol_type = other DNA
ggccaacatggtgaaactcc

SEQ ID NO: 111557 - DNA, 20 bp, synthetic construct
  source 1..20: mol_type = other DNA
tggccaacatggtgaaactc

SEQ ID NO: 111558 - DNA, 20 bp, synthetic construct
  source 1..20: mol_type = other DNA
ctggccaacatggtgaaact

SEQ ID NO: 111559 - DNA, 20 bp, synthetic construct
  source 1..20: mol_type = other DNA
actggccaacatggtgaaac

SEQ ID NO: 111560 - DNA, 20 bp, synthetic construct
  source 1..20: mol_type = other DNA
gactggccaacatggtgaaa

SEQ ID NO: 111561 - DNA, 20 bp, synthetic construct
  source 1..20: mol_type = other DNA
agactggccaacatggtgaa

SEQ ID NO: 111562 - DNA, 20 bp, synthetic construct
  source 1..20: mol_type = other DNA
cagactggccaacatggtga

SEQ ID NO: 111563 - DNA, 20 bp, synthetic construct
  source 1..20: mol_type = other DNA
ccagactggccaacatggtg

SEQ ID NO: 111564 - DNA, 20 bp, synthetic construct
  source 1..20: mol_type = other DNA
accagactggccaacatggt

SEQ ID NO: 111565 - DNA, 20 bp, synthetic construct
  source 1..20: mol_type = other DNA
gaccagactggccaacatgg

SEQ ID NO: 111566 - DNA, 20 bp, synthetic construct
  source 1..20: mol_type = other DNA
agaccagactggccaacatg

SEQ ID NO: 111567 - DNA, 20 bp, synthetic construct
  source 1..20: mol_type = other DNA
aagaccagactggccaacat

SEQ ID NO: 111568 - DNA, 20 bp, synthetic construct
  source 1..20: mol_type = other DNA
taagaccagactggccaaca

SEQ ID NO: 111569 - DNA, 20 bp, synthetic construct
  source 1..20: mol_type = other DNA
ttaagaccagactggccaac

SEQ ID NO: 111570 - DNA, 20 bp, synthetic construct
  source 1..20: mol_type = other DNA
tttaagaccagactggccaa

SEQ ID NO: 111571 - DNA, 20 bp, synthetic construct
  source 1..20: mol_type = other DNA
gtttaagaccagactggcca

SEQ ID NO: 111572 - DNA, 20 bp, synthetic construct
  source 1..20: mol_type = other DNA
agtttaagaccagactggcc

SEQ ID NO: 111573 - DNA, 20 bp, synthetic construct
  source 1..20: mol_type = other DNA
gagtttaagaccagactggc

SEQ ID NO: 111574 - DNA, 20 bp, synthetic construct
  source 1..20: mol_type = other DNA
ggagtttaagaccagactgg

SEQ ID NO: 111575 - DNA, 20 bp, synthetic construct
  source 1..20: mol_type = other DNA
aggagtttaagaccagactg

SEQ ID NO: 111576 - DNA, 20 bp, synthetic construct
  source 1..20: mol_type = other DNA
caggagtttaagaccagact

SEQ ID NO: 111577 - DNA, 20 bp, synthetic construct
  source 1..20: mol_type = other DNA
tcaggagtttaagaccagac

SEQ ID NO: 111578 - DNA, 20 bp, synthetic construct
  source 1..20: mol_type = other DNA
gtcaggagtttaagaccaga

SEQ ID NO: 111579 - DNA, 20 bp, synthetic construct
  source 1..20: mol_type = other DNA
ggtcaggagtttaagaccag

SEQ ID NO: 111580 - DNA, 20 bp, synthetic construct
  source 1..20: mol_type = other DNA
aggtcaggagtttaagacca

SEQ ID NO: 111581 - DNA, 20 bp, synthetic construct
  source 1..20: mol_type = other DNA
gaggtcaggagtttaagacc

SEQ ID NO: 111582 - DNA, 20 bp, synthetic construct
  source 1..20: mol_type = other DNA
tgaggtcaggagtttaagac

SEQ ID NO: 111583 - DNA, 20 bp, synthetic construct
  source 1..20: mol_type = other DNA
ttgaggtcaggagtttaaga

SEQ ID NO: 111584 - DNA, 20 bp, synthetic construct
  source 1..20: mol_type = other DNA
cttgaggtcaggagtttaag

SEQ ID NO: 111585 - DNA, 20 bp, synthetic construct
  source 1..20: mol_type = other DNA
acttgaggtcaggagtttaa

SEQ ID NO: 111586 - DNA, 20 bp, synthetic construct
  source 1..20: mol_type = other DNA
cacttgaggtcaggagttta

SEQ ID NO: 111587 - DNA, 20 bp, synthetic construct
  source 1..20: mol_type = other DNA
tcacttgaggtcaggagttt

SEQ ID NO: 111588 - DNA, 20 bp, synthetic construct
  source 1..20: mol_type = other DNA
atcacttgaggtcaggagtt

SEQ ID NO: 111589 - DNA, 20 bp, synthetic construct
  source 1..20: mol_type = other DNA
gatcacttgaggtcaggagt

SEQ ID NO: 111590 - DNA, 20 bp, synthetic construct
  source 1..20: mol_type = other DNA
ggatcacttgaggtcaggag

SEQ ID NO: 111591 - DNA, 20 bp, synthetic construct
  source 1..20: mol_type = other DNA
tggatcacttgaggtcagga

SEQ ID NO: 111592 - DNA, 20 bp, synthetic construct
  source 1..20: mol_type = other DNA
gtggatcacttgaggtcagg

SEQ ID NO: 111593 - DNA, 20 bp, synthetic construct
  source 1..20: mol_type = other DNA
ggtggatcacttgaggtcag

SEQ ID NO: 111594 - DNA, 20 bp, synthetic construct
  source 1..20: mol_type = other DNA
aggtggatcacttgaggtca

SEQ ID NO: 111595 - DNA, 20 bp, synthetic construct
  source 1..20: mol_type = other DNA
caggtggatcacttgaggtc

SEQ ID NO: 111596 - DNA, 20 bp, synthetic construct
  source 1..20: mol_type = other DNA
gcaggtggatcacttgaggt

SEQ ID NO: 111597 - DNA, 20 bp, synthetic construct
  source 1..20: mol_type = other DNA
ggcaggtggatcacttgagg

SEQ ID NO: 111598 - DNA, 20 bp, synthetic construct
  source 1..20: mol_type = other DNA
aggcaggtggatcacttgag

SEQ ID NO: 111599 - DNA, 20 bp, synthetic construct
  source 1..20: mol_type = other DNA
aaggcaggtggatcacttga

SEQ ID NO: 111600 - DNA, 20 bp, synthetic construct
  source 1..20: mol_type = other DNA
caaggcaggtggatcacttg

SEQ ID NO: 111601 - DNA, 20 bp, synthetic construct
  source 1..20: mol_type = other DNA
ccaaggcaggtggatcactt

SEQ ID NO: 111602 - DNA, 20 bp, synthetic construct
  source 1..20: mol_type = other DNA
gccaaggcaggtggatcact

SEQ ID NO: 111603 - DNA, 20 bp, synthetic construct
  source 1..20: mol_type = other DNA
agccaaggcaggtggatcac

SEQ ID NO: 111604 - DNA, 20 bp, synthetic construct
  source 1..20: mol_type = other DNA
aagccaaggcaggtggatca

SEQ ID NO: 111605 - DNA, 20 bp, synthetic construct
  source 1..20: mol_type = other DNA
gaagccaaggcaggtggatc

SEQ ID NO: 111606 - DNA, 20 bp, synthetic construct
  source 1..20: mol_type = other DNA
ggaagccaaggcaggtggat

SEQ ID NO: 111607 - DNA, 20 bp, synthetic construct
  source 1..20: mol_type = other DNA
gggaagccaaggcaggtgga

SEQ ID NO: 111608 - DNA, 20 bp, synthetic construct
  source 1..20: mol_type = other DNA
tgggaagccaaggcaggtgg

SEQ ID NO: 111609 - DNA, 20 bp, synthetic construct
  source 1..20: mol_type = other DNA
ttgggaagccaaggcaggtg

SEQ ID NO: 111610 - DNA, 20 bp, synthetic construct
  source 1..20: mol_type = other DNA
tttgggaagccaaggcaggt

SEQ ID NO: 111611 - DNA, 20 bp, synthetic construct
  source 1..20: mol_type = other DNA
ctttgggaagccaaggcagg

SEQ ID NO: 111612 - DNA, 20 bp, synthetic construct
  source 1..20: mol_type = other DNA
actttgggaagccaaggcag

SEQ ID NO: 111613 - DNA, 20 bp, synthetic construct
  source 1..20: mol_type = other DNA
cactttgggaagccaaggca

SEQ ID NO: 111614 - DNA, 20 bp, synthetic construct
  source 1..20: mol_type = other DNA
gcactttgggaagccaaggc

SEQ ID NO: 111615 - DNA, 20 bp, synthetic construct
  source 1..20: mol_type = other DNA
agcactttgggaagccaagg

SEQ ID NO: 111616 - DNA, 20 bp, synthetic construct
  source 1..20: mol_type = other DNA
tagcactttgggaagccaag

SEQ ID NO: 111617 - DNA, 20 bp, synthetic construct
  source 1..20: mol_type = other DNA
ctagcactttgggaagccaa

SEQ ID NO: 111618 - DNA, 20 bp, synthetic construct
  source 1..20: mol_type = other DNA
cctagcactttgggaagcca

SEQ ID NO: 111619 - DNA, 20 bp, synthetic construct
  source 1..20: mol_type = other DNA
tcctagcactttgggaagcc

SEQ ID NO: 111620 - DNA, 20 bp, synthetic construct
  source 1..20: mol_type = other DNA
atcctagcactttgggaagc

SEQ ID NO: 111621 - DNA, 20 bp, synthetic construct
  source 1..20: mol_type = other DNA
catcctagcactttgggaag

SEQ ID NO: 111622 - DNA, 20 bp, synthetic construct
  source 1..20: mol_type = other DNA
tcatcctagcactttgggaa

SEQ ID NO: 111623 - DNA, 20 bp, synthetic construct
  source 1..20: mol_type = other DNA
atcatcctagcactttggga

SEQ ID NO: 111624 - DNA, 20 bp, synthetic construct
  source 1..20: mol_type = other DNA
tatcatcctagcactttggg

SEQ ID NO: 111625 - DNA, 20 bp, synthetic construct
  source 1..20: mol_type = other DNA
ctatcatcctagcactttgg

SEQ ID NO: 111626 - DNA, 20 bp, synthetic construct
  source 1..20: mol_type = other DNA
cctatcatcctagcactttg

SEQ ID NO: 111627 - DNA, 20 bp, synthetic construct
  source 1..20: mol_type = other DNA
acctatcatcctagcacttt

SEQ ID NO: 111628 - DNA, 20 bp, synthetic construct
  source 1..20: mol_type = other DNA
cacctatcatcctagcactt

SEQ ID NO: 111629 - DNA, 20 bp, synthetic construct
  source 1..20: mol_type = other DNA
acacctatcatcctagcact

SEQ ID NO: 111630 - DNA, 20 bp, synthetic construct
  source 1..20: mol_type = other DNA
aacacctatcatcctagcac

SEQ ID NO: 111631 - DNA, 20 bp, synthetic construct
  source 1..20: mol_type = other DNA
taacacctatcatcctagca

SEQ ID NO: 111632 - DNA, 20 bp, synthetic construct
  source 1..20: mol_type = other DNA
ctaacacctatcatcctagc

SEQ ID NO: 111633 - DNA, 20 bp, synthetic construct
  source 1..20: mol_type = other DNA
gctaacacctatcatcctag

SEQ ID NO: 111634 - DNA, 20 bp, synthetic construct
  source 1..20: mol_type = other DNA
ggctaacacctatcatccta

SEQ ID NO: 111635 - DNA, 20 bp, synthetic construct
  source 1..20: mol_type = other DNA
tggctaacacctatcatcct

SEQ ID NO: 111636 - DNA, 20 bp, synthetic construct
  source 1..20: mol_type = other DNA
gtggctaacacctatcatcc

SEQ ID NO: 111637 - DNA, 20 bp, synthetic construct
  source 1..20: mol_type = other DNA
agtggctaacacctatcatc

SEQ ID NO: 111638 - DNA, 20 bp, synthetic construct
  source 1..20: mol_type = other DNA
cagtggctaacacctatcat

SEQ ID NO: 111639 - DNA, 20 bp, synthetic construct
  source 1..20: mol_type = other DNA
gcagtggctaacacctatca

SEQ ID NO: 111640 - DNA, 20 bp, synthetic construct
  source 1..20: mol_type = other DNA
tgcagtggctaacacctatc

SEQ ID NO: 111641 - DNA, 20 bp, synthetic construct
  source 1..20: mol_type = other DNA
gtgcagtggctaacacctat

SEQ ID NO: 111642 - DNA, 20 bp, synthetic construct
  source 1..20: mol_type = other DNA
cgtgcagtggctaacaccta

SEQ ID NO: 111643 - DNA, 20 bp, synthetic construct
  source 1..20: mol_type = other DNA
gcgtgcagtggctaacacct

SEQ ID NO: 111644 - DNA, 20 bp, synthetic construct
  source 1..20: mol_type = other DNA
tgcgtgcagtggctaacacc

SEQ ID NO: 111645 - DNA, 20 bp, synthetic construct
  source 1..20: mol_type = other DNA
ctgcgtgcagtggctaacac

SEQ ID NO: 111646 - DNA, 20 bp, synthetic construct
  source 1..20: mol_type = other DNA
gctgcgtgcagtggctaaca

SEQ ID NO: 111647 - DNA, 20 bp, synthetic construct
  source 1..20: mol_type = other DNA
ggctgcgtgcagtggctaac

SEQ ID NO: 111648 - DNA, 20 bp, synthetic construct
  source 1..20: mol_type = other DNA
gggctgcgtgcagtggctaa

SEQ ID NO: 111649 - DNA, 20 bp, synthetic construct
  source 1..20: mol_type = other DNA
agggctgcgtgcagtggcta

SEQ ID NO: 111650 - DNA, 20 bp, synthetic construct
  source 1..20: mol_type = other DNA
cagggctgcgtgcagtggct

SEQ ID NO: 111651 - DNA, 20 bp, synthetic construct
  source 1..20: mol_type = other DNA
tcagggctgcgtgcagtggc

SEQ ID NO: 111652 - DNA, 20 bp, synthetic construct
  source 1..20: mol_type = other DNA
ttcagggctgcgtgcagtgg

SEQ ID NO: 111653 - DNA, 20 bp, synthetic construct
  source 1..20: mol_type = other DNA
gttcagggctgcgtgcagtg

SEQ ID NO: 111654 - DNA, 20 bp, synthetic construct
  source 1..20: mol_type = other DNA
tgttcagggctgcgtgcagt

SEQ ID NO: 111655 - DNA, 20 bp, synthetic construct
  source 1..20: mol_type = other DNA
atgttcagggctgcgtgcag

SEQ ID NO: 111656 - DNA, 20 bp, synthetic construct
  source 1..20: mol_type = other DNA
tatgttcagggctgcgtgca

SEQ ID NO: 111657 - DNA, 20 bp, synthetic construct
  source 1..20: mol_type = other DNA
ctatgttcagggctgcgtgc

SEQ ID NO: 111658 - DNA, 20 bp, synthetic construct
  source 1..20: mol_type = other DNA
gctatgttcagggctgcgtg

SEQ ID NO: 111659 - DNA, 20 bp, synthetic construct
  source 1..20: mol_type = other DNA
agctatgttcagggctgcgt

SEQ ID NO: 111660 - DNA, 20 bp, synthetic construct
  source 1..20: mol_type = other DNA
aagctatgttcagggctgcg

SEQ ID NO: 111661 - DNA, 20 bp, synthetic construct
  source 1..20: mol_type = other DNA
aaagctatgttcagggctgc

SEQ ID NO: 111662 - DNA, 20 bp, synthetic construct
  source 1..20: mol_type = other DNA
aaaagctatgttcagggctg

SEQ ID NO: 111663 - DNA, 20 bp, synthetic construct
  source 1..20: mol_type = other DNA
taaaagctatgttcagggct

SEQ ID NO: 111664 - DNA, 20 bp, synthetic construct
  source 1..20: mol_type = other DNA
ttaaaagctatgttcagggc

SEQ ID NO: 111665 - DNA, 20 bp, synthetic construct
  source 1..20: mol_type = other DNA
cttaaaagctatgttcaggg

SEQ ID NO: 111666 - DNA, 20 bp, synthetic construct
  source 1..20: mol_type = other DNA
acttaaaagctatgttcagg

SEQ ID NO: 111667 - DNA, 20 bp, synthetic construct
  source 1..20: mol_type = other DNA
aacttaaaagctatgttcag

SEQ ID NO: 111668 - DNA, 20 bp, synthetic construct
  source 1..20: mol_type = other DNA
gaacttaaaagctatgttca

SEQ ID NO: 111669 - DNA, 20 bp, synthetic construct
  source 1..20: mol_type = other DNA
ggaacttaaaagctatgttc

SEQ ID NO: 111670 - DNA, 20 bp, synthetic construct
  source 1..20: mol_type = other DNA
aggaacttaaaagctatgtt

SEQ ID NO: 111671 - DNA, 20 bp, synthetic construct
  source 1..20: mol_type = other DNA
aaggaacttaaaagctatgt

SEQ ID NO: 111672 - DNA, 20 bp, synthetic construct
  source 1..20: mol_type = other DNA
aaaggaacttaaaagctatg

SEQ ID NO: 111673 - DNA, 20 bp, synthetic construct
  source 1..20: mol_type = other DNA
taaaggaacttaaaagctat

SEQ ID NO: 111674 - DNA, 20 bp, synthetic construct
  source 1..20: mol_type = other DNA
ataaaggaacttaaaagcta

SEQ ID NO: 111675 - DNA, 20 bp, synthetic construct
  source 1..20: mol_type = other DNA
aataaaggaacttaaaagct

SEQ ID NO: 111676 - DNA, 20 bp, synthetic construct
  source 1..20: mol_type = other DNA
caataaaggaacttaaaagc

SEQ ID NO: 111677 - DNA, 20 bp, synthetic construct
  source 1..20: mol_type = other DNA
acaataaaggaacttaaaag

SEQ ID NO: 111678 - DNA, 20 bp, synthetic construct
  source 1..20: mol_type = other DNA
gacaataaaggaacttaaaa

SEQ ID NO: 111679 - DNA, 20 bp, synthetic construct
  source 1..20: mol_type = other DNA
tgacaataaaggaacttaaa

SEQ ID NO: 111680 - DNA, 20 bp, synthetic construct
  source 1..20: mol_type = other DNA
atgacaataaaggaacttaa

SEQ ID NO: 111681 - DNA, 20 bp, synthetic construct
  source 1..20: mol_type = other DNA
tatgacaataaaggaactta

SEQ ID NO: 111682 - DNA, 20 bp, synthetic construct
  source 1..20: mol_type = other DNA
atatgacaataaaggaactt

SEQ ID NO: 111683 - DNA, 20 bp, synthetic construct
  source 1..20: mol_type = other DNA
aatatgacaataaaggaact

SEQ ID NO: 111684 - DNA, 20 bp, synthetic construct
  source 1..20: mol_type = other DNA
gaatatgacaataaaggaac

SEQ ID NO: 111685 - DNA, 20 bp, synthetic construct
  source 1..20: mol_type = other DNA
ggaatatgacaataaaggaa

SEQ ID NO: 111686 - DNA, 20 bp, synthetic construct
  source 1..20: mol_type = other DNA
aggaatatgacaataaagga

SEQ ID NO: 111687 - DNA, 20 bp, synthetic construct
  source 1..20: mol_type = other DNA
aaggaatatgacaataaagg

SEQ ID NO: 111688 - DNA, 20 bp, synthetic construct
  source 1..20: mol_type = other DNA
aaaggaatatgacaataaag

SEQ ID NO: 111689 - DNA, 20 bp, synthetic construct
  source 1..20: mol_type = other DNA
aaaaggaatatgacaataaa

SEQ ID NO: 111690 - DNA, 20 bp, synthetic construct
  source 1..20: mol_type = other DNA
caaaaggaatatgacaataa

SEQ ID NO: 111691 - DNA, 20 bp, synthetic construct
  source 1..20: mol_type = other DNA
tcaaaaggaatatgacaata

SEQ ID NO: 111692 - DNA, 20 bp, synthetic construct
  source 1..20: mol_type = other DNA
gtcaaaaggaatatgacaat

SEQ ID NO: 111693 - DNA, 20 bp, synthetic construct
  source 1..20: mol_type = other DNA
cgtcaaaaggaatatgacaa

SEQ ID NO: 111694 - DNA, 20 bp, synthetic construct
  source 1..20: mol_type = other DNA
tcgtcaaaaggaatatgaca

SEQ ID NO: 111695 - DNA, 20 bp, synthetic construct
  source 1..20: mol_type = other DNA
ctcgtcaaaaggaatatgac

SEQ ID NO: 111696 - DNA, 20 bp, synthetic construct
  source 1..20: mol_type = other DNA
actcgtcaaaaggaatatga

SEQ ID NO: 111697 - DNA, 20 bp, synthetic construct
  source 1..20: mol_type = other DNA
gactcgtcaaaaggaatatg

SEQ ID NO: 111698 - DNA, 20 bp, synthetic construct
  source 1..20: mol_type = other DNA
agactcgtcaaaaggaatat

SEQ ID NO: 111699 - DNA, 20 bp, synthetic construct
  source 1..20: mol_type = other DNA
tagactcgtcaaaaggaata

SEQ ID NO: 111700 - DNA, 20 bp, synthetic construct
  source 1..20: mol_type = other DNA
atagactcgtcaaaaggaat

SEQ ID NO: 111701 - DNA, 20 bp, synthetic construct
  source 1..20: mol_type = other DNA
gatagactcgtcaaaaggaa

SEQ ID NO: 111702 - DNA, 20 bp, synthetic construct
  source 1..20: mol_type = other DNA
tgatagactcgtcaaaagga

SEQ ID NO: 111703 - DNA, 20 bp, synthetic construct
  source 1..20: mol_type = other DNA
atgatagactcgtcaaaagg

SEQ ID NO: 111704 - DNA, 20 bp, synthetic construct
  source 1..20: mol_type = other DNA
aatgatagactcgtcaaaag

SEQ ID NO: 111705 - DNA, 20 bp, synthetic construct
  source 1..20: mol_type = other DNA
aaatgatagactcgtcaaaa

SEQ ID NO: 111706 - DNA, 20 bp, synthetic construct
  source 1..20: mol_type = other DNA
aaaatgatagactcgtcaaa

SEQ ID NO: 111707 - DNA, 20 bp, synthetic construct
  source 1..20: mol_type = other DNA
gaaaatgatagactcgtcaa

SEQ ID NO: 111708 - DNA, 20 bp, synthetic construct
  source 1..20: mol_type = other DNA
agaaaatgatagactcgtca

SEQ ID NO: 111709 - DNA, 20 bp, synthetic construct
  source 1..20: mol_type = other DNA
cagaaaatgatagactcgtc

SEQ ID NO: 111710 - DNA, 20 bp, synthetic construct
  source 1..20: mol_type = other DNA
tcagaaaatgatagactcgt

SEQ ID NO: 111711 - DNA, 20 bp, synthetic construct
  source 1..20: mol_type = other DNA
gtcagaaaatgatagactcg

SEQ ID NO: 111712 - DNA, 20 bp, synthetic construct
  source 1..20: mol_type = other DNA
agtcagaaaatgatagactc

SEQ ID NO: 111713 - DNA, 20 bp, synthetic construct
  source 1..20: mol_type = other DNA
gagtcagaaaatgatagact

SEQ ID NO: 111714 - DNA, 20 bp, synthetic construct
  source 1..20: mol_type = other DNA
tgagtcagaaaatgatagac

SEQ ID NO: 111715 - DNA, 20 bp, synthetic construct
  source 1..20: mol_type = other DNA
gtgagtcagaaaatgataga

SEQ ID NO: 111716 - DNA, 20 bp, synthetic construct
  source 1..20: mol_type = other DNA
agtgagtcagaaaatgatag

SEQ ID NO: 111717 - DNA, 20 bp, synthetic construct
  source 1..20: mol_type = other DNA
aagtgagtcagaaaatgata

SEQ ID NO: 111718 - DNA, 20 bp, synthetic construct
  source 1..20: mol_type = other DNA
caagtgagtcagaaaatgat

SEQ ID NO: 111719 - DNA, 20 bp, synthetic construct
  source 1..20: mol_type = other DNA
acaagtgagtcagaaaatga

SEQ ID NO: 111720 - DNA, 20 bp, synthetic construct
  source 1..20: mol_type = other DNA
tacaagtgagtcagaaaatg

SEQ ID NO: 111721 - DNA, 20 bp, synthetic construct
  source 1..20: mol_type = other DNA
gtacaagtgagtcagaaaat

SEQ ID NO: 111722 - DNA, 20 bp, synthetic construct
  source 1..20: mol_type = other DNA
tgtacaagtgagtcagaaaa

SEQ ID NO: 111723 - DNA, 20 bp, synthetic construct
  source 1..20: mol_type = other DNA
atgtacaagtgagtcagaaa

SEQ ID NO: 111724 - DNA, 20 bp, synthetic construct
  source 1..20: mol_type = other DNA
catgtacaagtgagtcagaa

SEQ ID NO: 111725 - DNA, 20 bp, synthetic construct
  source 1..20: mol_type = other DNA
acatgtacaagtgagtcaga

SEQ ID NO: 111726 - DNA, 20 bp, synthetic construct
  source 1..20: mol_type = other DNA
cacatgtacaagtgagtcag

SEQ ID NO: 111727 - DNA, 20 bp, synthetic construct
  source 1..20: mol_type = other DNA
acacatgtacaagtgagtca

SEQ ID NO: 111728 - DNA, 20 bp, synthetic construct
  source 1..20: mol_type = other DNA
cacacatgtacaagtgagtc

SEQ ID NO: 111729 - DNA, 20 bp, synthetic construct
  source 1..20: mol_type = other DNA
acacacatgtacaagtgagt

SEQ ID NO: 111730 - DNA, 20 bp, synthetic construct
  source 1..20: mol_type = other DNA
gacacacatgtacaagtgag

SEQ ID NO: 111731 - DNA, 20 bp, synthetic construct
  source 1..20: mol_type = other DNA
agacacacatgtacaagtga

SEQ ID NO: 111732 - DNA, 20 bp, synthetic construct
  source 1..20: mol_type = other DNA
gagacacacatgtacaagtg

SEQ ID NO: 111733 - DNA, 20 bp, synthetic construct
  source 1..20: mol_type = other DNA
tgagacacacatgtacaagt

SEQ ID NO: 111734 - DNA, 20 bp, synthetic construct
  source 1..20: mol_type = other DNA
gtgagacacacatgtacaag

SEQ ID NO: 111735 - DNA, 20 bp, synthetic construct
  source 1..20: mol_type = other DNA
ggtgagacacacatgtacaa

SEQ ID NO: 111736 - DNA, 20 bp, synthetic construct
  source 1..20: mol_type = other DNA
gggtgagacacacatgtaca

SEQ ID NO: 111737 - DNA, 20 bp, synthetic construct
  source 1..20: mol_type = other DNA
agggtgagacacacatgtac

SEQ ID NO: 111738 - DNA, 20 bp, synthetic construct
  source 1..20: mol_type = other DNA
aagggtgagacacacatgta

SEQ ID NO: 111739 - DNA, 20 bp, synthetic construct
  source 1..20: mol_type = other DNA
caagggtgagacacacatgt

SEQ ID NO: 111740 - DNA, 20 bp, synthetic construct
  source 1..20: mol_type = other DNA
ccaagggtgagacacacatg

SEQ ID NO: 111741 - DNA, 20 bp, synthetic construct
  source 1..20: mol_type = other DNA
accaagggtgagacacacat

SEQ ID NO: 111742 - DNA, 20 bp, synthetic construct
  source 1..20: mol_type = other DNA
gaccaagggtgagacacaca

SEQ ID NO: 111743 - DNA, 20 bp, synthetic construct
  source 1..20: mol_type = other DNA
ggaccaagggtgagacacac

SEQ ID NO: 111744 - DNA, 20 bp, synthetic construct
  source 1..20: mol_type = other DNA
tggaccaagggtgagacaca

SEQ ID NO: 111745 - DNA, 20 bp, synthetic construct
  source 1..20: mol_type = other DNA
ctggaccaagggtgagacac

SEQ ID NO: 111746 - DNA, 20 bp, synthetic construct
  source 1..20: mol_type = other DNA
gctggaccaagggtgagaca

SEQ ID NO: 111747 - DNA, 20 bp, synthetic construct
  source 1..20: mol_type = other DNA
ggctggaccaagggtgagac

SEQ ID NO: 111748 - DNA, 20 bp, synthetic construct
  source 1..20: mol_type = other DNA
tggctggaccaagggtgaga

SEQ ID NO: 111749 - DNA, 20 bp, synthetic construct
  source 1..20: mol_type = other DNA
atggctggaccaagggtgag

SEQ ID NO: 111750 - DNA, 20 bp, synthetic construct
  source 1..20: mol_type = other DNA
aatggctggaccaagggtga

SEQ ID NO: 111751 - DNA, 20 bp, synthetic construct
  source 1..20: mol_type = other DNA
caatggctggaccaagggtg

SEQ ID NO: 111752 - DNA, 20 bp, synthetic construct
  source 1..20: mol_type = other DNA
ccaatggctggaccaagggt

SEQ ID NO: 111753 - DNA, 20 bp, synthetic construct
  source 1..20: mol_type = other DNA
accaatggctggaccaaggg

SEQ ID NO: 111754 - DNA, 20 bp, synthetic construct
  source 1..20: mol_type = other DNA
caccaatggctggaccaagg

SEQ ID NO: 111755 - DNA, 20 bp, synthetic construct
  source 1..20: mol_type = other DNA
gcaccaatggctggaccaag

SEQ ID NO: 111756 - DNA, 20 bp, synthetic construct
  source 1..20: mol_type = other DNA
agcaccaatggctggaccaa

SEQ ID NO: 111757 - DNA, 20 bp, synthetic construct
  source 1..20: mol_type = other DNA
aagcaccaatggctggacca

SEQ ID NO: 111758 - DNA, 20 bp, synthetic construct
  source 1..20: mol_type = other DNA
aaagcaccaatggctggacc

SEQ ID NO: 111759 - DNA, 20 bp, synthetic construct
  source 1..20: mol_type = other DNA
aaaagcaccaatggctggac

SEQ ID NO: 111760 - DNA, 20 bp, synthetic construct
  source 1..20: mol_type = other DNA
gaaaagcaccaatggctgga

SEQ ID NO: 111761 - DNA, 20 bp, synthetic construct
  source 1..20: mol_type = other DNA
agaaaagcaccaatggctgg

SEQ ID NO: 111762 - DNA, 20 bp, synthetic construct
  source 1..20: mol_type = other DNA
aagaaaagcaccaatggctg

SEQ ID NO: 111763 - DNA, 20 bp, synthetic construct
  source 1..20: mol_type = other DNA
aaagaaaagcaccaatggct

SEQ ID NO: 111764 - DNA, 20 bp, synthetic construct
  source 1..20: mol_type = other DNA
taaagaaaagcaccaatggc

SEQ ID NO: 111765 - DNA, 20 bp, synthetic construct
  source 1..20: mol_type = other DNA
gtaaagaaaagcaccaatgg

SEQ ID NO: 111766 - DNA, 20 bp, synthetic construct
  source 1..20: mol_type = other DNA
agtaaagaaaagcaccaatg

SEQ ID NO: 111767 - DNA, 20 bp, synthetic construct
  source 1..20: mol_type = other DNA
aagtaaagaaaagcaccaat

SEQ ID NO: 111768 - DNA, 20 bp, synthetic construct
  source 1..20: mol_type = other DNA
gaagtaaagaaaagcaccaa

SEQ ID NO: 111769 - DNA, 20 bp, synthetic construct
  source 1..20: mol_type = other DNA
agaagtaaagaaaagcacca

SEQ ID NO: 111770 - DNA, 20 bp, synthetic construct
  source 1..20: mol_type = other DNA
aagaagtaaagaaaagcacc

SEQ ID NO: 111771 - DNA, 20 bp, synthetic construct
  source 1..20: mol_type = other DNA
aaagaagtaaagaaaagcac

SEQ ID NO: 111772 - DNA, 20 bp, synthetic construct
  source 1..20: mol_type = other DNA
taaagaagtaaagaaaagca

SEQ ID NO: 111773 - DNA, 20 bp, synthetic construct
  source 1..20: mol_type = other DNA
ataaagaagtaaagaaaagc

SEQ ID NO: 111774 - DNA, 20 bp, synthetic construct
  source 1..20: mol_type = other DNA
aataaagaagtaaagaaaag

SEQ ID NO: 111775 - DNA, 20 bp, synthetic construct
  source 1..20: mol_type = other DNA
aaataaagaagtaaagaaaa

SEQ ID NO: 111776 - DNA, 20 bp, synthetic construct
  source 1..20: mol_type = other DNA
aaaataaagaagtaaagaaa

SEQ ID NO: 111777 - DNA, 20 bp, synthetic construct
  source 1..20: mol_type = other DNA
aaaaataaagaagtaaagaa

SEQ ID NO: 111778 - DNA, 20 bp, synthetic construct
  source 1..20: mol_type = other DNA
caaaaataaagaagtaaaga

SEQ ID NO: 111779 - DNA, 20 bp, synthetic construct
  source 1..20: mol_type = other DNA
acaaaaataaagaagtaaag

SEQ ID NO: 111780 - DNA, 20 bp, synthetic construct
  source 1..20: mol_type = other DNA
aacaaaaataaagaagtaaa

SEQ ID NO: 111781 - DNA, 20 bp, synthetic construct
  source 1..20: mol_type = other DNA
taacaaaaataaagaagtaa

SEQ ID NO: 111782 - DNA, 20 bp, synthetic construct
  source 1..20: mol_type = other DNA
ataacaaaaataaagaagta

SEQ ID NO: 111783 - DNA, 20 bp, synthetic construct
  source 1..20: mol_type = other DNA
aataacaaaaataaagaagt

SEQ ID NO: 111784 - DNA, 20 bp, synthetic construct
  source 1..20: mol_type = other DNA
aaataacaaaaataaagaag

SEQ ID NO: 111785 - DNA, 20 bp, synthetic construct
  source 1..20: mol_type = other DNA
aaaataacaaaaataaagaa

SEQ ID NO: 111786 - DNA, 20 bp, synthetic construct
  source 1..20: mol_type = other DNA
taaaataacaaaaataaaga

SEQ ID NO: 111787 - DNA, 20 bp, synthetic construct
  source 1..20: mol_type = other DNA
ataaaataacaaaaataaag

SEQ ID NO: 111788 - DNA, 20 bp, synthetic construct
  source 1..20: mol_type = other DNA
aataaaataacaaaaataaa

SEQ ID NO: 111789 - DNA, 20 bp, synthetic construct
  source 1..20: mol_type = other DNA
aaataaaataacaaaaataa

SEQ ID NO: 111790 - DNA, 20 bp, synthetic construct
  source 1..20: mol_type = other DNA
aaaataaaataacaaaaata

SEQ ID NO: 111791 - DNA, 20 bp, synthetic construct
  source 1..20: mol_type = other DNA
taaaataaaataacaaaaat

SEQ ID NO: 111792 - DNA, 20 bp, synthetic construct
  source 1..20: mol_type = other DNA
ataaaataaaataacaaaaa

SEQ ID NO: 111793 - DNA, 20 bp, synthetic construct
  source 1..20: mol_type = other DNA
aataaaataaaataacaaaa

SEQ ID NO: 111794 - DNA, 20 bp, synthetic construct
  source 1..20: mol_type = other DNA
aaataaaataaaataacaaa

SEQ ID NO: 111795 - DNA, 20 bp, synthetic construct
  source 1..20: mol_type = other DNA
aaaataaaataaaataacaa

SEQ ID NO: 111796 - DNA, 20 bp, synthetic construct
  source 1..20: mol_type = other DNA
taaaataaaataaaataaca

SEQ ID NO: 111797 - DNA, 20 bp, synthetic construct
  source 1..20: mol_type = other DNA
ataaaataaaataaaataac

SEQ ID NO: 111798 - DNA, 20 bp, synthetic construct
  source 1..20: mol_type = other DNA
aataaaataaaataaaataa

SEQ ID NO: 111799 - DNA, 20 bp, synthetic construct
  source 1..20: mol_type = other DNA
taataaaataaaataaaata

SEQ ID NO: 111800 - DNA, 20 bp, synthetic construct
  source 1..20: mol_type = other DNA
ataataaaataaaataaaat

SEQ ID NO: 111801 - DNA, 20 bp, synthetic construct
  source 1..20: mol_type = other DNA
aataataaaataaaataaaa

SEQ ID NO: 111802 - DNA, 20 bp, synthetic construct
  source 1..20: mol_type = other DNA
taataataaaataaaataaa

SEQ ID NO: 111803 - DNA, 20 bp, synthetic construct
  source 1..20: mol_type = other DNA
ataataataaaataaaataa

SEQ ID NO: 111804 - DNA, 20 bp, synthetic construct
  source 1..20: mol_type = other DNA
aataataataaaataaaata

SEQ ID NO: 111805 - DNA, 20 bp, synthetic construct
  source 1..20: mol_type = other DNA
aaataataataaaataaaat

SEQ ID NO: 111806 - DNA, 20 bp, synthetic construct
  source 1..20: mol_type = other DNA
aaaataataataaaataaaa

SEQ ID NO: 111807 - DNA, 20 bp, synthetic construct
  source 1..20: mol_type = other DNA
aaaaataataataaaataaa

SEQ ID NO: 111808 - DNA, 20 bp, synthetic construct
  source 1..20: mol_type = other DNA
aaaaaataataataaaataa

SEQ ID NO: 111809 - DNA, 20 bp, synthetic construct
  source 1..20: mol_type = other DNA
taaaaaataataataaaata

SEQ ID NO: 111810 - DNA, 20 bp, synthetic construct
  source 1..20: mol_type = other DNA
ttaaaaaataataataaaat

SEQ ID NO: 111811 - DNA, 20 bp, synthetic construct
  source 1..20: mol_type = other DNA
tttaaaaaataataataaaa

SEQ ID NO: 111812 - DNA, 20 bp, synthetic construct
  source 1..20: mol_type = other DNA
atttaaaaaataataataaa

SEQ ID NO: 111813 - DNA, 20 bp, synthetic construct
  source 1..20: mol_type = other DNA
catttaaaaaataataataa

SEQ ID NO: 111814 - DNA, 20 bp, synthetic construct
  source 1..20: mol_type = other DNA
tcatttaaaaaataataata

SEQ ID NO: 111815 - DNA, 20 bp, synthetic construct
  source 1..20: mol_type = other DNA
ctcatttaaaaaataataat

SEQ ID NO: 111816 - DNA, 20 bp, synthetic construct
  source 1..20: mol_type = other DNA
tctcatttaaaaaataataa

SEQ ID NO: 111817 - DNA, 20 bp, synthetic construct
  source 1..20: mol_type = other DNA
gtctcatttaaaaaataata

SEQ ID NO: 111818 - DNA, 20 bp, synthetic construct
  source 1..20: mol_type = other DNA
tgtctcatttaaaaaataat

SEQ ID NO: 111819 - DNA, 20 bp, synthetic construct
  source 1..20: mol_type = other DNA
ctgtctcatttaaaaaataa

SEQ ID NO: 111820 - DNA, 20 bp, synthetic construct
  source 1..20: mol_type = other DNA
cctgtctcatttaaaaaata

SEQ ID NO: 111821 - DNA, 20 bp, synthetic construct
  source 1..20: mol_type = other DNA
ccctgtctcatttaaaaaat

SEQ ID NO: 111822 - DNA, 20 bp, synthetic construct
  source 1..20: mol_type = other DNA
accctgtctcatttaaaaaa

SEQ ID NO: 111823 - DNA, 20 bp, synthetic construct
  source 1..20: mol_type = other DNA
taccctgtctcatttaaaaa

SEQ ID NO: 111824 - DNA, 20 bp, synthetic construct
  source 1..20: mol_type = other DNA
ataccctgtctcatttaaaa

SEQ ID NO: 111825 - DNA, 20 bp, synthetic construct
  source 1..20: mol_type = other DNA
gataccctgtctcatttaaa

SEQ ID NO: 111826 - DNA, 20 bp, synthetic construct
  source 1..20: mol_type = other DNA
tgataccctgtctcatttaa

SEQ ID NO: 111827 - DNA, 20 bp, synthetic construct
  source 1..20: mol_type = other DNA
gtgataccctgtctcattta

SEQ ID NO: 111828 - DNA, 20 bp, synthetic construct
  source 1..20: mol_type = other DNA
agtgataccctgtctcattt

SEQ ID NO: 111829 - DNA, 20 bp, synthetic construct
  source 1..20: mol_type = other DNA
tagtgataccctgtctcatt

SEQ ID NO: 111830 - DNA, 20 bp, synthetic construct
  source 1..20: mol_type = other DNA
atagtgataccctgtctcat

SEQ ID NO: 111831 - DNA, 20 bp, synthetic construct
  source 1..20: mol_type = other DNA
catagtgataccctgtctca

SEQ ID NO: 111832 - DNA, 20 bp, synthetic construct
  source 1..20: mol_type = other DNA
acatagtgataccctgtctc

SEQ ID NO: 111833 - DNA, 20 bp, synthetic construct
  source 1..20: mol_type = other DNA
aacatagtgataccctgtct

SEQ ID NO: 111834 - DNA, 20 bp, synthetic construct
  source 1..20: mol_type = other DNA
caacatagtgataccctgtc

SEQ ID NO: 111835 - DNA, 20 bp, synthetic construct
  source 1..20: mol_type = other DNA
gcaacatagtgataccctgt

SEQ ID NO: 111836 - DNA, 20 bp, synthetic construct
  source 1..20: mol_type = other DNA
ggcaacatagtgataccctg

SEQ ID NO: 111837 - DNA, 20 bp, synthetic construct
  source 1..20: mol_type = other DNA
gggcaacatagtgataccct

SEQ ID NO: 111838 - DNA, 20 bp, synthetic construct
  source 1..20: mol_type = other DNA
tgggcaacatagtgataccc

SEQ ID NO: 111839 - DNA, 20 bp, synthetic construct
  source 1..20: mol_type = other DNA
ctgggcaacatagtgatacc

SEQ ID NO: 111840 - DNA, 20 bp, synthetic construct
  source 1..20: mol_type = other DNA
cctgggcaacatagtgatac

SEQ ID NO: 111841 - DNA, 20 bp, synthetic construct
  source 1..20: mol_type = other DNA
gcctgggcaacatagtgata

SEQ ID NO: 111842 - DNA, 20 bp, synthetic construct
  source 1..20: mol_type = other DNA
agcctgggcaacatagtgat

SEQ ID NO: 111843 - DNA, 20 bp, synthetic construct
  source 1..20: mol_type = other DNA
cagcctgggcaacatagtga

SEQ ID NO: 111844 - DNA, 20 bp, synthetic construct
  source 1..20: mol_type = other DNA
ccagcctgggcaacatagtg

SEQ ID NO: 111845 - DNA, 20 bp, synthetic construct
  source 1..20: mol_type = other DNA
accagcctgggcaacatagt

SEQ ID NO: 111846 - DNA, 20 bp, synthetic construct
  source 1..20: mol_type = other DNA
gaccagcctgggcaacatag

SEQ ID NO: 111847 - DNA, 20 bp, synthetic construct
  source 1..20: mol_type = other DNA
agaccagcctgggcaacata

SEQ ID NO: 111848 - DNA, 20 bp, synthetic construct
  source 1..20: mol_type = other DNA
aagaccagcctgggcaacat

SEQ ID NO: 111849 - DNA, 20 bp, synthetic construct
  source 1..20: mol_type = other DNA
caagaccagcctgggcaaca

SEQ ID NO: 111850 - DNA, 20 bp, synthetic construct
  source 1..20: mol_type = other DNA
tcaagaccagcctgggcaac

SEQ ID NO: 111851 - DNA, 20 bp, synthetic construct
  source 1..20: mol_type = other DNA
ttcaagaccagcctgggcaa

SEQ ID NO: 111852 - DNA, 20 bp, synthetic construct
  source 1..20: mol_type = other DNA
gttcaagaccagcctgggca

SEQ ID NO: 111853 - DNA, 20 bp, synthetic construct
  source 1..20: mol_type = other DNA
agttcaagaccagcctgggc

SEQ ID NO: 111854 - DNA, 20 bp, synthetic construct
  source 1..20: mol_type = other DNA
gagttcaagaccagcctggg

SEQ ID NO: 111855 - DNA, 20 bp, synthetic construct
  source 1..20: mol_type = other DNA
ggagttcaagaccagcctgg

SEQ ID NO: 111856 - DNA, 20 bp, synthetic construct
  source 1..20: mol_type = other DNA
aggagttcaagaccagcctg

SEQ ID NO: 111857 - DNA, 20 bp, synthetic construct
  source 1..20: mol_type = other DNA
caggagttcaagaccagcct

SEQ ID NO: 111858 - DNA, 20 bp, synthetic construct
  source 1..20: mol_type = other DNA
tcaggagttcaagaccagcc

SEQ ID NO: 111859 - DNA, 20 bp, synthetic construct
  source 1..20: mol_type = other DNA
ctcaggagttcaagaccagc

SEQ ID NO: 111860 - DNA, 20 bp, synthetic construct
  source 1..20: mol_type = other DNA
gctcaggagttcaagaccag

SEQ ID NO: 111861 - DNA, 20 bp, synthetic construct
  source 1..20: mol_type = other DNA
agctcaggagttcaagacca

SEQ ID NO: 111862 - DNA, 20 bp, synthetic construct
  source 1..20: mol_type = other DNA
aagctcaggagttcaagacc

SEQ ID NO: 111863 - DNA, 20 bp, synthetic construct
  source 1..20: mol_type = other DNA
taagctcaggagttcaagac

SEQ ID NO: 111864 - DNA, 20 bp, synthetic construct
  source 1..20: mol_type = other DNA
ttaagctcaggagttcaaga

SEQ ID NO: 111865 - DNA, 20 bp, synthetic construct
  source 1..20: mol_type = other DNA
cttaagctcaggagttcaag

SEQ ID NO: 111866 - DNA, 20 bp, synthetic construct
  source 1..20: mol_type = other DNA
gcttaagctcaggagttcaa

SEQ ID NO: 111867 - DNA, 20 bp, synthetic construct
  source 1..20: mol_type = other DNA
tgcttaagctcaggagttca

SEQ ID NO: 111868 - DNA, 20 bp, synthetic construct
  source 1..20: mol_type = other DNA
ctgcttaagctcaggagttc

SEQ ID NO: 111869 - DNA, 20 bp, synthetic construct
  source 1..20: mol_type = other DNA
actgcttaagctcaggagtt

SEQ ID NO: 111870 - DNA, 20 bp, synthetic construct
  source 1..20: mol_type = other DNA
gactgcttaagctcaggagt

SEQ ID NO: 111871 - DNA, 20 bp, synthetic construct
  source 1..20: mol_type = other DNA
agactgcttaagctcaggag

SEQ ID NO: 111872 - DNA, 20 bp, synthetic construct
  source 1..20: mol_type = other DNA
cagactgcttaagctcagga

SEQ ID NO: 111873 - DNA, 20 bp, synthetic construct
  source 1..20: mol_type = other DNA
gcagactgcttaagctcagg

SEQ ID NO: 111874 - DNA, 20 bp, synthetic construct
  source 1..20: mol_type = other DNA
agcagactgcttaagctcag

SEQ ID NO: 111875 - DNA, 20 bp, synthetic construct
  source 1..20: mol_type = other DNA
aagcagactgcttaagctca

SEQ ID NO: 111876 - DNA, 20 bp, synthetic construct
  source 1..20: mol_type = other DNA
caagcagactgcttaagctc

SEQ ID NO: 111877 - DNA, 20 bp, synthetic construct
  source 1..20: mol_type = other DNA
acaagcagactgcttaagct

SEQ ID NO: 111878 - DNA, 20 bp, synthetic construct
  source 1..20: mol_type = other DNA
gacaagcagactgcttaagc

SEQ ID NO: 111879 - DNA, 20 bp, synthetic construct
  source 1..20: mol_type = other DNA
agacaagcagactgcttaag

SEQ ID NO: 111880 - DNA, 20 bp, synthetic construct
  source 1..20: mol_type = other DNA
gagacaagcagactgcttaa

SEQ ID NO: 111881 - DNA, 20 bp, synthetic construct
  source 1..20: mol_type = other DNA
tgagacaagcagactgctta

SEQ ID NO: 111882 - DNA, 20 bp, synthetic construct
  source 1..20: mol_type = other DNA
ctgagacaagcagactgctt

SEQ ID NO: 111883 - DNA, 20 bp, synthetic construct
  source 1..20: mol_type = other DNA
gctgagacaagcagactgct

SEQ ID NO: 111884 - DNA, 20 bp, synthetic construct
  source 1..20: mol_type = other DNA
ggctgagacaagcagactgc

SEQ ID NO: 111885 - DNA, 20 bp, synthetic construct
  source 1..20: mol_type = other DNA
aggctgagacaagcagactg

SEQ ID NO: 111886 - DNA, 20 bp, synthetic construct
  source 1..20: mol_type = other DNA
gaggctgagacaagcagact

SEQ ID NO: 111887 - DNA, 20 bp, synthetic construct
  source 1..20: mol_type = other DNA
ggaggctgagacaagcagac

SEQ ID NO: 111888 - DNA, 20 bp, synthetic construct
  source 1..20: mol_type = other DNA
gggaggctgagacaagcaga

SEQ ID NO: 111889 - DNA, 20 bp, synthetic construct
  source 1..20: mol_type = other DNA
tgggaggctgagacaagcag

SEQ ID NO: 111890 - DNA, 20 bp, synthetic construct
  source 1..20: mol_type = other DNA
ttgggaggctgagacaagca

SEQ ID NO: 111891 - DNA, 20 bp, synthetic construct
  source 1..20: mol_type = other DNA
tttgggaggctgagacaagc

SEQ ID NO: 111892 - DNA, 20 bp, synthetic construct
  source 1..20: mol_type = other DNA
ctttgggaggctgagacaag

SEQ ID NO: 111893 - DNA, 20 bp, synthetic construct
  source 1..20: mol_type = other DNA
cctttgggaggctgagacaa

SEQ ID NO: 111894 - DNA, 20 bp, synthetic construct
  source 1..20: mol_type = other DNA
ccctttgggaggctgagaca

SEQ ID NO: 111895 - DNA, 20 bp, synthetic construct
  source 1..20: mol_type = other DNA
gccctttgggaggctgagac

SEQ ID NO: 111896 - DNA, 20 bp, synthetic construct
  source 1..20: mol_type = other DNA
agccctttgggaggctgaga

SEQ ID NO: 111897 - DNA, 20 bp, synthetic construct
  source 1..20: mol_type = other DNA
cagccctttgggaggctgag

SEQ ID NO: 111898 - DNA, 20 bp, synthetic construct
  source 1..20: mol_type = other DNA
ccagccctttgggaggctga

SEQ ID NO: 111899 - DNA, 20 bp, synthetic construct
  source 1..20: mol_type = other DNA
tccagccctttgggaggctg

SEQ ID NO: 111900 - DNA, 20 bp, synthetic construct
  source 1..20: mol_type = other DNA
ttccagccctttgggaggct

SEQ ID NO: 111901 - DNA, 20 bp, synthetic construct
  source 1..20: mol_type = other DNA
attccagccctttgggaggc

SEQ ID NO: 111902 - DNA, 20 bp, synthetic construct
  source 1..20: mol_type = other DNA
aattccagccctttgggagg

SEQ ID NO: 111903 - DNA, 20 bp, synthetic construct
  source 1..20: mol_type = other DNA
taattccagccctttgggag

SEQ ID NO: 111904 - DNA, 20 bp, synthetic construct
  source 1..20: mol_type = other DNA
gtaattccagccctttggga

SEQ ID NO: 111905 - DNA, 20 bp, synthetic construct
  source 1..20: mol_type = other DNA
tgtaattccagccctttggg

SEQ ID NO: 111906 - DNA, 20 bp, synthetic construct
  source 1..20: mol_type = other DNA
ctgtaattccagccctttgg

SEQ ID NO: 111907 - DNA, 20 bp, synthetic construct
  source 1..20: mol_type = other DNA
actgtaattccagccctttg

SEQ ID NO: 111908 - DNA, 20 bp, synthetic construct
  source 1..20: mol_type = other DNA
cactgtaattccagcccttt

SEQ ID NO: 111909 - DNA, 20 bp, synthetic construct
  source 1..20: mol_type = other DNA
tcactgtaattccagccctt

SEQ ID NO: 111910 - DNA, 20 bp, synthetic construct
  source 1..20: mol_type = other DNA
atcactgtaattccagccct

SEQ ID NO: 111911 - DNA, 20 bp, synthetic construct
  source 1..20: mol_type = other DNA
catcactgtaattccagccc

SEQ ID NO: 111912 - DNA, 20 bp, synthetic construct
  source 1..20: mol_type = other DNA
tcatcactgtaattccagcc

SEQ ID NO: 111913 - DNA, 20 bp, synthetic construct
  source 1..20: mol_type = other DNA
ctcatcactgtaattccagc

SEQ ID NO: 111914 - DNA, 20 bp, synthetic construct
  source 1..20: mol_type = other DNA
gctcatcactgtaattccag

SEQ ID NO: 111915 - DNA, 20 bp, synthetic construct
  source 1..20: mol_type = other DNA
agctcatcactgtaattcca

SEQ ID NO: 111916 - DNA, 20 bp, synthetic construct
  source 1..20: mol_type = other DNA
tagctcatcactgtaattcc

SEQ ID NO: 111917 - DNA, 20 bp, synthetic construct
  source 1..20: mol_type = other DNA
gtagctcatcactgtaattc

SEQ ID NO: 111918 - DNA, 20 bp, synthetic construct
  source 1..20: mol_type = other DNA
agtagctcatcactgtaatt

SEQ ID NO: 111919 - DNA, 20 bp, synthetic construct
  source 1..20: mol_type = other DNA
cagtagctcatcactgtaat

SEQ ID NO: 111920 - DNA, 20 bp, synthetic construct
  source 1..20: mol_type = other DNA
acagtagctcatcactgtaa

SEQ ID NO: 111921 - DNA, 20 bp, synthetic construct
  source 1..20: mol_type = other DNA
cacagtagctcatcactgta

SEQ ID NO: 111922 - DNA, 20 bp, synthetic construct
  source 1..20: mol_type = other DNA
gcacagtagctcatcactgt

SEQ ID NO: 111923 - DNA, 20 bp, synthetic construct
  source 1..20: mol_type = other DNA
ggcacagtagctcatcactg

SEQ ID NO: 111924 - DNA, 20 bp, synthetic construct
  source 1..20: mol_type = other DNA
gggcacagtagctcatcact

SEQ ID NO: 111925 - DNA, 20 bp, synthetic construct
  source 1..20: mol_type = other DNA
tgggcacagtagctcatcac

SEQ ID NO: 111926 - DNA, 20 bp, synthetic construct
  source 1..20: mol_type = other DNA
ctgggcacagtagctcatca

SEQ ID NO: 111927 - DNA, 20 bp, synthetic construct
  source 1..20: mol_type = other DNA
gctgggcacagtagctcatc

SEQ ID NO: 111928 - DNA, 20 bp, synthetic construct
  source 1..20: mol_type = other DNA
agctgggcacagtagctcat

SEQ ID NO: 111929 - DNA, 20 bp, synthetic construct
  source 1..20: mol_type = other DNA
gagctgggcacagtagctca

SEQ ID NO: 111930 - DNA, 20 bp, synthetic construct
  source 1..20: mol_type = other DNA
tgagctgggcacagtagctc

SEQ ID NO: 111931 - DNA, 20 bp, synthetic construct
  source 1..20: mol_type = other DNA
atgagctgggcacagtagct

SEQ ID NO: 111932 - DNA, 20 bp, synthetic construct
  source 1..20: mol_type = other DNA
aatgagctgggcacagtagc

SEQ ID NO: 111933 - DNA, 20 bp, synthetic construct
  source 1..20: mol_type = other DNA
caatgagctgggcacagtag

SEQ ID NO: 111934 - DNA, 20 bp, synthetic construct
  source 1..20: mol_type = other DNA
ccaatgagctgggcacagta

SEQ ID NO: 111935 - DNA, 20 bp, synthetic construct
  source 1..20: mol_type = other DNA
accaatgagctgggcacagt

SEQ ID NO: 111936 - DNA, 20 bp, synthetic construct
  source 1..20: mol_type = other DNA
caccaatgagctgggcacag

SEQ ID NO: 111937 - DNA, 20 bp, synthetic construct
  source 1..20: mol_type = other DNA
gcaccaatgagctgggcaca

SEQ ID NO: 111938 - DNA, 20 bp, synthetic construct
  source 1..20: mol_type = other DNA
agcaccaatgagctgggcac

SEQ ID NO: 111939 - DNA, 20 bp, synthetic construct
  source 1..20: mol_type = other DNA
tagcaccaatgagctgggca

SEQ ID NO: 111940 - DNA, 20 bp, synthetic construct
  source 1..20: mol_type = other DNA
atagcaccaatgagctgggc

SEQ ID NO: 111941 - DNA, 20 bp, synthetic construct
  source 1..20: mol_type = other DNA
gatagcaccaatgagctggg

SEQ ID NO: 111942 - DNA, 20 bp, synthetic construct
  source 1..20: mol_type = other DNA
agatagcaccaatgagctgg

SEQ ID NO: 111943 - DNA, 20 bp, synthetic construct
  source 1..20: mol_type = other DNA
aagatagcaccaatgagctg

SEQ ID NO: 111944 - DNA, 20 bp, synthetic construct
  source 1..20: mol_type = other DNA
aaagatagcaccaatgagct

SEQ ID NO: 111945 - DNA, 20 bp, synthetic construct
  source 1..20: mol_type = other DNA
aaaagatagcaccaatgagc

SEQ ID NO: 111946 - DNA, 20 bp, synthetic construct
  source 1..20: mol_type = other DNA
aaaaagatagcaccaatgag

SEQ ID NO: 111947 - DNA, 20 bp, synthetic construct
  source 1..20: mol_type = other DNA
aaaaaagatagcaccaatga

SEQ ID NO: 111948 - DNA, 20 bp, synthetic construct
  source 1..20: mol_type = other DNA
aaaaaaagatagcaccaatg

SEQ ID NO: 111949 - DNA, 20 bp, synthetic construct
  source 1..20: mol_type = other DNA
aaaaaaaagatagcaccaat

SEQ ID NO: 111950 - DNA, 20 bp, synthetic construct
  source 1..20: mol_type = other DNA
aaaaaaaaagatagcaccaa

SEQ ID NO: 111951 - DNA, 20 bp, synthetic construct
  source 1..20: mol_type = other DNA
aaaaaaaaaagatagcacca

SEQ ID NO: 111952 - DNA, 20 bp, synthetic construct
  source 1..20: mol_type = other DNA
aaaaaaaaaaagatagcacc

SEQ ID NO: 111953 - DNA, 20 bp, synthetic construct
  source 1..20: mol_type = other DNA
aaaaaaaaaaaagatagcac

SEQ ID NO: 111954 - DNA, 20 bp, synthetic construct
  source 1..20: mol_type = other DNA
aaaaaaaaaaaaagatagca

SEQ ID NO: 111955 - DNA, 20 bp, synthetic construct
  source 1..20: mol_type = other DNA
aaaaaaaaaaaaaagatagc

SEQ ID NO: 111956 - DNA, 20 bp, synthetic construct
  source 1..20: mol_type = other DNA
aaaaaaaaaaaaaaagatag

SEQ ID NO: 111957 - DNA, 20 bp, synthetic construct
  source 1..20: mol_type = other DNA
caaaaaaaaaaaaaaagata

SEQ ID NO: 111958 - DNA, 20 bp, synthetic construct
  source 1..20: mol_type = other DNA
tcaaaaaaaaaaaaaaagat

SEQ ID NO: 111959 - DNA, 20 bp, synthetic construct
  source 1..20: mol_type = other DNA
ctcaaaaaaaaaaaaaaaga

SEQ ID NO: 111960 - DNA, 20 bp, synthetic construct
  source 1..20: mol_type = other DNA
tctcaaaaaaaaaaaaaaag

SEQ ID NO: 111961 - DNA, 20 bp, synthetic construct
  source 1..20: mol_type = other DNA
gtctcaaaaaaaaaaaaaaa

SEQ ID NO: 111962 - DNA, 20 bp, synthetic construct
  source 1..20: mol_type = other DNA
cgtctcaaaaaaaaaaaaaa

SEQ ID NO: 111963 - DNA, 20 bp, synthetic construct
  source 1..20: mol_type = other DNA
ccgtctcaaaaaaaaaaaaa

SEQ ID NO: 111964 - DNA, 20 bp, synthetic construct
  source 1..20: mol_type = other DNA
tccgtctcaaaaaaaaaaaa

SEQ ID NO: 111965 - DNA, 20 bp, synthetic construct
  source 1..20: mol_type = other DNA
ctccgtctcaaaaaaaaaaa

SEQ ID NO: 111966 - DNA, 20 bp, synthetic construct
  source 1..20: mol_type = other DNA
actccgtctcaaaaaaaaaa

SEQ ID NO: 111967 - DNA, 20 bp, synthetic construct
  source 1..20: mol_type = other DNA
gactccgtctcaaaaaaaaa

SEQ ID NO: 111968 - DNA, 20 bp, synthetic construct
  source 1..20: mol_type = other DNA
agactccgtctcaaaaaaaa

SEQ ID NO: 111969 - DNA, 20 bp, synthetic construct
  source 1..20: mol_type = other DNA
gagactccgtctcaaaaaaa

SEQ ID NO: 111970 - DNA, 20 bp, synthetic construct
  source 1..20: mol_type = other DNA
cgagactccgtctcaaaaaa

SEQ ID NO: 111971 - DNA, 20 bp, synthetic construct
  source 1..20: mol_type = other DNA
gcgagactccgtctcaaaaa

SEQ ID NO: 111972 - DNA, 20 bp, synthetic construct
  source 1..20: mol_type = other DNA
agcgagactccgtctcaaaa

SEQ ID NO: 111973 - DNA, 20 bp, synthetic construct
  source 1..20: mol_type = other DNA
gagcgagactccgtctcaaa

SEQ ID NO: 111974 - DNA, 20 bp, synthetic construct
  source 1..20: mol_type = other DNA
agagcgagactccgtctcaa

SEQ ID NO: 111975 - DNA, 20 bp, synthetic construct
  source 1..20: mol_type = other DNA
cagagcgagactccgtctca

SEQ ID NO: 111976 - DNA, 20 bp, synthetic construct
  source 1..20: mol_type = other DNA
acagagcgagactccgtctc

SEQ ID NO: 111977 - DNA, 20 bp, synthetic construct
  source 1..20: mol_type = other DNA
gacagagcgagactccgtct

SEQ ID NO: 111978 - DNA, 20 bp, synthetic construct
  source 1..20: mol_type = other DNA
tgacagagcgagactccgtc

SEQ ID NO: 111979 - DNA, 20 bp, synthetic construct
  source 1..20: mol_type = other DNA
gtgacagagcgagactccgt

SEQ ID NO: 111980 - DNA, 20 bp, synthetic construct
  source 1..20: mol_type = other DNA
ggtgacagagcgagactccg

SEQ ID NO: 111981 - DNA, 20 bp, synthetic construct
  source 1..20: mol_type = other DNA
gggtgacagagcgagactcc

SEQ ID NO: 111982 - DNA, 20 bp, synthetic construct
  source 1..20: mol_type = other DNA
tgggtgacagagcgagactc

SEQ ID NO: 111983 - DNA, 20 bp, synthetic construct
  source 1..20: mol_type = other DNA
ctgggtgacagagcgagact

SEQ ID NO: 111984 - DNA, 20 bp, synthetic construct
  source 1..20: mol_type = other DNA
cctgggtgacagagcgagac

SEQ ID NO: 111985 - DNA, 20 bp, synthetic construct
  source 1..20: mol_type = other DNA
gcctgggtgacagagcgaga

SEQ ID NO: 111986 - DNA, 20 bp, synthetic construct
  source 1..20: mol_type = other DNA
agcctgggtgacagagcgag

SEQ ID NO: 111987 - DNA, 20 bp, synthetic construct
  source 1..20: mol_type = other DNA
cagcctgggtgacagagcga

SEQ ID NO: 111988 - DNA, 20 bp, synthetic construct
  source 1..20: mol_type = other DNA
ccagcctgggtgacagagcg

SEQ ID NO: 111989 - DNA, 20 bp, synthetic construct
  source 1..20: mol_type = other DNA
tccagcctgggtgacagagc

SEQ ID NO: 111990 - DNA, 20 bp, synthetic construct
  source 1..20: mol_type = other DNA
ctccagcctgggtgacagag

SEQ ID NO: 111991 - DNA, 20 bp, synthetic construct
  source 1..20: mol_type = other DNA
actccagcctgggtgacaga

SEQ ID NO: 111992 - DNA, 20 bp, synthetic construct
  source 1..20: mol_type = other DNA
cactccagcctgggtgacag

SEQ ID NO: 111993 - DNA, 20 bp, synthetic construct
  source 1..20: mol_type = other DNA
gcactccagcctgggtgaca

SEQ ID NO: 111994 - DNA, 20 bp, synthetic construct
  source 1..20: mol_type = other DNA
tgcactccagcctgggtgac

SEQ ID NO: 111995 - DNA, 20 bp, synthetic construct
  source 1..20: mol_type = other DNA
ctgcactccagcctgggtga

SEQ ID NO: 111996 - DNA, 20 bp, synthetic construct
  source 1..20: mol_type = other DNA
actgcactccagcctgggtg

SEQ ID NO: 111997 - DNA, 20 bp, synthetic construct
  source 1..20: mol_type = other DNA
cactgcactccagcctgggt

SEQ ID NO: 111998 - DNA, 20 bp, synthetic construct
  source 1..20: mol_type = other DNA
ccactgcactccagcctggg

SEQ ID NO: 111999 - DNA, 20 bp, synthetic construct
  source 1..20: mol_type = other DNA
gccactgcactccagcctgg

SEQ ID NO: 112000 - DNA, 20 bp, synthetic construct
  source 1..20: mol_type = other DNA
cgccactgcactccagcctg

SEQ ID NO: 112001 - DNA, 20 bp, synthetic construct
  source 1..20: mol_type = other DNA
acgccactgcactccagcct

SEQ ID NO: 112002 - DNA, 20 bp, synthetic construct
  source 1..20: mol_type = other DNA
cacgccactgcactccagcc

SEQ ID NO: 112003 - DNA, 20 bp, synthetic construct
  source 1..20: mol_type = other DNA
tcacgccactgcactccagc

SEQ ID NO: 112004 - DNA, 20 bp, synthetic construct
  source 1..20: mol_type = other DNA
atcacgccactgcactccag

SEQ ID NO: 112005 - DNA, 20 bp, synthetic construct
  source 1..20: mol_type = other DNA
gatcacgccactgcactcca

SEQ ID NO: 112006 - DNA, 20 bp, synthetic construct
  source 1..20: mol_type = other DNA
agatcacgccactgcactcc

SEQ ID NO: 112007 - DNA, 20 bp, synthetic construct
  source 1..20: mol_type = other DNA
aagatcacgccactgcactc

SEQ ID NO: 112008 - DNA, 20 bp, synthetic construct
  source 1..20: mol_type = other DNA
caagatcacgccactgcact

SEQ ID NO: 112009 - DNA, 20 bp, synthetic construct
  source 1..20: mol_type = other DNA
ccaagatcacgccactgcac

SEQ ID NO: 112010 - DNA, 20 bp, synthetic construct
  source 1..20: mol_type = other DNA
gccaagatcacgccactgca

SEQ ID NO: 112011 - DNA, 20 bp, synthetic construct
  source 1..20: mol_type = other DNA
agccaagatcacgccactgc

SEQ ID NO: 112012 - DNA, 20 bp, synthetic construct
  source 1..20: mol_type = other DNA
gagccaagatcacgccactg

SEQ ID NO: 112013 - DNA, 20 bp, synthetic construct
  source 1..20: mol_type = other DNA
tgagccaagatcacgccact

SEQ ID NO: 112014 - DNA, 20 bp, synthetic construct
  source 1..20: mol_type = other DNA
gtgagccaagatcacgccac

SEQ ID NO: 112015 - DNA, 20 bp, synthetic construct
  source 1..20: mol_type = other DNA
agtgagccaagatcacgcca

SEQ ID NO: 112016 - DNA, 20 bp, synthetic construct
  source 1..20: mol_type = other DNA
cagtgagccaagatcacgcc

SEQ ID NO: 112017 - DNA, 20 bp, synthetic construct
  source 1..20: mol_type = other DNA
gcagtgagccaagatcacgc

SEQ ID NO: 112018 - DNA, 20 bp, synthetic construct
  source 1..20: mol_type = other DNA
tgcagtgagccaagatcacg

SEQ ID NO: 112019 - DNA, 20 bp, synthetic construct
  source 1..20: mol_type = other DNA
ctgcagtgagccaagatcac

SEQ ID NO: 112020 - DNA, 20 bp, synthetic construct
  source 1..20: mol_type = other DNA
gctgcagtgagccaagatca

SEQ ID NO: 112021 - DNA, 20 bp, synthetic construct
  source 1..20: mol_type = other DNA
agctgcagtgagccaagatc

SEQ ID NO: 112022 - DNA, 20 bp, synthetic construct
  source 1..20: mol_type = other DNA
gagctgcagtgagccaagat

SEQ ID NO: 112023 - DNA, 20 bp, synthetic construct
  source 1..20: mol_type = other DNA
ggagctgcagtgagccaaga

SEQ ID NO: 112024 - DNA, 20 bp, synthetic construct
  source 1..20: mol_type = other DNA
tggagctgcagtgagccaag

SEQ ID NO: 112025 - DNA, 20 bp, synthetic construct
  source 1..20: mol_type = other DNA
gtggagctgcagtgagccaa

SEQ ID NO: 112026 - DNA, 20 bp, synthetic construct
  source 1..20: mol_type = other DNA
agtggagctgcagtgagcca

SEQ ID NO: 112027 - DNA, 20 bp, synthetic construct
  source 1..20: mol_type = other DNA
aagtggagctgcagtgagcc

SEQ ID NO: 112028 - DNA, 20 bp, synthetic construct
  source 1..20: mol_type = other DNA
gaagtggagctgcagtgagc

SEQ ID NO: 112029 - DNA, 20 bp, synthetic construct
  source 1..20: mol_type = other DNA
ggaagtggagctgcagtgag

SEQ ID NO: 112030 - DNA, 20 bp, synthetic construct
  source 1..20: mol_type = other DNA
gggaagtggagctgcagtga

SEQ ID NO: 112031 - DNA, 20 bp, synthetic construct
  source 1..20: mol_type = other DNA
tgggaagtggagctgcagtg

SEQ ID NO: 112032 - DNA, 20 bp, synthetic construct
  source 1..20: mol_type = other DNA
ctgggaagtggagctgcagt

SEQ ID NO: 112033 - DNA, 20 bp, synthetic construct
  source 1..20: mol_type = other DNA
cctgggaagtggagctgcag

SEQ ID NO: 112034 - DNA, 20 bp, synthetic construct
  source 1..20: mol_type = other DNA
acctgggaagtggagctgca

SEQ ID NO: 112035 - DNA, 20 bp, synthetic construct
  source 1..20: mol_type = other DNA
aacctgggaagtggagctgc

SEQ ID NO: 112036 - DNA, 20 bp, synthetic construct
  source 1..20: mol_type = other DNA
gaacctgggaagtggagctg

SEQ ID NO: 112037 - DNA, 20 bp, synthetic construct
  source 1..20: mol_type = other DNA
tgaacctgggaagtggagct

SEQ ID NO: 112038 - DNA, 20 bp, synthetic construct
  source 1..20: mol_type = other DNA
gtgaacctgggaagtggagc

SEQ ID NO: 112039 - DNA, 20 bp, synthetic construct
  source 1..20: mol_type = other DNA
tgtgaacctgggaagtggag

SEQ ID NO: 112040 - DNA, 20 bp, synthetic construct
  source 1..20: mol_type = other DNA
gtgtgaacctgggaagtgga

SEQ ID NO: 112041 - DNA, 20 bp, synthetic construct
  source 1..20: mol_type = other DNA
ggtgtgaacctgggaagtgg

SEQ ID NO: 112042 - DNA, 20 bp, synthetic construct
  source 1..20: mol_type = other DNA
tggtgtgaacctgggaagtg

SEQ ID NO: 112043 - DNA, 20 bp, synthetic construct
  source 1..20: mol_type = other DNA
atggtgtgaacctgggaagt

SEQ ID NO: 112044 - DNA, 20 bp, synthetic construct
  source 1..20: mol_type = other DNA
aatggtgtgaacctgggaag

SEQ ID NO: 112045 - DNA, 20 bp, synthetic construct
  source 1..20: mol_type = other DNA
gaatggtgtgaacctgggaa

SEQ ID NO: 112046 - DNA, 20 bp, synthetic construct
  source 1..20: mol_type = other DNA
agaatggtgtgaacctggga

SEQ ID NO: 112047 - DNA, 20 bp, synthetic construct
  source 1..20: mol_type = other DNA
gagaatggtgtgaacctggg

SEQ ID NO: 112048 - DNA, 20 bp, synthetic construct
  source 1..20: mol_type = other DNA
ggagaatggtgtgaacctgg

SEQ ID NO: 112049 - DNA, 20 bp, synthetic construct
  source 1..20: mol_type = other DNA
aggagaatggtgtgaacctg

SEQ ID NO: 112050 - DNA, 20 bp, synthetic construct
  source 1..20: mol_type = other DNA
taggagaatggtgtgaacct

SEQ ID NO: 112051 - DNA, 20 bp, synthetic construct
  source 1..20: mol_type = other DNA
gtaggagaatggtgtgaacc

SEQ ID NO: 112052 - DNA, 20 bp, synthetic construct
  source 1..20: mol_type = other DNA
ggtaggagaatggtgtgaac

SEQ ID NO: 112053 - DNA, 20 bp, synthetic construct
  source 1..20: mol_type = other DNA
aggtaggagaatggtgtgaa

SEQ ID NO: 112054 - DNA, 20 bp, synthetic construct
  source 1..20: mol_type = other DNA
gaggtaggagaatggtgtga

SEQ ID NO: 112055 - DNA, 20 bp, synthetic construct
  source 1..20: mol_type = other DNA
tgaggtaggagaatggtgtg

SEQ ID NO: 112056 - DNA, 20 bp, synthetic construct
  source 1..20: mol_type = other DNA
ctgaggtaggagaatggtgt

SEQ ID NO: 112057 - DNA, 20 bp, synthetic construct
  source 1..20: mol_type = other DNA
gctgaggtaggagaatggtg

SEQ ID NO: 112058 - DNA, 20 bp, synthetic construct
  source 1..20: mol_type = other DNA
ggctgaggtaggagaatggt

SEQ ID NO: 112059 - DNA, 20 bp, synthetic construct
  source 1..20: mol_type = other DNA
aggctgaggtaggagaatgg

SEQ ID NO: 112060 - DNA, 20 bp, synthetic construct
  source 1..20: mol_type = other DNA
gaggctgaggtaggagaatg

SEQ ID NO: 112061 - DNA, 20 bp, synthetic construct
  source 1..20: mol_type = other DNA
ggaggctgaggtaggagaat

SEQ ID NO: 112062 - DNA, 20 bp, synthetic construct
  source 1..20: mol_type = other DNA
gggaggctgaggtaggagaa

SEQ ID NO: 112063 - DNA, 20 bp, synthetic construct
  source 1..20: mol_type = other DNA
cgggaggctgaggtaggaga

SEQ ID NO: 112064 - DNA, 20 bp, synthetic construct
  source 1..20: mol_type = other DNA
tcgggaggctgaggtaggag

SEQ ID NO: 112065 - DNA, 20 bp, synthetic construct
  source 1..20: mol_type = other DNA
ctcgggaggctgaggtagga

SEQ ID NO: 112066 - DNA, 20 bp, synthetic construct
  source 1..20: mol_type = other DNA
actcgggaggctgaggtagg

SEQ ID NO: 112067 - DNA, 20 bp, synthetic construct
  source 1..20: mol_type = other DNA
tactcgggaggctgaggtag

SEQ ID NO: 112068 - DNA, 20 bp, synthetic construct
  source 1..20: mol_type = other DNA
ctactcgggaggctgaggta

SEQ ID NO: 112069 - DNA, 20 bp, synthetic construct
  source 1..20: mol_type = other DNA
gctactcgggaggctgaggt

SEQ ID NO: 112070 - DNA, 20 bp, synthetic construct
  source 1..20: mol_type = other DNA
tgctactcgggaggctgagg

SEQ ID NO: 112071 - DNA, 20 bp, synthetic construct
  source 1..20: mol_type = other DNA
ctgctactcgggaggctgag

SEQ ID NO: 112072 - DNA, 20 bp, synthetic construct
  source 1..20: mol_type = other DNA
cctgctactcgggaggctga

SEQ ID NO: 112073 - DNA, 20 bp, synthetic construct
  source 1..20: mol_type = other DNA
ccctgctactcgggaggctg

SEQ ID NO: 112074 - DNA, 20 bp, synthetic construct
  source 1..20: mol_type = other DNA
tccctgctactcgggaggct

SEQ ID NO: 112075 - DNA, 20 bp, synthetic construct
  source 1..20: mol_type = other DNA
gtccctgctactcgggaggc

SEQ ID NO: 112076 - DNA, 20 bp, synthetic construct
  source 1..20: mol_type = other DNA
agtccctgctactcgggagg

SEQ ID NO: 112077 - DNA, 20 bp, synthetic construct
  source 1..20: mol_type = other DNA
tagtccctgctactcgggag

SEQ ID NO: 112078 - DNA, 20 bp, synthetic construct
  source 1..20: mol_type = other DNA
atagtccctgctactcggga

SEQ ID NO: 112079 - DNA, 20 bp, synthetic construct
  source 1..20: mol_type = other DNA
tatagtccctgctactcggg

SEQ ID NO: 112080 - DNA, 20 bp, synthetic construct
  source 1..20: mol_type = other DNA
ctatagtccctgctactcgg

SEQ ID NO: 112081 - DNA, 20 bp, synthetic construct
  source 1..20: mol_type = other DNA
cctatagtccctgctactcg

SEQ ID NO: 112082 - DNA, 20 bp, synthetic construct
  source 1..20: mol_type = other DNA
gcctatagtccctgctactc

SEQ ID NO: 112083 - DNA, 20 bp, synthetic construct
  source 1..20: mol_type = other DNA
cgcctatagtccctgctact

SEQ ID NO: 112084 - DNA, 20 bp, synthetic construct
  source 1..20: mol_type = other DNA
gcgcctatagtccctgctac

SEQ ID NO: 112085 - DNA, 20 bp, synthetic construct
  source 1..20: mol_type = other DNA
ggcgcctatagtccctgcta

SEQ ID NO: 112086 - DNA, 20 bp, synthetic construct
  source 1..20: mol_type = other DNA
aggcgcctatagtccctgct

SEQ ID NO: 112087 - DNA, 20 bp, synthetic construct
  source 1..20: mol_type = other DNA
caggcgcctatagtccctgc

SEQ ID NO: 112088 - DNA, 20 bp, synthetic construct
  source 1..20: mol_type = other DNA
gcaggcgcctatagtccctg

SEQ ID NO: 112089 - DNA, 20 bp, synthetic construct
  source 1..20: mol_type = other DNA
ggcaggcgcctatagtccct

SEQ ID NO: 112090 - DNA, 20 bp, synthetic construct
  source 1..20: mol_type = other DNA
tggcaggcgcctatagtccc

SEQ ID NO: 112091 - DNA, 20 bp, synthetic construct
  source 1..20: mol_type = other DNA
gtggcaggcgcctatagtcc

SEQ ID NO: 112092 - DNA, 20 bp, synthetic construct
  source 1..20: mol_type = other DNA
ggtggcaggcgcctatagtc

SEQ ID NO: 112093 - DNA, 20 bp, synthetic construct
  source 1..20: mol_type = other DNA
tggtggcaggcgcctatagt

SEQ ID NO: 112094 - DNA, 20 bp, synthetic construct
  source 1..20: mol_type = other DNA
atggtggcaggcgcctatag

SEQ ID NO: 112095 - DNA, 20 bp, synthetic construct
  source 1..20: mol_type = other DNA
catggtggcaggcgcctata

SEQ ID NO: 112096 - DNA, 20 bp, synthetic construct
  source 1..20: mol_type = other DNA
gcatggtggcaggcgcctat

SEQ ID NO: 112097 - DNA, 20 bp, synthetic construct
  source 1..20: mol_type = other DNA
ggcatggtggcaggcgccta

SEQ ID NO: 112098 - DNA, 20 bp, synthetic construct
  source 1..20: mol_type = other DNA
aggcatggtggcaggcgcct

SEQ ID NO: 112099 - DNA, 20 bp, synthetic construct
  source 1..20: mol_type = other DNA
caggcatggtggcaggcgcc

SEQ ID NO: 112100 - DNA, 20 bp, synthetic construct
  source 1..20: mol_type = other DNA
ccaggcatggtggcaggcgc

SEQ ID NO: 112101 - DNA, 20 bp, synthetic construct
  source 1..20: mol_type = other DNA
gccaggcatggtggcaggcg

SEQ ID NO: 112102 - DNA, 20 bp, synthetic construct
  source 1..20: mol_type = other DNA
agccaggcatggtggcaggc

SEQ ID NO: 112103 - DNA, 20 bp, synthetic construct
  source 1..20: mol_type = other DNA
tagccaggcatggtggcagg

SEQ ID NO: 112104 - DNA, 20 bp, synthetic construct
  source 1..20: mol_type = other DNA
ttagccaggcatggtggcag

SEQ ID NO: 112105 - DNA, 20 bp, synthetic construct
  source 1..20: mol_type = other DNA
attagccaggcatggtggca

SEQ ID NO: 112106 - DNA, 20 bp, synthetic construct
  source 1..20: mol_type = other DNA
aattagccaggcatggtggc

SEQ ID NO: 112107 - DNA, 20 bp, synthetic construct
  source 1..20: mol_type = other DNA
aaattagccaggcatggtgg

SEQ ID NO: 112108 - DNA, 20 bp, synthetic construct
  source 1..20: mol_type = other DNA
aaaattagccaggcatggtg

SEQ ID NO: 112109 - DNA, 20 bp, synthetic construct
  source 1..20: mol_type = other DNA
aaaaattagccaggcatggt

SEQ ID NO: 112110 - DNA, 20 bp, synthetic construct
  source 1..20: mol_type = other DNA
caaaaattagccaggcatgg

SEQ ID NO: 112111 - DNA, 20 bp, synthetic construct
  source 1..20: mol_type = other DNA
acaaaaattagccaggcatg

SEQ ID NO: 112112 - DNA, 20 bp, synthetic construct
  source 1..20: mol_type = other DNA
tacaaaaattagccaggcat

SEQ ID NO: 112113 - DNA, 20 bp, synthetic construct
  source 1..20: mol_type = other DNA
atacaaaaattagccaggca

SEQ ID NO: 112114 - DNA, 20 bp, synthetic construct
  source 1..20: mol_type = other DNA
aatacaaaaattagccaggc

SEQ ID NO: 112115 - DNA, 20 bp, synthetic construct
  source 1..20: mol_type = other DNA
aaatacaaaaattagccagg

SEQ ID NO: 112116 - DNA, 20 bp, synthetic construct
  source 1..20: mol_type = other DNA
aaaatacaaaaattagccag

SEQ ID NO: 112117 - DNA, 20 bp, synthetic construct
  source 1..20: mol_type = other DNA
aaaaatacaaaaattagcca

SEQ ID NO: 112118 - DNA, 20 bp, synthetic construct
  source 1..20: mol_type = other DNA
taaaaatacaaaaattagcc

SEQ ID NO: 112119 - DNA, 20 bp, synthetic construct
  source 1..20: mol_type = other DNA
ctaaaaatacaaaaattagc

SEQ ID NO: 112120 - DNA, 20 bp, synthetic construct
  source 1..20: mol_type = other DNA
actaaaaatacaaaaattag

SEQ ID NO: 112121 - DNA, 20 bp, synthetic construct
  source 1..20: mol_type = other DNA
tactaaaaatacaaaaatta

SEQ ID NO: 112122 - DNA, 20 bp, synthetic construct
  source 1..20: mol_type = other DNA
ctactaaaaatacaaaaatt

SEQ ID NO: 112123 - DNA, 20 bp, synthetic construct
  source 1..20: mol_type = other DNA
tctactaaaaatacaaaaat

SEQ ID NO: 112124 - DNA, 20 bp, synthetic construct
  source 1..20: mol_type = other DNA
ctctactaaaaatacaaaaa

SEQ ID NO: 112125 - DNA, 20 bp, synthetic construct
  source 1..20: mol_type = other DNA
tctctactaaaaatacaaaa

SEQ ID NO: 112126 - DNA, 20 bp, synthetic construct
  source 1..20: mol_type = other DNA
atctctactaaaaatacaaa

SEQ ID NO: 112127 - DNA, 20 bp, synthetic construct
  source 1..20: mol_type = other DNA
catctctactaaaaatacaa

SEQ ID NO: 112128 - DNA, 20 bp, synthetic construct
  source 1..20: mol_type = other DNA
ccatctctactaaaaataca

SEQ ID NO: 112129 - DNA, 20 bp, synthetic construct
  source 1..20: mol_type = other DNA
cccatctctactaaaaatac

SEQ ID NO: 112130 - DNA, 20 bp, synthetic construct
  source 1..20: mol_type = other DNA
ccccatctctactaaaaata

SEQ ID NO: 112131 - DNA, 20 bp, synthetic construct
  source 1..20: mol_type = other DNA
accccatctctactaaaaat

SEQ ID NO: 112132 - DNA, 20 bp, synthetic construct
  source 1..20: mol_type = other DNA
aaccccatctctactaaaaa

SEQ ID NO: 112133 - DNA, 20 bp, synthetic construct
  source 1..20: mol_type = other DNA
aaaccccatctctactaaaa

SEQ ID NO: 112134 - DNA, 20 bp, synthetic construct
  source 1..20: mol_type = other DNA
gaaaccccatctctactaaa

SEQ ID NO: 112135 - DNA, 20 bp, synthetic construct
  source 1..20: mol_type = other DNA
tgaaaccccatctctactaa

SEQ ID NO: 112136 - DNA, 20 bp, synthetic construct
  source 1..20: mol_type = other DNA
ctgaaaccccatctctacta

SEQ ID NO: 112137 - DNA, 20 bp, synthetic construct
  source 1..20: mol_type = other DNA
gctgaaaccccatctctact

SEQ ID NO: 112138 - DNA, 20 bp, synthetic construct
  source 1..20: mol_type = other DNA
cgctgaaaccccatctctac

SEQ ID NO: 112139 - DNA, 20 bp, synthetic construct
  source 1..20: mol_type = other DNA
acgctgaaaccccatctcta

SEQ ID NO: 112140 - DNA, 20 bp, synthetic construct
  source 1..20: mol_type = other DNA
cacgctgaaaccccatctct

SEQ ID NO: 112141 - DNA, 20 bp, synthetic construct
  source 1..20: mol_type = other DNA
acacgctgaaaccccatctc

SEQ ID NO: 112142 - DNA, 20 bp, synthetic construct
  source 1..20: mol_type = other DNA
cacacgctgaaaccccatct

SEQ ID NO: 112143 - DNA, 20 bp, synthetic construct
  source 1..20: mol_type = other DNA
tcacacgctgaaaccccatc

SEQ ID NO: 112144 - DNA, 20 bp, synthetic construct
  source 1..20: mol_type = other DNA
ctcacacgctgaaaccccat

SEQ ID NO: 112145 - DNA, 20 bp, synthetic construct
  source 1..20: mol_type = other DNA
gctcacacgctgaaacccca

SEQ ID NO: 112146 - DNA, 20 bp, synthetic construct
  source 1..20: mol_type = other DNA
ggctcacacgctgaaacccc

SEQ ID NO: 112147 - DNA, 20 bp, synthetic construct
  source 1..20: mol_type = other DNA
tggctcacacgctgaaaccc

SEQ ID NO: 112148 - DNA, 20 bp, synthetic construct
  source 1..20: mol_type = other DNA
ttggctcacacgctgaaacc

SEQ ID NO: 112149 - DNA, 20 bp, synthetic construct
  source 1..20: mol_type = other DNA
cttggctcacacgctgaaac

SEQ ID NO: 112150 - DNA, 20 bp, synthetic construct
  source 1..20: mol_type = other DNA
tcttggctcacacgctgaaa

SEQ ID NO: 112151 - DNA, 20 bp, synthetic construct
  source 1..20: mol_type = other DNA
atcttggctcacacgctgaa

SEQ ID NO: 112152 - DNA, 20 bp, synthetic construct
  source 1..20: mol_type = other DNA
catcttggctcacacgctga

SEQ ID NO: 112153 - DNA, 20 bp, synthetic construct
  source 1..20: mol_type = other DNA
ccatcttggctcacacgctg

SEQ ID NO: 112154 - DNA, 20 bp, synthetic construct
  source 1..20: mol_type = other DNA
accatcttggctcacacgct

SEQ ID NO: 112155 - DNA, 20 bp, synthetic construct
  source 1..20: mol_type = other DNA
gaccatcttggctcacacgc

SEQ ID NO: 112156 - DNA, 20 bp, synthetic construct
  source 1..20: mol_type = other DNA
agaccatcttggctcacacg

SEQ ID NO: 112157 - DNA, 20 bp, synthetic construct
  source 1..20: mol_type = other DNA
gagaccatcttggctcacac

SEQ ID NO: 112158 - DNA, 20 bp, synthetic construct
  source 1..20: mol_type = other DNA
cgagaccatcttggctcaca

SEQ ID NO: 112159 - DNA, 20 bp, synthetic construct
  source 1..20: mol_type = other DNA
tcgagaccatcttggctcac

SEQ ID NO: 112160 - DNA, 20 bp, synthetic construct
  source 1..20: mol_type = other DNA
atcgagaccatcttggctca

SEQ ID NO: 112161 - DNA, 20 bp, synthetic construct
  source 1..20: mol_type = other DNA
gatcgagaccatcttggctc

SEQ ID NO: 112162 - DNA, 20 bp, synthetic construct
  source 1..20: mol_type = other DNA
agatcgagaccatcttggct

SEQ ID NO: 112163 - DNA, 20 bp, synthetic construct
  source 1..20: mol_type = other DNA
gagatcgagaccatcttggc

SEQ ID NO: 112164 - DNA, 20 bp, synthetic construct
  source 1..20: mol_type = other DNA
ggagatcgagaccatcttgg

SEQ ID NO: 112165 - DNA, 20 bp, synthetic construct
  source 1..20: mol_type = other DNA
aggagatcgagaccatcttg

SEQ ID NO: 112166 - DNA, 20 bp, synthetic construct
  source 1..20: mol_type = other DNA
caggagatcgagaccatctt

SEQ ID NO: 112167 - DNA, 20 bp, synthetic construct
  source 1..20: mol_type = other DNA
tcaggagatcgagaccatct

SEQ ID NO: 112168 - DNA, 20 bp, synthetic construct
  source 1..20: mol_type = other DNA
gtcaggagatcgagaccatc

SEQ ID NO: 112169 - DNA, 20 bp, synthetic construct
  source 1..20: mol_type = other DNA
ggtcaggagatcgagaccat

SEQ ID NO: 112170 - DNA, 20 bp, synthetic construct
  source 1..20: mol_type = other DNA
aggtcaggagatcgagacca

SEQ ID NO: 112171 - DNA, 20 bp, synthetic construct
  source 1..20: mol_type = other DNA
gaggtcaggagatcgagacc

SEQ ID NO: 112172 - DNA, 20 bp, synthetic construct
  source 1..20: mol_type = other DNA
cgaggtcaggagatcgagac

SEQ ID NO: 112173 - DNA, 20 bp, synthetic construct
  source 1..20: mol_type = other DNA
acgaggtcaggagatcgaga

SEQ ID NO: 112174 - DNA, 20 bp, synthetic construct
  source 1..20: mol_type = other DNA
cacgaggtcaggagatcgag

SEQ ID NO: 112175 - DNA, 20 bp, synthetic construct
  source 1..20: mol_type = other DNA
tcacgaggtcaggagatcga

SEQ ID NO: 112176 - DNA, 20 bp, synthetic construct
  source 1..20: mol_type = other DNA
atcacgaggtcaggagatcg

SEQ ID NO: 112177 - DNA, 20 bp, synthetic construct
  source 1..20: mol_type = other DNA
gatcacgaggtcaggagatc

SEQ ID NO: 112178 - DNA, 20 bp, synthetic construct
  source 1..20: mol_type = other DNA
ggatcacgaggtcaggagat

SEQ ID NO: 112179 - DNA, 20 bp, synthetic construct
  source 1..20: mol_type = other DNA
cggatcacgaggtcaggaga

SEQ ID NO: 112180 - DNA, 20 bp, synthetic construct
  source 1..20: mol_type = other DNA
gcggatcacgaggtcaggag

SEQ ID NO: 112181 - DNA, 20 bp, synthetic construct
  source 1..20: mol_type = other DNA
ggcggatcacgaggtcagga

SEQ ID NO: 112182 - DNA, 20 bp, synthetic construct
  source 1..20: mol_type = other DNA
aggcggatcacgaggtcagg

SEQ ID NO: 112183 - DNA, 20 bp, synthetic construct
  source 1..20: mol_type = other DNA
caggcggatcacgaggtcag

SEQ ID NO: 112184 - DNA, 20 bp, synthetic construct
  source 1..20: mol_type = other DNA
gcaggcggatcacgaggtca

SEQ ID NO: 112185 - DNA, 20 bp, synthetic construct
  source 1..20: mol_type = other DNA
ggcaggcggatcacgaggtc

SEQ ID NO: 112186 - DNA, 20 bp, synthetic construct
  source 1..20: mol_type = other DNA
aggcaggcggatcacgaggt

SEQ ID NO: 112187 - DNA, 20 bp, synthetic construct
  source 1..20: mol_type = other DNA
aaggcaggcggatcacgagg

SEQ ID NO: 112188 - DNA, 20 bp, synthetic construct
  source 1..20: mol_type = other DNA
caaggcaggcggatcacgag

SEQ ID NO: 112189 - DNA, 20 bp, synthetic construct
  source 1..20: mol_type = other DNA
ccaaggcaggcggatcacga

SEQ ID NO: 112190 - DNA, 20 bp, synthetic construct
  source 1..20: mol_type = other DNA
gccaaggcaggcggatcacg

SEQ ID NO: 112191 - DNA, 20 bp, synthetic construct
  source 1..20: mol_type = other DNA
ggccaaggcaggcggatcac

SEQ ID NO: 112192 - DNA, 20 bp, synthetic construct
  source 1..20: mol_type = other DNA
aggccaaggcaggcggatca

SEQ ID NO: 112193 - DNA, 20 bp, synthetic construct
  source 1..20: mol_type = other DNA
gaggccaaggcaggcggatc

SEQ ID NO: 112194 - DNA, 20 bp, synthetic construct
  source 1..20: mol_type = other DNA
ggaggccaaggcaggcggat

SEQ ID NO: 112195 - DNA, 20 bp, synthetic construct
  source 1..20: mol_type = other DNA
gggaggccaaggcaggcgga

SEQ ID NO: 112196 - DNA, 20 bp, synthetic construct
  source 1..20: mol_type = other DNA
tgggaggccaaggcaggcgg

SEQ ID NO: 112197 - DNA, 20 bp, synthetic construct
  source 1..20: mol_type = other DNA
ttgggaggccaaggcaggcg

SEQ ID NO: 112198 - DNA, 20 bp, synthetic construct
  source 1..20: mol_type = other DNA
tttgggaggccaaggcaggc

SEQ ID NO: 112199 - DNA, 20 bp, synthetic construct
  source 1..20: mol_type = other DNA
ctttgggaggccaaggcagg

SEQ ID NO: 112200 - DNA, 20 bp, synthetic construct
  source 1..20: mol_type = other DNA
actttgggaggccaaggcag

SEQ ID NO: 112201 - DNA, 20 bp, synthetic construct
  source 1..20: mol_type = other DNA
cactttgggaggccaaggca

SEQ ID NO: 112202 - DNA, 20 bp, synthetic construct
  source 1..20: mol_type = other DNA
gcactttgggaggccaaggc

SEQ ID NO: 112203 - DNA, 20 bp, synthetic construct
  source 1..20: mol_type = other DNA
agcactttgggaggccaagg

SEQ ID NO: 112204 - DNA, 20 bp, synthetic construct
  source 1..20: mol_type = other DNA
cagcactttgggaggccaag

SEQ ID NO: 112205 - DNA, 20 bp, synthetic construct
  source 1..20: mol_type = other DNA
ccagcactttgggaggccaa

SEQ ID NO: 112206 - DNA, 20 bp, synthetic construct
  source 1..20: mol_type = other DNA
cccagcactttgggaggcca

SEQ ID NO: 112207 - DNA, 20 bp, synthetic construct
  source 1..20: mol_type = other DNA
tcccagcactttgggaggcc

SEQ ID NO: 112208 - DNA, 20 bp, synthetic construct
  source 1..20: mol_type = other DNA
atcccagcactttgggaggc

SEQ ID NO: 112209 - DNA, 20 bp, synthetic construct
  source 1..20: mol_type = other DNA
aatcccagcactttgggagg

SEQ ID NO: 112210 - DNA, 20 bp, synthetic construct
  source 1..20: mol_type = other DNA
taatcccagcactttgggag

SEQ ID NO: 112211 - DNA, 20 bp, synthetic construct
  source 1..20: mol_type = other DNA
gtaatcccagcactttggga

SEQ ID NO: 112212 - DNA, 20 bp, synthetic construct
  source 1..20: mol_type = other DNA
tgtaatcccagcactttggg

SEQ ID NO: 112213 - DNA, 20 bp, synthetic construct
  source 1..20: mol_type = other DNA
ctgtaatcccagcactttgg

SEQ ID NO: 112214 - DNA, 20 bp, synthetic construct
  source 1..20: mol_type = other DNA
cctgtaatcccagcactttg

SEQ ID NO: 112215 - DNA, 20 bp, synthetic construct
  source 1..20: mol_type = other DNA
gcctgtaatcccagcacttt

SEQ ID NO: 112216 - DNA, 20 bp, synthetic construct
  source 1..20: mol_type = other DNA
cgcctgtaatcccagcactt

SEQ ID NO: 112217 - DNA, 20 bp, synthetic construct
  source 1..20: mol_type = other DNA
acgcctgtaatcccagcact

SEQ ID NO: 112218 - DNA, 20 bp, synthetic construct
  source 1..20: mol_type = other DNA
cacgcctgtaatcccagcac

SEQ ID NO: 112219 - DNA, 20 bp, synthetic construct
  source 1..20: mol_type = other DNA
tcacgcctgtaatcccagca

SEQ ID NO: 112220 - DNA, 20 bp, synthetic construct
  source 1..20: mol_type = other DNA
ctcacgcctgtaatcccagc

SEQ ID NO: 112221 - DNA, 20 bp, synthetic construct
  source 1..20: mol_type = other DNA
gctcacgcctgtaatcccag

SEQ ID NO: 112222 - DNA, 20 bp, synthetic construct
  source 1..20: mol_type = other DNA
ggctcacgcctgtaatccca

SEQ ID NO: 112223 - DNA, 20 bp, synthetic construct
  source 1..20: mol_type = other DNA
tggctcacgcctgtaatccc

SEQ ID NO: 112224 - DNA, 20 bp, synthetic construct
  source 1..20: mol_type = other DNA
gtggctcacgcctgtaatcc

SEQ ID NO: 112225 - DNA, 20 bp, synthetic construct
  source 1..20: mol_type = other DNA
ggtggctcacgcctgtaatc

SEQ ID NO: 112226 - DNA, 20 bp, synthetic construct
  source 1..20: mol_type = other DNA
cggtggctcacgcctgtaat

SEQ ID NO: 112227 - DNA, 20 bp, synthetic construct
  source 1..20: mol_type = other DNA
acggtggctcacgcctgtaa

SEQ ID NO: 112228 - DNA, 20 bp, synthetic construct
  source 1..20: mol_type = other DNA
cacggtggctcacgcctgta

SEQ ID NO: 112229 - DNA, 20 bp, synthetic construct
  source 1..20: mol_type = other DNA
gcacggtggctcacgcctgt

SEQ ID NO: 112230 - DNA, 20 bp, synthetic construct
  source 1..20: mol_type = other DNA
ggcacggtggctcacgcctg

SEQ ID NO: 112231 - DNA, 20 bp, synthetic construct
  source 1..20: mol_type = other DNA
gggcacggtggctcacgcct

SEQ ID NO: 112232 - DNA, 20 bp, synthetic construct
  source 1..20: mol_type = other DNA
cgggcacggtggctcacgcc

SEQ ID NO: 112233 - DNA, 20 bp, synthetic construct
  source 1..20: mol_type = other DNA
ccgggcacggtggctcacgc

SEQ ID NO: 112234 - DNA, 20 bp, synthetic construct
  source 1..20: mol_type = other DNA
gccgggcacggtggctcacg

SEQ ID NO: 112235 - DNA, 20 bp, synthetic construct
  source 1..20: mol_type = other DNA
ggccgggcacggtggctcac

SEQ ID NO: 112236 - DNA, 20 bp, synthetic construct
  source 1..20: mol_type = other DNA
gggccgggcacggtggctca

SEQ ID NO: 112237 - DNA, 20 bp, synthetic construct
  source 1..20: mol_type = other DNA
ggggccgggcacggtggctc

SEQ ID NO: 112238 - DNA, 20 bp, synthetic construct
  source 1..20: mol_type = other DNA
gggggccgggcacggtggct

SEQ ID NO: 112239 - DNA, 20 bp, synthetic construct
  source 1..20: mol_type = other DNA
tgggggccgggcacggtggc

SEQ ID NO: 112240 - DNA, 20 bp, synthetic construct
  source 1..20: mol_type = other DNA
atgggggccgggcacggtgg

SEQ ID NO: 112241 - DNA, 20 bp, synthetic construct
  source 1..20: mol_type = other DNA
aatgggggccgggcacggtg

SEQ ID NO: 112242 - DNA, 20 bp, synthetic construct
  source 1..20: mol_type = other DNA
caatgggggccgggcacggt

SEQ ID NO: 112243 - DNA, 20 bp, synthetic construct
  source 1..20: mol_type = other DNA
ccaatgggggccgggcacgg

SEQ ID NO: 112244 - DNA, 20 bp, synthetic construct
  source 1..20: mol_type = other DNA
accaatgggggccgggcacg

SEQ ID NO: 112245 - DNA, 20 bp, synthetic construct
  source 1..20: mol_type = other DNA
caccaatgggggccgggcac

SEQ ID NO: 112246 - DNA, 20 bp, synthetic construct
  source 1..20: mol_type = other DNA
gcaccaatgggggccgggca

SEQ ID NO: 112247 - DNA, 20 bp, synthetic construct
  source 1..20: mol_type = other DNA
agcaccaatgggggccgggc

SEQ ID NO: 112248 - DNA, 20 bp, synthetic construct
  source 1..20: mol_type = other DNA
tagcaccaatgggggccggg

SEQ ID NO: 112249 - DNA, 20 bp, synthetic construct
  source 1..20: mol_type = other DNA
atagcaccaatgggggccgg

SEQ ID NO: 112250 - DNA, 20 bp, synthetic construct
  source 1..20: mol_type = other DNA
aatagcaccaatgggggccg

SEQ ID NO: 112251 - DNA, 20 bp, synthetic construct
  source 1..20: mol_type = other DNA
caatagcaccaatgggggcc

SEQ ID NO: 112252 - DNA, 20 bp, synthetic construct
  source 1..20: mol_type = other DNA
acaatagcaccaatgggggc

SEQ ID NO: 112253 - DNA, 20 bp, synthetic construct
  source 1..20: mol_type = other DNA
aacaatagcaccaatggggg

SEQ ID NO: 112254 - DNA, 20 bp, synthetic construct
  source 1..20: mol_type = other DNA
aaacaatagcaccaatgggg

SEQ ID NO: 112255 - DNA, 20 bp, synthetic construct
  source 1..20: mol_type = other DNA
aaaacaatagcaccaatggg

SEQ ID NO: 112256 - DNA, 20 bp, synthetic construct
  source 1..20: mol_type = other DNA
taaaacaatagcaccaatgg

SEQ ID NO: 112257 - DNA, 20 bp, synthetic construct
  source 1..20: mol_type = other DNA
ataaaacaatagcaccaatg

SEQ ID NO: 112258 - DNA, 20 bp, synthetic construct
  source 1..20: mol_type = other DNA
cataaaacaatagcaccaat

SEQ ID NO: 112259 - DNA, 20 bp, synthetic construct
  source 1..20: mol_type = other DNA
acataaaacaatagcaccaa

SEQ ID NO: 112260 - DNA, 20 bp, synthetic construct
  source 1..20: mol_type = other DNA
cacataaaacaatagcacca

SEQ ID NO: 112261 - DNA, 20 bp, synthetic construct
  source 1..20: mol_type = other DNA
tcacataaaacaatagcacc

SEQ ID NO: 112262 - DNA, 20 bp, synthetic construct
  source 1..20: mol_type = other DNA
atcacataaaacaatagcac

SEQ ID NO: 112263 - DNA, 20 bp, synthetic construct
  source 1..20: mol_type = other DNA
tatcacataaaacaatagca

SEQ ID NO: 112264 - DNA, 20 bp, synthetic construct
  source 1..20: mol_type = other DNA
ctatcacataaaacaatagc

SEQ ID NO: 112265 - DNA, 20 bp, synthetic construct
  source 1..20: mol_type = other DNA
tctatcacataaaacaatag

SEQ ID NO: 112266 - DNA, 20 bp, synthetic construct
  source 1..20: mol_type = other DNA
ctctatcacataaaacaata

SEQ ID NO: 112267 - DNA, 20 bp, synthetic construct
  source 1..20: mol_type = other DNA
gctctatcacataaaacaat

SEQ ID NO: 112268 - DNA, 20 bp, synthetic construct
  source 1..20: mol_type = other DNA
ggctctatcacataaaacaa

SEQ ID NO: 112269 - DNA, 20 bp, synthetic construct
  source 1..20: mol_type = other DNA
tggctctatcacataaaaca

SEQ ID NO: 112270 - DNA, 20 bp, synthetic construct
  source 1..20: mol_type = other DNA
ctggctctatcacataaaac

SEQ ID NO: 112271 - DNA, 20 bp, synthetic construct
  source 1..20: mol_type = other DNA
gctggctctatcacataaaa

SEQ ID NO: 112272 - DNA, 20 bp, synthetic construct
  source 1..20: mol_type = other DNA
agctggctctatcacataaa

SEQ ID NO: 112273 - DNA, 20 bp, synthetic construct
  source 1..20: mol_type = other DNA
aagctggctctatcacataa

SEQ ID NO: 112274 - DNA, 20 bp, synthetic construct
  source 1..20: mol_type = other DNA
gaagctggctctatcacata

SEQ ID NO: 112275 - DNA, 20 bp, synthetic construct
  source 1..20: mol_type = other DNA
agaagctggctctatcacat

SEQ ID NO: 112276 - DNA, 20 bp, synthetic construct
  source 1..20: mol_type = other DNA
gagaagctggctctatcaca

SEQ ID NO: 112277 - DNA, 20 bp, synthetic construct
  source 1..20: mol_type = other DNA
ggagaagctggctctatcac

SEQ ID NO: 112278 - DNA, 20 bp, synthetic construct
  source 1..20: mol_type = other DNA
gggagaagctggctctatca

SEQ ID NO: 112279 - DNA, 20 bp, synthetic construct
  source 1..20: mol_type = other DNA
agggagaagctggctctatc

SEQ ID NO: 112280 - DNA, 20 bp, synthetic construct
  source 1..20: mol_type = other DNA
aagggagaagctggctctat

SEQ ID NO: 112281 - DNA, 20 bp, synthetic construct
  source 1..20: mol_type = other DNA
aaagggagaagctggctcta

SEQ ID NO: 112282 - DNA, 20 bp, synthetic construct
  source 1..20: mol_type = other DNA
aaaagggagaagctggctct

SEQ ID NO: 112283 - DNA, 20 bp, synthetic construct
  source 1..20: mol_type = other DNA
gaaaagggagaagctggctc

SEQ ID NO: 112284 - DNA, 20 bp, synthetic construct
  source 1..20: mol_type = other DNA
agaaaagggagaagctggct

SEQ ID NO: 112285 - DNA, 20 bp, synthetic construct
  source 1..20: mol_type = other DNA
aagaaaagggagaagctggc

SEQ ID NO: 112286 - DNA, 20 bp, synthetic construct
  source 1..20: mol_type = other DNA
aaagaaaagggagaagctgg

SEQ ID NO: 112287 - DNA, 20 bp, synthetic construct
  source 1..20: mol_type = other DNA
caaagaaaagggagaagctg

SEQ ID NO: 112288 - DNA, 20 bp, synthetic construct
  source 1..20: mol_type = other DNA
ccaaagaaaagggagaagct

SEQ ID NO: 112289 - DNA, 20 bp, synthetic construct
  source 1..20: mol_type = other DNA
tccaaagaaaagggagaagc

SEQ ID NO: 112290 - DNA, 20 bp, synthetic construct
  source 1..20: mol_type = other DNA
atccaaagaaaagggagaag

SEQ ID NO: 112291 - DNA, 20 bp, synthetic construct
  source 1..20: mol_type = other DNA
aatccaaagaaaagggagaa

SEQ ID NO: 112292 - DNA, 20 bp, synthetic construct
  source 1..20: mol_type = other DNA
aaatccaaagaaaagggaga

SEQ ID NO: 112293 - DNA, 20 bp, synthetic construct
  source 1..20: mol_type = other DNA
aaaatccaaagaaaagggag

SEQ ID NO: 112294 - DNA, 20 bp, synthetic construct
  source 1..20: mol_type = other DNA
aaaaatccaaagaaaaggga

SEQ ID NO: 112295 - DNA, 20 bp, synthetic construct
  source 1..20: mol_type = other DNA
taaaaatccaaagaaaaggg

SEQ ID NO: 112296 - DNA, 20 bp, synthetic construct
  source 1..20: mol_type = other DNA
ttaaaaatccaaagaaaagg

SEQ ID NO: 112297 - DNA, 20 bp, synthetic construct
  source 1..20: mol_type = other DNA
tttaaaaatccaaagaaaag

SEQ ID NO: 112298 - DNA, 20 bp, synthetic construct
  source 1..20: mol_type = other DNA
gtttaaaaatccaaagaaaa

SEQ ID NO: 112299 - DNA, 20 bp, synthetic construct
  source 1..20: mol_type = other DNA
tgtttaaaaatccaaagaaa

SEQ ID NO: 112300 - DNA, 20 bp, synthetic construct
  source 1..20: mol_type = other DNA
atgtttaaaaatccaaagaa

SEQ ID NO: 112301 - DNA, 20 bp, synthetic construct
  source 1..20: mol_type = other DNA
tatgtttaaaaatccaaaga

SEQ ID NO: 112302 - DNA, 20 bp, synthetic construct
  source 1..20: mol_type = other DNA
gtatgtttaaaaatccaaag

SEQ ID NO: 112303 - DNA, 20 bp, synthetic construct
  source 1..20: mol_type = other DNA
agtatgtttaaaaatccaaa

SEQ ID NO: 112304 - DNA, 20 bp, synthetic construct
  source 1..20: mol_type = other DNA
gagtatgtttaaaaatccaa

SEQ ID NO: 112305 - DNA, 20 bp, synthetic construct
  source 1..20: mol_type = other DNA
agagtatgtttaaaaatcca

SEQ ID NO: 112306 - DNA, 20 bp, synthetic construct
  source 1..20: mol_type = other DNA
aagagtatgtttaaaaatcc

SEQ ID NO: 112307 - DNA, 20 bp, synthetic construct
  source 1..20: mol_type = other DNA
gaagagtatgtttaaaaatc

SEQ ID NO: 112308 - DNA, 20 bp, synthetic construct
  source 1..20: mol_type = other DNA
ggaagagtatgtttaaaaat

SEQ ID NO: 112309 - DNA, 20 bp, synthetic construct
  source 1..20: mol_type = other DNA
aggaagagtatgtttaaaaa

SEQ ID NO: 112310 - DNA, 20 bp, synthetic construct
  source 1..20: mol_type = other DNA
aaggaagagtatgtttaaaa

SEQ ID NO: 112311 - DNA, 20 bp, synthetic construct
  source 1..20: mol_type = other DNA
aaaggaagagtatgtttaaa

SEQ ID NO: 112312 - DNA, 20 bp, synthetic construct
  source 1..20: mol_type = other DNA
aaaaggaagagtatgtttaa

SEQ ID NO: 112313 - DNA, 20 bp, synthetic construct
  source 1..20: mol_type = other DNA
taaaaggaagagtatgttta

SEQ ID NO: 112314 - DNA, 20 bp, synthetic construct
  source 1..20: mol_type = other DNA
gtaaaaggaagagtatgttt

SEQ ID NO: 112315 - DNA, 20 bp, synthetic construct
  source 1..20: mol_type = other DNA
agtaaaaggaagagtatgtt

SEQ ID NO: 112316 - DNA, 20 bp, synthetic construct
  source 1..20: mol_type = other DNA
aagtaaaaggaagagtatgt

SEQ ID NO: 112317 - DNA, 20 bp, synthetic construct
  source 1..20: mol_type = other DNA
taagtaaaaggaagagtatg

SEQ ID NO: 112318 - DNA, 20 bp, synthetic construct
  source 1..20: mol_type = other DNA
ctaagtaaaaggaagagtat

SEQ ID NO: 112319 - DNA, 20 bp, synthetic construct
  source 1..20: mol_type = other DNA
tctaagtaaaaggaagagta

SEQ ID NO: 112320 - DNA, 20 bp, synthetic construct
  source 1..20: mol_type = other DNA
gtctaagtaaaaggaagagt

SEQ ID NO: 112321 - DNA, 20 bp, synthetic construct
  source 1..20: mol_type = other DNA
agtctaagtaaaaggaagag

SEQ ID NO: 112322 - DNA, 20 bp, synthetic construct
  source 1..20: mol_type = other DNA
tagtctaagtaaaaggaaga

SEQ ID NO: 112323 - DNA, 20 bp, synthetic construct
  source 1..20: mol_type = other DNA
atagtctaagtaaaaggaag

SEQ ID NO: 112324 - DNA, 20 bp, synthetic construct
  source 1..20: mol_type = other DNA
aatagtctaagtaaaaggaa

SEQ ID NO: 112325 - DNA, 20 bp, synthetic construct
  source 1..20: mol_type = other DNA
gaatagtctaagtaaaagga

SEQ ID NO: 112326 - DNA, 20 bp, synthetic construct
  source 1..20: mol_type = other DNA
agaatagtctaagtaaaagg

SEQ ID NO: 112327 - DNA, 20 bp, synthetic construct
  source 1..20: mol_type = other DNA
gagaatagtctaagtaaaag

SEQ ID NO: 112328 - DNA, 20 bp, synthetic construct
  source 1..20: mol_type = other DNA
ggagaatagtctaagtaaaa

SEQ ID NO: 112329 - DNA, 20 bp, synthetic construct
  source 1..20: mol_type = other DNA
tggagaatagtctaagtaaa

SEQ ID NO: 112330 - DNA, 20 bp, synthetic construct
  source 1..20: mol_type = other DNA
atggagaatagtctaagtaa

SEQ ID NO: 112331 - DNA, 20 bp, synthetic construct
  source 1..20: mol_type = other DNA
gatggagaatagtctaagta

SEQ ID NO: 112332 - DNA, 20 bp, synthetic construct
  source 1..20: mol_type = other DNA
ggatggagaatagtctaagt

SEQ ID NO: 112333 - DNA, 20 bp, synthetic construct
  source 1..20: mol_type = other DNA
gggatggagaatagtctaag

SEQ ID NO: 112334 - DNA, 20 bp, synthetic construct
  source 1..20: mol_type = other DNA
tgggatggagaatagtctaa

SEQ ID NO: 112335 - DNA, 20 bp, synthetic construct
  source 1..20: mol_type = other DNA
ttgggatggagaatagtcta

SEQ ID NO: 112336 - DNA, 20 bp, synthetic construct
  source 1..20: mol_type = other DNA
gttgggatggagaatagtct

SEQ ID NO: 112337 - DNA, 20 bp, synthetic construct
  source 1..20: mol_type = other DNA
tgttgggatggagaatagtc

SEQ ID NO: 112338 - DNA, 20 bp, synthetic construct
  source 1..20: mol_type = other DNA
gtgttgggatggagaatagt

SEQ ID NO: 112339 - DNA, 20 bp, synthetic construct
  source 1..20: mol_type = other DNA
ggtgttgggatggagaatag

SEQ ID NO: 112340 - DNA, 20 bp, synthetic construct
  source 1..20: mol_type = other DNA
aggtgttgggatggagaata

SEQ ID NO: 112341 - DNA, 20 bp, synthetic construct
  source 1..20: mol_type = other DNA
aaggtgttgggatggagaat

SEQ ID NO: 112342 - DNA, 20 bp, synthetic construct
  source 1..20: mol_type = other DNA
aaaggtgttgggatggagaa

SEQ ID NO: 112343 - DNA, 20 bp, synthetic construct
  source 1..20: mol_type = other DNA
gaaaggtgttgggatggaga

SEQ ID NO: 112344 - DNA, 20 bp, synthetic construct
  source 1..20: mol_type = other DNA
ggaaaggtgttgggatggag

SEQ ID NO: 112345 - DNA, 20 bp, synthetic construct
  source 1..20: mol_type = other DNA
aggaaaggtgttgggatgga

SEQ ID NO: 112346 - DNA, 20 bp, synthetic construct
  source 1..20: mol_type = other DNA
taggaaaggtgttgggatgg

SEQ ID NO: 112347 - DNA, 20 bp, synthetic construct
  source 1..20: mol_type = other DNA
ttaggaaaggtgttgggatg

SEQ ID NO: 112348 - DNA, 20 bp, synthetic construct
  source 1..20: mol_type = other DNA
tttaggaaaggtgttgggat

SEQ ID NO: 112349 - DNA, 20 bp, synthetic construct
  source 1..20: mol_type = other DNA
gtttaggaaaggtgttggga

SEQ ID NO: 112350 - DNA, 20 bp, synthetic construct
  source 1..20: mol_type = other DNA
agtttaggaaaggtgttggg

SEQ ID NO: 112351 - DNA, 20 bp, synthetic construct
  source 1..20: mol_type = other DNA
aagtttaggaaaggtgttgg

SEQ ID NO: 112352 - DNA, 20 bp, synthetic construct
  source 1..20: mol_type = other DNA
gaagtttaggaaaggtgttg

SEQ ID NO: 112353 - DNA, 20 bp, synthetic construct
  source 1..20: mol_type = other DNA
agaagtttaggaaaggtgtt

SEQ ID NO: 112354 - DNA, 20 bp, synthetic construct
  source 1..20: mol_type = other DNA
aagaagtttaggaaaggtgt

SEQ ID NO: 112355 - DNA, 20 bp, synthetic construct
  source 1..20: mol_type = other DNA
aaagaagtttaggaaaggtg

SEQ ID NO: 112356 - DNA, 20 bp, synthetic construct
  source 1..20: mol_type = other DNA
gaaagaagtttaggaaaggt

SEQ ID NO: 112357 - DNA, 20 bp, synthetic construct
  source 1..20: mol_type = other DNA
tgaaagaagtttaggaaagg

SEQ ID NO: 112358 - DNA, 20 bp, synthetic construct
  source 1..20: mol_type = other DNA
gtgaaagaagtttaggaaag

SEQ ID NO: 112359 - DNA, 20 bp, synthetic construct
  source 1..20: mol_type = other DNA
tgtgaaagaagtttaggaaa

SEQ ID NO: 112360 - DNA, 20 bp, synthetic construct
  source 1..20: mol_type = other DNA
gtgtgaaagaagtttaggaa

SEQ ID NO: 112361 - DNA, 20 bp, synthetic construct
  source 1..20: mol_type = other DNA
ggtgtgaaagaagtttagga

SEQ ID NO: 112362 - DNA, 20 bp, synthetic construct
  source 1..20: mol_type = other DNA
aggtgtgaaagaagtttagg

SEQ ID NO: 112363 - DNA, 20 bp, synthetic construct
  source 1..20: mol_type = other DNA
aaggtgtgaaagaagtttag

SEQ ID NO: 112364 - DNA, 20 bp, synthetic construct
  source 1..20: mol_type = other DNA
taaggtgtgaaagaagttta

SEQ ID NO: 112365 - DNA, 20 bp, synthetic construct
  source 1..20: mol_type = other DNA
ctaaggtgtgaaagaagttt

SEQ ID NO: 112366 - DNA, 20 bp, synthetic construct
  source 1..20: mol_type = other DNA
tctaaggtgtgaaagaagtt

SEQ ID NO: 112367 - DNA, 20 bp, synthetic construct
  source 1..20: mol_type = other DNA
gtctaaggtgtgaaagaagt

SEQ ID NO: 112368 - DNA, 20 bp, synthetic construct
  source 1..20: mol_type = other DNA
agtctaaggtgtgaaagaag

SEQ ID NO: 112369 - DNA, 20 bp, synthetic construct
  source 1..20: mol_type = other DNA
tagtctaaggtgtgaaagaa

SEQ ID NO: 112370 - DNA, 20 bp, synthetic construct
  source 1..20: mol_type = other DNA
ctagtctaaggtgtgaaaga

SEQ ID NO: 112371 - DNA, 20 bp, synthetic construct
  source 1..20: mol_type = other DNA
gctagtctaaggtgtgaaag

SEQ ID NO: 112372 - DNA, 20 bp, synthetic construct
  source 1..20: mol_type = other DNA
agctagtctaaggtgtgaaa

SEQ ID NO: 112373 - DNA, 20 bp, synthetic construct
  source 1..20: mol_type = other DNA
cagctagtctaaggtgtgaa

SEQ ID NO: 112374 - DNA, 20 bp, synthetic construct
  source 1..20: mol_type = other DNA
tcagctagtctaaggtgtga

SEQ ID NO: 112375 - DNA, 20 bp, synthetic construct
  source 1..20: mol_type = other DNA
gtcagctagtctaaggtgtg

SEQ ID NO: 112376 - DNA, 20 bp, synthetic construct
  source 1..20: mol_type = other DNA
tgtcagctagtctaaggtgt

SEQ ID NO: 112377 - DNA, 20 bp, synthetic construct
  source 1..20: mol_type = other DNA
gtgtcagctagtctaaggtg

SEQ ID NO: 112378 - DNA, 20 bp, synthetic construct
  source 1..20: mol_type = other DNA
agtgtcagctagtctaaggt

SEQ ID NO: 112379 - DNA, 20 bp, synthetic construct
  source 1..20: mol_type = other DNA
aagtgtcagctagtctaagg

SEQ ID NO: 112380 - DNA, 20 bp, synthetic construct
  source 1..20: mol_type = other DNA
aaagtgtcagctagtctaag

SEQ ID NO: 112381 - DNA, 20 bp, synthetic construct
  source 1..20: mol_type = other DNA
taaagtgtcagctagtctaa

SEQ ID NO: 112382 - DNA, 20 bp, synthetic construct
  source 1..20: mol_type = other DNA
gtaaagtgtcagctagtcta

SEQ ID NO: 112383 - DNA, 20 bp, synthetic construct
  source 1..20: mol_type = other DNA
agtaaagtgtcagctagtct

SEQ ID NO: 112384 - DNA, 20 bp, synthetic construct
  source 1..20: mol_type = other DNA
cagtaaagtgtcagctagtc

SEQ ID NO: 112385 - DNA, 20 bp, synthetic construct
  source 1..20: mol_type = other DNA
tcagtaaagtgtcagctagt

SEQ ID NO: 112386 - DNA, 20 bp, synthetic construct
  source 1..20: mol_type = other DNA
ctcagtaaagtgtcagctag

SEQ ID NO: 112387 - DNA, 20 bp, synthetic construct
  source 1..20: mol_type = other DNA
tctcagtaaagtgtcagcta

SEQ ID NO: 112388 - DNA, 20 bp, synthetic construct
  source 1..20: mol_type = other DNA
ttctcagtaaagtgtcagct

SEQ ID NO: 112389 - DNA, 20 bp, synthetic construct
  source 1..20: mol_type = other DNA
tttctcagtaaagtgtcagc

SEQ ID NO: 112390 - DNA, 20 bp, synthetic construct
  source 1..20: mol_type = other DNA
gtttctcagtaaagtgtcag

SEQ ID NO: 112391 - DNA, 20 bp, synthetic construct
  source 1..20: mol_type = other DNA
ggtttctcagtaaagtgtca

SEQ ID NO: 112392 - DNA, 20 bp, synthetic construct
  source 1..20: mol_type = other DNA
aggtttctcagtaaagtgtc

SEQ ID NO: 112393 - DNA, 20 bp, synthetic construct
  source 1..20: mol_type = other DNA
aaggtttctcagtaaagtgt

SEQ ID NO: 112394 - DNA, 20 bp, synthetic construct
  source 1..20: mol_type = other DNA
aaaggtttctcagtaaagtg

SEQ ID NO: 112395 - DNA, 20 bp, synthetic construct
  source 1..20: mol_type = other DNA
gaaaggtttctcagtaaagt

SEQ ID NO: 112396 - DNA, 20 bp, synthetic construct
  source 1..20: mol_type = other DNA
agaaaggtttctcagtaaag

SEQ ID NO: 112397 - DNA, 20 bp, synthetic construct
  source 1..20: mol_type = other DNA
aagaaaggtttctcagtaaa

SEQ ID NO: 112398 - DNA, 20 bp, synthetic construct
  source 1..20: mol_type = other DNA
aaagaaaggtttctcagtaa

SEQ ID NO: 112399 - DNA, 20 bp, synthetic construct
  source 1..20: mol_type = other DNA
aaaagaaaggtttctcagta

SEQ ID NO: 112400 - DNA, 20 bp, synthetic construct
  source 1..20: mol_type = other DNA
aaaaagaaaggtttctcagt

SEQ ID NO: 112401 - DNA, 20 bp, synthetic construct
  source 1..20: mol_type = other DNA
aaaaaagaaaggtttctcag

SEQ ID NO: 112402 - DNA, 20 bp, synthetic construct
  source 1..20: mol_type = other DNA
taaaaaagaaaggtttctca

SEQ ID NO: 112403 - DNA, 20 bp, synthetic construct
  source 1..20: mol_type = other DNA
ataaaaaagaaaggtttctc

SEQ ID NO: 112404 - DNA, 20 bp, synthetic construct
  source 1..20: mol_type = other DNA
tataaaaaagaaaggtttct

SEQ ID NO: 112405 - DNA, 20 bp, synthetic construct
  source 1..20: mol_type = other DNA
ctataaaaaagaaaggtttc

SEQ ID NO: 112406 - DNA, 20 bp, synthetic construct
  source 1..20: mol_type = other DNA
cctataaaaaagaaaggttt

SEQ ID NO: 112407 - DNA, 20 bp, synthetic construct
  source 1..20: mol_type = other DNA
acctataaaaaagaaaggtt

SEQ ID NO: 112408 - DNA, 20 bp, synthetic construct
  source 1..20: mol_type = other DNA
aacctataaaaaagaaaggt

SEQ ID NO: 112409 - DNA, 20 bp, synthetic construct
  source 1..20: mol_type = other DNA
caacctataaaaaagaaagg

SEQ ID NO: 112410 - DNA, 20 bp, synthetic construct
  source 1..20: mol_type = other DNA
gcaacctataaaaaagaaag

SEQ ID NO: 112411 - DNA, 20 bp, synthetic construct
  source 1..20: mol_type = other DNA
agcaacctataaaaaagaaa

SEQ ID NO: 112412 - DNA, 20 bp, synthetic construct
  source 1..20: mol_type = other DNA
aagcaacctataaaaaagaa

SEQ ID NO: 112413 - DNA, 20 bp, synthetic construct
  source 1..20: mol_type = other DNA
aaagcaacctataaaaaaga

SEQ ID NO: 112414 - DNA, 20 bp, synthetic construct
  source 1..20: mol_type = other DNA
aaaagcaacctataaaaaag

SEQ ID NO: 112415 - DNA, 20 bp, synthetic construct
  source 1..20: mol_type = other DNA
aaaaagcaacctataaaaaa

SEQ ID NO: 112416 - DNA, 20 bp, synthetic construct
  source 1..20: mol_type = other DNA
gaaaaagcaacctataaaaa

SEQ ID NO: 112417 - DNA, 20 bp, synthetic construct
  source 1..20: mol_type = other DNA
agaaaaagcaacctataaaa

SEQ ID NO: 112418 - DNA, 20 bp, synthetic construct
  source 1..20: mol_type = other DNA
tagaaaaagcaacctataaa

SEQ ID NO: 112419 - DNA, 20 bp, synthetic construct
  source 1..20: mol_type = other DNA
atagaaaaagcaacctataa

SEQ ID NO: 112420 - DNA, 20 bp, synthetic construct
  source 1..20: mol_type = other DNA
tatagaaaaagcaacctata

SEQ ID NO: 112421 - DNA, 20 bp, synthetic construct
  source 1..20: mol_type = other DNA
ctatagaaaaagcaacctat

SEQ ID NO: 112422 - DNA, 20 bp, synthetic construct
  source 1..20: mol_type = other DNA
tctatagaaaaagcaaccta

SEQ ID NO: 112423 - DNA, 20 bp, synthetic construct
  source 1..20: mol_type = other DNA
gtctatagaaaaagcaacct

SEQ ID NO: 112424 - DNA, 20 bp, synthetic construct
  source 1..20: mol_type = other DNA
agtctatagaaaaagcaacc

SEQ ID NO: 112425 - DNA, 20 bp, synthetic construct
  source 1..20: mol_type = other DNA
gagtctatagaaaaagcaac

SEQ ID NO: 112426 - DNA, 20 bp, synthetic construct
  source 1..20: mol_type = other DNA
agagtctatagaaaaagcaa

SEQ ID NO: 112427 - DNA, 20 bp, synthetic construct
  source 1..20: mol_type = other DNA
gagagtctatagaaaaagca

SEQ ID NO: 112428 - DNA, 20 bp, synthetic construct
  source 1..20: mol_type = other DNA
agagagtctatagaaaaagc

SEQ ID NO: 112429 - DNA, 20 bp, synthetic construct
  source 1..20: mol_type = other DNA
aagagagtctatagaaaaag

SEQ ID NO: 112430 - DNA, 20 bp, synthetic construct
  source 1..20: mol_type = other DNA
taagagagtctatagaaaaa

SEQ ID NO: 112431 - DNA, 20 bp, synthetic construct
  source 1..20: mol_type = other DNA
ctaagagagtctatagaaaa

SEQ ID NO: 112432 - DNA, 20 bp, synthetic construct
  source 1..20: mol_type = other DNA
gctaagagagtctatagaaa

SEQ ID NO: 112433 - DNA, 20 bp, synthetic construct
  source 1..20: mol_type = other DNA
tgctaagagagtctatagaa

SEQ ID NO: 112434 - DNA, 20 bp, synthetic construct
  source 1..20: mol_type = other DNA
atgctaagagagtctataga

SEQ ID NO: 112435 - DNA, 20 bp, synthetic construct
  source 1..20: mol_type = other DNA
aatgctaagagagtctatag

SEQ ID NO: 112436 - DNA, 20 bp, synthetic construct
  source 1..20: mol_type = other DNA
aaatgctaagagagtctata

SEQ ID NO: 112437 - DNA, 20 bp, synthetic construct
  source 1..20: mol_type = other DNA
taaatgctaagagagtctat

SEQ ID NO: 112438 - DNA, 20 bp, synthetic construct
  source 1..20: mol_type = other DNA
gtaaatgctaagagagtcta

SEQ ID NO: 112439 - DNA, 20 bp, synthetic construct
  source 1..20: mol_type = other DNA
agtaaatgctaagagagtct

SEQ ID NO: 112440 - DNA, 20 bp, synthetic construct
  source 1..20: mol_type = other DNA
gagtaaatgctaagagagtc

SEQ ID NO: 112441 - DNA, 20 bp, synthetic construct
  source 1..20: mol_type = other DNA
tgagtaaatgctaagagagt

SEQ ID NO: 112442 - DNA, 20 bp, synthetic construct
  source 1..20: mol_type = other DNA
atgagtaaatgctaagagag

SEQ ID NO: 112443 - DNA, 20 bp, synthetic construct
  source 1..20: mol_type = other DNA
aatgagtaaatgctaagaga

SEQ ID NO: 112444 - DNA, 20 bp, synthetic construct
  source 1..20: mol_type = other DNA
aaatgagtaaatgctaagag

SEQ ID NO: 112445 - DNA, 20 bp, synthetic construct
  source 1..20: mol_type = other DNA
aaaatgagtaaatgctaaga

SEQ ID NO: 112446 - DNA, 20 bp, synthetic construct
  source 1..20: mol_type = other DNA
taaaatgagtaaatgctaag

SEQ ID NO: 112447 - DNA, 20 bp, synthetic construct
  source 1..20: mol_type = other DNA
ataaaatgagtaaatgctaa

SEQ ID NO: 112448 - DNA, 20 bp, synthetic construct
  source 1..20: mol_type = other DNA
aataaaatgagtaaatgcta

SEQ ID NO: 112449 - DNA, 20 bp, synthetic construct
  source 1..20: mol_type = other DNA
caataaaatgagtaaatgct

SEQ ID NO: 112450 - DNA, 20 bp, synthetic construct
  source 1..20: mol_type = other DNA
acaataaaatgagtaaatgc

SEQ ID NO: 112451 - DNA, 20 bp, synthetic construct
  source 1..20: mol_type = other DNA
cacaataaaatgagtaaatg

SEQ ID NO: 112452 - DNA, 20 bp, synthetic construct
  source 1..20: mol_type = other DNA
tcacaataaaatgagtaaat

SEQ ID NO: 112453 - DNA, 20 bp, synthetic construct
  source 1..20: mol_type = other DNA
ttcacaataaaatgagtaaa

SEQ ID NO: 112454 - DNA, 20 bp, synthetic construct
  source 1..20: mol_type = other DNA
cttcacaataaaatgagtaa

SEQ ID NO: 112455 - DNA, 20 bp, synthetic construct
  source 1..20: mol_type = other DNA
acttcacaataaaatgagta

SEQ ID NO: 112456 - DNA, 20 bp, synthetic construct
  source 1..20: mol_type = other DNA
cacttcacaataaaatgagt

SEQ ID NO: 112457 - DNA, 20 bp, synthetic construct
  source 1..20: mol_type = other DNA
acacttcacaataaaatgag

SEQ ID NO: 112458 - DNA, 20 bp, synthetic construct
  source 1..20: mol_type = other DNA
gacacttcacaataaaatga

SEQ ID NO: 112459 - DNA, 20 bp, synthetic construct
  source 1..20: mol_type = other DNA
agacacttcacaataaaatg

SEQ ID NO: 112460 - DNA, 20 bp, synthetic construct
  source 1..20: mol_type = other DNA
cagacacttcacaataaaat

SEQ ID NO: 112461 - DNA, 20 bp, synthetic construct
  source 1..20: mol_type = other DNA
tcagacacttcacaataaaa

SEQ ID NO: 112462 - DNA, 20 bp, synthetic construct
  source 1..20: mol_type = other DNA
atcagacacttcacaataaa

SEQ ID NO: 112463 - DNA, 20 bp, synthetic construct
  source 1..20: mol_type = other DNA
gatcagacacttcacaataa

SEQ ID NO: 112464 - DNA, 20 bp, synthetic construct
  source 1..20: mol_type = other DNA
agatcagacacttcacaata

SEQ ID NO: 112465 - DNA, 20 bp, synthetic construct
  source 1..20: mol_type = other DNA
aagatcagacacttcacaat

SEQ ID NO: 112466 - DNA, 20 bp, synthetic construct
  source 1..20: mol_type = other DNA
taagatcagacacttcacaa

SEQ ID NO: 112467 - DNA, 20 bp, synthetic construct
  source 1..20: mol_type = other DNA
ataagatcagacacttcaca

SEQ ID NO: 112468 - DNA, 20 bp, synthetic construct
  source 1..20: mol_type = other DNA
aataagatcagacacttcac

SEQ ID NO: 112469 - DNA, 20 bp, synthetic construct
  source 1..20: mol_type = other DNA
aaataagatcagacacttca

SEQ ID NO: 112470 - DNA, 20 bp, synthetic construct
  source 1..20: mol_type = other DNA
taaataagatcagacacttc

SEQ ID NO: 112471 - DNA, 20 bp, synthetic construct
  source 1..20: mol_type = other DNA
ttaaataagatcagacactt

SEQ ID NO: 112472 - DNA, 20 bp, synthetic construct
  source 1..20: mol_type = other DNA
tttaaataagatcagacact

SEQ ID NO: 112473 - DNA, 20 bp, synthetic construct
  source 1..20: mol_type = other DNA
atttaaataagatcagacac

SEQ ID NO: 112474 - DNA, 20 bp, synthetic construct
  source 1..20: mol_type = other DNA
catttaaataagatcagaca

SEQ ID NO: 112475 - DNA, 20 bp, synthetic construct
  source 1..20: mol_type = other DNA
tcatttaaataagatcagac

SEQ ID NO: 112476 - DNA, 20 bp, synthetic construct
  source 1..20: mol_type = other DNA
gtcatttaaataagatcaga

SEQ ID NO: 112477 - DNA, 20 bp, synthetic construct
  source 1..20: mol_type = other DNA
tgtcatttaaataagatcag

SEQ ID NO: 112478 - DNA, 20 bp, synthetic construct
  source 1..20: mol_type = other DNA
ttgtcatttaaataagatca

SEQ ID NO: 112479 - DNA, 20 bp, synthetic construct
  source 1..20: mol_type = other DNA
cttgtcatttaaataagatc

SEQ ID NO: 112480 - DNA, 20 bp, synthetic construct
  source 1..20: mol_type = other DNA
acttgtcatttaaataagat

SEQ ID NO: 112481 - DNA, 20 bp, synthetic construct
  source 1..20: mol_type = other DNA
tacttgtcatttaaataaga

SEQ ID NO: 112482 - DNA, 20 bp, synthetic construct
  source 1..20: mol_type = other DNA
atacttgtcatttaaataag

SEQ ID NO: 112483 - DNA, 20 bp, synthetic construct
  source 1..20: mol_type = other DNA
tatacttgtcatttaaataa

SEQ ID NO: 112484 - DNA, 20 bp, synthetic construct
  source 1..20: mol_type = other DNA
ttatacttgtcatttaaata

SEQ ID NO: 112485 - DNA, 20 bp, synthetic construct
  source 1..20: mol_type = other DNA
cttatacttgtcatttaaat

SEQ ID NO: 112486 - DNA, 20 bp, synthetic construct
  source 1..20: mol_type = other DNA
tcttatacttgtcatttaaa

SEQ ID NO: 112487 - DNA, 20 bp, synthetic construct
  source 1..20: mol_type = other DNA
ctcttatacttgtcatttaa

SEQ ID NO: 112488 - DNA, 20 bp, synthetic construct
  source 1..20: mol_type = other DNA
cctcttatacttgtcattta

SEQ ID NO: 112489 - DNA, 20 bp, synthetic construct
  source 1..20: mol_type = other DNA
tcctcttatacttgtcattt

SEQ ID NO: 112490 - DNA, 20 bp, synthetic construct
  source 1..20: mol_type = other DNA
atcctcttatacttgtcatt

SEQ ID NO: 112491 - DNA, 20 bp, synthetic construct
  source 1..20: mol_type = other DNA
tatcctcttatacttgtcat

SEQ ID NO: 112492 - DNA, 20 bp, synthetic construct
  source 1..20: mol_type = other DNA
ctatcctcttatacttgtca

SEQ ID NO: 112493 - DNA, 20 bp, synthetic construct
  source 1..20: mol_type = other DNA
tctatcctcttatacttgtc

SEQ ID NO: 112494 - DNA, 20 bp, synthetic construct
  source 1..20: mol_type = other DNA
ttctatcctcttatacttgt

SEQ ID NO: 112495 - DNA, 20 bp, synthetic construct
  source 1..20: mol_type = other DNA
tttctatcctcttatacttg

SEQ ID NO: 112496 - DNA, 20 bp, synthetic construct
  source 1..20: mol_type = other DNA
gtttctatcctcttatactt

SEQ ID NO: 112497 - DNA, 20 bp, synthetic construct
  source 1..20: mol_type = other DNA
agtttctatcctcttatact

SEQ ID NO: 112498 - DNA, 20 bp, synthetic construct
  source 1..20: mol_type = other DNA
tagtttctatcctcttatac

SEQ ID NO: 112499 - DNA, 20 bp, synthetic construct
  source 1..20: mol_type = other DNA
atagtttctatcctcttata

SEQ ID NO: 112500 - DNA, 20 bp, synthetic construct
  source 1..20: mol_type = other DNA
aatagtttctatcctcttat

SEQ ID NO: 112501 - DNA, 20 bp, synthetic construct
  source 1..20: mol_type = other DNA
aaatagtttctatcctctta

SEQ ID NO: 112502 - DNA, 20 bp, synthetic construct
  source 1..20: mol_type = other DNA
gaaatagtttctatcctctt

SEQ ID NO: 112503 - DNA, 20 bp, synthetic construct
  source 1..20: mol_type = other DNA
tgaaatagtttctatcctct

SEQ ID NO: 112504 - DNA, 20 bp, synthetic construct
  source 1..20: mol_type = other DNA
atgaaatagtttctatcctc

SEQ ID NO: 112505 - DNA, 20 bp, synthetic construct
  source 1..20: mol_type = other DNA
tatgaaatagtttctatcct

SEQ ID NO: 112506 - DNA, 20 bp, synthetic construct
  source 1..20: mol_type = other DNA
atatgaaatagtttctatcc

SEQ ID NO: 112507 - DNA, 20 bp, synthetic construct
  source 1..20: mol_type = other DNA
aatatgaaatagtttctatc

SEQ ID NO: 112508 - DNA, 20 bp, synthetic construct
  source 1..20: mol_type = other DNA
aaatatgaaatagtttctat

SEQ ID NO: 112509 - DNA, 20 bp, synthetic construct
  source 1..20: mol_type = other DNA
aaaatatgaaatagtttcta

SEQ ID NO: 112510 - DNA, 20 bp, synthetic construct
  source 1..20: mol_type = other DNA
aaaaatatgaaatagtttct

SEQ ID NO: 112511 - DNA, 20 bp, synthetic construct
  source 1..20: mol_type = other DNA
gaaaaatatgaaatagtttc

SEQ ID NO: 112512 - DNA, 20 bp, synthetic construct
  source 1..20: mol_type = other DNA
agaaaaatatgaaatagttt

SEQ ID NO: 112513 - DNA, 20 bp, synthetic construct
  source 1..20: mol_type = other DNA
gagaaaaatatgaaatagtt

SEQ ID NO: 112514 - DNA, 20 bp, synthetic construct
  source 1..20: mol_type = other DNA
tgagaaaaatatgaaatagt

SEQ ID NO: 112515 - DNA, 20 bp, synthetic construct
  source 1..20: mol_type = other DNA
gtgagaaaaatatgaaatag

SEQ ID NO: 112516 - DNA, 20 bp, synthetic construct
  source 1..20: mol_type = other DNA
ggtgagaaaaatatgaaata

SEQ ID NO: 112517 - DNA, 20 bp, synthetic construct
  source 1..20: mol_type = other DNA
gggtgagaaaaatatgaaat

SEQ ID NO: 112518 - DNA, 20 bp, synthetic construct
  source 1..20: mol_type = other DNA
tgggtgagaaaaatatgaaa

SEQ ID NO: 112519 - DNA, 20 bp, synthetic construct
  source 1..20: mol_type = other DNA
ctgggtgagaaaaatatgaa

SEQ ID NO: 112520 - DNA, 20 bp, synthetic construct
  source 1..20: mol_type = other DNA
gctgggtgagaaaaatatga

SEQ ID NO: 112521 - DNA, 20 bp, synthetic construct
  source 1..20: mol_type = other DNA
tgctgggtgagaaaaatatg

SEQ ID NO: 112522 - DNA, 20 bp, synthetic construct
  source 1..20: mol_type = other DNA
ctgctgggtgagaaaaatat

SEQ ID NO: 112523 - DNA, 20 bp, synthetic construct
  source 1..20: mol_type = other DNA
cctgctgggtgagaaaaata

SEQ ID NO: 112524 - DNA, 20 bp, synthetic construct
  source 1..20: mol_type = other DNA
gcctgctgggtgagaaaaat

SEQ ID NO: 112525 - DNA, 20 bp, synthetic construct
  source 1..20: mol_type = other DNA
tgcctgctgggtgagaaaaa

SEQ ID NO: 112526 - DNA, 20 bp, synthetic construct
  source 1..20: mol_type = other DNA
gtgcctgctgggtgagaaaa

SEQ ID NO: 112527 - DNA, 20 bp, synthetic construct
  source 1..20: mol_type = other DNA
tgtgcctgctgggtgagaaa

SEQ ID NO: 112528 - DNA, 20 bp, synthetic construct
  source 1..20: mol_type = other DNA
ttgtgcctgctgggtgagaa

SEQ ID NO: 112529 - DNA, 20 bp, synthetic construct
  source 1..20: mol_type = other DNA
attgtgcctgctgggtgaga

SEQ ID NO: 112530 - DNA, 20 bp, synthetic construct
  source 1..20: mol_type = other DNA
aattgtgcctgctgggtgag

SEQ ID NO: 112531 - DNA, 20 bp, synthetic construct
  source 1..20: mol_type = other DNA
aaattgtgcctgctgggtga

SEQ ID NO: 112532 - DNA, 20 bp, synthetic construct
  source 1..20: mol_type = other DNA
gaaattgtgcctgctgggtg

SEQ ID NO: 112533 - DNA, 20 bp, synthetic construct
  source 1..20: mol_type = other DNA
agaaattgtgcctgctgggt

SEQ ID NO: 112534 - DNA, 20 bp, synthetic construct
  source 1..20: mol_type = other DNA
cagaaattgtgcctgctggg

SEQ ID NO: 112535 - DNA, 20 bp, synthetic construct
  source 1..20: mol_type = other DNA
tcagaaattgtgcctgctgg

SEQ ID NO: 112536 - DNA, 20 bp, synthetic construct
  source 1..20: mol_type = other DNA
gtcagaaattgtgcctgctg

SEQ ID NO: 112537 - DNA, 20 bp, synthetic construct
  source 1..20: mol_type = other DNA
tgtcagaaattgtgcctgct

SEQ ID NO: 112538 - DNA, 20 bp, synthetic construct
  source 1..20: mol_type = other DNA
atgtcagaaattgtgcctgc

SEQ ID NO: 112539 - DNA, 20 bp, synthetic construct
  source 1..20: mol_type = other DNA
catgtcagaaattgtgcctg

SEQ ID NO: 112540 - DNA, 20 bp, synthetic construct
  source 1..20: mol_type = other DNA
acatgtcagaaattgtgcct

SEQ ID NO: 112541 - DNA, 20 bp, synthetic construct
  source 1..20: mol_type = other DNA
cacatgtcagaaattgtgcc

SEQ ID NO: 112542 - DNA, 20 bp, synthetic construct
  source 1..20: mol_type = other DNA
ccacatgtcagaaattgtgc

SEQ ID NO: 112543 - DNA, 20 bp, synthetic construct
  source 1..20: mol_type = other DNA
accacatgtcagaaattgtg

SEQ ID NO: 112544 - DNA, 20 bp, synthetic construct
  source 1..20: mol_type = other DNA
taccacatgtcagaaattgt

SEQ ID NO: 112545 - DNA, 20 bp, synthetic construct
  source 1..20: mol_type = other DNA
ttaccacatgtcagaaattg

SEQ ID NO: 112546 - DNA, 20 bp, synthetic construct
  source 1..20: mol_type = other DNA
cttaccacatgtcagaaatt

SEQ ID NO: 112547 - DNA, 20 bp, synthetic construct
  source 1..20: mol_type = other DNA
gcttaccacatgtcagaaat

SEQ ID NO: 112548 - DNA, 20 bp, synthetic construct
  source 1..20: mol_type = other DNA
tgcttaccacatgtcagaaa

SEQ ID NO: 112549 - DNA, 20 bp, synthetic construct
  source 1..20: mol_type = other DNA
gtgcttaccacatgtcagaa

SEQ ID NO: 112550 - DNA, 20 bp, synthetic construct
  source 1..20: mol_type = other DNA
agtgcttaccacatgtcaga

SEQ ID NO: 112551 - DNA, 20 bp, synthetic construct
  source 1..20: mol_type = other DNA
gagtgcttaccacatgtcag

SEQ ID NO: 112552 - DNA, 20 bp, synthetic construct
  source 1..20: mol_type = other DNA
tgagtgcttaccacatgtca

SEQ ID NO: 112553 - DNA, 20 bp, synthetic construct
  source 1..20: mol_type = other DNA
ctgagtgcttaccacatgtc

SEQ ID NO: 112554 - DNA, 20 bp, synthetic construct
  source 1..20: mol_type = other DNA
actgagtgcttaccacatgt

SEQ ID NO: 112555 - DNA, 20 bp, synthetic construct
  source 1..20: mol_type = other DNA
tactgagtgcttaccacatg

SEQ ID NO: 112556 - DNA, 20 bp, synthetic construct
  source 1..20: mol_type = other DNA
ttactgagtgcttaccacat

SEQ ID NO: 112557 - DNA, 20 bp, synthetic construct
  source 1..20: mol_type = other DNA
tttactgagtgcttaccaca

SEQ ID NO: 112558 - DNA, 20 bp, synthetic construct
  source 1..20: mol_type = other DNA
atttactgagtgcttaccac

SEQ ID NO: 112559 - DNA, 20 bp, synthetic construct
  source 1..20: mol_type = other DNA
tatttactgagtgcttacca

SEQ ID NO: 112560 - DNA, 20 bp, synthetic construct
  source 1..20: mol_type = other DNA
atatttactgagtgcttacc

SEQ ID NO: 112561 - DNA, 20 bp, synthetic construct
  source 1..20: mol_type = other DNA
aatatttactgagtgcttac

SEQ ID NO: 112562 - DNA, 20 bp, synthetic construct
  source 1..20: mol_type = other DNA
caatatttactgagtgctta

SEQ ID NO: 112563 - DNA, 20 bp, synthetic construct
  source 1..20: mol_type = other DNA
tcaatatttactgagtgctt

SEQ ID NO: 112564 - DNA, 20 bp, synthetic construct
  source 1..20: mol_type = other DNA
ttcaatatttactgagtgct

SEQ ID NO: 112565 - DNA, 20 bp, synthetic construct
  source 1..20: mol_type = other DNA
gttcaatatttactgagtgc

SEQ ID NO: 112566 - DNA, 20 bp, synthetic construct
  source 1..20: mol_type = other DNA
agttcaatatttactgagtg

SEQ ID NO: 112567 - DNA, 20 bp, synthetic construct
  source 1..20: mol_type = other DNA
aagttcaatatttactgagt

SEQ ID NO: 112568 - DNA, 20 bp, synthetic construct
  source 1..20: mol_type = other DNA
aaagttcaatatttactgag

SEQ ID NO: 112569 - DNA, 20 bp, synthetic construct
  source 1..20: mol_type = other DNA
taaagttcaatatttactga

SEQ ID NO: 112570 - DNA, 20 bp, synthetic construct
  source 1..20: mol_type = other DNA
ctaaagttcaatatttactg

SEQ ID NO: 112571 - DNA, 20 bp, synthetic construct
  source 1..20: mol_type = other DNA
tctaaagttcaatatttact

SEQ ID NO: 112572 - DNA, 20 bp, synthetic construct
  source 1..20: mol_type = other DNA
ctctaaagttcaatatttac

SEQ ID NO: 112573 - DNA, 20 bp, synthetic construct
  source 1..20: mol_type = other DNA
cctctaaagttcaatattta

SEQ ID NO: 112574 - DNA, 20 bp, synthetic construct
  source 1..20: mol_type = other DNA
gcctctaaagttcaatattt

SEQ ID NO: 112575 - DNA, 20 bp, synthetic construct
  source 1..20: mol_type = other DNA
agcctctaaagttcaatatt

SEQ ID NO: 112576 - DNA, 20 bp, synthetic construct
  source 1..20: mol_type = other DNA
tagcctctaaagttcaatat

SEQ ID NO: 112577 - DNA, 20 bp, synthetic construct
  source 1..20: mol_type = other DNA
ctagcctctaaagttcaata

SEQ ID NO: 112578 - DNA, 20 bp, synthetic construct
  source 1..20: mol_type = other DNA
cctagcctctaaagttcaat

SEQ ID NO: 112579 - DNA, 20 bp, synthetic construct
  source 1..20: mol_type = other DNA
tcctagcctctaaagttcaa

SEQ ID NO: 112580 - DNA, 20 bp, synthetic construct
  source 1..20: mol_type = other DNA
gtcctagcctctaaagttca

SEQ ID NO: 112581 - DNA, 20 bp, synthetic construct
  source 1..20: mol_type = other DNA
tgtcctagcctctaaagttc

SEQ ID NO: 112582 - DNA, 20 bp, synthetic construct
  source 1..20: mol_type = other DNA
atgtcctagcctctaaagtt

SEQ ID NO: 112583 - DNA, 20 bp, synthetic construct
  source 1..20: mol_type = other DNA
aatgtcctagcctctaaagt

SEQ ID NO: 112584 - DNA, 20 bp, synthetic construct
  source 1..20: mol_type = other DNA
aaatgtcctagcctctaaag

SEQ ID NO: 112585 - DNA, 20 bp, synthetic construct
  source 1..20: mol_type = other DNA
caaatgtcctagcctctaaa

SEQ ID NO: 112586 - DNA, 20 bp, synthetic construct
  source 1..20: mol_type = other DNA
tcaaatgtcctagcctctaa

SEQ ID NO: 112587 - DNA, 20 bp, synthetic construct
  source 1..20: mol_type = other DNA
ctcaaatgtcctagcctcta

SEQ ID NO: 112588 - DNA, 20 bp, synthetic construct
  source 1..20: mol_type = other DNA
actcaaatgtcctagcctct

SEQ ID NO: 112589 - DNA, 20 bp, synthetic construct
  source 1..20: mol_type = other DNA
cactcaaatgtcctagcctc

SEQ ID NO: 112590 - DNA, 20 bp, synthetic construct
  source 1..20: mol_type = other DNA
gcactcaaatgtcctagcct

SEQ ID NO: 112591 - DNA, 20 bp, synthetic construct
  source 1..20: mol_type = other DNA
agcactcaaatgtcctagcc

SEQ ID NO: 112592 - DNA, 20 bp, synthetic construct
  source 1..20: mol_type = other DNA
aagcactcaaatgtcctagc

SEQ ID NO: 112593 - DNA, 20 bp, synthetic construct
  source 1..20: mol_type = other DNA
aaagcactcaaatgtcctag

SEQ ID NO: 112594 - DNA, 20 bp, synthetic construct
  source 1..20: mol_type = other DNA
caaagcactcaaatgtccta

SEQ ID NO: 112595 - DNA, 20 bp, synthetic construct
  source 1..20: mol_type = other DNA
ccaaagcactcaaatgtcct

SEQ ID NO: 112596 - DNA, 20 bp, synthetic construct
  source 1..20: mol_type = other DNA
accaaagcactcaaatgtcc

SEQ ID NO: 112597 - DNA, 20 bp, synthetic construct
  source 1..20: mol_type = other DNA
caccaaagcactcaaatgtc

SEQ ID NO: 112598 - DNA, 20 bp, synthetic construct
  source 1..20: mol_type = other DNA
tcaccaaagcactcaaatgt

SEQ ID NO: 112599 - DNA, 20 bp, synthetic construct
  source 1..20: mol_type = other DNA
gtcaccaaagcactcaaatg

SEQ ID NO: 112600 - DNA, 20 bp, synthetic construct
  source 1..20: mol_type = other DNA
agtcaccaaagcactcaaat

SEQ ID NO: 112601 - DNA, 20 bp, synthetic construct
  source 1..20: mol_type = other DNA
cagtcaccaaagcactcaaa

SEQ ID NO: 112602 - DNA, 20 bp, synthetic construct
  source 1..20: mol_type = other DNA
acagtcaccaaagcactcaa

SEQ ID NO: 112603 - DNA, 20 bp, synthetic construct
  source 1..20: mol_type = other DNA
cacagtcaccaaagcactca

SEQ ID NO: 112604 - DNA, 20 bp, synthetic construct
  source 1..20: mol_type = other DNA
ccacagtcaccaaagcactc

SEQ ID NO: 112605 - DNA, 20 bp, synthetic construct
  source 1..20: mol_type = other DNA
accacagtcaccaaagcact

SEQ ID NO: 112606 - DNA, 20 bp, synthetic construct
  source 1..20: mol_type = other DNA
aaccacagtcaccaaagcac

SEQ ID NO: 112607 - DNA, 20 bp, synthetic construct
  source 1..20: mol_type = other DNA
caaccacagtcaccaaagca

SEQ ID NO: 112608 - DNA, 20 bp, synthetic construct
  source 1..20: mol_type = other DNA
acaaccacagtcaccaaagc

SEQ ID NO: 112609 - DNA, 20 bp, synthetic construct
  source 1..20: mol_type = other DNA
cacaaccacagtcaccaaag

SEQ ID NO: 112610 - DNA, 20 bp, synthetic construct
  source 1..20: mol_type = other DNA
gcacaaccacagtcaccaaa

SEQ ID NO: 112611 - DNA, 20 bp, synthetic construct
  source 1..20: mol_type = other DNA
agcacaaccacagtcaccaa

SEQ ID NO: 112612 - DNA, 20 bp, synthetic construct
  source 1..20: mol_type = other DNA
tagcacaaccacagtcacca

SEQ ID NO: 112613 - DNA, 20 bp, synthetic construct
  source 1..20: mol_type = other DNA
atagcacaaccacagtcacc

SEQ ID NO: 112614 - DNA, 20 bp, synthetic construct
  source 1..20: mol_type = other DNA
tatagcacaaccacagtcac

SEQ ID NO: 112615 - DNA, 20 bp, synthetic construct
  source 1..20: mol_type = other DNA
atatagcacaaccacagtca

SEQ ID NO: 112616 - DNA, 20 bp, synthetic construct
  source 1..20: mol_type = other DNA
tatatagcacaaccacagtc

SEQ ID NO: 112617 - DNA, 20 bp, synthetic construct
  source 1..20: mol_type = other DNA
ctatatagcacaaccacagt

SEQ ID NO: 112618 - DNA, 20 bp, synthetic construct
  source 1..20: mol_type = other DNA
cctatatagcacaaccacag

SEQ ID NO: 112619 - DNA, 20 bp, synthetic construct
  source 1..20: mol_type = other DNA
acctatatagcacaaccaca

SEQ ID NO: 112620 - DNA, 20 bp, synthetic construct
  source 1..20: mol_type = other DNA
tacctatatagcacaaccac

SEQ ID NO: 112621 - DNA, 20 bp, synthetic construct
  source 1..20: mol_type = other DNA
gtacctatatagcacaacca

SEQ ID NO: 112622 - DNA, 20 bp, synthetic construct
  source 1..20: mol_type = other DNA
agtacctatatagcacaacc

SEQ ID NO: 112623 - DNA, 20 bp, synthetic construct
  source 1..20: mol_type = other DNA
gagtacctatatagcacaac

SEQ ID NO: 112624 - DNA, 20 bp, synthetic construct
  source 1..20: mol_type = other DNA
agagtacctatatagcacaa

SEQ ID NO: 112625 - DNA, 20 bp, synthetic construct
  source 1..20: mol_type = other DNA
cagagtacctatatagcaca

SEQ ID NO: 112626 - DNA, 20 bp, synthetic construct
  source 1..20: mol_type = other DNA
acagagtacctatatagcac

SEQ ID NO: 112627 - DNA, 20 bp, synthetic construct
  source 1..20: mol_type = other DNA
aacagagtacctatatagca

SEQ ID NO: 112628 - DNA, 20 bp, synthetic construct
  source 1..20: mol_type = other DNA
taacagagtacctatatagc

SEQ ID NO: 112629 - DNA, 20 bp, synthetic construct
  source 1..20: mol_type = other DNA
ataacagagtacctatatag

SEQ ID NO: 112630 - DNA, 20 bp, synthetic construct
  source 1..20: mol_type = other DNA
aataacagagtacctatata

SEQ ID NO: 112631 - DNA, 20 bp, synthetic construct
  source 1..20: mol_type = other DNA
caataacagagtacctatat

SEQ ID NO: 112632 - DNA, 20 bp, synthetic construct
  source 1..20: mol_type = other DNA
acaataacagagtacctata

SEQ ID NO: 112633 - DNA, 20 bp, synthetic construct
  source 1..20: mol_type = other DNA
aacaataacagagtacctat

SEQ ID NO: 112634 - DNA, 20 bp, synthetic construct
  source 1..20: mol_type = other DNA
taacaataacagagtaccta

SEQ ID NO: 112635 - DNA, 20 bp, synthetic construct
  source 1..20: mol_type = other DNA
ctaacaataacagagtacct

SEQ ID NO: 112636 - DNA, 20 bp, synthetic construct
  source 1..20: mol_type = other DNA
actaacaataacagagtacc

SEQ ID NO: 112637 - DNA, 20 bp, synthetic construct
  source 1..20: mol_type = other DNA
aactaacaataacagagtac

SEQ ID NO: 112638 - DNA, 20 bp, synthetic construct
  source 1..20: mol_type = other DNA
aaactaacaataacagagta

SEQ ID NO: 112639 - DNA, 20 bp, synthetic construct
  source 1..20: mol_type = other DNA
taaactaacaataacagagt

SEQ ID NO: 112640 - DNA, 20 bp, synthetic construct
  source 1..20: mol_type = other DNA
ataaactaacaataacagag

SEQ ID NO: 112641 - DNA, 20 bp, synthetic construct
  source 1..20: mol_type = other DNA
tataaactaacaataacaga

SEQ ID NO: 112642 - DNA, 20 bp, synthetic construct
  source 1..20: mol_type = other DNA
ctataaactaacaataacag

SEQ ID NO: 112643 - DNA, 20 bp, synthetic construct
  source 1..20: mol_type = other DNA
actataaactaacaataaca

SEQ ID NO: 112644 - DNA, 20 bp, synthetic construct
  source 1..20: mol_type = other DNA
tactataaactaacaataac

SEQ ID NO: 112645 - DNA, 20 bp, synthetic construct
  source 1..20: mol_type = other DNA
ttactataaactaacaataa

SEQ ID NO: 112646 - DNA, 20 bp, synthetic construct
  source 1..20: mol_type = other DNA
tttactataaactaacaata

SEQ ID NO: 112647 - DNA, 20 bp, synthetic construct
  source 1..20: mol_type = other DNA
ttttactataaactaacaat

SEQ ID NO: 112648 - DNA, 20 bp, synthetic construct
  source 1..20: mol_type = other DNA
cttttactataaactaacaa

SEQ ID NO: 112649 - DNA, 20 bp, synthetic construct
  source 1..20: mol_type = other DNA
gcttttactataaactaaca

SEQ ID NO: 112650 - DNA, 20 bp, synthetic construct
  source 1..20: mol_type = other DNA
tgcttttactataaactaac

SEQ ID NO: 112651 - DNA, 20 bp, synthetic construct
  source 1..20: mol_type = other DNA
atgcttttactataaactaa

SEQ ID NO: 112652 - DNA, 20 bp, synthetic construct
  source 1..20: mol_type = other DNA
aatgcttttactataaacta

SEQ ID NO: 112653 - DNA, 20 bp, synthetic construct
  source 1..20: mol_type = other DNA
taatgcttttactataaact

SEQ ID NO: 112654 - DNA, 20 bp, synthetic construct
  source 1..20: mol_type = other DNA
gtaatgcttttactataaac

SEQ ID NO: 112655 - DNA, 20 bp, synthetic construct
  source 1..20: mol_type = other DNA
agtaatgcttttactataaa

SEQ ID NO: 112656 - DNA, 20 bp, synthetic construct
  source 1..20: mol_type = other DNA
gagtaatgcttttactataa

SEQ ID NO: 112657 - DNA, 20 bp, synthetic construct
  source 1..20: mol_type = other DNA
agagtaatgcttttactata

SEQ ID NO: 112658 - DNA, 20 bp, synthetic construct
  source 1..20: mol_type = other DNA
aagagtaatgcttttactat

SEQ ID NO: 112659 - DNA, 20 bp, synthetic construct
  source 1..20: mol_type = other DNA
taagagtaatgcttttacta

SEQ ID NO: 112660 - DNA, 20 bp, synthetic construct
  source 1..20: mol_type = other DNA
ttaagagtaatgcttttact

SEQ ID NO: 112661 - DNA, 20 bp, synthetic construct
  source 1..20: mol_type = other DNA
tttaagagtaatgcttttac

SEQ ID NO: 112662 - DNA, 20 bp, synthetic construct
  source 1..20: mol_type = other DNA
ctttaagagtaatgctttta

SEQ ID NO: 112663 - DNA, 20 bp, synthetic construct
  source 1..20: mol_type = other DNA
actttaagagtaatgctttt

SEQ ID NO: 112664 - DNA, 20 bp, synthetic construct
  source 1..20: mol_type = other DNA
tactttaagagtaatgcttt

SEQ ID NO: 112665 - DNA, 20 bp, synthetic construct
  source 1..20: mol_type = other DNA
atactttaagagtaatgctt

SEQ ID NO: 112666 - DNA, 20 bp, synthetic construct
  source 1..20: mol_type = other DNA
catactttaagagtaatgct

SEQ ID NO: 112667 - DNA, 20 bp, synthetic construct
  source 1..20: mol_type = other DNA
tcatactttaagagtaatgc

SEQ ID NO: 112668 - DNA, 20 bp, synthetic construct
  source 1..20: mol_type = other DNA
ttcatactttaagagtaatg

SEQ ID NO: 112669 - DNA, 20 bp, synthetic construct
  source 1..20: mol_type = other DNA
tttcatactttaagagtaat

SEQ ID NO: 112670 - DNA, 20 bp, synthetic construct
  source 1..20: mol_type = other DNA
ttttcatactttaagagtaa

SEQ ID NO: 112671 - DNA, 20 bp, synthetic construct
  source 1..20: mol_type = other DNA
tttttcatactttaagagta

SEQ ID NO: 112672 - DNA, 20 bp, synthetic construct
  source 1..20: mol_type = other DNA
ttttttcatactttaagagt

SEQ ID NO: 112673 - DNA, 20 bp, synthetic construct
  source 1..20: mol_type = other DNA
cttttttcatactttaagag

SEQ ID NO: 112674 - DNA, 20 bp, synthetic construct
  source 1..20: mol_type = other DNA
gcttttttcatactttaaga

SEQ ID NO: 112675 - DNA, 20 bp, synthetic construct
  source 1..20: mol_type = other DNA
ggcttttttcatactttaag

SEQ ID NO: 112676 - DNA, 20 bp, synthetic construct
  source 1..20: mol_type = other DNA
aggcttttttcatactttaa

SEQ ID NO: 112677 - DNA, 20 bp, synthetic construct
  source 1..20: mol_type = other DNA
aaggcttttttcatacttta

SEQ ID NO: 112678 - DNA, 20 bp, synthetic construct
  source 1..20: mol_type = other DNA
taaggcttttttcatacttt

SEQ ID NO: 112679 - DNA, 20 bp, synthetic construct
  source 1..20: mol_type = other DNA
ataaggcttttttcatactt

SEQ ID NO: 112680 - DNA, 20 bp, synthetic construct
  source 1..20: mol_type = other DNA
aataaggcttttttcatact

SEQ ID NO: 112681 - DNA, 20 bp, synthetic construct
  source 1..20: mol_type = other DNA
gaataaggcttttttcatac

SEQ ID NO: 112682 - DNA, 20 bp, synthetic construct
  source 1..20: mol_type = other DNA
tgaataaggcttttttcata

SEQ ID NO: 112683 - DNA, 20 bp, synthetic construct
  source 1..20: mol_type = other DNA
ctgaataaggcttttttcat

SEQ ID NO: 112684 - DNA, 20 bp, synthetic construct
  source 1..20: mol_type = other DNA
tctgaataaggcttttttca

SEQ ID NO: 112685 - DNA, 20 bp, synthetic construct
  source 1..20: mol_type = other DNA
ttctgaataaggcttttttc

SEQ ID NO: 112686 - DNA, 20 bp, synthetic construct
  source 1..20: mol_type = other DNA
gttctgaataaggctttttt

SEQ ID NO: 112687 - DNA, 20 bp, synthetic construct
  source 1..20: mol_type = other DNA
tgttctgaataaggcttttt

SEQ ID NO: 112688 - DNA, 20 bp, synthetic construct
  source 1..20: mol_type = other DNA
atgttctgaataaggctttt

SEQ ID NO: 112689 - DNA, 20 bp, synthetic construct
  source 1..20: mol_type = other DNA
aatgttctgaataaggcttt

SEQ ID NO: 112690 - DNA, 20 bp, synthetic construct
  source 1..20: mol_type = other DNA
aaatgttctgaataaggctt

SEQ ID NO: 112691 - DNA, 20 bp, synthetic construct
  source 1..20: mol_type = other DNA
gaaatgttctgaataaggct

SEQ ID NO: 112692 - DNA, 20 bp, synthetic construct
  source 1..20: mol_type = other DNA
tgaaatgttctgaataaggc

SEQ ID NO: 112693 - DNA, 20 bp, synthetic construct
  source 1..20: mol_type = other DNA
atgaaatgttctgaataagg

SEQ ID NO: 112694 - DNA, 20 bp, synthetic construct
  source 1..20: mol_type = other DNA
catgaaatgttctgaataag

SEQ ID NO: 112695 - DNA, 20 bp, synthetic construct
  source 1..20: mol_type = other DNA
gcatgaaatgttctgaataa

SEQ ID NO: 112696 - DNA, 20 bp, synthetic construct
  source 1..20: mol_type = other DNA
cgcatgaaatgttctgaata

SEQ ID NO: 112697 - DNA, 20 bp, synthetic construct
  source 1..20: mol_type = other DNA
acgcatgaaatgttctgaat

SEQ ID NO: 112698 - DNA, 20 bp, synthetic construct
  source 1..20: mol_type = other DNA
tacgcatgaaatgttctgaa

SEQ ID NO: 112699 - DNA, 20 bp, synthetic construct
  source 1..20: mol_type = other DNA
atacgcatgaaatgttctga

SEQ ID NO: 112700 - DNA, 20 bp, synthetic construct
  source 1..20: mol_type = other DNA
tatacgcatgaaatgttctg

SEQ ID NO: 112701 - DNA, 20 bp, synthetic construct
  source 1..20: mol_type = other DNA
ctatacgcatgaaatgttct

SEQ ID NO: 112702 - DNA, 20 bp, synthetic construct
  source 1..20: mol_type = other DNA
actatacgcatgaaatgttc

SEQ ID NO: 112703 - DNA, 20 bp, synthetic construct
  source 1..20: mol_type = other DNA
aactatacgcatgaaatgtt

SEQ ID NO: 112704 - DNA, 20 bp, synthetic construct
  source 1..20: mol_type = other DNA
taactatacgcatgaaatgt

SEQ ID NO: 112705 - DNA, 20 bp, synthetic construct
  source 1..20: mol_type = other DNA
ttaactatacgcatgaaatg

SEQ ID NO: 112706 - DNA, 20 bp, synthetic construct
  source 1..20: mol_type = other DNA
attaactatacgcatgaaat

SEQ ID NO: 112707 - DNA, 20 bp, synthetic construct
  source 1..20: mol_type = other DNA
tattaactatacgcatgaaa

SEQ ID NO: 112708 - DNA, 20 bp, synthetic construct
  source 1..20: mol_type = other DNA
atattaactatacgcatgaa

SEQ ID NO: 112709 - DNA, 20 bp, synthetic construct
  source 1..20: mol_type = other DNA
aatattaactatacgcatga

SEQ ID NO: 112710 - DNA, 20 bp, synthetic construct
  source 1..20: mol_type = other DNA
taatattaactatacgcatg

SEQ ID NO: 112711 - DNA, 20 bp, synthetic construct
  source 1..20: mol_type = other DNA
gtaatattaactatacgcat

SEQ ID NO: 112712 - DNA, 20 bp, synthetic construct
  source 1..20: mol_type = other DNA
cgtaatattaactatacgca

SEQ ID NO: 112713 - DNA, 20 bp, synthetic construct
  source 1..20: mol_type = other DNA
acgtaatattaactatacgc

SEQ ID NO: 112714 - DNA, 20 bp, synthetic construct
  source 1..20: mol_type = other DNA
tacgtaatattaactatacg

SEQ ID NO: 112715 - DNA, 20 bp, synthetic construct
  source 1..20: mol_type = other DNA
ctacgtaatattaactatac

SEQ ID NO: 112716 - DNA, 20 bp, synthetic construct
  source 1..20: mol_type = other DNA
gctacgtaatattaactata

SEQ ID NO: 112717 - DNA, 20 bp, synthetic construct
  source 1..20: mol_type = other DNA
agctacgtaatattaactat

SEQ ID NO: 112718 - DNA, 20 bp, synthetic construct
  source 1..20: mol_type = other DNA
aagctacgtaatattaacta

SEQ ID NO: 112719 - DNA, 20 bp, synthetic construct
  source 1..20: mol_type = other DNA
caagctacgtaatattaact

SEQ ID NO: 112720 - DNA, 20 bp, synthetic construct
  source 1..20: mol_type = other DNA
acaagctacgtaatattaac

SEQ ID NO: 112721 - DNA, 20 bp, synthetic construct
  source 1..20: mol_type = other DNA
cacaagctacgtaatattaa

SEQ ID NO: 112722 - DNA, 20 bp, synthetic construct
  source 1..20: mol_type = other DNA
gcacaagctacgtaatatta

SEQ ID NO: 112723 - DNA, 20 bp, synthetic construct
  source 1..20: mol_type = other DNA
agcacaagctacgtaatatt

SEQ ID NO: 112724 - DNA, 20 bp, synthetic construct
  source 1..20: mol_type = other DNA
gagcacaagctacgtaatat

SEQ ID NO: 112725 - DNA, 20 bp, synthetic construct
  source 1..20: mol_type = other DNA
tgagcacaagctacgtaata

SEQ ID NO: 112726 - DNA, 20 bp, synthetic construct
  source 1..20: mol_type = other DNA
atgagcacaagctacgtaat

SEQ ID NO: 112727 - DNA, 20 bp, synthetic construct
  source 1..20: mol_type = other DNA
catgagcacaagctacgtaa

SEQ ID NO: 112728 - DNA, 20 bp, synthetic construct
  source 1..20: mol_type = other DNA
ccatgagcacaagctacgta

SEQ ID NO: 112729 - DNA, 20 bp, synthetic construct
  source 1..20: mol_type = other DNA
gccatgagcacaagctacgt

SEQ ID NO: 112730 - DNA, 20 bp, synthetic construct
  source 1..20: mol_type = other DNA
tgccatgagcacaagctacg

SEQ ID NO: 112731 - DNA, 20 bp, synthetic construct
  source 1..20: mol_type = other DNA
ttgccatgagcacaagctac

SEQ ID NO: 112732 - DNA, 20 bp, synthetic construct
  source 1..20: mol_type = other DNA
tttgccatgagcacaagcta

SEQ ID NO: 112733 - DNA, 20 bp, synthetic construct
  source 1..20: mol_type = other DNA
ttttgccatgagcacaagct

SEQ ID NO: 112734 - DNA, 20 bp, synthetic construct
  source 1..20: mol_type = other DNA
tttttgccatgagcacaagc

SEQ ID NO: 112735 - DNA, 20 bp, synthetic construct
  source 1..20: mol_type = other DNA
atttttgccatgagcacaag

SEQ ID NO: 112736 - DNA, 20 bp, synthetic construct
  source 1..20: mol_type = other DNA
catttttgccatgagcacaa

SEQ ID NO: 112737 - DNA, 20 bp, synthetic construct
  source 1..20: mol_type = other DNA
acatttttgccatgagcaca

SEQ ID NO: 112738 - DNA, 20 bp, synthetic construct
  source 1..20: mol_type = other DNA
tacatttttgccatgagcac

SEQ ID NO: 112739 - DNA, 20 bp, synthetic construct
  source 1..20: mol_type = other DNA
atacatttttgccatgagca

SEQ ID NO: 112740 - DNA, 20 bp, synthetic construct
  source 1..20: mol_type = other DNA
aatacatttttgccatgagc

SEQ ID NO: 112741 - DNA, 20 bp, synthetic construct
  source 1..20: mol_type = other DNA
taatacatttttgccatgag

SEQ ID NO: 112742 - DNA, 20 bp, synthetic construct
  source 1..20: mol_type = other DNA
gtaatacatttttgccatga

SEQ ID NO: 112743 - DNA, 20 bp, synthetic construct
  source 1..20: mol_type = other DNA
agtaatacatttttgccatg

SEQ ID NO: 112744 - DNA, 20 bp, synthetic construct
  source 1..20: mol_type = other DNA
tagtaatacatttttgccat

SEQ ID NO: 112745 - DNA, 20 bp, synthetic construct
  source 1..20: mol_type = other DNA
ttagtaatacatttttgcca

SEQ ID NO: 112746 - DNA, 20 bp, synthetic construct
  source 1..20: mol_type = other DNA
tttagtaatacatttttgcc

SEQ ID NO: 112747 - DNA, 20 bp, synthetic construct
  source 1..20: mol_type = other DNA
ctttagtaatacatttttgc

SEQ ID NO: 112748 - DNA, 20 bp, synthetic construct
  source 1..20: mol_type = other DNA
actttagtaatacatttttg

SEQ ID NO: 112749 - DNA, 20 bp, synthetic construct
  source 1..20: mol_type = other DNA
aactttagtaatacattttt

SEQ ID NO: 112750 - DNA, 20 bp, synthetic construct
  source 1..20: mol_type = other DNA
taactttagtaatacatttt

SEQ ID NO: 112751 - DNA, 20 bp, synthetic construct
  source 1..20: mol_type = other DNA
ataactttagtaatacattt

SEQ ID NO: 112752 - DNA, 20 bp, synthetic construct
  source 1..20: mol_type = other DNA
aataactttagtaatacatt

SEQ ID NO: 112753 - DNA, 20 bp, synthetic construct
  source 1..20: mol_type = other DNA
aaataactttagtaatacat

SEQ ID NO: 112754 - DNA, 20 bp, synthetic construct
  source 1..20: mol_type = other DNA
taaataactttagtaataca

SEQ ID NO: 112755 - DNA, 20 bp, synthetic construct
  source 1..20: mol_type = other DNA
ttaaataactttagtaatac

SEQ ID NO: 112756 - DNA, 20 bp, synthetic construct
  source 1..20: mol_type = other DNA
cttaaataactttagtaata

SEQ ID NO: 112757 - DNA, 20 bp, synthetic construct
  source 1..20: mol_type = other DNA
tcttaaataactttagtaat

SEQ ID NO: 112758 - DNA, 20 bp, synthetic construct
  source 1..20: mol_type = other DNA
atcttaaataactttagtaa

SEQ ID NO: 112759 - DNA, 20 bp, synthetic construct
  source 1..20: mol_type = other DNA
tatcttaaataactttagta

SEQ ID NO: 112760 - DNA, 20 bp, synthetic construct
  source 1..20: mol_type = other DNA
atatcttaaataactttagt

SEQ ID NO: 112761 - DNA, 20 bp, synthetic construct
  source 1..20: mol_type = other DNA
aatatcttaaataactttag

SEQ ID NO: 112762 - DNA, 20 bp, synthetic construct
  source 1..20: mol_type = other DNA
aaatatcttaaataacttta

SEQ ID NO: 112763 - DNA, 20 bp, synthetic construct
  source 1..20: mol_type = other DNA
taaatatcttaaataacttt

SEQ ID NO: 112764 - DNA, 20 bp, synthetic construct
  source 1..20: mol_type = other DNA
ttaaatatcttaaataactt

SEQ ID NO: 112765 - DNA, 20 bp, synthetic construct
  source 1..20: mol_type = other DNA
cttaaatatcttaaataact

SEQ ID NO: 112766 - DNA, 20 bp, synthetic construct
  source 1..20: mol_type = other DNA
acttaaatatcttaaataac

SEQ ID NO: 112767 - DNA, 20 bp, synthetic construct
  source 1..20: mol_type = other DNA
tacttaaatatcttaaataa

SEQ ID NO: 112768 - DNA, 20 bp, synthetic construct
  source 1..20: mol_type = other DNA
atacttaaatatcttaaata

SEQ ID NO: 112769 - DNA, 20 bp, synthetic construct
  source 1..20: mol_type = other DNA
tatacttaaatatcttaaat

SEQ ID NO: 112770 - DNA, 20 bp, synthetic construct
  source 1..20: mol_type = other DNA
ttatacttaaatatcttaaa

SEQ ID NO: 112771 - DNA, 20 bp, synthetic construct
  source 1..20: mol_type = other DNA
attatacttaaatatcttaa

SEQ ID NO: 112772 - DNA, 20 bp, synthetic construct
  source 1..20: mol_type = other DNA
aattatacttaaatatctta

SEQ ID NO: 112773 - DNA, 20 bp, synthetic construct
  source 1..20: mol_type = other DNA
caattatacttaaatatctt

SEQ ID NO: 112774 - DNA, 20 bp, synthetic construct
  source 1..20: mol_type = other DNA
acaattatacttaaatatct

SEQ ID NO: 112775 - DNA, 20 bp, synthetic construct
  source 1..20: mol_type = other DNA
aacaattatacttaaatatc

SEQ ID NO: 112776 - DNA, 20 bp, synthetic construct
  source 1..20: mol_type = other DNA
aaacaattatacttaaatat

SEQ ID NO: 112777 - DNA, 20 bp, synthetic construct
  source 1..20: mol_type = other DNA
gaaacaattatacttaaata

SEQ ID NO: 112778 - DNA, 20 bp, synthetic construct
  source 1..20: mol_type = other DNA
ggaaacaattatacttaaat

SEQ ID NO: 112779 - DNA, 20 bp, synthetic construct
  source 1..20: mol_type = other DNA
aggaaacaattatacttaaa

SEQ ID NO: 112780 - DNA, 20 bp, synthetic construct
  source 1..20: mol_type = other DNA
aaggaaacaattatacttaa

SEQ ID NO: 112781 - DNA, 20 bp, synthetic construct
  source 1..20: mol_type = other DNA
aaaggaaacaattatactta

SEQ ID NO: 112782 - DNA, 20 bp, synthetic construct
  source 1..20: mol_type = other DNA
taaaggaaacaattatactt

SEQ ID NO: 112783 - DNA, 20 bp, synthetic construct
  source 1..20: mol_type = other DNA
ataaaggaaacaattatact

SEQ ID NO: 112784 - DNA, 20 bp, synthetic construct
  source 1..20: mol_type = other DNA
aataaaggaaacaattatac

SEQ ID NO: 112785 - DNA, 20 bp, synthetic construct
  source 1..20: mol_type = other DNA
aaataaaggaaacaattata

SEQ ID NO: 112786 - DNA, 20 bp, synthetic construct
  source 1..20: mol_type = other DNA
taaataaaggaaacaattat

SEQ ID NO: 112787 - DNA, 20 bp, synthetic construct
  source 1..20: mol_type = other DNA
ctaaataaaggaaacaatta

SEQ ID NO: 112788 - DNA, 20 bp, synthetic construct
  source 1..20: mol_type = other DNA
actaaataaaggaaacaatt

SEQ ID NO: 112789 - DNA, 20 bp, synthetic construct
  source 1..20: mol_type = other DNA
aactaaataaaggaaacaat

SEQ ID NO: 112790 - DNA, 20 bp, synthetic construct
  source 1..20: mol_type = other DNA
taactaaataaaggaaacaa

SEQ ID NO: 112791 - DNA, 20 bp, synthetic construct
  source 1..20: mol_type = other DNA
gtaactaaataaaggaaaca

SEQ ID NO: 112792 - DNA, 20 bp, synthetic construct
  source 1..20: mol_type = other DNA
tgtaactaaataaaggaaac

SEQ ID NO: 112793 - DNA, 20 bp, synthetic construct
  source 1..20: mol_type = other DNA
ctgtaactaaataaaggaaa

SEQ ID NO: 112794 - DNA, 20 bp, synthetic construct
  source 1..20: mol_type = other DNA
gctgtaactaaataaaggaa

SEQ ID NO: 112795 - DNA, 20 bp, synthetic construct
  source 1..20: mol_type = other DNA
ggctgtaactaaataaagga

SEQ ID NO: 112796 - DNA, 20 bp, synthetic construct
  source 1..20: mol_type = other DNA
tggctgtaactaaataaagg

SEQ ID NO: 112797 - DNA, 20 bp, synthetic construct
  source 1..20: mol_type = other DNA
ttggctgtaactaaataaag

SEQ ID NO: 112798 - DNA, 20 bp, synthetic construct
  source 1..20: mol_type = other DNA
cttggctgtaactaaataaa

SEQ ID NO: 112799 - DNA, 20 bp, synthetic construct
  source 1..20: mol_type = other DNA
acttggctgtaactaaataa

SEQ ID NO: 112800 - DNA, 20 bp, synthetic construct
  source 1..20: mol_type = other DNA
aacttggctgtaactaaata

SEQ ID NO: 112801 - DNA, 20 bp, synthetic construct
  source 1..20: mol_type = other DNA
gaacttggctgtaactaaat

SEQ ID NO: 112802 - DNA, 20 bp, synthetic construct
  source 1..20: mol_type = other DNA
agaacttggctgtaactaaa

SEQ ID NO: 112803 - DNA, 20 bp, synthetic construct
  source 1..20: mol_type = other DNA
tagaacttggctgtaactaa

SEQ ID NO: 112804 - DNA, 20 bp, synthetic construct
  source 1..20: mol_type = other DNA
gtagaacttggctgtaacta

SEQ ID NO: 112805 - DNA, 20 bp, synthetic construct
  source 1..20: mol_type = other DNA
agtagaacttggctgtaact

SEQ ID NO: 112806 - DNA, 20 bp, synthetic construct
  source 1..20: mol_type = other DNA
aagtagaacttggctgtaac

SEQ ID NO: 112807 - DNA, 20 bp, synthetic construct
  source 1..20: mol_type = other DNA
gaagtagaacttggctgtaa

SEQ ID NO: 112808 - DNA, 20 bp, synthetic construct
  source 1..20: mol_type = other DNA
agaagtagaacttggctgta

SEQ ID NO: 112809 - DNA, 20 bp, synthetic construct
  source 1..20: mol_type = other DNA
cagaagtagaacttggctgt

SEQ ID NO: 112810 - DNA, 20 bp, synthetic construct
  source 1..20: mol_type = other DNA
tcagaagtagaacttggctg

SEQ ID NO: 112811 - DNA, 20 bp, synthetic construct
  source 1..20: mol_type = other DNA
ttcagaagtagaacttggct

SEQ ID NO: 112812 - DNA, 20 bp, synthetic construct
  source 1..20: mol_type = other DNA
attcagaagtagaacttggc

SEQ ID NO: 112813 - DNA, 20 bp, synthetic construct
  source 1..20: mol_type = other DNA
gattcagaagtagaacttgg

SEQ ID NO: 112814 - DNA, 20 bp, synthetic construct
  source 1..20: mol_type = other DNA
agattcagaagtagaacttg

SEQ ID NO: 112815 - DNA, 20 bp, synthetic construct
  source 1..20: mol_type = other DNA
tagattcagaagtagaactt

SEQ ID NO: 112816 - DNA, 20 bp, synthetic construct
  source 1..20: mol_type = other DNA
atagattcagaagtagaact

SEQ ID NO: 112817 - DNA, 20 bp, synthetic construct
  source 1..20: mol_type = other DNA
catagattcagaagtagaac

SEQ ID NO: 112818 - DNA, 20 bp, synthetic construct
  source 1..20: mol_type = other DNA
ccatagattcagaagtagaa

SEQ ID NO: 112819 - DNA, 20 bp, synthetic construct
  source 1..20: mol_type = other DNA
tccatagattcagaagtaga

SEQ ID NO: 112820 - DNA, 20 bp, synthetic construct
  source 1..20: mol_type = other DNA
atccatagattcagaagtag

SEQ ID NO: 112821 - DNA, 20 bp, synthetic construct
  source 1..20: mol_type = other DNA
gatccatagattcagaagta

SEQ ID NO: 112822 - DNA, 20 bp, synthetic construct
  source 1..20: mol_type = other DNA
tgatccatagattcagaagt

SEQ ID NO: 112823 - DNA, 20 bp, synthetic construct
  source 1..20: mol_type = other DNA
ttgatccatagattcagaag

SEQ ID NO: 112824 - DNA, 20 bp, synthetic construct
  source 1..20: mol_type = other DNA
gttgatccatagattcagaa

SEQ ID NO: 112825 - DNA, 20 bp, synthetic construct
  source 1..20: mol_type = other DNA
agttgatccatagattcaga

SEQ ID NO: 112826 - DNA, 20 bp, synthetic construct
  source 1..20: mol_type = other DNA
tagttgatccatagattcag

SEQ ID NO: 112827 - DNA, 20 bp, synthetic construct
  source 1..20: mol_type = other DNA
gtagttgatccatagattca

SEQ ID NO: 112828 - DNA, 20 bp, synthetic construct
  source 1..20: mol_type = other DNA
agtagttgatccatagattc

SEQ ID NO: 112829 - DNA, 20 bp, synthetic construct
  source 1..20: mol_type = other DNA
tagtagttgatccatagatt

SEQ ID NO: 112830 - DNA, 20 bp, synthetic construct
  source 1..20: mol_type = other DNA
ttagtagttgatccatagat

SEQ ID NO: 112831 - DNA, 20 bp, synthetic construct
  source 1..20: mol_type = other DNA
tttagtagttgatccataga

SEQ ID NO: 112832 - DNA, 20 bp, synthetic construct
  source 1..20: mol_type = other DNA
gtttagtagttgatccatag

SEQ ID NO: 112833 - DNA, 20 bp, synthetic construct
  source 1..20: mol_type = other DNA
tgtttagtagttgatccata

SEQ ID NO: 112834 - DNA, 20 bp, synthetic construct
  source 1..20: mol_type = other DNA
ttgtttagtagttgatccat

SEQ ID NO: 112835 - DNA, 20 bp, synthetic construct
  source 1..20: mol_type = other DNA
tttgtttagtagttgatcca

SEQ ID NO: 112836 - DNA, 20 bp, synthetic construct
  source 1..20: mol_type = other DNA
ttttgtttagtagttgatcc

SEQ ID NO: 112837 - DNA, 20 bp, synthetic construct
  source 1..20: mol_type = other DNA
tttttgtttagtagttgatc

SEQ ID NO: 112838 - DNA, 20 bp, synthetic construct
  source 1..20: mol_type = other DNA
atttttgtttagtagttgat

SEQ ID NO: 112839 - DNA, 20 bp, synthetic construct
  source 1..20: mol_type = other DNA
tatttttgtttagtagttga

SEQ ID NO: 112840 - DNA, 20 bp, synthetic construct
  source 1..20: mol_type = other DNA
ctatttttgtttagtagttg

SEQ ID NO: 112841 - DNA, 20 bp, synthetic construct
  source 1..20: mol_type = other DNA
tctatttttgtttagtagtt

SEQ ID NO: 112842 - DNA, 20 bp, synthetic construct
  source 1..20: mol_type = other DNA
ctctatttttgtttagtagt

SEQ ID NO: 112843 - DNA, 20 bp, synthetic construct
  source 1..20: mol_type = other DNA
tctctatttttgtttagtag

SEQ ID NO: 112844 - DNA, 20 bp, synthetic construct
  source 1..20: mol_type = other DNA
ctctctatttttgtttagta

SEQ ID NO: 112845 - DNA, 20 bp, synthetic construct
  source 1..20: mol_type = other DNA
cctctctatttttgtttagt

SEQ ID NO: 112846 - DNA, 20 bp, synthetic construct
  source 1..20: mol_type = other DNA
ccctctctatttttgtttag

SEQ ID NO: 112847 - DNA, 20 bp, synthetic construct
  source 1..20: mol_type = other DNA
tccctctctatttttgttta

SEQ ID NO: 112848 - DNA, 20 bp, synthetic construct
  source 1..20: mol_type = other DNA
ctccctctctatttttgttt

SEQ ID NO: 112849 - DNA, 20 bp, synthetic construct
  source 1..20: mol_type = other DNA
tctccctctctatttttgtt

SEQ ID NO: 112850 - DNA, 20 bp, synthetic construct
  source 1..20: mol_type = other DNA
ttctccctctctatttttgt

SEQ ID NO: 112851 - DNA, 20 bp, synthetic construct
  source 1..20: mol_type = other DNA
tttctccctctctatttttg

SEQ ID NO: 112852 - DNA, 20 bp, synthetic construct
  source 1..20: mol_type = other DNA
ttttctccctctctattttt

SEQ ID NO: 112853 - DNA, 20 bp, synthetic construct
  source 1..20: mol_type = other DNA
tttttctccctctctatttt

SEQ ID NO: 112854 - DNA, 20 bp, synthetic construct
  source 1..20: mol_type = other DNA
atttttctccctctctattt

SEQ ID NO: 112855 - DNA, 20 bp, synthetic construct
  source 1..20: mol_type = other DNA
gatttttctccctctctatt

SEQ ID NO: 112856 - DNA, 20 bp, synthetic construct
  source 1..20: mol_type = other DNA
tgatttttctccctctctat

SEQ ID NO: 112857 - DNA, 20 bp, synthetic construct
  source 1..20: mol_type = other DNA
ttgatttttctccctctcta

SEQ ID NO: 112858 - DNA, 20 bp, synthetic construct
  source 1..20: mol_type = other DNA
cttgatttttctccctctct

SEQ ID NO: 112859 - DNA, 20 bp, synthetic construct
  source 1..20: mol_type = other DNA
tcttgatttttctccctctc

SEQ ID NO: 112860 - DNA, 20 bp, synthetic construct
  source 1..20: mol_type = other DNA
ctcttgatttttctccctct

SEQ ID NO: 112861 - DNA, 20 bp, synthetic construct
  source 1..20: mol_type = other DNA
tctcttgatttttctccctc

SEQ ID NO: 112862 - DNA, 20 bp, synthetic construct
  source 1..20: mol_type = other DNA
atctcttgatttttctccct

SEQ ID NO: 112863 - DNA, 20 bp, synthetic construct
  source 1..20: mol_type = other DNA
aatctcttgatttttctccc

SEQ ID NO: 112864 - DNA, 20 bp, synthetic construct
  source 1..20: mol_type = other DNA
aaatctcttgatttttctcc

SEQ ID NO: 112865 - DNA, 20 bp, synthetic construct
  source 1..20: mol_type = other DNA
caaatctcttgatttttctc

SEQ ID NO: 112866 - DNA, 20 bp, synthetic construct
  source 1..20: mol_type = other DNA
tcaaatctcttgatttttct

SEQ ID NO: 112867 - DNA, 20 bp, synthetic construct
  source 1..20: mol_type = other DNA
atcaaatctcttgatttttc

SEQ ID NO: 112868 - DNA, 20 bp, synthetic construct
  source 1..20: mol_type = other DNA
gatcaaatctcttgattttt

SEQ ID NO: 112869 - DNA, 20 bp, synthetic construct
  source 1..20: mol_type = other DNA
tgatcaaatctcttgatttt

SEQ ID NO: 112870 - DNA, 20 bp, synthetic construct
  source 1..20: mol_type = other DNA
ttgatcaaatctcttgattt

SEQ ID NO: 112871 - DNA, 20 bp, synthetic construct
  source 1..20: mol_type = other DNA
tttgatcaaatctcttgatt

SEQ ID NO: 112872 - DNA, 20 bp, synthetic construct
  source 1..20: mol_type = other DNA
ctttgatcaaatctcttgat

SEQ ID NO: 112873 - DNA, 20 bp, synthetic construct
  source 1..20: mol_type = other DNA
tctttgatcaaatctcttga

SEQ ID NO: 112874 - DNA, 20 bp, synthetic construct
  source 1..20: mol_type = other DNA
gtctttgatcaaatctcttg

SEQ ID NO: 112875 - DNA, 20 bp, synthetic construct
  source 1..20: mol_type = other DNA
tgtctttgatcaaatctctt

SEQ ID NO: 112876 - DNA, 20 bp, synthetic construct
  source 1..20: mol_type = other DNA
ttgtctttgatcaaatctct

SEQ ID NO: 112877 - DNA, 20 bp, synthetic construct
  source 1..20: mol_type = other DNA
tttgtctttgatcaaatctc

SEQ ID NO: 112878 - DNA, 20 bp, synthetic construct
  source 1..20: mol_type = other DNA
ttttgtctttgatcaaatct

SEQ ID NO: 112879 - DNA, 20 bp, synthetic construct
  source 1..20: mol_type = other DNA
attttgtctttgatcaaatc

SEQ ID NO: 112880 - DNA, 20 bp, synthetic construct
  source 1..20: mol_type = other DNA
aattttgtctttgatcaaat

SEQ ID NO: 112881 - DNA, 20 bp, synthetic construct
  source 1..20: mol_type = other DNA
caattttgtctttgatcaaa

SEQ ID NO: 112882 - DNA, 20 bp, synthetic construct
  source 1..20: mol_type = other DNA
tcaattttgtctttgatcaa

SEQ ID NO: 112883 - DNA, 20 bp, synthetic construct
  source 1..20: mol_type = other DNA
ttcaattttgtctttgatca

SEQ ID NO: 112884 - DNA, 20 bp, synthetic construct
  source 1..20: mol_type = other DNA
gttcaattttgtctttgatc

SEQ ID NO: 112885 - DNA, 20 bp, synthetic construct
  source 1..20: mol_type = other DNA
ggttcaattttgtctttgat

SEQ ID NO: 112886 - DNA, 20 bp, synthetic construct
  source 1..20: mol_type = other DNA
tggttcaattttgtctttga

SEQ ID NO: 112887 - DNA, 20 bp, synthetic construct
  source 1..20: mol_type = other DNA
ttggttcaattttgtctttg

SEQ ID NO: 112888 - DNA, 20 bp, synthetic construct
  source 1..20: mol_type = other DNA
cttggttcaattttgtcttt

SEQ ID NO: 112889 - DNA, 20 bp, synthetic construct
  source 1..20: mol_type = other DNA
acttggttcaattttgtctt

SEQ ID NO: 112890 - DNA, 20 bp, synthetic construct
  source 1..20: mol_type = other DNA
cacttggttcaattttgtct

SEQ ID NO: 112891 - DNA, 20 bp, synthetic construct
  source 1..20: mol_type = other DNA
gcacttggttcaattttgtc

SEQ ID NO: 112892 - DNA, 20 bp, synthetic construct
  source 1..20: mol_type = other DNA
agcacttggttcaattttgt

SEQ ID NO: 112893 - DNA, 20 bp, synthetic construct
  source 1..20: mol_type = other DNA
tagcacttggttcaattttg

SEQ ID NO: 112894 - DNA, 20 bp, synthetic construct
  source 1..20: mol_type = other DNA
ttagcacttggttcaatttt

SEQ ID NO: 112895 - DNA, 20 bp, synthetic construct
  source 1..20: mol_type = other DNA
cttagcacttggttcaattt

SEQ ID NO: 112896 - DNA, 20 bp, synthetic construct
  source 1..20: mol_type = other DNA
ccttagcacttggttcaatt

SEQ ID NO: 112897 - DNA, 20 bp, synthetic construct
  source 1..20: mol_type = other DNA
tccttagcacttggttcaat

SEQ ID NO: 112898 - DNA, 20 bp, synthetic construct
  source 1..20: mol_type = other DNA
atccttagcacttggttcaa

SEQ ID NO: 112899 - DNA, 20 bp, synthetic construct
  source 1..20: mol_type = other DNA
aatccttagcacttggttca

SEQ ID NO: 112900 - DNA, 20 bp, synthetic construct
  source 1..20: mol_type = other DNA
gaatccttagcacttggttc

SEQ ID NO: 112901 - DNA, 20 bp, synthetic construct
  source 1..20: mol_type = other DNA
agaatccttagcacttggtt

SEQ ID NO: 112902 - DNA, 20 bp, synthetic construct
  source 1..20: mol_type = other DNA
aagaatccttagcacttggt

SEQ ID NO: 112903 - DNA, 20 bp, synthetic construct
  source 1..20: mol_type = other DNA
aaagaatccttagcacttgg

SEQ ID NO: 112904 - DNA, 20 bp, synthetic construct
  source 1..20: mol_type = other DNA
gaaagaatccttagcacttg

SEQ ID NO: 112905 - DNA, 20 bp, synthetic construct
  source 1..20: mol_type = other DNA
tgaaagaatccttagcactt

SEQ ID NO: 112906 - DNA, 20 bp, synthetic construct
  source 1..20: mol_type = other DNA
atgaaagaatccttagcact

SEQ ID NO: 112907 - DNA, 20 bp, synthetic construct
  source 1..20: mol_type = other DNA
aatgaaagaatccttagcac

SEQ ID NO: 112908 - DNA, 20 bp, synthetic construct
  source 1..20: mol_type = other DNA
caatgaaagaatccttagca

SEQ ID NO: 112909 - DNA, 20 bp, synthetic construct
  source 1..20: mol_type = other DNA
tcaatgaaagaatccttagc

SEQ ID NO: 112910 - DNA, 20 bp, synthetic construct
  source 1..20: mol_type = other DNA
ttcaatgaaagaatccttag

SEQ ID NO: 112911 - DNA, 20 bp, synthetic construct
  source 1..20: mol_type = other DNA
tttcaatgaaagaatcctta

SEQ ID NO: 112912 - DNA, 20 bp, synthetic construct
  source 1..20: mol_type = other DNA
ttttcaatgaaagaatcctt

SEQ ID NO: 112913 - DNA, 20 bp, synthetic construct
  source 1..20: mol_type = other DNA
attttcaatgaaagaatcct

SEQ ID NO: 112914 - DNA, 20 bp, synthetic construct
  source 1..20: mol_type = other DNA
tattttcaatgaaagaatcc

SEQ ID NO: 112915 - DNA, 20 bp, synthetic construct
  source 1..20: mol_type = other DNA
ctattttcaatgaaagaatc

SEQ ID NO: 112916 - DNA, 20 bp, synthetic construct
  source 1..20: mol_type = other DNA
gctattttcaatgaaagaat

SEQ ID NO: 112917 - DNA, 20 bp, synthetic construct
  source 1..20: mol_type = other DNA
tgctattttcaatgaaagaa

SEQ ID NO: 112918 - DNA, 20 bp, synthetic construct
  source 1..20: mol_type = other DNA
ctgctattttcaatgaaaga

SEQ ID NO: 112919 - DNA, 20 bp, synthetic construct
  source 1..20: mol_type = other DNA
gctgctattttcaatgaaag

SEQ ID NO: 112920 - DNA, 20 bp, synthetic construct
  source 1..20: mol_type = other DNA
tgctgctattttcaatgaaa

SEQ ID NO: 112921 - DNA, 20 bp, synthetic construct
  source 1..20: mol_type = other DNA
ctgctgctattttcaatgaa

SEQ ID NO: 112922 - DNA, 20 bp, synthetic construct
  source 1..20: mol_type = other DNA
gctgctgctattttcaatga

SEQ ID NO: 112923 - DNA, 20 bp, synthetic construct
  source 1..20: mol_type = other DNA
tgctgctgctattttcaatg

SEQ ID NO: 112924 - DNA, 20 bp, synthetic construct
  source 1..20: mol_type = other DNA
ttgctgctgctattttcaat

SEQ ID NO: 112925 - DNA, 20 bp, synthetic construct
  source 1..20: mol_type = other DNA
gttgctgctgctattttcaa

SEQ ID NO: 112926 - DNA, 20 bp, synthetic construct
  source 1..20: mol_type = other DNA
agttgctgctgctattttca

SEQ ID NO: 112927 - DNA, 20 bp, synthetic construct
  source 1..20: mol_type = other DNA
cagttgctgctgctattttc

SEQ ID NO: 112928 - DNA, 20 bp, synthetic construct
  source 1..20: mol_type = other DNA
acagttgctgctgctatttt

SEQ ID NO: 112929 - DNA, 20 bp, synthetic construct
  source 1..20: mol_type = other DNA
tacagttgctgctgctattt

SEQ ID NO: 112930 - DNA, 20 bp, synthetic construct
  source 1..20: mol_type = other DNA
gtacagttgctgctgctatt

SEQ ID NO: 112931 - DNA, 20 bp, synthetic construct
  source 1..20: mol_type = other DNA
ggtacagttgctgctgctat

SEQ ID NO: 112932 - DNA, 20 bp, synthetic construct
  source 1..20: mol_type = other DNA
tggtacagttgctgctgcta

SEQ ID NO: 112933 - DNA, 20 bp, synthetic construct
  source 1..20: mol_type = other DNA
ctggtacagttgctgctgct

SEQ ID NO: 112934 - DNA, 20 bp, synthetic construct
  source 1..20: mol_type = other DNA
actggtacagttgctgctgc

SEQ ID NO: 112935 - DNA, 20 bp, synthetic construct
  source 1..20: mol_type = other DNA
cactggtacagttgctgctg

SEQ ID NO: 112936 - DNA, 20 bp, synthetic construct
  source 1..20: mol_type = other DNA
ccactggtacagttgctgct

SEQ ID NO: 112937 - DNA, 20 bp, synthetic construct
  source 1..20: mol_type = other DNA
gccactggtacagttgctgc

SEQ ID NO: 112938 - DNA, 20 bp, synthetic construct
  source 1..20: mol_type = other DNA
tgccactggtacagttgctg

SEQ ID NO: 112939 - DNA, 20 bp, synthetic construct
  source 1..20: mol_type = other DNA
ctgccactggtacagttgct

SEQ ID NO: 112940 - DNA, 20 bp, synthetic construct
  source 1..20: mol_type = other DNA
gctgccactggtacagttgc

SEQ ID NO: 112941 - DNA, 20 bp, synthetic construct
  source 1..20: mol_type = other DNA
tgctgccactggtacagttg

SEQ ID NO: 112942 - DNA, 20 bp, synthetic construct
  source 1..20: mol_type = other DNA
ctgctgccactggtacagtt

SEQ ID NO: 112943 - DNA, 20 bp, synthetic construct
  source 1..20: mol_type = other DNA
gctgctgccactggtacagt

SEQ ID NO: 112944 - DNA, 20 bp, synthetic construct
  source 1..20: mol_type = other DNA
tgctgctgccactggtacag

SEQ ID NO: 112945 - DNA, 20 bp, synthetic construct
  source 1..20: mol_type = other DNA
ttgctgctgccactggtaca

SEQ ID NO: 112946 - DNA, 20 bp, synthetic construct
  source 1..20: mol_type = other DNA
cttgctgctgccactggtac

SEQ ID NO: 112947 - DNA, 20 bp, synthetic construct
  source 1..20: mol_type = other DNA
gcttgctgctgccactggta

SEQ ID NO: 112948 - DNA, 20 bp, synthetic construct
  source 1..20: mol_type = other DNA
ggcttgctgctgccactggt

SEQ ID NO: 112949 - DNA, 20 bp, synthetic construct
  source 1..20: mol_type = other DNA
cggcttgctgctgccactgg

SEQ ID NO: 112950 - DNA, 20 bp, synthetic construct
  source 1..20: mol_type = other DNA
tcggcttgctgctgccactg

SEQ ID NO: 112951 - DNA, 20 bp, synthetic construct
  source 1..20: mol_type = other DNA
ttcggcttgctgctgccact

SEQ ID NO: 112952 - DNA, 20 bp, synthetic construct
  source 1..20: mol_type = other DNA
attcggcttgctgctgccac

SEQ ID NO: 112953 - DNA, 20 bp, synthetic construct
  source 1..20: mol_type = other DNA
tattcggcttgctgctgcca

SEQ ID NO: 112954 - DNA, 20 bp, synthetic construct
  source 1..20: mol_type = other DNA
ctattcggcttgctgctgcc

SEQ ID NO: 112955 - DNA, 20 bp, synthetic construct
  source 1..20: mol_type = other DNA
gctattcggcttgctgctgc

SEQ ID NO: 112956 - DNA, 20 bp, synthetic construct
  source 1..20: mol_type = other DNA
ggctattcggcttgctgctg

SEQ ID NO: 112957 - DNA, 20 bp, synthetic construct
  source 1..20: mol_type = other DNA
gggctattcggcttgctgct

SEQ ID NO: 112958 - DNA, 20 bp, synthetic construct
  source 1..20: mol_type = other DNA
ggggctattcggcttgctgc

SEQ ID NO: 112959 - DNA, 20 bp, synthetic construct
  source 1..20: mol_type = other DNA
tggggctattcggcttgctg

SEQ ID NO: 112960 - DNA, 20 bp, synthetic construct
  source 1..20: mol_type = other DNA
ctggggctattcggcttgct

SEQ ID NO: 112961 - DNA, 20 bp, synthetic construct
  source 1..20: mol_type = other DNA
gctggggctattcggcttgc

SEQ ID NO: 112962 - DNA, 20 bp, synthetic construct
  source 1..20: mol_type = other DNA
tgctggggctattcggcttg

SEQ ID NO: 112963 - DNA, 20 bp, synthetic construct
  source 1..20: mol_type = other DNA
atgctggggctattcggctt

SEQ ID NO: 112964 - DNA, 20 bp, synthetic construct
  source 1..20: mol_type = other DNA
aatgctggggctattcggct

SEQ ID NO: 112965 - DNA, 20 bp, synthetic construct
  source 1..20: mol_type = other DNA
aaatgctggggctattcggc

SEQ ID NO: 112966 - DNA, 20 bp, synthetic construct
  source 1..20: mol_type = other DNA
gaaatgctggggctattcgg

SEQ ID NO: 112967 - DNA, 20 bp, synthetic construct
  source 1..20: mol_type = other DNA
ggaaatgctggggctattcg

SEQ ID NO: 112968 - DNA, 20 bp, synthetic construct
  source 1..20: mol_type = other DNA
gggaaatgctggggctattc

SEQ ID NO: 112969 - DNA, 20 bp, synthetic construct
  source 1..20: mol_type = other DNA
ggggaaatgctggggctatt

SEQ ID NO: 112970 - DNA, 20 bp, synthetic construct
  source 1..20: mol_type = other DNA
aggggaaatgctggggctat

SEQ ID NO: 112971 - DNA, 20 bp, synthetic construct
  source 1..20: mol_type = other DNA
aaggggaaatgctggggcta

SEQ ID NO: 112972 - DNA, 20 bp, synthetic construct
  source 1..20: mol_type = other DNA
gaaggggaaatgctggggct

SEQ ID NO: 112973 - DNA, 20 bp, synthetic construct
  source 1..20: mol_type = other DNA
tgaaggggaaatgctggggc

SEQ ID NO: 112974 - DNA, 20 bp, synthetic construct
  source 1..20: mol_type = other DNA
ttgaaggggaaatgctgggg

SEQ ID NO: 112975 - DNA, 20 bp, synthetic construct
  source 1..20: mol_type = other DNA
attgaaggggaaatgctggg

SEQ ID NO: 112976 - DNA, 20 bp, synthetic construct
  source 1..20: mol_type = other DNA
tattgaaggggaaatgctgg

SEQ ID NO: 112977 - DNA, 20 bp, synthetic construct
  source 1..20: mol_type = other DNA
gtattgaaggggaaatgctg

SEQ ID NO: 112978 - DNA, 20 bp, synthetic construct
  source 1..20: mol_type = other DNA
agtattgaaggggaaatgct

SEQ ID NO: 112979 - DNA, 20 bp, synthetic construct
  source 1..20: mol_type = other DNA
aagtattgaaggggaaatgc

SEQ ID NO: 112980 - DNA, 20 bp, synthetic construct
  source 1..20: mol_type = other DNA
taagtattgaaggggaaatg

SEQ ID NO: 112981 - DNA, 20 bp, synthetic construct
  source 1..20: mol_type = other DNA
ctaagtattgaaggggaaat

SEQ ID NO: 112982 - DNA, 20 bp, synthetic construct
  source 1..20: mol_type = other DNA
actaagtattgaaggggaaa

SEQ ID NO: 112983 - DNA, 20 bp, synthetic construct
  source 1..20: mol_type = other DNA
tactaagtattgaaggggaa

SEQ ID NO: 112984 - DNA, 20 bp, synthetic construct
  source 1..20: mol_type = other DNA
ttactaagtattgaagggga

SEQ ID NO: 112985 - DNA, 20 bp, synthetic construct
  source 1..20: mol_type = other DNA
gttactaagtattgaagggg

SEQ ID NO: 112986 - DNA, 20 bp, synthetic construct
  source 1..20: mol_type = other DNA
tgttactaagtattgaaggg

SEQ ID NO: 112987 - DNA, 20 bp, synthetic construct
  source 1..20: mol_type = other DNA
gtgttactaagtattgaagg

SEQ ID NO: 112988 - DNA, 20 bp, synthetic construct
  source 1..20: mol_type = other DNA
cgtgttactaagtattgaag

SEQ ID NO: 112989 - DNA, 20 bp, synthetic construct
  source 1..20: mol_type = other DNA
ccgtgttactaagtattgaa

SEQ ID NO: 112990 - DNA, 20 bp, synthetic construct
  source 1..20: mol_type = other DNA
tccgtgttactaagtattga

SEQ ID NO: 112991 - DNA, 20 bp, synthetic construct
  source 1..20: mol_type = other DNA
ctccgtgttactaagtattg

SEQ ID NO: 112992 - DNA, 20 bp, synthetic construct
  source 1..20: mol_type = other DNA
gctccgtgttactaagtatt

SEQ ID NO: 112993 - DNA, 20 bp, synthetic construct
  source 1..20: mol_type = other DNA
tgctccgtgttactaagtat

SEQ ID NO: 112994 - DNA, 20 bp, synthetic construct
  source 1..20: mol_type = other DNA
gtgctccgtgttactaagta

SEQ ID NO: 112995 - DNA, 20 bp, synthetic construct
  source 1..20: mol_type = other DNA
tgtgctccgtgttactaagt

SEQ ID NO: 112996 - DNA, 20 bp, synthetic construct
  source 1..20: mol_type = other DNA
ttgtgctccgtgttactaag

SEQ ID NO: 112997 - DNA, 20 bp, synthetic construct
  source 1..20: mol_type = other DNA
cttgtgctccgtgttactaa

SEQ ID NO: 112998 - DNA, 20 bp, synthetic construct
  source 1..20: mol_type = other DNA
tcttgtgctccgtgttacta

SEQ ID NO: 112999 - DNA, 20 bp, synthetic construct
  source 1..20: mol_type = other DNA
ctcttgtgctccgtgttact

SEQ ID NO: 113000 - DNA, 20 bp, synthetic construct
  source 1..20: mol_type = other DNA
cctcttgtgctccgtgttac

SEQ ID NO: 113001 - DNA, 20 bp, synthetic construct
  source 1..20: mol_type = other DNA
ccctcttgtgctccgtgtta

SEQ ID NO: 113002 - DNA, 20 bp, synthetic construct
  source 1..20: mol_type = other DNA
cccctcttgtgctccgtgtt

SEQ ID NO: 113003 - DNA, 20 bp, synthetic construct
  source 1..20: mol_type = other DNA
tcccctcttgtgctccgtgt

SEQ ID NO: 113004 - DNA, 20 bp, synthetic construct
  source 1..20: mol_type = other DNA
gtcccctcttgtgctccgtg

SEQ ID NO: 113005 - DNA, 20 bp, synthetic construct
  source 1..20: mol_type = other DNA
ggtcccctcttgtgctccgt

SEQ ID NO: 113006 - DNA, 20 bp, synthetic construct
  source 1..20: mol_type = other DNA
aggtcccctcttgtgctccg

SEQ ID NO: 113007 - DNA, 20 bp, synthetic construct
  source 1..20: mol_type = other DNA
caggtcccctcttgtgctcc

SEQ ID NO: 113008 - DNA, 20 bp, synthetic construct
  source 1..20: mol_type = other DNA
tcaggtcccctcttgtgctc

SEQ ID NO: 113009 - DNA, 20 bp, synthetic construct
  source 1..20: mol_type = other DNA
ctcaggtcccctcttgtgct

SEQ ID NO: 113010 - DNA, 20 bp, synthetic construct
  source 1..20: mol_type = other DNA
cctcaggtcccctcttgtgc

SEQ ID NO: 113011 - DNA, 20 bp, synthetic construct
  source 1..20: mol_type = other DNA
acctcaggtcccctcttgtg

SEQ ID NO: 113012 - DNA, 20 bp, synthetic construct
  source 1..20: mol_type = other DNA
gacctcaggtcccctcttgt

SEQ ID NO: 113013 - DNA, 20 bp, synthetic construct
  source 1..20: mol_type = other DNA
tgacctcaggtcccctcttg

SEQ ID NO: 113014 - DNA, 20 bp, synthetic construct
  source 1..20: mol_type = other DNA
gtgacctcaggtcccctctt

SEQ ID NO: 113015 - DNA, 20 bp, synthetic construct
  source 1..20: mol_type = other DNA
agtgacctcaggtcccctct

SEQ ID NO: 113016 - DNA, 20 bp, synthetic construct
  source 1..20: mol_type = other DNA
aagtgacctcaggtcccctc

SEQ ID NO: 113017 - DNA, 20 bp, synthetic construct
  source 1..20: mol_type = other DNA
gaagtgacctcaggtcccct

SEQ ID NO: 113018 - DNA, 20 bp, synthetic construct
  source 1..20: mol_type = other DNA
ggaagtgacctcaggtcccc

SEQ ID NO: 113019 - DNA, 20 bp, synthetic construct
  source 1..20: mol_type = other DNA
gggaagtgacctcaggtccc

SEQ ID NO: 113020 - DNA, 20 bp, synthetic construct
  source 1..20: mol_type = other DNA
tgggaagtgacctcaggtcc

SEQ ID NO: 113021 - DNA, 20 bp, synthetic construct
  source 1..20: mol_type = other DNA
ttgggaagtgacctcaggtc

SEQ ID NO: 113022 - DNA, 20 bp, synthetic construct
  source 1..20: mol_type = other DNA
cttgggaagtgacctcaggt

SEQ ID NO: 113023 - DNA, 20 bp, synthetic construct
  source 1..20: mol_type = other DNA
ccttgggaagtgacctcagg

SEQ ID NO: 113024 - DNA, 20 bp, synthetic construct
  source 1..20: mol_type = other DNA
cccttgggaagtgacctcag

SEQ ID NO: 113025 - DNA, 20 bp, synthetic construct
  source 1..20: mol_type = other DNA
ccccttgggaagtgacctca

SEQ ID NO: 113026 - DNA, 20 bp, synthetic construct
  source 1..20: mol_type = other DNA
accccttgggaagtgacctc

SEQ ID NO: 113027 - DNA, 20 bp, synthetic construct
  source 1..20: mol_type = other DNA
aaccccttgggaagtgacct

SEQ ID NO: 113028 - DNA, 20 bp, synthetic construct
  source 1..20: mol_type = other DNA
gaaccccttgggaagtgacc

SEQ ID NO: 113029 - DNA, 20 bp, synthetic construct
  source 1..20: mol_type = other DNA
tgaaccccttgggaagtgac

SEQ ID NO: 113030 - DNA, 20 bp, synthetic construct
  source 1..20: mol_type = other DNA
ctgaaccccttgggaagtga

SEQ ID NO: 113031 - DNA, 20 bp, synthetic construct
  source 1..20: mol_type = other DNA
tctgaaccccttgggaagtg

SEQ ID NO: 113032 - DNA, 20 bp, synthetic construct
  source 1..20: mol_type = other DNA
gtctgaaccccttgggaagt

SEQ ID NO: 113033 - DNA, 20 bp, synthetic construct
  source 1..20: mol_type = other DNA
agtctgaaccccttgggaag

SEQ ID NO: 113034 - DNA, 20 bp, synthetic construct
  source 1..20: mol_type = other DNA
aagtctgaaccccttgggaa

SEQ ID NO: 113035 - DNA, 20 bp, synthetic construct
  source 1..20: mol_type = other DNA
gaagtctgaaccccttggga

SEQ ID NO: 113036 - DNA, 20 bp, synthetic construct
  source 1..20: mol_type = other DNA
ggaagtctgaaccccttggg

SEQ ID NO: 113037 - DNA, 20 bp, synthetic construct
  source 1..20: mol_type = other DNA
tggaagtctgaaccccttgg

SEQ ID NO: 113038 - DNA, 20 bp, synthetic construct
  source 1..20: mol_type = other DNA
ctggaagtctgaaccccttg

SEQ ID NO: 113039 - DNA, 20 bp, synthetic construct
  source 1..20: mol_type = other DNA
gctggaagtctgaacccctt

SEQ ID NO: 113040 - DNA, 20 bp, synthetic construct
  source 1..20: mol_type = other DNA
ggctggaagtctgaacccct

SEQ ID NO: 113041 - DNA, 20 bp, synthetic construct
  source 1..20: mol_type = other DNA
gggctggaagtctgaacccc

SEQ ID NO: 113042 - DNA, 20 bp, synthetic construct
  source 1..20: mol_type = other DNA
tgggctggaagtctgaaccc

SEQ ID NO: 113043 - DNA, 20 bp, synthetic construct
  source 1..20: mol_type = other DNA
ctgggctggaagtctgaacc

SEQ ID NO: 113044 - DNA, 20 bp, synthetic construct
  source 1..20: mol_type = other DNA
gctgggctggaagtctgaac

SEQ ID NO: 113045 - DNA, 20 bp, synthetic construct
  source 1..20: mol_type = other DNA
tgctgggctggaagtctgaa

SEQ ID NO: 113046 - DNA, 20 bp, synthetic construct
  source 1..20: mol_type = other DNA
atgctgggctggaagtctga

SEQ ID NO: 113047 - DNA, 20 bp, synthetic construct
  source 1..20: mol_type = other DNA
catgctgggctggaagtctg

SEQ ID NO: 113048 - DNA, 20 bp, synthetic construct
  source 1..20: mol_type = other DNA
acatgctgggctggaagtct

SEQ ID NO: 113049 - DNA, 20 bp, synthetic construct
  source 1..20: mol_type = other DNA
tacatgctgggctggaagtc

SEQ ID NO: 113050 - DNA, 20 bp, synthetic construct
  source 1..20: mol_type = other DNA
ttacatgctgggctggaagt

SEQ ID NO: 113051 - DNA, 20 bp, synthetic construct
  source 1..20: mol_type = other DNA
tttacatgctgggctggaag

SEQ ID NO: 113052 - DNA, 20 bp, synthetic construct
  source 1..20: mol_type = other DNA
gtttacatgctgggctggaa

SEQ ID NO: 113053 - DNA, 20 bp, synthetic construct
  source 1..20: mol_type = other DNA
tgtttacatgctgggctgga

SEQ ID NO: 113054 - DNA, 20 bp, synthetic construct
  source 1..20: mol_type = other DNA
ttgtttacatgctgggctgg

SEQ ID NO: 113055 - DNA, 20 bp, synthetic construct
  source 1..20: mol_type = other DNA
cttgtttacatgctgggctg

SEQ ID NO: 113056 - DNA, 20 bp, synthetic construct
  source 1..20: mol_type = other DNA
tcttgtttacatgctgggct

SEQ ID NO: 113057 - DNA, 20 bp, synthetic construct
  source 1..20: mol_type = other DNA
ctcttgtttacatgctgggc

SEQ ID NO: 113058 - DNA, 20 bp, synthetic construct
  source 1..20: mol_type = other DNA
tctcttgtttacatgctggg

SEQ ID NO: 113059 - DNA, 20 bp, synthetic construct
  source 1..20: mol_type = other DNA
ttctcttgtttacatgctgg

SEQ ID NO: 113060 - DNA, 20 bp, synthetic construct
  source 1..20: mol_type = other DNA
tttctcttgtttacatgctg

SEQ ID NO: 113061 - DNA, 20 bp, synthetic construct
  source 1..20: mol_type = other DNA
ctttctcttgtttacatgct

SEQ ID NO: 113062 - DNA, 20 bp, synthetic construct
  source 1..20: mol_type = other DNA
tctttctcttgtttacatgc

SEQ ID NO: 113063 - DNA, 20 bp, synthetic construct
  source 1..20: mol_type = other DNA
gtctttctcttgtttacatg

SEQ ID NO: 113064 - DNA, 20 bp, synthetic construct
  source 1..20: mol_type = other DNA
cgtctttctcttgtttacat

SEQ ID NO: 113065 - DNA, 20 bp, synthetic construct
  source 1..20: mol_type = other DNA
tcgtctttctcttgtttaca

SEQ ID NO: 113066 - DNA, 20 bp, synthetic construct
  source 1..20: mol_type = other DNA
atcgtctttctcttgtttac

SEQ ID NO: 113067 - DNA, 20 bp, synthetic construct
  source 1..20: mol_type = other DNA
tatcgtctttctcttgttta

SEQ ID NO: 113068 - DNA, 20 bp, synthetic construct
  source 1..20: mol_type = other DNA
ttatcgtctttctcttgttt

SEQ ID NO: 113069 - DNA, 20 bp, synthetic construct
  source 1..20: mol_type = other DNA
cttatcgtctttctcttgtt

SEQ ID NO: 113070 - DNA, 20 bp, synthetic construct
  source 1..20: mol_type = other DNA
ccttatcgtctttctcttgt

SEQ ID NO: 113071 - DNA, 20 bp, synthetic construct
  source 1..20: mol_type = other DNA
tccttatcgtctttctcttg

SEQ ID NO: 113072 - DNA, 20 bp, synthetic construct
  source 1..20: mol_type = other DNA
ttccttatcgtctttctctt

SEQ ID NO: 113073 - DNA, 20 bp, synthetic construct
  source 1..20: mol_type = other DNA
cttccttatcgtctttctct

SEQ ID NO: 113074 - DNA, 20 bp, synthetic construct
  source 1..20: mol_type = other DNA
tcttccttatcgtctttctc

SEQ ID NO: 113075 - DNA, 20 bp, synthetic construct
  source 1..20: mol_type = other DNA
ctcttccttatcgtctttct

SEQ ID NO: 113076 - DNA, 20 bp, synthetic construct
  source 1..20: mol_type = other DNA
tctcttccttatcgtctttc

SEQ ID NO: 113077 - DNA, 20 bp, synthetic construct
  source 1..20: mol_type = other DNA
ttctcttccttatcgtcttt

SEQ ID NO: 113078 - DNA, 20 bp, synthetic construct
  source 1..20: mol_type = other DNA
cttctcttccttatcgtctt

SEQ ID NO: 113079 - DNA, 20 bp, synthetic construct
  source 1..20: mol_type = other DNA
tcttctcttccttatcgtct

SEQ ID NO: 113080 - DNA, 20 bp, synthetic construct
  source 1..20: mol_type = other DNA
ttcttctcttccttatcgtc

SEQ ID NO: 113081 - DNA, 20 bp, synthetic construct
  source 1..20: mol_type = other DNA
tttcttctcttccttatcgt

SEQ ID NO: 113082 - DNA, 20 bp, synthetic construct
  source 1..20: mol_type = other DNA
ctttcttctcttccttatcg

SEQ ID NO: 113083 - DNA, 20 bp, synthetic construct
  source 1..20: mol_type = other DNA
tctttcttctcttccttatc

SEQ ID NO: 113084 - DNA, 20 bp, synthetic construct
  source 1..20: mol_type = other DNA
gtctttcttctcttccttat

SEQ ID NO: 113085 - DNA, 20 bp, synthetic construct
  source 1..20: mol_type = other DNA
cgtctttcttctcttcctta

SEQ ID NO: 113086 - DNA, 20 bp, synthetic construct
  source 1..20: mol_type = other DNA
gcgtctttcttctcttcctt

SEQ ID NO: 113087 - DNA, 20 bp, synthetic construct
  source 1..20: mol_type = other DNA
tgcgtctttcttctcttcct

SEQ ID NO: 113088 - DNA, 20 bp, synthetic construct
  source 1..20: mol_type = other DNA
ctgcgtctttcttctcttcc

SEQ ID NO: 113089 - DNA, 20 bp, synthetic construct
  source 1..20: mol_type = other DNA
gctgcgtctttcttctcttc

SEQ ID NO: 113090 - DNA, 20 bp, synthetic construct
  source 1..20: mol_type = other DNA
agctgcgtctttcttctctt

SEQ ID NO: 113091 - DNA, 20 bp, synthetic construct
  source 1..20: mol_type = other DNA
cagctgcgtctttcttctct

SEQ ID NO: 113092 - DNA, 20 bp, synthetic construct
  source 1..20: mol_type = other DNA
tcagctgcgtctttcttctc

SEQ ID NO: 113093 - DNA, 20 bp, synthetic construct
  source 1..20: mol_type = other DNA
ctcagctgcgtctttcttct

SEQ ID NO: 113094 - DNA, 20 bp, synthetic construct
  source 1..20: mol_type = other DNA
actcagctgcgtctttcttc

SEQ ID NO: 113095 - DNA, 20 bp, synthetic construct
  source 1..20: mol_type = other DNA
cactcagctgcgtctttctt

SEQ ID NO: 113096 - DNA, 20 bp, synthetic construct
  source 1..20: mol_type = other DNA
tcactcagctgcgtctttct

SEQ ID NO: 113097 - DNA, 20 bp, synthetic construct
  source 1..20: mol_type = other DNA
ctcactcagctgcgtctttc

SEQ ID NO: 113098 - DNA, 20 bp, synthetic construct
  source 1..20: mol_type = other DNA
actcactcagctgcgtcttt

SEQ ID NO: 113099 - DNA, 20 bp, synthetic construct
  source 1..20: mol_type = other DNA
tactcactcagctgcgtctt

SEQ ID NO: 113100 - DNA, 20 bp, synthetic construct
  source 1..20: mol_type = other DNA
ttactcactcagctgcgtct

SEQ ID NO: 113101 - DNA, 20 bp, synthetic construct
  source 1..20: mol_type = other DNA
tttactcactcagctgcgtc

SEQ ID NO: 113102 - DNA, 20 bp, synthetic construct
  source 1..20: mol_type = other DNA
gtttactcactcagctgcgt

SEQ ID NO: 113103 - DNA, 20 bp, synthetic construct
  source 1..20: mol_type = other DNA
ggtttactcactcagctgcg

SEQ ID NO: 113104 - DNA, 20 bp, synthetic construct
  source 1..20: mol_type = other DNA
aggtttactcactcagctgc

SEQ ID NO: 113105 - DNA, 20 bp, synthetic construct
  source 1..20: mol_type = other DNA
caggtttactcactcagctg

SEQ ID NO: 113106 - DNA, 20 bp, synthetic construct
  source 1..20: mol_type = other DNA
ccaggtttactcactcagct

SEQ ID NO: 113107 - DNA, 20 bp, synthetic construct
  source 1..20: mol_type = other DNA
tccaggtttactcactcagc

SEQ ID NO: 113108 - DNA, 20 bp, synthetic construct
  source 1..20: mol_type = other DNA
ttccaggtttactcactcag

SEQ ID NO: 113109 - DNA, 20 bp, synthetic construct
  source 1..20: mol_type = other DNA
gttccaggtttactcactca

SEQ ID NO: 113110 - DNA, 20 bp, synthetic construct
  source 1..20: mol_type = other DNA
agttccaggtttactcactc

SEQ ID NO: 113111 - DNA, 20 bp, synthetic construct
  source 1..20: mol_type = other DNA
aagttccaggtttactcact

SEQ ID NO: 113112 - DNA, 20 bp, synthetic construct
  source 1..20: mol_type = other DNA
taagttccaggtttactcac

SEQ ID NO: 113113 - DNA, 20 bp, synthetic construct
  source 1..20: mol_type = other DNA
ctaagttccaggtttactca

SEQ ID NO: 113114 - DNA, 20 bp, synthetic construct
  source 1..20: mol_type = other DNA
tctaagttccaggtttactc

SEQ ID NO: 113115 - DNA, 20 bp, synthetic construct
  source 1..20: mol_type = other DNA
gtctaagttccaggtttact

SEQ ID NO: 113116 - DNA, 20 bp, synthetic construct
  source 1..20: mol_type = other DNA
ggtctaagttccaggtttac

SEQ ID NO: 113117 - DNA, 20 bp, synthetic construct
  source 1..20: mol_type = other DNA
tggtctaagttccaggttta

SEQ ID NO: 113118 - DNA, 20 bp, synthetic construct
  source 1..20: mol_type = other DNA
atggtctaagttccaggttt

SEQ ID NO: 113119 - DNA, 20 bp, synthetic construct
  source 1..20: mol_type = other DNA
gatggtctaagttccaggtt

SEQ ID NO: 113120 - DNA, 20 bp, synthetic construct
  source 1..20: mol_type = other DNA
ggatggtctaagttccaggt

SEQ ID NO: 113121 - DNA, 20 bp, synthetic construct
  source 1..20: mol_type = other DNA
aggatggtctaagttccagg

SEQ ID NO: 113122 - DNA, 20 bp, synthetic construct
  source 1..20: mol_type = other DNA
caggatggtctaagttccag

SEQ ID NO: 113123 - DNA, 20 bp, synthetic construct
  source 1..20: mol_type = other DNA
acaggatggtctaagttcca

SEQ ID NO: 113124 - DNA, 20 bp, synthetic construct
  source 1..20: mol_type = other DNA
aacaggatggtctaagttcc

SEQ ID NO: 113125 - DNA, 20 bp, synthetic construct
  source 1..20: mol_type = other DNA
taacaggatggtctaagttc

SEQ ID NO: 113126 - DNA, 20 bp, synthetic construct
  source 1..20: mol_type = other DNA
gtaacaggatggtctaagtt

SEQ ID NO: 113127 - DNA, 20 bp, synthetic construct
  source 1..20: mol_type = other DNA
agtaacaggatggtctaagt

SEQ ID NO: 113128 - DNA, 20 bp, synthetic construct
  source 1..20: mol_type = other DNA
gagtaacaggatggtctaag

SEQ ID NO: 113129 - DNA, 20 bp, synthetic construct
  source 1..20: mol_type = other DNA
tgagtaacaggatggtctaa

SEQ ID NO: 113130 - DNA, 20 bp, synthetic construct
  source 1..20: mol_type = other DNA
ttgagtaacaggatggtcta

SEQ ID NO: 113131 - DNA, 20 bp, synthetic construct
  source 1..20: mol_type = other DNA
attgagtaacaggatggtct

SEQ ID NO: 113132 - DNA, 20 bp, synthetic construct
  source 1..20: mol_type = other DNA
aattgagtaacaggatggtc

SEQ ID NO: 113133 - DNA, 20 bp, synthetic construct
  source 1..20: mol_type = other DNA
taattgagtaacaggatggt

SEQ ID NO: 113134 - DNA, 20 bp, synthetic construct
  source 1..20: mol_type = other DNA
ttaattgagtaacaggatgg

SEQ ID NO: 113135 - DNA, 20 bp, synthetic construct
  source 1..20: mol_type = other DNA
gttaattgagtaacaggatg

SEQ ID NO: 113136 - DNA, 20 bp, synthetic construct
  source 1..20: mol_type = other DNA
agttaattgagtaacaggat

SEQ ID NO: 113137 - DNA, 20 bp, synthetic construct
  source 1..20: mol_type = other DNA
aagttaattgagtaacagga

SEQ ID NO: 113138 - DNA, 20 bp, synthetic construct
  source 1..20: mol_type = other DNA
aaagttaattgagtaacagg

SEQ ID NO: 113139 - DNA, 20 bp, synthetic construct
  source 1..20: mol_type = other DNA
aaaagttaattgagtaacag

SEQ ID NO: 113140 - DNA, 20 bp, synthetic construct
  source 1..20: mol_type = other DNA
aaaaagttaattgagtaaca

SEQ ID NO: 113141 - DNA, 20 bp, synthetic construct
  source 1..20: mol_type = other DNA
aaaaaagttaattgagtaac

SEQ ID NO: 113142 - DNA, 20 bp, synthetic construct
  source 1..20: mol_type = other DNA
aaaaaaagttaattgagtaa

SEQ ID NO: 113143 - DNA, 20 bp, synthetic construct
  source 1..20: mol_type = other DNA
aaaaaaaagttaattgagta

SEQ ID NO: 113144 - DNA, 20 bp, synthetic construct
  source 1..20: mol_type = other DNA
aaaaaaaaagttaattgagt

SEQ ID NO: 113145 - DNA, 20 bp, synthetic construct
  source 1..20: mol_type = other DNA
aaaaaaaaaagttaattgag

SEQ ID NO: 113146 - DNA, 20 bp, synthetic construct
  source 1..20: mol_type = other DNA
aaaaaaaaaaagttaattga

SEQ ID NO: 113147 - DNA, 20 bp, synthetic construct
  source 1..20: mol_type = other DNA
aaaaaaaaaaaagttaattg

SEQ ID NO: 113148 - DNA, 20 bp, synthetic construct
  source 1..20: mol_type = other DNA
taaaaaaaaaaaagttaatt

SEQ ID NO: 113149 - DNA, 20 bp, synthetic construct
  source 1..20: mol_type = other DNA
ttaaaaaaaaaaaagttaat

SEQ ID NO: 113150 - DNA, 20 bp, synthetic construct
  source 1..20: mol_type = other DNA
tttaaaaaaaaaaaagttaa

SEQ ID NO: 113151 - DNA, 20 bp, synthetic construct
  source 1..20: mol_type = other DNA
ctttaaaaaaaaaaaagtta

SEQ ID NO: 113152 - DNA, 20 bp, synthetic construct
  source 1..20: mol_type = other DNA
cctttaaaaaaaaaaaagtt

SEQ ID NO: 113153 - DNA, 20 bp, synthetic construct
  source 1..20: mol_type = other DNA
gcctttaaaaaaaaaaaagt

SEQ ID NO: 113154 - DNA, 20 bp, synthetic construct
  source 1..20: mol_type = other DNA
tgcctttaaaaaaaaaaaag

SEQ ID NO: 113155 - DNA, 20 bp, synthetic construct
  source 1..20: mol_type = other DNA
atgcctttaaaaaaaaaaaa

SEQ ID NO: 113156 - DNA, 20 bp, synthetic construct
  source 1..20: mol_type = other DNA
aatgcctttaaaaaaaaaaa

SEQ ID NO: 113157 - DNA, 20 bp, synthetic construct
  source 1..20: mol_type = other DNA
aaatgcctttaaaaaaaaaa

SEQ ID NO: 113158 - DNA, 20 bp, synthetic construct
  source 1..20: mol_type = other DNA
taaatgcctttaaaaaaaaa

SEQ ID NO: 113159 - DNA, 20 bp, synthetic construct
  source 1..20: mol_type = other DNA
ctaaatgcctttaaaaaaaa

SEQ ID NO: 113160 - DNA, 20 bp, synthetic construct
  source 1..20: mol_type = other DNA
cctaaatgcctttaaaaaaa

SEQ ID NO: 113161 - DNA, 20 bp, synthetic construct
  source 1..20: mol_type = other DNA
acctaaatgcctttaaaaaa

SEQ ID NO: 113162 - DNA, 20 bp, synthetic construct
  source 1..20: mol_type = other DNA
gacctaaatgcctttaaaaa

SEQ ID NO: 113163 - DNA, 20 bp, synthetic construct
  source 1..20: mol_type = other DNA
ggacctaaatgcctttaaaa

SEQ ID NO: 113164 - DNA, 20 bp, synthetic construct
  source 1..20: mol_type = other DNA
aggacctaaatgcctttaaa

SEQ ID NO: 113165 - DNA, 20 bp, synthetic construct
  source 1..20: mol_type = other DNA
aaggacctaaatgcctttaa

SEQ ID NO: 113166 - DNA, 20 bp, synthetic construct
  source 1..20: mol_type = other DNA
gaaggacctaaatgccttta

SEQ ID NO: 113167 - DNA, 20 bp, synthetic construct
  source 1..20: mol_type = other DNA
ggaaggacctaaatgccttt

SEQ ID NO: 113168 - DNA, 20 bp, synthetic construct
  source 1..20: mol_type = other DNA
tggaaggacctaaatgcctt

SEQ ID NO: 113169 - DNA, 20 bp, synthetic construct
  source 1..20: mol_type = other DNA
ttggaaggacctaaatgcct

SEQ ID NO: 113170 - DNA, 20 bp, synthetic construct
  source 1..20: mol_type = other DNA
gttggaaggacctaaatgcc

SEQ ID NO: 113171 - DNA, 20 bp, synthetic construct
  source 1..20: mol_type = other DNA
agttggaaggacctaaatgc

SEQ ID NO: 113172 - DNA, 20 bp, synthetic construct
  source 1..20: mol_type = other DNA
cagttggaaggacctaaatg

SEQ ID NO: 113173 - DNA, 20 bp, synthetic construct
  source 1..20: mol_type = other DNA
acagttggaaggacctaaat

SEQ ID NO: 113174 - DNA, 20 bp, synthetic construct
  source 1..20: mol_type = other DNA
cacagttggaaggacctaaa

SEQ ID NO: 113175 - DNA, 20 bp, synthetic construct
  source 1..20: mol_type = other DNA
tcacagttggaaggacctaa

SEQ ID NO: 113176 - DNA, 20 bp, synthetic construct
  source 1..20: mol_type = other DNA
ttcacagttggaaggaccta

SEQ ID NO: 113177 - DNA, 20 bp, synthetic construct
  source 1..20: mol_type = other DNA
cttcacagttggaaggacct

SEQ ID NO: 113178 - DNA, 20 bp, synthetic construct
  source 1..20: mol_type = other DNA
tcttcacagttggaaggacc

SEQ ID NO: 113179 - DNA, 20 bp, synthetic construct
  source 1..20: mol_type = other DNA
ttcttcacagttggaaggac

SEQ ID NO: 113180 - DNA, 20 bp, synthetic construct
  source 1..20: mol_type = other DNA
attcttcacagttggaagga

SEQ ID NO: 113181 - DNA, 20 bp, synthetic construct
  source 1..20: mol_type = other DNA
gattcttcacagttggaagg

SEQ ID NO: 113182 - DNA, 20 bp, synthetic construct
  source 1..20: mol_type = other DNA
ggattcttcacagttggaag

SEQ ID NO: 113183 - DNA, 20 bp, synthetic construct
  source 1..20: mol_type = other DNA
tggattcttcacagttggaa

SEQ ID NO: 113184 - DNA, 20 bp, synthetic construct
  source 1..20: mol_type = other DNA
atggattcttcacagttgga

SEQ ID NO: 113185 - DNA, 20 bp, synthetic construct
  source 1..20: mol_type = other DNA
gatggattcttcacagttgg

SEQ ID NO: 113186 - DNA, 20 bp, synthetic construct
  source 1..20: mol_type = other DNA
agatggattcttcacagttg

SEQ ID NO: 113187 - DNA, 20 bp, synthetic construct
  source 1..20: mol_type = other DNA
cagatggattcttcacagtt

SEQ ID NO: 113188 - DNA, 20 bp, synthetic construct
  source 1..20: mol_type = other DNA
ccagatggattcttcacagt

SEQ ID NO: 113189 - DNA, 20 bp, synthetic construct
  source 1..20: mol_type = other DNA
tccagatggattcttcacag

SEQ ID NO: 113190 - DNA, 20 bp, synthetic construct
  source 1..20: mol_type = other DNA
gtccagatggattcttcaca

SEQ ID NO: 113191 - DNA, 20 bp, synthetic construct
  source 1..20: mol_type = other DNA
agtccagatggattcttcac

SEQ ID NO: 113192 - DNA, 20 bp, synthetic construct
  source 1..20: mol_type = other DNA
aagtccagatggattcttca

SEQ ID NO: 113193 - DNA, 20 bp, synthetic construct
  source 1..20: mol_type = other DNA
aaagtccagatggattcttc

SEQ ID NO: 113194 - DNA, 20 bp, synthetic construct
  source 1..20: mol_type = other DNA
aaaagtccagatggattctt

SEQ ID NO: 113195 - DNA, 20 bp, synthetic construct
  source 1..20: mol_type = other DNA
taaaagtccagatggattct

SEQ ID NO: 113196 - DNA, 20 bp, synthetic construct
  source 1..20: mol_type = other DNA
ctaaaagtccagatggattc

SEQ ID NO: 113197 - DNA, 20 bp, synthetic construct
  source 1..20: mol_type = other DNA
tctaaaagtccagatggatt

SEQ ID NO: 113198 - DNA, 20 bp, synthetic construct
  source 1..20: mol_type = other DNA
gtctaaaagtccagatggat

SEQ ID NO: 113199 - DNA, 20 bp, synthetic construct
  source 1..20: mol_type = other DNA
agtctaaaagtccagatgga

SEQ ID NO: 113200 - DNA, 20 bp, synthetic construct
  source 1..20: mol_type = other DNA
tagtctaaaagtccagatgg

SEQ ID NO: 113201 - DNA, 20 bp, synthetic construct
  source 1..20: mol_type = other DNA
gtagtctaaaagtccagatg

SEQ ID NO: 113202 - DNA, 20 bp, synthetic construct
  source 1..20: mol_type = other DNA
agtagtctaaaagtccagat

SEQ ID NO: 113203 - DNA, 20 bp, synthetic construct
  source 1..20: mol_type = other DNA
aagtagtctaaaagtccaga

SEQ ID NO: 113204 - DNA, 20 bp, synthetic construct
  source 1..20: mol_type = other DNA
aaagtagtctaaaagtccag

SEQ ID NO: 113205 - DNA, 20 bp, synthetic construct
  source 1..20: mol_type = other DNA
taaagtagtctaaaagtcca

SEQ ID NO: 113206 - DNA, 20 bp, synthetic construct
  source 1..20: mol_type = other DNA
ataaagtagtctaaaagtcc

SEQ ID NO: 113207 - DNA, 20 bp, synthetic construct
  source 1..20: mol_type = other DNA
tataaagtagtctaaaagtc

SEQ ID NO: 113208 - DNA, 20 bp, synthetic construct
  source 1..20: mol_type = other DNA
gtataaagtagtctaaaagt

SEQ ID NO: 113209 - DNA, 20 bp, synthetic construct
  source 1..20: mol_type = other DNA
tgtataaagtagtctaaaag

SEQ ID NO: 113210 - DNA, 20 bp, synthetic construct
  source 1..20: mol_type = other DNA
atgtataaagtagtctaaaa

SEQ ID NO: 113211 - DNA, 20 bp, synthetic construct
  source 1..20: mol_type = other DNA
aatgtataaagtagtctaaa

SEQ ID NO: 113212 - DNA, 20 bp, synthetic construct
  source 1..20: mol_type = other DNA
caatgtataaagtagtctaa

SEQ ID NO: 113213 - DNA, 20 bp, synthetic construct
  source 1..20: mol_type = other DNA
gcaatgtataaagtagtcta

SEQ ID NO: 113214 - DNA, 20 bp, synthetic construct
  source 1..20: mol_type = other DNA
ggcaatgtataaagtagtct

SEQ ID NO: 113215 - DNA, 20 bp, synthetic construct
  source 1..20: mol_type = other DNA
gggcaatgtataaagtagtc

SEQ ID NO: 113216 - DNA, 20 bp, synthetic construct
  source 1..20: mol_type = other DNA
agggcaatgtataaagtagt

SEQ ID NO: 113217 - DNA, 20 bp, synthetic construct
  source 1..20: mol_type = other DNA
aagggcaatgtataaagtag

SEQ ID NO: 113218 - DNA, 20 bp, synthetic construct
  source 1..20: mol_type = other DNA
taagggcaatgtataaagta

SEQ ID NO: 113219 - DNA, 20 bp, synthetic construct
  source 1..20: mol_type = other DNA
ctaagggcaatgtataaagt

SEQ ID NO: 113220 - DNA, 20 bp, synthetic construct
  source 1..20: mol_type = other DNA
actaagggcaatgtataaag

SEQ ID NO: 113221 - DNA, 20 bp, synthetic construct
  source 1..20: mol_type = other DNA
aactaagggcaatgtataaa

SEQ ID NO: 113222 - DNA, 20 bp, synthetic construct
  source 1..20: mol_type = other DNA
aaactaagggcaatgtataa

SEQ ID NO: 113223 - DNA, 20 bp, synthetic construct
  source 1..20: mol_type = other DNA
taaactaagggcaatgtata

SEQ ID NO: 113224 - DNA, 20 bp, synthetic construct
  source 1..20: mol_type = other DNA
gtaaactaagggcaatgtat

SEQ ID NO: 113225 - DNA, 20 bp, synthetic construct
  source 1..20: mol_type = other DNA
tgtaaactaagggcaatgta

SEQ ID NO: 113226 - DNA, 20 bp, synthetic construct
  source 1..20: mol_type = other DNA
ttgtaaactaagggcaatgt

SEQ ID NO: 113227 - DNA, 20 bp, synthetic construct
  source 1..20: mol_type = other DNA
tttgtaaactaagggcaatg

SEQ ID NO: 113228 - DNA, 20 bp, synthetic construct
  source 1..20: mol_type = other DNA
gtttgtaaactaagggcaat

SEQ ID NO: 113229 - DNA, 20 bp, synthetic construct
  source 1..20: mol_type = other DNA
tgtttgtaaactaagggcaa

SEQ ID NO: 113230 - DNA, 20 bp, synthetic construct
  source 1..20: mol_type = other DNA
ctgtttgtaaactaagggca

SEQ ID NO: 113231 - DNA, 20 bp, synthetic construct
  source 1..20: mol_type = other DNA
gctgtttgtaaactaagggc

SEQ ID NO: 113232 - DNA, 20 bp, synthetic construct
  source 1..20: mol_type = other DNA
agctgtttgtaaactaaggg

SEQ ID NO: 113233 - DNA, 20 bp, synthetic construct
  source 1..20: mol_type = other DNA
tagctgtttgtaaactaagg

SEQ ID NO: 113234 - DNA, 20 bp, synthetic construct
  source 1..20: mol_type = other DNA
ctagctgtttgtaaactaag

SEQ ID NO: 113235 - DNA, 20 bp, synthetic construct
  source 1..20: mol_type = other DNA
actagctgtttgtaaactaa

SEQ ID NO: 113236 - DNA, 20 bp, synthetic construct
  source 1..20: mol_type = other DNA
gactagctgtttgtaaacta

SEQ ID NO: 113237 - DNA, 20 bp, synthetic construct
  source 1..20: mol_type = other DNA
ggactagctgtttgtaaact

SEQ ID NO: 113238 - DNA, 20 bp, synthetic construct
  source 1..20: mol_type = other DNA
tggactagctgtttgtaaac

SEQ ID NO: 113239 - DNA, 20 bp, synthetic construct
  source 1..20: mol_type = other DNA
ttggactagctgtttgtaaa

SEQ ID NO: 113240 - DNA, 20 bp, synthetic construct
  source 1..20: mol_type = other DNA
tttggactagctgtttgtaa

SEQ ID NO: 113241 - DNA, 20 bp, synthetic construct
  source 1..20: mol_type = other DNA
gtttggactagctgtttgta

SEQ ID NO: 113242 - DNA, 20 bp, synthetic construct
  source 1..20: mol_type = other DNA
tgtttggactagctgtttgt

SEQ ID NO: 113243 - DNA, 20 bp, synthetic construct
  source 1..20: mol_type = other DNA
ttgtttggactagctgtttg

SEQ ID NO: 113244 - DNA, 20 bp, synthetic construct
  source 1..20: mol_type = other DNA
tttgtttggactagctgttt

SEQ ID NO: 113245 - DNA, 20 bp, synthetic construct
  source 1..20: mol_type = other DNA
atttgtttggactagctgtt

SEQ ID NO: 113246 - DNA, 20 bp, synthetic construct
  source 1..20: mol_type = other DNA
catttgtttggactagctgt

SEQ ID NO: 113247 - DNA, 20 bp, synthetic construct
  source 1..20: mol_type = other DNA
tcatttgtttggactagctg

SEQ ID NO: 113248 - DNA, 20 bp, synthetic construct
  source 1..20: mol_type = other DNA
gtcatttgtttggactagct

SEQ ID NO: 113249 - DNA, 20 bp, synthetic construct
  source 1..20: mol_type = other DNA
tgtcatttgtttggactagc

SEQ ID NO: 113250 - DNA, 20 bp, synthetic construct
  source 1..20: mol_type = other DNA
atgtcatttgtttggactag

SEQ ID NO: 113251 - DNA, 20 bp, synthetic construct
  source 1..20: mol_type = other DNA
gatgtcatttgtttggacta

SEQ ID NO: 113252 - DNA, 20 bp, synthetic construct
  source 1..20: mol_type = other DNA
agatgtcatttgtttggact

SEQ ID NO: 113253 - DNA, 20 bp, synthetic construct
  source 1..20: mol_type = other DNA
aagatgtcatttgtttggac

SEQ ID NO: 113254 - DNA, 20 bp, synthetic construct
  source 1..20: mol_type = other DNA
taagatgtcatttgtttgga

SEQ ID NO: 113255 - DNA, 20 bp, synthetic construct
  source 1..20: mol_type = other DNA
ttaagatgtcatttgtttgg

SEQ ID NO: 113256 - DNA, 20 bp, synthetic construct
  source 1..20: mol_type = other DNA
cttaagatgtcatttgtttg

SEQ ID NO: 113257 - DNA, 20 bp, synthetic construct
  source 1..20: mol_type = other DNA
acttaagatgtcatttgttt

SEQ ID NO: 113258 - DNA, 20 bp, synthetic construct
  source 1..20: mol_type = other DNA
tacttaagatgtcatttgtt

SEQ ID NO: 113259 - DNA, 20 bp, synthetic construct
  source 1..20: mol_type = other DNA
ttacttaagatgtcatttgt

SEQ ID NO: 113260 - DNA, 20 bp, synthetic construct
  source 1..20: mol_type = other DNA
tttacttaagatgtcatttg

SEQ ID NO: 113261 - DNA, 20 bp, synthetic construct
  source 1..20: mol_type = other DNA
atttacttaagatgtcattt

SEQ ID NO: 113262 - DNA, 20 bp, synthetic construct
  source 1..20: mol_type = other DNA
catttacttaagatgtcatt

SEQ ID NO: 113263 - DNA, 20 bp, synthetic construct
  source 1..20: mol_type = other DNA
tcatttacttaagatgtcat

SEQ ID NO: 113264 - DNA, 20 bp, synthetic construct
  source 1..20: mol_type = other DNA
ctcatttacttaagatgtca

SEQ ID NO: 113265 - DNA, 20 bp, synthetic construct
  source 1..20: mol_type = other DNA
cctcatttacttaagatgtc

SEQ ID NO: 113266 - DNA, 20 bp, synthetic construct
  source 1..20: mol_type = other DNA
acctcatttacttaagatgt

SEQ ID NO: 113267 - DNA, 20 bp, synthetic construct
  source 1..20: mol_type = other DNA
aacctcatttacttaagatg

SEQ ID NO: 113268 - DNA, 20 bp, synthetic construct
  source 1..20: mol_type = other DNA
taacctcatttacttaagat

SEQ ID NO: 113269 - DNA, 20 bp, synthetic construct
  source 1..20: mol_type = other DNA
ataacctcatttacttaaga

SEQ ID NO: 113270 - DNA, 20 bp, synthetic construct
  source 1..20: mol_type = other DNA
aataacctcatttacttaag

SEQ ID NO: 113271 - DNA, 20 bp, synthetic construct
  source 1..20: mol_type = other DNA
caataacctcatttacttaa

SEQ ID NO: 113272 - DNA, 20 bp, synthetic construct
  source 1..20: mol_type = other DNA
gcaataacctcatttactta

SEQ ID NO: 113273 - DNA, 20 bp, synthetic construct
  source 1..20: mol_type = other DNA
tgcaataacctcatttactt

SEQ ID NO: 113274 - DNA, 20 bp, synthetic construct
  source 1..20: mol_type = other DNA
gtgcaataacctcatttact

SEQ ID NO: 113275 - DNA, 20 bp, synthetic construct
  source 1..20: mol_type = other DNA
ggtgcaataacctcatttac

SEQ ID NO: 113276 - DNA, 20 bp, synthetic construct
  source 1..20: mol_type = other DNA
gggtgcaataacctcattta

SEQ ID NO: 113277 - DNA, 20 bp, synthetic construct
  source 1..20: mol_type = other DNA
agggtgcaataacctcattt

SEQ ID NO: 113278 - DNA, 20 bp, synthetic construct
  source 1..20: mol_type = other DNA
cagggtgcaataacctcatt

SEQ ID NO: 113279 - DNA, 20 bp, synthetic construct
  source 1..20: mol_type = other DNA
acagggtgcaataacctcat

SEQ ID NO: 113280 - DNA, 20 bp, synthetic construct
  source 1..20: mol_type = other DNA
cacagggtgcaataacctca

SEQ ID NO: 113281 - DNA, 20 bp, synthetic construct
  source 1..20: mol_type = other DNA
gcacagggtgcaataacctc

SEQ ID NO: 113282 - DNA, 20 bp, synthetic construct
  source 1..20: mol_type = other DNA
agcacagggtgcaataacct

SEQ ID NO: 113283 - DNA, 20 bp, synthetic construct
  source 1..20: mol_type = other DNA
tagcacagggtgcaataacc

SEQ ID NO: 113284 - DNA, 20 bp, synthetic construct
  source 1..20: mol_type = other DNA
gtagcacagggtgcaataac

SEQ ID NO: 113285 - DNA, 20 bp, synthetic construct
  source 1..20: mol_type = other DNA
agtagcacagggtgcaataa

SEQ ID NO: 113286 - DNA, 20 bp, synthetic construct
  source 1..20: mol_type = other DNA
gagtagcacagggtgcaata

SEQ ID NO: 113287 - DNA, 20 bp, synthetic construct
  source 1..20: mol_type = other DNA
agagtagcacagggtgcaat

SEQ ID NO: 113288 - DNA, 20 bp, synthetic construct
  source 1..20: mol_type = other DNA
aagagtagcacagggtgcaa

SEQ ID NO: 113289 - DNA, 20 bp, synthetic construct
  source 1..20: mol_type = other DNA
gaagagtagcacagggtgca

SEQ ID NO: 113290 - DNA, 20 bp, synthetic construct
  source 1..20: mol_type = other DNA
agaagagtagcacagggtgc

SEQ ID NO: 113291 - DNA, 20 bp, synthetic construct
  source 1..20: mol_type = other DNA
cagaagagtagcacagggtg

SEQ ID NO: 113292 - DNA, 20 bp, synthetic construct
  source 1..20: mol_type = other DNA
acagaagagtagcacagggt

SEQ ID NO: 113293 - DNA, 20 bp, synthetic construct
  source 1..20: mol_type = other DNA
aacagaagagtagcacaggg

SEQ ID NO: 113294 - DNA, 20 bp, synthetic construct
  source 1..20: mol_type = other DNA
gaacagaagagtagcacagg

SEQ ID NO: 113295 - DNA, 20 bp, synthetic construct
  source 1..20: mol_type = other DNA
agaacagaagagtagcacag

SEQ ID NO: 113296 - DNA, 20 bp, synthetic construct
  source 1..20: mol_type = other DNA
aagaacagaagagtagcaca

SEQ ID NO: 113297 - DNA, 20 bp, synthetic construct
  source 1..20: mol_type = other DNA
gaagaacagaagagtagcac

SEQ ID NO: 113298 - DNA, 20 bp, synthetic construct
  source 1..20: mol_type = other DNA
ggaagaacagaagagtagca

SEQ ID NO: 113299 - DNA, 20 bp, synthetic construct
  source 1..20: mol_type = other DNA
gggaagaacagaagagtagc

SEQ ID NO: 113300 - DNA, 20 bp, synthetic construct
  source 1..20: mol_type = other DNA
ggggaagaacagaagagtag

SEQ ID NO: 113301 - DNA, 20 bp, synthetic construct
  source 1..20: mol_type = other DNA
aggggaagaacagaagagta

SEQ ID NO: 113302 - DNA, 20 bp, synthetic construct
  source 1..20: mol_type = other DNA
aaggggaagaacagaagagt

SEQ ID NO: 113303 - DNA, 20 bp, synthetic construct
  source 1..20: mol_type = other DNA
aaaggggaagaacagaagag

SEQ ID NO: 113304 - DNA, 20 bp, synthetic construct
  source 1..20: mol_type = other DNA
aaaaggggaagaacagaaga

SEQ ID NO: 113305 - DNA, 20 bp, synthetic construct
  source 1..20: mol_type = other DNA
aaaaaggggaagaacagaag

SEQ ID NO: 113306 - DNA, 20 bp, synthetic construct
  source 1..20: mol_type = other DNA
aaaaaaggggaagaacagaa

SEQ ID NO: 113307 - DNA, 20 bp, synthetic construct
  source 1..20: mol_type = other DNA
caaaaaaggggaagaacaga

SEQ ID NO: 113308 - DNA, 20 bp, synthetic construct
  source 1..20: mol_type = other DNA
acaaaaaaggggaagaacag

SEQ ID NO: 113309 - DNA, 20 bp, synthetic construct
  source 1..20: mol_type = other DNA
tacaaaaaaggggaagaaca

SEQ ID NO: 113310 - DNA, 20 bp, synthetic construct
  source 1..20: mol_type = other DNA
gtacaaaaaaggggaagaac

SEQ ID NO: 113311 - DNA, 20 bp, synthetic construct
  source 1..20: mol_type = other DNA
ggtacaaaaaaggggaagaa

SEQ ID NO: 113312 - DNA, 20 bp, synthetic construct
  source 1..20: mol_type = other DNA
gggtacaaaaaaggggaaga

SEQ ID NO: 113313 - DNA, 20 bp, synthetic construct
  source 1..20: mol_type = other DNA
ggggtacaaaaaaggggaag

SEQ ID NO: 113314 - DNA, 20 bp, synthetic construct
  source 1..20: mol_type = other DNA
tggggtacaaaaaaggggaa

SEQ ID NO: 113315 - DNA, 20 bp, synthetic construct
  source 1..20: mol_type = other DNA
ctggggtacaaaaaagggga

SEQ ID NO: 113316 - DNA, 20 bp, synthetic construct
  source 1..20: mol_type = other DNA
cctggggtacaaaaaagggg

SEQ ID NO: 113317 - DNA, 20 bp, synthetic construct
  source 1..20: mol_type = other DNA
ccctggggtacaaaaaaggg

SEQ ID NO: 113318 - DNA, 20 bp, synthetic construct
  source 1..20: mol_type = other DNA
gccctggggtacaaaaaagg

SEQ ID NO: 113319 - DNA, 20 bp, synthetic construct
  source 1..20: mol_type = other DNA
agccctggggtacaaaaaag

SEQ ID NO: 113320 - DNA, 20 bp, synthetic construct
  source 1..20: mol_type = other DNA
tagccctggggtacaaaaaa

SEQ ID NO: 113321 - DNA, 20 bp, synthetic construct
  source 1..20: mol_type = other DNA
ctagccctggggtacaaaaa

SEQ ID NO: 113322 - DNA, 20 bp, synthetic construct
  source 1..20: mol_type = other DNA
tctagccctggggtacaaaa

SEQ ID NO: 113323 - DNA, 20 bp, synthetic construct
  source 1..20: mol_type = other DNA
ttctagccctggggtacaaa

SEQ ID NO: 113324 - DNA, 20 bp, synthetic construct
  source 1..20: mol_type = other DNA
tttctagccctggggtacaa

SEQ ID NO: 113325 - DNA, 20 bp, synthetic construct
  source 1..20: mol_type = other DNA
ttttctagccctggggtaca

SEQ ID NO: 113326 - DNA, 20 bp, synthetic construct
  source 1..20: mol_type = other DNA
tttttctagccctggggtac

SEQ ID NO: 113327 - DNA, 20 bp, synthetic construct
  source 1..20: mol_type = other DNA
gtttttctagccctggggta

SEQ ID NO: 113328 - DNA, 20 bp, synthetic construct
  source 1..20: mol_type = other DNA
tgtttttctagccctggggt

SEQ ID NO: 113329 - DNA, 20 bp, synthetic construct
  source 1..20: mol_type = other DNA
ttgtttttctagccctgggg

SEQ ID NO: 113330 - DNA, 20 bp, synthetic construct
  source 1..20: mol_type = other DNA
cttgtttttctagccctggg

SEQ ID NO: 113331 - DNA, 20 bp, synthetic construct
  source 1..20: mol_type = other DNA
ccttgtttttctagccctgg

SEQ ID NO: 113332 - DNA, 20 bp, synthetic construct
  source 1..20: mol_type = other DNA
gccttgtttttctagccctg

SEQ ID NO: 113333 - DNA, 20 bp, synthetic construct
  source 1..20: mol_type = other DNA
tgccttgtttttctagccct

SEQ ID NO: 113334 - DNA, 20 bp, synthetic construct
  source 1..20: mol_type = other DNA
atgccttgtttttctagccc

SEQ ID NO: 113335 - DNA, 20 bp, synthetic construct
  source 1..20: mol_type = other DNA
tatgccttgtttttctagcc

SEQ ID NO: 113336 - DNA, 20 bp, synthetic construct
  source 1..20: mol_type = other DNA
ttatgccttgtttttctagc

SEQ ID NO: 113337 - DNA, 20 bp, synthetic construct
  source 1..20: mol_type = other DNA
tttatgccttgtttttctag

SEQ ID NO: 113338 - DNA, 20 bp, synthetic construct
  source 1..20: mol_type = other DNA
atttatgccttgtttttcta

SEQ ID NO: 113339 - DNA, 20 bp, synthetic construct
  source 1..20: mol_type = other DNA
aatttatgccttgtttttct

SEQ ID NO: 113340 - DNA, 20 bp, synthetic construct
  source 1..20: mol_type = other DNA
taatttatgccttgtttttc

SEQ ID NO: 113341 - DNA, 20 bp, synthetic construct
  source 1..20: mol_type = other DNA
ttaatttatgccttgttttt

SEQ ID NO: 113342 - DNA, 20 bp, synthetic construct
  source 1..20: mol_type = other DNA
cttaatttatgccttgtttt

SEQ ID NO: 113343 - DNA, 20 bp, synthetic construct
  source 1..20: mol_type = other DNA
tcttaatttatgccttgttt

SEQ ID NO: 113344 - DNA, 20 bp, synthetic construct
  source 1..20: mol_type = other DNA
ttcttaatttatgccttgtt

SEQ ID NO: 113345 - DNA, 20 bp, synthetic construct
  source 1..20: mol_type = other DNA
tttcttaatttatgccttgt

SEQ ID NO: 113346 - DNA, 20 bp, synthetic construct
  source 1..20: mol_type = other DNA
ttttcttaatttatgccttg

SEQ ID NO: 113347 - DNA, 20 bp, synthetic construct
  source 1..20: mol_type = other DNA
cttttcttaatttatgcctt

SEQ ID NO: 113348 - DNA, 20 bp, synthetic construct
  source 1..20: mol_type = other DNA
acttttcttaatttatgcct

SEQ ID NO: 113349 - DNA, 20 bp, synthetic construct
  source 1..20: mol_type = other DNA
aacttttcttaatttatgcc

SEQ ID NO: 113350 - DNA, 20 bp, synthetic construct
  source 1..20: mol_type = other DNA
aaacttttcttaatttatgc

SEQ ID NO: 113351 - DNA, 20 bp, synthetic construct
  source 1..20: mol_type = other DNA
aaaacttttcttaatttatg

SEQ ID NO: 113352 - DNA, 20 bp, synthetic construct
  source 1..20: mol_type = other DNA
aaaaacttttcttaatttat

SEQ ID NO: 113353 - DNA, 20 bp, synthetic construct
  source 1..20: mol_type = other DNA
gaaaaacttttcttaattta

SEQ ID NO: 113354 - DNA, 20 bp, synthetic construct
  source 1..20: mol_type = other DNA
agaaaaacttttcttaattt

SEQ ID NO: 113355 - DNA, 20 bp, synthetic construct
  source 1..20: mol_type = other DNA
cagaaaaacttttcttaatt

SEQ ID NO: 113356 - DNA, 20 bp, synthetic construct
  source 1..20: mol_type = other DNA
acagaaaaacttttcttaat

SEQ ID NO: 113357 - DNA, 20 bp, synthetic construct
  source 1..20: mol_type = other DNA
tacagaaaaacttttcttaa

SEQ ID NO: 113358 - DNA, 20 bp, synthetic construct
  source 1..20: mol_type = other DNA
ttacagaaaaacttttctta

SEQ ID NO: 113359 - DNA, 20 bp, synthetic construct
  source 1..20: mol_type = other DNA
tttacagaaaaacttttctt

SEQ ID NO: 113360 - DNA, 20 bp, synthetic construct
  source 1..20: mol_type = other DNA
atttacagaaaaacttttct

SEQ ID NO: 113361 - DNA, 20 bp, synthetic construct
  source 1..20: mol_type = other DNA
catttacagaaaaacttttc

SEQ ID NO: 113362 - DNA, 20 bp, synthetic construct
  source 1..20: mol_type = other DNA
tcatttacagaaaaactttt

SEQ ID NO: 113363 - DNA, 20 bp, synthetic construct
  source 1..20: mol_type = other DNA
ttcatttacagaaaaacttt

SEQ ID NO: 113364 - DNA, 20 bp, synthetic construct
  source 1..20: mol_type = other DNA
gttcatttacagaaaaactt

SEQ ID NO: 113365 - DNA, 20 bp, synthetic construct
  source 1..20: mol_type = other DNA
tgttcatttacagaaaaact

SEQ ID NO: 113366 - DNA, 20 bp, synthetic construct
  source 1..20: mol_type = other DNA
ctgttcatttacagaaaaac

SEQ ID NO: 113367 - DNA, 20 bp, synthetic construct
  source 1..20: mol_type = other DNA
cctgttcatttacagaaaaa

SEQ ID NO: 113368 - DNA, 20 bp, synthetic construct
  source 1..20: mol_type = other DNA
tcctgttcatttacagaaaa

SEQ ID NO: 113369 - DNA, 20 bp, synthetic construct
  source 1..20: mol_type = other DNA
ctcctgttcatttacagaaa

SEQ ID NO: 113370 - DNA, 20 bp, synthetic construct
  source 1..20: mol_type = other DNA
actcctgttcatttacagaa

SEQ ID NO: 113371 - DNA, 20 bp, synthetic construct
  source 1..20: mol_type = other DNA
aactcctgttcatttacaga

SEQ ID NO: 113372 - DNA, 20 bp, synthetic construct
  source 1..20: mol_type = other DNA
caactcctgttcatttacag

SEQ ID NO: 113373 - DNA, 20 bp, synthetic construct
  source 1..20: mol_type = other DNA
tcaactcctgttcatttaca

SEQ ID NO: 113374 - DNA, 20 bp, synthetic construct
  source 1..20: mol_type = other DNA
ttcaactcctgttcatttac

SEQ ID NO: 113375 - DNA, 20 bp, synthetic construct
  source 1..20: mol_type = other DNA
tttcaactcctgttcattta

SEQ ID NO: 113376 - DNA, 20 bp, synthetic construct
  source 1..20: mol_type = other DNA
ttttcaactcctgttcattt

SEQ ID NO: 113377 - DNA, 20 bp, synthetic construct
  source 1..20: mol_type = other DNA
tttttcaactcctgttcatt

SEQ ID NO: 113378 - DNA, 20 bp, synthetic construct
  source 1..20: mol_type = other DNA
atttttcaactcctgttcat

SEQ ID NO: 113379 - DNA, 20 bp, synthetic construct
  source 1..20: mol_type = other DNA
aatttttcaactcctgttca

SEQ ID NO: 113380 - DNA, 20 bp, synthetic construct
  source 1..20: mol_type = other DNA
taatttttcaactcctgttc

SEQ ID NO: 113381 - DNA, 20 bp, synthetic construct
  source 1..20: mol_type = other DNA
ataatttttcaactcctgtt

SEQ ID NO: 113382 - DNA, 20 bp, synthetic construct
  source 1..20: mol_type = other DNA
gataatttttcaactcctgt

SEQ ID NO: 113383 - DNA, 20 bp, synthetic construct
  source 1..20: mol_type = other DNA
tgataatttttcaactcctg

SEQ ID NO: 113384 - DNA, 20 bp, synthetic construct
  source 1..20: mol_type = other DNA
ttgataatttttcaactcct

SEQ ID NO: 113385 - DNA, 20 bp, synthetic construct
  source 1..20: mol_type = other DNA
attgataatttttcaactcc

SEQ ID NO: 113386 - DNA, 20 bp, synthetic construct
  source 1..20: mol_type = other DNA
aattgataatttttcaactc

SEQ ID NO: 113387 - DNA, 20 bp, synthetic construct
  source 1..20: mol_type = other DNA
gaattgataatttttcaact

SEQ ID NO: 113388 - DNA, 20 bp, synthetic construct
  source 1..20: mol_type = other DNA
tgaattgataatttttcaac

SEQ ID NO: 113389 - DNA, 20 bp, synthetic construct
  source 1..20: mol_type = other DNA
ctgaattgataatttttcaa

SEQ ID NO: 113390 - DNA, 20 bp, synthetic construct
  source 1..20: mol_type = other DNA
cctgaattgataatttttca

SEQ ID NO: 113391 - DNA, 20 bp, synthetic construct
  source 1..20: mol_type = other DNA
ccctgaattgataatttttc

SEQ ID NO: 113392 - DNA, 20 bp, synthetic construct
  source 1..20: mol_type = other DNA
cccctgaattgataattttt

SEQ ID NO: 113393 - DNA, 20 bp, synthetic construct
  source 1..20: mol_type = other DNA
tcccctgaattgataatttt

SEQ ID NO: 113394 - DNA, 20 bp, synthetic construct
  source 1..20: mol_type = other DNA
gtcccctgaattgataattt

SEQ ID NO: 113395 - DNA, 20 bp, synthetic construct
  source 1..20: mol_type = other DNA
ggtcccctgaattgataatt

SEQ ID NO: 113396 - DNA, 20 bp, synthetic construct
  source 1..20: mol_type = other DNA
aggtcccctgaattgataat

SEQ ID NO: 113397 - DNA, 20 bp, synthetic construct
  source 1..20: mol_type = other DNA
taggtcccctgaattgataa

SEQ ID NO: 113398 - DNA, 20 bp, synthetic construct
  source 1..20: mol_type = other DNA
ataggtcccctgaattgata

SEQ ID NO: 113399 - DNA, 20 bp, synthetic construct
  source 1..20: mol_type = other DNA
gataggtcccctgaattgat

SEQ ID NO: 113400 - DNA, 20 bp, synthetic construct
  source 1..20: mol_type = other DNA
agataggtcccctgaattga

SEQ ID NO: 113401 - DNA, 20 bp, synthetic construct
  source 1..20: mol_type = other DNA
aagataggtcccctgaattg

SEQ ID NO: 113402 - DNA, 20 bp, synthetic construct
  source 1..20: mol_type = other DNA
aaagataggtcccctgaatt

SEQ ID NO: 113403 - DNA, 20 bp, synthetic construct
  source 1..20: mol_type = other DNA
taaagataggtcccctgaat

SEQ ID NO: 113404 - DNA, 20 bp, synthetic construct
  source 1..20: mol_type = other DNA
gtaaagataggtcccctgaa

SEQ ID NO: 113405 - DNA, 20 bp, synthetic construct
  source 1..20: mol_type = other DNA
agtaaagataggtcccctga

SEQ ID NO: 113406 - DNA, 20 bp, synthetic construct
  source 1..20: mol_type = other DNA
cagtaaagataggtcccctg

SEQ ID NO: 113407 - DNA, 20 bp, synthetic construct
  source 1..20: mol_type = other DNA
ccagtaaagataggtcccct

SEQ ID NO: 113408 - DNA, 20 bp, synthetic construct
  source 1..20: mol_type = other DNA
tccagtaaagataggtcccc

SEQ ID NO: 113409 - DNA, 20 bp, synthetic construct
  source 1..20: mol_type = other DNA
atccagtaaagataggtccc

SEQ ID NO: 113410 - DNA, 20 bp, synthetic construct
  source 1..20: mol_type = other DNA
aatccagtaaagataggtcc

SEQ ID NO: 113411 - DNA, 20 bp, synthetic construct
  source 1..20: mol_type = other DNA
gaatccagtaaagataggtc

SEQ ID NO: 113412 - DNA, 20 bp, synthetic construct
  source 1..20: mol_type = other DNA
ggaatccagtaaagataggt

SEQ ID NO: 113413 - DNA, 20 bp, synthetic construct
  source 1..20: mol_type = other DNA
tggaatccagtaaagatagg

SEQ ID NO: 113414 - DNA, 20 bp, synthetic construct
  source 1..20: mol_type = other DNA
gtggaatccagtaaagatag

SEQ ID NO: 113415 - DNA, 20 bp, synthetic construct
  source 1..20: mol_type = other DNA
agtggaatccagtaaagata

SEQ ID NO: 113416 - DNA, 20 bp, synthetic construct
  source 1..20: mol_type = other DNA
gagtggaatccagtaaagat

SEQ ID NO: 113417 - DNA, 20 bp, synthetic construct
  source 1..20: mol_type = other DNA
tgagtggaatccagtaaaga

SEQ ID NO: 113418 - DNA, 20 bp, synthetic construct
  source 1..20: mol_type = other DNA
atgagtggaatccagtaaag

SEQ ID NO: 113419 - DNA, 20 bp, synthetic construct
  source 1..20: mol_type = other DNA
aatgagtggaatccagtaaa

SEQ ID NO: 113420 - DNA, 20 bp, synthetic construct
  source 1..20: mol_type = other DNA
taatgagtggaatccagtaa

SEQ ID NO: 113421 - DNA, 20 bp, synthetic construct
  source 1..20: mol_type = other DNA
ctaatgagtggaatccagta

SEQ ID NO: 113422 - DNA, 20 bp, synthetic construct
  source 1..20: mol_type = other DNA
actaatgagtggaatccagt

SEQ ID NO: 113423 - DNA, 20 bp, synthetic construct
  source 1..20: mol_type = other DNA
gactaatgagtggaatccag

SEQ ID NO: 113424 - DNA, 20 bp, synthetic construct
  source 1..20: mol_type = other DNA
tgactaatgagtggaatcca

SEQ ID NO: 113425 - DNA, 20 bp, synthetic construct
  source 1..20: mol_type = other DNA
gtgactaatgagtggaatcc

SEQ ID NO: 113426 - DNA, 20 bp, synthetic construct
  source 1..20: mol_type = other DNA
ggtgactaatgagtggaatc

SEQ ID NO: 113427 - DNA, 20 bp, synthetic construct
  source 1..20: mol_type = other DNA
gggtgactaatgagtggaat

SEQ ID NO: 113428 - DNA, 20 bp, synthetic construct
  source 1..20: mol_type = other DNA
agggtgactaatgagtggaa

SEQ ID NO: 113429 - DNA, 20 bp, synthetic construct
  source 1..20: mol_type = other DNA
gagggtgactaatgagtgga

SEQ ID NO: 113430 - DNA, 20 bp, synthetic construct
  source 1..20: mol_type = other DNA
tgagggtgactaatgagtgg

SEQ ID NO: 113431 - DNA, 20 bp, synthetic construct
  source 1..20: mol_type = other DNA
gtgagggtgactaatgagtg

SEQ ID NO: 113432 - DNA, 20 bp, synthetic construct
  source 1..20: mol_type = other DNA
agtgagggtgactaatgagt

SEQ ID NO: 113433 - DNA, 20 bp, synthetic construct
  source 1..20: mol_type = other DNA
cagtgagggtgactaatgag

SEQ ID NO: 113434 - DNA, 20 bp, synthetic construct
  source 1..20: mol_type = other DNA
acagtgagggtgactaatga

SEQ ID NO: 113435 - DNA, 20 bp, synthetic construct
  source 1..20: mol_type = other DNA
cacagtgagggtgactaatg

SEQ ID NO: 113436 - DNA, 20 bp, synthetic construct
  source 1..20: mol_type = other DNA
gcacagtgagggtgactaat

SEQ ID NO: 113437 - DNA, 20 bp, synthetic construct
  source 1..20: mol_type = other DNA
agcacagtgagggtgactaa

SEQ ID NO: 113438 - DNA, 20 bp, synthetic construct
  source 1..20: mol_type = other DNA
cagcacagtgagggtgacta

SEQ ID NO: 113439 - DNA, 20 bp, synthetic construct
  source 1..20: mol_type = other DNA
gcagcacagtgagggtgact

SEQ ID NO: 113440 - DNA, 20 bp, synthetic construct
  source 1..20: mol_type = other DNA
agcagcacagtgagggtgac

SEQ ID NO: 113441 - DNA, 20 bp, synthetic construct
  source 1..20: mol_type = other DNA
tagcagcacagtgagggtga

SEQ ID NO: 113442 - DNA, 20 bp, synthetic construct
  source 1..20: mol_type = other DNA
ctagcagcacagtgagggtg

SEQ ID NO: 113443 - DNA, 20 bp, synthetic construct
  source 1..20: mol_type = other DNA
cctagcagcacagtgagggt

SEQ ID NO: 113444 - DNA, 20 bp, synthetic construct
  source 1..20: mol_type = other DNA
acctagcagcacagtgaggg

SEQ ID NO: 113445 - DNA, 20 bp, synthetic construct
  source 1..20: mol_type = other DNA
aacctagcagcacagtgagg

SEQ ID NO: 113446 - DNA, 20 bp, synthetic construct
  source 1..20: mol_type = other DNA
caacctagcagcacagtgag

SEQ ID NO: 113447 - DNA, 20 bp, synthetic construct
  source 1..20: mol_type = other DNA
tcaacctagcagcacagtga

SEQ ID NO: 113448 - DNA, 20 bp, synthetic construct
  source 1..20: mol_type = other DNA
ttcaacctagcagcacagtg

SEQ ID NO: 113449 - DNA, 20 bp, synthetic construct
  source 1..20: mol_type = other DNA
tttcaacctagcagcacagt

SEQ ID NO: 113450 - DNA, 20 bp, synthetic construct
  source 1..20: mol_type = other DNA
ttttcaacctagcagcacag

SEQ ID NO: 113451 - DNA, 20 bp, synthetic construct
  source 1..20: mol_type = other DNA
tttttcaacctagcagcaca

SEQ ID NO: 113452 - DNA, 20 bp, synthetic construct
  source 1..20: mol_type = other DNA
gtttttcaacctagcagcac

SEQ ID NO: 113453 - DNA, 20 bp, synthetic construct
  source 1..20: mol_type = other DNA
agtttttcaacctagcagca

SEQ ID NO: 113454 - DNA, 20 bp, synthetic construct
  source 1..20: mol_type = other DNA
cagtttttcaacctagcagc

SEQ ID NO: 113455 - DNA, 20 bp, synthetic construct
  source 1..20: mol_type = other DNA
gcagtttttcaacctagcag

SEQ ID NO: 113456 - DNA, 20 bp, synthetic construct
  source 1..20: mol_type = other DNA
ggcagtttttcaacctagca

SEQ ID NO: 113457 - DNA, 20 bp, synthetic construct
  source 1..20: mol_type = other DNA
tggcagtttttcaacctagc

SEQ ID NO: 113458 - DNA, 20 bp, synthetic construct
  source 1..20: mol_type = other DNA
gtggcagtttttcaacctag

SEQ ID NO: 113459 - DNA, 20 bp, synthetic construct
  source 1..20: mol_type = other DNA
agtggcagtttttcaaccta

SEQ ID NO: 113460 - DNA, 20 bp, synthetic construct
  source 1..20: mol_type = other DNA
cagtggcagtttttcaacct

SEQ ID NO: 113461 - DNA, 20 bp, synthetic construct
  source 1..20: mol_type = other DNA
acagtggcagtttttcaacc

SEQ ID NO: 113462 - DNA, 20 bp, synthetic construct
  source 1..20: mol_type = other DNA
gacagtggcagtttttcaac

SEQ ID NO: 113463 - DNA, 20 bp, synthetic construct
  source 1..20: mol_type = other DNA
tgacagtggcagtttttcaa

SEQ ID NO: 113464 - DNA, 20 bp, synthetic construct
  source 1..20: mol_type = other DNA
ttgacagtggcagtttttca

SEQ ID NO: 113465 - DNA, 20 bp, synthetic construct
  source 1..20: mol_type = other DNA
cttgacagtggcagtttttc

SEQ ID NO: 113466 - DNA, 20 bp, synthetic construct
  source 1..20: mol_type = other DNA
ccttgacagtggcagttttt

SEQ ID NO: 113467 - DNA, 20 bp, synthetic construct
  source 1..20: mol_type = other DNA
tccttgacagtggcagtttt

SEQ ID NO: 113468 - DNA, 20 bp, synthetic construct
  source 1..20: mol_type = other DNA
ctccttgacagtggcagttt

SEQ ID NO: 113469 - DNA, 20 bp, synthetic construct
  source 1..20: mol_type = other DNA
tctccttgacagtggcagtt

SEQ ID NO: 113470 - DNA, 20 bp, synthetic construct
  source 1..20: mol_type = other DNA
ctctccttgacagtggcagt

SEQ ID NO: 113471 - DNA, 20 bp, synthetic construct
  source 1..20: mol_type = other DNA
tctctccttgacagtggcag

SEQ ID NO: 113472 - DNA, 20 bp, synthetic construct
  source 1..20: mol_type = other DNA
ttctctccttgacagtggca

SEQ ID NO: 113473 - DNA, 20 bp, synthetic construct
  source 1..20: mol_type = other DNA
cttctctccttgacagtggc

SEQ ID NO: 113474 - DNA, 20 bp, synthetic construct
  source 1..20: mol_type = other DNA
gcttctctccttgacagtgg

SEQ ID NO: 113475 - DNA, 20 bp, synthetic construct
  source 1..20: mol_type = other DNA
tgcttctctccttgacagtg

SEQ ID NO: 113476 - DNA, 20 bp, synthetic construct
  source 1..20: mol_type = other DNA
atgcttctctccttgacagt

SEQ ID NO: 113477 - DNA, 20 bp, synthetic construct
  source 1..20: mol_type = other DNA
catgcttctctccttgacag

SEQ ID NO: 113478 - DNA, 20 bp, synthetic construct
  source 1..20: mol_type = other DNA
gcatgcttctctccttgaca

SEQ ID NO: 113479 - DNA, 20 bp, synthetic construct
  source 1..20: mol_type = other DNA
cgcatgcttctctccttgac

SEQ ID NO: 113480 - DNA, 20 bp, synthetic construct
  source 1..20: mol_type = other DNA
ccgcatgcttctctccttga

SEQ ID NO: 113481 - DNA, 20 bp, synthetic construct
  source 1..20: mol_type = other DNA
accgcatgcttctctccttg

SEQ ID NO: 113482 - DNA, 20 bp, synthetic construct
  source 1..20: mol_type = other DNA
caccgcatgcttctctcctt

SEQ ID NO: 113483 - DNA, 20 bp, synthetic construct
  source 1..20: mol_type = other DNA
gcaccgcatgcttctctcct

SEQ ID NO: 113484 - DNA, 20 bp, synthetic construct
  source 1..20: mol_type = other DNA
agcaccgcatgcttctctcc

SEQ ID NO: 113485 - DNA, 20 bp, synthetic construct
  source 1..20: mol_type = other DNA
aagcaccgcatgcttctctc

SEQ ID NO: 113486 - DNA, 20 bp, synthetic construct
  source 1..20: mol_type = other DNA
gaagcaccgcatgcttctct

SEQ ID NO: 113487 - DNA, 20 bp, synthetic construct
  source 1..20: mol_type = other DNA
agaagcaccgcatgcttctc

SEQ ID NO: 113488 - DNA, 20 bp, synthetic construct
  source 1..20: mol_type = other DNA
tagaagcaccgcatgcttct

SEQ ID NO: 113489 - DNA, 20 bp, synthetic construct
  source 1..20: mol_type = other DNA
gtagaagcaccgcatgcttc

SEQ ID NO: 113490 - DNA, 20 bp, synthetic construct
  source 1..20: mol_type = other DNA
agtagaagcaccgcatgctt

SEQ ID NO: 113491 - DNA, 20 bp, synthetic construct
  source 1..20: mol_type = other DNA
aagtagaagcaccgcatgct

SEQ ID NO: 113492 - DNA, 20 bp, synthetic construct
  source 1..20: mol_type = other DNA
caagtagaagcaccgcatgc

SEQ ID NO: 113493 - DNA, 20 bp, synthetic construct
  source 1..20: mol_type = other DNA
ccaagtagaagcaccgcatg

SEQ ID NO: 113494 - DNA, 20 bp, synthetic construct
  source 1..20: mol_type = other DNA
tccaagtagaagcaccgcat

SEQ ID NO: 113495 - DNA, 20 bp, synthetic construct
  source 1..20: mol_type = other DNA
ttccaagtagaagcaccgca

SEQ ID NO: 113496 - DNA, 20 bp, synthetic construct
  source 1..20: mol_type = other DNA
attccaagtagaagcaccgc

SEQ ID NO: 113497 - DNA, 20 bp, synthetic construct
  source 1..20: mol_type = other DNA
aattccaagtagaagcaccg

SEQ ID NO: 113498 - DNA, 20 bp, synthetic construct
  source 1..20: mol_type = other DNA
gaattccaagtagaagcacc

SEQ ID NO: 113499 - DNA, 20 bp, synthetic construct
  source 1..20: mol_type = other DNA
tgaattccaagtagaagcac

SEQ ID NO: 113500 - DNA, 20 bp, synthetic construct
  source 1..20: mol_type = other DNA
ttgaattccaagtagaagca

SEQ ID NO: 113501 - DNA, 20 bp, synthetic construct
  source 1..20: mol_type = other DNA
tttgaattccaagtagaagc

SEQ ID NO: 113502 - DNA, 20 bp, synthetic construct
  source 1..20: mol_type = other DNA
ttttgaattccaagtagaag

SEQ ID NO: 113503 - DNA, 20 bp, synthetic construct
  source 1..20: mol_type = other DNA
attttgaattccaagtagaa

SEQ ID NO: 113504 - DNA, 20 bp, synthetic construct
  source 1..20: mol_type = other DNA
tattttgaattccaagtaga

SEQ ID NO: 113505 - DNA, 20 bp, synthetic construct
  source 1..20: mol_type = other DNA
atattttgaattccaagtag

SEQ ID NO: 113506 - DNA, 20 bp, synthetic construct
  source 1..20: mol_type = other DNA
aatattttgaattccaagta

SEQ ID NO: 113507 - DNA, 20 bp, synthetic construct
  source 1..20: mol_type = other DNA
aaatattttgaattccaagt

SEQ ID NO: 113508 - DNA, 20 bp, synthetic construct
  source 1..20: mol_type = other DNA
aaaatattttgaattccaag

SEQ ID NO: 113509 - DNA, 20 bp, synthetic construct
  source 1..20: mol_type = other DNA
aaaaatattttgaattccaa

SEQ ID NO: 113510 - DNA, 20 bp, synthetic construct
  source 1..20: mol_type = other DNA
gaaaaatattttgaattcca

SEQ ID NO: 113511 - DNA, 20 bp, synthetic construct
  source 1..20: mol_type = other DNA
tgaaaaatattttgaattcc

SEQ ID NO: 113512 - DNA, 20 bp, synthetic construct
  source 1..20: mol_type = other DNA
atgaaaaatattttgaattc

SEQ ID NO: 113513 - DNA, 20 bp, synthetic construct
  source 1..20: mol_type = other DNA
gatgaaaaatattttgaatt

SEQ ID NO: 113514 - DNA, 20 bp, synthetic construct
  source 1..20: mol_type = other DNA
tgatgaaaaatattttgaat

SEQ ID NO: 113515 - DNA, 20 bp, synthetic construct
  source 1..20: mol_type = other DNA
ctgatgaaaaatattttgaa

SEQ ID NO: 113516 - DNA, 20 bp, synthetic construct
  source 1..20: mol_type = other DNA
tctgatgaaaaatattttga

SEQ ID NO: 113517 - DNA, 20 bp, synthetic construct
  source 1..20: mol_type = other DNA
ttctgatgaaaaatattttg

SEQ ID NO: 113518 - DNA, 20 bp, synthetic construct
  source 1..20: mol_type = other DNA
tttctgatgaaaaatatttt

SEQ ID NO: 113519 - DNA, 20 bp, synthetic construct
  source 1..20: mol_type = other DNA
gtttctgatgaaaaatattt

SEQ ID NO: 113520 - DNA, 20 bp, synthetic construct
  source 1..20: mol_type = other DNA
agtttctgatgaaaaatatt

SEQ ID NO: 113521 - DNA, 20 bp, synthetic construct
  source 1..20: mol_type = other DNA
cagtttctgatgaaaaatat

SEQ ID NO: 113522 - DNA, 20 bp, synthetic construct
  source 1..20: mol_type = other DNA
acagtttctgatgaaaaata

SEQ ID NO: 113523 - DNA, 20 bp, synthetic construct
  source 1..20: mol_type = other DNA
cacagtttctgatgaaaaat

SEQ ID NO: 113524 - DNA, 20 bp, synthetic construct
  source 1..20: mol_type = other DNA
acacagtttctgatgaaaaa

SEQ ID NO: 113525 - DNA, 20 bp, synthetic construct
  source 1..20: mol_type = other DNA
aacacagtttctgatgaaaa

SEQ ID NO: 113526 - DNA, 20 bp, synthetic construct
  source 1..20: mol_type = other DNA
aaacacagtttctgatgaaa

SEQ ID NO: 113527 - DNA, 20 bp, synthetic construct
  source 1..20: mol_type = other DNA
aaaacacagtttctgatgaa

SEQ ID NO: 113528 - DNA, 20 bp, synthetic construct
  source 1..20: mol_type = other DNA
taaaacacagtttctgatga

SEQ ID NO: 113529 - DNA, 20 bp, synthetic construct
  source 1..20: mol_type = other DNA
ctaaaacacagtttctgatg

SEQ ID NO: 113530 - DNA, 20 bp, synthetic construct
  source 1..20: mol_type = other DNA
actaaaacacagtttctgat

SEQ ID NO: 113531 - DNA, 20 bp, synthetic construct
  source 1..20: mol_type = other DNA
aactaaaacacagtttctga

SEQ ID NO: 113532 - DNA, 20 bp, synthetic construct
  source 1..20: mol_type = other DNA
taactaaaacacagtttctg

SEQ ID NO: 113533 - DNA, 20 bp, synthetic construct
  source 1..20: mol_type = other DNA
ttaactaaaacacagtttct

SEQ ID NO: 113534 - DNA, 20 bp, synthetic construct
  source 1..20: mol_type = other DNA
attaactaaaacacagtttc

SEQ ID NO: 113535 - DNA, 20 bp, synthetic construct
  source 1..20: mol_type = other DNA
cattaactaaaacacagttt

SEQ ID NO: 113536 - DNA, 20 bp, synthetic construct
  source 1..20: mol_type = other DNA
acattaactaaaacacagtt

SEQ ID NO: 113537 - DNA, 20 bp, synthetic construct
  source 1..20: mol_type = other DNA
aacattaactaaaacacagt

SEQ ID NO: 113538 - DNA, 20 bp, synthetic construct
  source 1..20: mol_type = other DNA
aaacattaactaaaacacag

SEQ ID NO: 113539 - DNA, 20 bp, synthetic construct
  source 1..20: mol_type = other DNA
taaacattaactaaaacaca

SEQ ID NO: 113540 - DNA, 20 bp, synthetic construct
  source 1..20: mol_type = other DNA
ctaaacattaactaaaacac

SEQ ID NO: 113541 - DNA, 20 bp, synthetic construct
  source 1..20: mol_type = other DNA
tctaaacattaactaaaaca

SEQ ID NO: 113542 - DNA, 20 bp, synthetic construct
  source 1..20: mol_type = other DNA
atctaaacattaactaaaac

SEQ ID NO: 113543 - DNA, 20 bp, synthetic construct
  source 1..20: mol_type = other DNA
aatctaaacattaactaaaa

SEQ ID NO: 113544 - DNA, 20 bp, synthetic construct
  source 1..20: mol_type = other DNA
aaatctaaacattaactaaa

SEQ ID NO: 113545 - DNA, 20 bp, synthetic construct
  source 1..20: mol_type = other DNA
caaatctaaacattaactaa

SEQ ID NO: 113546 - DNA, 20 bp, synthetic construct
  source 1..20: mol_type = other DNA
acaaatctaaacattaacta

SEQ ID NO: 113547 - DNA, 20 bp, synthetic construct
  source 1..20: mol_type = other DNA
aacaaatctaaacattaact

SEQ ID NO: 113548 - DNA, 20 bp, synthetic construct
  source 1..20: mol_type = other DNA
taacaaatctaaacattaac

SEQ ID NO: 113549 - DNA, 20 bp, synthetic construct
  source 1..20: mol_type = other DNA
ttaacaaatctaaacattaa

SEQ ID NO: 113550 - DNA, 20 bp, synthetic construct
  source 1..20: mol_type = other DNA
cttaacaaatctaaacatta

SEQ ID NO: 113551 - DNA, 20 bp, synthetic construct
  source 1..20: mol_type = other DNA
tcttaacaaatctaaacatt

SEQ ID NO: 113552 - DNA, 20 bp, synthetic construct
  source 1..20: mol_type = other DNA
atcttaacaaatctaaacat

SEQ ID NO: 113553 - DNA, 20 bp, synthetic construct
  source 1..20: mol_type = other DNA
tatcttaacaaatctaaaca

SEQ ID NO: 113554 - DNA, 20 bp, synthetic construct
  source 1..20: mol_type = other DNA
ctatcttaacaaatctaaac

SEQ ID NO: 113555 - DNA, 20 bp, synthetic construct
  source 1..20: mol_type = other DNA
tctatcttaacaaatctaaa

SEQ ID NO: 113556 - DNA, 20 bp, synthetic construct
  source 1..20: mol_type = other DNA
gtctatcttaacaaatctaa

SEQ ID NO: 113557 - DNA, 20 bp, synthetic construct
  source 1..20: mol_type = other DNA
agtctatcttaacaaatcta

SEQ ID NO: 113558 - DNA, 20 bp, synthetic construct
  source 1..20: mol_type = other DNA
aagtctatcttaacaaatct

SEQ ID NO: 113559 - DNA, 20 bp, synthetic construct
  source 1..20: mol_type = other DNA
taagtctatcttaacaaatc

SEQ ID NO: 113560 - DNA, 20 bp, synthetic construct
  source 1..20: mol_type = other DNA
ttaagtctatcttaacaaat

SEQ ID NO: 113561 - DNA, 20 bp, synthetic construct
  source 1..20: mol_type = other DNA
attaagtctatcttaacaaa

SEQ ID NO: 113562 - DNA, 20 bp, synthetic construct
  source 1..20: mol_type = other DNA
aattaagtctatcttaacaa

SEQ ID NO: 113563 - DNA, 20 bp, synthetic construct
  source 1..20: mol_type = other DNA
gaattaagtctatcttaaca

SEQ ID NO: 113564 - DNA, 20 bp, synthetic construct
  source 1..20: mol_type = other DNA
agaattaagtctatcttaac

SEQ ID NO: 113565 - DNA, 20 bp, synthetic construct
  source 1..20: mol_type = other DNA
cagaattaagtctatcttaa

SEQ ID NO: 113566 - DNA, 20 bp, synthetic construct
  source 1..20: mol_type = other DNA
gcagaattaagtctatctta

SEQ ID NO: 113567 - DNA, 20 bp, synthetic construct
  source 1..20: mol_type = other DNA
tgcagaattaagtctatctt

SEQ ID NO: 113568 - DNA, 20 bp, synthetic construct
  source 1..20: mol_type = other DNA
gtgcagaattaagtctatct

SEQ ID NO: 113569 - DNA, 20 bp, synthetic construct
  source 1..20: mol_type = other DNA
tgtgcagaattaagtctatc

SEQ ID NO: 113570 - DNA, 20 bp, synthetic construct
  source 1..20: mol_type = other DNA
atgtgcagaattaagtctat

SEQ ID NO: 113571 - DNA, 20 bp, synthetic construct
  source 1..20: mol_type = other DNA
aatgtgcagaattaagtcta

SEQ ID NO: 113572 - DNA, 20 bp, synthetic construct
  source 1..20: mol_type = other DNA
gaatgtgcagaattaagtct

SEQ ID NO: 113573 - DNA, 20 bp, synthetic construct
  source 1..20: mol_type = other DNA
tgaatgtgcagaattaagtc

SEQ ID NO: 113574 - DNA, 20 bp, synthetic construct
  source 1..20: mol_type = other DNA
ctgaatgtgcagaattaagt

SEQ ID NO: 113575 - DNA, 20 bp, synthetic construct
  source 1..20: mol_type = other DNA
actgaatgtgcagaattaag

SEQ ID NO: 113576 - DNA, 20 bp, synthetic construct
  source 1..20: mol_type = other DNA
tactgaatgtgcagaattaa

SEQ ID NO: 113577 - DNA, 20 bp, synthetic construct
  source 1..20: mol_type = other DNA
atactgaatgtgcagaatta

SEQ ID NO: 113578 - DNA, 20 bp, synthetic construct
  source 1..20: mol_type = other DNA
tatactgaatgtgcagaatt

SEQ ID NO: 113579 - DNA, 20 bp, synthetic construct
  source 1..20: mol_type = other DNA
atatactgaatgtgcagaat

SEQ ID NO: 113580 - DNA, 20 bp, synthetic construct
  source 1..20: mol_type = other DNA
aatatactgaatgtgcagaa

SEQ ID NO: 113581 - DNA, 20 bp, synthetic construct
  source 1..20: mol_type = other DNA
taatatactgaatgtgcaga

SEQ ID NO: 113582 - DNA, 20 bp, synthetic construct
  source 1..20: mol_type = other DNA
ttaatatactgaatgtgcag

SEQ ID NO: 113583 - DNA, 20 bp, synthetic construct
  source 1..20: mol_type = other DNA
attaatatactgaatgtgca

SEQ ID NO: 113584 - DNA, 20 bp, synthetic construct
  source 1..20: mol_type = other DNA
aattaatatactgaatgtgc

SEQ ID NO: 113585 - DNA, 20 bp, synthetic construct
  source 1..20: mol_type = other DNA
taattaatatactgaatgtg

SEQ ID NO: 113586 - DNA, 20 bp, synthetic construct
  source 1..20: mol_type = other DNA
ttaattaatatactgaatgt

SEQ ID NO: 113587 - DNA, 20 bp, synthetic construct
  source 1..20: mol_type = other DNA
tttaattaatatactgaatg

SEQ ID NO: 113588 - DNA, 20 bp, synthetic construct
  source 1..20: mol_type = other DNA
atttaattaatatactgaat

SEQ ID NO: 113589 - DNA, 20 bp, synthetic construct
  source 1..20: mol_type = other DNA
catttaattaatatactgaa

SEQ ID NO: 113590 - DNA, 20 bp, synthetic construct
  source 1..20: mol_type = other DNA
ccatttaattaatatactga

SEQ ID NO: 113591 - DNA, 20 bp, synthetic construct
  source 1..20: mol_type = other DNA
tccatttaattaatatactg

SEQ ID NO: 113592 - DNA, 20 bp, synthetic construct
  source 1..20: mol_type = other DNA
gtccatttaattaatatact

SEQ ID NO: 113593 - DNA, 20 bp, synthetic construct
  source 1..20: mol_type = other DNA
agtccatttaattaatatac

SEQ ID NO: 113594 - DNA, 20 bp, synthetic construct
  source 1..20: mol_type = other DNA
aagtccatttaattaatata

SEQ ID NO: 113595 - DNA, 20 bp, synthetic construct
  source 1..20: mol_type = other DNA
aaagtccatttaattaatat

SEQ ID NO: 113596 - DNA, 20 bp, synthetic construct
  source 1..20: mol_type = other DNA
aaaagtccatttaattaata

SEQ ID NO: 113597 - DNA, 20 bp, synthetic construct
  source 1..20: mol_type = other DNA
taaaagtccatttaattaat

SEQ ID NO: 113598 - DNA, 20 bp, synthetic construct
  source 1..20: mol_type = other DNA
ctaaaagtccatttaattaa

SEQ ID NO: 113599 - DNA, 20 bp, synthetic construct
  source 1..20: mol_type = other DNA
cctaaaagtccatttaatta

SEQ ID NO: 113600 - DNA, 20 bp, synthetic construct
  source 1..20: mol_type = other DNA
ccctaaaagtccatttaatt

SEQ ID NO: 113601 - DNA, 20 bp, synthetic construct
  source 1..20: mol_type = other DNA
cccctaaaagtccatttaat

SEQ ID NO: 113602 - DNA, 20 bp, synthetic construct
  source 1..20: mol_type = other DNA
gcccctaaaagtccatttaa

SEQ ID NO: 113603 - DNA, 20 bp, synthetic construct
  source 1..20: mol_type = other DNA
agcccctaaaagtccattta

SEQ ID NO: 113604 - DNA, 20 bp, synthetic construct
  source 1..20: mol_type = other DNA
tagcccctaaaagtccattt

SEQ ID NO: 113605 - DNA, 20 bp, synthetic construct
  source 1..20: mol_type = other DNA
ttagcccctaaaagtccatt

SEQ ID NO: 113606 - DNA, 20 bp, synthetic construct
  source 1..20: mol_type = other DNA
gttagcccctaaaagtccat

SEQ ID NO: 113607 - DNA, 20 bp, synthetic construct
  source 1..20: mol_type = other DNA
ggttagcccctaaaagtcca

SEQ ID NO: 113608 - DNA, 20 bp, synthetic construct
  source 1..20: mol_type = other DNA
aggttagcccctaaaagtcc

SEQ ID NO: 113609 - DNA, 20 bp, synthetic construct
  source 1..20: mol_type = other DNA
gaggttagcccctaaaagtc

SEQ ID NO: 113610 - DNA, 20 bp, synthetic construct
  source 1..20: mol_type = other DNA
tgaggttagcccctaaaagt

SEQ ID NO: 113611 - DNA, 20 bp, synthetic construct
  source 1..20: mol_type = other DNA
ctgaggttagcccctaaaag

SEQ ID NO: 113612 - DNA, 20 bp, synthetic construct
  source 1..20: mol_type = other DNA
tctgaggttagcccctaaaa

SEQ ID NO: 113613 - DNA, 20 bp, synthetic construct
  source 1..20: mol_type = other DNA
ttctgaggttagcccctaaa

SEQ ID NO: 113614 - DNA, 20 bp, synthetic construct
  source 1..20: mol_type = other DNA
gttctgaggttagcccctaa

SEQ ID NO: 113615 - DNA, 20 bp, synthetic construct
  source 1..20: mol_type = other DNA
agttctgaggttagccccta

SEQ ID NO: 113616 - DNA, 20 bp, synthetic construct
  source 1..20: mol_type = other DNA
aagttctgaggttagcccct

SEQ ID NO: 113617 - DNA, 20 bp, synthetic construct
  source 1..20: mol_type = other DNA
taagttctgaggttagcccc

SEQ ID NO: 113618 - DNA, 20 bp, synthetic construct
  source 1..20: mol_type = other DNA
ttaagttctgaggttagccc

SEQ ID NO: 113619 - DNA, 20 bp, synthetic construct
  source 1..20: mol_type = other DNA
gttaagttctgaggttagcc

SEQ ID NO: 113620 - DNA, 20 bp, synthetic construct
  source 1..20: mol_type = other DNA
agttaagttctgaggttagc

SEQ ID NO: 113621 - DNA, 20 bp, synthetic construct
  source 1..20: mol_type = other DNA
tagttaagttctgaggttag

SEQ ID NO: 113622 - DNA, 20 bp, synthetic construct
  source 1..20: mol_type = other DNA
gtagttaagttctgaggtta

SEQ ID NO: 113623 - DNA, 20 bp, synthetic construct
  source 1..20: mol_type = other DNA
ggtagttaagttctgaggtt

SEQ ID NO: 113624 - DNA, 20 bp, synthetic construct
  source 1..20: mol_type = other DNA
tggtagttaagttctgaggt

SEQ ID NO: 113625 - DNA, 20 bp, synthetic construct
  source 1..20: mol_type = other DNA
atggtagttaagttctgagg

SEQ ID NO: 113626 - DNA, 20 bp, synthetic construct
  source 1..20: mol_type = other DNA
aatggtagttaagttctgag

SEQ ID NO: 113627 - DNA, 20 bp, synthetic construct
  source 1..20: mol_type = other DNA
caatggtagttaagttctga

SEQ ID NO: 113628 - DNA, 20 bp, synthetic construct
  source 1..20: mol_type = other DNA
tcaatggtagttaagttctg

SEQ ID NO: 113629 - DNA, 20 bp, synthetic construct
  source 1..20: mol_type = other DNA
gtcaatggtagttaagttct

SEQ ID NO: 113630 - DNA, 20 bp, synthetic construct
  source 1..20: mol_type = other DNA
agtcaatggtagttaagttc

SEQ ID NO: 113631 - DNA, 20 bp, synthetic construct
  source 1..20: mol_type = other DNA
aagtcaatggtagttaagtt

SEQ ID NO: 113632 - DNA, 20 bp, synthetic construct
  source 1..20: mol_type = other DNA
taagtcaatggtagttaagt

SEQ ID NO: 113633 - DNA, 20 bp, synthetic construct
  source 1..20: mol_type = other DNA
ctaagtcaatggtagttaag

SEQ ID NO: 113634 - DNA, 20 bp, synthetic construct
  source 1..20: mol_type = other DNA
cctaagtcaatggtagttaa

SEQ ID NO: 113635 - DNA, 20 bp, synthetic construct
  source 1..20: mol_type = other DNA
acctaagtcaatggtagtta

SEQ ID NO: 113636 - DNA, 20 bp, synthetic construct
  source 1..20: mol_type = other DNA
cacctaagtcaatggtagtt

SEQ ID NO: 113637 - DNA, 20 bp, synthetic construct
  source 1..20: mol_type = other DNA
acacctaagtcaatggtagt

SEQ ID NO: 113638 - DNA, 20 bp, synthetic construct
  source 1..20: mol_type = other DNA
aacacctaagtcaatggtag

SEQ ID NO: 113639 - DNA, 20 bp, synthetic construct
  source 1..20: mol_type = other DNA
aaacacctaagtcaatggta

SEQ ID NO: 113640 - DNA, 20 bp, synthetic construct
  source 1..20: mol_type = other DNA
caaacacctaagtcaatggt

SEQ ID NO: 113641 - DNA, 20 bp, synthetic construct
  source 1..20: mol_type = other DNA
ccaaacacctaagtcaatgg

SEQ ID NO: 113642 - DNA, 20 bp, synthetic construct
  source 1..20: mol_type = other DNA
cccaaacacctaagtcaatg

SEQ ID NO: 113643 - DNA, 20 bp, synthetic construct
  source 1..20: mol_type = other DNA
acccaaacacctaagtcaat

SEQ ID NO: 113644 - DNA, 20 bp, synthetic construct
  source 1..20: mol_type = other DNA
tacccaaacacctaagtcaa

SEQ ID NO: 113645 - DNA, 20 bp, synthetic construct
  source 1..20: mol_type = other DNA
gtacccaaacacctaagtca

SEQ ID NO: 113646 - DNA, 20 bp, synthetic construct
  source 1..20: mol_type = other DNA
ggtacccaaacacctaagtc

SEQ ID NO: 113647 - DNA, 20 bp, synthetic construct
  source 1..20: mol_type = other DNA
tggtacccaaacacctaagt

SEQ ID NO: 113648 - DNA, 20 bp, synthetic construct
  source 1..20: mol_type = other DNA
ttggtacccaaacacctaag

SEQ ID NO: 113649 - DNA, 20 bp, synthetic construct
  source 1..20: mol_type = other DNA
tttggtacccaaacacctaa

SEQ ID NO: 113650 - DNA, 20 bp, synthetic construct
  source 1..20: mol_type = other DNA
gtttggtacccaaacaccta

SEQ ID NO: 113651 - DNA, 20 bp, synthetic construct
  source 1..20: mol_type = other DNA
tgtttggtacccaaacacct

SEQ ID NO: 113652 - DNA, 20 bp, synthetic construct
  source 1..20: mol_type = other DNA
ttgtttggtacccaaacacc

SEQ ID NO: 113653 - DNA, 20 bp, synthetic construct
  source 1..20: mol_type = other DNA
attgtttggtacccaaacac

SEQ ID NO: 113654 - DNA, 20 bp, synthetic construct
  source 1..20: mol_type = other DNA
gattgtttggtacccaaaca

SEQ ID NO: 113655 - DNA, 20 bp, synthetic construct
  source 1..20: mol_type = other DNA
ggattgtttggtacccaaac

SEQ ID NO: 113656 - DNA, 20 bp, synthetic construct
  source 1..20: mol_type = other DNA
tggattgtttggtacccaaa

SEQ ID NO: 113657 - DNA, 20 bp, synthetic construct
  source 1..20: mol_type = other DNA
ctggattgtttggtacccaa

SEQ ID NO: 113658 - DNA, 20 bp, synthetic construct
  source 1..20: mol_type = other DNA
actggattgtttggtaccca

SEQ ID NO: 113659 - DNA, 20 bp, synthetic construct
  source 1..20: mol_type = other DNA
aactggattgtttggtaccc

SEQ ID NO: 113660 - DNA, 20 bp, synthetic construct
  source 1..20: mol_type = other DNA
taactggattgtttggtacc

SEQ ID NO: 113661 - DNA, 20 bp, synthetic construct
  source 1..20: mol_type = other DNA
ttaactggattgtttggtac

SEQ ID NO: 113662 - DNA, 20 bp, synthetic construct
  source 1..20: mol_type = other DNA
tttaactggattgtttggta

SEQ ID NO: 113663 - DNA, 20 bp, synthetic construct
  source 1..20: mol_type = other DNA
ctttaactggattgtttggt

SEQ ID NO: 113664 - DNA, 20 bp, synthetic construct
  source 1..20: mol_type = other DNA
gctttaactggattgtttgg

SEQ ID NO: 113665 - DNA, 20 bp, synthetic construct
  source 1..20: mol_type = other DNA
agctttaactggattgtttg

SEQ ID NO: 113666 - DNA, 20 bp, synthetic construct
  source 1..20: mol_type = other DNA
cagctttaactggattgttt

SEQ ID NO: 113667 - DNA, 20 bp, synthetic construct
  source 1..20: mol_type = other DNA
tcagctttaactggattgtt

SEQ ID NO: 113668 - DNA, 20 bp, synthetic construct
  source 1..20: mol_type = other DNA
ttcagctttaactggattgt

SEQ ID NO: 113669 - DNA, 20 bp, synthetic construct
  source 1..20: mol_type = other DNA
cttcagctttaactggattg

SEQ ID NO: 113670 - DNA, 20 bp, synthetic construct
  source 1..20: mol_type = other DNA
acttcagctttaactggatt

SEQ ID NO: 113671 - DNA, 20 bp, synthetic construct
  source 1..20: mol_type = other DNA
aacttcagctttaactggat

SEQ ID NO: 113672 - DNA, 20 bp, synthetic construct
  source 1..20: mol_type = other DNA
aaacttcagctttaactgga

SEQ ID NO: 113673 - DNA, 20 bp, synthetic construct
  source 1..20: mol_type = other DNA
aaaacttcagctttaactgg

SEQ ID NO: 113674 - DNA, 20 bp, synthetic construct
  source 1..20: mol_type = other DNA
caaaacttcagctttaactg

SEQ ID NO: 113675 - DNA, 20 bp, synthetic construct
  source 1..20: mol_type = other DNA
ccaaaacttcagctttaact

SEQ ID NO: 113676 - DNA, 20 bp, synthetic construct
  source 1..20: mol_type = other DNA
tccaaaacttcagctttaac

SEQ ID NO: 113677 - DNA, 20 bp, synthetic construct
  source 1..20: mol_type = other DNA
ttccaaaacttcagctttaa

SEQ ID NO: 113678 - DNA, 20 bp, synthetic construct
  source 1..20: mol_type = other DNA
attccaaaacttcagcttta

SEQ ID NO: 113679 - DNA, 20 bp, synthetic construct
  source 1..20: mol_type = other DNA
cattccaaaacttcagcttt

SEQ ID NO: 113680 - DNA, 20 bp, synthetic construct
  source 1..20: mol_type = other DNA
gcattccaaaacttcagctt

SEQ ID NO: 113681 - DNA, 20 bp, synthetic construct
  source 1..20: mol_type = other DNA
tgcattccaaaacttcagct

SEQ ID NO: 113682 - DNA, 20 bp, synthetic construct
  source 1..20: mol_type = other DNA
ctgcattccaaaacttcagc

SEQ ID NO: 113683 - DNA, 20 bp, synthetic construct
  source 1..20: mol_type = other DNA
gctgcattccaaaacttcag

SEQ ID NO: 113684 - DNA, 20 bp, synthetic construct
  source 1..20: mol_type = other DNA
agctgcattccaaaacttca

SEQ ID NO: 113685 - DNA, 20 bp, synthetic construct
  source 1..20: mol_type = other DNA
aagctgcattccaaaacttc

SEQ ID NO: 113686 - DNA, 20 bp, synthetic construct
  source 1..20: mol_type = other DNA
taagctgcattccaaaactt

SEQ ID NO: 113687 - DNA, 20 bp, synthetic construct
  source 1..20: mol_type = other DNA
ataagctgcattccaaaact

SEQ ID NO: 113688 - DNA, 20 bp, synthetic construct
  source 1..20: mol_type = other DNA
aataagctgcattccaaaac

SEQ ID NO: 113689 - DNA, 20 bp, synthetic construct
  source 1..20: mol_type = other DNA
caataagctgcattccaaaa

SEQ ID NO: 113690 - DNA, 20 bp, synthetic construct
  source 1..20: mol_type = other DNA
tcaataagctgcattccaaa

SEQ ID NO: 113691 - DNA, 20 bp, synthetic construct
  source 1..20: mol_type = other DNA
atcaataagctgcattccaa

SEQ ID NO: 113692 - DNA, 20 bp, synthetic construct
  source 1..20: mol_type = other DNA
tatcaataagctgcattcca

SEQ ID NO: 113693 - DNA, 20 bp, synthetic construct
  source 1..20: mol_type = other DNA
ttatcaataagctgcattcc

SEQ ID NO: 113694 - DNA, 20 bp, synthetic construct
  source 1..20: mol_type = other DNA
tttatcaataagctgcattc

SEQ ID NO: 113695 - DNA, 20 bp, synthetic construct
  source 1..20: mol_type = other DNA
atttatcaataagctgcatt

SEQ ID NO: 113696 - DNA, 20 bp, synthetic construct
  source 1..20: mol_type = other DNA
aatttatcaataagctgcat

SEQ ID NO: 113697 - DNA, 20 bp, synthetic construct
  source 1..20: mol_type = other DNA
caatttatcaataagctgca

SEQ ID NO: 113698 - DNA, 20 bp, synthetic construct
  source 1..20: mol_type = other DNA
ccaatttatcaataagctgc

SEQ ID NO: 113699 - DNA, 20 bp, synthetic construct
  source 1..20: mol_type = other DNA
cccaatttatcaataagctg

SEQ ID NO: 113700 - DNA, 20 bp, synthetic construct
  source 1..20: mol_type = other DNA
ccccaatttatcaataagct

SEQ ID NO: 113701 - DNA, 20 bp, synthetic construct
  source 1..20: mol_type = other DNA
tccccaatttatcaataagc

SEQ ID NO: 113702 - DNA, 20 bp, synthetic construct
  source 1..20: mol_type = other DNA
gtccccaatttatcaataag

SEQ ID NO: 113703 - DNA, 20 bp, synthetic construct
  source 1..20: mol_type = other DNA
agtccccaatttatcaataa

SEQ ID NO: 113704 - DNA, 20 bp, synthetic construct
  source 1..20: mol_type = other DNA
cagtccccaatttatcaata

SEQ ID NO: 113705 - DNA, 20 bp, synthetic construct
  source 1..20: mol_type = other DNA
gcagtccccaatttatcaat

SEQ ID NO: 113706 - DNA, 20 bp, synthetic construct
  source 1..20: mol_type = other DNA
agcagtccccaatttatcaa

SEQ ID NO: 113707 - DNA, 20 bp, synthetic construct
  source 1..20: mol_type = other DNA
aagcagtccccaatttatca

SEQ ID NO: 113708 - DNA, 20 bp, synthetic construct
  source 1..20: mol_type = other DNA
taagcagtccccaatttatc

SEQ ID NO: 113709 - DNA, 20 bp, synthetic construct
  source 1..20: mol_type = other DNA
ataagcagtccccaatttat

SEQ ID NO: 113710 - DNA, 20 bp, synthetic construct
  source 1..20: mol_type = other DNA
aataagcagtccccaattta

SEQ ID NO: 113711 - DNA, 20 bp, synthetic construct
  source 1..20: mol_type = other DNA
gaataagcagtccccaattt

SEQ ID NO: 113712 - DNA, 20 bp, synthetic construct
  source 1..20: mol_type = other DNA
agaataagcagtccccaatt

SEQ ID NO: 113713 - DNA, 20 bp, synthetic construct
  source 1..20: mol_type = other DNA
aagaataagcagtccccaat

SEQ ID NO: 113714 - DNA, 20 bp, synthetic construct
  source 1..20: mol_type = other DNA
caagaataagcagtccccaa

SEQ ID NO: 113715 - DNA, 20 bp, synthetic construct
  source 1..20: mol_type = other DNA
tcaagaataagcagtcccca

SEQ ID NO: 113716 - DNA, 20 bp, synthetic construct
  source 1..20: mol_type = other DNA
atcaagaataagcagtcccc

SEQ ID NO: 113717 - DNA, 20 bp, synthetic construct
  source 1..20: mol_type = other DNA
aatcaagaataagcagtccc

SEQ ID NO: 113718 - DNA, 20 bp, synthetic construct
  source 1..20: mol_type = other DNA
aaatcaagaataagcagtcc

SEQ ID NO: 113719 - DNA, 20 bp, synthetic construct
  source 1..20: mol_type = other DNA
caaatcaagaataagcagtc

SEQ ID NO: 113720 - DNA, 20 bp, synthetic construct
  source 1..20: mol_type = other DNA
tcaaatcaagaataagcagt

SEQ ID NO: 113721 - DNA, 20 bp, synthetic construct
  source 1..20: mol_type = other DNA
ctcaaatcaagaataagcag

SEQ ID NO: 113722 - DNA, 20 bp, synthetic construct
  source 1..20: mol_type = other DNA
cctcaaatcaagaataagca

SEQ ID NO: 113723 - DNA, 20 bp, synthetic construct
  source 1..20: mol_type = other DNA
gcctcaaatcaagaataagc

SEQ ID NO: 113724 - DNA, 20 bp, synthetic construct
  source 1..20: mol_type = other DNA
tgcctcaaatcaagaataag

SEQ ID NO: 113725 - DNA, 20 bp, synthetic construct
  source 1..20: mol_type = other DNA
ttgcctcaaatcaagaataa

SEQ ID NO: 113726 - DNA, 20 bp, synthetic construct
  source 1..20: mol_type = other DNA
attgcctcaaatcaagaata

SEQ ID NO: 113727 - DNA, 20 bp, synthetic construct
  source 1..20: mol_type = other DNA
aattgcctcaaatcaagaat

SEQ ID NO: 113728 - DNA, 20 bp, synthetic construct
  source 1..20: mol_type = other DNA
aaattgcctcaaatcaagaa

SEQ ID NO: 113729 - DNA, 20 bp, synthetic construct
  source 1..20: mol_type = other DNA
aaaattgcctcaaatcaaga

SEQ ID NO: 113730 - DNA, 20 bp, synthetic construct
  source 1..20: mol_type = other DNA
aaaaattgcctcaaatcaag

SEQ ID NO: 113731 - DNA, 20 bp, synthetic construct
  source 1..20: mol_type = other DNA
aaaaaattgcctcaaatcaa

SEQ ID NO: 113732 - DNA, 20 bp, synthetic construct
  source 1..20: mol_type = other DNA
aaaaaaattgcctcaaatca

SEQ ID NO: 113733 - DNA, 20 bp, synthetic construct
  source 1..20: mol_type = other DNA
aaaaaaaattgcctcaaatc

SEQ ID NO: 113734 - DNA, 20 bp, synthetic construct
  source 1..20: mol_type = other DNA
aaaaaaaaattgcctcaaat

SEQ ID NO: 113735 - DNA, 20 bp, synthetic construct
  source 1..20: mol_type = other DNA
taaaaaaaaattgcctcaaa

SEQ ID NO: 113736 - DNA, 20 bp, synthetic construct
  source 1..20: mol_type = other DNA
gtaaaaaaaaattgcctcaa

SEQ ID NO: 113737 - DNA, 20 bp, synthetic construct
  source 1..20: mol_type = other DNA
tgtaaaaaaaaattgcctca

SEQ ID NO: 113738 - DNA, 20 bp, synthetic construct
  source 1..20: mol_type = other DNA
ctgtaaaaaaaaattgcctc

SEQ ID NO: 113739 - DNA, 20 bp, synthetic construct
  source 1..20: mol_type = other DNA
gctgtaaaaaaaaattgcct

SEQ ID NO: 113740 - DNA, 20 bp, synthetic construct
  source 1..20: mol_type = other DNA
ggctgtaaaaaaaaattgcc

SEQ ID NO: 113741 - DNA, 20 bp, synthetic construct
  source 1..20: mol_type = other DNA
tggctgtaaaaaaaaattgc

SEQ ID NO: 113742 - DNA, 20 bp, synthetic construct
  source 1..20: mol_type = other DNA
atggctgtaaaaaaaaattg

SEQ ID NO: 113743 - DNA, 20 bp, synthetic construct
  source 1..20: mol_type = other DNA
catggctgtaaaaaaaaatt

SEQ ID NO: 113744 - DNA, 20 bp, synthetic construct
  source 1..20: mol_type = other DNA
tcatggctgtaaaaaaaaat

SEQ ID NO: 113745 - DNA, 20 bp, synthetic construct
  source 1..20: mol_type = other DNA
gtcatggctgtaaaaaaaaa

SEQ ID NO: 113746 - DNA, 20 bp, synthetic construct
  source 1..20: mol_type = other DNA
agtcatggctgtaaaaaaaa

SEQ ID NO: 113747 - DNA, 20 bp, synthetic construct
  source 1..20: mol_type = other DNA
aagtcatggctgtaaaaaaa

SEQ ID NO: 113748 - DNA, 20 bp, synthetic construct
  source 1..20: mol_type = other DNA
aaagtcatggctgtaaaaaa

SEQ ID NO: 113749 - DNA, 20 bp, synthetic construct
  source 1..20: mol_type = other DNA
aaaagtcatggctgtaaaaa

SEQ ID NO: 113750 - DNA, 20 bp, synthetic construct
  source 1..20: mol_type = other DNA
aaaaagtcatggctgtaaaa

SEQ ID NO: 113751 - DNA, 20 bp, synthetic construct
  source 1..20: mol_type = other DNA
gaaaaagtcatggctgtaaa

SEQ ID NO: 113752 - DNA, 20 bp, synthetic construct
  source 1..20: mol_type = other DNA
ggaaaaagtcatggctgtaa

SEQ ID NO: 113753 - DNA, 20 bp, synthetic construct
  source 1..20: mol_type = other DNA
tggaaaaagtcatggctgta

SEQ ID NO: 113754 - DNA, 20 bp, synthetic construct
  source 1..20: mol_type = other DNA
ctggaaaaagtcatggctgt

SEQ ID NO: 113755 - DNA, 20 bp, synthetic construct
  source 1..20: mol_type = other DNA
cctggaaaaagtcatggctg

SEQ ID NO: 113756 - DNA, 20 bp, synthetic construct
  source 1..20: mol_type = other DNA
acctggaaaaagtcatggct

SEQ ID NO: 113757 - DNA, 20 bp, synthetic construct
  source 1..20: mol_type = other DNA
tacctggaaaaagtcatggc

SEQ ID NO: 113758 - DNA, 20 bp, synthetic construct
  source 1..20: mol_type = other DNA
atacctggaaaaagtcatgg

SEQ ID NO: 113759 - DNA, 20 bp, synthetic construct
  source 1..20: mol_type = other DNA
catacctggaaaaagtcatg

SEQ ID NO: 113760 - DNA, 20 bp, synthetic construct
  source 1..20: mol_type = other DNA
acatacctggaaaaagtcat

SEQ ID NO: 113761 - DNA, 20 bp, synthetic construct
  source 1..20: mol_type = other DNA
gacatacctggaaaaagtca

SEQ ID NO: 113762 - DNA, 20 bp, synthetic construct
  source 1..20: mol_type = other DNA
tgacatacctggaaaaagtc

SEQ ID NO: 113763 - DNA, 20 bp, synthetic construct
  source 1..20: mol_type = other DNA
atgacatacctggaaaaagt

SEQ ID NO: 113764 - DNA, 20 bp, synthetic construct
  source 1..20: mol_type = other DNA
catgacatacctggaaaaag

SEQ ID NO: 113765 - DNA, 20 bp, synthetic construct
  source 1..20: mol_type = other DNA
acatgacatacctggaaaaa

SEQ ID NO: 113766 - DNA, 20 bp, synthetic construct
  source 1..20: mol_type = other DNA
tacatgacatacctggaaaa

SEQ ID NO: 113767 - DNA, 20 bp, synthetic construct
  source 1..20: mol_type = other DNA
ttacatgacatacctggaaa

SEQ ID NO: 113768 - DNA, 20 bp, synthetic construct
  source 1..20: mol_type = other DNA
tttacatgacatacctggaa

SEQ ID NO: 113769 - DNA, 20 bp, synthetic construct
  source 1..20: mol_type = other DNA
ttttacatgacatacctgga

SEQ ID NO: 113770 - DNA, 20 bp, synthetic construct
  source 1..20: mol_type = other DNA
attttacatgacatacctgg

SEQ ID NO: 113771 - DNA, 20 bp, synthetic construct
  source 1..20: mol_type = other DNA
tattttacatgacatacctg

SEQ ID NO: 113772 - DNA, 20 bp, synthetic construct
  source 1..20: mol_type = other DNA
atattttacatgacatacct

SEQ ID NO: 113773 - DNA, 20 bp, synthetic construct
  source 1..20: mol_type = other DNA
gatattttacatgacatacc

SEQ ID NO: 113774 - DNA, 20 bp, synthetic construct
  source 1..20: mol_type = other DNA
agatattttacatgacatac

SEQ ID NO: 113775 - DNA, 20 bp, synthetic construct
  source 1..20: mol_type = other DNA
aagatattttacatgacata

SEQ ID NO: 113776 - DNA, 20 bp, synthetic construct
  source 1..20: mol_type = other DNA
gaagatattttacatgacat

SEQ ID NO: 113777 - DNA, 20 bp, synthetic construct
  source 1..20: mol_type = other DNA
agaagatattttacatgaca

SEQ ID NO: 113778 - DNA, 20 bp, synthetic construct
  source 1..20: mol_type = other DNA
gagaagatattttacatgac

SEQ ID NO: 113779 - DNA, 20 bp, synthetic construct
  source 1..20: mol_type = other DNA
tgagaagatattttacatga

SEQ ID NO: 113780 - DNA, 20 bp, synthetic construct
  source 1..20: mol_type = other DNA
gtgagaagatattttacatg

SEQ ID NO: 113781 - DNA, 20 bp, synthetic construct
  source 1..20: mol_type = other DNA
tgtgagaagatattttacat

SEQ ID NO: 113782 - DNA, 20 bp, synthetic construct
  source 1..20: mol_type = other DNA
atgtgagaagatattttaca

SEQ ID NO: 113783 - DNA, 20 bp, synthetic construct
  source 1..20: mol_type = other DNA
tatgtgagaagatattttac

SEQ ID NO: 113784 - DNA, 20 bp, synthetic construct
  source 1..20: mol_type = other DNA
ttatgtgagaagatatttta

SEQ ID NO: 113785 - DNA, 20 bp, synthetic construct
  source 1..20: mol_type = other DNA
cttatgtgagaagatatttt

SEQ ID NO: 113786 - DNA, 20 bp, synthetic construct
  source 1..20: mol_type = other DNA
tcttatgtgagaagatattt

SEQ ID NO: 113787 - DNA, 20 bp, synthetic construct
  source 1..20: mol_type = other DNA
ttcttatgtgagaagatatt

SEQ ID NO: 113788 - DNA, 20 bp, synthetic construct
  source 1..20: mol_type = other DNA
attcttatgtgagaagatat

SEQ ID NO: 113789 - DNA, 20 bp, synthetic construct
  source 1..20: mol_type = other DNA
aattcttatgtgagaagata

SEQ ID NO: 113790 - DNA, 20 bp, synthetic construct
  source 1..20: mol_type = other DNA
taattcttatgtgagaagat

SEQ ID NO: 113791 - DNA, 20 bp, synthetic construct
  source 1..20: mol_type = other DNA
gtaattcttatgtgagaaga

SEQ ID NO: 113792 - DNA, 20 bp, synthetic construct
  source 1..20: mol_type = other DNA
agtaattcttatgtgagaag

SEQ ID NO: 113793 - DNA, 20 bp, synthetic construct
  source 1..20: mol_type = other DNA
cagtaattcttatgtgagaa

SEQ ID NO: 113794 - DNA, 20 bp, synthetic construct
  source 1..20: mol_type = other DNA
gcagtaattcttatgtgaga

SEQ ID NO: 113795 - DNA, 20 bp, synthetic construct
  source 1..20: mol_type = other DNA
tgcagtaattcttatgtgag

SEQ ID NO: 113796 - DNA, 20 bp, synthetic construct
  source 1..20: mol_type = other DNA
atgcagtaattcttatgtga

SEQ ID NO: 113797 - DNA, 20 bp, synthetic construct
  source 1..20: mol_type = other DNA
catgcagtaattcttatgtg

SEQ ID NO: 113798 - DNA, 20 bp, synthetic construct
  source 1..20: mol_type = other DNA
gcatgcagtaattcttatgt

SEQ ID NO: 113799 - DNA, 20 bp, synthetic construct
  source 1..20: mol_type = other DNA
agcatgcagtaattcttatg

SEQ ID NO: 113800 - DNA, 20 bp, synthetic construct
  source 1..20: mol_type = other DNA
tagcatgcagtaattcttat

SEQ ID NO: 113801 - DNA, 20 bp, synthetic construct
  source 1..20: mol_type = other DNA
ctagcatgcagtaattctta

SEQ ID NO: 113802 - DNA, 20 bp, synthetic construct
  source 1..20: mol_type = other DNA
tctagcatgcagtaattctt

SEQ ID NO: 113803 - DNA, 20 bp, synthetic construct
  source 1..20: mol_type = other DNA
ttctagcatgcagtaattct

SEQ ID NO: 113804 - DNA, 20 bp, synthetic construct
  source 1..20: mol_type = other DNA
attctagcatgcagtaattc

SEQ ID NO: 113805 - DNA, 20 bp, synthetic construct
  source 1..20: mol_type = other DNA
tattctagcatgcagtaatt

SEQ ID NO: 113806 - DNA, 20 bp, synthetic construct
  source 1..20: mol_type = other DNA
atattctagcatgcagtaat

SEQ ID NO: 113807 - DNA, 20 bp, synthetic construct
  source 1..20: mol_type = other DNA
aatattctagcatgcagtaa

SEQ ID NO: 113808 - DNA, 20 bp, synthetic construct
  source 1..20: mol_type = other DNA
caatattctagcatgcagta

SEQ ID NO: 113809 - DNA, 20 bp, synthetic construct
  source 1..20: mol_type = other DNA
ccaatattctagcatgcagt

SEQ ID NO: 113810 - DNA, 20 bp, synthetic construct
  source 1..20: mol_type = other DNA
accaatattctagcatgcag

SEQ ID NO: 113811 - DNA, 20 bp, synthetic construct
  source 1..20: mol_type = other DNA
taccaatattctagcatgca

SEQ ID NO: 113812 - DNA, 20 bp, synthetic construct
  source 1..20: mol_type = other DNA
ataccaatattctagcatgc

SEQ ID NO: 113813 - DNA, 20 bp, synthetic construct
  source 1..20: mol_type = other DNA
cataccaatattctagcatg

SEQ ID NO: 113814 - DNA, 20 bp, synthetic construct
  source 1..20: mol_type = other DNA
acataccaatattctagcat

SEQ ID NO: 113815 - DNA, 20 bp, synthetic construct
  source 1..20: mol_type = other DNA
aacataccaatattctagca

SEQ ID NO: 113816 - DNA, 20 bp, synthetic construct
  source 1..20: mol_type = other DNA
caacataccaatattctagc

SEQ ID NO: 113817 - DNA, 20 bp, synthetic construct
  source 1..20: mol_type = other DNA
tcaacataccaatattctag

SEQ ID NO: 113818 - DNA, 20 bp, synthetic construct
  source 1..20: mol_type = other DNA
gtcaacataccaatattcta

SEQ ID NO: 113819 - DNA, 20 bp, synthetic construct
  source 1..20: mol_type = other DNA
agtcaacataccaatattct

SEQ ID NO: 113820 - DNA, 20 bp, synthetic construct
  source 1..20: mol_type = other DNA
cagtcaacataccaatattc

SEQ ID NO: 113821 - DNA, 20 bp, synthetic construct
  source 1..20: mol_type = other DNA
ccagtcaacataccaatatt

SEQ ID NO: 113822 - DNA, 20 bp, synthetic construct
  source 1..20: mol_type = other DNA
accagtcaacataccaatat

SEQ ID NO: 113823 - DNA, 20 bp, synthetic construct
  source 1..20: mol_type = other DNA
taccagtcaacataccaata

SEQ ID NO: 113824 - DNA, 20 bp, synthetic construct
  source 1..20: mol_type = other DNA
ctaccagtcaacataccaat

SEQ ID NO: 113825 - DNA, 20 bp, synthetic construct
  source 1..20: mol_type = other DNA
gctaccagtcaacataccaa

SEQ ID NO: 113826 - DNA, 20 bp, synthetic construct
  source 1..20: mol_type = other DNA
agctaccagtcaacatacca

SEQ ID NO: 113827 - DNA, 20 bp, synthetic construct
  source 1..20: mol_type = other DNA
gagctaccagtcaacatacc

SEQ ID NO: 113828 - DNA, 20 bp, synthetic construct
  source 1..20: mol_type = other DNA
tgagctaccagtcaacatac

SEQ ID NO: 113829 - DNA, 20 bp, synthetic construct
  source 1..20: mol_type = other DNA
atgagctaccagtcaacata

SEQ ID NO: 113830 - DNA, 20 bp, synthetic construct
  source 1..20: mol_type = other DNA
tatgagctaccagtcaacat

SEQ ID NO: 113831 - DNA, 20 bp, synthetic construct
  source 1..20: mol_type = other DNA
gtatgagctaccagtcaaca

SEQ ID NO: 113832 - DNA, 20 bp, synthetic construct
  source 1..20: mol_type = other DNA
ggtatgagctaccagtcaac

SEQ ID NO: 113833 - DNA, 20 bp, synthetic construct
  source 1..20: mol_type = other DNA
aggtatgagctaccagtcaa

SEQ ID NO: 113834 - DNA, 20 bp, synthetic construct
  source 1..20: mol_type = other DNA
taggtatgagctaccagtca

SEQ ID NO: 113835 - DNA, 20 bp, synthetic construct
  source 1..20: mol_type = other DNA
ataggtatgagctaccagtc

SEQ ID NO: 113836 - DNA, 20 bp, synthetic construct
  source 1..20: mol_type = other DNA
tataggtatgagctaccagt

SEQ ID NO: 113837 - DNA, 20 bp, synthetic construct
  source 1..20: mol_type = other DNA
ttataggtatgagctaccag

SEQ ID NO: 113838 - DNA, 20 bp, synthetic construct
  source 1..20: mol_type = other DNA
attataggtatgagctacca

SEQ ID NO: 113839 - DNA, 20 bp, synthetic construct
  source 1..20: mol_type = other DNA
gattataggtatgagctacc

SEQ ID NO: 113840 - DNA, 20 bp, synthetic construct
  source 1..20: mol_type = other DNA
ggattataggtatgagctac

SEQ ID NO: 113841 - DNA, 20 bp, synthetic construct
  source 1..20: mol_type = other DNA
gggattataggtatgagcta

SEQ ID NO: 113842 - DNA, 20 bp, synthetic construct
  source 1..20: mol_type = other DNA
tgggattataggtatgagct

SEQ ID NO: 113843 - DNA, 20 bp, synthetic construct
  source 1..20: mol_type = other DNA
ctgggattataggtatgagc

SEQ ID NO: 113844 - DNA, 20 bp, synthetic construct
  source 1..20: mol_type = other DNA
gctgggattataggtatgag

SEQ ID NO: 113845 - DNA, 20 bp, synthetic construct
  source 1..20: mol_type = other DNA
tgctgggattataggtatga

SEQ ID NO: 113846 - DNA, 20 bp, synthetic construct
  source 1..20: mol_type = other DNA
gtgctgggattataggtatg

SEQ ID NO: 113847 - DNA, 20 bp, synthetic construct
  source 1..20: mol_type = other DNA
agtgctgggattataggtat

SEQ ID NO: 113848 - DNA, 20 bp, synthetic construct
  source 1..20: mol_type = other DNA
gagtgctgggattataggta

SEQ ID NO: 113849 - DNA, 20 bp, synthetic construct
  source 1..20: mol_type = other DNA
agagtgctgggattataggt

SEQ ID NO: 113850 - DNA, 20 bp, synthetic construct
  source 1..20: mol_type = other DNA
cagagtgctgggattatagg

SEQ ID NO: 113851 - DNA, 20 bp, synthetic construct
  source 1..20: mol_type = other DNA
ccagagtgctgggattatag

SEQ ID NO: 113852 - DNA, 20 bp, synthetic construct
  source 1..20: mol_type = other DNA
cccagagtgctgggattata

SEQ ID NO: 113853 - DNA, 20 bp, synthetic construct
  source 1..20: mol_type = other DNA
tcccagagtgctgggattat

SEQ ID NO: 113854 - DNA, 20 bp, synthetic construct
  source 1..20: mol_type = other DNA
ctcccagagtgctgggatta

SEQ ID NO: 113855 - DNA, 20 bp, synthetic construct
  source 1..20: mol_type = other DNA
cctcccagagtgctgggatt

SEQ ID NO: 113856 - DNA, 20 bp, synthetic construct
  source 1..20: mol_type = other DNA
acctcccagagtgctgggat

SEQ ID NO: 113857 - DNA, 20 bp, synthetic construct
  source 1..20: mol_type = other DNA
gacctcccagagtgctggga

SEQ ID NO: 113858 - DNA, 20 bp, synthetic construct
  source 1..20: mol_type = other DNA
ggacctcccagagtgctggg

SEQ ID NO: 113859 - DNA, 20 bp, synthetic construct
  source 1..20: mol_type = other DNA
tggacctcccagagtgctgg

SEQ ID NO: 113860 - DNA, 20 bp, synthetic construct
  source 1..20: mol_type = other DNA
ttggacctcccagagtgctg

SEQ ID NO: 113861 - DNA, 20 bp, synthetic construct
  source 1..20: mol_type = other DNA
cttggacctcccagagtgct

SEQ ID NO: 113862 - DNA, 20 bp, synthetic construct
  source 1..20: mol_type = other DNA
gcttggacctcccagagtgc

SEQ ID NO: 113863 - DNA, 20 bp, synthetic construct
  source 1..20: mol_type = other DNA
tgcttggacctcccagagtg

SEQ ID NO: 113864 - DNA, 20 bp, synthetic construct
  source 1..20: mol_type = other DNA
ctgcttggacctcccagagt

SEQ ID NO: 113865 - DNA, 20 bp, synthetic construct
  source 1..20: mol_type = other DNA
cctgcttggacctcccagag

SEQ ID NO: 113866 - DNA, 20 bp, synthetic construct
  source 1..20: mol_type = other DNA
acctgcttggacctcccaga

SEQ ID NO: 113867 - DNA, 20 bp, synthetic construct
  source 1..20: mol_type = other DNA
tacctgcttggacctcccag

SEQ ID NO: 113868 - DNA, 20 bp, synthetic construct
  source 1..20: mol_type = other DNA
ctacctgcttggacctccca

SEQ ID NO: 113869 - DNA, 20 bp, synthetic construct
  source 1..20: mol_type = other DNA
tctacctgcttggacctccc

SEQ ID NO: 113870 - DNA, 20 bp, synthetic construct
  source 1..20: mol_type = other DNA
atctacctgcttggacctcc

SEQ ID NO: 113871 - DNA, 20 bp, synthetic construct
  source 1..20: mol_type = other DNA
aatctacctgcttggacctc

SEQ ID NO: 113872 - DNA, 20 bp, synthetic construct
  source 1..20: mol_type = other DNA
taatctacctgcttggacct

SEQ ID NO: 113873 - DNA, 20 bp, synthetic construct
  source 1..20: mol_type = other DNA
gtaatctacctgcttggacc

SEQ ID NO: 113874 - DNA, 20 bp, synthetic construct
  source 1..20: mol_type = other DNA
agtaatctacctgcttggac

SEQ ID NO: 113875 - DNA, 20 bp, synthetic construct
  source 1..20: mol_type = other DNA
aagtaatctacctgcttgga

SEQ ID NO: 113876 - DNA, 20 bp, synthetic construct
  source 1..20: mol_type = other DNA
caagtaatctacctgcttgg

SEQ ID NO: 113877 - DNA, 20 bp, synthetic construct
  source 1..20: mol_type = other DNA
tcaagtaatctacctgcttg

SEQ ID NO: 113878 - DNA, 20 bp, synthetic construct
  source 1..20: mol_type = other DNA
ctcaagtaatctacctgctt

SEQ ID NO: 113879 - DNA, 20 bp, synthetic construct
  source 1..20: mol_type = other DNA
cctcaagtaatctacctgct

SEQ ID NO: 113880 - DNA, 20 bp, synthetic construct
  source 1..20: mol_type = other DNA
acctcaagtaatctacctgc

SEQ ID NO: 113881 - DNA, 20 bp, synthetic construct
  source 1..20: mol_type = other DNA
aacctcaagtaatctacctg

SEQ ID NO: 113882 - DNA, 20 bp, synthetic construct
  source 1..20: mol_type = other DNA
taacctcaagtaatctacct

SEQ ID NO: 113883 - DNA, 20 bp, synthetic construct
  source 1..20: mol_type = other DNA
ctaacctcaagtaatctacc

SEQ ID NO: 113884 - DNA, 20 bp, synthetic construct
  source 1..20: mol_type = other DNA
cctaacctcaagtaatctac

SEQ ID NO: 113885 - DNA, 20 bp, synthetic construct
  source 1..20: mol_type = other DNA
tcctaacctcaagtaatcta

SEQ ID NO: 113886 - DNA, 20 bp, synthetic construct
  source 1..20: mol_type = other DNA
ctcctaacctcaagtaatct

SEQ ID NO: 113887 - DNA, 20 bp, synthetic construct
  source 1..20: mol_type = other DNA
actcctaacctcaagtaatc

SEQ ID NO: 113888 - DNA, 20 bp, synthetic construct
  source 1..20: mol_type = other DNA
aactcctaacctcaagtaat

SEQ ID NO: 113889 - DNA, 20 bp, synthetic construct
  source 1..20: mol_type = other DNA
caactcctaacctcaagtaa

SEQ ID NO: 113890 - DNA, 20 bp, synthetic construct
  source 1..20: mol_type = other DNA
tcaactcctaacctcaagta

SEQ ID NO: 113891 - DNA, 20 bp, synthetic construct
  source 1..20: mol_type = other DNA
ttcaactcctaacctcaagt

SEQ ID NO: 113892 - DNA, 20 bp, synthetic construct
  source 1..20: mol_type = other DNA
cttcaactcctaacctcaag

SEQ ID NO: 113893 - DNA, 20 bp, synthetic construct
  source 1..20: mol_type = other DNA
tcttcaactcctaacctcaa

SEQ ID NO: 113894 - DNA, 20 bp, synthetic construct
  source 1..20: mol_type = other DNA
gtcttcaactcctaacctca

SEQ ID NO: 113895 - DNA, 20 bp, synthetic construct
  source 1..20: mol_type = other DNA
ggtcttcaactcctaacctc

SEQ ID NO: 113896 - DNA, 20 bp, synthetic construct
  source 1..20: mol_type = other DNA
tggtcttcaactcctaacct

SEQ ID NO: 113897 - DNA, 20 bp, synthetic construct
  source 1..20: mol_type = other DNA
ctggtcttcaactcctaacc

SEQ ID NO: 113898 - DNA, 20 bp, synthetic construct
  source 1..20: mol_type = other DNA
gctggtcttcaactcctaac

SEQ ID NO: 113899 - DNA, 20 bp, synthetic construct
  source 1..20: mol_type = other DNA
ggctggtcttcaactcctaa

SEQ ID NO: 113900 - DNA, 20 bp, synthetic construct
  source 1..20: mol_type = other DNA
aggctggtcttcaactccta

SEQ ID NO: 113901 - DNA, 20 bp, synthetic construct
  source 1..20: mol_type = other DNA
caggctggtcttcaactcct

SEQ ID NO: 113902 - DNA, 20 bp, synthetic construct
  source 1..20: mol_type = other DNA
ccaggctggtcttcaactcc

SEQ ID NO: 113903 - DNA, 20 bp, synthetic construct
  source 1..20: mol_type = other DNA
gccaggctggtcttcaactc

SEQ ID NO: 113904 - DNA, 20 bp, synthetic construct
  source 1..20: mol_type = other DNA
ggccaggctggtcttcaact

SEQ ID NO: 113905 - DNA, 20 bp, synthetic construct
  source 1..20: mol_type = other DNA
tggccaggctggtcttcaac

SEQ ID NO: 113906 - DNA, 20 bp, synthetic construct
  source 1..20: mol_type = other DNA
ttggccaggctggtcttcaa

SEQ ID NO: 113907 - DNA, 20 bp, synthetic construct
  source 1..20: mol_type = other DNA
gttggccaggctggtcttca

SEQ ID NO: 113908 - DNA, 20 bp, synthetic construct
  source 1..20: mol_type = other DNA
tgttggccaggctggtcttc

SEQ ID NO: 113909 - DNA, 20 bp, synthetic construct
  source 1..20: mol_type = other DNA
atgttggccaggctggtctt

SEQ ID NO: 113910 - DNA, 20 bp, synthetic construct
  source 1..20: mol_type = other DNA
catgttggccaggctggtct

SEQ ID NO: 113911 - DNA, 20 bp, synthetic construct
  source 1..20: mol_type = other DNA
acatgttggccaggctggtc

SEQ ID NO: 113912 - DNA, 20 bp, synthetic construct
  source 1..20: mol_type = other DNA
cacatgttggccaggctggt

SEQ ID NO: 113913 - DNA, 20 bp, synthetic construct
  source 1..20: mol_type = other DNA
tcacatgttggccaggctgg

SEQ ID NO: 113914 - DNA, 20 bp, synthetic construct
  source 1..20: mol_type = other DNA
ttcacatgttggccaggctg

SEQ ID NO: 113915 - DNA, 20 bp, synthetic construct
  source 1..20: mol_type = other DNA
tttcacatgttggccaggct

SEQ ID NO: 113916 - DNA, 20 bp, synthetic construct
  source 1..20: mol_type = other DNA
gtttcacatgttggccaggc

SEQ ID NO: 113917 - DNA, 20 bp, synthetic construct
  source 1..20: mol_type = other DNA
ggtttcacatgttggccagg

SEQ ID NO: 113918 - DNA, 20 bp, synthetic construct
  source 1..20: mol_type = other DNA
gggtttcacatgttggccag

SEQ ID NO: 113919 - DNA, 20 bp, synthetic construct
  source 1..20: mol_type = other DNA
agggtttcacatgttggcca

SEQ ID NO: 113920 - DNA, 20 bp, synthetic construct
  source 1..20: mol_type = other DNA
cagggtttcacatgttggcc

SEQ ID NO: 113921 - DNA, 20 bp, synthetic construct
  source 1..20: mol_type = other DNA
acagggtttcacatgttggc

SEQ ID NO: 113922 - DNA, 20 bp, synthetic construct
  source 1..20: mol_type = other DNA
gacagggtttcacatgttgg

SEQ ID NO: 113923 - DNA, 20 bp, synthetic construct
  source 1..20: mol_type = other DNA
agacagggtttcacatgttg

SEQ ID NO: 113924 - DNA, 20 bp, synthetic construct
  source 1..20: mol_type = other DNA
cagacagggtttcacatgtt

SEQ ID NO: 113925 - DNA, 20 bp, synthetic construct
  source 1..20: mol_type = other DNA
acagacagggtttcacatgt

SEQ ID NO: 113926 - DNA, 20 bp, synthetic construct
  source 1..20: mol_type = other DNA
tacagacagggtttcacatg

SEQ ID NO: 113927 - DNA, 20 bp, synthetic construct
  source 1..20: mol_type = other DNA
gtacagacagggtttcacat

SEQ ID NO: 113928 - DNA, 20 bp, synthetic construct
  source 1..20: mol_type = other DNA
agtacagacagggtttcaca

SEQ ID NO: 113929 - DNA, 20 bp, synthetic construct
  source 1..20: mol_type = other DNA
tagtacagacagggtttcac

SEQ ID NO: 113930 - DNA, 20 bp, synthetic construct
  source 1..20: mol_type = other DNA
ttagtacagacagggtttca

SEQ ID NO: 113931 - DNA, 20 bp, synthetic construct
  source 1..20: mol_type = other DNA
tttagtacagacagggtttc

SEQ ID NO: 113932 - DNA, 20 bp, synthetic construct
  source 1..20: mol_type = other DNA
ttttagtacagacagggttt

SEQ ID NO: 113933 - DNA, 20 bp, synthetic construct
  source 1..20: mol_type = other DNA
tttttagtacagacagggtt

SEQ ID NO: 113934 - DNA, 20 bp, synthetic construct
  source 1..20: mol_type = other DNA
atttttagtacagacagggt

SEQ ID NO: 113935 - DNA, 20 bp, synthetic construct
  source 1..20: mol_type = other DNA
tatttttagtacagacaggg

SEQ ID NO: 113936 - DNA, 20 bp, synthetic construct
  source 1..20: mol_type = other DNA
gtatttttagtacagacagg

SEQ ID NO: 113937 - DNA, 20 bp, synthetic construct
  source 1..20: mol_type = other DNA
tgtatttttagtacagacag

SEQ ID NO: 113938 - DNA, 20 bp, synthetic construct
  source 1..20: mol_type = other DNA
ttgtatttttagtacagaca

SEQ ID NO: 113939 - DNA, 20 bp, synthetic construct
  source 1..20: mol_type = other DNA
tttgtatttttagtacagac

SEQ ID NO: 113940 - DNA, 20 bp, synthetic construct
  source 1..20: mol_type = other DNA
ttttgtatttttagtacaga

SEQ ID NO: 113941 - DNA, 20 bp, synthetic construct
  source 1..20: mol_type = other DNA
tttttgtatttttagtacag

SEQ ID NO: 113942 - DNA, 20 bp, synthetic construct
  source 1..20: mol_type = other DNA
atttttgtatttttagtaca

SEQ ID NO: 113943 - DNA, 20 bp, synthetic construct
  source 1..20: mol_type = other DNA
aatttttgtatttttagtac

SEQ ID NO: 113944 - DNA, 20 bp, synthetic construct
  source 1..20: mol_type = other DNA
taatttttgtatttttagta

SEQ ID NO: 113945 - DNA, 20 bp, synthetic construct
  source 1..20: mol_type = other DNA
ctaatttttgtatttttagt

SEQ ID NO: 113946 - DNA, 20 bp, synthetic construct
  source 1..20: mol_type = other DNA
gctaatttttgtatttttag

SEQ ID NO: 113947 - DNA, 20 bp, synthetic construct
  source 1..20: mol_type = other DNA
ggctaatttttgtattttta

SEQ ID NO: 113948 - DNA, 20 bp, synthetic construct
  source 1..20: mol_type = other DNA
tggctaatttttgtattttt

SEQ ID NO: 113949 - DNA, 20 bp, synthetic construct
  source 1..20: mol_type = other DNA
ctggctaatttttgtatttt

SEQ ID NO: 113950 - DNA, 20 bp, synthetic construct
  source 1..20: mol_type = other DNA
cctggctaatttttgtattt

SEQ ID NO: 113951 - DNA, 20 bp, synthetic construct
  source 1..20: mol_type = other DNA
gcctggctaatttttgtatt

SEQ ID NO: 113952 - DNA, 20 bp, synthetic construct
  source 1..20: mol_type = other DNA
tgcctggctaatttttgtat

SEQ ID NO: 113953 - DNA, 20 bp, synthetic construct
  source 1..20: mol_type = other DNA
atgcctggctaatttttgta

SEQ ID NO: 113954 - DNA, 20 bp, synthetic construct
  source 1..20: mol_type = other DNA
catgcctggctaatttttgt

SEQ ID NO: 113955 - DNA, 20 bp, synthetic construct
  source 1..20: mol_type = other DNA
ccatgcctggctaatttttg

SEQ ID NO: 113956 - DNA, 20 bp, synthetic construct
  source 1..20: mol_type = other DNA
accatgcctggctaattttt

SEQ ID NO: 113957 - DNA, 20 bp, synthetic construct
  source 1..20: mol_type = other DNA
caccatgcctggctaatttt

SEQ ID NO: 113958 - DNA, 20 bp, synthetic construct
  source 1..20: mol_type = other DNA
ccaccatgcctggctaattt

SEQ ID NO: 113959 - DNA, 20 bp, synthetic construct
  source 1..20: mol_type = other DNA
accaccatgcctggctaatt

SEQ ID NO: 113960 - DNA, 20 bp, synthetic construct
  source 1..20: mol_type = other DNA
taccaccatgcctggctaat

SEQ ID NO: 113961 - DNA, 20 bp, synthetic construct
  source 1..20: mol_type = other DNA
ctaccaccatgcctggctaa

SEQ ID NO: 113962 - DNA, 20 bp, synthetic construct
  source 1..20: mol_type = other DNA
cctaccaccatgcctggcta

SEQ ID NO: 113963 - DNA, 20 bp, synthetic construct
  source 1..20: mol_type = other DNA
acctaccaccatgcctggct

SEQ ID NO: 113964 - DNA, 20 bp, synthetic construct
  source 1..20: mol_type = other DNA
cacctaccaccatgcctggc

SEQ ID NO: 113965 - DNA, 20 bp, synthetic construct
  source 1..20: mol_type = other DNA
gcacctaccaccatgcctgg

SEQ ID NO: 113966 - DNA, 20 bp, synthetic construct
  source 1..20: mol_type = other DNA
ggcacctaccaccatgcctg

SEQ ID NO: 113967 - DNA, 20 bp, synthetic construct
  source 1..20: mol_type = other DNA
aggcacctaccaccatgcct

SEQ ID NO: 113968 - DNA, 20 bp, synthetic construct
  source 1..20: mol_type = other DNA
caggcacctaccaccatgcc

SEQ ID NO: 113969 - DNA, 20 bp, synthetic construct
  source 1..20: mol_type = other DNA
acaggcacctaccaccatgc

SEQ ID NO: 113970 - DNA, 20 bp, synthetic construct
  source 1..20: mol_type = other DNA
tacaggcacctaccaccatg

SEQ ID NO: 113971 - DNA, 20 bp, synthetic construct
  source 1..20: mol_type = other DNA
atacaggcacctaccaccat

SEQ ID NO: 113972 - DNA, 20 bp, synthetic construct
  source 1..20: mol_type = other DNA
gatacaggcacctaccacca

SEQ ID NO: 113973 - DNA, 20 bp, synthetic construct
  source 1..20: mol_type = other DNA
ggatacaggcacctaccacc

SEQ ID NO: 113974 - DNA, 20 bp, synthetic construct
  source 1..20: mol_type = other DNA
gggatacaggcacctaccac

SEQ ID NO: 113975 - DNA, 20 bp, synthetic construct
  source 1..20: mol_type = other DNA
tgggatacaggcacctacca

SEQ ID NO: 113976 - DNA, 20 bp, synthetic construct
  source 1..20: mol_type = other DNA
ctgggatacaggcacctacc

SEQ ID NO: 113977 - DNA, 20 bp, synthetic construct
  source 1..20: mol_type = other DNA
gctgggatacaggcacctac

SEQ ID NO: 113978 - DNA, 20 bp, synthetic construct
  source 1..20: mol_type = other DNA
agctgggatacaggcaccta

SEQ ID NO: 113979 - DNA, 20 bp, synthetic construct
  source 1..20: mol_type = other DNA
tagctgggatacaggcacct

SEQ ID NO: 113980 - DNA, 20 bp, synthetic construct
  source 1..20: mol_type = other DNA
gtagctgggatacaggcacc

SEQ ID NO: 113981 - DNA, 20 bp, synthetic construct
  source 1..20: mol_type = other DNA
agtagctgggatacaggcac

SEQ ID NO: 113982 - DNA, 20 bp, synthetic construct
  source 1..20: mol_type = other DNA
gagtagctgggatacaggca

SEQ ID NO: 113983 - DNA, 20 bp, synthetic construct
  source 1..20: mol_type = other DNA
cgagtagctgggatacaggc

SEQ ID NO: 113984 - DNA, 20 bp, synthetic construct
  source 1..20: mol_type = other DNA
ccgagtagctgggatacagg

SEQ ID NO: 113985 - DNA, 20 bp, synthetic construct
  source 1..20: mol_type = other DNA
cccgagtagctgggatacag

SEQ ID NO: 113986 - DNA, 20 bp, synthetic construct
  source 1..20: mol_type = other DNA
tcccgagtagctgggataca

SEQ ID NO: 113987 - DNA, 20 bp, synthetic construct
  source 1..20: mol_type = other DNA
ctcccgagtagctgggatac

SEQ ID NO: 113988 - DNA, 20 bp, synthetic construct
  source 1..20: mol_type = other DNA
cctcccgagtagctgggata

SEQ ID NO: 113989 - DNA, 20 bp, synthetic construct
  source 1..20: mol_type = other DNA
gcctcccgagtagctgggat

SEQ ID NO: 113990 - DNA, 20 bp, synthetic construct
  source 1..20: mol_type = other DNA
agcctcccgagtagctggga

SEQ ID NO: 113991 - DNA, 20 bp, synthetic construct
  source 1..20: mol_type = other DNA
cagcctcccgagtagctggg

SEQ ID NO: 113992 - DNA, 20 bp, synthetic construct
  source 1..20: mol_type = other DNA
tcagcctcccgagtagctgg

SEQ ID NO: 113993 - DNA, 20 bp, synthetic construct
  source 1..20: mol_type = other DNA
ctcagcctcccgagtagctg

SEQ ID NO: 113994 - DNA, 20 bp, synthetic construct
  source 1..20: mol_type = other DNA
cctcagcctcccgagtagct

SEQ ID NO: 113995 - DNA, 20 bp, synthetic construct
  source 1..20: mol_type = other DNA
gcctcagcctcccgagtagc

SEQ ID NO: 113996 - DNA, 20 bp, synthetic construct
  source 1..20: mol_type = other DNA
tgcctcagcctcccgagtag

SEQ ID NO: 113997 - DNA, 20 bp, synthetic construct
  source 1..20: mol_type = other DNA
ctgcctcagcctcccgagta

SEQ ID NO: 113998 - DNA, 20 bp, synthetic construct
  source 1..20: mol_type = other DNA
cctgcctcagcctcccgagt

SEQ ID NO: 113999 - DNA, 20 bp, synthetic construct
  source 1..20: mol_type = other DNA
tcctgcctcagcctcccgag

SEQ ID NO: 114000 - DNA, 20 bp, synthetic construct
  source 1..20: mol_type = other DNA
ctcctgcctcagcctcccga

SEQ ID NO: 114001 - DNA, 20 bp, synthetic construct
  source 1..20: mol_type = other DNA
tctcctgcctcagcctcccg

SEQ ID NO: 114002 - DNA, 20 bp, synthetic construct
  source 1..20: mol_type = other DNA
ttctcctgcctcagcctccc

SEQ ID NO: 114003 - DNA, 20 bp, synthetic construct
  source 1..20: mol_type = other DNA
attctcctgcctcagcctcc

SEQ ID NO: 114004 - DNA, 20 bp, synthetic construct
  source 1..20: mol_type = other DNA
aattctcctgcctcagcctc

SEQ ID NO: 114005 - DNA, 20 bp, synthetic construct
  source 1..20: mol_type = other DNA
caattctcctgcctcagcct

SEQ ID NO: 114006 - DNA, 20 bp, synthetic construct
  source 1..20: mol_type = other DNA
gcaattctcctgcctcagcc

SEQ ID NO: 114007 - DNA, 20 bp, synthetic construct
  source 1..20: mol_type = other DNA
agcaattctcctgcctcagc

SEQ ID NO: 114008 - DNA, 20 bp, synthetic construct
  source 1..20: mol_type = other DNA
aagcaattctcctgcctcag

SEQ ID NO: 114009 - DNA, 20 bp, synthetic construct
  source 1..20: mol_type = other DNA
caagcaattctcctgcctca

SEQ ID NO: 114010 - DNA, 20 bp, synthetic construct
  source 1..20: mol_type = other DNA
tcaagcaattctcctgcctc

SEQ ID NO: 114011 - DNA, 20 bp, synthetic construct
  source 1..20: mol_type = other DNA
ttcaagcaattctcctgcct

SEQ ID NO: 114012 - DNA, 20 bp, synthetic construct
  source 1..20: mol_type = other DNA
gttcaagcaattctcctgcc

SEQ ID NO: 114013 - DNA, 20 bp, synthetic construct
  source 1..20: mol_type = other DNA
ggttcaagcaattctcctgc

SEQ ID NO: 114014 - DNA, 20 bp, synthetic construct
  source 1..20: mol_type = other DNA
gggttcaagcaattctcctg

SEQ ID NO: 114015 - DNA, 20 bp, synthetic construct
  source 1..20: mol_type = other DNA
tgggttcaagcaattctcct

SEQ ID NO: 114016 - DNA, 20 bp, synthetic construct
  source 1..20: mol_type = other DNA
ctgggttcaagcaattctcc

SEQ ID NO: 114017 - DNA, 20 bp, synthetic construct
  source 1..20: mol_type = other DNA
tctgggttcaagcaattctc

SEQ ID NO: 114018 - DNA, 20 bp, synthetic construct
  source 1..20: mol_type = other DNA
ttctgggttcaagcaattct

SEQ ID NO: 114019 - DNA, 20 bp, synthetic construct
  source 1..20: mol_type = other DNA
cttctgggttcaagcaattc

SEQ ID NO: 114020 - DNA, 20 bp, synthetic construct
  source 1..20: mol_type = other DNA
ccttctgggttcaagcaatt

SEQ ID NO: 114021 - DNA, 20 bp, synthetic construct
  source 1..20: mol_type = other DNA
accttctgggttcaagcaat

SEQ ID NO: 114022 - DNA, 20 bp, synthetic construct
  source 1..20: mol_type = other DNA
caccttctgggttcaagcaa

SEQ ID NO: 114023 - DNA, 20 bp, synthetic construct
  source 1..20: mol_type = other DNA
ccaccttctgggttcaagca

SEQ ID NO: 114024 - DNA, 20 bp, synthetic construct
  source 1..20: mol_type = other DNA
tccaccttctgggttcaagc

SEQ ID NO: 114025 - DNA, 20 bp, synthetic construct
  source 1..20: mol_type = other DNA
ctccaccttctgggttcaag

SEQ ID NO: 114026 - DNA, 20 bp, synthetic construct
  source 1..20: mol_type = other DNA
cctccaccttctgggttcaa

SEQ ID NO: 114027 - DNA, 20 bp, synthetic construct
  source 1..20: mol_type = other DNA
gcctccaccttctgggttca

SEQ ID NO: 114028 - DNA, 20 bp, synthetic construct
  source 1..20: mol_type = other DNA
agcctccaccttctgggttc

SEQ ID NO: 114029 - DNA, 20 bp, synthetic construct
  source 1..20: mol_type = other DNA
cagcctccaccttctgggtt

SEQ ID NO: 114030 - DNA, 20 bp, synthetic construct
  source 1..20: mol_type = other DNA
gcagcctccaccttctgggt

SEQ ID NO: 114031 - DNA, 20 bp, synthetic construct
  source 1..20: mol_type = other DNA
tgcagcctccaccttctggg

SEQ ID NO: 114032 - DNA, 20 bp, synthetic construct
  source 1..20: mol_type = other DNA
ctgcagcctccaccttctgg

SEQ ID NO: 114033 - DNA, 20 bp, synthetic construct
  source 1..20: mol_type = other DNA
actgcagcctccaccttctg

SEQ ID NO: 114034 - DNA, 20 bp, synthetic construct
  source 1..20: mol_type = other DNA
cactgcagcctccaccttct

SEQ ID NO: 114035 - DNA, 20 bp, synthetic construct
  source 1..20: mol_type = other DNA
tcactgcagcctccaccttc

SEQ ID NO: 114036 - DNA, 20 bp, synthetic construct
  source 1..20: mol_type = other DNA
ctcactgcagcctccacctt

SEQ ID NO: 114037 - DNA, 20 bp, synthetic construct
  source 1..20: mol_type = other DNA
gctcactgcagcctccacct

SEQ ID NO: 114038 - DNA, 20 bp, synthetic construct
  source 1..20: mol_type = other DNA
ggctcactgcagcctccacc

SEQ ID NO: 114039 - DNA, 20 bp, synthetic construct
  source 1..20: mol_type = other DNA
cggctcactgcagcctccac

SEQ ID NO: 114040 - DNA, 20 bp, synthetic construct
  source 1..20: mol_type = other DNA
tcggctcactgcagcctcca

SEQ ID NO: 114041 - DNA, 20 bp, synthetic construct
  source 1..20: mol_type = other DNA
ctcggctcactgcagcctcc

SEQ ID NO: 114042 - DNA, 20 bp, synthetic construct
  source 1..20: mol_type = other DNA
tctcggctcactgcagcctc

SEQ ID NO: 114043 - DNA, 20 bp, synthetic construct
  source 1..20: mol_type = other DNA
atctcggctcactgcagcct

SEQ ID NO: 114044 - DNA, 20 bp, synthetic construct
  source 1..20: mol_type = other DNA
gatctcggctcactgcagcc

SEQ ID NO: 114045 - DNA, 20 bp, synthetic construct
  source 1..20: mol_type = other DNA
tgatctcggctcactgcagc

SEQ ID NO: 114046 - DNA, 20 bp, synthetic construct
  source 1..20: mol_type = other DNA
atgatctcggctcactgcag

SEQ ID NO: 114047 - DNA, 20 bp, synthetic construct
  source 1..20: mol_type = other DNA
catgatctcggctcactgca

SEQ ID NO: 114048 - DNA, 20 bp, synthetic construct
  source 1..20: mol_type = other DNA
gcatgatctcggctcactgc

SEQ ID NO: 114049 - DNA, 20 bp, synthetic construct
  source 1..20: mol_type = other DNA
ggcatgatctcggctcactg

SEQ ID NO: 114050 - DNA, 20 bp, synthetic construct
  source 1..20: mol_type = other DNA
tggcatgatctcggctcact

SEQ ID NO: 114051 - DNA, 20 bp, synthetic construct
  source 1..20: mol_type = other DNA
gtggcatgatctcggctcac

SEQ ID NO: 114052 - DNA, 20 bp, synthetic construct
  source 1..20: mol_type = other DNA
agtggcatgatctcggctca

SEQ ID NO: 114053 - DNA, 20 bp, synthetic construct
  source 1..20: mol_type = other DNA
cagtggcatgatctcggctc

SEQ ID NO: 114054 - DNA, 20 bp, synthetic construct
  source 1..20: mol_type = other DNA
gcagtggcatgatctcggct

SEQ ID NO: 114055 - DNA, 20 bp, synthetic construct
  source 1..20: mol_type = other DNA
tgcagtggcatgatctcggc

SEQ ID NO: 114056 - DNA, 20 bp, synthetic construct
  source 1..20: mol_type = other DNA
gtgcagtggcatgatctcgg

SEQ ID NO: 114057 - DNA, 20 bp, synthetic construct
  source 1..20: mol_type = other DNA
agtgcagtggcatgatctcg

SEQ ID NO: 114058 - DNA, 20 bp, synthetic construct
  source 1..20: mol_type = other DNA
gagtgcagtggcatgatctc

SEQ ID NO: 114059 - DNA, 20 bp, synthetic construct
  source 1..20: mol_type = other DNA
ggagtgcagtggcatgatct

SEQ ID NO: 114060 - DNA, 20 bp, synthetic construct
  source 1..20: mol_type = other DNA
tggagtgcagtggcatgatc

SEQ ID NO: 114061 - DNA, 20 bp, synthetic construct
  source 1..20: mol_type = other DNA
ctggagtgcagtggcatgat

SEQ ID NO: 114062 - DNA, 20 bp, synthetic construct
  source 1..20: mol_type = other DNA
gctggagtgcagtggcatga

SEQ ID NO: 114063 - DNA, 20 bp, synthetic construct
  source 1..20: mol_type = other DNA
ggctggagtgcagtggcatg

SEQ ID NO: 114064 - DNA, 20 bp, synthetic construct
  source 1..20: mol_type = other DNA
aggctggagtgcagtggcat

SEQ ID NO: 114065 - DNA, 20 bp, synthetic construct
  source 1..20: mol_type = other DNA
caggctggagtgcagtggca

SEQ ID NO: 114066 - DNA, 20 bp, synthetic construct
  source 1..20: mol_type = other DNA
ccaggctggagtgcagtggc

SEQ ID NO: 114067 - DNA, 20 bp, synthetic construct
  source 1..20: mol_type = other DNA
cccaggctggagtgcagtgg

SEQ ID NO: 114068 - DNA, 20 bp, synthetic construct
  source 1..20: mol_type = other DNA
acccaggctggagtgcagtg

SEQ ID NO: 114069 - DNA, 20 bp, synthetic construct
  source 1..20: mol_type = other DNA
cacccaggctggagtgcagt

SEQ ID NO: 114070 - DNA, 20 bp, synthetic construct
  source 1..20: mol_type = other DNA
tcacccaggctggagtgcag

SEQ ID NO: 114071 - DNA, 20 bp, synthetic construct
  source 1..20: mol_type = other DNA
gtcacccaggctggagtgca

SEQ ID NO: 114072 - DNA, 20 bp, synthetic construct
  source 1..20: mol_type = other DNA
tgtcacccaggctggagtgc

SEQ ID NO: 114073 - DNA, 20 bp, synthetic construct
  source 1..20: mol_type = other DNA
ctgtcacccaggctggagtg

SEQ ID NO: 114074 - DNA, 20 bp, synthetic construct
  source 1..20: mol_type = other DNA
tctgtcacccaggctggagt

SEQ ID NO: 114075 - DNA, 20 bp, synthetic construct
  source 1..20: mol_type = other DNA
ctctgtcacccaggctggag

SEQ ID NO: 114076 - DNA, 20 bp, synthetic construct
  source 1..20: mol_type = other DNA
gctctgtcacccaggctgga

SEQ ID NO: 114077 - DNA, 20 bp, synthetic construct
  source 1..20: mol_type = other DNA
cgctctgtcacccaggctgg

SEQ ID NO: 114078 - DNA, 20 bp, synthetic construct
  source 1..20: mol_type = other DNA
tcgctctgtcacccaggctg

SEQ ID NO: 114079 - DNA, 20 bp, synthetic construct
  source 1..20: mol_type = other DNA
ctcgctctgtcacccaggct

SEQ ID NO: 114080 - DNA, 20 bp, synthetic construct
  source 1..20: mol_type = other DNA
tctcgctctgtcacccaggc

SEQ ID NO: 114081 - DNA, 20 bp, synthetic construct
  source 1..20: mol_type = other DNA
gtctcgctctgtcacccagg

SEQ ID NO: 114082 - DNA, 20 bp, synthetic construct
  source 1..20: mol_type = other DNA
agtctcgctctgtcacccag

SEQ ID NO: 114083 - DNA, 20 bp, synthetic construct
  source 1..20: mol_type = other DNA
gagtctcgctctgtcaccca

SEQ ID NO: 114084 - DNA, 20 bp, synthetic construct
  source 1..20: mol_type = other DNA
agagtctcgctctgtcaccc

SEQ ID NO: 114085 - DNA, 20 bp, synthetic construct
  source 1..20: mol_type = other DNA
cagagtctcgctctgtcacc

SEQ ID NO: 114086 - DNA, 20 bp, synthetic construct
  source 1..20: mol_type = other DNA
acagagtctcgctctgtcac

SEQ ID NO: 114087 - DNA, 20 bp, synthetic construct
  source 1..20: mol_type = other DNA
gacagagtctcgctctgtca

SEQ ID NO: 114088 - DNA, 20 bp, synthetic construct
  source 1..20: mol_type = other DNA
agacagagtctcgctctgtc

SEQ ID NO: 114089 - DNA, 20 bp, synthetic construct
  source 1..20: mol_type = other DNA
gagacagagtctcgctctgt

SEQ ID NO: 114090 - DNA, 20 bp, synthetic construct
  source 1..20: mol_type = other DNA
tgagacagagtctcgctctg

SEQ ID NO: 114091 - DNA, 20 bp, synthetic construct
  source 1..20: mol_type = other DNA
ttgagacagagtctcgctct

SEQ ID NO: 114092 - DNA, 20 bp, synthetic construct
  source 1..20: mol_type = other DNA
tttgagacagagtctcgctc

SEQ ID NO: 114093 - DNA, 20 bp, synthetic construct
  source 1..20: mol_type = other DNA
ttttgagacagagtctcgct

SEQ ID NO: 114094 - DNA, 20 bp, synthetic construct
  source 1..20: mol_type = other DNA
tttttgagacagagtctcgc

SEQ ID NO: 114095 - DNA, 20 bp, synthetic construct
  source 1..20: mol_type = other DNA
atttttgagacagagtctcg

SEQ ID NO: 114096 - DNA, 20 bp, synthetic construct
  source 1..20: mol_type = other DNA
tatttttgagacagagtctc

SEQ ID NO: 114097 - DNA, 20 bp, synthetic construct
  source 1..20: mol_type = other DNA
ttatttttgagacagagtct

SEQ ID NO: 114098 - DNA, 20 bp, synthetic construct
  source 1..20: mol_type = other DNA
tttatttttgagacagagtc

SEQ ID NO: 114099 - DNA, 20 bp, synthetic construct
  source 1..20: mol_type = other DNA
atttatttttgagacagagt

SEQ ID NO: 114100 - DNA, 20 bp, synthetic construct
  source 1..20: mol_type = other DNA
tatttatttttgagacagag

SEQ ID NO: 114101 - DNA, 20 bp, synthetic construct
  source 1..20: mol_type = other DNA
ttatttatttttgagacaga

SEQ ID NO: 114102 - DNA, 20 bp, synthetic construct
  source 1..20: mol_type = other DNA
tttatttatttttgagacag

SEQ ID NO: 114103 - DNA, 20 bp, synthetic construct
  source 1..20: mol_type = other DNA
atttatttatttttgagaca

SEQ ID NO: 114104 - DNA, 20 bp, synthetic construct
  source 1..20: mol_type = other DNA
tatttatttatttttgagac

SEQ ID NO: 114105 - DNA, 20 bp, synthetic construct
  source 1..20: mol_type = other DNA
ttatttatttatttttgaga

SEQ ID NO: 114106 - DNA, 20 bp, synthetic construct
  source 1..20: mol_type = other DNA
tttatttatttatttttgag

SEQ ID NO: 114107 - DNA, 20 bp, synthetic construct
  source 1..20: mol_type = other DNA
atttatttatttatttttga

SEQ ID NO: 114108 - DNA, 20 bp, synthetic construct
  source 1..20: mol_type = other DNA
tatttatttatttatttttg

SEQ ID NO: 114109 - DNA, 20 bp, synthetic construct
  source 1..20: mol_type = other DNA
ttatttatttatttattttt

SEQ ID NO: 114110 - DNA, 20 bp, synthetic construct
  source 1..20: mol_type = other DNA
tttatttatttatttatttt

SEQ ID NO: 114111 - DNA, 20 bp, synthetic construct
  source 1..20: mol_type = other DNA
atttatttatttatttattt

SEQ ID NO: 114112 - DNA, 20 bp, synthetic construct
  source 1..20: mol_type = other DNA
tatttatttatttatttatt

SEQ ID NO: 114113 - DNA, 20 bp, synthetic construct
  source 1..20: mol_type = other DNA
ttatttatttatttatttat

SEQ ID NO: 114114 - DNA, 20 bp, synthetic construct
  source 1..20: mol_type = other DNA
tttatttatttatttattta

SEQ ID NO: 114115 - DNA, 20 bp, synthetic construct
  source 1..20: mol_type = other DNA
ttttatttatttatttattt

SEQ ID NO: 114116 - DNA, 20 bp, synthetic construct
  source 1..20: mol_type = other DNA
cttttatttatttatttatt

SEQ ID NO: 114117 - DNA, 20 bp, synthetic construct
  source 1..20: mol_type = other DNA
ccttttatttatttatttat

SEQ ID NO: 114118 - DNA, 20 bp, synthetic construct
  source 1..20: mol_type = other DNA
tccttttatttatttattta

SEQ ID NO: 114119 - DNA, 20 bp, synthetic construct
  source 1..20: mol_type = other DNA
atccttttatttatttattt

SEQ ID NO: 114120 - DNA, 20 bp, synthetic construct
  source 1..20: mol_type = other DNA
tatccttttatttatttatt

SEQ ID NO: 114121 - DNA, 20 bp, synthetic construct
  source 1..20: mol_type = other DNA
gtatccttttatttatttat

SEQ ID NO: 114122 - DNA, 20 bp, synthetic construct
  source 1..20: mol_type = other DNA
agtatccttttatttattta

SEQ ID NO: 114123 - DNA, 20 bp, synthetic construct
  source 1..20: mol_type = other DNA
cagtatccttttatttattt

SEQ ID NO: 114124 - DNA, 20 bp, synthetic construct
  source 1..20: mol_type = other DNA
acagtatccttttatttatt

SEQ ID NO: 114125 - DNA, 20 bp, synthetic construct
  source 1..20: mol_type = other DNA
aacagtatccttttatttat

SEQ ID NO: 114126 - DNA, 20 bp, synthetic construct
  source 1..20: mol_type = other DNA
taacagtatccttttattta

SEQ ID NO: 114127 - DNA, 20 bp, synthetic construct
  source 1..20: mol_type = other DNA
ataacagtatccttttattt

SEQ ID NO: 114128 - DNA, 20 bp, synthetic construct
  source 1..20: mol_type = other DNA
cataacagtatccttttatt

SEQ ID NO: 114129 - DNA, 20 bp, synthetic construct
  source 1..20: mol_type = other DNA
acataacagtatccttttat

SEQ ID NO: 114130 - DNA, 20 bp, synthetic construct
  source 1..20: mol_type = other DNA
aacataacagtatcctttta

SEQ ID NO: 114131 - DNA, 20 bp, synthetic construct
  source 1..20: mol_type = other DNA
taacataacagtatcctttt

SEQ ID NO: 114132 - DNA, 20 bp, synthetic construct
  source 1..20: mol_type = other DNA
ttaacataacagtatccttt

SEQ ID NO: 114133 - DNA, 20 bp, synthetic construct
  source 1..20: mol_type = other DNA
cttaacataacagtatcctt

SEQ ID NO: 114134 - DNA, 20 bp, synthetic construct
  source 1..20: mol_type = other DNA
tcttaacataacagtatcct

SEQ ID NO: 114135 - DNA, 20 bp, synthetic construct
  source 1..20: mol_type = other DNA
ttcttaacataacagtatcc

SEQ ID NO: 114136 - DNA, 20 bp, synthetic construct
  source 1..20: mol_type = other DNA
attcttaacataacagtatc

SEQ ID NO: 114137 - DNA, 20 bp, synthetic construct
  source 1..20: mol_type = other DNA
aattcttaacataacagtat

SEQ ID NO: 114138 - DNA, 20 bp, synthetic construct
  source 1..20: mol_type = other DNA
caattcttaacataacagta

SEQ ID NO: 114139 - DNA, 20 bp, synthetic construct
  source 1..20: mol_type = other DNA
gcaattcttaacataacagt

SEQ ID NO: 114140 - DNA, 20 bp, synthetic construct
  source 1..20: mol_type = other DNA
agcaattcttaacataacag

SEQ ID NO: 114141 - DNA, 20 bp, synthetic construct
  source 1..20: mol_type = other DNA
aagcaattcttaacataaca

SEQ ID NO: 114142 - DNA, 20 bp, synthetic construct
  source 1..20: mol_type = other DNA
aaagcaattcttaacataac

SEQ ID NO: 114143 - DNA, 20 bp, synthetic construct
  source 1..20: mol_type = other DNA
aaaagcaattcttaacataa

SEQ ID NO: 114144 - DNA, 20 bp, synthetic construct
  source 1..20: mol_type = other DNA
taaaagcaattcttaacata

SEQ ID NO: 114145 - DNA, 20 bp, synthetic construct
  source 1..20: mol_type = other DNA
ttaaaagcaattcttaacat

SEQ ID NO: 114146 - DNA, 20 bp, synthetic construct
  source 1..20: mol_type = other DNA
cttaaaagcaattcttaaca

SEQ ID NO: 114147 - DNA, 20 bp, synthetic construct
  source 1..20: mol_type = other DNA
ccttaaaagcaattcttaac

SEQ ID NO: 114148 - DNA, 20 bp, synthetic construct
  source 1..20: mol_type = other DNA
tccttaaaagcaattcttaa

SEQ ID NO: 114149 - DNA, 20 bp, synthetic construct
  source 1..20: mol_type = other DNA
atccttaaaagcaattctta

SEQ ID NO: 114150 - DNA, 20 bp, synthetic construct
  source 1..20: mol_type = other DNA
tatccttaaaagcaattctt

SEQ ID NO: 114151 - DNA, 20 bp, synthetic construct
  source 1..20: mol_type = other DNA
atatccttaaaagcaattct

SEQ ID NO: 114152 - DNA, 20 bp, synthetic construct
  source 1..20: mol_type = other DNA
aatatccttaaaagcaattc

SEQ ID NO: 114153 - DNA, 20 bp, synthetic construct
  source 1..20: mol_type = other DNA
aaatatccttaaaagcaatt

SEQ ID NO: 114154 - DNA, 20 bp, synthetic construct
  source 1..20: mol_type = other DNA
gaaatatccttaaaagcaat

SEQ ID NO: 114155 - DNA, 20 bp, synthetic construct
  source 1..20: mol_type = other DNA
tgaaatatccttaaaagcaa

SEQ ID NO: 114156 - DNA, 20 bp, synthetic construct
  source 1..20: mol_type = other DNA
atgaaatatccttaaaagca

SEQ ID NO: 114157 - DNA, 20 bp, synthetic construct
  source 1..20: mol_type = other DNA
tatgaaatatccttaaaagc

SEQ ID NO: 114158 - DNA, 20 bp, synthetic construct
  source 1..20: mol_type = other DNA
ttatgaaatatccttaaaag

SEQ ID NO: 114159 - DNA, 20 bp, synthetic construct
  source 1..20: mol_type = other DNA
cttatgaaatatccttaaaa

SEQ ID NO: 114160 - DNA, 20 bp, synthetic construct
  source 1..20: mol_type = other DNA
acttatgaaatatccttaaa

SEQ ID NO: 114161 - DNA, 20 bp, synthetic construct
  source 1..20: mol_type = other DNA
tacttatgaaatatccttaa

SEQ ID NO: 114162 - DNA, 20 bp, synthetic construct
  source 1..20: mol_type = other DNA
ctacttatgaaatatcctta

SEQ ID NO: 114163 - DNA, 20 bp, synthetic construct
  source 1..20: mol_type = other DNA
gctacttatgaaatatcctt

SEQ ID NO: 114164 - DNA, 20 bp, synthetic construct
  source 1..20: mol_type = other DNA
agctacttatgaaatatcct

SEQ ID NO: 114165 - DNA, 20 bp, synthetic construct
  source 1..20: mol_type = other DNA
tagctacttatgaaatatcc

SEQ ID NO: 114166 - DNA, 20 bp, synthetic construct
  source 1..20: mol_type = other DNA
gtagctacttatgaaatatc

SEQ ID NO: 114167 - DNA, 20 bp, synthetic construct
  source 1..20: mol_type = other DNA
agtagctacttatgaaatat

SEQ ID NO: 114168 - DNA, 20 bp, synthetic construct
  source 1..20: mol_type = other DNA
cagtagctacttatgaaata

SEQ ID NO: 114169 - DNA, 20 bp, synthetic construct
  source 1..20: mol_type = other DNA
acagtagctacttatgaaat

SEQ ID NO: 114170 - DNA, 20 bp, synthetic construct
  source 1..20: mol_type = other DNA
gacagtagctacttatgaaa

SEQ ID NO: 114171 - DNA, 20 bp, synthetic construct
  source 1..20: mol_type = other DNA
agacagtagctacttatgaa

SEQ ID NO: 114172 - DNA, 20 bp, synthetic construct
  source 1..20: mol_type = other DNA
aagacagtagctacttatga

SEQ ID NO: 114173 - DNA, 20 bp, synthetic construct
  source 1..20: mol_type = other DNA
aaagacagtagctacttatg

SEQ ID NO: 114174 - DNA, 20 bp, synthetic construct
  source 1..20: mol_type = other DNA
aaaagacagtagctacttat

SEQ ID NO: 114175 - DNA, 20 bp, synthetic construct
  source 1..20: mol_type = other DNA
gaaaagacagtagctactta

SEQ ID NO: 114176 - DNA, 20 bp, synthetic construct
  source 1..20: mol_type = other DNA
tgaaaagacagtagctactt

SEQ ID NO: 114177 - DNA, 20 bp, synthetic construct
  source 1..20: mol_type = other DNA
ctgaaaagacagtagctact

SEQ ID NO: 114178 - DNA, 20 bp, synthetic construct
  source 1..20: mol_type = other DNA
gctgaaaagacagtagctac

SEQ ID NO: 114179 - DNA, 20 bp, synthetic construct
  source 1..20: mol_type = other DNA
agctgaaaagacagtagcta

SEQ ID NO: 114180 - DNA, 20 bp, synthetic construct
  source 1..20: mol_type = other DNA
gagctgaaaagacagtagct

SEQ ID NO: 114181 - DNA, 20 bp, synthetic construct
  source 1..20: mol_type = other DNA
tgagctgaaaagacagtagc

SEQ ID NO: 114182 - DNA, 20 bp, synthetic construct
  source 1..20: mol_type = other DNA
ttgagctgaaaagacagtag

SEQ ID NO: 114183 - DNA, 20 bp, synthetic construct
  source 1..20: mol_type = other DNA
cttgagctgaaaagacagta

SEQ ID NO: 114184 - DNA, 20 bp, synthetic construct
  source 1..20: mol_type = other DNA
acttgagctgaaaagacagt

SEQ ID NO: 114185 - DNA, 20 bp, synthetic construct
  source 1..20: mol_type = other DNA
cacttgagctgaaaagacag

SEQ ID NO: 114186 - DNA, 20 bp, synthetic construct
  source 1..20: mol_type = other DNA
acacttgagctgaaaagaca

SEQ ID NO: 114187 - DNA, 20 bp, synthetic construct
  source 1..20: mol_type = other DNA
aacacttgagctgaaaagac

SEQ ID NO: 114188 - DNA, 20 bp, synthetic construct
  source 1..20: mol_type = other DNA
aaacacttgagctgaaaaga

SEQ ID NO: 114189 - DNA, 20 bp, synthetic construct
  source 1..20: mol_type = other DNA
caaacacttgagctgaaaag

SEQ ID NO: 114190 - DNA, 20 bp, synthetic construct
  source 1..20: mol_type = other DNA
acaaacacttgagctgaaaa

SEQ ID NO: 114191 - DNA, 20 bp, synthetic construct
  source 1..20: mol_type = other DNA
aacaaacacttgagctgaaa

SEQ ID NO: 114192 - DNA, 20 bp, synthetic construct
  source 1..20: mol_type = other DNA
caacaaacacttgagctgaa

SEQ ID NO: 114193 - DNA, 20 bp, synthetic construct
  source 1..20: mol_type = other DNA
tcaacaaacacttgagctga

SEQ ID NO: 114194 - DNA, 20 bp, synthetic construct
  source 1..20: mol_type = other DNA
atcaacaaacacttgagctg

SEQ ID NO: 114195 - DNA, 20 bp, synthetic construct
  source 1..20: mol_type = other DNA
aatcaacaaacacttgagct

SEQ ID NO: 114196 - DNA, 20 bp, synthetic construct
  source 1..20: mol_type = other DNA
caatcaacaaacacttgagc

SEQ ID NO: 114197 - DNA, 20 bp, synthetic construct
  source 1..20: mol_type = other DNA
ccaatcaacaaacacttgag

SEQ ID NO: 114198 - DNA, 20 bp, synthetic construct
  source 1..20: mol_type = other DNA
gccaatcaacaaacacttga

SEQ ID NO: 114199 - DNA, 20 bp, synthetic construct
  source 1..20: mol_type = other DNA
ggccaatcaacaaacacttg

SEQ ID NO: 114200 - DNA, 20 bp, synthetic construct
  source 1..20: mol_type = other DNA
tggccaatcaacaaacactt

SEQ ID NO: 114201 - DNA, 20 bp, synthetic construct
  source 1..20: mol_type = other DNA
ctggccaatcaacaaacact

SEQ ID NO: 114202 - DNA, 20 bp, synthetic construct
  source 1..20: mol_type = other DNA
cctggccaatcaacaaacac

SEQ ID NO: 114203 - DNA, 20 bp, synthetic construct
  source 1..20: mol_type = other DNA
gcctggccaatcaacaaaca

SEQ ID NO: 114204 - DNA, 20 bp, synthetic construct
  source 1..20: mol_type = other DNA
cgcctggccaatcaacaaac

SEQ ID NO: 114205 - DNA, 20 bp, synthetic construct
  source 1..20: mol_type = other DNA
acgcctggccaatcaacaaa

SEQ ID NO: 114206 - DNA, 20 bp, synthetic construct
  source 1..20: mol_type = other DNA
cacgcctggccaatcaacaa

SEQ ID NO: 114207 - DNA, 20 bp, synthetic construct
  source 1..20: mol_type = other DNA
ccacgcctggccaatcaaca

SEQ ID NO: 114208 - DNA, 20 bp, synthetic construct
  source 1..20: mol_type = other DNA
accacgcctggccaatcaac

SEQ ID NO: 114209 - DNA, 20 bp, synthetic construct
  source 1..20: mol_type = other DNA
taccacgcctggccaatcaa

SEQ ID NO: 114210 - DNA, 20 bp, synthetic construct
  source 1..20: mol_type = other DNA
ctaccacgcctggccaatca

SEQ ID NO: 114211 - DNA, 20 bp, synthetic construct
  source 1..20: mol_type = other DNA
gctaccacgcctggccaatc

SEQ ID NO: 114212 - DNA, 20 bp, synthetic construct
  source 1..20: mol_type = other DNA
agctaccacgcctggccaat

SEQ ID NO: 114213 - DNA, 20 bp, synthetic construct
  source 1..20: mol_type = other DNA
gagctaccacgcctggccaa

SEQ ID NO: 114214 - DNA, 20 bp, synthetic construct
  source 1..20: mol_type = other DNA
tgagctaccacgcctggcca

SEQ ID NO: 114215 - DNA, 20 bp, synthetic construct
  source 1..20: mol_type = other DNA
atgagctaccacgcctggcc

SEQ ID NO: 114216 - DNA, 20 bp, synthetic construct
  source 1..20: mol_type = other DNA
tatgagctaccacgcctggc

SEQ ID NO: 114217 - DNA, 20 bp, synthetic construct
  source 1..20: mol_type = other DNA
gtatgagctaccacgcctgg

SEQ ID NO: 114218 - DNA, 20 bp, synthetic construct
  source 1..20: mol_type = other DNA
ggtatgagctaccacgcctg

SEQ ID NO: 114219 - DNA, 20 bp, synthetic construct
  source 1..20: mol_type = other DNA
aggtatgagctaccacgcct

SEQ ID NO: 114220 - DNA, 20 bp, synthetic construct
  source 1..20: mol_type = other DNA
caggtatgagctaccacgcc

SEQ ID NO: 114221 - DNA, 20 bp, synthetic construct
  source 1..20: mol_type = other DNA
acaggtatgagctaccacgc

SEQ ID NO: 114222 - DNA, 20 bp, synthetic construct
  source 1..20: mol_type = other DNA
tacaggtatgagctaccacg

SEQ ID NO: 114223 - DNA, 20 bp, synthetic construct
  source 1..20: mol_type = other DNA
ttacaggtatgagctaccac

SEQ ID NO: 114224 - DNA, 20 bp, synthetic construct
  source 1..20: mol_type = other DNA
attacaggtatgagctacca

SEQ ID NO: 114225 - DNA, 20 bp, synthetic construct
  source 1..20: mol_type = other DNA
gattacaggtatgagctacc

SEQ ID NO: 114226 - DNA, 20 bp, synthetic construct
  source 1..20: mol_type = other DNA
ggattacaggtatgagctac

SEQ ID NO: 114227 - DNA, 20 bp, synthetic construct
  source 1..20: mol_type = other DNA
gggattacaggtatgagcta

SEQ ID NO: 114228 - DNA, 20 bp, synthetic construct
  source 1..20: mol_type = other DNA
tgggattacaggtatgagct

SEQ ID NO: 114229 - DNA, 20 bp, synthetic construct
  source 1..20: mol_type = other DNA
ctgggattacaggtatgagc

SEQ ID NO: 114230 - DNA, 20 bp, synthetic construct
  source 1..20: mol_type = other DNA
gctgggattacaggtatgag

SEQ ID NO: 114231 - DNA, 20 bp, synthetic construct
  source 1..20: mol_type = other DNA
tgctgggattacaggtatga

SEQ ID NO: 114232 - DNA, 20 bp, synthetic construct
  source 1..20: mol_type = other DNA
gtgctgggattacaggtatg

SEQ ID NO: 114233 - DNA, 20 bp, synthetic construct
  source 1..20: mol_type = other DNA
agtgctgggattacaggtat

SEQ ID NO: 114234 - DNA, 20 bp, synthetic construct
  source 1..20: mol_type = other DNA
aagtgctgggattacaggta

SEQ ID NO: 114235 - DNA, 20 bp, synthetic construct
  source 1..20: mol_type = other DNA
aaagtgctgggattacaggt

SEQ ID NO: 114236 - DNA, 20 bp, synthetic construct
  source 1..20: mol_type = other DNA
caaagtgctgggattacagg

SEQ ID NO: 114237 - DNA, 20 bp, synthetic construct
  source 1..20: mol_type = other DNA
ccaaagtgctgggattacag

SEQ ID NO: 114238 - DNA, 20 bp, synthetic construct
  source 1..20: mol_type = other DNA
cccaaagtgctgggattaca

SEQ ID NO: 114239 - DNA, 20 bp, synthetic construct
  source 1..20: mol_type = other DNA
tcccaaagtgctgggattac

SEQ ID NO: 114240 - DNA, 20 bp, synthetic construct
  source 1..20: mol_type = other DNA
ctcccaaagtgctgggatta

SEQ ID NO: 114241 - DNA, 20 bp, synthetic construct
  source 1..20: mol_type = other DNA
cctcccaaagtgctgggatt

SEQ ID NO: 114242 - DNA, 20 bp, synthetic construct
  source 1..20: mol_type = other DNA
gcctcccaaagtgctgggat

SEQ ID NO: 114243 - DNA, 20 bp, synthetic construct
  source 1..20: mol_type = other DNA
agcctcccaaagtgctggga

SEQ ID NO: 114244 - DNA, 20 bp, synthetic construct
  source 1..20: mol_type = other DNA
cagcctcccaaagtgctggg

SEQ ID NO: 114245 - DNA, 20 bp, synthetic construct
  source 1..20: mol_type = other DNA
tcagcctcccaaagtgctgg

SEQ ID NO: 114246 - DNA, 20 bp, synthetic construct
  source 1..20: mol_type = other DNA
ctcagcctcccaaagtgctg

SEQ ID NO: 114247 - DNA, 20 bp, synthetic construct
  source 1..20: mol_type = other DNA
actcagcctcccaaagtgct

SEQ ID NO: 114248 - DNA, 20 bp, synthetic construct
  source 1..20: mol_type = other DNA
gactcagcctcccaaagtgc

SEQ ID NO: 114249 - DNA, 20 bp, synthetic construct
  source 1..20: mol_type = other DNA
tgactcagcctcccaaagtg

SEQ ID NO: 114250 - DNA, 20 bp, synthetic construct
  source 1..20: mol_type = other DNA
ctgactcagcctcccaaagt

SEQ ID NO: 114251 - DNA, 20 bp, synthetic construct
  source 1..20: mol_type = other DNA
cctgactcagcctcccaaag

SEQ ID NO: 114252 - DNA, 20 bp, synthetic construct
  source 1..20: mol_type = other DNA
gcctgactcagcctcccaaa

SEQ ID NO: 114253 - DNA, 20 bp, synthetic construct
  source 1..20: mol_type = other DNA
tgcctgactcagcctcccaa

SEQ ID NO: 114254 - DNA, 20 bp, synthetic construct
  source 1..20: mol_type = other DNA
ctgcctgactcagcctccca

SEQ ID NO: 114255 - DNA, 20 bp, synthetic construct
  source 1..20: mol_type = other DNA
tctgcctgactcagcctccc

SEQ ID NO: 114256 - DNA, 20 bp, synthetic construct
  source 1..20: mol_type = other DNA
atctgcctgactcagcctcc

SEQ ID NO: 114257 - DNA, 20 bp, synthetic construct
  source 1..20: mol_type = other DNA
gatctgcctgactcagcctc

SEQ ID NO: 114258 - DNA, 20 bp, synthetic construct
  source 1..20: mol_type = other DNA
tgatctgcctgactcagcct

SEQ ID NO: 114259 - DNA, 20 bp, synthetic construct
  source 1..20: mol_type = other DNA
gtgatctgcctgactcagcc

SEQ ID NO: 114260 - DNA, 20 bp, synthetic construct
  source 1..20: mol_type = other DNA
agtgatctgcctgactcagc

SEQ ID NO: 114261 - DNA, 20 bp, synthetic construct
  source 1..20: mol_type = other DNA
aagtgatctgcctgactcag

SEQ ID NO: 114262 - DNA, 20 bp, synthetic construct
  source 1..20: mol_type = other DNA
taagtgatctgcctgactca

SEQ ID NO: 114263 - DNA, 20 bp, synthetic construct
  source 1..20: mol_type = other DNA
ttaagtgatctgcctgactc

SEQ ID NO: 114264 - DNA, 20 bp, synthetic construct
  source 1..20: mol_type = other DNA
cttaagtgatctgcctgact

SEQ ID NO: 114265 - DNA, 20 bp, synthetic construct
  source 1..20: mol_type = other DNA
ccttaagtgatctgcctgac

SEQ ID NO: 114266 - DNA, 20 bp, synthetic construct
  source 1..20: mol_type = other DNA
accttaagtgatctgcctga

SEQ ID NO: 114267 - DNA, 20 bp, synthetic construct
  source 1..20: mol_type = other DNA
gaccttaagtgatctgcctg

SEQ ID NO: 114268 - DNA, 20 bp, synthetic construct
  source 1..20: mol_type = other DNA
tgaccttaagtgatctgcct

SEQ ID NO: 114269 - DNA, 20 bp, synthetic construct
  source 1..20: mol_type = other DNA
ctgaccttaagtgatctgcc

SEQ ID NO: 114270 - DNA, 20 bp, synthetic construct
  source 1..20: mol_type = other DNA
gctgaccttaagtgatctgc

SEQ ID NO: 114271 - DNA, 20 bp, synthetic construct
  source 1..20: mol_type = other DNA
cgctgaccttaagtgatctg

SEQ ID NO: 114272 - DNA, 20 bp, synthetic construct
  source 1..20: mol_type = other DNA
acgctgaccttaagtgatct

SEQ ID NO: 114273 - DNA, 20 bp, synthetic construct
  source 1..20: mol_type = other DNA
cacgctgaccttaagtgatc

SEQ ID NO: 114274 - DNA, 20 bp, synthetic construct
  source 1..20: mol_type = other DNA
ccacgctgaccttaagtgat

SEQ ID NO: 114275 - DNA, 20 bp, synthetic construct
  source 1..20: mol_type = other DNA
gccacgctgaccttaagtga

SEQ ID NO: 114276 - DNA, 20 bp, synthetic construct
  source 1..20: mol_type = other DNA
ggccacgctgaccttaagtg

SEQ ID NO: 114277 - DNA, 20 bp, synthetic construct
  source 1..20: mol_type = other DNA
tggccacgctgaccttaagt

SEQ ID NO: 114278 - DNA, 20 bp, synthetic construct
  source 1..20: mol_type = other DNA
ttggccacgctgaccttaag

SEQ ID NO: 114279 - DNA, 20 bp, synthetic construct
  source 1..20: mol_type = other DNA
tttggccacgctgaccttaa

SEQ ID NO: 114280 - DNA, 20 bp, synthetic construct
  source 1..20: mol_type = other DNA
ttttggccacgctgacctta

SEQ ID NO: 114281 - DNA, 20 bp, synthetic construct
  source 1..20: mol_type = other DNA
attttggccacgctgacctt

SEQ ID NO: 114282 - DNA, 20 bp, synthetic construct
  source 1..20: mol_type = other DNA
cattttggccacgctgacct

SEQ ID NO: 114283 - DNA, 20 bp, synthetic construct
  source 1..20: mol_type = other DNA
ccattttggccacgctgacc

SEQ ID NO: 114284 - DNA, 20 bp, synthetic construct
  source 1..20: mol_type = other DNA
accattttggccacgctgac

SEQ ID NO: 114285 - DNA, 20 bp, synthetic construct
  source 1..20: mol_type = other DNA
caccattttggccacgctga

SEQ ID NO: 114286 - DNA, 20 bp, synthetic construct
  source 1..20: mol_type = other DNA
tcaccattttggccacgctg

SEQ ID NO: 114287 - DNA, 20 bp, synthetic construct
  source 1..20: mol_type = other DNA
ttcaccattttggccacgct

SEQ ID NO: 114288 - DNA, 20 bp, synthetic construct
  source 1..20: mol_type = other DNA
tttcaccattttggccacgc

SEQ ID NO: 114289 - DNA, 20 bp, synthetic construct
  source 1..20: mol_type = other DNA
gtttcaccattttggccacg

SEQ ID NO: 114290 - DNA, 20 bp, synthetic construct
  source 1..20: mol_type = other DNA
ggtttcaccattttggccac

SEQ ID NO: 114291 - DNA, 20 bp, synthetic construct
  source 1..20: mol_type = other DNA
gggtttcaccattttggcca

SEQ ID NO: 114292 - DNA, 20 bp, synthetic construct
  source 1..20: mol_type = other DNA
ggggtttcaccattttggcc

SEQ ID NO: 114293 - DNA, 20 bp, synthetic construct
  source 1..20: mol_type = other DNA
tggggtttcaccattttggc

SEQ ID NO: 114294 - DNA, 20 bp, synthetic construct
  source 1..20: mol_type = other DNA
atggggtttcaccattttgg

SEQ ID NO: 114295 - DNA, 20 bp, synthetic construct
  source 1..20: mol_type = other DNA
gatggggtttcaccattttg

SEQ ID NO: 114296 - DNA, 20 bp, synthetic construct
  source 1..20: mol_type = other DNA
agatggggtttcaccatttt

SEQ ID NO: 114297 - DNA, 20 bp, synthetic construct
  source 1..20: mol_type = other DNA
aagatggggtttcaccattt

SEQ ID NO: 114298 - DNA, 20 bp, synthetic construct
  source 1..20: mol_type = other DNA
aaagatggggtttcaccatt

SEQ ID NO: 114299 - DNA, 20 bp, synthetic construct
  source 1..20: mol_type = other DNA
taaagatggggtttcaccat

SEQ ID NO: 114300 - DNA, 20 bp, synthetic construct
  source 1..20: mol_type = other DNA
gtaaagatggggtttcacca

SEQ ID NO: 114301 - DNA, 20 bp, synthetic construct
  source 1..20: mol_type = other DNA
agtaaagatggggtttcacc

SEQ ID NO: 114302 - DNA, 20 bp, synthetic construct
  source 1..20: mol_type = other DNA
tagtaaagatggggtttcac

SEQ ID NO: 114303 - DNA, 20 bp, synthetic construct
  source 1..20: mol_type = other DNA
ttagtaaagatggggtttca

SEQ ID NO: 114304 - DNA, 20 bp, synthetic construct
  source 1..20: mol_type = other DNA
tttagtaaagatggggtttc

SEQ ID NO: 114305 - DNA, 20 bp, synthetic construct
  source 1..20: mol_type = other DNA
ttttagtaaagatggggttt

SEQ ID NO: 114306 - DNA, 20 bp, synthetic construct
  source 1..20: mol_type = other DNA
tttttagtaaagatggggtt

SEQ ID NO: 114307 - DNA, 20 bp, synthetic construct
  source 1..20: mol_type = other DNA
atttttagtaaagatggggt

SEQ ID NO: 114308 - DNA, 20 bp, synthetic construct
  source 1..20: mol_type = other DNA
tatttttagtaaagatgggg

SEQ ID NO: 114309 - DNA, 20 bp, synthetic construct
  source 1..20: mol_type = other DNA
ttatttttagtaaagatggg

SEQ ID NO: 114310 - DNA, 20 bp, synthetic construct
  source 1..20: mol_type = other DNA
tttatttttagtaaagatgg

SEQ ID NO: 114311 - DNA, 20 bp, synthetic construct
  source 1..20: mol_type = other DNA
atttatttttagtaaagatg

SEQ ID NO: 114312 - DNA, 20 bp, synthetic construct
  source 1..20: mol_type = other DNA
tatttatttttagtaaagat

SEQ ID NO: 114313 - DNA, 20 bp, synthetic construct
  source 1..20: mol_type = other DNA
atatttatttttagtaaaga

SEQ ID NO: 114314 - DNA, 20 bp, synthetic construct
  source 1..20: mol_type = other DNA
aatatttatttttagtaaag

SEQ ID NO: 114315 - DNA, 20 bp, synthetic construct
  source 1..20: mol_type = other DNA
taatatttatttttagtaaa

SEQ ID NO: 114316 - DNA, 20 bp, synthetic construct
  source 1..20: mol_type = other DNA
ttaatatttatttttagtaa

SEQ ID NO: 114317 - DNA, 20 bp, synthetic construct
  source 1..20: mol_type = other DNA
tttaatatttatttttagta

SEQ ID NO: 114318 - DNA, 20 bp, synthetic construct
  source 1..20: mol_type = other DNA
ttttaatatttatttttagt

SEQ ID NO: 114319 - DNA, 20 bp, synthetic construct
  source 1..20: mol_type = other DNA
tttttaatatttatttttag

SEQ ID NO: 114320 - DNA, 20 bp, synthetic construct
  source 1..20: mol_type = other DNA
ttttttaatatttattttta

SEQ ID NO: 114321 - DNA, 20 bp, synthetic construct
  source 1..20: mol_type = other DNA
tttttttaatatttattttt

SEQ ID NO: 114322 - DNA, 20 bp, synthetic construct
  source 1..20: mol_type = other DNA
ttttttttaatatttatttt

SEQ ID NO: 114323 - DNA, 20 bp, synthetic construct
  source 1..20: mol_type = other DNA
attttttttaatatttattt

SEQ ID NO: 114324 - DNA, 20 bp, synthetic construct
  source 1..20: mol_type = other DNA
aattttttttaatatttatt

SEQ ID NO: 114325 - DNA, 20 bp, synthetic construct
  source 1..20: mol_type = other DNA
taattttttttaatatttat

SEQ ID NO: 114326 - DNA, 20 bp, synthetic construct
  source 1..20: mol_type = other DNA
ctaattttttttaatattta

SEQ ID NO: 114327 - DNA, 20 bp, synthetic construct
  source 1..20: mol_type = other DNA
gctaattttttttaatattt

SEQ ID NO: 114328 - DNA, 20 bp, synthetic construct
  source 1..20: mol_type = other DNA
agctaattttttttaatatt

SEQ ID NO: 114329 - DNA, 20 bp, synthetic construct
  source 1..20: mol_type = other DNA
cagctaattttttttaatat

SEQ ID NO: 114330 - DNA, 20 bp, synthetic construct
  source 1..20: mol_type = other DNA
ccagctaattttttttaata

SEQ ID NO: 114331 - DNA, 20 bp, synthetic construct
  source 1..20: mol_type = other DNA
cccagctaattttttttaat

SEQ ID NO: 114332 - DNA, 20 bp, synthetic construct
  source 1..20: mol_type = other DNA
gcccagctaattttttttaa

SEQ ID NO: 114333 - DNA, 20 bp, synthetic construct
  source 1..20: mol_type = other DNA
cgcccagctaatttttttta

SEQ ID NO: 114334 - DNA, 20 bp, synthetic construct
  source 1..20: mol_type = other DNA
acgcccagctaatttttttt

SEQ ID NO: 114335 - DNA, 20 bp, synthetic construct
  source 1..20: mol_type = other DNA
cacgcccagctaattttttt

SEQ ID NO: 114336 - DNA, 20 bp, synthetic construct
  source 1..20: mol_type = other DNA
ccacgcccagctaatttttt

SEQ ID NO: 114337 - DNA, 20 bp, synthetic construct
  source 1..20: mol_type = other DNA
accacgcccagctaattttt

SEQ ID NO: 114338 - DNA, 20 bp, synthetic construct
  source 1..20: mol_type = other DNA
caccacgcccagctaatttt

SEQ ID NO: 114339 - DNA, 20 bp, synthetic construct
  source 1..20: mol_type = other DNA
ccaccacgcccagctaattt

SEQ ID NO: 114340 - DNA, 20 bp, synthetic construct
  source 1..20: mol_type = other DNA
gccaccacgcccagctaatt

SEQ ID NO: 114341 - DNA, 20 bp, synthetic construct
  source 1..20: mol_type = other DNA
tgccaccacgcccagctaat

SEQ ID NO: 114342 - DNA, 20 bp, synthetic construct
  source 1..20: mol_type = other DNA
ctgccaccacgcccagctaa

SEQ ID NO: 114343 - DNA, 20 bp, synthetic construct
  source 1..20: mol_type = other DNA
actgccaccacgcccagcta

SEQ ID NO: 114344 - DNA, 20 bp, synthetic construct
  source 1..20: mol_type = other DNA
gactgccaccacgcccagct

SEQ ID NO: 114345 - DNA, 20 bp, synthetic construct
  source 1..20: mol_type = other DNA
agactgccaccacgcccagc

SEQ ID NO: 114346 - DNA, 20 bp, synthetic construct
  source 1..20: mol_type = other DNA
gagactgccaccacgcccag

SEQ ID NO: 114347 - DNA, 20 bp, synthetic construct
  source 1..20: mol_type = other DNA
ggagactgccaccacgccca

SEQ ID NO: 114348 - DNA, 20 bp, synthetic construct
  source 1..20: mol_type = other DNA
aggagactgccaccacgccc

SEQ ID NO: 114349 - DNA, 20 bp, synthetic construct
  source 1..20: mol_type = other DNA
caggagactgccaccacgcc

SEQ ID NO: 114350 - DNA, 20 bp, synthetic construct
  source 1..20: mol_type = other DNA
acaggagactgccaccacgc

SEQ ID NO: 114351 - DNA, 20 bp, synthetic construct
  source 1..20: mol_type = other DNA
tacaggagactgccaccacg

SEQ ID NO: 114352 - DNA, 20 bp, synthetic construct
  source 1..20: mol_type = other DNA
ttacaggagactgccaccac

SEQ ID NO: 114353 - DNA, 20 bp, synthetic construct
  source 1..20: mol_type = other DNA
attacaggagactgccacca

SEQ ID NO: 114354 - DNA, 20 bp, synthetic construct
  source 1..20: mol_type = other DNA
gattacaggagactgccacc

SEQ ID NO: 114355 - DNA, 20 bp, synthetic construct
  source 1..20: mol_type = other DNA
ggattacaggagactgccac

SEQ ID NO: 114356 - DNA, 20 bp, synthetic construct
  source 1..20: mol_type = other DNA
gggattacaggagactgcca

SEQ ID NO: 114357 - DNA, 20 bp, synthetic construct
  source 1..20: mol_type = other DNA
tgggattacaggagactgcc

SEQ ID NO: 114358 - DNA, 20 bp, synthetic construct
  source 1..20: mol_type = other DNA
ctgggattacaggagactgc

SEQ ID NO: 114359 - DNA, 20 bp, synthetic construct
  source 1..20: mol_type = other DNA
gctgggattacaggagactg

SEQ ID NO: 114360 - DNA, 20 bp, synthetic construct
  source 1..20: mol_type = other DNA
agctgggattacaggagact

SEQ ID NO: 114361 - DNA, 20 bp, synthetic construct
  source 1..20: mol_type = other DNA
tagctgggattacaggagac

SEQ ID NO: 114362 - DNA, 20 bp, synthetic construct
  source 1..20: mol_type = other DNA
ttagctgggattacaggaga

SEQ ID NO: 114363 - DNA, 20 bp, synthetic construct
  source 1..20: mol_type = other DNA
attagctgggattacaggag

SEQ ID NO: 114364 - DNA, 20 bp, synthetic construct
  source 1..20: mol_type = other DNA
gattagctgggattacagga

SEQ ID NO: 114365 - DNA, 20 bp, synthetic construct
  source 1..20: mol_type = other DNA
tgattagctgggattacagg

SEQ ID NO: 114366 - DNA, 20 bp, synthetic construct
  source 1..20: mol_type = other DNA
ctgattagctgggattacag

SEQ ID NO: 114367 - DNA, 20 bp, synthetic construct
  source 1..20: mol_type = other DNA
cctgattagctgggattaca

SEQ ID NO: 114368 - DNA, 20 bp, synthetic construct
  source 1..20: mol_type = other DNA
tcctgattagctgggattac

SEQ ID NO: 114369 - DNA, 20 bp, synthetic construct
  source 1..20: mol_type = other DNA
ctcctgattagctgggatta

SEQ ID NO: 114370 - DNA, 20 bp, synthetic construct
  source 1..20: mol_type = other DNA
cctcctgattagctgggatt

SEQ ID NO: 114371 - DNA, 20 bp, synthetic construct
  source 1..20: mol_type = other DNA
gcctcctgattagctgggat

SEQ ID NO: 114372 - DNA, 20 bp, synthetic construct
  source 1..20: mol_type = other DNA
agcctcctgattagctggga

SEQ ID NO: 114373 - DNA, 20 bp, synthetic construct
  source 1..20: mol_type = other DNA
tagcctcctgattagctggg

SEQ ID NO: 114374 - DNA, 20 bp, synthetic construct
  source 1..20: mol_type = other DNA
ttagcctcctgattagctgg

SEQ ID NO: 114375 - DNA, 20 bp, synthetic construct
  source 1..20: mol_type = other DNA
cttagcctcctgattagctg

SEQ ID NO: 114376 - DNA, 20 bp, synthetic construct
  source 1..20: mol_type = other DNA
ccttagcctcctgattagct

SEQ ID NO: 114377 - DNA, 20 bp, synthetic construct
  source 1..20: mol_type = other DNA
gccttagcctcctgattagc

SEQ ID NO: 114378 - DNA, 20 bp, synthetic construct
  source 1..20: mol_type = other DNA
tgccttagcctcctgattag

SEQ ID NO: 114379 - DNA, 20 bp, synthetic construct
  source 1..20: mol_type = other DNA
ttgccttagcctcctgatta

SEQ ID NO: 114380 - DNA, 20 bp, synthetic construct
  source 1..20: mol_type = other DNA
cttgccttagcctcctgatt

SEQ ID NO: 114381 - DNA, 20 bp, synthetic construct
  source 1..20: mol_type = other DNA
tcttgccttagcctcctgat

SEQ ID NO: 114382 - DNA, 20 bp, synthetic construct
  source 1..20: mol_type = other DNA
ctcttgccttagcctcctga

SEQ ID NO: 114383 - DNA, 20 bp, synthetic construct
  source 1..20: mol_type = other DNA
tctcttgccttagcctcctg

SEQ ID NO: 114384 - DNA, 20 bp, synthetic construct
  source 1..20: mol_type = other DNA
ttctcttgccttagcctcct

SEQ ID NO: 114385 - DNA, 20 bp, synthetic construct
  source 1..20: mol_type = other DNA
attctcttgccttagcctcc

SEQ ID NO: 114386 - DNA, 20 bp, synthetic construct
  source 1..20: mol_type = other DNA
cattctcttgccttagcctc

SEQ ID NO: 114387 - DNA, 20 bp, synthetic construct
  source 1..20: mol_type = other DNA
ccattctcttgccttagcct

SEQ ID NO: 114388 - DNA, 20 bp, synthetic construct
  source 1..20: mol_type = other DNA
gccattctcttgccttagcc

SEQ ID NO: 114389 - DNA, 20 bp, synthetic construct
  source 1..20: mol_type = other DNA
agccattctcttgccttagc

SEQ ID NO: 114390 - DNA, 20 bp, synthetic construct
  source 1..20: mol_type = other DNA
aagccattctcttgccttag

SEQ ID NO: 114391 - DNA, 20 bp, synthetic construct
  source 1..20: mol_type = other DNA
taagccattctcttgcctta

SEQ ID NO: 114392 - DNA, 20 bp, synthetic construct
  source 1..20: mol_type = other DNA
ttaagccattctcttgcctt

SEQ ID NO: 114393 - DNA, 20 bp, synthetic construct
  source 1..20: mol_type = other DNA
tttaagccattctcttgcct

SEQ ID NO: 114394 - DNA, 20 bp, synthetic construct
  source 1..20: mol_type = other DNA
gtttaagccattctcttgcc

SEQ ID NO: 114395 - DNA, 20 bp, synthetic construct
  source 1..20: mol_type = other DNA
agtttaagccattctcttgc

SEQ ID NO: 114396 - DNA, 20 bp, synthetic construct
  source 1..20: mol_type = other DNA
gagtttaagccattctcttg

SEQ ID NO: 114397 - DNA, 20 bp, synthetic construct
  source 1..20: mol_type = other DNA
cgagtttaagccattctctt

SEQ ID NO: 114398 - DNA, 20 bp, synthetic construct
  source 1..20: mol_type = other DNA
ccgagtttaagccattctct

SEQ ID NO: 114399 - DNA, 20 bp, synthetic construct
  source 1..20: mol_type = other DNA
cccgagtttaagccattctc

SEQ ID NO: 114400 - DNA, 20 bp, synthetic construct
  source 1..20: mol_type = other DNA
tcccgagtttaagccattct

SEQ ID NO: 114401 - DNA, 20 bp, synthetic construct
  source 1..20: mol_type = other DNA
ctcccgagtttaagccattc

SEQ ID NO: 114402 - DNA, 20 bp, synthetic construct
  source 1..20: mol_type = other DNA
cctcccgagtttaagccatt

SEQ ID NO: 114403 - DNA, 20 bp, synthetic construct
  source 1..20: mol_type = other DNA
gcctcccgagtttaagccat

SEQ ID NO: 114404 - DNA, 20 bp, synthetic construct
  source 1..20: mol_type = other DNA
tgcctcccgagtttaagcca

SEQ ID NO: 114405 - DNA, 20 bp, synthetic construct
  source 1..20: mol_type = other DNA
ctgcctcccgagtttaagcc

SEQ ID NO: 114406 - DNA, 20 bp, synthetic construct
  source 1..20: mol_type = other DNA
tctgcctcccgagtttaagc

SEQ ID NO: 114407 - DNA, 20 bp, synthetic construct
  source 1..20: mol_type = other DNA
ctctgcctcccgagtttaag

SEQ ID NO: 114408 - DNA, 20 bp, synthetic construct
  source 1..20: mol_type = other DNA
cctctgcctcccgagtttaa

SEQ ID NO: 114409 - DNA, 20 bp, synthetic construct
  source 1..20: mol_type = other DNA
acctctgcctcccgagttta

SEQ ID NO: 114410 - DNA, 20 bp, synthetic construct
  source 1..20: mol_type = other DNA
aacctctgcctcccgagttt

SEQ ID NO: 114411 - DNA, 20 bp, synthetic construct
  source 1..20: mol_type = other DNA
caacctctgcctcccgagtt

SEQ ID NO: 114412 - DNA, 20 bp, synthetic construct
  source 1..20: mol_type = other DNA
gcaacctctgcctcccgagt

SEQ ID NO: 114413 - DNA, 20 bp, synthetic construct
  source 1..20: mol_type = other DNA
tgcaacctctgcctcccgag

SEQ ID NO: 114414 - DNA, 20 bp, synthetic construct
  source 1..20: mol_type = other DNA
ctgcaacctctgcctcccga

SEQ ID NO: 114415 - DNA, 20 bp, synthetic construct
  source 1..20: mol_type = other DNA
actgcaacctctgcctcccg

SEQ ID NO: 114416 - DNA, 20 bp, synthetic construct
  source 1..20: mol_type = other DNA
cactgcaacctctgcctccc

SEQ ID NO: 114417 - DNA, 20 bp, synthetic construct
  source 1..20: mol_type = other DNA
tcactgcaacctctgcctcc

SEQ ID NO: 114418 - DNA, 20 bp, synthetic construct
  source 1..20: mol_type = other DNA
ctcactgcaacctctgcctc

SEQ ID NO: 114419 - DNA, 20 bp, synthetic construct
  source 1..20: mol_type = other DNA
gctcactgcaacctctgcct

SEQ ID NO: 114420 - DNA, 20 bp, synthetic construct
  source 1..20: mol_type = other DNA
ggctcactgcaacctctgcc

SEQ ID NO: 114421 - DNA, 20 bp, synthetic construct
  source 1..20: mol_type = other DNA
tggctcactgcaacctctgc

SEQ ID NO: 114422 - DNA, 20 bp, synthetic construct
  source 1..20: mol_type = other DNA
ttggctcactgcaacctctg

SEQ ID NO: 114423 - DNA, 20 bp, synthetic construct
  source 1..20: mol_type = other DNA
cttggctcactgcaacctct

SEQ ID NO: 114424 - DNA, 20 bp, synthetic construct
  source 1..20: mol_type = other DNA
tcttggctcactgcaacctc

SEQ ID NO: 114425 - DNA, 20 bp, synthetic construct
  source 1..20: mol_type = other DNA
atcttggctcactgcaacct

SEQ ID NO: 114426 - DNA, 20 bp, synthetic construct
  source 1..20: mol_type = other DNA
aatcttggctcactgcaacc

SEQ ID NO: 114427 - DNA, 20 bp, synthetic construct
  source 1..20: mol_type = other DNA
caatcttggctcactgcaac

SEQ ID NO: 114428 - DNA, 20 bp, synthetic construct
  source 1..20: mol_type = other DNA
gcaatcttggctcactgcaa

SEQ ID NO: 114429 - DNA, 20 bp, synthetic construct
  source 1..20: mol_type = other DNA
tgcaatcttggctcactgca

SEQ ID NO: 114430 - DNA, 20 bp, synthetic construct
  source 1..20: mol_type = other DNA
gtgcaatcttggctcactgc

SEQ ID NO: 114431 - DNA, 20 bp, synthetic construct
  source 1..20: mol_type = other DNA
agtgcaatcttggctcactg

SEQ ID NO: 114432 - DNA, 20 bp, synthetic construct
  source 1..20: mol_type = other DNA
cagtgcaatcttggctcact

SEQ ID NO: 114433 - DNA, 20 bp, synthetic construct
  source 1..20: mol_type = other DNA
gcagtgcaatcttggctcac

SEQ ID NO: 114434 - DNA, 20 bp, synthetic construct
  source 1..20: mol_type = other DNA
agcagtgcaatcttggctca

SEQ ID NO: 114435 - DNA, 20 bp, synthetic construct
  source 1..20: mol_type = other DNA
cagcagtgcaatcttggctc

SEQ ID NO: 114436 - DNA, 20 bp, synthetic construct
  source 1..20: mol_type = other DNA
gcagcagtgcaatcttggct

SEQ ID NO: 114437 - DNA, 20 bp, synthetic construct
  source 1..20: mol_type = other DNA
tgcagcagtgcaatcttggc

SEQ ID NO: 114438 - DNA, 20 bp, synthetic construct
  source 1..20: mol_type = other DNA
gtgcagcagtgcaatcttgg

SEQ ID NO: 114439 - DNA, 20 bp, synthetic construct
  source 1..20: mol_type = other DNA
agtgcagcagtgcaatcttg

SEQ ID NO: 114440 - DNA, 20 bp, synthetic construct
  source 1..20: mol_type = other DNA
gagtgcagcagtgcaatctt

SEQ ID NO: 114441 - DNA, 20 bp, synthetic construct
  source 1..20: mol_type = other DNA
ggagtgcagcagtgcaatct

SEQ ID NO: 114442 - DNA, 20 bp, synthetic construct
  source 1..20: mol_type = other DNA
tggagtgcagcagtgcaatc

SEQ ID NO: 114443 - DNA, 20 bp, synthetic construct
  source 1..20: mol_type = other DNA
ttggagtgcagcagtgcaat

SEQ ID NO: 114444 - DNA, 20 bp, synthetic construct
  source 1..20: mol_type = other DNA
gttggagtgcagcagtgcaa

SEQ ID NO: 114445 - DNA, 20 bp, synthetic construct
  source 1..20: mol_type = other DNA
ggttggagtgcagcagtgca

SEQ ID NO: 114446 - DNA, 20 bp, synthetic construct
  source 1..20: mol_type = other DNA
aggttggagtgcagcagtgc

SEQ ID NO: 114447 - DNA, 20 bp, synthetic construct
  source 1..20: mol_type = other DNA
caggttggagtgcagcagtg

SEQ ID NO: 114448 - DNA, 20 bp, synthetic construct
  source 1..20: mol_type = other DNA
tcaggttggagtgcagcagt

SEQ ID NO: 114449 - DNA, 20 bp, synthetic construct
  source 1..20: mol_type = other DNA
ctcaggttggagtgcagcag

SEQ ID NO: 114450 - DNA, 20 bp, synthetic construct
  source 1..20: mol_type = other DNA
gctcaggttggagtgcagca

SEQ ID NO: 114451 - DNA, 20 bp, synthetic construct
  source 1..20: mol_type = other DNA
tgctcaggttggagtgcagc

SEQ ID NO: 114452 - DNA, 20 bp, synthetic construct
  source 1..20: mol_type = other DNA
ttgctcaggttggagtgcag

SEQ ID NO: 114453 - DNA, 20 bp, synthetic construct
  source 1..20: mol_type = other DNA
gttgctcaggttggagtgca

SEQ ID NO: 114454 - DNA, 20 bp, synthetic construct
  source 1..20: mol_type = other DNA
tgttgctcaggttggagtgc

SEQ ID NO: 114455 - DNA, 20 bp, synthetic construct
  source 1..20: mol_type = other DNA
ctgttgctcaggttggagtg

SEQ ID NO: 114456 - DNA, 20 bp, synthetic construct
  source 1..20: mol_type = other DNA
tctgttgctcaggttggagt

SEQ ID NO: 114457 - DNA, 20 bp, synthetic construct
  source 1..20: mol_type = other DNA
ctctgttgctcaggttggag

SEQ ID NO: 114458 - DNA, 20 bp, synthetic construct
  source 1..20: mol_type = other DNA
actctgttgctcaggttgga

SEQ ID NO: 114459 - DNA, 20 bp, synthetic construct
  source 1..20: mol_type = other DNA
cactctgttgctcaggttgg

SEQ ID NO: 114460 - DNA, 20 bp, synthetic construct
  source 1..20: mol_type = other DNA
ccactctgttgctcaggttg

SEQ ID NO: 114461 - DNA, 20 bp, synthetic construct
  source 1..20: mol_type = other DNA
cccactctgttgctcaggtt

SEQ ID NO: 114462 - DNA, 20 bp, synthetic construct
  source 1..20: mol_type = other DNA
tcccactctgttgctcaggt

SEQ ID NO: 114463 - DNA, 20 bp, synthetic construct
  source 1..20: mol_type = other DNA
gtcccactctgttgctcagg

SEQ ID NO: 114464 - DNA, 20 bp, synthetic construct
  source 1..20: mol_type = other DNA
agtcccactctgttgctcag

SEQ ID NO: 114465 - DNA, 20 bp, synthetic construct
  source 1..20: mol_type = other DNA
gagtcccactctgttgctca

SEQ ID NO: 114466 - DNA, 20 bp, synthetic construct
  source 1..20: mol_type = other DNA
agagtcccactctgttgctc

SEQ ID NO: 114467 - DNA, 20 bp, synthetic construct
  source 1..20: mol_type = other DNA
cagagtcccactctgttgct

SEQ ID NO: 114468 - DNA, 20 bp, synthetic construct
  source 1..20: mol_type = other DNA
acagagtcccactctgttgc

SEQ ID NO: 114469 - DNA, 20 bp, synthetic construct
  source 1..20: mol_type = other DNA
cacagagtcccactctgttg

SEQ ID NO: 114470 - DNA, 20 bp, synthetic construct
  source 1..20: mol_type = other DNA
tcacagagtcccactctgtt

SEQ ID NO: 114471 - DNA, 20 bp, synthetic construct
  source 1..20: mol_type = other DNA
ttcacagagtcccactctgt

SEQ ID NO: 114472 - DNA, 20 bp, synthetic construct
  source 1..20: mol_type = other DNA
cttcacagagtcccactctg

SEQ ID NO: 114473 - DNA, 20 bp, synthetic construct
  source 1..20: mol_type = other DNA
ccttcacagagtcccactct

SEQ ID NO: 114474 - DNA, 20 bp, synthetic construct
  source 1..20: mol_type = other DNA
tccttcacagagtcccactc

SEQ ID NO: 114475 - DNA, 20 bp, synthetic construct
  source 1..20: mol_type = other DNA
ttccttcacagagtcccact

SEQ ID NO: 114476 - DNA, 20 bp, synthetic construct
  source 1..20: mol_type = other DNA
tttccttcacagagtcccac

SEQ ID NO: 114477 - DNA, 20 bp, synthetic construct
  source 1..20: mol_type = other DNA
ttttccttcacagagtccca

SEQ ID NO: 114478 - DNA, 20 bp, synthetic construct
  source 1..20: mol_type = other DNA
tttttccttcacagagtccc

SEQ ID NO: 114479 - DNA, 20 bp, synthetic construct
  source 1..20: mol_type = other DNA
ttttttccttcacagagtcc

SEQ ID NO: 114480 - DNA, 20 bp, synthetic construct
  source 1..20: mol_type = other DNA
tttttttccttcacagagtc

SEQ ID NO: 114481 - DNA, 20 bp, synthetic construct
  source 1..20: mol_type = other DNA
ttttttttccttcacagagt

SEQ ID NO: 114482 - DNA, 20 bp, synthetic construct
  source 1..20: mol_type = other DNA
tttttttttccttcacagag

SEQ ID NO: 114483 - DNA, 20 bp, synthetic construct
  source 1..20: mol_type = other DNA
ttttttttttccttcacaga

SEQ ID NO: 114484 - DNA, 20 bp, synthetic construct
  source 1..20: mol_type = other DNA
tttttttttttccttcacag

SEQ ID NO: 114485 - DNA, 20 bp, synthetic construct
  source 1..20: mol_type = other DNA
ctttttttttttccttcaca

SEQ ID NO: 114486 - DNA, 20 bp, synthetic construct
  source 1..20: mol_type = other DNA
actttttttttttccttcac

SEQ ID NO: 114487 - DNA, 20 bp, synthetic construct
  source 1..20: mol_type = other DNA
tactttttttttttccttca

SEQ ID NO: 114488 - DNA, 20 bp, synthetic construct
  source 1..20: mol_type = other DNA
atactttttttttttccttc

SEQ ID NO: 114489 - DNA, 20 bp, synthetic construct
  source 1..20: mol_type = other DNA
aatactttttttttttcctt

SEQ ID NO: 114490 - DNA, 20 bp, synthetic construct
  source 1..20: mol_type = other DNA
aaatactttttttttttcct

SEQ ID NO: 114491 - DNA, 20 bp, synthetic construct
  source 1..20: mol_type = other DNA
aaaatactttttttttttcc

SEQ ID NO: 114492 - DNA, 20 bp, synthetic construct
  source 1..20: mol_type = other DNA
aaaaatactttttttttttc

SEQ ID NO: 114493 - DNA, 20 bp, synthetic construct
  source 1..20: mol_type = other DNA
aaaaaatacttttttttttt

SEQ ID NO: 114494 - DNA, 20 bp, synthetic construct
  source 1..20: mol_type = other DNA
caaaaaatactttttttttt

SEQ ID NO: 114495 - DNA, 20 bp, synthetic construct
  source 1..20: mol_type = other DNA
tcaaaaaatacttttttttt

SEQ ID NO: 114496 - DNA, 20 bp, synthetic construct
  source 1..20: mol_type = other DNA
atcaaaaaatactttttttt

SEQ ID NO: 114497 - DNA, 20 bp, synthetic construct
  source 1..20: mol_type = other DNA
aatcaaaaaatacttttttt

SEQ ID NO: 114498 - DNA, 20 bp, synthetic construct
  source 1..20: mol_type = other DNA
caatcaaaaaatactttttt

SEQ ID NO: 114499 - DNA, 20 bp, synthetic construct
  source 1..20: mol_type = other DNA
gcaatcaaaaaatacttttt

SEQ ID NO: 114500 - DNA, 20 bp, synthetic construct
  source 1..20: mol_type = other DNA
ggcaatcaaaaaatactttt

SEQ ID NO: 114501 - DNA, 20 bp, synthetic construct
  source 1..20: mol_type = other DNA
aggcaatcaaaaaatacttt

SEQ ID NO: 114502 - DNA, 20 bp, synthetic construct
  source 1..20: mol_type = other DNA
aaggcaatcaaaaaatactt

SEQ ID NO: 114503 - DNA, 20 bp, synthetic construct
  source 1..20: mol_type = other DNA
aaaggcaatcaaaaaatact

SEQ ID NO: 114504 - DNA, 20 bp, synthetic construct
  source 1..20: mol_type = other DNA
caaaggcaatcaaaaaatac

SEQ ID NO: 114505 - DNA, 20 bp, synthetic construct
  source 1..20: mol_type = other DNA
tcaaaggcaatcaaaaaata

SEQ ID NO: 114506 - DNA, 20 bp, synthetic construct
  source 1..20: mol_type = other DNA
ctcaaaggcaatcaaaaaat

SEQ ID NO: 114507 - DNA, 20 bp, synthetic construct
  source 1..20: mol_type = other DNA
tctcaaaggcaatcaaaaaa

SEQ ID NO: 114508 - DNA, 20 bp, synthetic construct
  source 1..20: mol_type = other DNA
ctctcaaaggcaatcaaaaa

SEQ ID NO: 114509 - DNA, 20 bp, synthetic construct
  source 1..20: mol_type = other DNA
cctctcaaaggcaatcaaaa

SEQ ID NO: 114510 - DNA, 20 bp, synthetic construct
  source 1..20: mol_type = other DNA
tcctctcaaaggcaatcaaa

SEQ ID NO: 114511 - DNA, 20 bp, synthetic construct
  source 1..20: mol_type = other DNA
ttcctctcaaaggcaatcaa

SEQ ID NO: 114512 - DNA, 20 bp, synthetic construct
  source 1..20: mol_type = other DNA
gttcctctcaaaggcaatca

SEQ ID NO: 114513 - DNA, 20 bp, synthetic construct
  source 1..20: mol_type = other DNA
cgttcctctcaaaggcaatc

SEQ ID NO: 114514 - DNA, 20 bp, synthetic construct
  source 1..20: mol_type = other DNA
ccgttcctctcaaaggcaat

SEQ ID NO: 114515 - DNA, 20 bp, synthetic construct
  source 1..20: mol_type = other DNA
accgttcctctcaaaggcaa

SEQ ID NO: 114516 - DNA, 20 bp, synthetic construct
  source 1..20: mol_type = other DNA
aaccgttcctctcaaaggca

SEQ ID NO: 114517 - DNA, 20 bp, synthetic construct
  source 1..20: mol_type = other DNA
caaccgttcctctcaaaggc

SEQ ID NO: 114518 - DNA, 20 bp, synthetic construct
  source 1..20: mol_type = other DNA
acaaccgttcctctcaaagg

SEQ ID NO: 114519 - DNA, 20 bp, synthetic construct
  source 1..20: mol_type = other DNA
tacaaccgttcctctcaaag

SEQ ID NO: 114520 - DNA, 20 bp, synthetic construct
  source 1..20: mol_type = other DNA
atacaaccgttcctctcaaa

SEQ ID NO: 114521 - DNA, 20 bp, synthetic construct
  source 1..20: mol_type = other DNA
tatacaaccgttcctctcaa

SEQ ID NO: 114522 - DNA, 20 bp, synthetic construct
  source 1..20: mol_type = other DNA
atatacaaccgttcctctca

SEQ ID NO: 114523 - DNA, 20 bp, synthetic construct
  source 1..20: mol_type = other DNA
aatatacaaccgttcctctc

SEQ ID NO: 114524 - DNA, 20 bp, synthetic construct
  source 1..20: mol_type = other DNA
taatatacaaccgttcctct

SEQ ID NO: 114525 - DNA, 20 bp, synthetic construct
  source 1..20: mol_type = other DNA
gtaatatacaaccgttcctc

SEQ ID NO: 114526 - DNA, 20 bp, synthetic construct
  source 1..20: mol_type = other DNA
agtaatatacaaccgttcct

SEQ ID NO: 114527 - DNA, 20 bp, synthetic construct
  source 1..20: mol_type = other DNA
gagtaatatacaaccgttcc

SEQ ID NO: 114528 - DNA, 20 bp, synthetic construct
  source 1..20: mol_type = other DNA
tgagtaatatacaaccgttc

SEQ ID NO: 114529 - DNA, 20 bp, synthetic construct
  source 1..20: mol_type = other DNA
ctgagtaatatacaaccgtt

SEQ ID NO: 114530 - DNA, 20 bp, synthetic construct
  source 1..20: mol_type = other DNA
tctgagtaatatacaaccgt

SEQ ID NO: 114531 - DNA, 20 bp, synthetic construct
  source 1..20: mol_type = other DNA
atctgagtaatatacaaccg

SEQ ID NO: 114532 - DNA, 20 bp, synthetic construct
  source 1..20: mol_type = other DNA
aatctgagtaatatacaacc

SEQ ID NO: 114533 - DNA, 20 bp, synthetic construct
  source 1..20: mol_type = other DNA
aaatctgagtaatatacaac

SEQ ID NO: 114534 - DNA, 20 bp, synthetic construct
  source 1..20: mol_type = other DNA
aaaatctgagtaatatacaa

SEQ ID NO: 114535 - DNA, 20 bp, synthetic construct
  source 1..20: mol_type = other DNA
aaaaatctgagtaatataca

SEQ ID NO: 114536 - DNA, 20 bp, synthetic construct
  source 1..20: mol_type = other DNA
taaaaatctgagtaatatac

SEQ ID NO: 114537 - DNA, 20 bp, synthetic construct
  source 1..20: mol_type = other DNA
ttaaaaatctgagtaatata

SEQ ID NO: 114538 - DNA, 20 bp, synthetic construct
  source 1..20: mol_type = other DNA
tttaaaaatctgagtaatat

SEQ ID NO: 114539 - DNA, 20 bp, synthetic construct
  source 1..20: mol_type = other DNA
ttttaaaaatctgagtaata

SEQ ID NO: 114540 - DNA, 20 bp, synthetic construct
  source 1..20: mol_type = other DNA
tttttaaaaatctgagtaat

SEQ ID NO: 114541 - DNA, 20 bp, synthetic construct
  source 1..20: mol_type = other DNA
ttttttaaaaatctgagtaa

SEQ ID NO: 114542 - DNA, 20 bp, synthetic construct
  source 1..20: mol_type = other DNA
attttttaaaaatctgagta

SEQ ID NO: 114543 - DNA, 20 bp, synthetic construct
  source 1..20: mol_type = other DNA
aattttttaaaaatctgagt

SEQ ID NO: 114544 - DNA, 20 bp, synthetic construct
  source 1..20: mol_type = other DNA
caattttttaaaaatctgag

SEQ ID NO: 114545 - DNA, 20 bp, synthetic construct
  source 1..20: mol_type = other DNA
acaattttttaaaaatctga

SEQ ID NO: 114546 - DNA, 20 bp, synthetic construct
  source 1..20: mol_type = other DNA
aacaattttttaaaaatctg

SEQ ID NO: 114547 - DNA, 20 bp, synthetic construct
  source 1..20: mol_type = other DNA
gaacaattttttaaaaatct

SEQ ID NO: 114548 - DNA, 20 bp, synthetic construct
  source 1..20: mol_type = other DNA
agaacaattttttaaaaatc

SEQ ID NO: 114549 - DNA, 20 bp, synthetic construct
  source 1..20: mol_type = other DNA
aagaacaattttttaaaaat

SEQ ID NO: 114550 - DNA, 20 bp, synthetic construct
  source 1..20: mol_type = other DNA
aaagaacaattttttaaaaa

SEQ ID NO: 114551 - DNA, 20 bp, synthetic construct
  source 1..20: mol_type = other DNA
aaaagaacaattttttaaaa

SEQ ID NO: 114552 - DNA, 20 bp, synthetic construct
  source 1..20: mol_type = other DNA
taaaagaacaattttttaaa

SEQ ID NO: 114553 - DNA, 20 bp, synthetic construct
  source 1..20: mol_type = other DNA
ataaaagaacaattttttaa

SEQ ID NO: 114554 - DNA, 20 bp, synthetic construct
  source 1..20: mol_type = other DNA
cataaaagaacaatttttta

SEQ ID NO: 114555 - DNA, 20 bp, synthetic construct
  source 1..20: mol_type = other DNA
ccataaaagaacaatttttt

SEQ ID NO: 114556 - DNA, 20 bp, synthetic construct
  source 1..20: mol_type = other DNA
gccataaaagaacaattttt

SEQ ID NO: 114557 - DNA, 20 bp, synthetic construct
  source 1..20: mol_type = other DNA
agccataaaagaacaatttt

SEQ ID NO: 114558 - DNA, 20 bp, synthetic construct
  source 1..20: mol_type = other DNA
cagccataaaagaacaattt

SEQ ID NO: 114559 - DNA, 20 bp, synthetic construct
  source 1..20: mol_type = other DNA
acagccataaaagaacaatt

SEQ ID NO: 114560 - DNA, 20 bp, synthetic construct
  source 1..20: mol_type = other DNA
tacagccataaaagaacaat

SEQ ID NO: 114561 - DNA, 20 bp, synthetic construct
  source 1..20: mol_type = other DNA
atacagccataaaagaacaa

SEQ ID NO: 114562 - DNA, 20 bp, synthetic construct
  source 1..20: mol_type = other DNA
aatacagccataaaagaaca

SEQ ID NO: 114563 - DNA, 20 bp, synthetic construct
  source 1..20: mol_type = other DNA
gaatacagccataaaagaac

SEQ ID NO: 114564 - DNA, 20 bp, synthetic construct
  source 1..20: mol_type = other DNA
agaatacagccataaaagaa

SEQ ID NO: 114565 - DNA, 20 bp, synthetic construct
  source 1..20: mol_type = other DNA
aagaatacagccataaaaga

SEQ ID NO: 114566 - DNA, 20 bp, synthetic construct
  source 1..20: mol_type = other DNA
aaagaatacagccataaaag

SEQ ID NO: 114567 - DNA, 20 bp, synthetic construct
  source 1..20: mol_type = other DNA
taaagaatacagccataaaa

SEQ ID NO: 114568 - DNA, 20 bp, synthetic construct
  source 1..20: mol_type = other DNA
ttaaagaatacagccataaa

SEQ ID NO: 114569 - DNA, 20 bp, synthetic construct
  source 1..20: mol_type = other DNA
cttaaagaatacagccataa

SEQ ID NO: 114570 - DNA, 20 bp, synthetic construct
  source 1..20: mol_type = other DNA
ccttaaagaatacagccata

SEQ ID NO: 114571 - DNA, 20 bp, synthetic construct
  source 1..20: mol_type = other DNA
cccttaaagaatacagccat

SEQ ID NO: 114572 - DNA, 20 bp, synthetic construct
  source 1..20: mol_type = other DNA
tcccttaaagaatacagcca

SEQ ID NO: 114573 - DNA, 20 bp, synthetic construct
  source 1..20: mol_type = other DNA
atcccttaaagaatacagcc

SEQ ID NO: 114574 - DNA, 20 bp, synthetic construct
  source 1..20: mol_type = other DNA
aatcccttaaagaatacagc

SEQ ID NO: 114575 - DNA, 20 bp, synthetic construct
  source 1..20: mol_type = other DNA
taatcccttaaagaatacag

SEQ ID NO: 114576 - DNA, 20 bp, synthetic construct
  source 1..20: mol_type = other DNA
ttaatcccttaaagaataca

SEQ ID NO: 114577 - DNA, 20 bp, synthetic construct
  source 1..20: mol_type = other DNA
cttaatcccttaaagaatac

SEQ ID NO: 114578 - DNA, 20 bp, synthetic construct
  source 1..20: mol_type = other DNA
ccttaatcccttaaagaata

SEQ ID NO: 114579 - DNA, 20 bp, synthetic construct
  source 1..20: mol_type = other DNA
tccttaatcccttaaagaat

SEQ ID NO: 114580 - DNA, 20 bp, synthetic construct
  source 1..20: mol_type = other DNA
ttccttaatcccttaaagaa

SEQ ID NO: 114581 - DNA, 20 bp, synthetic construct
  source 1..20: mol_type = other DNA
attccttaatcccttaaaga

SEQ ID NO: 114582 - DNA, 20 bp, synthetic construct
  source 1..20: mol_type = other DNA
cattccttaatcccttaaag

SEQ ID NO: 114583 - DNA, 20 bp, synthetic construct
  source 1..20: mol_type = other DNA
ccattccttaatcccttaaa

SEQ ID NO: 114584 - DNA, 20 bp, synthetic construct
  source 1..20: mol_type = other DNA
cccattccttaatcccttaa

SEQ ID NO: 114585 - DNA, 20 bp, synthetic construct
  source 1..20: mol_type = other DNA
gcccattccttaatccctta

SEQ ID NO: 114586 - DNA, 20 bp, synthetic construct
  source 1..20: mol_type = other DNA
tgcccattccttaatccctt

SEQ ID NO: 114587 - DNA, 20 bp, synthetic construct
  source 1..20: mol_type = other DNA
ttgcccattccttaatccct

SEQ ID NO: 114588 - DNA, 20 bp, synthetic construct
  source 1..20: mol_type = other DNA
attgcccattccttaatccc

SEQ ID NO: 114589 - DNA, 20 bp, synthetic construct
  source 1..20: mol_type = other DNA
tattgcccattccttaatcc

SEQ ID NO: 114590 - DNA, 20 bp, synthetic construct
  source 1..20: mol_type = other DNA
atattgcccattccttaatc

SEQ ID NO: 114591 - DNA, 20 bp, synthetic construct
  source 1..20: mol_type = other DNA
tatattgcccattccttaat

SEQ ID NO: 114592 - DNA, 20 bp, synthetic construct
  source 1..20: mol_type = other DNA
ttatattgcccattccttaa

SEQ ID NO: 114593 - DNA, 20 bp, synthetic construct
  source 1..20: mol_type = other DNA
cttatattgcccattcctta

SEQ ID NO: 114594 - DNA, 20 bp, synthetic construct
  source 1..20: mol_type = other DNA
acttatattgcccattcctt

SEQ ID NO: 114595 - DNA, 20 bp, synthetic construct
  source 1..20: mol_type = other DNA
cacttatattgcccattcct

SEQ ID NO: 114596 - DNA, 20 bp, synthetic construct
  source 1..20: mol_type = other DNA
acacttatattgcccattcc

SEQ ID NO: 114597 - DNA, 20 bp, synthetic construct
  source 1..20: mol_type = other DNA
tacacttatattgcccattc

SEQ ID NO: 114598 - DNA, 20 bp, synthetic construct
  source 1..20: mol_type = other DNA
atacacttatattgcccatt

SEQ ID NO: 114599 - DNA, 20 bp, synthetic construct
  source 1..20: mol_type = other DNA
tatacacttatattgcccat

SEQ ID NO: 114600 - DNA, 20 bp, synthetic construct
  source 1..20: mol_type = other DNA
atatacacttatattgccca

SEQ ID NO: 114601 - DNA, 20 bp, synthetic construct
  source 1..20: mol_type = other DNA
catatacacttatattgccc

SEQ ID NO: 114602 - DNA, 20 bp, synthetic construct
  source 1..20: mol_type = other DNA
acatatacacttatattgcc

SEQ ID NO: 114603 - DNA, 20 bp, synthetic construct
  source 1..20: mol_type = other DNA
aacatatacacttatattgc

SEQ ID NO: 114604 - DNA, 20 bp, synthetic construct
  source 1..20: mol_type = other DNA
aaacatatacacttatattg

SEQ ID NO: 114605 - DNA, 20 bp, synthetic construct
  source 1..20: mol_type = other DNA
gaaacatatacacttatatt

SEQ ID NO: 114606 - DNA, 20 bp, synthetic construct
  source 1..20: mol_type = other DNA
tgaaacatatacacttatat

SEQ ID NO: 114607 - DNA, 20 bp, synthetic construct
  source 1..20: mol_type = other DNA
ttgaaacatatacacttata

SEQ ID NO: 114608 - DNA, 20 bp, synthetic construct
  source 1..20: mol_type = other DNA
attgaaacatatacacttat

SEQ ID NO: 114609 - DNA, 20 bp, synthetic construct
  source 1..20: mol_type = other DNA
tattgaaacatatacactta

SEQ ID NO: 114610 - DNA, 20 bp, synthetic construct
  source 1..20: mol_type = other DNA
ttattgaaacatatacactt

SEQ ID NO: 114611 - DNA, 20 bp, synthetic construct
  source 1..20: mol_type = other DNA
tttattgaaacatatacact

SEQ ID NO: 114612 - DNA, 20 bp, synthetic construct
  source 1..20: mol_type = other DNA
ttttattgaaacatatacac

SEQ ID NO: 114613 - DNA, 20 bp, synthetic construct
  source 1..20: mol_type = other DNA
tttttattgaaacatataca

SEQ ID NO: 114614 - DNA, 20 bp, synthetic construct
  source 1..20: mol_type = other DNA
gtttttattgaaacatatac

SEQ ID NO: 114615 - DNA, 20 bp, synthetic construct
  source 1..20: mol_type = other DNA
cgtttttattgaaacatata

SEQ ID NO: 114616 - DNA, 20 bp, synthetic construct
  source 1..20: mol_type = other DNA
tcgtttttattgaaacatat

SEQ ID NO: 114617 - DNA, 20 bp, synthetic construct
  source 1..20: mol_type = other DNA
atcgtttttattgaaacata

SEQ ID NO: 114618 - DNA, 20 bp, synthetic construct
  source 1..20: mol_type = other DNA
aatcgtttttattgaaacat

SEQ ID NO: 114619 - DNA, 20 bp, synthetic construct
  source 1..20: mol_type = other DNA
taatcgtttttattgaaaca

SEQ ID NO: 114620 - DNA, 20 bp, synthetic construct
  source 1..20: mol_type = other DNA
ctaatcgtttttattgaaac

SEQ ID NO: 114621 - DNA, 20 bp, synthetic construct
  source 1..20: mol_type = other DNA
actaatcgtttttattgaaa

SEQ ID NO: 114622 - DNA, 20 bp, synthetic construct
  source 1..20: mol_type = other DNA
cactaatcgtttttattgaa

SEQ ID NO: 114623 - DNA, 20 bp, synthetic construct
  source 1..20: mol_type = other DNA
tcactaatcgtttttattga

SEQ ID NO: 114624 - DNA, 20 bp, synthetic construct
  source 1..20: mol_type = other DNA
atcactaatcgtttttattg

SEQ ID NO: 114625 - DNA, 20 bp, synthetic construct
  source 1..20: mol_type = other DNA
gatcactaatcgtttttatt

SEQ ID NO: 114626 - DNA, 20 bp, synthetic construct
  source 1..20: mol_type = other DNA
agatcactaatcgtttttat

SEQ ID NO: 114627 - DNA, 20 bp, synthetic construct
  source 1..20: mol_type = other DNA
aagatcactaatcgttttta

SEQ ID NO: 114628 - DNA, 20 bp, synthetic construct
  source 1..20: mol_type = other DNA
gaagatcactaatcgttttt

SEQ ID NO: 114629 - DNA, 20 bp, synthetic construct
  source 1..20: mol_type = other DNA
agaagatcactaatcgtttt

SEQ ID NO: 114630 - DNA, 20 bp, synthetic construct
  source 1..20: mol_type = other DNA
tagaagatcactaatcgttt

SEQ ID NO: 114631 - DNA, 20 bp, synthetic construct
  source 1..20: mol_type = other DNA
ctagaagatcactaatcgtt

SEQ ID NO: 114632 - DNA, 20 bp, synthetic construct
  source 1..20: mol_type = other DNA
actagaagatcactaatcgt

SEQ ID NO: 114633 - DNA, 20 bp, synthetic construct
  source 1..20: mol_type = other DNA
cactagaagatcactaatcg

SEQ ID NO: 114634 - DNA, 20 bp, synthetic construct
  source 1..20: mol_type = other DNA
tcactagaagatcactaatc

SEQ ID NO: 114635 - DNA, 20 bp, synthetic construct
  source 1..20: mol_type = other DNA
ctcactagaagatcactaat

SEQ ID NO: 114636 - DNA, 20 bp, synthetic construct
  source 1..20: mol_type = other DNA
tctcactagaagatcactaa

SEQ ID NO: 114637 - DNA, 20 bp, synthetic construct
  source 1..20: mol_type = other DNA
ttctcactagaagatcacta

SEQ ID NO: 114638 - DNA, 20 bp, synthetic construct
  source 1..20: mol_type = other DNA
gttctcactagaagatcact

SEQ ID NO: 114639 - DNA, 20 bp, synthetic construct
  source 1..20: mol_type = other DNA
tgttctcactagaagatcac

SEQ ID NO: 114640 - DNA, 20 bp, synthetic construct
  source 1..20: mol_type = other DNA
ctgttctcactagaagatca

SEQ ID NO: 114641 - DNA, 20 bp, synthetic construct
  source 1..20: mol_type = other DNA
actgttctcactagaagatc

SEQ ID NO: 114642 - DNA, 20 bp, synthetic construct
  source 1..20: mol_type = other DNA
aactgttctcactagaagat

SEQ ID NO: 114643 - DNA, 20 bp, synthetic construct
  source 1..20: mol_type = other DNA
aaactgttctcactagaaga

SEQ ID NO: 114644 - DNA, 20 bp, synthetic construct
  source 1..20: mol_type = other DNA
taaactgttctcactagaag

SEQ ID NO: 114645 - DNA, 20 bp, synthetic construct
  source 1..20: mol_type = other DNA
ttaaactgttctcactagaa

SEQ ID NO: 114646 - DNA, 20 bp, synthetic construct
  source 1..20: mol_type = other DNA
tttaaactgttctcactaga

SEQ ID NO: 114647 - DNA, 20 bp, synthetic construct
  source 1..20: mol_type = other DNA
atttaaactgttctcactag

SEQ ID NO: 114648 - DNA, 20 bp, synthetic construct
  source 1..20: mol_type = other DNA
gatttaaactgttctcacta

SEQ ID NO: 114649 - DNA, 20 bp, synthetic construct
  source 1..20: mol_type = other DNA
agatttaaactgttctcact

SEQ ID NO: 114650 - DNA, 20 bp, synthetic construct
  source 1..20: mol_type = other DNA
tagatttaaactgttctcac

SEQ ID NO: 114651 - DNA, 20 bp, synthetic construct
  source 1..20: mol_type = other DNA
atagatttaaactgttctca

SEQ ID NO: 114652 - DNA, 20 bp, synthetic construct
  source 1..20: mol_type = other DNA
tatagatttaaactgttctc

SEQ ID NO: 114653 - DNA, 20 bp, synthetic construct
  source 1..20: mol_type = other DNA
atatagatttaaactgttct

SEQ ID NO: 114654 - DNA, 20 bp, synthetic construct
  source 1..20: mol_type = other DNA
aatatagatttaaactgttc

SEQ ID NO: 114655 - DNA, 20 bp, synthetic construct
  source 1..20: mol_type = other DNA
aaatatagatttaaactgtt

SEQ ID NO: 114656 - DNA, 20 bp, synthetic construct
  source 1..20: mol_type = other DNA
taaatatagatttaaactgt

SEQ ID NO: 114657 - DNA, 20 bp, synthetic construct
  source 1..20: mol_type = other DNA
ctaaatatagatttaaactg

SEQ ID NO: 114658 - DNA, 20 bp, synthetic construct
  source 1..20: mol_type = other DNA
gctaaatatagatttaaact

SEQ ID NO: 114659 - DNA, 20 bp, synthetic construct
  source 1..20: mol_type = other DNA
tgctaaatatagatttaaac

SEQ ID NO: 114660 - DNA, 20 bp, synthetic construct
  source 1..20: mol_type = other DNA
ttgctaaatatagatttaaa

SEQ ID NO: 114661 - DNA, 20 bp, synthetic construct
  source 1..20: mol_type = other DNA
attgctaaatatagatttaa

SEQ ID NO: 114662 - DNA, 20 bp, synthetic construct
  source 1..20: mol_type = other DNA
aattgctaaatatagattta

SEQ ID NO: 114663 - DNA, 20 bp, synthetic construct
  source 1..20: mol_type = other DNA
aaattgctaaatatagattt

SEQ ID NO: 114664 - DNA, 20 bp, synthetic construct
  source 1..20: mol_type = other DNA
aaaattgctaaatatagatt

SEQ ID NO: 114665 - DNA, 20 bp, synthetic construct
  source 1..20: mol_type = other DNA
aaaaattgctaaatatagat

SEQ ID NO: 114666 - DNA, 20 bp, synthetic construct
  source 1..20: mol_type = other DNA
aaaaaattgctaaatataga

SEQ ID NO: 114667 - DNA, 20 bp, synthetic construct
  source 1..20: mol_type = other DNA
aaaaaaattgctaaatatag

SEQ ID NO: 114668 - DNA, 20 bp, synthetic construct
  source 1..20: mol_type = other DNA
aaaaaaaattgctaaatata

SEQ ID NO: 114669 - DNA, 20 bp, synthetic construct
  source 1..20: mol_type = other DNA
taaaaaaaattgctaaatat

SEQ ID NO: 114670 - DNA, 20 bp, synthetic construct
  source 1..20: mol_type = other DNA
ttaaaaaaaattgctaaata

SEQ ID NO: 114671 - DNA, 20 bp, synthetic construct
  source 1..20: mol_type = other DNA
tttaaaaaaaattgctaaat

SEQ ID NO: 114672 - DNA, 20 bp, synthetic construct
  source 1..20: mol_type = other DNA
atttaaaaaaaattgctaaa

SEQ ID NO: 114673 - DNA, 20 bp, synthetic construct
  source 1..20: mol_type = other DNA
aatttaaaaaaaattgctaa

SEQ ID NO: 114674 - DNA, 20 bp, synthetic construct
  source 1..20: mol_type = other DNA
caatttaaaaaaaattgcta

SEQ ID NO: 114675 - DNA, 20 bp, synthetic construct
  source 1..20: mol_type = other DNA
acaatttaaaaaaaattgct

SEQ ID NO: 114676 - DNA, 20 bp, synthetic construct
  source 1..20: mol_type = other DNA
gacaatttaaaaaaaattgc

SEQ ID NO: 114677 - DNA, 20 bp, synthetic construct
  source 1..20: mol_type = other DNA
tgacaatttaaaaaaaattg

SEQ ID NO: 114678 - DNA, 20 bp, synthetic construct
  source 1..20: mol_type = other DNA
ctgacaatttaaaaaaaatt

SEQ ID NO: 114679 - DNA, 20 bp, synthetic construct
  source 1..20: mol_type = other DNA
cctgacaatttaaaaaaaat

SEQ ID NO: 114680 - DNA, 20 bp, synthetic construct
  source 1..20: mol_type = other DNA
acctgacaatttaaaaaaaa

SEQ ID NO: 114681 - DNA, 20 bp, synthetic construct
  source 1..20: mol_type = other DNA
tacctgacaatttaaaaaaa

SEQ ID NO: 114682 - DNA, 20 bp, synthetic construct
  source 1..20: mol_type = other DNA
atacctgacaatttaaaaaa

SEQ ID NO: 114683 - DNA, 20 bp, synthetic construct
  source 1..20: mol_type = other DNA
catacctgacaatttaaaaa

SEQ ID NO: 114684 - DNA, 20 bp, synthetic construct
  source 1..20: mol_type = other DNA
ccatacctgacaatttaaaa

SEQ ID NO: 114685 - DNA, 20 bp, synthetic construct
  source 1..20: mol_type = other DNA
tccatacctgacaatttaaa

SEQ ID NO: 114686 - DNA, 20 bp, synthetic construct
  source 1..20: mol_type = other DNA
ttccatacctgacaatttaa

SEQ ID NO: 114687 - DNA, 20 bp, synthetic construct
  source 1..20: mol_type = other DNA
cttccatacctgacaattta

SEQ ID NO: 114688 - DNA, 20 bp, synthetic construct
  source 1..20: mol_type = other DNA
tcttccatacctgacaattt

SEQ ID NO: 114689 - DNA, 20 bp, synthetic construct
  source 1..20: mol_type = other DNA
atcttccatacctgacaatt

SEQ ID NO: 114690 - DNA, 20 bp, synthetic construct
  source 1..20: mol_type = other DNA
aatcttccatacctgacaat

SEQ ID NO: 114691 - DNA, 20 bp, synthetic construct
  source 1..20: mol_type = other DNA
aaatcttccatacctgacaa

SEQ ID NO: 114692 - DNA, 20 bp, synthetic construct
  source 1..20: mol_type = other DNA
aaaatcttccatacctgaca

SEQ ID NO: 114693 - DNA, 20 bp, synthetic construct
  source 1..20: mol_type = other DNA
taaaatcttccatacctgac

SEQ ID NO: 114694 - DNA, 20 bp, synthetic construct
  source 1..20: mol_type = other DNA
ctaaaatcttccatacctga

SEQ ID NO: 114695 - DNA, 20 bp, synthetic construct
  source 1..20: mol_type = other DNA
tctaaaatcttccatacctg

SEQ ID NO: 114696 - DNA, 20 bp, synthetic construct
  source 1..20: mol_type = other DNA
ctctaaaatcttccatacct

SEQ ID NO: 114697 - DNA, 20 bp, synthetic construct
  source 1..20: mol_type = other DNA
gctctaaaatcttccatacc

SEQ ID NO: 114698 - DNA, 20 bp, synthetic construct
  source 1..20: mol_type = other DNA
tgctctaaaatcttccatac

SEQ ID NO: 114699 - DNA, 20 bp, synthetic construct
  source 1..20: mol_type = other DNA
ttgctctaaaatcttccata

SEQ ID NO: 114700 - DNA, 20 bp, synthetic construct
  source 1..20: mol_type = other DNA
gttgctctaaaatcttccat

SEQ ID NO: 114701 - DNA, 20 bp, synthetic construct
  source 1..20: mol_type = other DNA
cgttgctctaaaatcttcca

SEQ ID NO: 114702 - DNA, 20 bp, synthetic construct
  source 1..20: mol_type = other DNA
acgttgctctaaaatcttcc

SEQ ID NO: 114703 - DNA, 20 bp, synthetic construct
  source 1..20: mol_type = other DNA
tacgttgctctaaaatcttc

SEQ ID NO: 114704 - DNA, 20 bp, synthetic construct
  source 1..20: mol_type = other DNA
ttacgttgctctaaaatctt

SEQ ID NO: 114705 - DNA, 20 bp, synthetic construct
  source 1..20: mol_type = other DNA
tttacgttgctctaaaatct

SEQ ID NO: 114706 - DNA, 20 bp, synthetic construct
  source 1..20: mol_type = other DNA
ctttacgttgctctaaaatc

SEQ ID NO: 114707 - DNA, 20 bp, synthetic construct
  source 1..20: mol_type = other DNA
actttacgttgctctaaaat

SEQ ID NO: 114708 - DNA, 20 bp, synthetic construct
  source 1..20: mol_type = other DNA
gactttacgttgctctaaaa

SEQ ID NO: 114709 - DNA, 20 bp, synthetic construct
  source 1..20: mol_type = other DNA
ggactttacgttgctctaaa

SEQ ID NO: 114710 - DNA, 20 bp, synthetic construct
  source 1..20: mol_type = other DNA
tggactttacgttgctctaa

SEQ ID NO: 114711 - DNA, 20 bp, synthetic construct
  source 1..20: mol_type = other DNA
atggactttacgttgctcta

SEQ ID NO: 114712 - DNA, 20 bp, synthetic construct
  source 1..20: mol_type = other DNA
catggactttacgttgctct

SEQ ID NO: 114713 - DNA, 20 bp, synthetic construct
  source 1..20: mol_type = other DNA
acatggactttacgttgctc

SEQ ID NO: 114714 - DNA, 20 bp, synthetic construct
  source 1..20: mol_type = other DNA
tacatggactttacgttgct

SEQ ID NO: 114715 - DNA, 20 bp, synthetic construct
  source 1..20: mol_type = other DNA
ctacatggactttacgttgc

SEQ ID NO: 114716 - DNA, 20 bp, synthetic construct
  source 1..20: mol_type = other DNA
tctacatggactttacgttg

SEQ ID NO: 114717 - DNA, 20 bp, synthetic construct
  source 1..20: mol_type = other DNA
atctacatggactttacgtt

SEQ ID NO: 114718 - DNA, 20 bp, synthetic construct
  source 1..20: mol_type = other DNA
aatctacatggactttacgt

SEQ ID NO: 114719 - DNA, 20 bp, synthetic construct
  source 1..20: mol_type = other DNA
aaatctacatggactttacg

SEQ ID NO: 114720 - DNA, 20 bp, synthetic construct
  source 1..20: mol_type = other DNA
gaaatctacatggactttac

SEQ ID NO: 114721 - DNA, 20 bp, synthetic construct
  source 1..20: mol_type = other DNA
tgaaatctacatggacttta

SEQ ID NO: 114722 - DNA, 20 bp, synthetic construct
  source 1..20: mol_type = other DNA
gtgaaatctacatggacttt

SEQ ID NO: 114723 - DNA, 20 bp, synthetic construct
  source 1..20: mol_type = other DNA
agtgaaatctacatggactt

SEQ ID NO: 114724 - DNA, 20 bp, synthetic construct
  source 1..20: mol_type = other DNA
cagtgaaatctacatggact

SEQ ID NO: 114725 - DNA, 20 bp, synthetic construct
  source 1..20: mol_type = other DNA
ccagtgaaatctacatggac

SEQ ID NO: 114726 - DNA, 20 bp, synthetic construct
  source 1..20: mol_type = other DNA
gccagtgaaatctacatgga

SEQ ID NO: 114727 - DNA, 20 bp, synthetic construct
  source 1..20: mol_type = other DNA
ggccagtgaaatctacatgg

SEQ ID NO: 114728 - DNA, 20 bp, synthetic construct
  source 1..20: mol_type = other DNA
aggccagtgaaatctacatg

SEQ ID NO: 114729 - DNA, 20 bp, synthetic construct
  source 1..20: mol_type = other DNA
aaggccagtgaaatctacat

SEQ ID NO: 114730 - DNA, 20 bp, synthetic construct
  source 1..20: mol_type = other DNA
aaaggccagtgaaatctaca

SEQ ID NO: 114731 - DNA, 20 bp, synthetic construct
  source 1..20: mol_type = other DNA
taaaggccagtgaaatctac

SEQ ID NO: 114732 - DNA, 20 bp, synthetic construct
  source 1..20: mol_type = other DNA
ataaaggccagtgaaatcta

SEQ ID NO: 114733 - DNA, 20 bp, synthetic construct
  source 1..20: mol_type = other DNA
tataaaggccagtgaaatct

SEQ ID NO: 114734 - DNA, 20 bp, synthetic construct
  source 1..20: mol_type = other DNA
atataaaggccagtgaaatc

SEQ ID NO: 114735 - DNA, 20 bp, synthetic construct
  source 1..20: mol_type = other DNA
aatataaaggccagtgaaat

SEQ ID NO: 114736 - DNA, 20 bp, synthetic construct
  source 1..20: mol_type = other DNA
aaatataaaggccagtgaaa

SEQ ID NO: 114737 - DNA, 20 bp, synthetic construct
  source 1..20: mol_type = other DNA
aaaatataaaggccagtgaa

SEQ ID NO: 114738 - DNA, 20 bp, synthetic construct
  source 1..20: mol_type = other DNA
aaaaatataaaggccagtga

SEQ ID NO: 114739 - DNA, 20 bp, synthetic construct
  source 1..20: mol_type = other DNA
aaaaaatataaaggccagtg

SEQ ID NO: 114740 - DNA, 20 bp, synthetic construct
  source 1..20: mol_type = other DNA
aaaaaaatataaaggccagt

SEQ ID NO: 114741 - DNA, 20 bp, synthetic construct
  source 1..20: mol_type = other DNA
aaaaaaaatataaaggccag

SEQ ID NO: 114742 - DNA, 20 bp, synthetic construct
  source 1..20: mol_type = other DNA
taaaaaaaatataaaggcca

SEQ ID NO: 114743 - DNA, 20 bp, synthetic construct
  source 1..20: mol_type = other DNA
ctaaaaaaaatataaaggcc

SEQ ID NO: 114744 - DNA, 20 bp, synthetic construct
  source 1..20: mol_type = other DNA
cctaaaaaaaatataaaggc

SEQ ID NO: 114745 - DNA, 20 bp, synthetic construct
  source 1..20: mol_type = other DNA
gcctaaaaaaaatataaagg

SEQ ID NO: 114746 - DNA, 20 bp, synthetic construct
  source 1..20: mol_type = other DNA
tgcctaaaaaaaatataaag

SEQ ID NO: 114747 - DNA, 20 bp, synthetic construct
  source 1..20: mol_type = other DNA
ttgcctaaaaaaaatataaa

SEQ ID NO: 114748 - DNA, 20 bp, synthetic construct
  source 1..20: mol_type = other DNA
cttgcctaaaaaaaatataa

SEQ ID NO: 114749 - DNA, 20 bp, synthetic construct
  source 1..20: mol_type = other DNA
acttgcctaaaaaaaatata

SEQ ID NO: 114750 - DNA, 20 bp, synthetic construct
  source 1..20: mol_type = other DNA
aacttgcctaaaaaaaatat

SEQ ID NO: 114751 - DNA, 20 bp, synthetic construct
  source 1..20: mol_type = other DNA
taacttgcctaaaaaaaata

SEQ ID NO: 114752 - DNA, 20 bp, synthetic construct
  source 1..20: mol_type = other DNA
ctaacttgcctaaaaaaaat

SEQ ID NO: 114753 - DNA, 20 bp, synthetic construct
  source 1..20: mol_type = other DNA
cctaacttgcctaaaaaaaa

SEQ ID NO: 114754 - DNA, 20 bp, synthetic construct
  source 1..20: mol_type = other DNA
tcctaacttgcctaaaaaaa

SEQ ID NO: 114755 - DNA, 20 bp, synthetic construct
  source 1..20: mol_type = other DNA
ttcctaacttgcctaaaaaa

SEQ ID NO: 114756 - DNA, 20 bp, synthetic construct
  source 1..20: mol_type = other DNA
tttcctaacttgcctaaaaa

SEQ ID NO: 114757 - DNA, 20 bp, synthetic construct
  source 1..20: mol_type = other DNA
atttcctaacttgcctaaaa

SEQ ID NO: 114758 - DNA, 20 bp, synthetic construct
  source 1..20: mol_type = other DNA
gatttcctaacttgcctaaa

SEQ ID NO: 114759 - DNA, 20 bp, synthetic construct
  source 1..20: mol_type = other DNA
tgatttcctaacttgcctaa

SEQ ID NO: 114760 - DNA, 20 bp, synthetic construct
  source 1..20: mol_type = other DNA
ttgatttcctaacttgccta

SEQ ID NO: 114761 - DNA, 20 bp, synthetic construct
  source 1..20: mol_type = other DNA
gttgatttcctaacttgcct

SEQ ID NO: 114762 - DNA, 20 bp, synthetic construct
  source 1..20: mol_type = other DNA
tgttgatttcctaacttgcc

SEQ ID NO: 114763 - DNA, 20 bp, synthetic construct
  source 1..20: mol_type = other DNA
atgttgatttcctaacttgc

SEQ ID NO: 114764 - DNA, 20 bp, synthetic construct
  source 1..20: mol_type = other DNA
aatgttgatttcctaacttg

SEQ ID NO: 114765 - DNA, 20 bp, synthetic construct
  source 1..20: mol_type = other DNA
caatgttgatttcctaactt

SEQ ID NO: 114766 - DNA, 20 bp, synthetic construct
  source 1..20: mol_type = other DNA
tcaatgttgatttcctaact

SEQ ID NO: 114767 - DNA, 20 bp, synthetic construct
  source 1..20: mol_type = other DNA
ttcaatgttgatttcctaac

SEQ ID NO: 114768 - DNA, 20 bp, synthetic construct
  source 1..20: mol_type = other DNA
attcaatgttgatttcctaa

SEQ ID NO: 114769 - DNA, 20 bp, synthetic construct
  source 1..20: mol_type = other DNA
gattcaatgttgatttccta

SEQ ID NO: 114770 - DNA, 20 bp, synthetic construct
  source 1..20: mol_type = other DNA
ggattcaatgttgatttcct

SEQ ID NO: 114771 - DNA, 20 bp, synthetic construct
  source 1..20: mol_type = other DNA
gggattcaatgttgatttcc

SEQ ID NO: 114772 - DNA, 20 bp, synthetic construct
  source 1..20: mol_type = other DNA
tgggattcaatgttgatttc

SEQ ID NO: 114773 - DNA, 20 bp, synthetic construct
  source 1..20: mol_type = other DNA
ttgggattcaatgttgattt

SEQ ID NO: 114774 - DNA, 20 bp, synthetic construct
  source 1..20: mol_type = other DNA
attgggattcaatgttgatt

SEQ ID NO: 114775 - DNA, 20 bp, synthetic construct
  source 1..20: mol_type = other DNA
cattgggattcaatgttgat

SEQ ID NO: 114776 - DNA, 20 bp, synthetic construct
  source 1..20: mol_type = other DNA
gcattgggattcaatgttga

SEQ ID NO: 114777 - DNA, 20 bp, synthetic construct
  source 1..20: mol_type = other DNA
tgcattgggattcaatgttg

SEQ ID NO: 114778 - DNA, 20 bp, synthetic construct
  source 1..20: mol_type = other DNA
ttgcattgggattcaatgtt

SEQ ID NO: 114779 - DNA, 20 bp, synthetic construct
  source 1..20: mol_type = other DNA
tttgcattgggattcaatgt

SEQ ID NO: 114780 - DNA, 20 bp, synthetic construct
  source 1..20: mol_type = other DNA
ctttgcattgggattcaatg

SEQ ID NO: 114781 - DNA, 20 bp, synthetic construct
  source 1..20: mol_type = other DNA
cctttgcattgggattcaat

SEQ ID NO: 114782 - DNA, 20 bp, synthetic construct
  source 1..20: mol_type = other DNA
tcctttgcattgggattcaa

SEQ ID NO: 114783 - DNA, 20 bp, synthetic construct
  source 1..20: mol_type = other DNA
ctcctttgcattgggattca

SEQ ID NO: 114784 - DNA, 20 bp, synthetic construct
  source 1..20: mol_type = other DNA
actcctttgcattgggattc

SEQ ID NO: 114785 - DNA, 20 bp, synthetic construct
  source 1..20: mol_type = other DNA
aactcctttgcattgggatt

SEQ ID NO: 114786 - DNA, 20 bp, synthetic construct
  source 1..20: mol_type = other DNA
gaactcctttgcattgggat

SEQ ID NO: 114787 - DNA, 20 bp, synthetic construct
  source 1..20: mol_type = other DNA
tgaactcctttgcattggga

SEQ ID NO: 114788 - DNA, 20 bp, synthetic construct
  source 1..20: mol_type = other DNA
ttgaactcctttgcattggg

SEQ ID NO: 114789 - DNA, 20 bp, synthetic construct
  source 1..20: mol_type = other DNA
gttgaactcctttgcattgg

SEQ ID NO: 114790 - DNA, 20 bp, synthetic construct
  source 1..20: mol_type = other DNA
ggttgaactcctttgcattg

SEQ ID NO: 114791 - DNA, 20 bp, synthetic construct
  source 1..20: mol_type = other DNA
gggttgaactcctttgcatt

SEQ ID NO: 114792 - DNA, 20 bp, synthetic construct
  source 1..20: mol_type = other DNA
tgggttgaactcctttgcat

SEQ ID NO: 114793 - DNA, 20 bp, synthetic construct
  source 1..20: mol_type = other DNA
gtgggttgaactcctttgca

SEQ ID NO: 114794 - DNA, 20 bp, synthetic construct
  source 1..20: mol_type = other DNA
cgtgggttgaactcctttgc

SEQ ID NO: 114795 - DNA, 20 bp, synthetic construct
  source 1..20: mol_type = other DNA
acgtgggttgaactcctttg

SEQ ID NO: 114796 - DNA, 20 bp, synthetic construct
  source 1..20: mol_type = other DNA
aacgtgggttgaactccttt

SEQ ID NO: 114797 - DNA, 20 bp, synthetic construct
  source 1..20: mol_type = other DNA
gaacgtgggttgaactcctt

SEQ ID NO: 114798 - DNA, 20 bp, synthetic construct
  source 1..20: mol_type = other DNA
ggaacgtgggttgaactcct

SEQ ID NO: 114799 - DNA, 20 bp, synthetic construct
  source 1..20: mol_type = other DNA
aggaacgtgggttgaactcc

SEQ ID NO: 114800 - DNA, 20 bp, synthetic construct
  source 1..20: mol_type = other DNA
aaggaacgtgggttgaactc

SEQ ID NO: 114801 - DNA, 20 bp, synthetic construct
  source 1..20: mol_type = other DNA
gaaggaacgtgggttgaact

SEQ ID NO: 114802 - DNA, 20 bp, synthetic construct
  source 1..20: mol_type = other DNA
agaaggaacgtgggttgaac

SEQ ID NO: 114803 - DNA, 20 bp, synthetic construct
  source 1..20: mol_type = other DNA
gagaaggaacgtgggttgaa

SEQ ID NO: 114804 - DNA, 20 bp, synthetic construct
  source 1..20: mol_type = other DNA
agagaaggaacgtgggttga

SEQ ID NO: 114805 - DNA, 20 bp, synthetic construct
  source 1..20: mol_type = other DNA
gagagaaggaacgtgggttg

SEQ ID NO: 114806 - DNA, 20 bp, synthetic construct
  source 1..20: mol_type = other DNA
tgagagaaggaacgtgggtt

SEQ ID NO: 114807 - DNA, 20 bp, synthetic construct
  source 1..20: mol_type = other DNA
ctgagagaaggaacgtgggt

SEQ ID NO: 114808 - DNA, 20 bp, synthetic construct
  source 1..20: mol_type = other DNA
cctgagagaaggaacgtggg

SEQ ID NO: 114809 - DNA, 20 bp, synthetic construct
  source 1..20: mol_type = other DNA
acctgagagaaggaacgtgg

SEQ ID NO: 114810 - DNA, 20 bp, synthetic construct
  source 1..20: mol_type = other DNA
tacctgagagaaggaacgtg

SEQ ID NO: 114811 - DNA, 20 bp, synthetic construct
  source 1..20: mol_type = other DNA
ctacctgagagaaggaacgt

SEQ ID NO: 114812 - DNA, 20 bp, synthetic construct
  source 1..20: mol_type = other DNA
cctacctgagagaaggaacg

SEQ ID NO: 114813 - DNA, 20 bp, synthetic construct
  source 1..20: mol_type = other DNA
acctacctgagagaaggaac

SEQ ID NO: 114814 - DNA, 20 bp, synthetic construct
  source 1..20: mol_type = other DNA
aacctacctgagagaaggaa

SEQ ID NO: 114815 - DNA, 20 bp, synthetic construct
  source 1..20: mol_type = other DNA
aaacctacctgagagaagga

SEQ ID NO: 114816 - DNA, 20 bp, synthetic construct
  source 1..20: mol_type = other DNA
taaacctacctgagagaagg

SEQ ID NO: 114817 - DNA, 20 bp, synthetic construct
  source 1..20: mol_type = other DNA
ataaacctacctgagagaag

SEQ ID NO: 114818 - DNA, 20 bp, synthetic construct
  source 1..20: mol_type = other DNA
aataaacctacctgagagaa

SEQ ID NO: 114819 - DNA, 20 bp, synthetic construct
  source 1..20: mol_type = other DNA
taataaacctacctgagaga

SEQ ID NO: 114820 - DNA, 20 bp, synthetic construct
  source 1..20: mol_type = other DNA
gtaataaacctacctgagag

SEQ ID NO: 114821 - DNA, 20 bp, synthetic construct
  source 1..20: mol_type = other DNA
agtaataaacctacctgaga

SEQ ID NO: 114822 - DNA, 20 bp, synthetic construct
  source 1..20: mol_type = other DNA
aagtaataaacctacctgag

SEQ ID NO: 114823 - DNA, 20 bp, synthetic construct
  source 1..20: mol_type = other DNA
aaagtaataaacctacctga

SEQ ID NO: 114824 - DNA, 20 bp, synthetic construct
  source 1..20: mol_type = other DNA
gaaagtaataaacctacctg

SEQ ID NO: 114825 - DNA, 20 bp, synthetic construct
  source 1..20: mol_type = other DNA
agaaagtaataaacctacct

SEQ ID NO: 114826 - DNA, 20 bp, synthetic construct
  source 1..20: mol_type = other DNA
aagaaagtaataaacctacc

SEQ ID NO: 114827 - DNA, 20 bp, synthetic construct
  source 1..20: mol_type = other DNA
aaagaaagtaataaacctac

SEQ ID NO: 114828 - DNA, 20 bp, synthetic construct
  source 1..20: mol_type = other DNA
caaagaaagtaataaaccta

SEQ ID NO: 114829 - DNA, 20 bp, synthetic construct
  source 1..20: mol_type = other DNA
tcaaagaaagtaataaacct

SEQ ID NO: 114830 - DNA, 20 bp, synthetic construct
  source 1..20: mol_type = other DNA
ctcaaagaaagtaataaacc

SEQ ID NO: 114831 - DNA, 20 bp, synthetic construct
  source 1..20: mol_type = other DNA
cctcaaagaaagtaataaac

SEQ ID NO: 114832 - DNA, 20 bp, synthetic construct
  source 1..20: mol_type = other DNA
acctcaaagaaagtaataaa

SEQ ID NO: 114833 - DNA, 20 bp, synthetic construct
  source 1..20: mol_type = other DNA
aacctcaaagaaagtaataa

SEQ ID NO: 114834 - DNA, 20 bp, synthetic construct
  source 1..20: mol_type = other DNA
taacctcaaagaaagtaata

SEQ ID NO: 114835 - DNA, 20 bp, synthetic construct
  source 1..20: mol_type = other DNA
ataacctcaaagaaagtaat

SEQ ID NO: 114836 - DNA, 20 bp, synthetic construct
  source 1..20: mol_type = other DNA
gataacctcaaagaaagtaa

SEQ ID NO: 114837 - DNA, 20 bp, synthetic construct
  source 1..20: mol_type = other DNA
agataacctcaaagaaagta

SEQ ID NO: 114838 - DNA, 20 bp, synthetic construct
  source 1..20: mol_type = other DNA
tagataacctcaaagaaagt

SEQ ID NO: 114839 - DNA, 20 bp, synthetic construct
  source 1..20: mol_type = other DNA
ctagataacctcaaagaaag

SEQ ID NO: 114840 - DNA, 20 bp, synthetic construct
  source 1..20: mol_type = other DNA
actagataacctcaaagaaa

SEQ ID NO: 114841 - DNA, 20 bp, synthetic construct
  source 1..20: mol_type = other DNA
gactagataacctcaaagaa

SEQ ID NO: 114842 - DNA, 20 bp, synthetic construct
  source 1..20: mol_type = other DNA
ggactagataacctcaaaga

SEQ ID NO: 114843 - DNA, 20 bp, synthetic construct
  source 1..20: mol_type = other DNA
gggactagataacctcaaag

SEQ ID NO: 114844 - DNA, 20 bp, synthetic construct
  source 1..20: mol_type = other DNA
tgggactagataacctcaaa

SEQ ID NO: 114845 - DNA, 20 bp, synthetic construct
  source 1..20: mol_type = other DNA
ttgggactagataacctcaa

SEQ ID NO: 114846 - DNA, 20 bp, synthetic construct
  source 1..20: mol_type = other DNA
tttgggactagataacctca

SEQ ID NO: 114847 - DNA, 20 bp, synthetic construct
  source 1..20: mol_type = other DNA
ttttgggactagataacctc

SEQ ID NO: 114848 - DNA, 20 bp, synthetic construct
  source 1..20: mol_type = other DNA
tttttgggactagataacct

SEQ ID NO: 114849 - DNA, 20 bp, synthetic construct
  source 1..20: mol_type = other DNA
ttttttgggactagataacc

SEQ ID NO: 114850 - DNA, 20 bp, synthetic construct
  source 1..20: mol_type = other DNA
tttttttgggactagataac

SEQ ID NO: 114851 - DNA, 20 bp, synthetic construct
  source 1..20: mol_type = other DNA
ctttttttgggactagataa

SEQ ID NO: 114852 - DNA, 20 bp, synthetic construct
  source 1..20: mol_type = other DNA
tctttttttgggactagata

SEQ ID NO: 114853 - DNA, 20 bp, synthetic construct
  source 1..20: mol_type = other DNA
ttctttttttgggactagat

SEQ ID NO: 114854 - DNA, 20 bp, synthetic construct
  source 1..20: mol_type = other DNA
tttctttttttgggactaga

SEQ ID NO: 114855 - DNA, 20 bp, synthetic construct
  source 1..20: mol_type = other DNA
ttttctttttttgggactag

SEQ ID NO: 114856 - DNA, 20 bp, synthetic construct
  source 1..20: mol_type = other DNA
tttttctttttttgggacta

SEQ ID NO: 114857 - DNA, 20 bp, synthetic construct
  source 1..20: mol_type = other DNA
atttttctttttttgggact

SEQ ID NO: 114858 - DNA, 20 bp, synthetic construct
  source 1..20: mol_type = other DNA
aatttttctttttttgggac

SEQ ID NO: 114859 - DNA, 20 bp, synthetic construct
  source 1..20: mol_type = other DNA
taatttttctttttttggga

SEQ ID NO: 114860 - DNA, 20 bp, synthetic construct
  source 1..20: mol_type = other DNA
ataatttttctttttttggg

SEQ ID NO: 114861 - DNA, 20 bp, synthetic construct
  source 1..20: mol_type = other DNA
aataatttttctttttttgg

SEQ ID NO: 114862 - DNA, 20 bp, synthetic construct
  source 1..20: mol_type = other DNA
taataatttttctttttttg

SEQ ID NO: 114863 - DNA, 20 bp, synthetic construct
  source 1..20: mol_type = other DNA
ctaataatttttcttttttt

SEQ ID NO: 114864 - DNA, 20 bp, synthetic construct
  source 1..20: mol_type = other DNA
actaataatttttctttttt

SEQ ID NO: 114865 - DNA, 20 bp, synthetic construct
  source 1..20: mol_type = other DNA
tactaataatttttcttttt

SEQ ID NO: 114866 - DNA, 20 bp, synthetic construct
  source 1..20: mol_type = other DNA
ttactaataatttttctttt

SEQ ID NO: 114867 - DNA, 20 bp, synthetic construct
  source 1..20: mol_type = other DNA
attactaataatttttcttt

SEQ ID NO: 114868 - DNA, 20 bp, synthetic construct
  source 1..20: mol_type = other DNA
tattactaataatttttctt

SEQ ID NO: 114869 - DNA, 20 bp, synthetic construct
  source 1..20: mol_type = other DNA
ctattactaataatttttct

SEQ ID NO: 114870 - DNA, 20 bp, synthetic construct
  source 1..20: mol_type = other DNA
actattactaataatttttc

SEQ ID NO: 114871 - DNA, 20 bp, synthetic construct
  source 1..20: mol_type = other DNA
gactattactaataattttt

SEQ ID NO: 114872 - DNA, 20 bp, synthetic construct
  source 1..20: mol_type = other DNA
ggactattactaataatttt

SEQ ID NO: 114873 - DNA, 20 bp, synthetic construct
  source 1..20: mol_type = other DNA
aggactattactaataattt

SEQ ID NO: 114874 - DNA, 20 bp, synthetic construct
  source 1..20: mol_type = other DNA
aaggactattactaataatt

SEQ ID NO: 114875 - DNA, 20 bp, synthetic construct
  source 1..20: mol_type = other DNA
gaaggactattactaataat

SEQ ID NO: 114876 - DNA, 20 bp, synthetic construct
  source 1..20: mol_type = other DNA
agaaggactattactaataa

SEQ ID NO: 114877 - DNA, 20 bp, synthetic construct
  source 1..20: mol_type = other DNA
aagaaggactattactaata

SEQ ID NO: 114878 - DNA, 20 bp, synthetic construct
  source 1..20: mol_type = other DNA
gaagaaggactattactaat

SEQ ID NO: 114879 - DNA, 20 bp, synthetic construct
  source 1..20: mol_type = other DNA
ggaagaaggactattactaa

SEQ ID NO: 114880 - DNA, 20 bp, synthetic construct
  source 1..20: mol_type = other DNA
tggaagaaggactattacta

SEQ ID NO: 114881 - DNA, 20 bp, synthetic construct
  source 1..20: mol_type = other DNA
atggaagaaggactattact

SEQ ID NO: 114882 - DNA, 20 bp, synthetic construct
  source 1..20: mol_type = other DNA
tatggaagaaggactattac

SEQ ID NO: 114883 - DNA, 20 bp, synthetic construct
  source 1..20: mol_type = other DNA
gtatggaagaaggactatta

SEQ ID NO: 114884 - DNA, 20 bp, synthetic construct
  source 1..20: mol_type = other DNA
ggtatggaagaaggactatt

SEQ ID NO: 114885 - DNA, 20 bp, synthetic construct
  source 1..20: mol_type = other DNA
aggtatggaagaaggactat

SEQ ID NO: 114886 - DNA, 20 bp, synthetic construct
  source 1..20: mol_type = other DNA
caggtatggaagaaggacta

SEQ ID NO: 114887 - DNA, 20 bp, synthetic construct
  source 1..20: mol_type = other DNA
gcaggtatggaagaaggact

SEQ ID NO: 114888 - DNA, 20 bp, synthetic construct
  source 1..20: mol_type = other DNA
ggcaggtatggaagaaggac

SEQ ID NO: 114889 - DNA, 20 bp, synthetic construct
  source 1..20: mol_type = other DNA
tggcaggtatggaagaagga

SEQ ID NO: 114890 - DNA, 20 bp, synthetic construct
  source 1..20: mol_type = other DNA
atggcaggtatggaagaagg

SEQ ID NO: 114891 - DNA, 20 bp, synthetic construct
  source 1..20: mol_type = other DNA
gatggcaggtatggaagaag

SEQ ID NO: 114892 - DNA, 20 bp, synthetic construct
  source 1..20: mol_type = other DNA
agatggcaggtatggaagaa

SEQ ID NO: 114893 - DNA, 20 bp, synthetic construct
  source 1..20: mol_type = other DNA
cagatggcaggtatggaaga

SEQ ID NO: 114894 - DNA, 20 bp, synthetic construct
  source 1..20: mol_type = other DNA
tcagatggcaggtatggaag

SEQ ID NO: 114895 - DNA, 20 bp, synthetic construct
  source 1..20: mol_type = other DNA
ttcagatggcaggtatggaa

SEQ ID NO: 114896 - DNA, 20 bp, synthetic construct
  source 1..20: mol_type = other DNA
attcagatggcaggtatgga

SEQ ID NO: 114897 - DNA, 20 bp, synthetic construct
  source 1..20: mol_type = other DNA
aattcagatggcaggtatgg

SEQ ID NO: 114898 - DNA, 20 bp, synthetic construct
  source 1..20: mol_type = other DNA
aaattcagatggcaggtatg

SEQ ID NO: 114899 - DNA, 20 bp, synthetic construct
  source 1..20: mol_type = other DNA
aaaattcagatggcaggtat

SEQ ID NO: 114900 - DNA, 20 bp, synthetic construct
  source 1..20: mol_type = other DNA
caaaattcagatggcaggta

SEQ ID NO: 114901 - DNA, 20 bp, synthetic construct
  source 1..20: mol_type = other DNA
acaaaattcagatggcaggt

SEQ ID NO: 114902 - DNA, 20 bp, synthetic construct
  source 1..20: mol_type = other DNA
aacaaaattcagatggcagg

SEQ ID NO: 114903 - DNA, 20 bp, synthetic construct
  source 1..20: mol_type = other DNA
aaacaaaattcagatggcag

SEQ ID NO: 114904 - DNA, 20 bp, synthetic construct
  source 1..20: mol_type = other DNA
aaaacaaaattcagatggca

SEQ ID NO: 114905 - DNA, 20 bp, synthetic construct
  source 1..20: mol_type = other DNA
taaaacaaaattcagatggc

SEQ ID NO: 114906 - DNA, 20 bp, synthetic construct
  source 1..20: mol_type = other DNA
ctaaaacaaaattcagatgg

SEQ ID NO: 114907 - DNA, 20 bp, synthetic construct
  source 1..20: mol_type = other DNA
actaaaacaaaattcagatg

SEQ ID NO: 114908 - DNA, 20 bp, synthetic construct
  source 1..20: mol_type = other DNA
cactaaaacaaaattcagat

SEQ ID NO: 114909 - DNA, 20 bp, synthetic construct
  source 1..20: mol_type = other DNA
acactaaaacaaaattcaga

SEQ ID NO: 114910 - DNA, 20 bp, synthetic construct
  source 1..20: mol_type = other DNA
cacactaaaacaaaattcag

SEQ ID NO: 114911 - DNA, 20 bp, synthetic construct
  source 1..20: mol_type = other DNA
gcacactaaaacaaaattca

SEQ ID NO: 114912 - DNA, 20 bp, synthetic construct
  source 1..20: mol_type = other DNA
agcacactaaaacaaaattc

SEQ ID NO: 114913 - DNA, 20 bp, synthetic construct
  source 1..20: mol_type = other DNA
cagcacactaaaacaaaatt

SEQ ID NO: 114914 - DNA, 20 bp, synthetic construct
  source 1..20: mol_type = other DNA
tcagcacactaaaacaaaat

SEQ ID NO: 114915 - DNA, 20 bp, synthetic construct
  source 1..20: mol_type = other DNA
ttcagcacactaaaacaaaa

SEQ ID NO: 114916 - DNA, 20 bp, synthetic construct
  source 1..20: mol_type = other DNA
gttcagcacactaaaacaaa

SEQ ID NO: 114917 - DNA, 20 bp, synthetic construct
  source 1..20: mol_type = other DNA
ggttcagcacactaaaacaa

SEQ ID NO: 114918 - DNA, 20 bp, synthetic construct
  source 1..20: mol_type = other DNA
tggttcagcacactaaaaca

SEQ ID NO: 114919 - DNA, 20 bp, synthetic construct
  source 1..20: mol_type = other DNA
ttggttcagcacactaaaac

SEQ ID NO: 114920 - DNA, 20 bp, synthetic construct
  source 1..20: mol_type = other DNA
gttggttcagcacactaaaa

SEQ ID NO: 114921 - DNA, 20 bp, synthetic construct
  source 1..20: mol_type = other DNA
ggttggttcagcacactaaa

SEQ ID NO: 114922 - DNA, 20 bp, synthetic construct
  source 1..20: mol_type = other DNA
aggttggttcagcacactaa

SEQ ID NO: 114923 - DNA, 20 bp, synthetic construct
  source 1..20: mol_type = other DNA
aaggttggttcagcacacta

SEQ ID NO: 114924 - DNA, 20 bp, synthetic construct
  source 1..20: mol_type = other DNA
gaaggttggttcagcacact

SEQ ID NO: 114925 - DNA, 20 bp, synthetic construct
  source 1..20: mol_type = other DNA
agaaggttggttcagcacac

SEQ ID NO: 114926 - DNA, 20 bp, synthetic construct
  source 1..20: mol_type = other DNA
aagaaggttggttcagcaca

SEQ ID NO: 114927 - DNA, 20 bp, synthetic construct
  source 1..20: mol_type = other DNA
aaagaaggttggttcagcac

SEQ ID NO: 114928 - DNA, 20 bp, synthetic construct
  source 1..20: mol_type = other DNA
gaaagaaggttggttcagca

SEQ ID NO: 114929 - DNA, 20 bp, synthetic construct
  source 1..20: mol_type = other DNA
agaaagaaggttggttcagc

SEQ ID NO: 114930 - DNA, 20 bp, synthetic construct
  source 1..20: mol_type = other DNA
aagaaagaaggttggttcag

SEQ ID NO: 114931 - DNA, 20 bp, synthetic construct
  source 1..20: mol_type = other DNA
aaagaaagaaggttggttca

SEQ ID NO: 114932 - DNA, 20 bp, synthetic construct
  source 1..20: mol_type = other DNA
aaaagaaagaaggttggttc

SEQ ID NO: 114933 - DNA, 20 bp, synthetic construct
  source 1..20: mol_type = other DNA
aaaaagaaagaaggttggtt

SEQ ID NO: 114934 - DNA, 20 bp, synthetic construct
  source 1..20: mol_type = other DNA
aaaaaagaaagaaggttggt

SEQ ID NO: 114935 - DNA, 20 bp, synthetic construct
  source 1..20: mol_type = other DNA
aaaaaaagaaagaaggttgg

SEQ ID NO: 114936 - DNA, 20 bp, synthetic construct
  source 1..20: mol_type = other DNA
aaaaaaaagaaagaaggttg

SEQ ID NO: 114937 - DNA, 20 bp, synthetic construct
  source 1..20: mol_type = other DNA
taaaaaaaagaaagaaggtt

SEQ ID NO: 114938 - DNA, 20 bp, synthetic construct
  source 1..20: mol_type = other DNA
gtaaaaaaaagaaagaaggt

SEQ ID NO: 114939 - DNA, 20 bp, synthetic construct
  source 1..20: mol_type = other DNA
tgtaaaaaaaagaaagaagg

SEQ ID NO: 114940 - DNA, 20 bp, synthetic construct
  source 1..20: mol_type = other DNA
atgtaaaaaaaagaaagaag

SEQ ID NO: 114941 - DNA, 20 bp, synthetic construct
  source 1..20: mol_type = other DNA
catgtaaaaaaaagaaagaa

SEQ ID NO: 114942 - DNA, 20 bp, synthetic construct
  source 1..20: mol_type = other DNA
ccatgtaaaaaaaagaaaga

SEQ ID NO: 114943 - DNA, 20 bp, synthetic construct
  source 1..20: mol_type = other DNA
gccatgtaaaaaaaagaaag

SEQ ID NO: 114944 - DNA, 20 bp, synthetic construct
  source 1..20: mol_type = other DNA
ggccatgtaaaaaaaagaaa

SEQ ID NO: 114945 - DNA, 20 bp, synthetic construct
  source 1..20: mol_type = other DNA
tggccatgtaaaaaaaagaa

SEQ ID NO: 114946 - DNA, 20 bp, synthetic construct
  source 1..20: mol_type = other DNA
atggccatgtaaaaaaaaga

SEQ ID NO: 114947 - DNA, 20 bp, synthetic construct
  source 1..20: mol_type = other DNA
aatggccatgtaaaaaaaag

SEQ ID NO: 114948 - DNA, 20 bp, synthetic construct
  source 1..20: mol_type = other DNA
taatggccatgtaaaaaaaa

SEQ ID NO: 114949 - DNA, 20 bp, synthetic construct
  source 1..20: mol_type = other DNA
ttaatggccatgtaaaaaaa

SEQ ID NO: 114950 - DNA, 20 bp, synthetic construct
  source 1..20: mol_type = other DNA
attaatggccatgtaaaaaa

SEQ ID NO: 114951 - DNA, 20 bp, synthetic construct
  source 1..20: mol_type = other DNA
cattaatggccatgtaaaaa

SEQ ID NO: 114952 - DNA, 20 bp, synthetic construct
  source 1..20: mol_type = other DNA
tcattaatggccatgtaaaa

SEQ ID NO: 114953 - DNA, 20 bp, synthetic construct
  source 1..20: mol_type = other DNA
ttcattaatggccatgtaaa

SEQ ID NO: 114954 - DNA, 20 bp, synthetic construct
  source 1..20: mol_type = other DNA
attcattaatggccatgtaa

SEQ ID NO: 114955 - DNA, 20 bp, synthetic construct
  source 1..20: mol_type = other DNA
tattcattaatggccatgta

SEQ ID NO: 114956 - DNA, 20 bp, synthetic construct
  source 1..20: mol_type = other DNA
gtattcattaatggccatgt

SEQ ID NO: 114957 - DNA, 20 bp, synthetic construct
  source 1..20: mol_type = other DNA
agtattcattaatggccatg

SEQ ID NO: 114958 - DNA, 20 bp, synthetic construct
  source 1..20: mol_type = other DNA
aagtattcattaatggccat

SEQ ID NO: 114959 - DNA, 20 bp, synthetic construct
  source 1..20: mol_type = other DNA
aaagtattcattaatggcca

SEQ ID NO: 114960 - DNA, 20 bp, synthetic construct
  source 1..20: mol_type = other DNA
aaaagtattcattaatggcc

SEQ ID NO: 114961 - DNA, 20 bp, synthetic construct
  source 1..20: mol_type = other DNA
aaaaagtattcattaatggc

SEQ ID NO: 114962 - DNA, 20 bp, synthetic construct
  source 1..20: mol_type = other DNA
taaaaagtattcattaatgg

SEQ ID NO: 114963 - DNA, 20 bp, synthetic construct
  source 1..20: mol_type = other DNA
ttaaaaagtattcattaatg

SEQ ID NO: 114964 - DNA, 20 bp, synthetic construct
  source 1..20: mol_type = other DNA
tttaaaaagtattcattaat

SEQ ID NO: 114965 - DNA, 20 bp, synthetic construct
  source 1..20: mol_type = other DNA
gtttaaaaagtattcattaa

SEQ ID NO: 114966 - DNA, 20 bp, synthetic construct
  source 1..20: mol_type = other DNA
tgtttaaaaagtattcatta

SEQ ID NO: 114967 - DNA, 20 bp, synthetic construct
  source 1..20: mol_type = other DNA
atgtttaaaaagtattcatt

SEQ ID NO: 114968 - DNA, 20 bp, synthetic construct
  source 1..20: mol_type = other DNA
aatgtttaaaaagtattcat

SEQ ID NO: 114969 - DNA, 20 bp, synthetic construct
  source 1..20: mol_type = other DNA
taatgtttaaaaagtattca

SEQ ID NO: 114970 - DNA, 20 bp, synthetic construct
  source 1..20: mol_type = other DNA
ttaatgtttaaaaagtattc

SEQ ID NO: 114971 - DNA, 20 bp, synthetic construct
  source 1..20: mol_type = other DNA
tttaatgtttaaaaagtatt

SEQ ID NO: 114972 - DNA, 20 bp, synthetic construct
  source 1..20: mol_type = other DNA
ttttaatgtttaaaaagtat

SEQ ID NO: 114973 - DNA, 20 bp, synthetic construct
  source 1..20: mol_type = other DNA
tttttaatgtttaaaaagta

SEQ ID NO: 114974 - DNA, 20 bp, synthetic construct
  source 1..20: mol_type = other DNA
ttttttaatgtttaaaaagt

SEQ ID NO: 114975 - DNA, 20 bp, synthetic construct
  source 1..20: mol_type = other DNA
tttttttaatgtttaaaaag

SEQ ID NO: 114976 - DNA, 20 bp, synthetic construct
  source 1..20: mol_type = other DNA
ctttttttaatgtttaaaaa

SEQ ID NO: 114977 - DNA, 20 bp, synthetic construct
  source 1..20: mol_type = other DNA
cctttttttaatgtttaaaa

SEQ ID NO: 114978 - DNA, 20 bp, synthetic construct
  source 1..20: mol_type = other DNA
acctttttttaatgtttaaa

SEQ ID NO: 114979 - DNA, 20 bp, synthetic construct
  source 1..20: mol_type = other DNA
gacctttttttaatgtttaa

SEQ ID NO: 114980 - DNA, 20 bp, synthetic construct
  source 1..20: mol_type = other DNA
agacctttttttaatgttta

SEQ ID NO: 114981 - DNA, 20 bp, synthetic construct
  source 1..20: mol_type = other DNA
aagacctttttttaatgttt

SEQ ID NO: 114982 - DNA, 20 bp, synthetic construct
  source 1..20: mol_type = other DNA
aaagacctttttttaatgtt

SEQ ID NO: 114983 - DNA, 20 bp, synthetic construct
  source 1..20: mol_type = other DNA
caaagacctttttttaatgt

SEQ ID NO: 114984 - DNA, 20 bp, synthetic construct
  source 1..20: mol_type = other DNA
acaaagacctttttttaatg

SEQ ID NO: 114985 - DNA, 20 bp, synthetic construct
  source 1..20: mol_type = other DNA
aacaaagacctttttttaat

SEQ ID NO: 114986 - DNA, 20 bp, synthetic construct
  source 1..20: mol_type = other DNA
aaacaaagacctttttttaa

SEQ ID NO: 114987 - DNA, 20 bp, synthetic construct
  source 1..20: mol_type = other DNA
aaaacaaagaccttttttta

SEQ ID NO: 114988 - DNA, 20 bp, synthetic construct
  source 1..20: mol_type = other DNA
caaaacaaagaccttttttt

SEQ ID NO: 114989 - DNA, 20 bp, synthetic construct
  source 1..20: mol_type = other DNA
acaaaacaaagacctttttt

SEQ ID NO: 114990 - DNA, 20 bp, synthetic construct
  source 1..20: mol_type = other DNA
gacaaaacaaagaccttttt

SEQ ID NO: 114991 - DNA, 20 bp, synthetic construct
  source 1..20: mol_type = other DNA
tgacaaaacaaagacctttt

SEQ ID NO: 114992 - DNA, 20 bp, synthetic construct
  source 1..20: mol_type = other DNA
atgacaaaacaaagaccttt

SEQ ID NO: 114993 - DNA, 20 bp, synthetic construct
  source 1..20: mol_type = other DNA
gatgacaaaacaaagacctt

SEQ ID NO: 114994 - DNA, 20 bp, synthetic construct
  source 1..20: mol_type = other DNA
tgatgacaaaacaaagacct

SEQ ID NO: 114995 - DNA, 20 bp, synthetic construct
  source 1..20: mol_type = other DNA
ttgatgacaaaacaaagacc

SEQ ID NO: 114996 - DNA, 20 bp, synthetic construct
  source 1..20: mol_type = other DNA
attgatgacaaaacaaagac

SEQ ID NO: 114997 - DNA, 20 bp, synthetic construct
  source 1..20: mol_type = other DNA
aattgatgacaaaacaaaga

SEQ ID NO: 114998 - DNA, 20 bp, synthetic construct
  source 1..20: mol_type = other DNA
taattgatgacaaaacaaag

SEQ ID NO: 114999 - DNA, 20 bp, synthetic construct
  source 1..20: mol_type = other DNA
ctaattgatgacaaaacaaa

SEQ ID NO: 115000 - DNA, 20 bp, synthetic construct
  source 1..20: mol_type = other DNA
tctaattgatgacaaaacaa

SEQ ID NO: 115001 - DNA, 20 bp, synthetic construct
  source 1..20: mol_type = other DNA
atctaattgatgacaaaaca

SEQ ID NO: 115002 - DNA, 20 bp, synthetic construct
  source 1..20: mol_type = other DNA
catctaattgatgacaaaac

SEQ ID NO: 115003 - DNA, 20 bp, synthetic construct
  source 1..20: mol_type = other DNA
acatctaattgatgacaaaa

SEQ ID NO: 115004 - DNA, 20 bp, synthetic construct
  source 1..20: mol_type = other DNA
cacatctaattgatgacaaa

SEQ ID NO: 115005 - DNA, 20 bp, synthetic construct
  source 1..20: mol_type = other DNA
tcacatctaattgatgacaa

SEQ ID NO: 115006 - DNA, 20 bp, synthetic construct
  source 1..20: mol_type = other DNA
atcacatctaattgatgaca

SEQ ID NO: 115007 - DNA, 20 bp, synthetic construct
  source 1..20: mol_type = other DNA
gatcacatctaattgatgac

SEQ ID NO: 115008 - DNA, 20 bp, synthetic construct
  source 1..20: mol_type = other DNA
agatcacatctaattgatga

SEQ ID NO: 115009 - DNA, 20 bp, synthetic construct
  source 1..20: mol_type = other DNA
aagatcacatctaattgatg

SEQ ID NO: 115010 - DNA, 20 bp, synthetic construct
  source 1..20: mol_type = other DNA
caagatcacatctaattgat

SEQ ID NO: 115011 - DNA, 20 bp, synthetic construct
  source 1..20: mol_type = other DNA
ccaagatcacatctaattga

SEQ ID NO: 115012 - DNA, 20 bp, synthetic construct
  source 1..20: mol_type = other DNA
cccaagatcacatctaattg

SEQ ID NO: 115013 - DNA, 20 bp, synthetic construct
  source 1..20: mol_type = other DNA
gcccaagatcacatctaatt

SEQ ID NO: 115014 - DNA, 20 bp, synthetic construct
  source 1..20: mol_type = other DNA
tgcccaagatcacatctaat

SEQ ID NO: 115015 - DNA, 20 bp, synthetic construct
  source 1..20: mol_type = other DNA
ttgcccaagatcacatctaa

SEQ ID NO: 115016 - DNA, 20 bp, synthetic construct
  source 1..20: mol_type = other DNA
tttgcccaagatcacatcta

SEQ ID NO: 115017 - DNA, 20 bp, synthetic construct
  source 1..20: mol_type = other DNA
atttgcccaagatcacatct

SEQ ID NO: 115018 - DNA, 20 bp, synthetic construct
  source 1..20: mol_type = other DNA
gatttgcccaagatcacatc

SEQ ID NO: 115019 - DNA, 20 bp, synthetic construct
  source 1..20: mol_type = other DNA
agatttgcccaagatcacat

SEQ ID NO: 115020 - DNA, 20 bp, synthetic construct
  source 1..20: mol_type = other DNA
aagatttgcccaagatcaca

SEQ ID NO: 115021 - DNA, 20 bp, synthetic construct
  source 1..20: mol_type = other DNA
aaagatttgcccaagatcac

SEQ ID NO: 115022 - DNA, 20 bp, synthetic construct
  source 1..20: mol_type = other DNA
caaagatttgcccaagatca

SEQ ID NO: 115023 - DNA, 20 bp, synthetic construct
  source 1..20: mol_type = other DNA
tcaaagatttgcccaagatc

SEQ ID NO: 115024 - DNA, 20 bp, synthetic construct
  source 1..20: mol_type = other DNA
ttcaaagatttgcccaagat

SEQ ID NO: 115025 - DNA, 20 bp, synthetic construct
  source 1..20: mol_type = other DNA
attcaaagatttgcccaaga

SEQ ID NO: 115026 - DNA, 20 bp, synthetic construct
  source 1..20: mol_type = other DNA
aattcaaagatttgcccaag

SEQ ID NO: 115027 - DNA, 20 bp, synthetic construct
  source 1..20: mol_type = other DNA
aaattcaaagatttgcccaa

SEQ ID NO: 115028 - DNA, 20 bp, synthetic construct
  source 1..20: mol_type = other DNA
gaaattcaaagatttgccca

SEQ ID NO: 115029 - DNA, 20 bp, synthetic construct
  source 1..20: mol_type = other DNA
agaaattcaaagatttgccc

SEQ ID NO: 115030 - DNA, 20 bp, synthetic construct
  source 1..20: mol_type = other DNA
gagaaattcaaagatttgcc

SEQ ID NO: 115031 - DNA, 20 bp, synthetic construct
  source 1..20: mol_type = other DNA
agagaaattcaaagatttgc

SEQ ID NO: 115032 - DNA, 20 bp, synthetic construct
  source 1..20: mol_type = other DNA
cagagaaattcaaagatttg

SEQ ID NO: 115033 - DNA, 20 bp, synthetic construct
  source 1..20: mol_type = other DNA
tcagagaaattcaaagattt

SEQ ID NO: 115034 - DNA, 20 bp, synthetic construct
  source 1..20: mol_type = other DNA
gtcagagaaattcaaagatt

SEQ ID NO: 115035 - DNA, 20 bp, synthetic construct
  source 1..20: mol_type = other DNA
ggtcagagaaattcaaagat

SEQ ID NO: 115036 - DNA, 20 bp, synthetic construct
  source 1..20: mol_type = other DNA
gggtcagagaaattcaaaga

SEQ ID NO: 115037 - DNA, 20 bp, synthetic construct
  source 1..20: mol_type = other DNA
tgggtcagagaaattcaaag

SEQ ID NO: 115038 - DNA, 20 bp, synthetic construct
  source 1..20: mol_type = other DNA
ctgggtcagagaaattcaaa

SEQ ID NO: 115039 - DNA, 20 bp, synthetic construct
  source 1..20: mol_type = other DNA
tctgggtcagagaaattcaa

SEQ ID NO: 115040 - DNA, 20 bp, synthetic construct
  source 1..20: mol_type = other DNA
ttctgggtcagagaaattca

SEQ ID NO: 115041 - DNA, 20 bp, synthetic construct
  source 1..20: mol_type = other DNA
attctgggtcagagaaattc

SEQ ID NO: 115042 - DNA, 20 bp, synthetic construct
  source 1..20: mol_type = other DNA
aattctgggtcagagaaatt

SEQ ID NO: 115043 - DNA, 20 bp, synthetic construct
  source 1..20: mol_type = other DNA
aaattctgggtcagagaaat

SEQ ID NO: 115044 - DNA, 20 bp, synthetic construct
  source 1..20: mol_type = other DNA
caaattctgggtcagagaaa

SEQ ID NO: 115045 - DNA, 20 bp, synthetic construct
  source 1..20: mol_type = other DNA
tcaaattctgggtcagagaa

SEQ ID NO: 115046 - DNA, 20 bp, synthetic construct
  source 1..20: mol_type = other DNA
gtcaaattctgggtcagaga

SEQ ID NO: 115047 - DNA, 20 bp, synthetic construct
  source 1..20: mol_type = other DNA
cgtcaaattctgggtcagag

SEQ ID NO: 115048 - DNA, 20 bp, synthetic construct
  source 1..20: mol_type = other DNA
tcgtcaaattctgggtcaga

SEQ ID NO: 115049 - DNA, 20 bp, synthetic construct
  source 1..20: mol_type = other DNA
atcgtcaaattctgggtcag

SEQ ID NO: 115050 - DNA, 20 bp, synthetic construct
  source 1..20: mol_type = other DNA
catcgtcaaattctgggtca

SEQ ID NO: 115051 - DNA, 20 bp, synthetic construct
  source 1..20: mol_type = other DNA
ccatcgtcaaattctgggtc

SEQ ID NO: 115052 - DNA, 20 bp, synthetic construct
  source 1..20: mol_type = other DNA
accatcgtcaaattctgggt

SEQ ID NO: 115053 - DNA, 20 bp, synthetic construct
  source 1..20: mol_type = other DNA
aaccatcgtcaaattctggg

SEQ ID NO: 115054 - DNA, 20 bp, synthetic construct
  source 1..20: mol_type = other DNA
caaccatcgtcaaattctgg

SEQ ID NO: 115055 - DNA, 20 bp, synthetic construct
  source 1..20: mol_type = other DNA
ccaaccatcgtcaaattctg

SEQ ID NO: 115056 - DNA, 20 bp, synthetic construct
  source 1..20: mol_type = other DNA
gccaaccatcgtcaaattct

SEQ ID NO: 115057 - DNA, 20 bp, synthetic construct
  source 1..20: mol_type = other DNA
agccaaccatcgtcaaattc

SEQ ID NO: 115058 - DNA, 20 bp, synthetic construct
  source 1..20: mol_type = other DNA
tagccaaccatcgtcaaatt

SEQ ID NO: 115059 - DNA, 20 bp, synthetic construct
  source 1..20: mol_type = other DNA
ctagccaaccatcgtcaaat

SEQ ID NO: 115060 - DNA, 20 bp, synthetic construct
  source 1..20: mol_type = other DNA
gctagccaaccatcgtcaaa

SEQ ID NO: 115061 - DNA, 20 bp, synthetic construct
  source 1..20: mol_type = other DNA
agctagccaaccatcgtcaa

SEQ ID NO: 115062 - DNA, 20 bp, synthetic construct
  source 1..20: mol_type = other DNA
tagctagccaaccatcgtca

SEQ ID NO: 115063 - DNA, 20 bp, synthetic construct
  source 1..20: mol_type = other DNA
ctagctagccaaccatcgtc

SEQ ID NO: 115064 - DNA, 20 bp, synthetic construct
  source 1..20: mol_type = other DNA
cctagctagccaaccatcgt

SEQ ID NO: 115065 - DNA, 20 bp, synthetic construct
  source 1..20: mol_type = other DNA
gcctagctagccaaccatcg

SEQ ID NO: 115066 - DNA, 20 bp, synthetic construct
  source 1..20: mol_type = other DNA
agcctagctagccaaccatc

SEQ ID NO: 115067 - DNA, 20 bp, synthetic construct
  source 1..20: mol_type = other DNA
cagcctagctagccaaccat

SEQ ID NO: 115068 - DNA, 20 bp, synthetic construct
  source 1..20: mol_type = other DNA
acagcctagctagccaacca

SEQ ID NO: 115069 - DNA, 20 bp, synthetic construct
  source 1..20: mol_type = other DNA
gacagcctagctagccaacc

SEQ ID NO: 115070 - DNA, 20 bp, synthetic construct
  source 1..20: mol_type = other DNA
tgacagcctagctagccaac

SEQ ID NO: 115071 - DNA, 20 bp, synthetic construct
  source 1..20: mol_type = other DNA
ctgacagcctagctagccaa

SEQ ID NO: 115072 - DNA, 20 bp, synthetic construct
  source 1..20: mol_type = other DNA
cctgacagcctagctagcca

SEQ ID NO: 115073 - DNA, 20 bp, synthetic construct
  source 1..20: mol_type = other DNA
acctgacagcctagctagcc

SEQ ID NO: 115074 - DNA, 20 bp, synthetic construct
  source 1..20: mol_type = other DNA
aacctgacagcctagctagc

SEQ ID NO: 115075 - DNA, 20 bp, synthetic construct
  source 1..20: mol_type = other DNA
aaacctgacagcctagctag

SEQ ID NO: 115076 - DNA, 20 bp, synthetic construct
  source 1..20: mol_type = other DNA
taaacctgacagcctagcta

SEQ ID NO: 115077 - DNA, 20 bp, synthetic construct
  source 1..20: mol_type = other DNA
ataaacctgacagcctagct

SEQ ID NO: 115078 - DNA, 20 bp, synthetic construct
  source 1..20: mol_type = other DNA
tataaacctgacagcctagc

SEQ ID NO: 115079 - DNA, 20 bp, synthetic construct
  source 1..20: mol_type = other DNA
ctataaacctgacagcctag

SEQ ID NO: 115080 - DNA, 20 bp, synthetic construct
  source 1..20: mol_type = other DNA
tctataaacctgacagccta

SEQ ID NO: 115081 - DNA, 20 bp, synthetic construct
  source 1..20: mol_type = other DNA
atctataaacctgacagcct

SEQ ID NO: 115082 - DNA, 20 bp, synthetic construct
  source 1..20: mol_type = other DNA
tatctataaacctgacagcc

SEQ ID NO: 115083 - DNA, 20 bp, synthetic construct
  source 1..20: mol_type = other DNA
gtatctataaacctgacagc

SEQ ID NO: 115084 - DNA, 20 bp, synthetic construct
  source 1..20: mol_type = other DNA
cgtatctataaacctgacag

SEQ ID NO: 115085 - DNA, 20 bp, synthetic construct
  source 1..20: mol_type = other DNA
acgtatctataaacctgaca

SEQ ID NO: 115086 - DNA, 20 bp, synthetic construct
  source 1..20: mol_type = other DNA
gacgtatctataaacctgac

SEQ ID NO: 115087 - DNA, 20 bp, synthetic construct
  source 1..20: mol_type = other DNA
ggacgtatctataaacctga

SEQ ID NO: 115088 - DNA, 20 bp, synthetic construct
  source 1..20: mol_type = other DNA
aggacgtatctataaacctg

SEQ ID NO: 115089 - DNA, 20 bp, synthetic construct
  source 1..20: mol_type = other DNA
gaggacgtatctataaacct

SEQ ID NO: 115090 - DNA, 20 bp, synthetic construct
  source 1..20: mol_type = other DNA
agaggacgtatctataaacc

SEQ ID NO: 115091 - DNA, 20 bp, synthetic construct
  source 1..20: mol_type = other DNA
cagaggacgtatctataaac

SEQ ID NO: 115092 - DNA, 20 bp, synthetic construct
  source 1..20: mol_type = other DNA
gcagaggacgtatctataaa

SEQ ID NO: 115093 - DNA, 20 bp, synthetic construct
  source 1..20: mol_type = other DNA
tgcagaggacgtatctataa

SEQ ID NO: 115094 - DNA, 20 bp, synthetic construct
  source 1..20: mol_type = other DNA
gtgcagaggacgtatctata

SEQ ID NO: 115095 - DNA, 20 bp, synthetic construct
  source 1..20: mol_type = other DNA
ggtgcagaggacgtatctat

SEQ ID NO: 115096 - DNA, 20 bp, synthetic construct
  source 1..20: mol_type = other DNA
aggtgcagaggacgtatcta

SEQ ID NO: 115097 - DNA, 20 bp, synthetic construct
  source 1..20: mol_type = other DNA
caggtgcagaggacgtatct

SEQ ID NO: 115098 - DNA, 20 bp, synthetic construct
  source 1..20: mol_type = other DNA
tcaggtgcagaggacgtatc

SEQ ID NO: 115099 - DNA, 20 bp, synthetic construct
  source 1..20: mol_type = other DNA
ctcaggtgcagaggacgtat

SEQ ID NO: 115100 - DNA, 20 bp, synthetic construct
  source 1..20: mol_type = other DNA
cctcaggtgcagaggacgta

SEQ ID NO: 115101 - DNA, 20 bp, synthetic construct
  source 1..20: mol_type = other DNA
ccctcaggtgcagaggacgt

SEQ ID NO: 115102 - DNA, 20 bp, synthetic construct
  source 1..20: mol_type = other DNA
accctcaggtgcagaggacg

SEQ ID NO: 115103 - DNA, 20 bp, synthetic construct
  source 1..20: mol_type = other DNA
aaccctcaggtgcagaggac

SEQ ID NO: 115104 - DNA, 20 bp, synthetic construct
  source 1..20: mol_type = other DNA
aaaccctcaggtgcagagga

SEQ ID NO: 115105 - DNA, 20 bp, synthetic construct
  source 1..20: mol_type = other DNA
aaaaccctcaggtgcagagg

SEQ ID NO: 115106 - DNA, 20 bp, synthetic construct
  source 1..20: mol_type = other DNA
caaaaccctcaggtgcagag

SEQ ID NO: 115107 - DNA, 20 bp, synthetic construct
  source 1..20: mol_type = other DNA
gcaaaaccctcaggtgcaga

SEQ ID NO: 115108 - DNA, 20 bp, synthetic construct
  source 1..20: mol_type = other DNA
tgcaaaaccctcaggtgcag

SEQ ID NO: 115109 - DNA, 20 bp, synthetic construct
  source 1..20: mol_type = other DNA
atgcaaaaccctcaggtgca

SEQ ID NO: 115110 - DNA, 20 bp, synthetic construct
  source 1..20: mol_type = other DNA
gatgcaaaaccctcaggtgc

SEQ ID NO: 115111 - DNA, 20 bp, synthetic construct
  source 1..20: mol_type = other DNA
tgatgcaaaaccctcaggtg

SEQ ID NO: 115112 - DNA, 20 bp, synthetic construct
  source 1..20: mol_type = other DNA
gtgatgcaaaaccctcaggt

SEQ ID NO: 115113 - DNA, 20 bp, synthetic construct
  source 1..20: mol_type = other DNA
agtgatgcaaaaccctcagg

SEQ ID NO: 115114 - DNA, 20 bp, synthetic construct
  source 1..20: mol_type = other DNA
cagtgatgcaaaaccctcag

SEQ ID NO: 115115 - DNA, 20 bp, synthetic construct
  source 1..20: mol_type = other DNA
ccagtgatgcaaaaccctca

SEQ ID NO: 115116 - DNA, 20 bp, synthetic construct
  source 1..20: mol_type = other DNA
tccagtgatgcaaaaccctc

SEQ ID NO: 115117 - DNA, 20 bp, synthetic construct
  source 1..20: mol_type = other DNA
atccagtgatgcaaaaccct

SEQ ID NO: 115118 - DNA, 20 bp, synthetic construct
  source 1..20: mol_type = other DNA
aatccagtgatgcaaaaccc

SEQ ID NO: 115119 - DNA, 20 bp, synthetic construct
  source 1..20: mol_type = other DNA
gaatccagtgatgcaaaacc

SEQ ID NO: 115120 - DNA, 20 bp, synthetic construct
  source 1..20: mol_type = other DNA
tgaatccagtgatgcaaaac

SEQ ID NO: 115121 - DNA, 20 bp, synthetic construct
  source 1..20: mol_type = other DNA
ttgaatccagtgatgcaaaa

SEQ ID NO: 115122 - DNA, 20 bp, synthetic construct
  source 1..20: mol_type = other DNA
gttgaatccagtgatgcaaa

SEQ ID NO: 115123 - DNA, 20 bp, synthetic construct
  source 1..20: mol_type = other DNA
ggttgaatccagtgatgcaa

SEQ ID NO: 115124 - DNA, 20 bp, synthetic construct
  source 1..20: mol_type = other DNA
tggttgaatccagtgatgca

SEQ ID NO: 115125 - DNA, 20 bp, synthetic construct
  source 1..20: mol_type = other DNA
ttggttgaatccagtgatgc

SEQ ID NO: 115126 - DNA, 20 bp, synthetic construct
  source 1..20: mol_type = other DNA
gttggttgaatccagtgatg

SEQ ID NO: 115127 - DNA, 20 bp, synthetic construct
  source 1..20: mol_type = other DNA
ggttggttgaatccagtgat

SEQ ID NO: 115128 - DNA, 20 bp, synthetic construct
  source 1..20: mol_type = other DNA
tggttggttgaatccagtga

SEQ ID NO: 115129 - DNA, 20 bp, synthetic construct
  source 1..20: mol_type = other DNA
atggttggttgaatccagtg

SEQ ID NO: 115130 - DNA, 20 bp, synthetic construct
  source 1..20: mol_type = other DNA
catggttggttgaatccagt

SEQ ID NO: 115131 - DNA, 20 bp, synthetic construct
  source 1..20: mol_type = other DNA
ccatggttggttgaatccag

SEQ ID NO: 115132 - DNA, 20 bp, synthetic construct
  source 1..20: mol_type = other DNA
tccatggttggttgaatcca

SEQ ID NO: 115133 - DNA, 20 bp, synthetic construct
  source 1..20: mol_type = other DNA
atccatggttggttgaatcc

SEQ ID NO: 115134 - DNA, 20 bp, synthetic construct
  source 1..20: mol_type = other DNA
gatccatggttggttgaatc

SEQ ID NO: 115135 - DNA, 20 bp, synthetic construct
  source 1..20: mol_type = other DNA
tgatccatggttggttgaat

SEQ ID NO: 115136 - DNA, 20 bp, synthetic construct
  source 1..20: mol_type = other DNA
ttgatccatggttggttgaa

SEQ ID NO: 115137 - DNA, 20 bp, synthetic construct
  source 1..20: mol_type = other DNA
tttgatccatggttggttga

SEQ ID NO: 115138 - DNA, 20 bp, synthetic construct
  source 1..20: mol_type = other DNA
ttttgatccatggttggttg

SEQ ID NO: 115139 - DNA, 20 bp, synthetic construct
  source 1..20: mol_type = other DNA
tttttgatccatggttggtt

SEQ ID NO: 115140 - DNA, 20 bp, synthetic construct
  source 1..20: mol_type = other DNA
gtttttgatccatggttggt

SEQ ID NO: 115141 - DNA, 20 bp, synthetic construct
  source 1..20: mol_type = other DNA
tgtttttgatccatggttgg

SEQ ID NO: 115142 - DNA, 20 bp, synthetic construct
  source 1..20: mol_type = other DNA
atgtttttgatccatggttg

SEQ ID NO: 115143 - DNA, 20 bp, synthetic construct
  source 1..20: mol_type = other DNA
tatgtttttgatccatggtt

SEQ ID NO: 115144 - DNA, 20 bp, synthetic construct
  source 1..20: mol_type = other DNA
ctatgtttttgatccatggt

SEQ ID NO: 115145 - DNA, 20 bp, synthetic construct
  source 1..20: mol_type = other DNA
actatgtttttgatccatgg

SEQ ID NO: 115146 - DNA, 20 bp, synthetic construct
  source 1..20: mol_type = other DNA
aactatgtttttgatccatg

SEQ ID NO: 115147 - DNA, 20 bp, synthetic construct
  source 1..20: mol_type = other DNA
taactatgtttttgatccat

SEQ ID NO: 115148 - DNA, 20 bp, synthetic construct
  source 1..20: mol_type = other DNA
ctaactatgtttttgatcca

SEQ ID NO: 115149 - DNA, 20 bp, synthetic construct
  source 1..20: mol_type = other DNA
cctaactatgtttttgatcc

SEQ ID NO: 115150 - DNA, 20 bp, synthetic construct
  source 1..20: mol_type = other DNA
tcctaactatgtttttgatc

SEQ ID NO: 115151 - DNA, 20 bp, synthetic construct
  source 1..20: mol_type = other DNA
atcctaactatgtttttgat

SEQ ID NO: 115152 - DNA, 20 bp, synthetic construct
  source 1..20: mol_type = other DNA
tatcctaactatgtttttga

SEQ ID NO: 115153 - DNA, 20 bp, synthetic construct
  source 1..20: mol_type = other DNA
ttatcctaactatgtttttg

SEQ ID NO: 115154 - DNA, 20 bp, synthetic construct
  source 1..20: mol_type = other DNA
attatcctaactatgttttt

SEQ ID NO: 115155 - DNA, 20 bp, synthetic construct
  source 1..20: mol_type = other DNA
gattatcctaactatgtttt

SEQ ID NO: 115156 - DNA, 20 bp, synthetic construct
  source 1..20: mol_type = other DNA
agattatcctaactatgttt

SEQ ID NO: 115157 - DNA, 20 bp, synthetic construct
  source 1..20: mol_type = other DNA
tagattatcctaactatgtt

SEQ ID NO: 115158 - DNA, 20 bp, synthetic construct
  source 1..20: mol_type = other DNA
atagattatcctaactatgt

SEQ ID NO: 115159 - DNA, 20 bp, synthetic construct
  source 1..20: mol_type = other DNA
tatagattatcctaactatg

SEQ ID NO: 115160 - DNA, 20 bp, synthetic construct
  source 1..20: mol_type = other DNA
gtatagattatcctaactat

SEQ ID NO: 115161 - DNA, 20 bp, synthetic construct
  source 1..20: mol_type = other DNA
agtatagattatcctaacta

SEQ ID NO: 115162 - DNA, 20 bp, synthetic construct
  source 1..20: mol_type = other DNA
cagtatagattatcctaact

SEQ ID NO: 115163 - DNA, 20 bp, synthetic construct
  source 1..20: mol_type = other DNA
tcagtatagattatcctaac

SEQ ID NO: 115164 - DNA, 20 bp, synthetic construct
  source 1..20: mol_type = other DNA
ttcagtatagattatcctaa

SEQ ID NO: 115165 - DNA, 20 bp, synthetic construct
  source 1..20: mol_type = other DNA
gttcagtatagattatccta

SEQ ID NO: 115166 - DNA, 20 bp, synthetic construct
  source 1..20: mol_type = other DNA
tgttcagtatagattatcct

SEQ ID NO: 115167 - DNA, 20 bp, synthetic construct
  source 1..20: mol_type = other DNA
gtgttcagtatagattatcc

SEQ ID NO: 115168 - DNA, 20 bp, synthetic construct
  source 1..20: mol_type = other DNA
tgtgttcagtatagattatc

SEQ ID NO: 115169 - DNA, 20 bp, synthetic construct
  source 1..20: mol_type = other DNA
atgtgttcagtatagattat

SEQ ID NO: 115170 - DNA, 20 bp, synthetic construct
  source 1..20: mol_type = other DNA
catgtgttcagtatagatta

SEQ ID NO: 115171 - DNA, 20 bp, synthetic construct
  source 1..20: mol_type = other DNA
gcatgtgttcagtatagatt

SEQ ID NO: 115172 - DNA, 20 bp, synthetic construct
  source 1..20: mol_type = other DNA
tgcatgtgttcagtatagat

SEQ ID NO: 115173 - DNA, 20 bp, synthetic construct
  source 1..20: mol_type = other DNA
ctgcatgtgttcagtataga

SEQ ID NO: 115174 - DNA, 20 bp, synthetic construct
  source 1..20: mol_type = other DNA
tctgcatgtgttcagtatag

SEQ ID NO: 115175 - DNA, 20 bp, synthetic construct
  source 1..20: mol_type = other DNA
gtctgcatgtgttcagtata

SEQ ID NO: 115176 - DNA, 20 bp, synthetic construct
  source 1..20: mol_type = other DNA
cgtctgcatgtgttcagtat

SEQ ID NO: 115177 - DNA, 20 bp, synthetic construct
  source 1..20: mol_type = other DNA
acgtctgcatgtgttcagta

SEQ ID NO: 115178 - DNA, 20 bp, synthetic construct
  source 1..20: mol_type = other DNA
aacgtctgcatgtgttcagt

SEQ ID NO: 115179 - DNA, 20 bp, synthetic construct
  source 1..20: mol_type = other DNA
aaacgtctgcatgtgttcag

SEQ ID NO: 115180 - DNA, 20 bp, synthetic construct
  source 1..20: mol_type = other DNA
gaaacgtctgcatgtgttca

SEQ ID NO: 115181 - DNA, 20 bp, synthetic construct
  source 1..20: mol_type = other DNA
ggaaacgtctgcatgtgttc

SEQ ID NO: 115182 - DNA, 20 bp, synthetic construct
  source 1..20: mol_type = other DNA
aggaaacgtctgcatgtgtt

SEQ ID NO: 115183 - DNA, 20 bp, synthetic construct
  source 1..20: mol_type = other DNA
aaggaaacgtctgcatgtgt

SEQ ID NO: 115184 - DNA, 20 bp, synthetic construct
  source 1..20: mol_type = other DNA
caaggaaacgtctgcatgtg

SEQ ID NO: 115185 - DNA, 20 bp, synthetic construct
  source 1..20: mol_type = other DNA
acaaggaaacgtctgcatgt

SEQ ID NO: 115186 - DNA, 20 bp, synthetic construct
  source 1..20: mol_type = other DNA
gacaaggaaacgtctgcatg

SEQ ID NO: 115187 - DNA, 20 bp, synthetic construct
  source 1..20: mol_type = other DNA
tgacaaggaaacgtctgcat

SEQ ID NO: 115188 - DNA, 20 bp, synthetic construct
  source 1..20: mol_type = other DNA
atgacaaggaaacgtctgca

SEQ ID NO: 115189 - DNA, 20 bp, synthetic construct
  source 1..20: mol_type = other DNA
aatgacaaggaaacgtctgc

SEQ ID NO: 115190 - DNA, 20 bp, synthetic construct
  source 1..20: mol_type = other DNA
taatgacaaggaaacgtctg

SEQ ID NO: 115191 - DNA, 20 bp, synthetic construct
  source 1..20: mol_type = other DNA
ataatgacaaggaaacgtct

SEQ ID NO: 115192 - DNA, 20 bp, synthetic construct
  source 1..20: mol_type = other DNA
aataatgacaaggaaacgtc

SEQ ID NO: 115193 - DNA, 20 bp, synthetic construct
  source 1..20: mol_type = other DNA
gaataatgacaaggaaacgt

SEQ ID NO: 115194 - DNA, 20 bp, synthetic construct
  source 1..20: mol_type = other DNA
ggaataatgacaaggaaacg

SEQ ID NO: 115195 - DNA, 20 bp, synthetic construct
  source 1..20: mol_type = other DNA
tggaataatgacaaggaaac

SEQ ID NO: 115196 - DNA, 20 bp, synthetic construct
  source 1..20: mol_type = other DNA
ttggaataatgacaaggaaa

SEQ ID NO: 115197 - DNA, 20 bp, synthetic construct
  source 1..20: mol_type = other DNA
tttggaataatgacaaggaa

SEQ ID NO: 115198 - DNA, 20 bp, synthetic construct
  source 1..20: mol_type = other DNA
ttttggaataatgacaagga

SEQ ID NO: 115199 - DNA, 20 bp, synthetic construct
  source 1..20: mol_type = other DNA
gttttggaataatgacaagg

SEQ ID NO: 115200 - DNA, 20 bp, synthetic construct
  source 1..20: mol_type = other DNA
tgttttggaataatgacaag

SEQ ID NO: 115201 - DNA, 20 bp, synthetic construct
  source 1..20: mol_type = other DNA
ttgttttggaataatgacaa

SEQ ID NO: 115202 - DNA, 20 bp, synthetic construct
  source 1..20: mol_type = other DNA
attgttttggaataatgaca

SEQ ID NO: 115203 - DNA, 20 bp, synthetic construct
  source 1..20: mol_type = other DNA
tattgttttggaataatgac

SEQ ID NO: 115204 - DNA, 20 bp, synthetic construct
  source 1..20: mol_type = other DNA
gtattgttttggaataatga

SEQ ID NO: 115205 - DNA, 20 bp, synthetic construct
  source 1..20: mol_type = other DNA
tgtattgttttggaataatg

SEQ ID NO: 115206 - DNA, 20 bp, synthetic construct
  source 1..20: mol_type = other DNA
ctgtattgttttggaataat

SEQ ID NO: 115207 - DNA, 20 bp, synthetic construct
  source 1..20: mol_type = other DNA
actgtattgttttggaataa

SEQ ID NO: 115208 - DNA, 20 bp, synthetic construct
  source 1..20: mol_type = other DNA
tactgtattgttttggaata

SEQ ID NO: 115209 - DNA, 20 bp, synthetic construct
  source 1..20: mol_type = other DNA
ttactgtattgttttggaat

SEQ ID NO: 115210 - DNA, 20 bp, synthetic construct
  source 1..20: mol_type = other DNA
tttactgtattgttttggaa

SEQ ID NO: 115211 - DNA, 20 bp, synthetic construct
  source 1..20: mol_type = other DNA
ctttactgtattgttttgga

SEQ ID NO: 115212 - DNA, 20 bp, synthetic construct
  source 1..20: mol_type = other DNA
gctttactgtattgttttgg

SEQ ID NO: 115213 - DNA, 20 bp, synthetic construct
  source 1..20: mol_type = other DNA
tgctttactgtattgttttg

SEQ ID NO: 115214 - DNA, 20 bp, synthetic construct
  source 1..20: mol_type = other DNA
atgctttactgtattgtttt

SEQ ID NO: 115215 - DNA, 20 bp, synthetic construct
  source 1..20: mol_type = other DNA
aatgctttactgtattgttt

SEQ ID NO: 115216 - DNA, 20 bp, synthetic construct
  source 1..20: mol_type = other DNA
aaatgctttactgtattgtt

SEQ ID NO: 115217 - DNA, 20 bp, synthetic construct
  source 1..20: mol_type = other DNA
taaatgctttactgtattgt

SEQ ID NO: 115218 - DNA, 20 bp, synthetic construct
  source 1..20: mol_type = other DNA
gtaaatgctttactgtattg

SEQ ID NO: 115219 - DNA, 20 bp, synthetic construct
  source 1..20: mol_type = other DNA
ggtaaatgctttactgtatt

SEQ ID NO: 115220 - DNA, 20 bp, synthetic construct
  source 1..20: mol_type = other DNA
aggtaaatgctttactgtat

SEQ ID NO: 115221 - DNA, 20 bp, synthetic construct
  source 1..20: mol_type = other DNA
aaggtaaatgctttactgta

SEQ ID NO: 115222 - DNA, 20 bp, synthetic construct
  source 1..20: mol_type = other DNA
caaggtaaatgctttactgt

SEQ ID NO: 115223 - DNA, 20 bp, synthetic construct
  source 1..20: mol_type = other DNA
acaaggtaaatgctttactg

SEQ ID NO: 115224 - DNA, 20 bp, synthetic construct
  source 1..20: mol_type = other DNA
aacaaggtaaatgctttact

SEQ ID NO: 115225 - DNA, 20 bp, synthetic construct
  source 1..20: mol_type = other DNA
aaacaaggtaaatgctttac

SEQ ID NO: 115226 - DNA, 20 bp, synthetic construct
  source 1..20: mol_type = other DNA
aaaacaaggtaaatgcttta

SEQ ID NO: 115227 - DNA, 20 bp, synthetic construct
  source 1..20: mol_type = other DNA
taaaacaaggtaaatgcttt

SEQ ID NO: 115228 - DNA, 20 bp, synthetic construct
  source 1..20: mol_type = other DNA
ctaaaacaaggtaaatgctt

SEQ ID NO: 115229 - DNA, 20 bp, synthetic construct
  source 1..20: mol_type = other DNA
cctaaaacaaggtaaatgct

SEQ ID NO: 115230 - DNA, 20 bp, synthetic construct
  source 1..20: mol_type = other DNA
acctaaaacaaggtaaatgc

SEQ ID NO: 115231 - DNA, 20 bp, synthetic construct
  source 1..20: mol_type = other DNA
tacctaaaacaaggtaaatg

SEQ ID NO: 115232 - DNA, 20 bp, synthetic construct
  source 1..20: mol_type = other DNA
atacctaaaacaaggtaaat

SEQ ID NO: 115233 - DNA, 20 bp, synthetic construct
  source 1..20: mol_type = other DNA
aatacctaaaacaaggtaaa

SEQ ID NO: 115234 - DNA, 20 bp, synthetic construct
  source 1..20: mol_type = other DNA
taatacctaaaacaaggtaa

SEQ ID NO: 115235 - DNA, 20 bp, synthetic construct
  source 1..20: mol_type = other DNA
ataatacctaaaacaaggta

SEQ ID NO: 115236 - DNA, 20 bp, synthetic construct
  source 1..20: mol_type = other DNA
tataatacctaaaacaaggt

SEQ ID NO: 115237 - DNA, 20 bp, synthetic construct
  source 1..20: mol_type = other DNA
ttataatacctaaaacaagg

SEQ ID NO: 115238 - DNA, 20 bp, synthetic construct
  source 1..20: mol_type = other DNA
tttataatacctaaaacaag

SEQ ID NO: 115239 - DNA, 20 bp, synthetic construct
  source 1..20: mol_type = other DNA
atttataatacctaaaacaa

SEQ ID NO: 115240 - DNA, 20 bp, synthetic construct
  source 1..20: mol_type = other DNA
tatttataatacctaaaaca

SEQ ID NO: 115241 - DNA, 20 bp, synthetic construct
  source 1..20: mol_type = other DNA
ttatttataatacctaaaac

SEQ ID NO: 115242 - DNA, 20 bp, synthetic construct
  source 1..20: mol_type = other DNA
attatttataatacctaaaa

SEQ ID NO: 115243 - DNA, 20 bp, synthetic construct
  source 1..20: mol_type = other DNA
gattatttataatacctaaa

SEQ ID NO: 115244 - DNA, 20 bp, synthetic construct
  source 1..20: mol_type = other DNA
agattatttataatacctaa

SEQ ID NO: 115245 - DNA, 20 bp, synthetic construct
  source 1..20: mol_type = other DNA
tagattatttataataccta

SEQ ID NO: 115246 - DNA, 20 bp, synthetic construct
  source 1..20: mol_type = other DNA
ctagattatttataatacct

SEQ ID NO: 115247 - DNA, 20 bp, synthetic construct
  source 1..20: mol_type = other DNA
tctagattatttataatacc

SEQ ID NO: 115248 - DNA, 20 bp, synthetic construct
  source 1..20: mol_type = other DNA
ctctagattatttataatac

SEQ ID NO: 115249 - DNA, 20 bp, synthetic construct
  source 1..20: mol_type = other DNA
tctctagattatttataata

SEQ ID NO: 115250 - DNA, 20 bp, synthetic construct
  source 1..20: mol_type = other DNA
atctctagattatttataat

SEQ ID NO: 115251 - DNA, 20 bp, synthetic construct
  source 1..20: mol_type = other DNA
catctctagattatttataa

SEQ ID NO: 115252 - DNA, 20 bp, synthetic construct
  source 1..20: mol_type = other DNA
tcatctctagattatttata

SEQ ID NO: 115253 - DNA, 20 bp, synthetic construct
  source 1..20: mol_type = other DNA
atcatctctagattatttat

SEQ ID NO: 115254 - DNA, 20 bp, synthetic construct
  source 1..20: mol_type = other DNA
catcatctctagattattta

SEQ ID NO: 115255 - DNA, 20 bp, synthetic construct
  source 1..20: mol_type = other DNA
acatcatctctagattattt

SEQ ID NO: 115256 - DNA, 20 bp, synthetic construct
  source 1..20: mol_type = other DNA
tacatcatctctagattatt

SEQ ID NO: 115257 - DNA, 20 bp, synthetic construct
  source 1..20: mol_type = other DNA
ttacatcatctctagattat

SEQ ID NO: 115258 - DNA, 20 bp, synthetic construct
  source 1..20: mol_type = other DNA
tttacatcatctctagatta

SEQ ID NO: 115259 - DNA, 20 bp, synthetic construct
  source 1..20: mol_type = other DNA
ctttacatcatctctagatt

SEQ ID NO: 115260 - DNA, 20 bp, synthetic construct
  source 1..20: mol_type = other DNA
actttacatcatctctagat

SEQ ID NO: 115261 - DNA, 20 bp, synthetic construct
  source 1..20: mol_type = other DNA
tactttacatcatctctaga

SEQ ID NO: 115262 - DNA, 20 bp, synthetic construct
  source 1..20: mol_type = other DNA
atactttacatcatctctag

SEQ ID NO: 115263 - DNA, 20 bp, synthetic construct
  source 1..20: mol_type = other DNA
tatactttacatcatctcta

SEQ ID NO: 115264 - DNA, 20 bp, synthetic construct
  source 1..20: mol_type = other DNA
atatactttacatcatctct

SEQ ID NO: 115265 - DNA, 20 bp, synthetic construct
  source 1..20: mol_type = other DNA
tatatactttacatcatctc

SEQ ID NO: 115266 - DNA, 20 bp, synthetic construct
  source 1..20: mol_type = other DNA
ctatatactttacatcatct

SEQ ID NO: 115267 - DNA, 20 bp, synthetic construct
  source 1..20: mol_type = other DNA
cctatatactttacatcatc

SEQ ID NO: 115268 - DNA, 20 bp, synthetic construct
  source 1..20: mol_type = other DNA
tcctatatactttacatcat

SEQ ID NO: 115269 - DNA, 20 bp, synthetic construct
  source 1..20: mol_type = other DNA
ctcctatatactttacatca

SEQ ID NO: 115270 - DNA, 20 bp, synthetic construct
  source 1..20: mol_type = other DNA
cctcctatatactttacatc

SEQ ID NO: 115271 - DNA, 20 bp, synthetic construct
  source 1..20: mol_type = other DNA
tcctcctatatactttacat

SEQ ID NO: 115272 - DNA, 20 bp, synthetic construct
  source 1..20: mol_type = other DNA
atcctcctatatactttaca

SEQ ID NO: 115273 - DNA, 20 bp, synthetic construct
  source 1..20: mol_type = other DNA
tatcctcctatatactttac

SEQ ID NO: 115274 - DNA, 20 bp, synthetic construct
  source 1..20: mol_type = other DNA
atatcctcctatatacttta

SEQ ID NO: 115275 - DNA, 20 bp, synthetic construct
  source 1..20: mol_type = other DNA
catatcctcctatatacttt

SEQ ID NO: 115276 - DNA, 20 bp, synthetic construct
  source 1..20: mol_type = other DNA
gcatatcctcctatatactt

SEQ ID NO: 115277 - DNA, 20 bp, synthetic construct
  source 1..20: mol_type = other DNA
tgcatatcctcctatatact

SEQ ID NO: 115278 - DNA, 20 bp, synthetic construct
  source 1..20: mol_type = other DNA
atgcatatcctcctatatac

SEQ ID NO: 115279 - DNA, 20 bp, synthetic construct
  source 1..20: mol_type = other DNA
tatgcatatcctcctatata

SEQ ID NO: 115280 - DNA, 20 bp, synthetic construct
  source 1..20: mol_type = other DNA
ctatgcatatcctcctatat

SEQ ID NO: 115281 - DNA, 20 bp, synthetic construct
  source 1..20: mol_type = other DNA
cctatgcatatcctcctata

SEQ ID NO: 115282 - DNA, 20 bp, synthetic construct
  source 1..20: mol_type = other DNA
acctatgcatatcctcctat

SEQ ID NO: 115283 - DNA, 20 bp, synthetic construct
  source 1..20: mol_type = other DNA
aacctatgcatatcctccta

SEQ ID NO: 115284 - DNA, 20 bp, synthetic construct
  source 1..20: mol_type = other DNA
caacctatgcatatcctcct

SEQ ID NO: 115285 - DNA, 20 bp, synthetic construct
  source 1..20: mol_type = other DNA
acaacctatgcatatcctcc

SEQ ID NO: 115286 - DNA, 20 bp, synthetic construct
  source 1..20: mol_type = other DNA
tacaacctatgcatatcctc

SEQ ID NO: 115287 - DNA, 20 bp, synthetic construct
  source 1..20: mol_type = other DNA
atacaacctatgcatatcct

SEQ ID NO: 115288 - DNA, 20 bp, synthetic construct
  source 1..20: mol_type = other DNA
catacaacctatgcatatcc

SEQ ID NO: 115289 - DNA, 20 bp, synthetic construct
  source 1..20: mol_type = other DNA
gcatacaacctatgcatatc

SEQ ID NO: 115290 - DNA, 20 bp, synthetic construct
  source 1..20: mol_type = other DNA
cgcatacaacctatgcatat

SEQ ID NO: 115291 - DNA, 20 bp, synthetic construct
  source 1..20: mol_type = other DNA
tcgcatacaacctatgcata

SEQ ID NO: 115292 - DNA, 20 bp, synthetic construct
  source 1..20: mol_type = other DNA
ttcgcatacaacctatgcat

SEQ ID NO: 115293 - DNA, 20 bp, synthetic construct
  source 1..20: mol_type = other DNA
attcgcatacaacctatgca

SEQ ID NO: 115294 - DNA, 20 bp, synthetic construct
  source 1..20: mol_type = other DNA
tattcgcatacaacctatgc

SEQ ID NO: 115295 - DNA, 20 bp, synthetic construct
  source 1..20: mol_type = other DNA
gtattcgcatacaacctatg

SEQ ID NO: 115296 - DNA, 20 bp, synthetic construct
  source 1..20: mol_type = other DNA
agtattcgcatacaacctat

SEQ ID NO: 115297 - DNA, 20 bp, synthetic construct
  source 1..20: mol_type = other DNA
tagtattcgcatacaaccta

SEQ ID NO: 115298 - DNA, 20 bp, synthetic construct
  source 1..20: mol_type = other DNA
gtagtattcgcatacaacct

SEQ ID NO: 115299 - DNA, 20 bp, synthetic construct
  source 1..20: mol_type = other DNA
tgtagtattcgcatacaacc

SEQ ID NO: 115300 - DNA, 20 bp, synthetic construct
  source 1..20: mol_type = other DNA
atgtagtattcgcatacaac

SEQ ID NO: 115301 - DNA, 20 bp, synthetic construct
  source 1..20: mol_type = other DNA
catgtagtattcgcatacaa

SEQ ID NO: 115302 - DNA, 20 bp, synthetic construct
  source 1..20: mol_type = other DNA
tcatgtagtattcgcataca

SEQ ID NO: 115303 - DNA, 20 bp, synthetic construct
  source 1..20: mol_type = other DNA
atcatgtagtattcgcatac

SEQ ID NO: 115304 - DNA, 20 bp, synthetic construct
  source 1..20: mol_type = other DNA
aatcatgtagtattcgcata

SEQ ID NO: 115305 - DNA, 20 bp, synthetic construct
  source 1..20: mol_type = other DNA
aaatcatgtagtattcgcat

SEQ ID NO: 115306 - DNA, 20 bp, synthetic construct
  source 1..20: mol_type = other DNA
aaaatcatgtagtattcgca

SEQ ID NO: 115307 - DNA, 20 bp, synthetic construct
  source 1..20: mol_type = other DNA
taaaatcatgtagtattcgc

SEQ ID NO: 115308 - DNA, 20 bp, synthetic construct
  source 1..20: mol_type = other DNA
ataaaatcatgtagtattcg

SEQ ID NO: 115309 - DNA, 20 bp, synthetic construct
  source 1..20: mol_type = other DNA
cataaaatcatgtagtattc

SEQ ID NO: 115310 - DNA, 20 bp, synthetic construct
  source 1..20: mol_type = other DNA
acataaaatcatgtagtatt

SEQ ID NO: 115311 - DNA, 20 bp, synthetic construct
  source 1..20: mol_type = other DNA
tacataaaatcatgtagtat

SEQ ID NO: 115312 - DNA, 20 bp, synthetic construct
  source 1..20: mol_type = other DNA
ttacataaaatcatgtagta

SEQ ID NO: 115313 - DNA, 20 bp, synthetic construct
  source 1..20: mol_type = other DNA
cttacataaaatcatgtagt

SEQ ID NO: 115314 - DNA, 20 bp, synthetic construct
  source 1..20: mol_type = other DNA
ccttacataaaatcatgtag

SEQ ID NO: 115315 - DNA, 20 bp, synthetic construct
  source 1..20: mol_type = other DNA
cccttacataaaatcatgta

SEQ ID NO: 115316 - DNA, 20 bp, synthetic construct
  source 1..20: mol_type = other DNA
tcccttacataaaatcatgt

SEQ ID NO: 115317 - DNA, 20 bp, synthetic construct
  source 1..20: mol_type = other DNA
gtcccttacataaaatcatg

SEQ ID NO: 115318 - DNA, 20 bp, synthetic construct
  source 1..20: mol_type = other DNA
agtcccttacataaaatcat

SEQ ID NO: 115319 - DNA, 20 bp, synthetic construct
  source 1..20: mol_type = other DNA
aagtcccttacataaaatca

SEQ ID NO: 115320 - DNA, 20 bp, synthetic construct
  source 1..20: mol_type = other DNA
caagtcccttacataaaatc

SEQ ID NO: 115321 - DNA, 20 bp, synthetic construct
  source 1..20: mol_type = other DNA
tcaagtcccttacataaaat

SEQ ID NO: 115322 - DNA, 20 bp, synthetic construct
  source 1..20: mol_type = other DNA
ctcaagtcccttacataaaa

SEQ ID NO: 115323 - DNA, 20 bp, synthetic construct
  source 1..20: mol_type = other DNA
gctcaagtcccttacataaa

SEQ ID NO: 115324 - DNA, 20 bp, synthetic construct
  source 1..20: mol_type = other DNA
tgctcaagtcccttacataa

SEQ ID NO: 115325 - DNA, 20 bp, synthetic construct
  source 1..20: mol_type = other DNA
atgctcaagtcccttacata

SEQ ID NO: 115326 - DNA, 20 bp, synthetic construct
  source 1..20: mol_type = other DNA
aatgctcaagtcccttacat

SEQ ID NO: 115327 - DNA, 20 bp, synthetic construct
  source 1..20: mol_type = other DNA
gaatgctcaagtcccttaca

SEQ ID NO: 115328 - DNA, 20 bp, synthetic construct
  source 1..20: mol_type = other DNA
ggaatgctcaagtcccttac

SEQ ID NO: 115329 - DNA, 20 bp, synthetic construct
  source 1..20: mol_type = other DNA
tggaatgctcaagtccctta

SEQ ID NO: 115330 - DNA, 20 bp, synthetic construct
  source 1..20: mol_type = other DNA
ttggaatgctcaagtccctt

SEQ ID NO: 115331 - DNA, 20 bp, synthetic construct
  source 1..20: mol_type = other DNA
cttggaatgctcaagtccct

SEQ ID NO: 115332 - DNA, 20 bp, synthetic construct
  source 1..20: mol_type = other DNA
tcttggaatgctcaagtccc

SEQ ID NO: 115333 - DNA, 20 bp, synthetic construct
  source 1..20: mol_type = other DNA
gtcttggaatgctcaagtcc

SEQ ID NO: 115334 - DNA, 20 bp, synthetic construct
  source 1..20: mol_type = other DNA
agtcttggaatgctcaagtc

SEQ ID NO: 115335 - DNA, 20 bp, synthetic construct
  source 1..20: mol_type = other DNA
aagtcttggaatgctcaagt

SEQ ID NO: 115336 - DNA, 20 bp, synthetic construct
  source 1..20: mol_type = other DNA
aaagtcttggaatgctcaag

SEQ ID NO: 115337 - DNA, 20 bp, synthetic construct
  source 1..20: mol_type = other DNA
caaagtcttggaatgctcaa

SEQ ID NO: 115338 - DNA, 20 bp, synthetic construct
  source 1..20: mol_type = other DNA
ccaaagtcttggaatgctca

SEQ ID NO: 115339 - DNA, 20 bp, synthetic construct
  source 1..20: mol_type = other DNA
accaaagtcttggaatgctc

SEQ ID NO: 115340 - DNA, 20 bp, synthetic construct
  source 1..20: mol_type = other DNA
taccaaagtcttggaatgct

SEQ ID NO: 115341 - DNA, 20 bp, synthetic construct
  source 1..20: mol_type = other DNA
ataccaaagtcttggaatgc

SEQ ID NO: 115342 - DNA, 20 bp, synthetic construct
  source 1..20: mol_type = other DNA
gataccaaagtcttggaatg

SEQ ID NO: 115343 - DNA, 20 bp, synthetic construct
  source 1..20: mol_type = other DNA
agataccaaagtcttggaat

SEQ ID NO: 115344 - DNA, 20 bp, synthetic construct
  source 1..20: mol_type = other DNA
aagataccaaagtcttggaa

SEQ ID NO: 115345 - DNA, 20 bp, synthetic construct
  source 1..20: mol_type = other DNA
gaagataccaaagtcttgga

SEQ ID NO: 115346 - DNA, 20 bp, synthetic construct
  source 1..20: mol_type = other DNA
tgaagataccaaagtcttgg

SEQ ID NO: 115347 - DNA, 20 bp, synthetic construct
  source 1..20: mol_type = other DNA
gtgaagataccaaagtcttg

SEQ ID NO: 115348 - DNA, 20 bp, synthetic construct
  source 1..20: mol_type = other DNA
tgtgaagataccaaagtctt

SEQ ID NO: 115349 - DNA, 20 bp, synthetic construct
  source 1..20: mol_type = other DNA
ctgtgaagataccaaagtct

SEQ ID NO: 115350 - DNA, 20 bp, synthetic construct
  source 1..20: mol_type = other DNA
cctgtgaagataccaaagtc

SEQ ID NO: 115351 - DNA, 20 bp, synthetic construct
  source 1..20: mol_type = other DNA
ccctgtgaagataccaaagt

SEQ ID NO: 115352 - DNA, 20 bp, synthetic construct
  source 1..20: mol_type = other DNA
accctgtgaagataccaaag

SEQ ID NO: 115353 - DNA, 20 bp, synthetic construct
  source 1..20: mol_type = other DNA
taccctgtgaagataccaaa

SEQ ID NO: 115354 - DNA, 20 bp, synthetic construct
  source 1..20: mol_type = other DNA
gtaccctgtgaagataccaa

SEQ ID NO: 115355 - DNA, 20 bp, synthetic construct
  source 1..20: mol_type = other DNA
agtaccctgtgaagatacca

SEQ ID NO: 115356 - DNA, 20 bp, synthetic construct
  source 1..20: mol_type = other DNA
cagtaccctgtgaagatacc

SEQ ID NO: 115357 - DNA, 20 bp, synthetic construct
  source 1..20: mol_type = other DNA
acagtaccctgtgaagatac

SEQ ID NO: 115358 - DNA, 20 bp, synthetic construct
  source 1..20: mol_type = other DNA
tacagtaccctgtgaagata

SEQ ID NO: 115359 - DNA, 20 bp, synthetic construct
  source 1..20: mol_type = other DNA
ttacagtaccctgtgaagat

SEQ ID NO: 115360 - DNA, 20 bp, synthetic construct
  source 1..20: mol_type = other DNA
gttacagtaccctgtgaaga

SEQ ID NO: 115361 - DNA, 20 bp, synthetic construct
  source 1..20: mol_type = other DNA
ggttacagtaccctgtgaag

SEQ ID NO: 115362 - DNA, 20 bp, synthetic construct
  source 1..20: mol_type = other DNA
tggttacagtaccctgtgaa

SEQ ID NO: 115363 - DNA, 20 bp, synthetic construct
  source 1..20: mol_type = other DNA
ttggttacagtaccctgtga

SEQ ID NO: 115364 - DNA, 20 bp, synthetic construct
  source 1..20: mol_type = other DNA
attggttacagtaccctgtg

SEQ ID NO: 115365 - DNA, 20 bp, synthetic construct
  source 1..20: mol_type = other DNA
gattggttacagtaccctgt

SEQ ID NO: 115366 - DNA, 20 bp, synthetic construct
  source 1..20: mol_type = other DNA
ggattggttacagtaccctg

SEQ ID NO: 115367 - DNA, 20 bp, synthetic construct
  source 1..20: mol_type = other DNA
gggattggttacagtaccct

SEQ ID NO: 115368 - DNA, 20 bp, synthetic construct
  source 1..20: mol_type = other DNA
ggggattggttacagtaccc

SEQ ID NO: 115369 - DNA, 20 bp, synthetic construct
  source 1..20: mol_type = other DNA
gggggattggttacagtacc

SEQ ID NO: 115370 - DNA, 20 bp, synthetic construct
  source 1..20: mol_type = other DNA
tgggggattggttacagtac

SEQ ID NO: 115371 - DNA, 20 bp, synthetic construct
  source 1..20: mol_type = other DNA
gtgggggattggttacagta

SEQ ID NO: 115372 - DNA, 20 bp, synthetic construct
  source 1..20: mol_type = other DNA
tgtgggggattggttacagt

SEQ ID NO: 115373 - DNA, 20 bp, synthetic construct
  source 1..20: mol_type = other DNA
ctgtgggggattggttacag

SEQ ID NO: 115374 - DNA, 20 bp, synthetic construct
  source 1..20: mol_type = other DNA
tctgtgggggattggttaca

SEQ ID NO: 115375 - DNA, 20 bp, synthetic construct
  source 1..20: mol_type = other DNA
atctgtgggggattggttac

SEQ ID NO: 115376 - DNA, 20 bp, synthetic construct
  source 1..20: mol_type = other DNA
tatctgtgggggattggtta

SEQ ID NO: 115377 - DNA, 20 bp, synthetic construct
  source 1..20: mol_type = other DNA
gtatctgtgggggattggtt

SEQ ID NO: 115378 - DNA, 20 bp, synthetic construct
  source 1..20: mol_type = other DNA
agtatctgtgggggattggt

SEQ ID NO: 115379 - DNA, 20 bp, synthetic construct
  source 1..20: mol_type = other DNA
tagtatctgtgggggattgg

SEQ ID NO: 115380 - DNA, 20 bp, synthetic construct
  source 1..20: mol_type = other DNA
ttagtatctgtgggggattg

SEQ ID NO: 115381 - DNA, 20 bp, synthetic construct
  source 1..20: mol_type = other DNA
cttagtatctgtgggggatt

SEQ ID NO: 115382 - DNA, 20 bp, synthetic construct
  source 1..20: mol_type = other DNA
tcttagtatctgtgggggat

SEQ ID NO: 115383 - DNA, 20 bp, synthetic construct
  source 1..20: mol_type = other DNA
ctcttagtatctgtggggga

SEQ ID NO: 115384 - DNA, 20 bp, synthetic construct
  source 1..20: mol_type = other DNA
tctcttagtatctgtggggg

SEQ ID NO: 115385 - DNA, 20 bp, synthetic construct
  source 1..20: mol_type = other DNA
atctcttagtatctgtgggg

SEQ ID NO: 115386 - DNA, 20 bp, synthetic construct
  source 1..20: mol_type = other DNA
catctcttagtatctgtggg

SEQ ID NO: 115387 - DNA, 20 bp, synthetic construct
  source 1..20: mol_type = other DNA
tcatctcttagtatctgtgg

SEQ ID NO: 115388 - DNA, 20 bp, synthetic construct
  source 1..20: mol_type = other DNA
gtcatctcttagtatctgtg

SEQ ID NO: 115389 - DNA, 20 bp, synthetic construct
  source 1..20: mol_type = other DNA
agtcatctcttagtatctgt

SEQ ID NO: 115390 - DNA, 20 bp, synthetic construct
  source 1..20: mol_type = other DNA
cagtcatctcttagtatctg

SEQ ID NO: 115391 - DNA, 20 bp, synthetic construct
  source 1..20: mol_type = other DNA
acagtcatctcttagtatct

SEQ ID NO: 115392 - DNA, 20 bp, synthetic construct
  source 1..20: mol_type = other DNA
tacagtcatctcttagtatc

SEQ ID NO: 115393 - DNA, 20 bp, synthetic construct
  source 1..20: mol_type = other DNA
gtacagtcatctcttagtat

SEQ ID NO: 115394 - DNA, 20 bp, synthetic construct
  source 1..20: mol_type = other DNA
agtacagtcatctcttagta

SEQ ID NO: 115395 - DNA, 20 bp, synthetic construct
  source 1..20: mol_type = other DNA
tagtacagtcatctcttagt

SEQ ID NO: 115396 - DNA, 20 bp, synthetic construct
  source 1..20: mol_type = other DNA
atagtacagtcatctcttag

SEQ ID NO: 115397 - DNA, 20 bp, synthetic construct
  source 1..20: mol_type = other DNA
aatagtacagtcatctctta

SEQ ID NO: 115398 - DNA, 20 bp, synthetic construct
  source 1..20: mol_type = other DNA
caatagtacagtcatctctt

SEQ ID NO: 115399 - DNA, 20 bp, synthetic construct
  source 1..20: mol_type = other DNA
acaatagtacagtcatctct

SEQ ID NO: 115400 - DNA, 20 bp, synthetic construct
  source 1..20: mol_type = other DNA
aacaatagtacagtcatctc

SEQ ID NO: 115401 - DNA, 20 bp, synthetic construct
  source 1..20: mol_type = other DNA
taacaatagtacagtcatct

SEQ ID NO: 115402 - DNA, 20 bp, synthetic construct
  source 1..20: mol_type = other DNA
ataacaatagtacagtcatc

SEQ ID NO: 115403 - DNA, 20 bp, synthetic construct
  source 1..20: mol_type = other DNA
aataacaatagtacagtcat

SEQ ID NO: 115404 - DNA, 20 bp, synthetic construct
  source 1..20: mol_type = other DNA
taataacaatagtacagtca

SEQ ID NO: 115405 - DNA, 20 bp, synthetic construct
  source 1..20: mol_type = other DNA
ataataacaatagtacagtc

SEQ ID NO: 115406 - DNA, 20 bp, synthetic construct
  source 1..20: mol_type = other DNA
aataataacaatagtacagt

SEQ ID NO: 115407 - DNA, 20 bp, synthetic construct
  source 1..20: mol_type = other DNA
gaataataacaatagtacag

SEQ ID NO: 115408 - DNA, 20 bp, synthetic construct
  source 1..20: mol_type = other DNA
cgaataataacaatagtaca

SEQ ID NO: 115409 - DNA, 20 bp, synthetic construct
  source 1..20: mol_type = other DNA
tcgaataataacaatagtac

SEQ ID NO: 115410 - DNA, 20 bp, synthetic construct
  source 1..20: mol_type = other DNA
gtcgaataataacaatagta

SEQ ID NO: 115411 - DNA, 20 bp, synthetic construct
  source 1..20: mol_type = other DNA
agtcgaataataacaatagt

SEQ ID NO: 115412 - DNA, 20 bp, synthetic construct
  source 1..20: mol_type = other DNA
cagtcgaataataacaatag

SEQ ID NO: 115413 - DNA, 20 bp, synthetic construct
  source 1..20: mol_type = other DNA
tcagtcgaataataacaata

SEQ ID NO: 115414 - DNA, 20 bp, synthetic construct
  source 1..20: mol_type = other DNA
ctcagtcgaataataacaat

SEQ ID NO: 115415 - DNA, 20 bp, synthetic construct
  source 1..20: mol_type = other DNA
tctcagtcgaataataacaa

SEQ ID NO: 115416 - DNA, 20 bp, synthetic construct
  source 1..20: mol_type = other DNA
atctcagtcgaataataaca

SEQ ID NO: 115417 - DNA, 20 bp, synthetic construct
  source 1..20: mol_type = other DNA
gatctcagtcgaataataac

SEQ ID NO: 115418 - DNA, 20 bp, synthetic construct
  source 1..20: mol_type = other DNA
tgatctcagtcgaataataa

SEQ ID NO: 115419 - DNA, 20 bp, synthetic construct
  source 1..20: mol_type = other DNA
atgatctcagtcgaataata

SEQ ID NO: 115420 - DNA, 20 bp, synthetic construct
  source 1..20: mol_type = other DNA
tatgatctcagtcgaataat

SEQ ID NO: 115421 - DNA, 20 bp, synthetic construct
  source 1..20: mol_type = other DNA
ttatgatctcagtcgaataa

SEQ ID NO: 115422 - DNA, 20 bp, synthetic construct
  source 1..20: mol_type = other DNA
cttatgatctcagtcgaata

SEQ ID NO: 115423 - DNA, 20 bp, synthetic construct
  source 1..20: mol_type = other DNA
tcttatgatctcagtcgaat

SEQ ID NO: 115424 - DNA, 20 bp, synthetic construct
  source 1..20: mol_type = other DNA
ttcttatgatctcagtcgaa

SEQ ID NO: 115425 - DNA, 20 bp, synthetic construct
  source 1..20: mol_type = other DNA
cttcttatgatctcagtcga

SEQ ID NO: 115426 - DNA, 20 bp, synthetic construct
  source 1..20: mol_type = other DNA
tcttcttatgatctcagtcg

SEQ ID NO: 115427 - DNA, 20 bp, synthetic construct
  source 1..20: mol_type = other DNA
atcttcttatgatctcagtc

SEQ ID NO: 115428 - DNA, 20 bp, synthetic construct
  source 1..20: mol_type = other DNA
tatcttcttatgatctcagt

SEQ ID NO: 115429 - DNA, 20 bp, synthetic construct
  source 1..20: mol_type = other DNA
atatcttcttatgatctcag

SEQ ID NO: 115430 - DNA, 20 bp, synthetic construct
  source 1..20: mol_type = other DNA
tatatcttcttatgatctca

SEQ ID NO: 115431 - DNA, 20 bp, synthetic construct
  source 1..20: mol_type = other DNA
atatatcttcttatgatctc

SEQ ID NO: 115432 - DNA, 20 bp, synthetic construct
  source 1..20: mol_type = other DNA
aatatatcttcttatgatct

SEQ ID NO: 115433 - DNA, 20 bp, synthetic construct
  source 1..20: mol_type = other DNA
aaatatatcttcttatgatc

SEQ ID NO: 115434 - DNA, 20 bp, synthetic construct
  source 1..20: mol_type = other DNA
taaatatatcttcttatgat

SEQ ID NO: 115435 - DNA, 20 bp, synthetic construct
  source 1..20: mol_type = other DNA
ataaatatatcttcttatga

SEQ ID NO: 115436 - DNA, 20 bp, synthetic construct
  source 1..20: mol_type = other DNA
aataaatatatcttcttatg

SEQ ID NO: 115437 - DNA, 20 bp, synthetic construct
  source 1..20: mol_type = other DNA
aaataaatatatcttcttat

SEQ ID NO: 115438 - DNA, 20 bp, synthetic construct
  source 1..20: mol_type = other DNA
aaaataaatatatcttctta

SEQ ID NO: 115439 - DNA, 20 bp, synthetic construct
  source 1..20: mol_type = other DNA
aaaaataaatatatcttctt

SEQ ID NO: 115440 - DNA, 20 bp, synthetic construct
  source 1..20: mol_type = other DNA
taaaaataaatatatcttct

SEQ ID NO: 115441 - DNA, 20 bp, synthetic construct
  source 1..20: mol_type = other DNA
ttaaaaataaatatatcttc

SEQ ID NO: 115442 - DNA, 20 bp, synthetic construct
  source 1..20: mol_type = other DNA
attaaaaataaatatatctt

SEQ ID NO: 115443 - DNA, 20 bp, synthetic construct
  source 1..20: mol_type = other DNA
aattaaaaataaatatatct

SEQ ID NO: 115444 - DNA, 20 bp, synthetic construct
  source 1..20: mol_type = other DNA
aaattaaaaataaatatatc

SEQ ID NO: 115445 - DNA, 20 bp, synthetic construct
  source 1..20: mol_type = other DNA
aaaattaaaaataaatatat

SEQ ID NO: 115446 - DNA, 20 bp, synthetic construct
  source 1..20: mol_type = other DNA
aaaaattaaaaataaatata

SEQ ID NO: 115447 - DNA, 20 bp, synthetic construct
  source 1..20: mol_type = other DNA
taaaaattaaaaataaatat

SEQ ID NO: 115448 - DNA, 20 bp, synthetic construct
  source 1..20: mol_type = other DNA
ttaaaaattaaaaataaata

SEQ ID NO: 115449 - DNA, 20 bp, synthetic construct
  source 1..20: mol_type = other DNA
tttaaaaattaaaaataaat

SEQ ID NO: 115450 - DNA, 20 bp, synthetic construct
  source 1..20: mol_type = other DNA
ttttaaaaattaaaaataaa

SEQ ID NO: 115451 - DNA, 20 bp, synthetic construct
  source 1..20: mol_type = other DNA
tttttaaaaattaaaaataa

SEQ ID NO: 115452 - DNA, 20 bp, synthetic construct
  source 1..20: mol_type = other DNA
gtttttaaaaattaaaaata

SEQ ID NO: 115453 - DNA, 20 bp, synthetic construct
  source 1..20: mol_type = other DNA
tgtttttaaaaattaaaaat

SEQ ID NO: 115454 - DNA, 20 bp, synthetic construct
  source 1..20: mol_type = other DNA
gtgtttttaaaaattaaaaa

SEQ ID NO: 115455 - DNA, 20 bp, synthetic construct
  source 1..20: mol_type = other DNA
agtgtttttaaaaattaaaa

SEQ ID NO: 115456 - DNA, 20 bp, synthetic construct
  source 1..20: mol_type = other DNA
aagtgtttttaaaaattaaa

SEQ ID NO: 115457 - DNA, 20 bp, synthetic construct
  source 1..20: mol_type = other DNA
gaagtgtttttaaaaattaa

SEQ ID NO: 115458 - DNA, 20 bp, synthetic construct
  source 1..20: mol_type = other DNA
ggaagtgtttttaaaaatta

SEQ ID NO: 115459 - DNA, 20 bp, synthetic construct
  source 1..20: mol_type = other DNA
tggaagtgtttttaaaaatt

SEQ ID NO: 115460 - DNA, 20 bp, synthetic construct
  source 1..20: mol_type = other DNA
atggaagtgtttttaaaaat

SEQ ID NO: 115461 - DNA, 20 bp, synthetic construct
  source 1..20: mol_type = other DNA
gatggaagtgtttttaaaaa

SEQ ID NO: 115462 - DNA, 20 bp, synthetic construct
  source 1..20: mol_type = other DNA
tgatggaagtgtttttaaaa

SEQ ID NO: 115463 - DNA, 20 bp, synthetic construct
  source 1..20: mol_type = other DNA
ctgatggaagtgtttttaaa

SEQ ID NO: 115464 - DNA, 20 bp, synthetic construct
  source 1..20: mol_type = other DNA
actgatggaagtgtttttaa

SEQ ID NO: 115465 - DNA, 20 bp, synthetic construct
  source 1..20: mol_type = other DNA
aactgatggaagtgttttta

SEQ ID NO: 115466 - DNA, 20 bp, synthetic construct
  source 1..20: mol_type = other DNA
aaactgatggaagtgttttt

SEQ ID NO: 115467 - DNA, 20 bp, synthetic construct
  source 1..20: mol_type = other DNA
gaaactgatggaagtgtttt

SEQ ID NO: 115468 - DNA, 20 bp, synthetic construct
  source 1..20: mol_type = other DNA
agaaactgatggaagtgttt

SEQ ID NO: 115469 - DNA, 20 bp, synthetic construct
  source 1..20: mol_type = other DNA
aagaaactgatggaagtgtt

SEQ ID NO: 115470 - DNA, 20 bp, synthetic construct
  source 1..20: mol_type = other DNA
taagaaactgatggaagtgt

SEQ ID NO: 115471 - DNA, 20 bp, synthetic construct
  source 1..20: mol_type = other DNA
ttaagaaactgatggaagtg

SEQ ID NO: 115472 - DNA, 20 bp, synthetic construct
  source 1..20: mol_type = other DNA
tttaagaaactgatggaagt

SEQ ID NO: 115473 - DNA, 20 bp, synthetic construct
  source 1..20: mol_type = other DNA
ttttaagaaactgatggaag

SEQ ID NO: 115474 - DNA, 20 bp, synthetic construct
  source 1..20: mol_type = other DNA
tttttaagaaactgatggaa

SEQ ID NO: 115475 - DNA, 20 bp, synthetic construct
  source 1..20: mol_type = other DNA
atttttaagaaactgatgga

SEQ ID NO: 115476 - DNA, 20 bp, synthetic construct
  source 1..20: mol_type = other DNA
tatttttaagaaactgatgg

SEQ ID NO: 115477 - DNA, 20 bp, synthetic construct
  source 1..20: mol_type = other DNA
ctatttttaagaaactgatg

SEQ ID NO: 115478 - DNA, 20 bp, synthetic construct
  source 1..20: mol_type = other DNA
gctatttttaagaaactgat

SEQ ID NO: 115479 - DNA, 20 bp, synthetic construct
  source 1..20: mol_type = other DNA
agctatttttaagaaactga

SEQ ID NO: 115480 - DNA, 20 bp, synthetic construct
  source 1..20: mol_type = other DNA
cagctatttttaagaaactg

SEQ ID NO: 115481 - DNA, 20 bp, synthetic construct
  source 1..20: mol_type = other DNA
gcagctatttttaagaaact

SEQ ID NO: 115482 - DNA, 20 bp, synthetic construct
  source 1..20: mol_type = other DNA
ggcagctatttttaagaaac

SEQ ID NO: 115483 - DNA, 20 bp, synthetic construct
  source 1..20: mol_type = other DNA
tggcagctatttttaagaaa

SEQ ID NO: 115484 - DNA, 20 bp, synthetic construct
  source 1..20: mol_type = other DNA
gtggcagctatttttaagaa

SEQ ID NO: 115485 - DNA, 20 bp, synthetic construct
  source 1..20: mol_type = other DNA
agtggcagctatttttaaga

SEQ ID NO: 115486 - DNA, 20 bp, synthetic construct
  source 1..20: mol_type = other DNA
cagtggcagctatttttaag

SEQ ID NO: 115487 - DNA, 20 bp, synthetic construct
  source 1..20: mol_type = other DNA
acagtggcagctatttttaa

SEQ ID NO: 115488 - DNA, 20 bp, synthetic construct
  source 1..20: mol_type = other DNA
aacagtggcagctattttta

SEQ ID NO: 115489 - DNA, 20 bp, synthetic construct
  source 1..20: mol_type = other DNA
aaacagtggcagctattttt

SEQ ID NO: 115490 - DNA, 20 bp, synthetic construct
  source 1..20: mol_type = other DNA
aaaacagtggcagctatttt

SEQ ID NO: 115491 - DNA, 20 bp, synthetic construct
  source 1..20: mol_type = other DNA
aaaaacagtggcagctattt

SEQ ID NO: 115492 - DNA, 20 bp, synthetic construct
  source 1..20: mol_type = other DNA
taaaaacagtggcagctatt

SEQ ID NO: 115493 - DNA, 20 bp, synthetic construct
  source 1..20: mol_type = other DNA
ttaaaaacagtggcagctat

SEQ ID NO: 115494 - DNA, 20 bp, synthetic construct
  source 1..20: mol_type = other DNA
attaaaaacagtggcagcta

SEQ ID NO: 115495 - DNA, 20 bp, synthetic construct
  source 1..20: mol_type = other DNA
tattaaaaacagtggcagct

SEQ ID NO: 115496 - DNA, 20 bp, synthetic construct
  source 1..20: mol_type = other DNA
atattaaaaacagtggcagc

SEQ ID NO: 115497 - DNA, 20 bp, synthetic construct
  source 1..20: mol_type = other DNA
aatattaaaaacagtggcag

SEQ ID NO: 115498 - DNA, 20 bp, synthetic construct
  source 1..20: mol_type = other DNA
aaatattaaaaacagtggca

SEQ ID NO: 115499 - DNA, 20 bp, synthetic construct
  source 1..20: mol_type = other DNA
aaaatattaaaaacagtggc

SEQ ID NO: 115500 - DNA, 20 bp, synthetic construct
  source 1..20: mol_type = other DNA
aaaaatattaaaaacagtgg

SEQ ID NO: 115501 - DNA, 20 bp, synthetic construct
  source 1..20: mol_type = other DNA
aaaaaatattaaaaacagtg

SEQ ID NO: 115502 - DNA, 20 bp, synthetic construct
  source 1..20: mol_type = other DNA
taaaaaatattaaaaacagt

SEQ ID NO: 115503 - DNA, 20 bp, synthetic construct
  source 1..20: mol_type = other DNA
ttaaaaaatattaaaaacag

SEQ ID NO: 115504 - DNA, 20 bp, synthetic construct
  source 1..20: mol_type = other DNA
attaaaaaatattaaaaaca

SEQ ID NO: 115505 - DNA, 20 bp, synthetic construct
  source 1..20: mol_type = other DNA
aattaaaaaatattaaaaac

SEQ ID NO: 115506 - DNA, 20 bp, synthetic construct
  source 1..20: mol_type = other DNA
caattaaaaaatattaaaaa

SEQ ID NO: 115507 - DNA, 20 bp, synthetic construct
  source 1..20: mol_type = other DNA
tcaattaaaaaatattaaaa

SEQ ID NO: 115508 - DNA, 20 bp, synthetic construct
  source 1..20: mol_type = other DNA
gtcaattaaaaaatattaaa

SEQ ID NO: 115509 - DNA, 20 bp, synthetic construct
  source 1..20: mol_type = other DNA
tgtcaattaaaaaatattaa

SEQ ID NO: 115510 - DNA, 20 bp, synthetic construct
  source 1..20: mol_type = other DNA
ttgtcaattaaaaaatatta

SEQ ID NO: 115511 - DNA, 20 bp, synthetic construct
  source 1..20: mol_type = other DNA
tttgtcaattaaaaaatatt

SEQ ID NO: 115512 - DNA, 20 bp, synthetic construct
  source 1..20: mol_type = other DNA
ctttgtcaattaaaaaatat

SEQ ID NO: 115513 - DNA, 20 bp, synthetic construct
  source 1..20: mol_type = other DNA
actttgtcaattaaaaaata

SEQ ID NO: 115514 - DNA, 20 bp, synthetic construct
  source 1..20: mol_type = other DNA
aactttgtcaattaaaaaat

SEQ ID NO: 115515 - DNA, 20 bp, synthetic construct
  source 1..20: mol_type = other DNA
aaactttgtcaattaaaaaa

SEQ ID NO: 115516 - DNA, 20 bp, synthetic construct
  source 1..20: mol_type = other DNA
aaaactttgtcaattaaaaa

SEQ ID NO: 115517 - DNA, 20 bp, synthetic construct
  source 1..20: mol_type = other DNA
taaaactttgtcaattaaaa

SEQ ID NO: 115518 - DNA, 20 bp, synthetic construct
  source 1..20: mol_type = other DNA
ttaaaactttgtcaattaaa

SEQ ID NO: 115519 - DNA, 20 bp, synthetic construct
  source 1..20: mol_type = other DNA
cttaaaactttgtcaattaa

SEQ ID NO: 115520 - DNA, 20 bp, synthetic construct
  source 1..20: mol_type = other DNA
acttaaaactttgtcaatta

SEQ ID NO: 115521 - DNA, 20 bp, synthetic construct
  source 1..20: mol_type = other DNA
aacttaaaactttgtcaatt

SEQ ID NO: 115522 - DNA, 20 bp, synthetic construct
  source 1..20: mol_type = other DNA
gaacttaaaactttgtcaat

SEQ ID NO: 115523 - DNA, 20 bp, synthetic construct
  source 1..20: mol_type = other DNA
ggaacttaaaactttgtcaa

SEQ ID NO: 115524 - DNA, 20 bp, synthetic construct
  source 1..20: mol_type = other DNA
aggaacttaaaactttgtca

SEQ ID NO: 115525 - DNA, 20 bp, synthetic construct
  source 1..20: mol_type = other DNA
taggaacttaaaactttgtc

SEQ ID NO: 115526 - DNA, 20 bp, synthetic construct
  source 1..20: mol_type = other DNA
gtaggaacttaaaactttgt

SEQ ID NO: 115527 - DNA, 20 bp, synthetic construct
  source 1..20: mol_type = other DNA
agtaggaacttaaaactttg

SEQ ID NO: 115528 - DNA, 20 bp, synthetic construct
  source 1..20: mol_type = other DNA
cagtaggaacttaaaacttt

SEQ ID NO: 115529 - DNA, 20 bp, synthetic construct
  source 1..20: mol_type = other DNA
tcagtaggaacttaaaactt

SEQ ID NO: 115530 - DNA, 20 bp, synthetic construct
  source 1..20: mol_type = other DNA
ttcagtaggaacttaaaact

SEQ ID NO: 115531 - DNA, 20 bp, synthetic construct
  source 1..20: mol_type = other DNA
tttcagtaggaacttaaaac

SEQ ID NO: 115532 - DNA, 20 bp, synthetic construct
  source 1..20: mol_type = other DNA
gtttcagtaggaacttaaaa

SEQ ID NO: 115533 - DNA, 20 bp, synthetic construct
  source 1..20: mol_type = other DNA
tgtttcagtaggaacttaaa

SEQ ID NO: 115534 - DNA, 20 bp, synthetic construct
  source 1..20: mol_type = other DNA
atgtttcagtaggaacttaa

SEQ ID NO: 115535 - DNA, 20 bp, synthetic construct
  source 1..20: mol_type = other DNA
aatgtttcagtaggaactta

SEQ ID NO: 115536 - DNA, 20 bp, synthetic construct
  source 1..20: mol_type = other DNA
aaatgtttcagtaggaactt

SEQ ID NO: 115537 - DNA, 20 bp, synthetic construct
  source 1..20: mol_type = other DNA
aaaatgtttcagtaggaact

SEQ ID NO: 115538 - DNA, 20 bp, synthetic construct
  source 1..20: mol_type = other DNA
aaaaatgtttcagtaggaac

SEQ ID NO: 115539 - DNA, 20 bp, synthetic construct
  source 1..20: mol_type = other DNA
aaaaaatgtttcagtaggaa

SEQ ID NO: 115540 - DNA, 20 bp, synthetic construct
  source 1..20: mol_type = other DNA
gaaaaaatgtttcagtagga

SEQ ID NO: 115541 - DNA, 20 bp, synthetic construct
  source 1..20: mol_type = other DNA
agaaaaaatgtttcagtagg

SEQ ID NO: 115542 - DNA, 20 bp, synthetic construct
  source 1..20: mol_type = other DNA
aagaaaaaatgtttcagtag

SEQ ID NO: 115543 - DNA, 20 bp, synthetic construct
  source 1..20: mol_type = other DNA
aaagaaaaaatgtttcagta

SEQ ID NO: 115544 - DNA, 20 bp, synthetic construct
  source 1..20: mol_type = other DNA
aaaagaaaaaatgtttcagt

SEQ ID NO: 115545 - DNA, 20 bp, synthetic construct
  source 1..20: mol_type = other DNA
taaaagaaaaaatgtttcag

SEQ ID NO: 115546 - DNA, 20 bp, synthetic construct
  source 1..20: mol_type = other DNA
ataaaagaaaaaatgtttca

SEQ ID NO: 115547 - DNA, 20 bp, synthetic construct
  source 1..20: mol_type = other DNA
aataaaagaaaaaatgtttc

SEQ ID NO: 115548 - DNA, 20 bp, synthetic construct
  source 1..20: mol_type = other DNA
caataaaagaaaaaatgttt

SEQ ID NO: 115549 - DNA, 20 bp, synthetic construct
  source 1..20: mol_type = other DNA
tcaataaaagaaaaaatgtt

SEQ ID NO: 115550 - DNA, 20 bp, synthetic construct
  source 1..20: mol_type = other DNA
ttcaataaaagaaaaaatgt

SEQ ID NO: 115551 - DNA, 20 bp, synthetic construct
  source 1..20: mol_type = other DNA
tttcaataaaagaaaaaatg

SEQ ID NO: 115552 - DNA, 20 bp, synthetic construct
  source 1..20: mol_type = other DNA
atttcaataaaagaaaaaat

SEQ ID NO: 115553 - DNA, 20 bp, synthetic construct
  source 1..20: mol_type = other DNA
catttcaataaaagaaaaaa

SEQ ID NO: 115554 - DNA, 20 bp, synthetic construct
  source 1..20: mol_type = other DNA
acatttcaataaaagaaaaa

SEQ ID NO: 115555 - DNA, 20 bp, synthetic construct
  source 1..20: mol_type = other DNA
cacatttcaataaaagaaaa

SEQ ID NO: 115556 - DNA, 20 bp, synthetic construct
  source 1..20: mol_type = other DNA
tcacatttcaataaaagaaa

SEQ ID NO: 115557 - DNA, 20 bp, synthetic construct
  source 1..20: mol_type = other DNA
ttcacatttcaataaaagaa

SEQ ID NO: 115558 - DNA, 20 bp, synthetic construct
  source 1..20: mol_type = other DNA
tttcacatttcaataaaaga

SEQ ID NO: 115559 - DNA, 20 bp, synthetic construct
  source 1..20: mol_type = other DNA
ttttcacatttcaataaaag

SEQ ID NO: 115560 - DNA, 20 bp, synthetic construct
  source 1..20: mol_type = other DNA
attttcacatttcaataaaa

SEQ ID NO: 115561 - DNA, 20 bp, synthetic construct
  source 1..20: mol_type = other DNA
aattttcacatttcaataaa

SEQ ID NO: 115562 - DNA, 20 bp, synthetic construct
  source 1..20: mol_type = other DNA
aaattttcacatttcaataa

SEQ ID NO: 115563 - DNA, 20 bp, synthetic construct
  source 1..20: mol_type = other DNA
taaattttcacatttcaata

SEQ ID NO: 115564 - DNA, 20 bp, synthetic construct
  source 1..20: mol_type = other DNA
ataaattttcacatttcaat

SEQ ID NO: 115565 - DNA, 20 bp, synthetic construct
  source 1..20: mol_type = other DNA
cataaattttcacatttcaa

SEQ ID NO: 115566 - DNA, 20 bp, synthetic construct
  source 1..20: mol_type = other DNA
acataaattttcacatttca

SEQ ID NO: 115567 - DNA, 20 bp, synthetic construct
  source 1..20: mol_type = other DNA
cacataaattttcacatttc

SEQ ID NO: 115568 - DNA, 20 bp, synthetic construct
  source 1..20: mol_type = other DNA
gcacataaattttcacattt

SEQ ID NO: 115569 - DNA, 20 bp, synthetic construct
  source 1..20: mol_type = other DNA
agcacataaattttcacatt

SEQ ID NO: 115570 - DNA, 20 bp, synthetic construct
  source 1..20: mol_type = other DNA
cagcacataaattttcacat

SEQ ID NO: 115571 - DNA, 20 bp, synthetic construct
  source 1..20: mol_type = other DNA
acagcacataaattttcaca

SEQ ID NO: 115572 - DNA, 20 bp, synthetic construct
  source 1..20: mol_type = other DNA
cacagcacataaattttcac

SEQ ID NO: 115573 - DNA, 20 bp, synthetic construct
  source 1..20: mol_type = other DNA
acacagcacataaattttca

SEQ ID NO: 115574 - DNA, 20 bp, synthetic construct
  source 1..20: mol_type = other DNA
aacacagcacataaattttc

SEQ ID NO: 115575 - DNA, 20 bp, synthetic construct
  source 1..20: mol_type = other DNA
aaacacagcacataaatttt

SEQ ID NO: 115576 - DNA, 20 bp, synthetic construct
  source 1..20: mol_type = other DNA
aaaacacagcacataaattt

SEQ ID NO: 115577 - DNA, 20 bp, synthetic construct
  source 1..20: mol_type = other DNA
aaaaacacagcacataaatt

SEQ ID NO: 115578 - DNA, 20 bp, synthetic construct
  source 1..20: mol_type = other DNA
caaaaacacagcacataaat

SEQ ID NO: 115579 - DNA, 20 bp, synthetic construct
  source 1..20: mol_type = other DNA
acaaaaacacagcacataaa

SEQ ID NO: 115580 - DNA, 20 bp, synthetic construct
  source 1..20: mol_type = other DNA
aacaaaaacacagcacataa

SEQ ID NO: 115581 - DNA, 20 bp, synthetic construct
  source 1..20: mol_type = other DNA
aaacaaaaacacagcacata

SEQ ID NO: 115582 - DNA, 20 bp, synthetic construct
  source 1..20: mol_type = other DNA
aaaacaaaaacacagcacat

SEQ ID NO: 115583 - DNA, 20 bp, synthetic construct
  source 1..20: mol_type = other DNA
gaaaacaaaaacacagcaca

SEQ ID NO: 115584 - DNA, 20 bp, synthetic construct
  source 1..20: mol_type = other DNA
tgaaaacaaaaacacagcac

SEQ ID NO: 115585 - DNA, 20 bp, synthetic construct
  source 1..20: mol_type = other DNA
ttgaaaacaaaaacacagca

SEQ ID NO: 115586 - DNA, 20 bp, synthetic construct
  source 1..20: mol_type = other DNA
attgaaaacaaaaacacagc

SEQ ID NO: 115587 - DNA, 20 bp, synthetic construct
  source 1..20: mol_type = other DNA
tattgaaaacaaaaacacag

SEQ ID NO: 115588 - DNA, 20 bp, synthetic construct
  source 1..20: mol_type = other DNA
ttattgaaaacaaaaacaca

SEQ ID NO: 115589 - DNA, 20 bp, synthetic construct
  source 1..20: mol_type = other DNA
tttattgaaaacaaaaacac

SEQ ID NO: 115590 - DNA, 20 bp, synthetic construct
  source 1..20: mol_type = other DNA
ttttattgaaaacaaaaaca

SEQ ID NO: 115591 - DNA, 20 bp, synthetic construct
  source 1..20: mol_type = other DNA
cttttattgaaaacaaaaac

SEQ ID NO: 115592 - DNA, 20 bp, synthetic construct
  source 1..20: mol_type = other DNA
ccttttattgaaaacaaaaa

SEQ ID NO: 115593 - DNA, 20 bp, synthetic construct
  source 1..20: mol_type = other DNA
cccttttattgaaaacaaaa

SEQ ID NO: 115594 - DNA, 20 bp, synthetic construct
  source 1..20: mol_type = other DNA
tcccttttattgaaaacaaa

SEQ ID NO: 115595 - DNA, 20 bp, synthetic construct
  source 1..20: mol_type = other DNA
gtcccttttattgaaaacaa

SEQ ID NO: 115596 - DNA, 20 bp, synthetic construct
  source 1..20: mol_type = other DNA
tgtcccttttattgaaaaca

SEQ ID NO: 115597 - DNA, 20 bp, synthetic construct
  source 1..20: mol_type = other DNA
atgtcccttttattgaaaac

SEQ ID NO: 115598 - DNA, 20 bp, synthetic construct
  source 1..20: mol_type = other DNA
tatgtcccttttattgaaaa

SEQ ID NO: 115599 - DNA, 20 bp, synthetic construct
  source 1..20: mol_type = other DNA
ctatgtcccttttattgaaa

SEQ ID NO: 115600 - DNA, 20 bp, synthetic construct
  source 1..20: mol_type = other DNA
actatgtcccttttattgaa

SEQ ID NO: 115601 - DNA, 20 bp, synthetic construct
  source 1..20: mol_type = other DNA
aactatgtcccttttattga

SEQ ID NO: 115602 - DNA, 20 bp, synthetic construct
  source 1..20: mol_type = other DNA
taactatgtcccttttattg

SEQ ID NO: 115603 - DNA, 20 bp, synthetic construct
  source 1..20: mol_type = other DNA
ttaactatgtcccttttatt

SEQ ID NO: 115604 - DNA, 20 bp, synthetic construct
  source 1..20: mol_type = other DNA
tttaactatgtcccttttat

SEQ ID NO: 115605 - DNA, 20 bp, synthetic construct
  source 1..20: mol_type = other DNA
ctttaactatgtccctttta

SEQ ID NO: 115606 - DNA, 20 bp, synthetic construct
  source 1..20: mol_type = other DNA
gctttaactatgtccctttt

SEQ ID NO: 115607 - DNA, 20 bp, synthetic construct
  source 1..20: mol_type = other DNA
tgctttaactatgtcccttt

SEQ ID NO: 115608 - DNA, 20 bp, synthetic construct
  source 1..20: mol_type = other DNA
ttgctttaactatgtccctt

SEQ ID NO: 115609 - DNA, 20 bp, synthetic construct
  source 1..20: mol_type = other DNA
cttgctttaactatgtccct

SEQ ID NO: 115610 - DNA, 20 bp, synthetic construct
  source 1..20: mol_type = other DNA
acttgctttaactatgtccc

SEQ ID NO: 115611 - DNA, 20 bp, synthetic construct
  source 1..20: mol_type = other DNA
tacttgctttaactatgtcc

SEQ ID NO: 115612 - DNA, 20 bp, synthetic construct
  source 1..20: mol_type = other DNA
ttacttgctttaactatgtc

SEQ ID NO: 115613 - DNA, 20 bp, synthetic construct
  source 1..20: mol_type = other DNA
tttacttgctttaactatgt

SEQ ID NO: 115614 - DNA, 20 bp, synthetic construct
  source 1..20: mol_type = other DNA
ttttacttgctttaactatg

SEQ ID NO: 115615 - DNA, 20 bp, synthetic construct
  source 1..20: mol_type = other DNA
attttacttgctttaactat

SEQ ID NO: 115616 - DNA, 20 bp, synthetic construct
  source 1..20: mol_type = other DNA
aattttacttgctttaacta

SEQ ID NO: 115617 - DNA, 20 bp, synthetic construct
  source 1..20: mol_type = other DNA
taattttacttgctttaact

SEQ ID NO: 115618 - DNA, 20 bp, synthetic construct
  source 1..20: mol_type = other DNA
ctaattttacttgctttaac

SEQ ID NO: 115619 - DNA, 20 bp, synthetic construct
  source 1..20: mol_type = other DNA
tctaattttacttgctttaa

SEQ ID NO: 115620 - DNA, 20 bp, synthetic construct
  source 1..20: mol_type = other DNA
ttctaattttacttgcttta

SEQ ID NO: 115621 - DNA, 20 bp, synthetic construct
  source 1..20: mol_type = other DNA
tttctaattttacttgcttt

SEQ ID NO: 115622 - DNA, 20 bp, synthetic construct
  source 1..20: mol_type = other DNA
ctttctaattttacttgctt

SEQ ID NO: 115623 - DNA, 20 bp, synthetic construct
  source 1..20: mol_type = other DNA
tctttctaattttacttgct

SEQ ID NO: 115624 - DNA, 20 bp, synthetic construct
  source 1..20: mol_type = other DNA
gtctttctaattttacttgc

SEQ ID NO: 115625 - DNA, 20 bp, synthetic construct
  source 1..20: mol_type = other DNA
agtctttctaattttacttg

SEQ ID NO: 115626 - DNA, 20 bp, synthetic construct
  source 1..20: mol_type = other DNA
cagtctttctaattttactt

SEQ ID NO: 115627 - DNA, 20 bp, synthetic construct
  source 1..20: mol_type = other DNA
ccagtctttctaattttact

SEQ ID NO: 115628 - DNA, 20 bp, synthetic construct
  source 1..20: mol_type = other DNA
cccagtctttctaattttac

SEQ ID NO: 115629 - DNA, 20 bp, synthetic construct
  source 1..20: mol_type = other DNA
tcccagtctttctaatttta

SEQ ID NO: 115630 - DNA, 20 bp, synthetic construct
  source 1..20: mol_type = other DNA
ttcccagtctttctaatttt

SEQ ID NO: 115631 - DNA, 20 bp, synthetic construct
  source 1..20: mol_type = other DNA
tttcccagtctttctaattt

SEQ ID NO: 115632 - DNA, 20 bp, synthetic construct
  source 1..20: mol_type = other DNA
ttttcccagtctttctaatt

SEQ ID NO: 115633 - DNA, 20 bp, synthetic construct
  source 1..20: mol_type = other DNA
attttcccagtctttctaat

SEQ ID NO: 115634 - DNA, 20 bp, synthetic construct
  source 1..20: mol_type = other DNA
gattttcccagtctttctaa

SEQ ID NO: 115635 - DNA, 20 bp, synthetic construct
  source 1..20: mol_type = other DNA
ggattttcccagtctttcta

SEQ ID NO: 115636 - DNA, 20 bp, synthetic construct
  source 1..20: mol_type = other DNA
cggattttcccagtctttct

SEQ ID NO: 115637 - DNA, 20 bp, synthetic construct
  source 1..20: mol_type = other DNA
acggattttcccagtctttc

SEQ ID NO: 115638 - DNA, 20 bp, synthetic construct
  source 1..20: mol_type = other DNA
gacggattttcccagtcttt

SEQ ID NO: 115639 - DNA, 20 bp, synthetic construct
  source 1..20: mol_type = other DNA
agacggattttcccagtctt

SEQ ID NO: 115640 - DNA, 20 bp, synthetic construct
  source 1..20: mol_type = other DNA
aagacggattttcccagtct

SEQ ID NO: 115641 - DNA, 20 bp, synthetic construct
  source 1..20: mol_type = other DNA
aaagacggattttcccagtc

SEQ ID NO: 115642 - DNA, 20 bp, synthetic construct
  source 1..20: mol_type = other DNA
taaagacggattttcccagt

SEQ ID NO: 115643 - DNA, 20 bp, synthetic construct
  source 1..20: mol_type = other DNA
ttaaagacggattttcccag

SEQ ID NO: 115644 - DNA, 20 bp, synthetic construct
  source 1..20: mol_type = other DNA
tttaaagacggattttccca

SEQ ID NO: 115645 - DNA, 20 bp, synthetic construct
  source 1..20: mol_type = other DNA
atttaaagacggattttccc

SEQ ID NO: 115646 - DNA, 20 bp, synthetic construct
  source 1..20: mol_type = other DNA
aatttaaagacggattttcc

SEQ ID NO: 115647 - DNA, 20 bp, synthetic construct
  source 1..20: mol_type = other DNA
caatttaaagacggattttc

SEQ ID NO: 115648 - DNA, 20 bp, synthetic construct
  source 1..20: mol_type = other DNA
gcaatttaaagacggatttt

SEQ ID NO: 115649 - DNA, 20 bp, synthetic construct
  source 1..20: mol_type = other DNA
tgcaatttaaagacggattt

SEQ ID NO: 115650 - DNA, 20 bp, synthetic construct
  source 1..20: mol_type = other DNA
ttgcaatttaaagacggatt

SEQ ID NO: 115651 - DNA, 20 bp, synthetic construct
  source 1..20: mol_type = other DNA
attgcaatttaaagacggat

SEQ ID NO: 115652 - DNA, 20 bp, synthetic construct
  source 1..20: mol_type = other DNA
tattgcaatttaaagacgga

SEQ ID NO: 115653 - DNA, 20 bp, synthetic construct
  source 1..20: mol_type = other DNA
ttattgcaatttaaagacgg

SEQ ID NO: 115654 - DNA, 20 bp, synthetic construct
  source 1..20: mol_type = other DNA
attattgcaatttaaagacg

SEQ ID NO: 115655 - DNA, 20 bp, synthetic construct
  source 1..20: mol_type = other DNA
tattattgcaatttaaagac

SEQ ID NO: 115656 - DNA, 20 bp, synthetic construct
  source 1..20: mol_type = other DNA
ctattattgcaatttaaaga

SEQ ID NO: 115657 - DNA, 20 bp, synthetic construct
  source 1..20: mol_type = other DNA
actattattgcaatttaaag

SEQ ID NO: 115658 - DNA, 20 bp, synthetic construct
  source 1..20: mol_type = other DNA
aactattattgcaatttaaa

SEQ ID NO: 115659 - DNA, 20 bp, synthetic construct
  source 1..20: mol_type = other DNA
gaactattattgcaatttaa

SEQ ID NO: 115660 - DNA, 20 bp, synthetic construct
  source 1..20: mol_type = other DNA
tgaactattattgcaattta

SEQ ID NO: 115661 - DNA, 20 bp, synthetic construct
  source 1..20: mol_type = other DNA
atgaactattattgcaattt

SEQ ID NO: 115662 - DNA, 20 bp, synthetic construct
  source 1..20: mol_type = other DNA
gatgaactattattgcaatt

SEQ ID NO: 115663 - DNA, 20 bp, synthetic construct
  source 1..20: mol_type = other DNA
agatgaactattattgcaat

SEQ ID NO: 115664 - DNA, 20 bp, synthetic construct
  source 1..20: mol_type = other DNA
cagatgaactattattgcaa

SEQ ID NO: 115665 - DNA, 20 bp, synthetic construct
  source 1..20: mol_type = other DNA
acagatgaactattattgca

SEQ ID NO: 115666 - DNA, 20 bp, synthetic construct
  source 1..20: mol_type = other DNA
aacagatgaactattattgc

SEQ ID NO: 115667 - DNA, 20 bp, synthetic construct
  source 1..20: mol_type = other DNA
taacagatgaactattattg

SEQ ID NO: 115668 - DNA, 20 bp, synthetic construct
  source 1..20: mol_type = other DNA
gtaacagatgaactattatt

SEQ ID NO: 115669 - DNA, 20 bp, synthetic construct
  source 1..20: mol_type = other DNA
ggtaacagatgaactattat

SEQ ID NO: 115670 - DNA, 20 bp, synthetic construct
  source 1..20: mol_type = other DNA
aggtaacagatgaactatta

SEQ ID NO: 115671 - DNA, 20 bp, synthetic construct
  source 1..20: mol_type = other DNA
aaggtaacagatgaactatt

SEQ ID NO: 115672 - DNA, 20 bp, synthetic construct
  source 1..20: mol_type = other DNA
caaggtaacagatgaactat

SEQ ID NO: 115673 - DNA, 20 bp, synthetic construct
  source 1..20: mol_type = other DNA
tcaaggtaacagatgaacta

SEQ ID NO: 115674 - DNA, 20 bp, synthetic construct
  source 1..20: mol_type = other DNA
ctcaaggtaacagatgaact

SEQ ID NO: 115675 - DNA, 20 bp, synthetic construct
  source 1..20: mol_type = other DNA
tctcaaggtaacagatgaac

SEQ ID NO: 115676 - DNA, 20 bp, synthetic construct
  source 1..20: mol_type = other DNA
atctcaaggtaacagatgaa

SEQ ID NO: 115677 - DNA, 20 bp, synthetic construct
  source 1..20: mol_type = other DNA
tatctcaaggtaacagatga

SEQ ID NO: 115678 - DNA, 20 bp, synthetic construct
  source 1..20: mol_type = other DNA
ttatctcaaggtaacagatg

SEQ ID NO: 115679 - DNA, 20 bp, synthetic construct
  source 1..20: mol_type = other DNA
attatctcaaggtaacagat

SEQ ID NO: 115680 - DNA, 20 bp, synthetic construct
  source 1..20: mol_type = other DNA
aattatctcaaggtaacaga

SEQ ID NO: 115681 - DNA, 20 bp, synthetic construct
  source 1..20: mol_type = other DNA
caattatctcaaggtaacag

SEQ ID NO: 115682 - DNA, 20 bp, synthetic construct
  source 1..20: mol_type = other DNA
tcaattatctcaaggtaaca

SEQ ID NO: 115683 - DNA, 20 bp, synthetic construct
  source 1..20: mol_type = other DNA
ttcaattatctcaaggtaac

SEQ ID NO: 115684 - DNA, 20 bp, synthetic construct
  source 1..20: mol_type = other DNA
attcaattatctcaaggtaa

SEQ ID NO: 115685 - DNA, 20 bp, synthetic construct
  source 1..20: mol_type = other DNA
aattcaattatctcaaggta

SEQ ID NO: 115686 - DNA, 20 bp, synthetic construct
  source 1..20: mol_type = other DNA
aaattcaattatctcaaggt

SEQ ID NO: 115687 - DNA, 20 bp, synthetic construct
  source 1..20: mol_type = other DNA
taaattcaattatctcaagg

SEQ ID NO: 115688 - DNA, 20 bp, synthetic construct
  source 1..20: mol_type = other DNA
ataaattcaattatctcaag

SEQ ID NO: 115689 - DNA, 20 bp, synthetic construct
  source 1..20: mol_type = other DNA
aataaattcaattatctcaa

SEQ ID NO: 115690 - DNA, 20 bp, synthetic construct
  source 1..20: mol_type = other DNA
caataaattcaattatctca

SEQ ID NO: 115691 - DNA, 20 bp, synthetic construct
  source 1..20: mol_type = other DNA
acaataaattcaattatctc

SEQ ID NO: 115692 - DNA, 20 bp, synthetic construct
  source 1..20: mol_type = other DNA
aacaataaattcaattatct

SEQ ID NO: 115693 - DNA, 20 bp, synthetic construct
  source 1..20: mol_type = other DNA
caacaataaattcaattatc

SEQ ID NO: 115694 - DNA, 20 bp, synthetic construct
  source 1..20: mol_type = other DNA
acaacaataaattcaattat

SEQ ID NO: 115695 - DNA, 20 bp, synthetic construct
  source 1..20: mol_type = other DNA
aacaacaataaattcaatta

SEQ ID NO: 115696 - DNA, 20 bp, synthetic construct
  source 1..20: mol_type = other DNA
aaacaacaataaattcaatt

SEQ ID NO: 115697 - DNA, 20 bp, synthetic construct
  source 1..20: mol_type = other DNA
aaaacaacaataaattcaat

SEQ ID NO: 115698 - DNA, 20 bp, synthetic construct
  source 1..20: mol_type = other DNA
aaaaacaacaataaattcaa

SEQ ID NO: 115699 - DNA, 20 bp, synthetic construct
  source 1..20: mol_type = other DNA
caaaaacaacaataaattca

SEQ ID NO: 115700 - DNA, 20 bp, synthetic construct
  source 1..20: mol_type = other DNA
acaaaaacaacaataaattc

SEQ ID NO: 115701 - DNA, 20 bp, synthetic construct
  source 1..20: mol_type = other DNA
tacaaaaacaacaataaatt

SEQ ID NO: 115702 - DNA, 20 bp, synthetic construct
  source 1..20: mol_type = other DNA
ctacaaaaacaacaataaat

SEQ ID NO: 115703 - DNA, 20 bp, synthetic construct
  source 1..20: mol_type = other DNA
gctacaaaaacaacaataaa

SEQ ID NO: 115704 - DNA, 20 bp, synthetic construct
  source 1..20: mol_type = other DNA
ggctacaaaaacaacaataa

SEQ ID NO: 115705 - DNA, 20 bp, synthetic construct
  source 1..20: mol_type = other DNA
tggctacaaaaacaacaata

SEQ ID NO: 115706 - DNA, 20 bp, synthetic construct
  source 1..20: mol_type = other DNA
ttggctacaaaaacaacaat

SEQ ID NO: 115707 - DNA, 20 bp, synthetic construct
  source 1..20: mol_type = other DNA
tttggctacaaaaacaacaa

SEQ ID NO: 115708 - DNA, 20 bp, synthetic construct
  source 1..20: mol_type = other DNA
ctttggctacaaaaacaaca

SEQ ID NO: 115709 - DNA, 20 bp, synthetic construct
  source 1..20: mol_type = other DNA
gctttggctacaaaaacaac

SEQ ID NO: 115710 - DNA, 20 bp, synthetic construct
  source 1..20: mol_type = other DNA
ggctttggctacaaaaacaa

SEQ ID NO: 115711 - DNA, 20 bp, synthetic construct
  source 1..20: mol_type = other DNA
aggctttggctacaaaaaca

SEQ ID NO: 115712 - DNA, 20 bp, synthetic construct
  source 1..20: mol_type = other DNA
aaggctttggctacaaaaac

SEQ ID NO: 115713 - DNA, 20 bp, synthetic construct
  source 1..20: mol_type = other DNA
gaaggctttggctacaaaaa

SEQ ID NO: 115714 - DNA, 20 bp, synthetic construct
  source 1..20: mol_type = other DNA
agaaggctttggctacaaaa

SEQ ID NO: 115715 - DNA, 20 bp, synthetic construct
  source 1..20: mol_type = other DNA
tagaaggctttggctacaaa

SEQ ID NO: 115716 - DNA, 20 bp, synthetic construct
  source 1..20: mol_type = other DNA
gtagaaggctttggctacaa

SEQ ID NO: 115717 - DNA, 20 bp, synthetic construct
  source 1..20: mol_type = other DNA
agtagaaggctttggctaca

SEQ ID NO: 115718 - DNA, 20 bp, synthetic construct
  source 1..20: mol_type = other DNA
tagtagaaggctttggctac

SEQ ID NO: 115719 - DNA, 20 bp, synthetic construct
  source 1..20: mol_type = other DNA
gtagtagaaggctttggcta

SEQ ID NO: 115720 - DNA, 20 bp, synthetic construct
  source 1..20: mol_type = other DNA
ggtagtagaaggctttggct

SEQ ID NO: 115721 - DNA, 20 bp, synthetic construct
  source 1..20: mol_type = other DNA
gggtagtagaaggctttggc

SEQ ID NO: 115722 - DNA, 20 bp, synthetic construct
  source 1..20: mol_type = other DNA
ggggtagtagaaggctttgg

SEQ ID NO: 115723 - DNA, 20 bp, synthetic construct
  source 1..20: mol_type = other DNA
tggggtagtagaaggctttg

SEQ ID NO: 115724 - DNA, 20 bp, synthetic construct
  source 1..20: mol_type = other DNA
ttggggtagtagaaggcttt

SEQ ID NO: 115725 - DNA, 20 bp, synthetic construct
  source 1..20: mol_type = other DNA
gttggggtagtagaaggctt

SEQ ID NO: 115726 - DNA, 20 bp, synthetic construct
  source 1..20: mol_type = other DNA
agttggggtagtagaaggct

SEQ ID NO: 115727 - DNA, 20 bp, synthetic construct
  source 1..20: mol_type = other DNA
aagttggggtagtagaaggc

SEQ ID NO: 115728 - DNA, 20 bp, synthetic construct
  source 1..20: mol_type = other DNA
gaagttggggtagtagaagg

SEQ ID NO: 115729 - DNA, 20 bp, synthetic construct
  source 1..20: mol_type = other DNA
tgaagttggggtagtagaag

SEQ ID NO: 115730 - DNA, 20 bp, synthetic construct
  source 1..20: mol_type = other DNA
gtgaagttggggtagtagaa

SEQ ID NO: 115731 - DNA, 20 bp, synthetic construct
  source 1..20: mol_type = other DNA
ggtgaagttggggtagtaga

SEQ ID NO: 115732 - DNA, 20 bp, synthetic construct
  source 1..20: mol_type = other DNA
aggtgaagttggggtagtag

SEQ ID NO: 115733 - DNA, 20 bp, synthetic construct
  source 1..20: mol_type = other DNA
gaggtgaagttggggtagta

SEQ ID NO: 115734 - DNA, 20 bp, synthetic construct
  source 1..20: mol_type = other DNA
cgaggtgaagttggggtagt

SEQ ID NO: 115735 - DNA, 20 bp, synthetic construct
  source 1..20: mol_type = other DNA
ccgaggtgaagttggggtag

SEQ ID NO: 115736 - DNA, 20 bp, synthetic construct
  source 1..20: mol_type = other DNA
gccgaggtgaagttggggta

SEQ ID NO: 115737 - DNA, 20 bp, synthetic construct
  source 1..20: mol_type = other DNA
ggccgaggtgaagttggggt

SEQ ID NO: 115738 - DNA, 20 bp, synthetic construct
  source 1..20: mol_type = other DNA
aggccgaggtgaagttgggg

SEQ ID NO: 115739 - DNA, 20 bp, synthetic construct
  source 1..20: mol_type = other DNA
gaggccgaggtgaagttggg

SEQ ID NO: 115740 - DNA, 20 bp, synthetic construct
  source 1..20: mol_type = other DNA
tgaggccgaggtgaagttgg

SEQ ID NO: 115741 - DNA, 20 bp, synthetic construct
  source 1..20: mol_type = other DNA
ttgaggccgaggtgaagttg

SEQ ID NO: 115742 - DNA, 20 bp, synthetic construct
  source 1..20: mol_type = other DNA
cttgaggccgaggtgaagtt

SEQ ID NO: 115743 - DNA, 20 bp, synthetic construct
  source 1..20: mol_type = other DNA
gcttgaggccgaggtgaagt

SEQ ID NO: 115744 - DNA, 20 bp, synthetic construct
  source 1..20: mol_type = other DNA
tgcttgaggccgaggtgaag

SEQ ID NO: 115745 - DNA, 20 bp, synthetic construct
  source 1..20: mol_type = other DNA
gtgcttgaggccgaggtgaa

SEQ ID NO: 115746 - DNA, 20 bp, synthetic construct
  source 1..20: mol_type = other DNA
tgtgcttgaggccgaggtga

SEQ ID NO: 115747 - DNA, 20 bp, synthetic construct
  source 1..20: mol_type = other DNA
ttgtgcttgaggccgaggtg

SEQ ID NO: 115748 - DNA, 20 bp, synthetic construct
  source 1..20: mol_type = other DNA
gttgtgcttgaggccgaggt

SEQ ID NO: 115749 - DNA, 20 bp, synthetic construct
  source 1..20: mol_type = other DNA
ggttgtgcttgaggccgagg

SEQ ID NO: 115750 - DNA, 20 bp, synthetic construct
  source 1..20: mol_type = other DNA
aggttgtgcttgaggccgag

SEQ ID NO: 115751 - DNA, 20 bp, synthetic construct
  source 1..20: mol_type = other DNA
taggttgtgcttgaggccga

SEQ ID NO: 115752 - DNA, 20 bp, synthetic construct
  source 1..20: mol_type = other DNA
ctaggttgtgcttgaggccg

SEQ ID NO: 115753 - DNA, 20 bp, synthetic construct
  source 1..20: mol_type = other DNA
gctaggttgtgcttgaggcc

SEQ ID NO: 115754 - DNA, 20 bp, synthetic construct
  source 1..20: mol_type = other DNA
ggctaggttgtgcttgaggc

SEQ ID NO: 115755 - DNA, 20 bp, synthetic construct
  source 1..20: mol_type = other DNA
gggctaggttgtgcttgagg

SEQ ID NO: 115756 - DNA, 20 bp, synthetic construct
  source 1..20: mol_type = other DNA
tgggctaggttgtgcttgag

SEQ ID NO: 115757 - DNA, 20 bp, synthetic construct
  source 1..20: mol_type = other DNA
atgggctaggttgtgcttga

SEQ ID NO: 115758 - DNA, 20 bp, synthetic construct
  source 1..20: mol_type = other DNA
gatgggctaggttgtgcttg

SEQ ID NO: 115759 - DNA, 20 bp, synthetic construct
  source 1..20: mol_type = other DNA
agatgggctaggttgtgctt

SEQ ID NO: 115760 - DNA, 20 bp, synthetic construct
  source 1..20: mol_type = other DNA
tagatgggctaggttgtgct

SEQ ID NO: 115761 - DNA, 20 bp, synthetic construct
  source 1..20: mol_type = other DNA
atagatgggctaggttgtgc

SEQ ID NO: 115762 - DNA, 20 bp, synthetic construct
  source 1..20: mol_type = other DNA
catagatgggctaggttgtg

SEQ ID NO: 115763 - DNA, 20 bp, synthetic construct
  source 1..20: mol_type = other DNA
ccatagatgggctaggttgt

SEQ ID NO: 115764 - DNA, 20 bp, synthetic construct
  source 1..20: mol_type = other DNA
accatagatgggctaggttg

SEQ ID NO: 115765 - DNA, 20 bp, synthetic construct
  source 1..20: mol_type = other DNA
caccatagatgggctaggtt

SEQ ID NO: 115766 - DNA, 20 bp, synthetic construct
  source 1..20: mol_type = other DNA
ccaccatagatgggctaggt

SEQ ID NO: 115767 - DNA, 20 bp, synthetic construct
  source 1..20: mol_type = other DNA
cccaccatagatgggctagg

SEQ ID NO: 115768 - DNA, 20 bp, synthetic construct
  source 1..20: mol_type = other DNA
acccaccatagatgggctag

SEQ ID NO: 115769 - DNA, 20 bp, synthetic construct
  source 1..20: mol_type = other DNA
gacccaccatagatgggcta

SEQ ID NO: 115770 - DNA, 20 bp, synthetic construct
  source 1..20: mol_type = other DNA
tgacccaccatagatgggct

SEQ ID NO: 115771 - DNA, 20 bp, synthetic construct
  source 1..20: mol_type = other DNA
atgacccaccatagatgggc

SEQ ID NO: 115772 - DNA, 20 bp, synthetic construct
  source 1..20: mol_type = other DNA
gatgacccaccatagatggg

SEQ ID NO: 115773 - DNA, 20 bp, synthetic construct
  source 1..20: mol_type = other DNA
tgatgacccaccatagatgg

SEQ ID NO: 115774 - DNA, 20 bp, synthetic construct
  source 1..20: mol_type = other DNA
ttgatgacccaccatagatg

SEQ ID NO: 115775 - DNA, 20 bp, synthetic construct
  source 1..20: mol_type = other DNA
gttgatgacccaccatagat

SEQ ID NO: 115776 - DNA, 20 bp, synthetic construct
  source 1..20: mol_type = other DNA
tgttgatgacccaccataga

SEQ ID NO: 115777 - DNA, 20 bp, synthetic construct
  source 1..20: mol_type = other DNA
ctgttgatgacccaccatag

SEQ ID NO: 115778 - DNA, 20 bp, synthetic construct
  source 1..20: mol_type = other DNA
gctgttgatgacccaccata

SEQ ID NO: 115779 - DNA, 20 bp, synthetic construct
  source 1..20: mol_type = other DNA
ggctgttgatgacccaccat

SEQ ID NO: 115780 - DNA, 20 bp, synthetic construct
  source 1..20: mol_type = other DNA
tggctgttgatgacccacca

SEQ ID NO: 115781 - DNA, 20 bp, synthetic construct
  source 1..20: mol_type = other DNA
ttggctgttgatgacccacc

SEQ ID NO: 115782 - DNA, 20 bp, synthetic construct
  source 1..20: mol_type = other DNA
gttggctgttgatgacccac

SEQ ID NO: 115783 - DNA, 20 bp, synthetic construct
  source 1..20: mol_type = other DNA
agttggctgttgatgaccca

SEQ ID NO: 115784 - DNA, 20 bp, synthetic construct
  source 1..20: mol_type = other DNA
gagttggctgttgatgaccc

SEQ ID NO: 115785 - DNA, 20 bp, synthetic construct
  source 1..20: mol_type = other DNA
ggagttggctgttgatgacc

SEQ ID NO: 115786 - DNA, 20 bp, synthetic construct
  source 1..20: mol_type = other DNA
tggagttggctgttgatgac

SEQ ID NO: 115787 - DNA, 20 bp, synthetic construct
  source 1..20: mol_type = other DNA
ctggagttggctgttgatga

SEQ ID NO: 115788 - DNA, 20 bp, synthetic construct
  source 1..20: mol_type = other DNA
actggagttggctgttgatg

SEQ ID NO: 115789 - DNA, 20 bp, synthetic construct
  source 1..20: mol_type = other DNA
aactggagttggctgttgat

SEQ ID NO: 115790 - DNA, 20 bp, synthetic construct
  source 1..20: mol_type = other DNA
aaactggagttggctgttga

SEQ ID NO: 115791 - DNA, 20 bp, synthetic construct
  source 1..20: mol_type = other DNA
taaactggagttggctgttg

SEQ ID NO: 115792 - DNA, 20 bp, synthetic construct
  source 1..20: mol_type = other DNA
ataaactggagttggctgtt

SEQ ID NO: 115793 - DNA, 20 bp, synthetic construct
  source 1..20: mol_type = other DNA
tataaactggagttggctgt

SEQ ID NO: 115794 - DNA, 20 bp, synthetic construct
  source 1..20: mol_type = other DNA
gtataaactggagttggctg

SEQ ID NO: 115795 - DNA, 20 bp, synthetic construct
  source 1..20: mol_type = other DNA
agtataaactggagttggct

SEQ ID NO: 115796 - DNA, 20 bp, synthetic construct
  source 1..20: mol_type = other DNA
gagtataaactggagttggc

SEQ ID NO: 115797 - DNA, 20 bp, synthetic construct
  source 1..20: mol_type = other DNA
tgagtataaactggagttgg

SEQ ID NO: 115798 - DNA, 20 bp, synthetic construct
  source 1..20: mol_type = other DNA
ctgagtataaactggagttg

SEQ ID NO: 115799 - DNA, 20 bp, synthetic construct
  source 1..20: mol_type = other DNA
gctgagtataaactggagtt

SEQ ID NO: 115800 - DNA, 20 bp, synthetic construct
  source 1..20: mol_type = other DNA
ggctgagtataaactggagt

SEQ ID NO: 115801 - DNA, 20 bp, synthetic construct
  source 1..20: mol_type = other DNA
aggctgagtataaactggag

SEQ ID NO: 115802 - DNA, 20 bp, synthetic construct
  source 1..20: mol_type = other DNA
caggctgagtataaactgga

SEQ ID NO: 115803 - DNA, 20 bp, synthetic construct
  source 1..20: mol_type = other DNA
acaggctgagtataaactgg

SEQ ID NO: 115804 - DNA, 20 bp, synthetic construct
  source 1..20: mol_type = other DNA
aacaggctgagtataaactg

SEQ ID NO: 115805 - DNA, 20 bp, synthetic construct
  source 1..20: mol_type = other DNA
aaacaggctgagtataaact

SEQ ID NO: 115806 - DNA, 20 bp, synthetic construct
  source 1..20: mol_type = other DNA
caaacaggctgagtataaac

SEQ ID NO: 115807 - DNA, 20 bp, synthetic construct
  source 1..20: mol_type = other DNA
acaaacaggctgagtataaa

SEQ ID NO: 115808 - DNA, 20 bp, synthetic construct
  source 1..20: mol_type = other DNA
aacaaacaggctgagtataa

SEQ ID NO: 115809 - DNA, 20 bp, synthetic construct
  source 1..20: mol_type = other DNA
aaacaaacaggctgagtata

SEQ ID NO: 115810 - DNA, 20 bp, synthetic construct
  source 1..20: mol_type = other DNA
aaaacaaacaggctgagtat

SEQ ID NO: 115811 - DNA, 20 bp, synthetic construct
  source 1..20: mol_type = other DNA
caaaacaaacaggctgagta

SEQ ID NO: 115812 - DNA, 20 bp, synthetic construct
  source 1..20: mol_type = other DNA
gcaaaacaaacaggctgagt

SEQ ID NO: 115813 - DNA, 20 bp, synthetic construct
  source 1..20: mol_type = other DNA
tgcaaaacaaacaggctgag

SEQ ID NO: 115814 - DNA, 20 bp, synthetic construct
  source 1..20: mol_type = other DNA
gtgcaaaacaaacaggctga

SEQ ID NO: 115815 - DNA, 20 bp, synthetic construct
  source 1..20: mol_type = other DNA
ggtgcaaaacaaacaggctg

SEQ ID NO: 115816 - DNA, 20 bp, synthetic construct
  source 1..20: mol_type = other DNA
tggtgcaaaacaaacaggct

SEQ ID NO: 115817 - DNA, 20 bp, synthetic construct
  source 1..20: mol_type = other DNA
ttggtgcaaaacaaacaggc

SEQ ID NO: 115818 - DNA, 20 bp, synthetic construct
  source 1..20: mol_type = other DNA
tttggtgcaaaacaaacagg

SEQ ID NO: 115819 - DNA, 20 bp, synthetic construct
  source 1..20: mol_type = other DNA
atttggtgcaaaacaaacag

SEQ ID NO: 115820 - DNA, 20 bp, synthetic construct
  source 1..20: mol_type = other DNA
tatttggtgcaaaacaaaca

SEQ ID NO: 115821 - DNA, 20 bp, synthetic construct
  source 1..20: mol_type = other DNA
atatttggtgcaaaacaaac

SEQ ID NO: 115822 - DNA, 20 bp, synthetic construct
  source 1..20: mol_type = other DNA
catatttggtgcaaaacaaa

SEQ ID NO: 115823 - DNA, 20 bp, synthetic construct
  source 1..20: mol_type = other DNA
tcatatttggtgcaaaacaa

SEQ ID NO: 115824 - DNA, 20 bp, synthetic construct
  source 1..20: mol_type = other DNA
atcatatttggtgcaaaaca

SEQ ID NO: 115825 - DNA, 20 bp, synthetic construct
  source 1..20: mol_type = other DNA
catcatatttggtgcaaaac

SEQ ID NO: 115826 - DNA, 20 bp, synthetic construct
  source 1..20: mol_type = other DNA
acatcatatttggtgcaaaa

SEQ ID NO: 115827 - DNA, 20 bp, synthetic construct
  source 1..20: mol_type = other DNA
tacatcatatttggtgcaaa

SEQ ID NO: 115828 - DNA, 20 bp, synthetic construct
  source 1..20: mol_type = other DNA
atacatcatatttggtgcaa

SEQ ID NO: 115829 - DNA, 20 bp, synthetic construct
  source 1..20: mol_type = other DNA
gatacatcatatttggtgca

SEQ ID NO: 115830 - DNA, 20 bp, synthetic construct
  source 1..20: mol_type = other DNA
ggatacatcatatttggtgc

SEQ ID NO: 115831 - DNA, 20 bp, synthetic construct
  source 1..20: mol_type = other DNA
tggatacatcatatttggtg

SEQ ID NO: 115832 - DNA, 20 bp, synthetic construct
  source 1..20: mol_type = other DNA
ctggatacatcatatttggt

SEQ ID NO: 115833 - DNA, 20 bp, synthetic construct
  source 1..20: mol_type = other DNA
actggatacatcatatttgg

SEQ ID NO: 115834 - DNA, 20 bp, synthetic construct
  source 1..20: mol_type = other DNA
gactggatacatcatatttg

SEQ ID NO: 115835 - DNA, 20 bp, synthetic construct
  source 1..20: mol_type = other DNA
ggactggatacatcatattt

SEQ ID NO: 115836 - DNA, 20 bp, synthetic construct
  source 1..20: mol_type = other DNA
gggactggatacatcatatt

SEQ ID NO: 115837 - DNA, 20 bp, synthetic construct
  source 1..20: mol_type = other DNA
tgggactggatacatcatat

SEQ ID NO: 115838 - DNA, 20 bp, synthetic construct
  source 1..20: mol_type = other DNA
ctgggactggatacatcata

SEQ ID NO: 115839 - DNA, 20 bp, synthetic construct
  source 1..20: mol_type = other DNA
actgggactggatacatcat

SEQ ID NO: 115840 - DNA, 20 bp, synthetic construct
  source 1..20: mol_type = other DNA
cactgggactggatacatca

SEQ ID NO: 115841 - DNA, 20 bp, synthetic construct
  source 1..20: mol_type = other DNA
tcactgggactggatacatc

SEQ ID NO: 115842 - DNA, 20 bp, synthetic construct
  source 1..20: mol_type = other DNA
ctcactgggactggatacat

SEQ ID NO: 115843 - DNA, 20 bp, synthetic construct
  source 1..20: mol_type = other DNA
gctcactgggactggataca

SEQ ID NO: 115844 - DNA, 20 bp, synthetic construct
  source 1..20: mol_type = other DNA
ggctcactgggactggatac

SEQ ID NO: 115845 - DNA, 20 bp, synthetic construct
  source 1..20: mol_type = other DNA
gggctcactgggactggata

SEQ ID NO: 115846 - DNA, 20 bp, synthetic construct
  source 1..20: mol_type = other DNA
tgggctcactgggactggat

SEQ ID NO: 115847 - DNA, 20 bp, synthetic construct
  source 1..20: mol_type = other DNA
ctgggctcactgggactgga

SEQ ID NO: 115848 - DNA, 20 bp, synthetic construct
  source 1..20: mol_type = other DNA
cctgggctcactgggactgg

SEQ ID NO: 115849 - DNA, 20 bp, synthetic construct
  source 1..20: mol_type = other DNA
gcctgggctcactgggactg

SEQ ID NO: 115850 - DNA, 20 bp, synthetic construct
  source 1..20: mol_type = other DNA
cgcctgggctcactgggact

SEQ ID NO: 115851 - DNA, 20 bp, synthetic construct
  source 1..20: mol_type = other DNA
acgcctgggctcactgggac

SEQ ID NO: 115852 - DNA, 20 bp, synthetic construct
  source 1..20: mol_type = other DNA
cacgcctgggctcactggga

SEQ ID NO: 115853 - DNA, 20 bp, synthetic construct
  source 1..20: mol_type = other DNA
gcacgcctgggctcactggg

SEQ ID NO: 115854 - DNA, 20 bp, synthetic construct
  source 1..20: mol_type = other DNA
tgcacgcctgggctcactgg

SEQ ID NO: 115855 - DNA, 20 bp, synthetic construct
  source 1..20: mol_type = other DNA
ttgcacgcctgggctcactg

SEQ ID NO: 115856 - DNA, 20 bp, synthetic construct
  source 1..20: mol_type = other DNA
cttgcacgcctgggctcact

SEQ ID NO: 115857 - DNA, 20 bp, synthetic construct
  source 1..20: mol_type = other DNA
acttgcacgcctgggctcac

SEQ ID NO: 115858 - DNA, 20 bp, synthetic construct
  source 1..20: mol_type = other DNA
tacttgcacgcctgggctca

SEQ ID NO: 115859 - DNA, 20 bp, synthetic construct
  source 1..20: mol_type = other DNA
ttacttgcacgcctgggctc

SEQ ID NO: 115860 - DNA, 20 bp, synthetic construct
  source 1..20: mol_type = other DNA
cttacttgcacgcctgggct

SEQ ID NO: 115861 - DNA, 20 bp, synthetic construct
  source 1..20: mol_type = other DNA
acttacttgcacgcctgggc

SEQ ID NO: 115862 - DNA, 20 bp, synthetic construct
  source 1..20: mol_type = other DNA
gacttacttgcacgcctggg

SEQ ID NO: 115863 - DNA, 20 bp, synthetic construct
  source 1..20: mol_type = other DNA
tgacttacttgcacgcctgg

SEQ ID NO: 115864 - DNA, 20 bp, synthetic construct
  source 1..20: mol_type = other DNA
atgacttacttgcacgcctg

SEQ ID NO: 115865 - DNA, 20 bp, synthetic construct
  source 1..20: mol_type = other DNA
tatgacttacttgcacgcct

SEQ ID NO: 115866 - DNA, 20 bp, synthetic construct
  source 1..20: mol_type = other DNA
ctatgacttacttgcacgcc

SEQ ID NO: 115867 - DNA, 20 bp, synthetic construct
  source 1..20: mol_type = other DNA
tctatgacttacttgcacgc

SEQ ID NO: 115868 - DNA, 20 bp, synthetic construct
  source 1..20: mol_type = other DNA
ttctatgacttacttgcacg

SEQ ID NO: 115869 - DNA, 20 bp, synthetic construct
  source 1..20: mol_type = other DNA
attctatgacttacttgcac

SEQ ID NO: 115870 - DNA, 20 bp, synthetic construct
  source 1..20: mol_type = other DNA
aattctatgacttacttgca

SEQ ID NO: 115871 - DNA, 20 bp, synthetic construct
  source 1..20: mol_type = other DNA
aaattctatgacttacttgc

SEQ ID NO: 115872 - DNA, 20 bp, synthetic construct
  source 1..20: mol_type = other DNA
caaattctatgacttacttg

SEQ ID NO: 115873 - DNA, 20 bp, synthetic construct
  source 1..20: mol_type = other DNA
tcaaattctatgacttactt

SEQ ID NO: 115874 - DNA, 20 bp, synthetic construct
  source 1..20: mol_type = other DNA
atcaaattctatgacttact

SEQ ID NO: 115875 - DNA, 20 bp, synthetic construct
  source 1..20: mol_type = other DNA
catcaaattctatgacttac

SEQ ID NO: 115876 - DNA, 20 bp, synthetic construct
  source 1..20: mol_type = other DNA
acatcaaattctatgactta

SEQ ID NO: 115877 - DNA, 20 bp, synthetic construct
  source 1..20: mol_type = other DNA
aacatcaaattctatgactt

SEQ ID NO: 115878 - DNA, 20 bp, synthetic construct
  source 1..20: mol_type = other DNA
gaacatcaaattctatgact

SEQ ID NO: 115879 - DNA, 20 bp, synthetic construct
  source 1..20: mol_type = other DNA
tgaacatcaaattctatgac

SEQ ID NO: 115880 - DNA, 20 bp, synthetic construct
  source 1..20: mol_type = other DNA
gtgaacatcaaattctatga

SEQ ID NO: 115881 - DNA, 20 bp, synthetic construct
  source 1..20: mol_type = other DNA
agtgaacatcaaattctatg

SEQ ID NO: 115882 - DNA, 20 bp, synthetic construct
  source 1..20: mol_type = other DNA
aagtgaacatcaaattctat

SEQ ID NO: 115883 - DNA, 20 bp, synthetic construct
  source 1..20: mol_type = other DNA
taagtgaacatcaaattcta

SEQ ID NO: 115884 - DNA, 20 bp, synthetic construct
  source 1..20: mol_type = other DNA
ctaagtgaacatcaaattct

SEQ ID NO: 115885 - DNA, 20 bp, synthetic construct
  source 1..20: mol_type = other DNA
gctaagtgaacatcaaattc

SEQ ID NO: 115886 - DNA, 20 bp, synthetic construct
  source 1..20: mol_type = other DNA
ggctaagtgaacatcaaatt

SEQ ID NO: 115887 - DNA, 20 bp, synthetic construct
  source 1..20: mol_type = other DNA
aggctaagtgaacatcaaat

SEQ ID NO: 115888 - DNA, 20 bp, synthetic construct
  source 1..20: mol_type = other DNA
gaggctaagtgaacatcaaa

SEQ ID NO: 115889 - DNA, 20 bp, synthetic construct
  source 1..20: mol_type = other DNA
ggaggctaagtgaacatcaa

SEQ ID NO: 115890 - DNA, 20 bp, synthetic construct
  source 1..20: mol_type = other DNA
gggaggctaagtgaacatca

SEQ ID NO: 115891 - DNA, 20 bp, synthetic construct
  source 1..20: mol_type = other DNA
ggggaggctaagtgaacatc

SEQ ID NO: 115892 - DNA, 20 bp, synthetic construct
  source 1..20: mol_type = other DNA
tggggaggctaagtgaacat

SEQ ID NO: 115893 - DNA, 20 bp, synthetic construct
  source 1..20: mol_type = other DNA
ttggggaggctaagtgaaca

SEQ ID NO: 115894 - DNA, 20 bp, synthetic construct
  source 1..20: mol_type = other DNA
attggggaggctaagtgaac

SEQ ID NO: 115895 - DNA, 20 bp, synthetic construct
  source 1..20: mol_type = other DNA
aattggggaggctaagtgaa

SEQ ID NO: 115896 - DNA, 20 bp, synthetic construct
  source 1..20: mol_type = other DNA
caattggggaggctaagtga

SEQ ID NO: 115897 - DNA, 20 bp, synthetic construct
  source 1..20: mol_type = other DNA
acaattggggaggctaagtg

SEQ ID NO: 115898 - DNA, 20 bp, synthetic construct
  source 1..20: mol_type = other DNA
aacaattggggaggctaagt

SEQ ID NO: 115899 - DNA, 20 bp, synthetic construct
  source 1..20: mol_type = other DNA
aaacaattggggaggctaag

SEQ ID NO: 115900 - DNA, 20 bp, synthetic construct
  source 1..20: mol_type = other DNA
caaacaattggggaggctaa

SEQ ID NO: 115901 - DNA, 20 bp, synthetic construct
  source 1..20: mol_type = other DNA
acaaacaattggggaggcta

SEQ ID NO: 115902 - DNA, 20 bp, synthetic construct
  source 1..20: mol_type = other DNA
tacaaacaattggggaggct

SEQ ID NO: 115903 - DNA, 20 bp, synthetic construct
  source 1..20: mol_type = other DNA
atacaaacaattggggaggc

SEQ ID NO: 115904 - DNA, 20 bp, synthetic construct
  source 1..20: mol_type = other DNA
gatacaaacaattggggagg

SEQ ID NO: 115905 - DNA, 20 bp, synthetic construct
  source 1..20: mol_type = other DNA
agatacaaacaattggggag

SEQ ID NO: 115906 - DNA, 20 bp, synthetic construct
  source 1..20: mol_type = other DNA
cagatacaaacaattgggga

SEQ ID NO: 115907 - DNA, 20 bp, synthetic construct
  source 1..20: mol_type = other DNA
tcagatacaaacaattgggg

SEQ ID NO: 115908 - DNA, 20 bp, synthetic construct
  source 1..20: mol_type = other DNA
gtcagatacaaacaattggg

SEQ ID NO: 115909 - DNA, 20 bp, synthetic construct
  source 1..20: mol_type = other DNA
tgtcagatacaaacaattgg

SEQ ID NO: 115910 - DNA, 20 bp, synthetic construct
  source 1..20: mol_type = other DNA
gtgtcagatacaaacaattg

SEQ ID NO: 115911 - DNA, 20 bp, synthetic construct
  source 1..20: mol_type = other DNA
ggtgtcagatacaaacaatt

SEQ ID NO: 115912 - DNA, 20 bp, synthetic construct
  source 1..20: mol_type = other DNA
tggtgtcagatacaaacaat

SEQ ID NO: 115913 - DNA, 20 bp, synthetic construct
  source 1..20: mol_type = other DNA
ttggtgtcagatacaaacaa

SEQ ID NO: 115914 - DNA, 20 bp, synthetic construct
  source 1..20: mol_type = other DNA
cttggtgtcagatacaaaca

SEQ ID NO: 115915 - DNA, 20 bp, synthetic construct
  source 1..20: mol_type = other DNA
gcttggtgtcagatacaaac

SEQ ID NO: 115916 - DNA, 20 bp, synthetic construct
  source 1..20: mol_type = other DNA
tgcttggtgtcagatacaaa

SEQ ID NO: 115917 - DNA, 20 bp, synthetic construct
  source 1..20: mol_type = other DNA
gtgcttggtgtcagatacaa

SEQ ID NO: 115918 - DNA, 20 bp, synthetic construct
  source 1..20: mol_type = other DNA
agtgcttggtgtcagataca

SEQ ID NO: 115919 - DNA, 20 bp, synthetic construct
  source 1..20: mol_type = other DNA
gagtgcttggtgtcagatac

SEQ ID NO: 115920 - DNA, 20 bp, synthetic construct
  source 1..20: mol_type = other DNA
agagtgcttggtgtcagata

SEQ ID NO: 115921 - DNA, 20 bp, synthetic construct
  source 1..20: mol_type = other DNA
aagagtgcttggtgtcagat

SEQ ID NO: 115922 - DNA, 20 bp, synthetic construct
  source 1..20: mol_type = other DNA
aaagagtgcttggtgtcaga

SEQ ID NO: 115923 - DNA, 20 bp, synthetic construct
  source 1..20: mol_type = other DNA
taaagagtgcttggtgtcag

SEQ ID NO: 115924 - DNA, 20 bp, synthetic construct
  source 1..20: mol_type = other DNA
ctaaagagtgcttggtgtca

SEQ ID NO: 115925 - DNA, 20 bp, synthetic construct
  source 1..20: mol_type = other DNA
cctaaagagtgcttggtgtc

SEQ ID NO: 115926 - DNA, 20 bp, synthetic construct
  source 1..20: mol_type = other DNA
acctaaagagtgcttggtgt

SEQ ID NO: 115927 - DNA, 20 bp, synthetic construct
  source 1..20: mol_type = other DNA
aacctaaagagtgcttggtg

SEQ ID NO: 115928 - DNA, 20 bp, synthetic construct
  source 1..20: mol_type = other DNA
aaacctaaagagtgcttggt

SEQ ID NO: 115929 - DNA, 20 bp, synthetic construct
  source 1..20: mol_type = other DNA
aaaacctaaagagtgcttgg

SEQ ID NO: 115930 - DNA, 20 bp, synthetic construct
  source 1..20: mol_type = other DNA
gaaaacctaaagagtgcttg

SEQ ID NO: 115931 - DNA, 20 bp, synthetic construct
  source 1..20: mol_type = other DNA
tgaaaacctaaagagtgctt

SEQ ID NO: 115932 - DNA, 20 bp, synthetic construct
  source 1..20: mol_type = other DNA
ctgaaaacctaaagagtgct

SEQ ID NO: 115933 - DNA, 20 bp, synthetic construct
  source 1..20: mol_type = other DNA
actgaaaacctaaagagtgc

SEQ ID NO: 115934 - DNA, 20 bp, synthetic construct
  source 1..20: mol_type = other DNA
cactgaaaacctaaagagtg

SEQ ID NO: 115935 - DNA, 20 bp, synthetic construct
  source 1..20: mol_type = other DNA
tcactgaaaacctaaagagt

SEQ ID NO: 115936 - DNA, 20 bp, synthetic construct
  source 1..20: mol_type = other DNA
gtcactgaaaacctaaagag

SEQ ID NO: 115937 - DNA, 20 bp, synthetic construct
  source 1..20: mol_type = other DNA
agtcactgaaaacctaaaga

SEQ ID NO: 115938 - DNA, 20 bp, synthetic construct
  source 1..20: mol_type = other DNA
aagtcactgaaaacctaaag

SEQ ID NO: 115939 - DNA, 20 bp, synthetic construct
  source 1..20: mol_type = other DNA
caagtcactgaaaacctaaa

SEQ ID NO: 115940 - DNA, 20 bp, synthetic construct
  source 1..20: mol_type = other DNA
tcaagtcactgaaaacctaa

SEQ ID NO: 115941 - DNA, 20 bp, synthetic construct
  source 1..20: mol_type = other DNA
ctcaagtcactgaaaaccta

SEQ ID NO: 115942 - DNA, 20 bp, synthetic construct
  source 1..20: mol_type = other DNA
cctcaagtcactgaaaacct

SEQ ID NO: 115943 - DNA, 20 bp, synthetic construct
  source 1..20: mol_type = other DNA
ccctcaagtcactgaaaacc

SEQ ID NO: 115944 - DNA, 20 bp, synthetic construct
  source 1..20: mol_type = other DNA
accctcaagtcactgaaaac

SEQ ID NO: 115945 - DNA, 20 bp, synthetic construct
  source 1..20: mol_type = other DNA
caccctcaagtcactgaaaa

SEQ ID NO: 115946 - DNA, 20 bp, synthetic construct
  source 1..20: mol_type = other DNA
acaccctcaagtcactgaaa

SEQ ID NO: 115947 - DNA, 20 bp, synthetic construct
  source 1..20: mol_type = other DNA
cacaccctcaagtcactgaa

SEQ ID NO: 115948 - DNA, 20 bp, synthetic construct
  source 1..20: mol_type = other DNA
tcacaccctcaagtcactga

SEQ ID NO: 115949 - DNA, 20 bp, synthetic construct
  source 1..20: mol_type = other DNA
atcacaccctcaagtcactg

SEQ ID NO: 115950 - DNA, 20 bp, synthetic construct
  source 1..20: mol_type = other DNA
catcacaccctcaagtcact

SEQ ID NO: 115951 - DNA, 20 bp, synthetic construct
  source 1..20: mol_type = other DNA
ccatcacaccctcaagtcac

SEQ ID NO: 115952 - DNA, 20 bp, synthetic construct
  source 1..20: mol_type = other DNA
accatcacaccctcaagtca

SEQ ID NO: 115953 - DNA, 20 bp, synthetic construct
  source 1..20: mol_type = other DNA
aaccatcacaccctcaagtc

SEQ ID NO: 115954 - DNA, 20 bp, synthetic construct
  source 1..20: mol_type = other DNA
taaccatcacaccctcaagt

SEQ ID NO: 115955 - DNA, 20 bp, synthetic construct
  source 1..20: mol_type = other DNA
ataaccatcacaccctcaag

SEQ ID NO: 115956 - DNA, 20 bp, synthetic construct
  source 1..20: mol_type = other DNA
cataaccatcacaccctcaa

SEQ ID NO: 115957 - DNA, 20 bp, synthetic construct
  source 1..20: mol_type = other DNA
gcataaccatcacaccctca

SEQ ID NO: 115958 - DNA, 20 bp, synthetic construct
  source 1..20: mol_type = other DNA
tgcataaccatcacaccctc

SEQ ID NO: 115959 - DNA, 20 bp, synthetic construct
  source 1..20: mol_type = other DNA
atgcataaccatcacaccct

SEQ ID NO: 115960 - DNA, 20 bp, synthetic construct
  source 1..20: mol_type = other DNA
tatgcataaccatcacaccc

SEQ ID NO: 115961 - DNA, 20 bp, synthetic construct
  source 1..20: mol_type = other DNA
atatgcataaccatcacacc

SEQ ID NO: 115962 - DNA, 20 bp, synthetic construct
  source 1..20: mol_type = other DNA
catatgcataaccatcacac

SEQ ID NO: 115963 - DNA, 20 bp, synthetic construct
  source 1..20: mol_type = other DNA
gcatatgcataaccatcaca

SEQ ID NO: 115964 - DNA, 20 bp, synthetic construct
  source 1..20: mol_type = other DNA
tgcatatgcataaccatcac

SEQ ID NO: 115965 - DNA, 20 bp, synthetic construct
  source 1..20: mol_type = other DNA
atgcatatgcataaccatca

SEQ ID NO: 115966 - DNA, 20 bp, synthetic construct
  source 1..20: mol_type = other DNA
aatgcatatgcataaccatc

SEQ ID NO: 115967 - DNA, 20 bp, synthetic construct
  source 1..20: mol_type = other DNA
aaatgcatatgcataaccat

SEQ ID NO: 115968 - DNA, 20 bp, synthetic construct
  source 1..20: mol_type = other DNA
caaatgcatatgcataacca

SEQ ID NO: 115969 - DNA, 20 bp, synthetic construct
  source 1..20: mol_type = other DNA
tcaaatgcatatgcataacc

SEQ ID NO: 115970 - DNA, 20 bp, synthetic construct
  source 1..20: mol_type = other DNA
ttcaaatgcatatgcataac

SEQ ID NO: 115971 - DNA, 20 bp, synthetic construct
  source 1..20: mol_type = other DNA
tttcaaatgcatatgcataa

SEQ ID NO: 115972 - DNA, 20 bp, synthetic construct
  source 1..20: mol_type = other DNA
gtttcaaatgcatatgcata

SEQ ID NO: 115973 - DNA, 20 bp, synthetic construct
  source 1..20: mol_type = other DNA
tgtttcaaatgcatatgcat

SEQ ID NO: 115974 - DNA, 20 bp, synthetic construct
  source 1..20: mol_type = other DNA
ctgtttcaaatgcatatgca

SEQ ID NO: 115975 - DNA, 20 bp, synthetic construct
  source 1..20: mol_type = other DNA
tctgtttcaaatgcatatgc

SEQ ID NO: 115976 - DNA, 20 bp, synthetic construct
  source 1..20: mol_type = other DNA
gtctgtttcaaatgcatatg

SEQ ID NO: 115977 - DNA, 20 bp, synthetic construct
  source 1..20: mol_type = other DNA
tgtctgtttcaaatgcatat

SEQ ID NO: 115978 - DNA, 20 bp, synthetic construct
  source 1..20: mol_type = other DNA
ctgtctgtttcaaatgcata

SEQ ID NO: 115979 - DNA, 20 bp, synthetic construct
  source 1..20: mol_type = other DNA
cctgtctgtttcaaatgcat

SEQ ID NO: 115980 - DNA, 20 bp, synthetic construct
  source 1..20: mol_type = other DNA
gcctgtctgtttcaaatgca

SEQ ID NO: 115981 - DNA, 20 bp, synthetic construct
  source 1..20: mol_type = other DNA
tgcctgtctgtttcaaatgc

SEQ ID NO: 115982 - DNA, 20 bp, synthetic construct
  source 1..20: mol_type = other DNA
atgcctgtctgtttcaaatg

SEQ ID NO: 115983 - DNA, 20 bp, synthetic construct
  source 1..20: mol_type = other DNA
catgcctgtctgtttcaaat

SEQ ID NO: 115984 - DNA, 20 bp, synthetic construct
  source 1..20: mol_type = other DNA
gcatgcctgtctgtttcaaa

SEQ ID NO: 115985 - DNA, 20 bp, synthetic construct
  source 1..20: mol_type = other DNA
tgcatgcctgtctgtttcaa

SEQ ID NO: 115986 - DNA, 20 bp, synthetic construct
  source 1..20: mol_type = other DNA
ctgcatgcctgtctgtttca

SEQ ID NO: 115987 - DNA, 20 bp, synthetic construct
  source 1..20: mol_type = other DNA
tctgcatgcctgtctgtttc

SEQ ID NO: 115988 - DNA, 20 bp, synthetic construct
  source 1..20: mol_type = other DNA
ctctgcatgcctgtctgttt

SEQ ID NO: 115989 - DNA, 20 bp, synthetic construct
  source 1..20: mol_type = other DNA
tctctgcatgcctgtctgtt

SEQ ID NO: 115990 - DNA, 20 bp, synthetic construct
  source 1..20: mol_type = other DNA
atctctgcatgcctgtctgt

SEQ ID NO: 115991 - DNA, 20 bp, synthetic construct
  source 1..20: mol_type = other DNA
aatctctgcatgcctgtctg

SEQ ID NO: 115992 - DNA, 20 bp, synthetic construct
  source 1..20: mol_type = other DNA
gaatctctgcatgcctgtct

SEQ ID NO: 115993 - DNA, 20 bp, synthetic construct
  source 1..20: mol_type = other DNA
tgaatctctgcatgcctgtc

SEQ ID NO: 115994 - DNA, 20 bp, synthetic construct
  source 1..20: mol_type = other DNA
ctgaatctctgcatgcctgt

SEQ ID NO: 115995 - DNA, 20 bp, synthetic construct
  source 1..20: mol_type = other DNA
actgaatctctgcatgcctg

SEQ ID NO: 115996 - DNA, 20 bp, synthetic construct
  source 1..20: mol_type = other DNA
cactgaatctctgcatgcct

SEQ ID NO: 115997 - DNA, 20 bp, synthetic construct
  source 1..20: mol_type = other DNA
acactgaatctctgcatgcc

SEQ ID NO: 115998 - DNA, 20 bp, synthetic construct
  source 1..20: mol_type = other DNA
cacactgaatctctgcatgc

SEQ ID NO: 115999 - DNA, 20 bp, synthetic construct
  source 1..20: mol_type = other DNA
acacactgaatctctgcatg

SEQ ID NO: 116000 - DNA, 20 bp, synthetic construct
  source 1..20: mol_type = other DNA
aacacactgaatctctgcat

SEQ ID NO: 116001 - DNA, 20 bp, synthetic construct
  source 1..20: mol_type = other DNA
caacacactgaatctctgca

SEQ ID NO: 116002 - DNA, 20 bp, synthetic construct
  source 1..20: mol_type = other DNA
acaacacactgaatctctgc

SEQ ID NO: 116003 - DNA, 20 bp, synthetic construct
  source 1..20: mol_type = other DNA
aacaacacactgaatctctg

SEQ ID NO: 116004 - DNA, 20 bp, synthetic construct
  source 1..20: mol_type = other DNA
taacaacacactgaatctct

SEQ ID NO: 116005 - DNA, 20 bp, synthetic construct
  source 1..20: mol_type = other DNA
ttaacaacacactgaatctc

SEQ ID NO: 116006 - DNA, 20 bp, synthetic construct
  source 1..20: mol_type = other DNA
cttaacaacacactgaatct

SEQ ID NO: 116007 - DNA, 20 bp, synthetic construct
  source 1..20: mol_type = other DNA
acttaacaacacactgaatc

SEQ ID NO: 116008 - DNA, 20 bp, synthetic construct
  source 1..20: mol_type = other DNA
tacttaacaacacactgaat

SEQ ID NO: 116009 - DNA, 20 bp, synthetic construct
  source 1..20: mol_type = other DNA
atacttaacaacacactgaa

SEQ ID NO: 116010 - DNA, 20 bp, synthetic construct
  source 1..20: mol_type = other DNA
catacttaacaacacactga

SEQ ID NO: 116011 - DNA, 20 bp, synthetic construct
  source 1..20: mol_type = other DNA
tcatacttaacaacacactg

SEQ ID NO: 116012 - DNA, 20 bp, synthetic construct
  source 1..20: mol_type = other DNA
ctcatacttaacaacacact

SEQ ID NO: 116013 - DNA, 20 bp, synthetic construct
  source 1..20: mol_type = other DNA
cctcatacttaacaacacac

SEQ ID NO: 116014 - DNA, 20 bp, synthetic construct
  source 1..20: mol_type = other DNA
tcctcatacttaacaacaca

SEQ ID NO: 116015 - DNA, 20 bp, synthetic construct
  source 1..20: mol_type = other DNA
gtcctcatacttaacaacac

SEQ ID NO: 116016 - DNA, 20 bp, synthetic construct
  source 1..20: mol_type = other DNA
ggtcctcatacttaacaaca

SEQ ID NO: 116017 - DNA, 20 bp, synthetic construct
  source 1..20: mol_type = other DNA
aggtcctcatacttaacaac

SEQ ID NO: 116018 - DNA, 20 bp, synthetic construct
  source 1..20: mol_type = other DNA
taggtcctcatacttaacaa

SEQ ID NO: 116019 - DNA, 20 bp, synthetic construct
  source 1..20: mol_type = other DNA
ttaggtcctcatacttaaca

SEQ ID NO: 116020 - DNA, 20 bp, synthetic construct
  source 1..20: mol_type = other DNA
tttaggtcctcatacttaac

SEQ ID NO: 116021 - DNA, 20 bp, synthetic construct
  source 1..20: mol_type = other DNA
atttaggtcctcatacttaa

SEQ ID NO: 116022 - DNA, 20 bp, synthetic construct
  source 1..20: mol_type = other DNA
gatttaggtcctcatactta

SEQ ID NO: 116023 - DNA, 20 bp, synthetic construct
  source 1..20: mol_type = other DNA
agatttaggtcctcatactt

SEQ ID NO: 116024 - DNA, 20 bp, synthetic construct
  source 1..20: mol_type = other DNA
cagatttaggtcctcatact

SEQ ID NO: 116025 - DNA, 20 bp, synthetic construct
  source 1..20: mol_type = other DNA
tcagatttaggtcctcatac

SEQ ID NO: 116026 - DNA, 20 bp, synthetic construct
  source 1..20: mol_type = other DNA
ctcagatttaggtcctcata

SEQ ID NO: 116027 - DNA, 20 bp, synthetic construct
  source 1..20: mol_type = other DNA
tctcagatttaggtcctcat

SEQ ID NO: 116028 - DNA, 20 bp, synthetic construct
  source 1..20: mol_type = other DNA
ttctcagatttaggtcctca

SEQ ID NO: 116029 - DNA, 20 bp, synthetic construct
  source 1..20: mol_type = other DNA
attctcagatttaggtcctc

SEQ ID NO: 116030 - DNA, 20 bp, synthetic construct
  source 1..20: mol_type = other DNA
cattctcagatttaggtcct

SEQ ID NO: 116031 - DNA, 20 bp, synthetic construct
  source 1..20: mol_type = other DNA
acattctcagatttaggtcc

SEQ ID NO: 116032 - DNA, 20 bp, synthetic construct
  source 1..20: mol_type = other DNA
aacattctcagatttaggtc

SEQ ID NO: 116033 - DNA, 20 bp, synthetic construct
  source 1..20: mol_type = other DNA
aaacattctcagatttaggt

SEQ ID NO: 116034 - DNA, 20 bp, synthetic construct
  source 1..20: mol_type = other DNA
aaaacattctcagatttagg

SEQ ID NO: 116035 - DNA, 20 bp, synthetic construct
  source 1..20: mol_type = other DNA
gaaaacattctcagatttag

SEQ ID NO: 116036 - DNA, 20 bp, synthetic construct
  source 1..20: mol_type = other DNA
agaaaacattctcagattta

SEQ ID NO: 116037 - DNA, 20 bp, synthetic construct
  source 1..20: mol_type = other DNA
cagaaaacattctcagattt

SEQ ID NO: 116038 - DNA, 20 bp, synthetic construct
  source 1..20: mol_type = other DNA
acagaaaacattctcagatt

SEQ ID NO: 116039 - DNA, 20 bp, synthetic construct
  source 1..20: mol_type = other DNA
cacagaaaacattctcagat

SEQ ID NO: 116040 - DNA, 20 bp, synthetic construct
  source 1..20: mol_type = other DNA
tcacagaaaacattctcaga

SEQ ID NO: 116041 - DNA, 20 bp, synthetic construct
  source 1..20: mol_type = other DNA
ttcacagaaaacattctcag

SEQ ID NO: 116042 - DNA, 20 bp, synthetic construct
  source 1..20: mol_type = other DNA
tttcacagaaaacattctca

SEQ ID NO: 116043 - DNA, 20 bp, synthetic construct
  source 1..20: mol_type = other DNA
ttttcacagaaaacattctc

SEQ ID NO: 116044 - DNA, 20 bp, synthetic construct
  source 1..20: mol_type = other DNA
tttttcacagaaaacattct

SEQ ID NO: 116045 - DNA, 20 bp, synthetic construct
  source 1..20: mol_type = other DNA
ctttttcacagaaaacattc

SEQ ID NO: 116046 - DNA, 20 bp, synthetic construct
  source 1..20: mol_type = other DNA
tctttttcacagaaaacatt

SEQ ID NO: 116047 - DNA, 20 bp, synthetic construct
  source 1..20: mol_type = other DNA
atctttttcacagaaaacat

SEQ ID NO: 116048 - DNA, 20 bp, synthetic construct
  source 1..20: mol_type = other DNA
catctttttcacagaaaaca

SEQ ID NO: 116049 - DNA, 20 bp, synthetic construct
  source 1..20: mol_type = other DNA
ccatctttttcacagaaaac

SEQ ID NO: 116050 - DNA, 20 bp, synthetic construct
  source 1..20: mol_type = other DNA
accatctttttcacagaaaa

SEQ ID NO: 116051 - DNA, 20 bp, synthetic construct
  source 1..20: mol_type = other DNA
aaccatctttttcacagaaa

SEQ ID NO: 116052 - DNA, 20 bp, synthetic construct
  source 1..20: mol_type = other DNA
aaaccatctttttcacagaa

SEQ ID NO: 116053 - DNA, 20 bp, synthetic construct
  source 1..20: mol_type = other DNA
taaaccatctttttcacaga

SEQ ID NO: 116054 - DNA, 20 bp, synthetic construct
  source 1..20: mol_type = other DNA
ctaaaccatctttttcacag

SEQ ID NO: 116055 - DNA, 20 bp, synthetic construct
  source 1..20: mol_type = other DNA
tctaaaccatctttttcaca

SEQ ID NO: 116056 - DNA, 20 bp, synthetic construct
  source 1..20: mol_type = other DNA
atctaaaccatctttttcac

SEQ ID NO: 116057 - DNA, 20 bp, synthetic construct
  source 1..20: mol_type = other DNA
aatctaaaccatctttttca

SEQ ID NO: 116058 - DNA, 20 bp, synthetic construct
  source 1..20: mol_type = other DNA
aaatctaaaccatctttttc

SEQ ID NO: 116059 - DNA, 20 bp, synthetic construct
  source 1..20: mol_type = other DNA
taaatctaaaccatcttttt

SEQ ID NO: 116060 - DNA, 20 bp, synthetic construct
  source 1..20: mol_type = other DNA
gtaaatctaaaccatctttt

SEQ ID NO: 116061 - DNA, 20 bp, synthetic construct
  source 1..20: mol_type = other DNA
agtaaatctaaaccatcttt

SEQ ID NO: 116062 - DNA, 20 bp, synthetic construct
  source 1..20: mol_type = other DNA
cagtaaatctaaaccatctt

SEQ ID NO: 116063 - DNA, 20 bp, synthetic construct
  source 1..20: mol_type = other DNA
acagtaaatctaaaccatct

SEQ ID NO: 116064 - DNA, 20 bp, synthetic construct
  source 1..20: mol_type = other DNA
tacagtaaatctaaaccatc

SEQ ID NO: 116065 - DNA, 20 bp, synthetic construct
  source 1..20: mol_type = other DNA
ctacagtaaatctaaaccat

SEQ ID NO: 116066 - DNA, 20 bp, synthetic construct
  source 1..20: mol_type = other DNA
actacagtaaatctaaacca

SEQ ID NO: 116067 - DNA, 20 bp, synthetic construct
  source 1..20: mol_type = other DNA
aactacagtaaatctaaacc

SEQ ID NO: 116068 - DNA, 20 bp, synthetic construct
  source 1..20: mol_type = other DNA
aaactacagtaaatctaaac

SEQ ID NO: 116069 - DNA, 20 bp, synthetic construct
  source 1..20: mol_type = other DNA
caaactacagtaaatctaaa

SEQ ID NO: 116070 - DNA, 20 bp, synthetic construct
  source 1..20: mol_type = other DNA
ccaaactacagtaaatctaa

SEQ ID NO: 116071 - DNA, 20 bp, synthetic construct
  source 1..20: mol_type = other DNA
cccaaactacagtaaatcta

SEQ ID NO: 116072 - DNA, 20 bp, synthetic construct
  source 1..20: mol_type = other DNA
ccccaaactacagtaaatct

SEQ ID NO: 116073 - DNA, 20 bp, synthetic construct
  source 1..20: mol_type = other DNA
accccaaactacagtaaatc

SEQ ID NO: 116074 - DNA, 20 bp, synthetic construct
  source 1..20: mol_type = other DNA
aaccccaaactacagtaaat

SEQ ID NO: 116075 - DNA, 20 bp, synthetic construct
  source 1..20: mol_type = other DNA
aaaccccaaactacagtaaa

SEQ ID NO: 116076 - DNA, 20 bp, synthetic construct
  source 1..20: mol_type = other DNA
caaaccccaaactacagtaa

SEQ ID NO: 116077 - DNA, 20 bp, synthetic construct
  source 1..20: mol_type = other DNA
acaaaccccaaactacagta

SEQ ID NO: 116078 - DNA, 20 bp, synthetic construct
  source 1..20: mol_type = other DNA
aacaaaccccaaactacagt

SEQ ID NO: 116079 - DNA, 20 bp, synthetic construct
  source 1..20: mol_type = other DNA
gaacaaaccccaaactacag

SEQ ID NO: 116080 - DNA, 20 bp, synthetic construct
  source 1..20: mol_type = other DNA
ggaacaaaccccaaactaca

SEQ ID NO: 116081 - DNA, 20 bp, synthetic construct
  source 1..20: mol_type = other DNA
aggaacaaaccccaaactac

SEQ ID NO: 116082 - DNA, 20 bp, synthetic construct
  source 1..20: mol_type = other DNA
aaggaacaaaccccaaacta

SEQ ID NO: 116083 - DNA, 20 bp, synthetic construct
  source 1..20: mol_type = other DNA
aaaggaacaaaccccaaact

SEQ ID NO: 116084 - DNA, 20 bp, synthetic construct
  source 1..20: mol_type = other DNA
aaaaggaacaaaccccaaac

SEQ ID NO: 116085 - DNA, 20 bp, synthetic construct
  source 1..20: mol_type = other DNA
taaaaggaacaaaccccaaa

SEQ ID NO: 116086 - DNA, 20 bp, synthetic construct
  source 1..20: mol_type = other DNA
ctaaaaggaacaaaccccaa

SEQ ID NO: 116087 - DNA, 20 bp, synthetic construct
  source 1..20: mol_type = other DNA
gctaaaaggaacaaacccca

SEQ ID NO: 116088 - DNA, 20 bp, synthetic construct
  source 1..20: mol_type = other DNA
agctaaaaggaacaaacccc

SEQ ID NO: 116089 - DNA, 20 bp, synthetic construct
  source 1..20: mol_type = other DNA
cagctaaaaggaacaaaccc

SEQ ID NO: 116090 - DNA, 20 bp, synthetic construct
  source 1..20: mol_type = other DNA
acagctaaaaggaacaaacc

SEQ ID NO: 116091 - DNA, 20 bp, synthetic construct
  source 1..20: mol_type = other DNA
cacagctaaaaggaacaaac

SEQ ID NO: 116092 - DNA, 20 bp, synthetic construct
  source 1..20: mol_type = other DNA
ccacagctaaaaggaacaaa

SEQ ID NO: 116093 - DNA, 20 bp, synthetic construct
  source 1..20: mol_type = other DNA
cccacagctaaaaggaacaa

SEQ ID NO: 116094 - DNA, 20 bp, synthetic construct
  source 1..20: mol_type = other DNA
acccacagctaaaaggaaca

SEQ ID NO: 116095 - DNA, 20 bp, synthetic construct
  source 1..20: mol_type = other DNA
tacccacagctaaaaggaac

SEQ ID NO: 116096 - DNA, 20 bp, synthetic construct
  source 1..20: mol_type = other DNA
atacccacagctaaaaggaa

SEQ ID NO: 116097 - DNA, 20 bp, synthetic construct
  source 1..20: mol_type = other DNA
catacccacagctaaaagga

SEQ ID NO: 116098 - DNA, 20 bp, synthetic construct
  source 1..20: mol_type = other DNA
tcatacccacagctaaaagg

SEQ ID NO: 116099 - DNA, 20 bp, synthetic construct
  source 1..20: mol_type = other DNA
atcatacccacagctaaaag

SEQ ID NO: 116100 - DNA, 20 bp, synthetic construct
  source 1..20: mol_type = other DNA
gatcatacccacagctaaaa

SEQ ID NO: 116101 - DNA, 20 bp, synthetic construct
  source 1..20: mol_type = other DNA
agatcatacccacagctaaa

SEQ ID NO: 116102 - DNA, 20 bp, synthetic construct
  source 1..20: mol_type = other DNA
tagatcatacccacagctaa

SEQ ID NO: 116103 - DNA, 20 bp, synthetic construct
  source 1..20: mol_type = other DNA
ttagatcatacccacagcta

SEQ ID NO: 116104 - DNA, 20 bp, synthetic construct
  source 1..20: mol_type = other DNA
attagatcatacccacagct

SEQ ID NO: 116105 - DNA, 20 bp, synthetic construct
  source 1..20: mol_type = other DNA
aattagatcatacccacagc

SEQ ID NO: 116106 - DNA, 20 bp, synthetic construct
  source 1..20: mol_type = other DNA
aaattagatcatacccacag

SEQ ID NO: 116107 - DNA, 20 bp, synthetic construct
  source 1..20: mol_type = other DNA
aaaattagatcatacccaca

SEQ ID NO: 116108 - DNA, 20 bp, synthetic construct
  source 1..20: mol_type = other DNA
aaaaattagatcatacccac

SEQ ID NO: 116109 - DNA, 20 bp, synthetic construct
  source 1..20: mol_type = other DNA
aaaaaattagatcataccca

SEQ ID NO: 116110 - DNA, 20 bp, synthetic construct
  source 1..20: mol_type = other DNA
taaaaaattagatcataccc

SEQ ID NO: 116111 - DNA, 20 bp, synthetic construct
  source 1..20: mol_type = other DNA
ttaaaaaattagatcatacc

SEQ ID NO: 116112 - DNA, 20 bp, synthetic construct
  source 1..20: mol_type = other DNA
attaaaaaattagatcatac

SEQ ID NO: 116113 - DNA, 20 bp, synthetic construct
  source 1..20: mol_type = other DNA
cattaaaaaattagatcata

SEQ ID NO: 116114 - DNA, 20 bp, synthetic construct
  source 1..20: mol_type = other DNA
tcattaaaaaattagatcat

SEQ ID NO: 116115 - DNA, 20 bp, synthetic construct
  source 1..20: mol_type = other DNA
gtcattaaaaaattagatca

SEQ ID NO: 116116 - DNA, 20 bp, synthetic construct
  source 1..20: mol_type = other DNA
agtcattaaaaaattagatc

SEQ ID NO: 116117 - DNA, 20 bp, synthetic construct
  source 1..20: mol_type = other DNA
tagtcattaaaaaattagat

SEQ ID NO: 116118 - DNA, 20 bp, synthetic construct
  source 1..20: mol_type = other DNA
ttagtcattaaaaaattaga

SEQ ID NO: 116119 - DNA, 20 bp, synthetic construct
  source 1..20: mol_type = other DNA
attagtcattaaaaaattag

SEQ ID NO: 116120 - DNA, 20 bp, synthetic construct
  source 1..20: mol_type = other DNA
cattagtcattaaaaaatta

SEQ ID NO: 116121 - DNA, 20 bp, synthetic construct
  source 1..20: mol_type = other DNA
ccattagtcattaaaaaatt

SEQ ID NO: 116122 - DNA, 20 bp, synthetic construct
  source 1..20: mol_type = other DNA
tccattagtcattaaaaaat

SEQ ID NO: 116123 - DNA, 20 bp, synthetic construct
  source 1..20: mol_type = other DNA
ctccattagtcattaaaaaa

SEQ ID NO: 116124 - DNA, 20 bp, synthetic construct
  source 1..20: mol_type = other DNA
tctccattagtcattaaaaa

SEQ ID NO: 116125 - DNA, 20 bp, synthetic construct
  source 1..20: mol_type = other DNA
ttctccattagtcattaaaa

SEQ ID NO: 116126 - DNA, 20 bp, synthetic construct
  source 1..20: mol_type = other DNA
attctccattagtcattaaa

SEQ ID NO: 116127 - DNA, 20 bp, synthetic construct
  source 1..20: mol_type = other DNA
gattctccattagtcattaa

SEQ ID NO: 116128 - DNA, 20 bp, synthetic construct
  source 1..20: mol_type = other DNA
tgattctccattagtcatta

SEQ ID NO: 116129 - DNA, 20 bp, synthetic construct
  source 1..20: mol_type = other DNA
ctgattctccattagtcatt

SEQ ID NO: 116130 - DNA, 20 bp, synthetic construct
  source 1..20: mol_type = other DNA
cctgattctccattagtcat

SEQ ID NO: 116131 - DNA, 20 bp, synthetic construct
  source 1..20: mol_type = other DNA
tcctgattctccattagtca

SEQ ID NO: 116132 - DNA, 20 bp, synthetic construct
  source 1..20: mol_type = other DNA
ttcctgattctccattagtc

SEQ ID NO: 116133 - DNA, 20 bp, synthetic construct
  source 1..20: mol_type = other DNA
tttcctgattctccattagt

SEQ ID NO: 116134 - DNA, 20 bp, synthetic construct
  source 1..20: mol_type = other DNA
gtttcctgattctccattag

SEQ ID NO: 116135 - DNA, 20 bp, synthetic construct
  source 1..20: mol_type = other DNA
ggtttcctgattctccatta

SEQ ID NO: 116136 - DNA, 20 bp, synthetic construct
  source 1..20: mol_type = other DNA
aggtttcctgattctccatt

SEQ ID NO: 116137 - DNA, 20 bp, synthetic construct
  source 1..20: mol_type = other DNA
aaggtttcctgattctccat

SEQ ID NO: 116138 - DNA, 20 bp, synthetic construct
  source 1..20: mol_type = other DNA
gaaggtttcctgattctcca

SEQ ID NO: 116139 - DNA, 20 bp, synthetic construct
  source 1..20: mol_type = other DNA
agaaggtttcctgattctcc

SEQ ID NO: 116140 - DNA, 20 bp, synthetic construct
  source 1..20: mol_type = other DNA
gagaaggtttcctgattctc

SEQ ID NO: 116141 - DNA, 20 bp, synthetic construct
  source 1..20: mol_type = other DNA
tgagaaggtttcctgattct

SEQ ID NO: 116142 - DNA, 20 bp, synthetic construct
  source 1..20: mol_type = other DNA
atgagaaggtttcctgattc

SEQ ID NO: 116143 - DNA, 20 bp, synthetic construct
  source 1..20: mol_type = other DNA
catgagaaggtttcctgatt

SEQ ID NO: 116144 - DNA, 20 bp, synthetic construct
  source 1..20: mol_type = other DNA
gcatgagaaggtttcctgat

SEQ ID NO: 116145 - DNA, 20 bp, synthetic construct
  source 1..20: mol_type = other DNA
ggcatgagaaggtttcctga

SEQ ID NO: 116146 - DNA, 20 bp, synthetic construct
  source 1..20: mol_type = other DNA
aggcatgagaaggtttcctg

SEQ ID NO: 116147 - DNA, 20 bp, synthetic construct
  source 1..20: mol_type = other DNA
taggcatgagaaggtttcct

SEQ ID NO: 116148 - DNA, 20 bp, synthetic construct
  source 1..20: mol_type = other DNA
ctaggcatgagaaggtttcc

SEQ ID NO: 116149 - DNA, 20 bp, synthetic construct
  source 1..20: mol_type = other DNA
gctaggcatgagaaggtttc

SEQ ID NO: 116150 - DNA, 20 bp, synthetic construct
  source 1..20: mol_type = other DNA
agctaggcatgagaaggttt

SEQ ID NO: 116151 - DNA, 20 bp, synthetic construct
  source 1..20: mol_type = other DNA
gagctaggcatgagaaggtt

SEQ ID NO: 116152 - DNA, 20 bp, synthetic construct
  source 1..20: mol_type = other DNA
agagctaggcatgagaaggt

SEQ ID NO: 116153 - DNA, 20 bp, synthetic construct
  source 1..20: mol_type = other DNA
gagagctaggcatgagaagg

SEQ ID NO: 116154 - DNA, 20 bp, synthetic construct
  source 1..20: mol_type = other DNA
agagagctaggcatgagaag

SEQ ID NO: 116155 - DNA, 20 bp, synthetic construct
  source 1..20: mol_type = other DNA
tagagagctaggcatgagaa

SEQ ID NO: 116156 - DNA, 20 bp, synthetic construct
  source 1..20: mol_type = other DNA
ctagagagctaggcatgaga

SEQ ID NO: 116157 - DNA, 20 bp, synthetic construct
  source 1..20: mol_type = other DNA
gctagagagctaggcatgag

SEQ ID NO: 116158 - DNA, 20 bp, synthetic construct
  source 1..20: mol_type = other DNA
tgctagagagctaggcatga

SEQ ID NO: 116159 - DNA, 20 bp, synthetic construct
  source 1..20: mol_type = other DNA
ttgctagagagctaggcatg

SEQ ID NO: 116160 - DNA, 20 bp, synthetic construct
  source 1..20: mol_type = other DNA
attgctagagagctaggcat

SEQ ID NO: 116161 - DNA, 20 bp, synthetic construct
  source 1..20: mol_type = other DNA
tattgctagagagctaggca

SEQ ID NO: 116162 - DNA, 20 bp, synthetic construct
  source 1..20: mol_type = other DNA
atattgctagagagctaggc

SEQ ID NO: 116163 - DNA, 20 bp, synthetic construct
  source 1..20: mol_type = other DNA
tatattgctagagagctagg

SEQ ID NO: 116164 - DNA, 20 bp, synthetic construct
  source 1..20: mol_type = other DNA
ttatattgctagagagctag

SEQ ID NO: 116165 - DNA, 20 bp, synthetic construct
  source 1..20: mol_type = other DNA
tttatattgctagagagcta

SEQ ID NO: 116166 - DNA, 20 bp, synthetic construct
  source 1..20: mol_type = other DNA
ttttatattgctagagagct

SEQ ID NO: 116167 - DNA, 20 bp, synthetic construct
  source 1..20: mol_type = other DNA
gttttatattgctagagagc

SEQ ID NO: 116168 - DNA, 20 bp, synthetic construct
  source 1..20: mol_type = other DNA
agttttatattgctagagag

SEQ ID NO: 116169 - DNA, 20 bp, synthetic construct
  source 1..20: mol_type = other DNA
tagttttatattgctagaga

SEQ ID NO: 116170 - DNA, 20 bp, synthetic construct
  source 1..20: mol_type = other DNA
ttagttttatattgctagag

SEQ ID NO: 116171 - DNA, 20 bp, synthetic construct
  source 1..20: mol_type = other DNA
cttagttttatattgctaga

SEQ ID NO: 116172 - DNA, 20 bp, synthetic construct
  source 1..20: mol_type = other DNA
tcttagttttatattgctag

SEQ ID NO: 116173 - DNA, 20 bp, synthetic construct
  source 1..20: mol_type = other DNA
ctcttagttttatattgcta

SEQ ID NO: 116174 - DNA, 20 bp, synthetic construct
  source 1..20: mol_type = other DNA
actcttagttttatattgct

SEQ ID NO: 116175 - DNA, 20 bp, synthetic construct
  source 1..20: mol_type = other DNA
cactcttagttttatattgc

SEQ ID NO: 116176 - DNA, 20 bp, synthetic construct
  source 1..20: mol_type = other DNA
tcactcttagttttatattg

SEQ ID NO: 116177 - DNA, 20 bp, synthetic construct
  source 1..20: mol_type = other DNA
gtcactcttagttttatatt

SEQ ID NO: 116178 - DNA, 20 bp, synthetic construct
  source 1..20: mol_type = other DNA
tgtcactcttagttttatat

SEQ ID NO: 116179 - DNA, 20 bp, synthetic construct
  source 1..20: mol_type = other DNA
ctgtcactcttagttttata

SEQ ID NO: 116180 - DNA, 20 bp, synthetic construct
  source 1..20: mol_type = other DNA
tctgtcactcttagttttat

SEQ ID NO: 116181 - DNA, 20 bp, synthetic construct
  source 1..20: mol_type = other DNA
ttctgtcactcttagtttta

SEQ ID NO: 116182 - DNA, 20 bp, synthetic construct
  source 1..20: mol_type = other DNA
attctgtcactcttagtttt

SEQ ID NO: 116183 - DNA, 20 bp, synthetic construct
  source 1..20: mol_type = other DNA
tattctgtcactcttagttt

SEQ ID NO: 116184 - DNA, 20 bp, synthetic construct
  source 1..20: mol_type = other DNA
gtattctgtcactcttagtt

SEQ ID NO: 116185 - DNA, 20 bp, synthetic construct
  source 1..20: mol_type = other DNA
ggtattctgtcactcttagt

SEQ ID NO: 116186 - DNA, 20 bp, synthetic construct
  source 1..20: mol_type = other DNA
aggtattctgtcactcttag

SEQ ID NO: 116187 - DNA, 20 bp, synthetic construct
  source 1..20: mol_type = other DNA
aaggtattctgtcactctta

SEQ ID NO: 116188 - DNA, 20 bp, synthetic construct
  source 1..20: mol_type = other DNA
caaggtattctgtcactctt

SEQ ID NO: 116189 - DNA, 20 bp, synthetic construct
  source 1..20: mol_type = other DNA
acaaggtattctgtcactct

SEQ ID NO: 116190 - DNA, 20 bp, synthetic construct
  source 1..20: mol_type = other DNA
aacaaggtattctgtcactc

SEQ ID NO: 116191 - DNA, 20 bp, synthetic construct
  source 1..20: mol_type = other DNA
taacaaggtattctgtcact

SEQ ID NO: 116192 - DNA, 20 bp, synthetic construct
  source 1..20: mol_type = other DNA
ataacaaggtattctgtcac

SEQ ID NO: 116193 - DNA, 20 bp, synthetic construct
  source 1..20: mol_type = other DNA
aataacaaggtattctgtca

SEQ ID NO: 116194 - DNA, 20 bp, synthetic construct
  source 1..20: mol_type = other DNA
taataacaaggtattctgtc

SEQ ID NO: 116195 - DNA, 20 bp, synthetic construct
  source 1..20: mol_type = other DNA
ataataacaaggtattctgt

SEQ ID NO: 116196 - DNA, 20 bp, synthetic construct
  source 1..20: mol_type = other DNA
gataataacaaggtattctg

SEQ ID NO: 116197 - DNA, 20 bp, synthetic construct
  source 1..20: mol_type = other DNA
tgataataacaaggtattct

SEQ ID NO: 116198 - DNA, 20 bp, synthetic construct
  source 1..20: mol_type = other DNA
atgataataacaaggtattc

SEQ ID NO: 116199 - DNA, 20 bp, synthetic construct
  source 1..20: mol_type = other DNA
tatgataataacaaggtatt

SEQ ID NO: 116200 - DNA, 20 bp, synthetic construct
  source 1..20: mol_type = other DNA
ctatgataataacaaggtat

SEQ ID NO: 116201 - DNA, 20 bp, synthetic construct
  source 1..20: mol_type = other DNA
cctatgataataacaaggta

SEQ ID NO: 116202 - DNA, 20 bp, synthetic construct
  source 1..20: mol_type = other DNA
acctatgataataacaaggt

SEQ ID NO: 116203 - DNA, 20 bp, synthetic construct
  source 1..20: mol_type = other DNA
cacctatgataataacaagg

SEQ ID NO: 116204 - DNA, 20 bp, synthetic construct
  source 1..20: mol_type = other DNA
gcacctatgataataacaag

SEQ ID NO: 116205 - DNA, 20 bp, synthetic construct
  source 1..20: mol_type = other DNA
ggcacctatgataataacaa

SEQ ID NO: 116206 - DNA, 20 bp, synthetic construct
  source 1..20: mol_type = other DNA
aggcacctatgataataaca

SEQ ID NO: 116207 - DNA, 20 bp, synthetic construct
  source 1..20: mol_type = other DNA
taggcacctatgataataac

SEQ ID NO: 116208 - DNA, 20 bp, synthetic construct
  source 1..20: mol_type = other DNA
ttaggcacctatgataataa

SEQ ID NO: 116209 - DNA, 20 bp, synthetic construct
  source 1..20: mol_type = other DNA
attaggcacctatgataata

SEQ ID NO: 116210 - DNA, 20 bp, synthetic construct
  source 1..20: mol_type = other DNA
cattaggcacctatgataat

SEQ ID NO: 116211 - DNA, 20 bp, synthetic construct
  source 1..20: mol_type = other DNA
acattaggcacctatgataa

SEQ ID NO: 116212 - DNA, 20 bp, synthetic construct
  source 1..20: mol_type = other DNA
aacattaggcacctatgata

SEQ ID NO: 116213 - DNA, 20 bp, synthetic construct
  source 1..20: mol_type = other DNA
taacattaggcacctatgat

SEQ ID NO: 116214 - DNA, 20 bp, synthetic construct
  source 1..20: mol_type = other DNA
ttaacattaggcacctatga

SEQ ID NO: 116215 - DNA, 20 bp, synthetic construct
  source 1..20: mol_type = other DNA
attaacattaggcacctatg

SEQ ID NO: 116216 - DNA, 20 bp, synthetic construct
  source 1..20: mol_type = other DNA
aattaacattaggcacctat

SEQ ID NO: 116217 - DNA, 20 bp, synthetic construct
  source 1..20: mol_type = other DNA
aaattaacattaggcaccta

SEQ ID NO: 116218 - DNA, 20 bp, synthetic construct
  source 1..20: mol_type = other DNA
aaaattaacattaggcacct

SEQ ID NO: 116219 - DNA, 20 bp, synthetic construct
  source 1..20: mol_type = other DNA
aaaaattaacattaggcacc

SEQ ID NO: 116220 - DNA, 20 bp, synthetic construct
  source 1..20: mol_type = other DNA
aaaaaattaacattaggcac

SEQ ID NO: 116221 - DNA, 20 bp, synthetic construct
  source 1..20: mol_type = other DNA
aaaaaaattaacattaggca

SEQ ID NO: 116222 - DNA, 20 bp, synthetic construct
  source 1..20: mol_type = other DNA
aaaaaaaattaacattaggc

SEQ ID NO: 116223 - DNA, 20 bp, synthetic construct
  source 1..20: mol_type = other DNA
aaaaaaaaattaacattagg

SEQ ID NO: 116224 - DNA, 20 bp, synthetic construct
  source 1..20: mol_type = other DNA
aaaaaaaaaattaacattag

SEQ ID NO: 116225 - DNA, 20 bp, synthetic construct
  source 1..20: mol_type = other DNA
taaaaaaaaaattaacatta

SEQ ID NO: 116226 - DNA, 20 bp, synthetic construct
  source 1..20: mol_type = other DNA
ttaaaaaaaaaattaacatt

SEQ ID NO: 116227 - DNA, 20 bp, synthetic construct
  source 1..20: mol_type = other DNA
attaaaaaaaaaattaacat

SEQ ID NO: 116228 - DNA, 20 bp, synthetic construct
  source 1..20: mol_type = other DNA
aattaaaaaaaaaattaaca

SEQ ID NO: 116229 - DNA, 20 bp, synthetic construct
  source 1..20: mol_type = other DNA
gaattaaaaaaaaaattaac

SEQ ID NO: 116230 - DNA, 20 bp, synthetic construct
  source 1..20: mol_type = other DNA
agaattaaaaaaaaaattaa

SEQ ID NO: 116231 - DNA, 20 bp, synthetic construct
  source 1..20: mol_type = other DNA
gagaattaaaaaaaaaatta

SEQ ID NO: 116232 - DNA, 20 bp, synthetic construct
  source 1..20: mol_type = other DNA
agagaattaaaaaaaaaatt

SEQ ID NO: 116233 - DNA, 20 bp, synthetic construct
  source 1..20: mol_type = other DNA
gagagaattaaaaaaaaaat

SEQ ID NO: 116234 - DNA, 20 bp, synthetic construct
  source 1..20: mol_type = other DNA
tgagagaattaaaaaaaaaa

SEQ ID NO: 116235 - DNA, 20 bp, synthetic construct
  source 1..20: mol_type = other DNA
ttgagagaattaaaaaaaaa

SEQ ID NO: 116236 - DNA, 20 bp, synthetic construct
  source 1..20: mol_type = other DNA
cttgagagaattaaaaaaaa

SEQ ID NO: 116237 - DNA, 20 bp, synthetic construct
  source 1..20: mol_type = other DNA
gcttgagagaattaaaaaaa

SEQ ID NO: 116238 - DNA, 20 bp, synthetic construct
  source 1..20: mol_type = other DNA
ggcttgagagaattaaaaaa

SEQ ID NO: 116239 - DNA, 20 bp, synthetic construct
  source 1..20: mol_type = other DNA
aggcttgagagaattaaaaa

SEQ ID NO: 116240 - DNA, 20 bp, synthetic construct
  source 1..20: mol_type = other DNA
aaggcttgagagaattaaaa

SEQ ID NO: 116241 - DNA, 20 bp, synthetic construct
  source 1..20: mol_type = other DNA
aaaggcttgagagaattaaa

SEQ ID NO: 116242 - DNA, 20 bp, synthetic construct
  source 1..20: mol_type = other DNA
taaaggcttgagagaattaa

SEQ ID NO: 116243 - DNA, 20 bp, synthetic construct
  source 1..20: mol_type = other DNA
ataaaggcttgagagaatta

SEQ ID NO: 116244 - DNA, 20 bp, synthetic construct
  source 1..20: mol_type = other DNA
tataaaggcttgagagaatt

SEQ ID NO: 116245 - DNA, 20 bp, synthetic construct
  source 1..20: mol_type = other DNA
gtataaaggcttgagagaat

SEQ ID NO: 116246 - DNA, 20 bp, synthetic construct
  source 1..20: mol_type = other DNA
ggtataaaggcttgagagaa

SEQ ID NO: 116247 - DNA, 20 bp, synthetic construct
  source 1..20: mol_type = other DNA
gggtataaaggcttgagaga

SEQ ID NO: 116248 - DNA, 20 bp, synthetic construct
  source 1..20: mol_type = other DNA
tgggtataaaggcttgagag

SEQ ID NO: 116249 - DNA, 20 bp, synthetic construct
  source 1..20: mol_type = other DNA
ttgggtataaaggcttgaga

SEQ ID NO: 116250 - DNA, 20 bp, synthetic construct
  source 1..20: mol_type = other DNA
attgggtataaaggcttgag

SEQ ID NO: 116251 - DNA, 20 bp, synthetic construct
  source 1..20: mol_type = other DNA
tattgggtataaaggcttga

SEQ ID NO: 116252 - DNA, 20 bp, synthetic construct
  source 1..20: mol_type = other DNA
gtattgggtataaaggcttg

SEQ ID NO: 116253 - DNA, 20 bp, synthetic construct
  source 1..20: mol_type = other DNA
ggtattgggtataaaggctt

SEQ ID NO: 116254 - DNA, 20 bp, synthetic construct
  source 1..20: mol_type = other DNA
aggtattgggtataaaggct

SEQ ID NO: 116255 - DNA, 20 bp, synthetic construct
  source 1..20: mol_type = other DNA
taggtattgggtataaaggc

SEQ ID NO: 116256 - DNA, 20 bp, synthetic construct
  source 1..20: mol_type = other DNA
ataggtattgggtataaagg

SEQ ID NO: 116257 - DNA, 20 bp, synthetic construct
  source 1..20: mol_type = other DNA
cataggtattgggtataaag

SEQ ID NO: 116258 - DNA, 20 bp, synthetic construct
  source 1..20: mol_type = other DNA
tcataggtattgggtataaa

SEQ ID NO: 116259 - DNA, 20 bp, synthetic construct
  source 1..20: mol_type = other DNA
gtcataggtattgggtataa

SEQ ID NO: 116260 - DNA, 20 bp, synthetic construct
  source 1..20: mol_type = other DNA
cgtcataggtattgggtata

SEQ ID NO: 116261 - DNA, 20 bp, synthetic construct
  source 1..20: mol_type = other DNA
gcgtcataggtattgggtat

SEQ ID NO: 116262 - DNA, 20 bp, synthetic construct
  source 1..20: mol_type = other DNA
ggcgtcataggtattgggta

SEQ ID NO: 116263 - DNA, 20 bp, synthetic construct
  source 1..20: mol_type = other DNA
gggcgtcataggtattgggt

SEQ ID NO: 116264 - DNA, 20 bp, synthetic construct
  source 1..20: mol_type = other DNA
tgggcgtcataggtattggg

SEQ ID NO: 116265 - DNA, 20 bp, synthetic construct
  source 1..20: mol_type = other DNA
atgggcgtcataggtattgg

SEQ ID NO: 116266 - DNA, 20 bp, synthetic construct
  source 1..20: mol_type = other DNA
catgggcgtcataggtattg

SEQ ID NO: 116267 - DNA, 20 bp, synthetic construct
  source 1..20: mol_type = other DNA
gcatgggcgtcataggtatt

SEQ ID NO: 116268 - DNA, 20 bp, synthetic construct
  source 1..20: mol_type = other DNA
ggcatgggcgtcataggtat

SEQ ID NO: 116269 - DNA, 20 bp, synthetic construct
  source 1..20: mol_type = other DNA
tggcatgggcgtcataggta

SEQ ID NO: 116270 - DNA, 20 bp, synthetic construct
  source 1..20: mol_type = other DNA
ctggcatgggcgtcataggt

SEQ ID NO: 116271 - DNA, 20 bp, synthetic construct
  source 1..20: mol_type = other DNA
actggcatgggcgtcatagg

SEQ ID NO: 116272 - DNA, 20 bp, synthetic construct
  source 1..20: mol_type = other DNA
cactggcatgggcgtcatag

SEQ ID NO: 116273 - DNA, 20 bp, synthetic construct
  source 1..20: mol_type = other DNA
tcactggcatgggcgtcata

SEQ ID NO: 116274 - DNA, 20 bp, synthetic construct
  source 1..20: mol_type = other DNA
ttcactggcatgggcgtcat

SEQ ID NO: 116275 - DNA, 20 bp, synthetic construct
  source 1..20: mol_type = other DNA
attcactggcatgggcgtca

SEQ ID NO: 116276 - DNA, 20 bp, synthetic construct
  source 1..20: mol_type = other DNA
gattcactggcatgggcgtc

SEQ ID NO: 116277 - DNA, 20 bp, synthetic construct
  source 1..20: mol_type = other DNA
tgattcactggcatgggcgt

SEQ ID NO: 116278 - DNA, 20 bp, synthetic construct
  source 1..20: mol_type = other DNA
ttgattcactggcatgggcg

SEQ ID NO: 116279 - DNA, 20 bp, synthetic construct
  source 1..20: mol_type = other DNA
cttgattcactggcatgggc

SEQ ID NO: 116280 - DNA, 20 bp, synthetic construct
  source 1..20: mol_type = other DNA
gcttgattcactggcatggg

SEQ ID NO: 116281 - DNA, 20 bp, synthetic construct
  source 1..20: mol_type = other DNA
ggcttgattcactggcatgg

SEQ ID NO: 116282 - DNA, 20 bp, synthetic construct
  source 1..20: mol_type = other DNA
tggcttgattcactggcatg

SEQ ID NO: 116283 - DNA, 20 bp, synthetic construct
  source 1..20: mol_type = other DNA
ttggcttgattcactggcat

SEQ ID NO: 116284 - DNA, 20 bp, synthetic construct
  source 1..20: mol_type = other DNA
cttggcttgattcactggca

SEQ ID NO: 116285 - DNA, 20 bp, synthetic construct
  source 1..20: mol_type = other DNA
tcttggcttgattcactggc

SEQ ID NO: 116286 - DNA, 20 bp, synthetic construct
  source 1..20: mol_type = other DNA
gtcttggcttgattcactgg

SEQ ID NO: 116287 - DNA, 20 bp, synthetic construct
  source 1..20: mol_type = other DNA
tgtcttggcttgattcactg

SEQ ID NO: 116288 - DNA, 20 bp, synthetic construct
  source 1..20: mol_type = other DNA
atgtcttggcttgattcact

SEQ ID NO: 116289 - DNA, 20 bp, synthetic construct
  source 1..20: mol_type = other DNA
tatgtcttggcttgattcac

SEQ ID NO: 116290 - DNA, 20 bp, synthetic construct
  source 1..20: mol_type = other DNA
atatgtcttggcttgattca

SEQ ID NO: 116291 - DNA, 20 bp, synthetic construct
  source 1..20: mol_type = other DNA
tatatgtcttggcttgattc

SEQ ID NO: 116292 - DNA, 20 bp, synthetic construct
  source 1..20: mol_type = other DNA
ctatatgtcttggcttgatt

SEQ ID NO: 116293 - DNA, 20 bp, synthetic construct
  source 1..20: mol_type = other DNA
tctatatgtcttggcttgat

SEQ ID NO: 116294 - DNA, 20 bp, synthetic construct
  source 1..20: mol_type = other DNA
ctctatatgtcttggcttga

SEQ ID NO: 116295 - DNA, 20 bp, synthetic construct
  source 1..20: mol_type = other DNA
gctctatatgtcttggcttg

SEQ ID NO: 116296 - DNA, 20 bp, synthetic construct
  source 1..20: mol_type = other DNA
tgctctatatgtcttggctt

SEQ ID NO: 116297 - DNA, 20 bp, synthetic construct
  source 1..20: mol_type = other DNA
ctgctctatatgtcttggct

SEQ ID NO: 116298 - DNA, 20 bp, synthetic construct
  source 1..20: mol_type = other DNA
cctgctctatatgtcttggc

SEQ ID NO: 116299 - DNA, 20 bp, synthetic construct
  source 1..20: mol_type = other DNA
acctgctctatatgtcttgg

SEQ ID NO: 116300 - DNA, 20 bp, synthetic construct
  source 1..20: mol_type = other DNA
tacctgctctatatgtcttg

SEQ ID NO: 116301 - DNA, 20 bp, synthetic construct
  source 1..20: mol_type = other DNA
ttacctgctctatatgtctt

SEQ ID NO: 116302 - DNA, 20 bp, synthetic construct
  source 1..20: mol_type = other DNA
tttacctgctctatatgtct

SEQ ID NO: 116303 - DNA, 20 bp, synthetic construct
  source 1..20: mol_type = other DNA
ctttacctgctctatatgtc

SEQ ID NO: 116304 - DNA, 20 bp, synthetic construct
  source 1..20: mol_type = other DNA
cctttacctgctctatatgt

SEQ ID NO: 116305 - DNA, 20 bp, synthetic construct
  source 1..20: mol_type = other DNA
acctttacctgctctatatg

SEQ ID NO: 116306 - DNA, 20 bp, synthetic construct
  source 1..20: mol_type = other DNA
cacctttacctgctctatat

SEQ ID NO: 116307 - DNA, 20 bp, synthetic construct
  source 1..20: mol_type = other DNA
tcacctttacctgctctata

SEQ ID NO: 116308 - DNA, 20 bp, synthetic construct
  source 1..20: mol_type = other DNA
ctcacctttacctgctctat

SEQ ID NO: 116309 - DNA, 20 bp, synthetic construct
  source 1..20: mol_type = other DNA
tctcacctttacctgctcta

SEQ ID NO: 116310 - DNA, 20 bp, synthetic construct
  source 1..20: mol_type = other DNA
ttctcacctttacctgctct

SEQ ID NO: 116311 - DNA, 20 bp, synthetic construct
  source 1..20: mol_type = other DNA
attctcacctttacctgctc

SEQ ID NO: 116312 - DNA, 20 bp, synthetic construct
  source 1..20: mol_type = other DNA
tattctcacctttacctgct

SEQ ID NO: 116313 - DNA, 20 bp, synthetic construct
  source 1..20: mol_type = other DNA
ttattctcacctttacctgc

SEQ ID NO: 116314 - DNA, 20 bp, synthetic construct
  source 1..20: mol_type = other DNA
attattctcacctttacctg

SEQ ID NO: 116315 - DNA, 20 bp, synthetic construct
  source 1..20: mol_type = other DNA
gattattctcacctttacct

SEQ ID NO: 116316 - DNA, 20 bp, synthetic construct
  source 1..20: mol_type = other DNA
ggattattctcacctttacc

SEQ ID NO: 116317 - DNA, 20 bp, synthetic construct
  source 1..20: mol_type = other DNA
aggattattctcacctttac

SEQ ID NO: 116318 - DNA, 20 bp, synthetic construct
  source 1..20: mol_type = other DNA
caggattattctcaccttta

SEQ ID NO: 116319 - DNA, 20 bp, synthetic construct
  source 1..20: mol_type = other DNA
gcaggattattctcaccttt

SEQ ID NO: 116320 - DNA, 20 bp, synthetic construct
  source 1..20: mol_type = other DNA
ggcaggattattctcacctt

SEQ ID NO: 116321 - DNA, 20 bp, synthetic construct
  source 1..20: mol_type = other DNA
aggcaggattattctcacct

SEQ ID NO: 116322 - DNA, 20 bp, synthetic construct
  source 1..20: mol_type = other DNA
caggcaggattattctcacc

SEQ ID NO: 116323 - DNA, 20 bp, synthetic construct
  source 1..20: mol_type = other DNA
acaggcaggattattctcac

SEQ ID NO: 116324 - DNA, 20 bp, synthetic construct
  source 1..20: mol_type = other DNA
cacaggcaggattattctca

SEQ ID NO: 116325 - DNA, 20 bp, synthetic construct
  source 1..20: mol_type = other DNA
acacaggcaggattattctc

SEQ ID NO: 116326 - DNA, 20 bp, synthetic construct
  source 1..20: mol_type = other DNA
aacacaggcaggattattct

SEQ ID NO: 116327 - DNA, 20 bp, synthetic construct
  source 1..20: mol_type = other DNA
aaacacaggcaggattattc

SEQ ID NO: 116328 - DNA, 20 bp, synthetic construct
  source 1..20: mol_type = other DNA
caaacacaggcaggattatt

SEQ ID NO: 116329 - DNA, 20 bp, synthetic construct
  source 1..20: mol_type = other DNA
gcaaacacaggcaggattat

SEQ ID NO: 116330 - DNA, 20 bp, synthetic construct
  source 1..20: mol_type = other DNA
agcaaacacaggcaggatta

SEQ ID NO: 116331 - DNA, 20 bp, synthetic construct
  source 1..20: mol_type = other DNA
aagcaaacacaggcaggatt

SEQ ID NO: 116332 - DNA, 20 bp, synthetic construct
  source 1..20: mol_type = other DNA
caagcaaacacaggcaggat

SEQ ID NO: 116333 - DNA, 20 bp, synthetic construct
  source 1..20: mol_type = other DNA
acaagcaaacacaggcagga

SEQ ID NO: 116334 - DNA, 20 bp, synthetic construct
  source 1..20: mol_type = other DNA
tacaagcaaacacaggcagg

SEQ ID NO: 116335 - DNA, 20 bp, synthetic construct
  source 1..20: mol_type = other DNA
ctacaagcaaacacaggcag

SEQ ID NO: 116336 - DNA, 20 bp, synthetic construct
  source 1..20: mol_type = other DNA
actacaagcaaacacaggca

SEQ ID NO: 116337 - DNA, 20 bp, synthetic construct
  source 1..20: mol_type = other DNA
aactacaagcaaacacaggc

SEQ ID NO: 116338 - DNA, 20 bp, synthetic construct
  source 1..20: mol_type = other DNA
aaactacaagcaaacacagg

SEQ ID NO: 116339 - DNA, 20 bp, synthetic construct
  source 1..20: mol_type = other DNA
caaactacaagcaaacacag

SEQ ID NO: 116340 - DNA, 20 bp, synthetic construct
  source 1..20: mol_type = other DNA
gcaaactacaagcaaacaca

SEQ ID NO: 116341 - DNA, 20 bp, synthetic construct
  source 1..20: mol_type = other DNA
tgcaaactacaagcaaacac

SEQ ID NO: 116342 - DNA, 20 bp, synthetic construct
  source 1..20: mol_type = other DNA
atgcaaactacaagcaaaca

SEQ ID NO: 116343 - DNA, 20 bp, synthetic construct
  source 1..20: mol_type = other DNA
catgcaaactacaagcaaac

SEQ ID NO: 116344 - DNA, 20 bp, synthetic construct
  source 1..20: mol_type = other DNA
gcatgcaaactacaagcaaa

SEQ ID NO: 116345 - DNA, 20 bp, synthetic construct
  source 1..20: mol_type = other DNA
agcatgcaaactacaagcaa

SEQ ID NO: 116346 - DNA, 20 bp, synthetic construct
  source 1..20: mol_type = other DNA
cagcatgcaaactacaagca

SEQ ID NO: 116347 - DNA, 20 bp, synthetic construct
  source 1..20: mol_type = other DNA
gcagcatgcaaactacaagc

SEQ ID NO: 116348 - DNA, 20 bp, synthetic construct
  source 1..20: mol_type = other DNA
tgcagcatgcaaactacaag

SEQ ID NO: 116349 - DNA, 20 bp, synthetic construct
  source 1..20: mol_type = other DNA
atgcagcatgcaaactacaa

SEQ ID NO: 116350 - DNA, 20 bp, synthetic construct
  source 1..20: mol_type = other DNA
catgcagcatgcaaactaca

SEQ ID NO: 116351 - DNA, 20 bp, synthetic construct
  source 1..20: mol_type = other DNA
tcatgcagcatgcaaactac

SEQ ID NO: 116352 - DNA, 20 bp, synthetic construct
  source 1..20: mol_type = other DNA
ttcatgcagcatgcaaacta

SEQ ID NO: 116353 - DNA, 20 bp, synthetic construct
  source 1..20: mol_type = other DNA
attcatgcagcatgcaaact

SEQ ID NO: 116354 - DNA, 20 bp, synthetic construct
  source 1..20: mol_type = other DNA
aattcatgcagcatgcaaac

SEQ ID NO: 116355 - DNA, 20 bp, synthetic construct
  source 1..20: mol_type = other DNA
caattcatgcagcatgcaaa

SEQ ID NO: 116356 - DNA, 20 bp, synthetic construct
  source 1..20: mol_type = other DNA
tcaattcatgcagcatgcaa

SEQ ID NO: 116357 - DNA, 20 bp, synthetic construct
  source 1..20: mol_type = other DNA
ctcaattcatgcagcatgca

SEQ ID NO: 116358 - DNA, 20 bp, synthetic construct
  source 1..20: mol_type = other DNA
actcaattcatgcagcatgc

SEQ ID NO: 116359 - DNA, 20 bp, synthetic construct
  source 1..20: mol_type = other DNA
tactcaattcatgcagcatg

SEQ ID NO: 116360 - DNA, 20 bp, synthetic construct
  source 1..20: mol_type = other DNA
ttactcaattcatgcagcat

SEQ ID NO: 116361 - DNA, 20 bp, synthetic construct
  source 1..20: mol_type = other DNA
gttactcaattcatgcagca

SEQ ID NO: 116362 - DNA, 20 bp, synthetic construct
  source 1..20: mol_type = other DNA
agttactcaattcatgcagc

SEQ ID NO: 116363 - DNA, 20 bp, synthetic construct
  source 1..20: mol_type = other DNA
tagttactcaattcatgcag

SEQ ID NO: 116364 - DNA, 20 bp, synthetic construct
  source 1..20: mol_type = other DNA
ttagttactcaattcatgca

SEQ ID NO: 116365 - DNA, 20 bp, synthetic construct
  source 1..20: mol_type = other DNA
cttagttactcaattcatgc

SEQ ID NO: 116366 - DNA, 20 bp, synthetic construct
  source 1..20: mol_type = other DNA
acttagttactcaattcatg

SEQ ID NO: 116367 - DNA, 20 bp, synthetic construct
  source 1..20: mol_type = other DNA
aacttagttactcaattcat

SEQ ID NO: 116368 - DNA, 20 bp, synthetic construct
  source 1..20: mol_type = other DNA
aaacttagttactcaattca

SEQ ID NO: 116369 - DNA, 20 bp, synthetic construct
  source 1..20: mol_type = other DNA
taaacttagttactcaattc

SEQ ID NO: 116370 - DNA, 20 bp, synthetic construct
  source 1..20: mol_type = other DNA
ataaacttagttactcaatt

SEQ ID NO: 116371 - DNA, 20 bp, synthetic construct
  source 1..20: mol_type = other DNA
tataaacttagttactcaat

SEQ ID NO: 116372 - DNA, 20 bp, synthetic construct
  source 1..20: mol_type = other DNA
ttataaacttagttactcaa

SEQ ID NO: 116373 - DNA, 20 bp, synthetic construct
  source 1..20: mol_type = other DNA
attataaacttagttactca

SEQ ID NO: 116374 - DNA, 20 bp, synthetic construct
  source 1..20: mol_type = other DNA
cattataaacttagttactc

SEQ ID NO: 116375 - DNA, 20 bp, synthetic construct
  source 1..20: mol_type = other DNA
tcattataaacttagttact

SEQ ID NO: 116376 - DNA, 20 bp, synthetic construct
  source 1..20: mol_type = other DNA
ttcattataaacttagttac

SEQ ID NO: 116377 - DNA, 20 bp, synthetic construct
  source 1..20: mol_type = other DNA
attcattataaacttagtta

SEQ ID NO: 116378 - DNA, 20 bp, synthetic construct
  source 1..20: mol_type = other DNA
tattcattataaacttagtt

SEQ ID NO: 116379 - DNA, 20 bp, synthetic construct
  source 1..20: mol_type = other DNA
ttattcattataaacttagt

SEQ ID NO: 116380 - DNA, 20 bp, synthetic construct
  source 1..20: mol_type = other DNA
tttattcattataaacttag

SEQ ID NO: 116381 - DNA, 20 bp, synthetic construct
  source 1..20: mol_type = other DNA
atttattcattataaactta

SEQ ID NO: 116382 - DNA, 20 bp, synthetic construct
  source 1..20: mol_type = other DNA
tatttattcattataaactt

SEQ ID NO: 116383 - DNA, 20 bp, synthetic construct
  source 1..20: mol_type = other DNA
ctatttattcattataaact

SEQ ID NO: 116384 - DNA, 20 bp, synthetic construct
  source 1..20: mol_type = other DNA
actatttattcattataaac

SEQ ID NO: 116385 - DNA, 20 bp, synthetic construct
  source 1..20: mol_type = other DNA
aactatttattcattataaa

SEQ ID NO: 116386 - DNA, 20 bp, synthetic construct
  source 1..20: mol_type = other DNA
caactatttattcattataa

SEQ ID NO: 116387 - DNA, 20 bp, synthetic construct
  source 1..20: mol_type = other DNA
acaactatttattcattata

SEQ ID NO: 116388 - DNA, 20 bp, synthetic construct
  source 1..20: mol_type = other DNA
tacaactatttattcattat

SEQ ID NO: 116389 - DNA, 20 bp, synthetic construct
  source 1..20: mol_type = other DNA
ctacaactatttattcatta

SEQ ID NO: 116390 - DNA, 20 bp, synthetic construct
  source 1..20: mol_type = other DNA
actacaactatttattcatt

SEQ ID NO: 116391 - DNA, 20 bp, synthetic construct
  source 1..20: mol_type = other DNA
aactacaactatttattcat

SEQ ID NO: 116392 - DNA, 20 bp, synthetic construct
  source 1..20: mol_type = other DNA
aaactacaactatttattca

SEQ ID NO: 116393 - DNA, 20 bp, synthetic construct
  source 1..20: mol_type = other DNA
taaactacaactatttattc

SEQ ID NO: 116394 - DNA, 20 bp, synthetic construct
  source 1..20: mol_type = other DNA
ctaaactacaactatttatt

SEQ ID NO: 116395 - DNA, 20 bp, synthetic construct
  source 1..20: mol_type = other DNA
gctaaactacaactatttat

SEQ ID NO: 116396 - DNA, 20 bp, synthetic construct
  source 1..20: mol_type = other DNA
agctaaactacaactattta

SEQ ID NO: 116397 - DNA, 20 bp, synthetic construct
  source 1..20: mol_type = other DNA
gagctaaactacaactattt

SEQ ID NO: 116398 - DNA, 20 bp, synthetic construct
  source 1..20: mol_type = other DNA
agagctaaactacaactatt

SEQ ID NO: 116399 - DNA, 20 bp, synthetic construct
  source 1..20: mol_type = other DNA
cagagctaaactacaactat

SEQ ID NO: 116400 - DNA, 20 bp, synthetic construct
  source 1..20: mol_type = other DNA
tcagagctaaactacaacta

SEQ ID NO: 116401 - DNA, 20 bp, synthetic construct
  source 1..20: mol_type = other DNA
gtcagagctaaactacaact

SEQ ID NO: 116402 - DNA, 20 bp, synthetic construct
  source 1..20: mol_type = other DNA
agtcagagctaaactacaac

SEQ ID NO: 116403 - DNA, 20 bp, synthetic construct
  source 1..20: mol_type = other DNA
aagtcagagctaaactacaa

SEQ ID NO: 116404 - DNA, 20 bp, synthetic construct
  source 1..20: mol_type = other DNA
aaagtcagagctaaactaca

SEQ ID NO: 116405 - DNA, 20 bp, synthetic construct
  source 1..20: mol_type = other DNA
aaaagtcagagctaaactac

SEQ ID NO: 116406 - DNA, 20 bp, synthetic construct
  source 1..20: mol_type = other DNA
aaaaagtcagagctaaacta

SEQ ID NO: 116407 - DNA, 20 bp, synthetic construct
  source 1..20: mol_type = other DNA
caaaaagtcagagctaaact

SEQ ID NO: 116408 - DNA, 20 bp, synthetic construct
  source 1..20: mol_type = other DNA
tcaaaaagtcagagctaaac

SEQ ID NO: 116409 - DNA, 20 bp, synthetic construct
  source 1..20: mol_type = other DNA
atcaaaaagtcagagctaaa

SEQ ID NO: 116410 - DNA, 20 bp, synthetic construct
  source 1..20: mol_type = other DNA
catcaaaaagtcagagctaa

SEQ ID NO: 116411 - DNA, 20 bp, synthetic construct
  source 1..20: mol_type = other DNA
tcatcaaaaagtcagagcta

SEQ ID NO: 116412 - DNA, 20 bp, synthetic construct
  source 1..20: mol_type = other DNA
ctcatcaaaaagtcagagct

SEQ ID NO: 116413 - DNA, 20 bp, synthetic construct
  source 1..20: mol_type = other DNA
cctcatcaaaaagtcagagc

SEQ ID NO: 116414 - DNA, 20 bp, synthetic construct
  source 1..20: mol_type = other DNA
gcctcatcaaaaagtcagag

SEQ ID NO: 116415 - DNA, 20 bp, synthetic construct
  source 1..20: mol_type = other DNA
agcctcatcaaaaagtcaga

SEQ ID NO: 116416 - DNA, 20 bp, synthetic construct
  source 1..20: mol_type = other DNA
tagcctcatcaaaaagtcag

SEQ ID NO: 116417 - DNA, 20 bp, synthetic construct
  source 1..20: mol_type = other DNA
atagcctcatcaaaaagtca

SEQ ID NO: 116418 - DNA, 20 bp, synthetic construct
  source 1..20: mol_type = other DNA
catagcctcatcaaaaagtc

SEQ ID NO: 116419 - DNA, 20 bp, synthetic construct
  source 1..20: mol_type = other DNA
gcatagcctcatcaaaaagt

SEQ ID NO: 116420 - DNA, 20 bp, synthetic construct
  source 1..20: mol_type = other DNA
tgcatagcctcatcaaaaag

SEQ ID NO: 116421 - DNA, 20 bp, synthetic construct
  source 1..20: mol_type = other DNA
atgcatagcctcatcaaaaa

SEQ ID NO: 116422 - DNA, 20 bp, synthetic construct
  source 1..20: mol_type = other DNA
aatgcatagcctcatcaaaa

SEQ ID NO: 116423 - DNA, 20 bp, synthetic construct
  source 1..20: mol_type = other DNA
caatgcatagcctcatcaaa

SEQ ID NO: 116424 - DNA, 20 bp, synthetic construct
  source 1..20: mol_type = other DNA
ccaatgcatagcctcatcaa

SEQ ID NO: 116425 - DNA, 20 bp, synthetic construct
  source 1..20: mol_type = other DNA
gccaatgcatagcctcatca

SEQ ID NO: 116426 - DNA, 20 bp, synthetic construct
  source 1..20: mol_type = other DNA
agccaatgcatagcctcatc

SEQ ID NO: 116427 - DNA, 20 bp, synthetic construct
  source 1..20: mol_type = other DNA
aagccaatgcatagcctcat

SEQ ID NO: 116428 - DNA, 20 bp, synthetic construct
  source 1..20: mol_type = other DNA
aaagccaatgcatagcctca

SEQ ID NO: 116429 - DNA, 20 bp, synthetic construct
  source 1..20: mol_type = other DNA
aaaagccaatgcatagcctc

SEQ ID NO: 116430 - DNA, 20 bp, synthetic construct
  source 1..20: mol_type = other DNA
caaaagccaatgcatagcct

SEQ ID NO: 116431 - DNA, 20 bp, synthetic construct
  source 1..20: mol_type = other DNA
tcaaaagccaatgcatagcc

SEQ ID NO: 116432 - DNA, 20 bp, synthetic construct
  source 1..20: mol_type = other DNA
atcaaaagccaatgcatagc

SEQ ID NO: 116433 - DNA, 20 bp, synthetic construct
  source 1..20: mol_type = other DNA
catcaaaagccaatgcatag

SEQ ID NO: 116434 - DNA, 20 bp, synthetic construct
  source 1..20: mol_type = other DNA
tcatcaaaagccaatgcata

SEQ ID NO: 116435 - DNA, 20 bp, synthetic construct
  source 1..20: mol_type = other DNA
ttcatcaaaagccaatgcat

SEQ ID NO: 116436 - DNA, 20 bp, synthetic construct
  source 1..20: mol_type = other DNA
gttcatcaaaagccaatgca

SEQ ID NO: 116437 - DNA, 20 bp, synthetic construct
  source 1..20: mol_type = other DNA
tgttcatcaaaagccaatgc

SEQ ID NO: 116438 - DNA, 20 bp, synthetic construct
  source 1..20: mol_type = other DNA
ttgttcatcaaaagccaatg

SEQ ID NO: 116439 - DNA, 20 bp, synthetic construct
  source 1..20: mol_type = other DNA
gttgttcatcaaaagccaat

SEQ ID NO: 116440 - DNA, 20 bp, synthetic construct
  source 1..20: mol_type = other DNA
tgttgttcatcaaaagccaa

SEQ ID NO: 116441 - DNA, 20 bp, synthetic construct
  source 1..20: mol_type = other DNA
atgttgttcatcaaaagcca

SEQ ID NO: 116442 - DNA, 20 bp, synthetic construct
  source 1..20: mol_type = other DNA
aatgttgttcatcaaaagcc

SEQ ID NO: 116443 - DNA, 20 bp, synthetic construct
  source 1..20: mol_type = other DNA
taatgttgttcatcaaaagc

SEQ ID NO: 116444 - DNA, 20 bp, synthetic construct
  source 1..20: mol_type = other DNA
gtaatgttgttcatcaaaag

SEQ ID NO: 116445 - DNA, 20 bp, synthetic construct
  source 1..20: mol_type = other DNA
tgtaatgttgttcatcaaaa

SEQ ID NO: 116446 - DNA, 20 bp, synthetic construct
  source 1..20: mol_type = other DNA
atgtaatgttgttcatcaaa

SEQ ID NO: 116447 - DNA, 20 bp, synthetic construct
  source 1..20: mol_type = other DNA
tatgtaatgttgttcatcaa

SEQ ID NO: 116448 - DNA, 20 bp, synthetic construct
  source 1..20: mol_type = other DNA
ctatgtaatgttgttcatca

SEQ ID NO: 116449 - DNA, 20 bp, synthetic construct
  source 1..20: mol_type = other DNA
tctatgtaatgttgttcatc

SEQ ID NO: 116450 - DNA, 20 bp, synthetic construct
  source 1..20: mol_type = other DNA
atctatgtaatgttgttcat

SEQ ID NO: 116451 - DNA, 20 bp, synthetic construct
  source 1..20: mol_type = other DNA
tatctatgtaatgttgttca

SEQ ID NO: 116452 - DNA, 20 bp, synthetic construct
  source 1..20: mol_type = other DNA
atatctatgtaatgttgttc

SEQ ID NO: 116453 - DNA, 20 bp, synthetic construct
  source 1..20: mol_type = other DNA
aatatctatgtaatgttgtt

SEQ ID NO: 116454 - DNA, 20 bp, synthetic construct
  source 1..20: mol_type = other DNA
gaatatctatgtaatgttgt

SEQ ID NO: 116455 - DNA, 20 bp, synthetic construct
  source 1..20: mol_type = other DNA
tgaatatctatgtaatgttg

SEQ ID NO: 116456 - DNA, 20 bp, synthetic construct
  source 1..20: mol_type = other DNA
gtgaatatctatgtaatgtt

SEQ ID NO: 116457 - DNA, 20 bp, synthetic construct
  source 1..20: mol_type = other DNA
tgtgaatatctatgtaatgt

SEQ ID NO: 116458 - DNA, 20 bp, synthetic construct
  source 1..20: mol_type = other DNA
atgtgaatatctatgtaatg

SEQ ID NO: 116459 - DNA, 20 bp, synthetic construct
  source 1..20: mol_type = other DNA
catgtgaatatctatgtaat

SEQ ID NO: 116460 - DNA, 20 bp, synthetic construct
  source 1..20: mol_type = other DNA
ccatgtgaatatctatgtaa

SEQ ID NO: 116461 - DNA, 20 bp, synthetic construct
  source 1..20: mol_type = other DNA
tccatgtgaatatctatgta

SEQ ID NO: 116462 - DNA, 20 bp, synthetic construct
  source 1..20: mol_type = other DNA
atccatgtgaatatctatgt

SEQ ID NO: 116463 - DNA, 20 bp, synthetic construct
  source 1..20: mol_type = other DNA
aatccatgtgaatatctatg

SEQ ID NO: 116464 - DNA, 20 bp, synthetic construct
  source 1..20: mol_type = other DNA
aaatccatgtgaatatctat

SEQ ID NO: 116465 - DNA, 20 bp, synthetic construct
  source 1..20: mol_type = other DNA
aaaatccatgtgaatatcta

SEQ ID NO: 116466 - DNA, 20 bp, synthetic construct
  source 1..20: mol_type = other DNA
taaaatccatgtgaatatct

SEQ ID NO: 116467 - DNA, 20 bp, synthetic construct
  source 1..20: mol_type = other DNA
ataaaatccatgtgaatatc

SEQ ID NO: 116468 - DNA, 20 bp, synthetic construct
  source 1..20: mol_type = other DNA
cataaaatccatgtgaatat

SEQ ID NO: 116469 - DNA, 20 bp, synthetic construct
  source 1..20: mol_type = other DNA
tcataaaatccatgtgaata

SEQ ID NO: 116470 - DNA, 20 bp, synthetic construct
  source 1..20: mol_type = other DNA
ttcataaaatccatgtgaat

SEQ ID NO: 116471 - DNA, 20 bp, synthetic construct
  source 1..20: mol_type = other DNA
cttcataaaatccatgtgaa

SEQ ID NO: 116472 - DNA, 20 bp, synthetic construct
  source 1..20: mol_type = other DNA
tcttcataaaatccatgtga

SEQ ID NO: 116473 - DNA, 20 bp, synthetic construct
  source 1..20: mol_type = other DNA
ttcttcataaaatccatgtg

SEQ ID NO: 116474 - DNA, 20 bp, synthetic construct
  source 1..20: mol_type = other DNA
tttcttcataaaatccatgt

SEQ ID NO: 116475 - DNA, 20 bp, synthetic construct
  source 1..20: mol_type = other DNA
ttttcttcataaaatccatg

SEQ ID NO: 116476 - DNA, 20 bp, synthetic construct
  source 1..20: mol_type = other DNA
tttttcttcataaaatccat

SEQ ID NO: 116477 - DNA, 20 bp, synthetic construct
  source 1..20: mol_type = other DNA
gtttttcttcataaaatcca

SEQ ID NO: 116478 - DNA, 20 bp, synthetic construct
  source 1..20: mol_type = other DNA
tgtttttcttcataaaatcc

SEQ ID NO: 116479 - DNA, 20 bp, synthetic construct
  source 1..20: mol_type = other DNA
ctgtttttcttcataaaatc

SEQ ID NO: 116480 - DNA, 20 bp, synthetic construct
  source 1..20: mol_type = other DNA
cctgtttttcttcataaaat

SEQ ID NO: 116481 - DNA, 20 bp, synthetic construct
  source 1..20: mol_type = other DNA
ccctgtttttcttcataaaa

SEQ ID NO: 116482 - DNA, 20 bp, synthetic construct
  source 1..20: mol_type = other DNA
cccctgtttttcttcataaa

SEQ ID NO: 116483 - DNA, 20 bp, synthetic construct
  source 1..20: mol_type = other DNA
tcccctgtttttcttcataa

SEQ ID NO: 116484 - DNA, 20 bp, synthetic construct
  source 1..20: mol_type = other DNA
ctcccctgtttttcttcata

SEQ ID NO: 116485 - DNA, 20 bp, synthetic construct
  source 1..20: mol_type = other DNA
tctcccctgtttttcttcat

SEQ ID NO: 116486 - DNA, 20 bp, synthetic construct
  source 1..20: mol_type = other DNA
ttctcccctgtttttcttca

SEQ ID NO: 116487 - DNA, 20 bp, synthetic construct
  source 1..20: mol_type = other DNA
tttctcccctgtttttcttc

SEQ ID NO: 116488 - DNA, 20 bp, synthetic construct
  source 1..20: mol_type = other DNA
ttttctcccctgtttttctt

SEQ ID NO: 116489 - DNA, 20 bp, synthetic construct
  source 1..20: mol_type = other DNA
tttttctcccctgtttttct

SEQ ID NO: 116490 - DNA, 20 bp, synthetic construct
  source 1..20: mol_type = other DNA
ttttttctcccctgtttttc

SEQ ID NO: 116491 - DNA, 20 bp, synthetic construct
  source 1..20: mol_type = other DNA
attttttctcccctgttttt

SEQ ID NO: 116492 - DNA, 20 bp, synthetic construct
  source 1..20: mol_type = other DNA
cattttttctcccctgtttt

SEQ ID NO: 116493 - DNA, 20 bp, synthetic construct
  source 1..20: mol_type = other DNA
gcattttttctcccctgttt

SEQ ID NO: 116494 - DNA, 20 bp, synthetic construct
  source 1..20: mol_type = other DNA
ggcattttttctcccctgtt

SEQ ID NO: 116495 - DNA, 20 bp, synthetic construct
  source 1..20: mol_type = other DNA
gggcattttttctcccctgt

SEQ ID NO: 116496 - DNA, 20 bp, synthetic construct
  source 1..20: mol_type = other DNA
tgggcattttttctcccctg

SEQ ID NO: 116497 - DNA, 20 bp, synthetic construct
  source 1..20: mol_type = other DNA
atgggcattttttctcccct

SEQ ID NO: 116498 - DNA, 20 bp, synthetic construct
  source 1..20: mol_type = other DNA
gatgggcattttttctcccc

SEQ ID NO: 116499 - DNA, 20 bp, synthetic construct
  source 1..20: mol_type = other DNA
tgatgggcattttttctccc

SEQ ID NO: 116500 - DNA, 20 bp, synthetic construct
  source 1..20: mol_type = other DNA
ctgatgggcattttttctcc

SEQ ID NO: 116501 - DNA, 20 bp, synthetic construct
  source 1..20: mol_type = other DNA
actgatgggcattttttctc

SEQ ID NO: 116502 - DNA, 20 bp, synthetic construct
  source 1..20: mol_type = other DNA
aactgatgggcattttttct

SEQ ID NO: 116503 - DNA, 20 bp, synthetic construct
  source 1..20: mol_type = other DNA
caactgatgggcattttttc

SEQ ID NO: 116504 - DNA, 20 bp, synthetic construct
  source 1..20: mol_type = other DNA
acaactgatgggcatttttt

SEQ ID NO: 116505 - DNA, 20 bp, synthetic construct
  source 1..20: mol_type = other DNA
cacaactgatgggcattttt

SEQ ID NO: 116506 - DNA, 20 bp, synthetic construct
  source 1..20: mol_type = other DNA
tcacaactgatgggcatttt

SEQ ID NO: 116507 - DNA, 20 bp, synthetic construct
  source 1..20: mol_type = other DNA
atcacaactgatgggcattt

SEQ ID NO: 116508 - DNA, 20 bp, synthetic construct
  source 1..20: mol_type = other DNA
aatcacaactgatgggcatt

SEQ ID NO: 116509 - DNA, 20 bp, synthetic construct
  source 1..20: mol_type = other DNA
taatcacaactgatgggcat

SEQ ID NO: 116510 - DNA, 20 bp, synthetic construct
  source 1..20: mol_type = other DNA
ataatcacaactgatgggca

SEQ ID NO: 116511 - DNA, 20 bp, synthetic construct
  source 1..20: mol_type = other DNA
tataatcacaactgatgggc

SEQ ID NO: 116512 - DNA, 20 bp, synthetic construct
  source 1..20: mol_type = other DNA
atataatcacaactgatggg

SEQ ID NO: 116513 - DNA, 20 bp, synthetic construct
  source 1..20: mol_type = other DNA
tatataatcacaactgatgg

SEQ ID NO: 116514 - DNA, 20 bp, synthetic construct
  source 1..20: mol_type = other DNA
ctatataatcacaactgatg

SEQ ID NO: 116515 - DNA, 20 bp, synthetic construct
  source 1..20: mol_type = other DNA
actatataatcacaactgat

SEQ ID NO: 116516 - DNA, 20 bp, synthetic construct
  source 1..20: mol_type = other DNA
tactatataatcacaactga

SEQ ID NO: 116517 - DNA, 20 bp, synthetic construct
  source 1..20: mol_type = other DNA
atactatataatcacaactg

SEQ ID NO: 116518 - DNA, 20 bp, synthetic construct
  source 1..20: mol_type = other DNA
gatactatataatcacaact

SEQ ID NO: 116519 - DNA, 20 bp, synthetic construct
  source 1..20: mol_type = other DNA
ggatactatataatcacaac

SEQ ID NO: 116520 - DNA, 20 bp, synthetic construct
  source 1..20: mol_type = other DNA
aggatactatataatcacaa

SEQ ID NO: 116521 - DNA, 20 bp, synthetic construct
  source 1..20: mol_type = other DNA
gaggatactatataatcaca

SEQ ID NO: 116522 - DNA, 20 bp, synthetic construct
  source 1..20: mol_type = other DNA
agaggatactatataatcac

SEQ ID NO: 116523 - DNA, 20 bp, synthetic construct
  source 1..20: mol_type = other DNA
aagaggatactatataatca

SEQ ID NO: 116524 - DNA, 20 bp, synthetic construct
  source 1..20: mol_type = other DNA
gaagaggatactatataatc

SEQ ID NO: 116525 - DNA, 20 bp, synthetic construct
  source 1..20: mol_type = other DNA
tgaagaggatactatataat

SEQ ID NO: 116526 - DNA, 20 bp, synthetic construct
  source 1..20: mol_type = other DNA
ttgaagaggatactatataa

SEQ ID NO: 116527 - DNA, 20 bp, synthetic construct
  source 1..20: mol_type = other DNA
tttgaagaggatactatata

SEQ ID NO: 116528 - DNA, 20 bp, synthetic construct
  source 1..20: mol_type = other DNA
ttttgaagaggatactatat

SEQ ID NO: 116529 - DNA, 20 bp, synthetic construct
  source 1..20: mol_type = other DNA
tttttgaagaggatactata

SEQ ID NO: 116530 - DNA, 20 bp, synthetic construct
  source 1..20: mol_type = other DNA
ctttttgaagaggatactat

SEQ ID NO: 116531 - DNA, 20 bp, synthetic construct
  source 1..20: mol_type = other DNA
tctttttgaagaggatacta

SEQ ID NO: 116532 - DNA, 20 bp, synthetic construct
  source 1..20: mol_type = other DNA
ctctttttgaagaggatact

SEQ ID NO: 116533 - DNA, 20 bp, synthetic construct
  source 1..20: mol_type = other DNA
actctttttgaagaggatac

SEQ ID NO: 116534 - DNA, 20 bp, synthetic construct
  source 1..20: mol_type = other DNA
tactctttttgaagaggata

SEQ ID NO: 116535 - DNA, 20 bp, synthetic construct
  source 1..20: mol_type = other DNA
ttactctttttgaagaggat

SEQ ID NO: 116536 - DNA, 20 bp, synthetic construct
  source 1..20: mol_type = other DNA
attactctttttgaagagga

SEQ ID NO: 116537 - DNA, 20 bp, synthetic construct
  source 1..20: mol_type = other DNA
aattactctttttgaagagg

SEQ ID NO: 116538 - DNA, 20 bp, synthetic construct
  source 1..20: mol_type = other DNA
caattactctttttgaagag

SEQ ID NO: 116539 - DNA, 20 bp, synthetic construct
  source 1..20: mol_type = other DNA
ccaattactctttttgaaga

SEQ ID NO: 116540 - DNA, 20 bp, synthetic construct
  source 1..20: mol_type = other DNA
tccaattactctttttgaag

SEQ ID NO: 116541 - DNA, 20 bp, synthetic construct
  source 1..20: mol_type = other DNA
ctccaattactctttttgaa

SEQ ID NO: 116542 - DNA, 20 bp, synthetic construct
  source 1..20: mol_type = other DNA
cctccaattactctttttga

SEQ ID NO: 116543 - DNA, 20 bp, synthetic construct
  source 1..20: mol_type = other DNA
gcctccaattactctttttg

SEQ ID NO: 116544 - DNA, 20 bp, synthetic construct
  source 1..20: mol_type = other DNA
ggcctccaattactcttttt

SEQ ID NO: 116545 - DNA, 20 bp, synthetic construct
  source 1..20: mol_type = other DNA
aggcctccaattactctttt

SEQ ID NO: 116546 - DNA, 20 bp, synthetic construct
  source 1..20: mol_type = other DNA
caggcctccaattactcttt

SEQ ID NO: 116547 - DNA, 20 bp, synthetic construct
  source 1..20: mol_type = other DNA
ccaggcctccaattactctt

SEQ ID NO: 116548 - DNA, 20 bp, synthetic construct
  source 1..20: mol_type = other DNA
accaggcctccaattactct

SEQ ID NO: 116549 - DNA, 20 bp, synthetic construct
  source 1..20: mol_type = other DNA
caccaggcctccaattactc

SEQ ID NO: 116550 - DNA, 20 bp, synthetic construct
  source 1..20: mol_type = other DNA
acaccaggcctccaattact

SEQ ID NO: 116551 - DNA, 20 bp, synthetic construct
  source 1..20: mol_type = other DNA
cacaccaggcctccaattac

SEQ ID NO: 116552 - DNA, 20 bp, synthetic construct
  source 1..20: mol_type = other DNA
tcacaccaggcctccaatta

SEQ ID NO: 116553 - DNA, 20 bp, synthetic construct
  source 1..20: mol_type = other DNA
atcacaccaggcctccaatt

SEQ ID NO: 116554 - DNA, 20 bp, synthetic construct
  source 1..20: mol_type = other DNA
catcacaccaggcctccaat

SEQ ID NO: 116555 - DNA, 20 bp, synthetic construct
  source 1..20: mol_type = other DNA
ccatcacaccaggcctccaa

SEQ ID NO: 116556 - DNA, 20 bp, synthetic construct
  source 1..20: mol_type = other DNA
gccatcacaccaggcctcca

SEQ ID NO: 116557 - DNA, 20 bp, synthetic construct
  source 1..20: mol_type = other DNA
agccatcacaccaggcctcc

SEQ ID NO: 116558 - DNA, 20 bp, synthetic construct
  source 1..20: mol_type = other DNA
gagccatcacaccaggcctc

SEQ ID NO: 116559 - DNA, 20 bp, synthetic construct
  source 1..20: mol_type = other DNA
tgagccatcacaccaggcct

SEQ ID NO: 116560 - DNA, 20 bp, synthetic construct
  source 1..20: mol_type = other DNA
gtgagccatcacaccaggcc

SEQ ID NO: 116561 - DNA, 20 bp, synthetic construct
  source 1..20: mol_type = other DNA
tgtgagccatcacaccaggc

SEQ ID NO: 116562 - DNA, 20 bp, synthetic construct
  source 1..20: mol_type = other DNA
gtgtgagccatcacaccagg

SEQ ID NO: 116563 - DNA, 20 bp, synthetic construct
  source 1..20: mol_type = other DNA
ggtgtgagccatcacaccag

SEQ ID NO: 116564 - DNA, 20 bp, synthetic construct
  source 1..20: mol_type = other DNA
aggtgtgagccatcacacca

SEQ ID NO: 116565 - DNA, 20 bp, synthetic construct
  source 1..20: mol_type = other DNA
caggtgtgagccatcacacc

SEQ ID NO: 116566 - DNA, 20 bp, synthetic construct
  source 1..20: mol_type = other DNA
acaggtgtgagccatcacac

SEQ ID NO: 116567 - DNA, 20 bp, synthetic construct
  source 1..20: mol_type = other DNA
tacaggtgtgagccatcaca

SEQ ID NO: 116568 - DNA, 20 bp, synthetic construct
  source 1..20: mol_type = other DNA
ttacaggtgtgagccatcac

SEQ ID NO: 116569 - DNA, 20 bp, synthetic construct
  source 1..20: mol_type = other DNA
attacaggtgtgagccatca

SEQ ID NO: 116570 - DNA, 20 bp, synthetic construct
  source 1..20: mol_type = other DNA
aattacaggtgtgagccatc

SEQ ID NO: 116571 - DNA, 20 bp, synthetic construct
  source 1..20: mol_type = other DNA
aaattacaggtgtgagccat

SEQ ID NO: 116572 - DNA, 20 bp, synthetic construct
  source 1..20: mol_type = other DNA
aaaattacaggtgtgagcca

SEQ ID NO: 116573 - DNA, 20 bp, synthetic construct
  source 1..20: mol_type = other DNA
taaaattacaggtgtgagcc

SEQ ID NO: 116574 - DNA, 20 bp, synthetic construct
  source 1..20: mol_type = other DNA
ctaaaattacaggtgtgagc

SEQ ID NO: 116575 - DNA, 20 bp, synthetic construct
  source 1..20: mol_type = other DNA
gctaaaattacaggtgtgag

SEQ ID NO: 116576 - DNA, 20 bp, synthetic construct
  source 1..20: mol_type = other DNA
tgctaaaattacaggtgtga

SEQ ID NO: 116577 - DNA, 20 bp, synthetic construct
  source 1..20: mol_type = other DNA
gtgctaaaattacaggtgtg

SEQ ID NO: 116578 - DNA, 20 bp, synthetic construct
  source 1..20: mol_type = other DNA
agtgctaaaattacaggtgt

SEQ ID NO: 116579 - DNA, 20 bp, synthetic construct
  source 1..20: mol_type = other DNA
aagtgctaaaattacaggtg

SEQ ID NO: 116580 - DNA, 20 bp, synthetic construct
  source 1..20: mol_type = other DNA
aaagtgctaaaattacaggt

SEQ ID NO: 116581 - DNA, 20 bp, synthetic construct
  source 1..20: mol_type = other DNA
caaagtgctaaaattacagg

SEQ ID NO: 116582 - DNA, 20 bp, synthetic construct
  source 1..20: mol_type = other DNA
ccaaagtgctaaaattacag

SEQ ID NO: 116583 - DNA, 20 bp, synthetic construct
  source 1..20: mol_type = other DNA
cccaaagtgctaaaattaca

SEQ ID NO: 116584 - DNA, 20 bp, synthetic construct
  source 1..20: mol_type = other DNA
tcccaaagtgctaaaattac

SEQ ID NO: 116585 - DNA, 20 bp, synthetic construct
  source 1..20: mol_type = other DNA
ctcccaaagtgctaaaatta

SEQ ID NO: 116586 - DNA, 20 bp, synthetic construct
  source 1..20: mol_type = other DNA
cctcccaaagtgctaaaatt

SEQ ID NO: 116587 - DNA, 20 bp, synthetic construct
  source 1..20: mol_type = other DNA
gcctcccaaagtgctaaaat

SEQ ID NO: 116588 - DNA, 20 bp, synthetic construct
  source 1..20: mol_type = other DNA
ggcctcccaaagtgctaaaa

SEQ ID NO: 116589 - DNA, 20 bp, synthetic construct
  source 1..20: mol_type = other DNA
tggcctcccaaagtgctaaa

SEQ ID NO: 116590 - DNA, 20 bp, synthetic construct
  source 1..20: mol_type = other DNA
ttggcctcccaaagtgctaa

SEQ ID NO: 116591 - DNA, 20 bp, synthetic construct
  source 1..20: mol_type = other DNA
cttggcctcccaaagtgcta

SEQ ID NO: 116592 - DNA, 20 bp, synthetic construct
  source 1..20: mol_type = other DNA
ccttggcctcccaaagtgct

SEQ ID NO: 116593 - DNA, 20 bp, synthetic construct
  source 1..20: mol_type = other DNA
gccttggcctcccaaagtgc

SEQ ID NO: 116594 - DNA, 20 bp, synthetic construct
  source 1..20: mol_type = other DNA
tgccttggcctcccaaagtg

SEQ ID NO: 116595 - DNA, 20 bp, synthetic construct
  source 1..20: mol_type = other DNA
ctgccttggcctcccaaagt

SEQ ID NO: 116596 - DNA, 20 bp, synthetic construct
  source 1..20: mol_type = other DNA
cctgccttggcctcccaaag

SEQ ID NO: 116597 - DNA, 20 bp, synthetic construct
  source 1..20: mol_type = other DNA
tcctgccttggcctcccaaa

SEQ ID NO: 116598 - DNA, 20 bp, synthetic construct
  source 1..20: mol_type = other DNA
ctcctgccttggcctcccaa

SEQ ID NO: 116599 - DNA, 20 bp, synthetic construct
  source 1..20: mol_type = other DNA
cctcctgccttggcctccca

SEQ ID NO: 116600 - DNA, 20 bp, synthetic construct
  source 1..20: mol_type = other DNA
tcctcctgccttggcctccc

SEQ ID NO: 116601 - DNA, 20 bp, synthetic construct
  source 1..20: mol_type = other DNA
atcctcctgccttggcctcc

SEQ ID NO: 116602 - DNA, 20 bp, synthetic construct
  source 1..20: mol_type = other DNA
aatcctcctgccttggcctc

SEQ ID NO: 116603 - DNA, 20 bp, synthetic construct
  source 1..20: mol_type = other DNA
caatcctcctgccttggcct

SEQ ID NO: 116604 - DNA, 20 bp, synthetic construct
  source 1..20: mol_type = other DNA
gcaatcctcctgccttggcc

SEQ ID NO: 116605 - DNA, 20 bp, synthetic construct
  source 1..20: mol_type = other DNA
agcaatcctcctgccttggc

SEQ ID NO: 116606 - DNA, 20 bp, synthetic construct
  source 1..20: mol_type = other DNA
aagcaatcctcctgccttgg

SEQ ID NO: 116607 - DNA, 20 bp, synthetic construct
  source 1..20: mol_type = other DNA
caagcaatcctcctgccttg

SEQ ID NO: 116608 - DNA, 20 bp, synthetic construct
  source 1..20: mol_type = other DNA
tcaagcaatcctcctgcctt

SEQ ID NO: 116609 - DNA, 20 bp, synthetic construct
  source 1..20: mol_type = other DNA
ctcaagcaatcctcctgcct

SEQ ID NO: 116610 - DNA, 20 bp, synthetic construct
  source 1..20: mol_type = other DNA
gctcaagcaatcctcctgcc

SEQ ID NO: 116611 - DNA, 20 bp, synthetic construct
  source 1..20: mol_type = other DNA
agctcaagcaatcctcctgc

SEQ ID NO: 116612 - DNA, 20 bp, synthetic construct
  source 1..20: mol_type = other DNA
gagctcaagcaatcctcctg

SEQ ID NO: 116613 - DNA, 20 bp, synthetic construct
  source 1..20: mol_type = other DNA
tgagctcaagcaatcctcct

SEQ ID NO: 116614 - DNA, 20 bp, synthetic construct
  source 1..20: mol_type = other DNA
ctgagctcaagcaatcctcc

SEQ ID NO: 116615 - DNA, 20 bp, synthetic construct
  source 1..20: mol_type = other DNA
cctgagctcaagcaatcctc

SEQ ID NO: 116616 - DNA, 20 bp, synthetic construct
  source 1..20: mol_type = other DNA
tcctgagctcaagcaatcct

SEQ ID NO: 116617 - DNA, 20 bp, synthetic construct
  source 1..20: mol_type = other DNA
ctcctgagctcaagcaatcc

SEQ ID NO: 116618 - DNA, 20 bp, synthetic construct
  source 1..20: mol_type = other DNA
gctcctgagctcaagcaatc

SEQ ID NO: 116619 - DNA, 20 bp, synthetic construct
  source 1..20: mol_type = other DNA
ggctcctgagctcaagcaat

SEQ ID NO: 116620 - DNA, 20 bp, synthetic construct
  source 1..20: mol_type = other DNA
gggctcctgagctcaagcaa

SEQ ID NO: 116621 - DNA, 20 bp, synthetic construct
  source 1..20: mol_type = other DNA
tgggctcctgagctcaagca

SEQ ID NO: 116622 - DNA, 20 bp, synthetic construct
  source 1..20: mol_type = other DNA
ttgggctcctgagctcaagc

SEQ ID NO: 116623 - DNA, 20 bp, synthetic construct
  source 1..20: mol_type = other DNA
cttgggctcctgagctcaag

SEQ ID NO: 116624 - DNA, 20 bp, synthetic construct
  source 1..20: mol_type = other DNA
tcttgggctcctgagctcaa

SEQ ID NO: 116625 - DNA, 20 bp, synthetic construct
  source 1..20: mol_type = other DNA
atcttgggctcctgagctca

SEQ ID NO: 116626 - DNA, 20 bp, synthetic construct
  source 1..20: mol_type = other DNA
gatcttgggctcctgagctc

SEQ ID NO: 116627 - DNA, 20 bp, synthetic construct
  source 1..20: mol_type = other DNA
tgatcttgggctcctgagct

SEQ ID NO: 116628 - DNA, 20 bp, synthetic construct
  source 1..20: mol_type = other DNA
ctgatcttgggctcctgagc

SEQ ID NO: 116629 - DNA, 20 bp, synthetic construct
  source 1..20: mol_type = other DNA
gctgatcttgggctcctgag

SEQ ID NO: 116630 - DNA, 20 bp, synthetic construct
  source 1..20: mol_type = other DNA
ggctgatcttgggctcctga

SEQ ID NO: 116631 - DNA, 20 bp, synthetic construct
  source 1..20: mol_type = other DNA
aggctgatcttgggctcctg

SEQ ID NO: 116632 - DNA, 20 bp, synthetic construct
  source 1..20: mol_type = other DNA
caggctgatcttgggctcct

SEQ ID NO: 116633 - DNA, 20 bp, synthetic construct
  source 1..20: mol_type = other DNA
ccaggctgatcttgggctcc

SEQ ID NO: 116634 - DNA, 20 bp, synthetic construct
  source 1..20: mol_type = other DNA
tccaggctgatcttgggctc

SEQ ID NO: 116635 - DNA, 20 bp, synthetic construct
  source 1..20: mol_type = other DNA
gtccaggctgatcttgggct

SEQ ID NO: 116636 - DNA, 20 bp, synthetic construct
  source 1..20: mol_type = other DNA
tgtccaggctgatcttgggc

SEQ ID NO: 116637 - DNA, 20 bp, synthetic construct
  source 1..20: mol_type = other DNA
ttgtccaggctgatcttggg

SEQ ID NO: 116638 - DNA, 20 bp, synthetic construct
  source 1..20: mol_type = other DNA
gttgtccaggctgatcttgg

SEQ ID NO: 116639 - DNA, 20 bp, synthetic construct
  source 1..20: mol_type = other DNA
tgttgtccaggctgatcttg

SEQ ID NO: 116640 - DNA, 20 bp, synthetic construct
  source 1..20: mol_type = other DNA
ctgttgtccaggctgatctt

SEQ ID NO: 116641 - DNA, 20 bp, synthetic construct
  source 1..20: mol_type = other DNA
tctgttgtccaggctgatct

SEQ ID NO: 116642 - DNA, 20 bp, synthetic construct
  source 1..20: mol_type = other DNA
ctctgttgtccaggctgatc

SEQ ID NO: 116643 - DNA, 20 bp, synthetic construct
  source 1..20: mol_type = other DNA
tctctgttgtccaggctgat

SEQ ID NO: 116644 - DNA, 20 bp, synthetic construct
  source 1..20: mol_type = other DNA
gtctctgttgtccaggctga

SEQ ID NO: 116645 - DNA, 20 bp, synthetic construct
  source 1..20: mol_type = other DNA
agtctctgttgtccaggctg

SEQ ID NO: 116646 - DNA, 20 bp, synthetic construct
  source 1..20: mol_type = other DNA
aagtctctgttgtccaggct

SEQ ID NO: 116647 - DNA, 20 bp, synthetic construct
  source 1..20: mol_type = other DNA
aaagtctctgttgtccaggc

SEQ ID NO: 116648 - DNA, 20 bp, synthetic construct
  source 1..20: mol_type = other DNA
caaagtctctgttgtccagg

SEQ ID NO: 116649 - DNA, 20 bp, synthetic construct
  source 1..20: mol_type = other DNA
acaaagtctctgttgtccag

SEQ ID NO: 116650 - DNA, 20 bp, synthetic construct
  source 1..20: mol_type = other DNA
gacaaagtctctgttgtcca

SEQ ID NO: 116651 - DNA, 20 bp, synthetic construct
  source 1..20: mol_type = other DNA
agacaaagtctctgttgtcc

SEQ ID NO: 116652 - DNA, 20 bp, synthetic construct
  source 1..20: mol_type = other DNA
gagacaaagtctctgttgtc

SEQ ID NO: 116653 - DNA, 20 bp, synthetic construct
  source 1..20: mol_type = other DNA
agagacaaagtctctgttgt

SEQ ID NO: 116654 - DNA, 20 bp, synthetic construct
  source 1..20: mol_type = other DNA
tagagacaaagtctctgttg

SEQ ID NO: 116655 - DNA, 20 bp, synthetic construct
  source 1..20: mol_type = other DNA
gtagagacaaagtctctgtt

SEQ ID NO: 116656 - DNA, 20 bp, synthetic construct
  source 1..20: mol_type = other DNA
agtagagacaaagtctctgt

SEQ ID NO: 116657 - DNA, 20 bp, synthetic construct
  source 1..20: mol_type = other DNA
tagtagagacaaagtctctg

SEQ ID NO: 116658 - DNA, 20 bp, synthetic construct
  source 1..20: mol_type = other DNA
ttagtagagacaaagtctct

SEQ ID NO: 116659 - DNA, 20 bp, synthetic construct
  source 1..20: mol_type = other DNA
tttagtagagacaaagtctc

SEQ ID NO: 116660 - DNA, 20 bp, synthetic construct
  source 1..20: mol_type = other DNA
ttttagtagagacaaagtct

SEQ ID NO: 116661 - DNA, 20 bp, synthetic construct
  source 1..20: mol_type = other DNA
attttagtagagacaaagtc

SEQ ID NO: 116662 - DNA, 20 bp, synthetic construct
  source 1..20: mol_type = other DNA
aattttagtagagacaaagt

SEQ ID NO: 116663 - DNA, 20 bp, synthetic construct
  source 1..20: mol_type = other DNA
gaattttagtagagacaaag

SEQ ID NO: 116664 - DNA, 20 bp, synthetic construct
  source 1..20: mol_type = other DNA
tgaattttagtagagacaaa

SEQ ID NO: 116665 - DNA, 20 bp, synthetic construct
  source 1..20: mol_type = other DNA
ttgaattttagtagagacaa

SEQ ID NO: 116666 - DNA, 20 bp, synthetic construct
  source 1..20: mol_type = other DNA
tttgaattttagtagagaca

SEQ ID NO: 116667 - DNA, 20 bp, synthetic construct
  source 1..20: mol_type = other DNA
ttttgaattttagtagagac

SEQ ID NO: 116668 - DNA, 20 bp, synthetic construct
  source 1..20: mol_type = other DNA
tttttgaattttagtagaga

SEQ ID NO: 116669 - DNA, 20 bp, synthetic construct
  source 1..20: mol_type = other DNA
ttttttgaattttagtagag

SEQ ID NO: 116670 - DNA, 20 bp, synthetic construct
  source 1..20: mol_type = other DNA
tttttttgaattttagtaga

SEQ ID NO: 116671 - DNA, 20 bp, synthetic construct
  source 1..20: mol_type = other DNA
atttttttgaattttagtag

SEQ ID NO: 116672 - DNA, 20 bp, synthetic construct
  source 1..20: mol_type = other DNA
aatttttttgaattttagta

SEQ ID NO: 116673 - DNA, 20 bp, synthetic construct
  source 1..20: mol_type = other DNA
taatttttttgaattttagt

SEQ ID NO: 116674 - DNA, 20 bp, synthetic construct
  source 1..20: mol_type = other DNA
ctaatttttttgaattttag

SEQ ID NO: 116675 - DNA, 20 bp, synthetic construct
  source 1..20: mol_type = other DNA
gctaatttttttgaatttta

SEQ ID NO: 116676 - DNA, 20 bp, synthetic construct
  source 1..20: mol_type = other DNA
agctaatttttttgaatttt

SEQ ID NO: 116677 - DNA, 20 bp, synthetic construct
  source 1..20: mol_type = other DNA
cagctaatttttttgaattt

SEQ ID NO: 116678 - DNA, 20 bp, synthetic construct
  source 1..20: mol_type = other DNA
ccagctaatttttttgaatt

SEQ ID NO: 116679 - DNA, 20 bp, synthetic construct
  source 1..20: mol_type = other DNA
cccagctaatttttttgaat

SEQ ID NO: 116680 - DNA, 20 bp, synthetic construct
  source 1..20: mol_type = other DNA
gcccagctaatttttttgaa

SEQ ID NO: 116681 - DNA, 20 bp, synthetic construct
  source 1..20: mol_type = other DNA
tgcccagctaatttttttga

SEQ ID NO: 116682 - DNA, 20 bp, synthetic construct
  source 1..20: mol_type = other DNA
atgcccagctaatttttttg

SEQ ID NO: 116683 - DNA, 20 bp, synthetic construct
  source 1..20: mol_type = other DNA
catgcccagctaattttttt

SEQ ID NO: 116684 - DNA, 20 bp, synthetic construct
  source 1..20: mol_type = other DNA
ccatgcccagctaatttttt

SEQ ID NO: 116685 - DNA, 20 bp, synthetic construct
  source 1..20: mol_type = other DNA
accatgcccagctaattttt

SEQ ID NO: 116686 - DNA, 20 bp, synthetic construct
  source 1..20: mol_type = other DNA
caccatgcccagctaatttt

SEQ ID NO: 116687 - DNA, 20 bp, synthetic construct
  source 1..20: mol_type = other DNA
ccaccatgcccagctaattt

SEQ ID NO: 116688 - DNA, 20 bp, synthetic construct
  source 1..20: mol_type = other DNA
gccaccatgcccagctaatt

SEQ ID NO: 116689 - DNA, 20 bp, synthetic construct
  source 1..20: mol_type = other DNA
tgccaccatgcccagctaat

SEQ ID NO: 116690 - DNA, 20 bp, synthetic construct
  source 1..20: mol_type = other DNA
atgccaccatgcccagctaa

SEQ ID NO: 116691 - DNA, 20 bp, synthetic construct
  source 1..20: mol_type = other DNA
tatgccaccatgcccagcta

SEQ ID NO: 116692 - DNA, 20 bp, synthetic construct
  source 1..20: mol_type = other DNA
atatgccaccatgcccagct

SEQ ID NO: 116693 - DNA, 20 bp, synthetic construct
  source 1..20: mol_type = other DNA
catatgccaccatgcccagc

SEQ ID NO: 116694 - DNA, 20 bp, synthetic construct
  source 1..20: mol_type = other DNA
gcatatgccaccatgcccag

SEQ ID NO: 116695 - DNA, 20 bp, synthetic construct
  source 1..20: mol_type = other DNA
ggcatatgccaccatgccca

SEQ ID NO: 116696 - DNA, 20 bp, synthetic construct
  source 1..20: mol_type = other DNA
aggcatatgccaccatgccc

SEQ ID NO: 116697 - DNA, 20 bp, synthetic construct
  source 1..20: mol_type = other DNA
caggcatatgccaccatgcc

SEQ ID NO: 116698 - DNA, 20 bp, synthetic construct
  source 1..20: mol_type = other DNA
acaggcatatgccaccatgc

SEQ ID NO: 116699 - DNA, 20 bp, synthetic construct
  source 1..20: mol_type = other DNA
tacaggcatatgccaccatg

SEQ ID NO: 116700 - DNA, 20 bp, synthetic construct
  source 1..20: mol_type = other DNA
ctacaggcatatgccaccat

SEQ ID NO: 116701 - DNA, 20 bp, synthetic construct
  source 1..20: mol_type = other DNA
gctacaggcatatgccacca

SEQ ID NO: 116702 - DNA, 20 bp, synthetic construct
  source 1..20: mol_type = other DNA
ggctacaggcatatgccacc

SEQ ID NO: 116703 - DNA, 20 bp, synthetic construct
  source 1..20: mol_type = other DNA
gggctacaggcatatgccac

SEQ ID NO: 116704 - DNA, 20 bp, synthetic construct
  source 1..20: mol_type = other DNA
ggggctacaggcatatgcca

SEQ ID NO: 116705 - DNA, 20 bp, synthetic construct
  source 1..20: mol_type = other DNA
tggggctacaggcatatgcc

SEQ ID NO: 116706 - DNA, 20 bp, synthetic construct
  source 1..20: mol_type = other DNA
ctggggctacaggcatatgc

SEQ ID NO: 116707 - DNA, 20 bp, synthetic construct
  source 1..20: mol_type = other DNA
gctggggctacaggcatatg

SEQ ID NO: 116708 - DNA, 20 bp, synthetic construct
  source 1..20: mol_type = other DNA
agctggggctacaggcatat

SEQ ID NO: 116709 - DNA, 20 bp, synthetic construct
  source 1..20: mol_type = other DNA
cagctggggctacaggcata

SEQ ID NO: 116710 - DNA, 20 bp, synthetic construct
  source 1..20: mol_type = other DNA
acagctggggctacaggcat

SEQ ID NO: 116711 - DNA, 20 bp, synthetic construct
  source 1..20: mol_type = other DNA
aacagctggggctacaggca

SEQ ID NO: 116712 - DNA, 20 bp, synthetic construct
  source 1..20: mol_type = other DNA
aaacagctggggctacaggc

SEQ ID NO: 116713 - DNA, 20 bp, synthetic construct
  source 1..20: mol_type = other DNA
caaacagctggggctacagg

SEQ ID NO: 116714 - DNA, 20 bp, synthetic construct
  source 1..20: mol_type = other DNA
ccaaacagctggggctacag

SEQ ID NO: 116715 - DNA, 20 bp, synthetic construct
  source 1..20: mol_type = other DNA
cccaaacagctggggctaca

SEQ ID NO: 116716 - DNA, 20 bp, synthetic construct
  source 1..20: mol_type = other DNA
ccccaaacagctggggctac

SEQ ID NO: 116717 - DNA, 20 bp, synthetic construct
  source 1..20: mol_type = other DNA
cccccaaacagctggggcta

SEQ ID NO: 116718 - DNA, 20 bp, synthetic construct
  source 1..20: mol_type = other DNA
tcccccaaacagctggggct

SEQ ID NO: 116719 - DNA, 20 bp, synthetic construct
  source 1..20: mol_type = other DNA
gtcccccaaacagctggggc

SEQ ID NO: 116720 - DNA, 20 bp, synthetic construct
  source 1..20: mol_type = other DNA
agtcccccaaacagctgggg

SEQ ID NO: 116721 - DNA, 20 bp, synthetic construct
  source 1..20: mol_type = other DNA
cagtcccccaaacagctggg

SEQ ID NO: 116722 - DNA, 20 bp, synthetic construct
  source 1..20: mol_type = other DNA
tcagtcccccaaacagctgg

SEQ ID NO: 116723 - DNA, 20 bp, synthetic construct
  source 1..20: mol_type = other DNA
ctcagtcccccaaacagctg

SEQ ID NO: 116724 - DNA, 20 bp, synthetic construct
  source 1..20: mol_type = other DNA
cctcagtcccccaaacagct

SEQ ID NO: 116725 - DNA, 20 bp, synthetic construct
  source 1..20: mol_type = other DNA
gcctcagtcccccaaacagc

SEQ ID NO: 116726 - DNA, 20 bp, synthetic construct
  source 1..20: mol_type = other DNA
cgcctcagtcccccaaacag

SEQ ID NO: 116727 - DNA, 20 bp, synthetic construct
  source 1..20: mol_type = other DNA
tcgcctcagtcccccaaaca

SEQ ID NO: 116728 - DNA, 20 bp, synthetic construct
  source 1..20: mol_type = other DNA
ctcgcctcagtcccccaaac

SEQ ID NO: 116729 - DNA, 20 bp, synthetic construct
  source 1..20: mol_type = other DNA
tctcgcctcagtcccccaaa

SEQ ID NO: 116730 - DNA, 20 bp, synthetic construct
  source 1..20: mol_type = other DNA
ctctcgcctcagtcccccaa

SEQ ID NO: 116731 - DNA, 20 bp, synthetic construct
  source 1..20: mol_type = other DNA
cctctcgcctcagtccccca

SEQ ID NO: 116732 - DNA, 20 bp, synthetic construct
  source 1..20: mol_type = other DNA
tcctctcgcctcagtccccc

SEQ ID NO: 116733 - DNA, 20 bp, synthetic construct
  source 1..20: mol_type = other DNA
atcctctcgcctcagtcccc

SEQ ID NO: 116734 - DNA, 20 bp, synthetic construct
  source 1..20: mol_type = other DNA
gatcctctcgcctcagtccc

SEQ ID NO: 116735 - DNA, 20 bp, synthetic construct
  source 1..20: mol_type = other DNA
tgatcctctcgcctcagtcc

SEQ ID NO: 116736 - DNA, 20 bp, synthetic construct
  source 1..20: mol_type = other DNA
gtgatcctctcgcctcagtc

SEQ ID NO: 116737 - DNA, 20 bp, synthetic construct
  source 1..20: mol_type = other DNA
agtgatcctctcgcctcagt

SEQ ID NO: 116738 - DNA, 20 bp, synthetic construct
  source 1..20: mol_type = other DNA
aagtgatcctctcgcctcag

SEQ ID NO: 116739 - DNA, 20 bp, synthetic construct
  source 1..20: mol_type = other DNA
caagtgatcctctcgcctca

SEQ ID NO: 116740 - DNA, 20 bp, synthetic construct
  source 1..20: mol_type = other DNA
tcaagtgatcctctcgcctc

SEQ ID NO: 116741 - DNA, 20 bp, synthetic construct
  source 1..20: mol_type = other DNA
ctcaagtgatcctctcgcct

SEQ ID NO: 116742 - DNA, 20 bp, synthetic construct
  source 1..20: mol_type = other DNA
gctcaagtgatcctctcgcc

SEQ ID NO: 116743 - DNA, 20 bp, synthetic construct
  source 1..20: mol_type = other DNA
ggctcaagtgatcctctcgc

SEQ ID NO: 116744 - DNA, 20 bp, synthetic construct
  source 1..20: mol_type = other DNA
gggctcaagtgatcctctcg

SEQ ID NO: 116745 - DNA, 20 bp, synthetic construct
  source 1..20: mol_type = other DNA
tgggctcaagtgatcctctc

SEQ ID NO: 116746 - DNA, 20 bp, synthetic construct
  source 1..20: mol_type = other DNA
ctgggctcaagtgatcctct

SEQ ID NO: 116747 - DNA, 20 bp, synthetic construct
  source 1..20: mol_type = other DNA
cctgggctcaagtgatcctc

SEQ ID NO: 116748 - DNA, 20 bp, synthetic construct
  source 1..20: mol_type = other DNA
tcctgggctcaagtgatcct

SEQ ID NO: 116749 - DNA, 20 bp, synthetic construct
  source 1..20: mol_type = other DNA
ttcctgggctcaagtgatcc

SEQ ID NO: 116750 - DNA, 20 bp, synthetic construct
  source 1..20: mol_type = other DNA
cttcctgggctcaagtgatc

SEQ ID NO: 116751 - DNA, 20 bp, synthetic construct
  source 1..20: mol_type = other DNA
acttcctgggctcaagtgat

SEQ ID NO: 116752 - DNA, 20 bp, synthetic construct
  source 1..20: mol_type = other DNA
tacttcctgggctcaagtga

SEQ ID NO: 116753 - DNA, 20 bp, synthetic construct
  source 1..20: mol_type = other DNA
ctacttcctgggctcaagtg

SEQ ID NO: 116754 - DNA, 20 bp, synthetic construct
  source 1..20: mol_type = other DNA
tctacttcctgggctcaagt

SEQ ID NO: 116755 - DNA, 20 bp, synthetic construct
  source 1..20: mol_type = other DNA
ctctacttcctgggctcaag

SEQ ID NO: 116756 - DNA, 20 bp, synthetic construct
  source 1..20: mol_type = other DNA
cctctacttcctgggctcaa

SEQ ID NO: 116757 - DNA, 20 bp, synthetic construct
  source 1..20: mol_type = other DNA
gcctctacttcctgggctca

SEQ ID NO: 116758 - DNA, 20 bp, synthetic construct
  source 1..20: mol_type = other DNA
agcctctacttcctgggctc

SEQ ID NO: 116759 - DNA, 20 bp, synthetic construct
  source 1..20: mol_type = other DNA
cagcctctacttcctgggct

SEQ ID NO: 116760 - DNA, 20 bp, synthetic construct
  source 1..20: mol_type = other DNA
gcagcctctacttcctgggc

SEQ ID NO: 116761 - DNA, 20 bp, synthetic construct
  source 1..20: mol_type = other DNA
tgcagcctctacttcctggg

SEQ ID NO: 116762 - DNA, 20 bp, synthetic construct
  source 1..20: mol_type = other DNA
ctgcagcctctacttcctgg

SEQ ID NO: 116763 - DNA, 20 bp, synthetic construct
  source 1..20: mol_type = other DNA
actgcagcctctacttcctg

SEQ ID NO: 116764 - DNA, 20 bp, synthetic construct
  source 1..20: mol_type = other DNA
cactgcagcctctacttcct

SEQ ID NO: 116765 - DNA, 20 bp, synthetic construct
  source 1..20: mol_type = other DNA
tcactgcagcctctacttcc

SEQ ID NO: 116766 - DNA, 20 bp, synthetic construct
  source 1..20: mol_type = other DNA
ctcactgcagcctctacttc

SEQ ID NO: 116767 - DNA, 20 bp, synthetic construct
  source 1..20: mol_type = other DNA
gctcactgcagcctctactt

SEQ ID NO: 116768 - DNA, 20 bp, synthetic construct
  source 1..20: mol_type = other DNA
agctcactgcagcctctact

SEQ ID NO: 116769 - DNA, 20 bp, synthetic construct
  source 1..20: mol_type = other DNA
cagctcactgcagcctctac

SEQ ID NO: 116770 - DNA, 20 bp, synthetic construct
  source 1..20: mol_type = other DNA
acagctcactgcagcctcta

SEQ ID NO: 116771 - DNA, 20 bp, synthetic construct
  source 1..20: mol_type = other DNA
cacagctcactgcagcctct

SEQ ID NO: 116772 - DNA, 20 bp, synthetic construct
  source 1..20: mol_type = other DNA
tcacagctcactgcagcctc

SEQ ID NO: 116773 - DNA, 20 bp, synthetic construct
  source 1..20: mol_type = other DNA
atcacagctcactgcagcct

SEQ ID NO: 116774 - DNA, 20 bp, synthetic construct
  source 1..20: mol_type = other DNA
aatcacagctcactgcagcc

SEQ ID NO: 116775 - DNA, 20 bp, synthetic construct
  source 1..20: mol_type = other DNA
taatcacagctcactgcagc

SEQ ID NO: 116776 - DNA, 20 bp, synthetic construct
  source 1..20: mol_type = other DNA
ataatcacagctcactgcag

SEQ ID NO: 116777 - DNA, 20 bp, synthetic construct
  source 1..20: mol_type = other DNA
cataatcacagctcactgca

SEQ ID NO: 116778 - DNA, 20 bp, synthetic construct
  source 1..20: mol_type = other DNA
gcataatcacagctcactgc

SEQ ID NO: 116779 - DNA, 20 bp, synthetic construct
  source 1..20: mol_type = other DNA
ggcataatcacagctcactg

SEQ ID NO: 116780 - DNA, 20 bp, synthetic construct
  source 1..20: mol_type = other DNA
tggcataatcacagctcact

SEQ ID NO: 116781 - DNA, 20 bp, synthetic construct
  source 1..20: mol_type = other DNA
gtggcataatcacagctcac

SEQ ID NO: 116782 - DNA, 20 bp, synthetic construct
  source 1..20: mol_type = other DNA
agtggcataatcacagctca

SEQ ID NO: 116783 - DNA, 20 bp, synthetic construct
  source 1..20: mol_type = other DNA
cagtggcataatcacagctc

SEQ ID NO: 116784 - DNA, 20 bp, synthetic construct
  source 1..20: mol_type = other DNA
gcagtggcataatcacagct

SEQ ID NO: 116785 - DNA, 20 bp, synthetic construct
  source 1..20: mol_type = other DNA
ggcagtggcataatcacagc

SEQ ID NO: 116786 - DNA, 20 bp, synthetic construct
  source 1..20: mol_type = other DNA
gggcagtggcataatcacag

SEQ ID NO: 116787 - DNA, 20 bp, synthetic construct
  source 1..20: mol_type = other DNA
agggcagtggcataatcaca

SEQ ID NO: 116788 - DNA, 20 bp, synthetic construct
  source 1..20: mol_type = other DNA
gagggcagtggcataatcac

SEQ ID NO: 116789 - DNA, 20 bp, synthetic construct
  source 1..20: mol_type = other DNA
ggagggcagtggcataatca

SEQ ID NO: 116790 - DNA, 20 bp, synthetic construct
  source 1..20: mol_type = other DNA
tggagggcagtggcataatc

SEQ ID NO: 116791 - DNA, 20 bp, synthetic construct
  source 1..20: mol_type = other DNA
ctggagggcagtggcataat

SEQ ID NO: 116792 - DNA, 20 bp, synthetic construct
  source 1..20: mol_type = other DNA
gctggagggcagtggcataa

SEQ ID NO: 116793 - DNA, 20 bp, synthetic construct
  source 1..20: mol_type = other DNA
ggctggagggcagtggcata

SEQ ID NO: 116794 - DNA, 20 bp, synthetic construct
  source 1..20: mol_type = other DNA
aggctggagggcagtggcat

SEQ ID NO: 116795 - DNA, 20 bp, synthetic construct
  source 1..20: mol_type = other DNA
caggctggagggcagtggca

SEQ ID NO: 116796 - DNA, 20 bp, synthetic construct
  source 1..20: mol_type = other DNA
ccaggctggagggcagtggc

SEQ ID NO: 116797 - DNA, 20 bp, synthetic construct
  source 1..20: mol_type = other DNA
cccaggctggagggcagtgg

SEQ ID NO: 116798 - DNA, 20 bp, synthetic construct
  source 1..20: mol_type = other DNA
gcccaggctggagggcagtg

SEQ ID NO: 116799 - DNA, 20 bp, synthetic construct
  source 1..20: mol_type = other DNA
cgcccaggctggagggcagt

SEQ ID NO: 116800 - DNA, 20 bp, synthetic construct
  source 1..20: mol_type = other DNA
tcgcccaggctggagggcag

SEQ ID NO: 116801 - DNA, 20 bp, synthetic construct
  source 1..20: mol_type = other DNA
gtcgcccaggctggagggca

SEQ ID NO: 116802 - DNA, 20 bp, synthetic construct
  source 1..20: mol_type = other DNA
tgtcgcccaggctggagggc

SEQ ID NO: 116803 - DNA, 20 bp, synthetic construct
  source 1..20: mol_type = other DNA
ctgtcgcccaggctggaggg

SEQ ID NO: 116804 - DNA, 20 bp, synthetic construct
  source 1..20: mol_type = other DNA
tctgtcgcccaggctggagg

SEQ ID NO: 116805 - DNA, 20 bp, synthetic construct
  source 1..20: mol_type = other DNA
ctctgtcgcccaggctggag

SEQ ID NO: 116806 - DNA, 20 bp, synthetic construct
  source 1..20: mol_type = other DNA
actctgtcgcccaggctgga

SEQ ID NO: 116807 - DNA, 20 bp, synthetic construct
  source 1..20: mol_type = other DNA
cactctgtcgcccaggctgg

SEQ ID NO: 116808 - DNA, 20 bp, synthetic construct
  source 1..20: mol_type = other DNA
tcactctgtcgcccaggctg

SEQ ID NO: 116809 - DNA, 20 bp, synthetic construct
  source 1..20: mol_type = other DNA
ctcactctgtcgcccaggct

SEQ ID NO: 116810 - DNA, 20 bp, synthetic construct
  source 1..20: mol_type = other DNA
tctcactctgtcgcccaggc

SEQ ID NO: 116811 - DNA, 20 bp, synthetic construct
  source 1..20: mol_type = other DNA
gtctcactctgtcgcccagg

SEQ ID NO: 116812 - DNA, 20 bp, synthetic construct
  source 1..20: mol_type = other DNA
ggtctcactctgtcgcccag

SEQ ID NO: 116813 - DNA, 20 bp, synthetic construct
  source 1..20: mol_type = other DNA
gggtctcactctgtcgccca

SEQ ID NO: 116814 - DNA, 20 bp, synthetic construct
  source 1..20: mol_type = other DNA
ggggtctcactctgtcgccc

SEQ ID NO: 116815 - DNA, 20 bp, synthetic construct
  source 1..20: mol_type = other DNA
cggggtctcactctgtcgcc

SEQ ID NO: 116816 - DNA, 20 bp, synthetic construct
  source 1..20: mol_type = other DNA
acggggtctcactctgtcgc

SEQ ID NO: 116817 - DNA, 20 bp, synthetic construct
  source 1..20: mol_type = other DNA
gacggggtctcactctgtcg

SEQ ID NO: 116818 - DNA, 20 bp, synthetic construct
  source 1..20: mol_type = other DNA
agacggggtctcactctgtc

SEQ ID NO: 116819 - DNA, 20 bp, synthetic construct
  source 1..20: mol_type = other DNA
gagacggggtctcactctgt

SEQ ID NO: 116820 - DNA, 20 bp, synthetic construct
  source 1..20: mol_type = other DNA
tgagacggggtctcactctg

SEQ ID NO: 116821 - DNA, 20 bp, synthetic construct
  source 1..20: mol_type = other DNA
ttgagacggggtctcactct

SEQ ID NO: 116822 - DNA, 20 bp, synthetic construct
  source 1..20: mol_type = other DNA
tttgagacggggtctcactc

SEQ ID NO: 116823 - DNA, 20 bp, synthetic construct
  source 1..20: mol_type = other DNA
gtttgagacggggtctcact

SEQ ID NO: 116824 - DNA, 20 bp, synthetic construct
  source 1..20: mol_type = other DNA
tgtttgagacggggtctcac

SEQ ID NO: 116825 - DNA, 20 bp, synthetic construct
  source 1..20: mol_type = other DNA
atgtttgagacggggtctca

SEQ ID NO: 116826 - DNA, 20 bp, synthetic construct
  source 1..20: mol_type = other DNA
tatgtttgagacggggtctc

SEQ ID NO: 116827 - DNA, 20 bp, synthetic construct
  source 1..20: mol_type = other DNA
ttatgtttgagacggggtct

SEQ ID NO: 116828 - DNA, 20 bp, synthetic construct
  source 1..20: mol_type = other DNA
tttatgtttgagacggggtc

SEQ ID NO: 116829 - DNA, 20 bp, synthetic construct
  source 1..20: mol_type = other DNA
atttatgtttgagacggggt

SEQ ID NO: 116830 - DNA, 20 bp, synthetic construct
  source 1..20: mol_type = other DNA
tatttatgtttgagacgggg

SEQ ID NO: 116831 - DNA, 20 bp, synthetic construct
  source 1..20: mol_type = other DNA
gtatttatgtttgagacggg

SEQ ID NO: 116832 - DNA, 20 bp, synthetic construct
  source 1..20: mol_type = other DNA
agtatttatgtttgagacgg

SEQ ID NO: 116833 - DNA, 20 bp, synthetic construct
  source 1..20: mol_type = other DNA
cagtatttatgtttgagacg

SEQ ID NO: 116834 - DNA, 20 bp, synthetic construct
  source 1..20: mol_type = other DNA
ccagtatttatgtttgagac

SEQ ID NO: 116835 - DNA, 20 bp, synthetic construct
  source 1..20: mol_type = other DNA
gccagtatttatgtttgaga

SEQ ID NO: 116836 - DNA, 20 bp, synthetic construct
  source 1..20: mol_type = other DNA
agccagtatttatgtttgag

SEQ ID NO: 116837 - DNA, 20 bp, synthetic construct
  source 1..20: mol_type = other DNA
cagccagtatttatgtttga

SEQ ID NO: 116838 - DNA, 20 bp, synthetic construct
  source 1..20: mol_type = other DNA
ccagccagtatttatgtttg

SEQ ID NO: 116839 - DNA, 20 bp, synthetic construct
  source 1..20: mol_type = other DNA
cccagccagtatttatgttt

SEQ ID NO: 116840 - DNA, 20 bp, synthetic construct
  source 1..20: mol_type = other DNA
gcccagccagtatttatgtt

SEQ ID NO: 116841 - DNA, 20 bp, synthetic construct
  source 1..20: mol_type = other DNA
tgcccagccagtatttatgt

SEQ ID NO: 116842 - DNA, 20 bp, synthetic construct
  source 1..20: mol_type = other DNA
atgcccagccagtatttatg

SEQ ID NO: 116843 - DNA, 20 bp, synthetic construct
  source 1..20: mol_type = other DNA
catgcccagccagtatttat

SEQ ID NO: 116844 - DNA, 20 bp, synthetic construct
  source 1..20: mol_type = other DNA
ccatgcccagccagtattta

SEQ ID NO: 116845 - DNA, 20 bp, synthetic construct
  source 1..20: mol_type = other DNA
accatgcccagccagtattt

SEQ ID NO: 116846 - DNA, 20 bp, synthetic construct
  source 1..20: mol_type = other DNA
caccatgcccagccagtatt

SEQ ID NO: 116847 - DNA, 20 bp, synthetic construct
  source 1..20: mol_type = other DNA
ccaccatgcccagccagtat

SEQ ID NO: 116848 - DNA, 20 bp, synthetic construct
  source 1..20: mol_type = other DNA
gccaccatgcccagccagta

SEQ ID NO: 116849 - DNA, 20 bp, synthetic construct
  source 1..20: mol_type = other DNA
agccaccatgcccagccagt

SEQ ID NO: 116850 - DNA, 20 bp, synthetic construct
  source 1..20: mol_type = other DNA
aagccaccatgcccagccag

SEQ ID NO: 116851 - DNA, 20 bp, synthetic construct
  source 1..20: mol_type = other DNA
taagccaccatgcccagcca

SEQ ID NO: 116852 - DNA, 20 bp, synthetic construct
  source 1..20: mol_type = other DNA
ataagccaccatgcccagcc

SEQ ID NO: 116853 - DNA, 20 bp, synthetic construct
  source 1..20: mol_type = other DNA
cataagccaccatgcccagc

SEQ ID NO: 116854 - DNA, 20 bp, synthetic construct
  source 1..20: mol_type = other DNA
gcataagccaccatgcccag

SEQ ID NO: 116855 - DNA, 20 bp, synthetic construct
  source 1..20: mol_type = other DNA
ggcataagccaccatgccca

SEQ ID NO: 116856 - DNA, 20 bp, synthetic construct
  source 1..20: mol_type = other DNA
aggcataagccaccatgccc

SEQ ID NO: 116857 - DNA, 20 bp, synthetic construct
  source 1..20: mol_type = other DNA
caggcataagccaccatgcc

SEQ ID NO: 116858 - DNA, 20 bp, synthetic construct
  source 1..20: mol_type = other DNA
acaggcataagccaccatgc

SEQ ID NO: 116859 - DNA, 20 bp, synthetic construct
  source 1..20: mol_type = other DNA
tacaggcataagccaccatg

SEQ ID NO: 116860 - DNA, 20 bp, synthetic construct
  source 1..20: mol_type = other DNA
ttacaggcataagccaccat

SEQ ID NO: 116861 - DNA, 20 bp, synthetic construct
  source 1..20: mol_type = other DNA
attacaggcataagccacca

SEQ ID NO: 116862 - DNA, 20 bp, synthetic construct
  source 1..20: mol_type = other DNA
gattacaggcataagccacc

SEQ ID NO: 116863 - DNA, 20 bp, synthetic construct
  source 1..20: mol_type = other DNA
ggattacaggcataagccac

SEQ ID NO: 116864 - DNA, 20 bp, synthetic construct
  source 1..20: mol_type = other DNA
gggattacaggcataagcca

SEQ ID NO: 116865 - DNA, 20 bp, synthetic construct
  source 1..20: mol_type = other DNA
tgggattacaggcataagcc

SEQ ID NO: 116866 - DNA, 20 bp, synthetic construct
  source 1..20: mol_type = other DNA
ctgggattacaggcataagc

SEQ ID NO: 116867 - DNA, 20 bp, synthetic construct
  source 1..20: mol_type = other DNA
gctgggattacaggcataag

SEQ ID NO: 116868 - DNA, 20 bp, synthetic construct
  source 1..20: mol_type = other DNA
tgctgggattacaggcataa

SEQ ID NO: 116869 - DNA, 20 bp, synthetic construct
  source 1..20: mol_type = other DNA
gtgctgggattacaggcata

SEQ ID NO: 116870 - DNA, 20 bp, synthetic construct
  source 1..20: mol_type = other DNA
agtgctgggattacaggcat

SEQ ID NO: 116871 - DNA, 20 bp, synthetic construct
  source 1..20: mol_type = other DNA
aagtgctgggattacaggca

SEQ ID NO: 116872 - DNA, 20 bp, synthetic construct
  source 1..20: mol_type = other DNA
aaagtgctgggattacaggc

SEQ ID NO: 116873 - DNA, 20 bp, synthetic construct
  source 1..20: mol_type = other DNA
caaagtgctgggattacagg

SEQ ID NO: 116874 - DNA, 20 bp, synthetic construct
  source 1..20: mol_type = other DNA
ccaaagtgctgggattacag

SEQ ID NO: 116875 - DNA, 20 bp, synthetic construct
  source 1..20: mol_type = other DNA
cccaaagtgctgggattaca

SEQ ID NO: 116876 - DNA, 20 bp, synthetic construct
  source 1..20: mol_type = other DNA
tcccaaagtgctgggattac

SEQ ID NO: 116877 - DNA, 20 bp, synthetic construct
  source 1..20: mol_type = other DNA
ctcccaaagtgctgggatta

SEQ ID NO: 116878 - DNA, 20 bp, synthetic construct
  source 1..20: mol_type = other DNA
cctcccaaagtgctgggatt

SEQ ID NO: 116879 - DNA, 20 bp, synthetic construct
  source 1..20: mol_type = other DNA
gcctcccaaagtgctgggat

SEQ ID NO: 116880 - DNA, 20 bp, synthetic construct
  source 1..20: mol_type = other DNA
ggcctcccaaagtgctggga

SEQ ID NO: 116881 - DNA, 20 bp, synthetic construct
  source 1..20: mol_type = other DNA
cggcctcccaaagtgctggg

SEQ ID NO: 116882 - DNA, 20 bp, synthetic construct
  source 1..20: mol_type = other DNA
tcggcctcccaaagtgctgg

SEQ ID NO: 116883 - DNA, 20 bp, synthetic construct
  source 1..20: mol_type = other DNA
ctcggcctcccaaagtgctg

SEQ ID NO: 116884 - DNA, 20 bp, synthetic construct
  source 1..20: mol_type = other DNA
cctcggcctcccaaagtgct

SEQ ID NO: 116885 - DNA, 20 bp, synthetic construct
  source 1..20: mol_type = other DNA
acctcggcctcccaaagtgc

SEQ ID NO: 116886 - DNA, 20 bp, synthetic construct
  source 1..20: mol_type = other DNA
cacctcggcctcccaaagtg

SEQ ID NO: 116887 - DNA, 20 bp, synthetic construct
  source 1..20: mol_type = other DNA
ccacctcggcctcccaaagt

SEQ ID NO: 116888 - DNA, 20 bp, synthetic construct
  source 1..20: mol_type = other DNA
cccacctcggcctcccaaag

SEQ ID NO: 116889 - DNA, 20 bp, synthetic construct
  source 1..20: mol_type = other DNA
acccacctcggcctcccaaa

SEQ ID NO: 116890 - DNA, 20 bp, synthetic construct
  source 1..20: mol_type = other DNA
cacccacctcggcctcccaa

SEQ ID NO: 116891 - DNA, 20 bp, synthetic construct
  source 1..20: mol_type = other DNA
acacccacctcggcctccca

SEQ ID NO: 116892 - DNA, 20 bp, synthetic construct
  source 1..20: mol_type = other DNA
tacacccacctcggcctccc

SEQ ID NO: 116893 - DNA, 20 bp, synthetic construct
  source 1..20: mol_type = other DNA
atacacccacctcggcctcc

SEQ ID NO: 116894 - DNA, 20 bp, synthetic construct
  source 1..20: mol_type = other DNA
gatacacccacctcggcctc

SEQ ID NO: 116895 - DNA, 20 bp, synthetic construct
  source 1..20: mol_type = other DNA
tgatacacccacctcggcct

SEQ ID NO: 116896 - DNA, 20 bp, synthetic construct
  source 1..20: mol_type = other DNA
gtgatacacccacctcggcc

SEQ ID NO: 116897 - DNA, 20 bp, synthetic construct
  source 1..20: mol_type = other DNA
ggtgatacacccacctcggc

SEQ ID NO: 116898 - DNA, 20 bp, synthetic construct
  source 1..20: mol_type = other DNA
aggtgatacacccacctcgg

SEQ ID NO: 116899 - DNA, 20 bp, synthetic construct
  source 1..20: mol_type = other DNA
caggtgatacacccacctcg

SEQ ID NO: 116900 - DNA, 20 bp, synthetic construct
  source 1..20: mol_type = other DNA
tcaggtgatacacccacctc

SEQ ID NO: 116901 - DNA, 20 bp, synthetic construct
  source 1..20: mol_type = other DNA
ctcaggtgatacacccacct

SEQ ID NO: 116902 - DNA, 20 bp, synthetic construct
  source 1..20: mol_type = other DNA
cctcaggtgatacacccacc

SEQ ID NO: 116903 - DNA, 20 bp, synthetic construct
  source 1..20: mol_type = other DNA
acctcaggtgatacacccac

SEQ ID NO: 116904 - DNA, 20 bp, synthetic construct
  source 1..20: mol_type = other DNA
gacctcaggtgatacaccca

SEQ ID NO: 116905 - DNA, 20 bp, synthetic construct
  source 1..20: mol_type = other DNA
tgacctcaggtgatacaccc

SEQ ID NO: 116906 - DNA, 20 bp, synthetic construct
  source 1..20: mol_type = other DNA
ctgacctcaggtgatacacc

SEQ ID NO: 116907 - DNA, 20 bp, synthetic construct
  source 1..20: mol_type = other DNA
actgacctcaggtgatacac

SEQ ID NO: 116908 - DNA, 20 bp, synthetic construct
  source 1..20: mol_type = other DNA
tactgacctcaggtgataca

SEQ ID NO: 116909 - DNA, 20 bp, synthetic construct
  source 1..20: mol_type = other DNA
ctactgacctcaggtgatac

SEQ ID NO: 116910 - DNA, 20 bp, synthetic construct
  source 1..20: mol_type = other DNA
actactgacctcaggtgata

SEQ ID NO: 116911 - DNA, 20 bp, synthetic construct
  source 1..20: mol_type = other DNA
aactactgacctcaggtgat

SEQ ID NO: 116912 - DNA, 20 bp, synthetic construct
  source 1..20: mol_type = other DNA
aaactactgacctcaggtga

SEQ ID NO: 116913 - DNA, 20 bp, synthetic construct
  source 1..20: mol_type = other DNA
caaactactgacctcaggtg

SEQ ID NO: 116914 - DNA, 20 bp, synthetic construct
  source 1..20: mol_type = other DNA
tcaaactactgacctcaggt

SEQ ID NO: 116915 - DNA, 20 bp, synthetic construct
  source 1..20: mol_type = other DNA
ctcaaactactgacctcagg

SEQ ID NO: 116916 - DNA, 20 bp, synthetic construct
  source 1..20: mol_type = other DNA
tctcaaactactgacctcag

SEQ ID NO: 116917 - DNA, 20 bp, synthetic construct
  source 1..20: mol_type = other DNA
gtctcaaactactgacctca

SEQ ID NO: 116918 - DNA, 20 bp, synthetic construct
  source 1..20: mol_type = other DNA
ggtctcaaactactgacctc

SEQ ID NO: 116919 - DNA, 20 bp, synthetic construct
  source 1..20: mol_type = other DNA
tggtctcaaactactgacct

SEQ ID NO: 116920 - DNA, 20 bp, synthetic construct
  source 1..20: mol_type = other DNA
ctggtctcaaactactgacc

SEQ ID NO: 116921 - DNA, 20 bp, synthetic construct
  source 1..20: mol_type = other DNA
gctggtctcaaactactgac

SEQ ID NO: 116922 - DNA, 20 bp, synthetic construct
  source 1..20: mol_type = other DNA
ggctggtctcaaactactga

SEQ ID NO: 116923 - DNA, 20 bp, synthetic construct
  source 1..20: mol_type = other DNA
aggctggtctcaaactactg

SEQ ID NO: 116924 - DNA, 20 bp, synthetic construct
  source 1..20: mol_type = other DNA
caggctggtctcaaactact

SEQ ID NO: 116925 - DNA, 20 bp, synthetic construct
  source 1..20: mol_type = other DNA
ccaggctggtctcaaactac

SEQ ID NO: 116926 - DNA, 20 bp, synthetic construct
  source 1..20: mol_type = other DNA
gccaggctggtctcaaacta

SEQ ID NO: 116927 - DNA, 20 bp, synthetic construct
  source 1..20: mol_type = other DNA
ggccaggctggtctcaaact

SEQ ID NO: 116928 - DNA, 20 bp, synthetic construct
  source 1..20: mol_type = other DNA
tggccaggctggtctcaaac

SEQ ID NO: 116929 - DNA, 20 bp, synthetic construct
  source 1..20: mol_type = other DNA
ttggccaggctggtctcaaa

SEQ ID NO: 116930 - DNA, 20 bp, synthetic construct
  source 1..20: mol_type = other DNA
gttggccaggctggtctcaa

SEQ ID NO: 116931 - DNA, 20 bp, synthetic construct
  source 1..20: mol_type = other DNA
tgttggccaggctggtctca

SEQ ID NO: 116932 - DNA, 20 bp, synthetic construct
  source 1..20: mol_type = other DNA
atgttggccaggctggtctc

SEQ ID NO: 116933 - DNA, 20 bp, synthetic construct
  source 1..20: mol_type = other DNA
catgttggccaggctggtct

SEQ ID NO: 116934 - DNA, 20 bp, synthetic construct
  source 1..20: mol_type = other DNA
ccatgttggccaggctggtc

SEQ ID NO: 116935 - DNA, 20 bp, synthetic construct
  source 1..20: mol_type = other DNA
gccatgttggccaggctggt

SEQ ID NO: 116936 - DNA, 20 bp, synthetic construct
  source 1..20: mol_type = other DNA
cgccatgttggccaggctgg

SEQ ID NO: 116937 - DNA, 20 bp, synthetic construct
  source 1..20: mol_type = other DNA
tcgccatgttggccaggctg

SEQ ID NO: 116938 - DNA, 20 bp, synthetic construct
  source 1..20: mol_type = other DNA
ttcgccatgttggccaggct

SEQ ID NO: 116939 - DNA, 20 bp, synthetic construct
  source 1..20: mol_type = other DNA
tttcgccatgttggccaggc

SEQ ID NO: 116940 - DNA, 20 bp, synthetic construct
  source 1..20: mol_type = other DNA
gtttcgccatgttggccagg

SEQ ID NO: 116941 - DNA, 20 bp, synthetic construct
  source 1..20: mol_type = other DNA
ggtttcgccatgttggccag

SEQ ID NO: 116942 - DNA, 20 bp, synthetic construct
  source 1..20: mol_type = other DNA
gggtttcgccatgttggcca

SEQ ID NO: 116943 - DNA, 20 bp, synthetic construct
  source 1..20: mol_type = other DNA
ggggtttcgccatgttggcc

SEQ ID NO: 116944 - DNA, 20 bp, synthetic construct
  source 1..20: mol_type = other DNA
tggggtttcgccatgttggc

SEQ ID NO: 116945 - DNA, 20 bp, synthetic construct
  source 1..20: mol_type = other DNA
atggggtttcgccatgttgg

SEQ ID NO: 116946 - DNA, 20 bp, synthetic construct
  source 1..20: mol_type = other DNA
gatggggtttcgccatgttg

SEQ ID NO: 116947 - DNA, 20 bp, synthetic construct
  source 1..20: mol_type = other DNA
agatggggtttcgccatgtt

SEQ ID NO: 116948 - DNA, 20 bp, synthetic construct
  source 1..20: mol_type = other DNA
gagatggggtttcgccatgt

SEQ ID NO: 116949 - DNA, 20 bp, synthetic construct
  source 1..20: mol_type = other DNA
agagatggggtttcgccatg

SEQ ID NO: 116950 - DNA, 20 bp, synthetic construct
  source 1..20: mol_type = other DNA
tagagatggggtttcgccat

SEQ ID NO: 116951 - DNA, 20 bp, synthetic construct
  source 1..20: mol_type = other DNA
gtagagatggggtttcgcca

SEQ ID NO: 116952 - DNA, 20 bp, synthetic construct
  source 1..20: mol_type = other DNA
agtagagatggggtttcgcc

SEQ ID NO: 116953 - DNA, 20 bp, synthetic construct
  source 1..20: mol_type = other DNA
tagtagagatggggtttcgc

SEQ ID NO: 116954 - DNA, 20 bp, synthetic construct
  source 1..20: mol_type = other DNA
ttagtagagatggggtttcg

SEQ ID NO: 116955 - DNA, 20 bp, synthetic construct
  source 1..20: mol_type = other DNA
tttagtagagatggggtttc

SEQ ID NO: 116956 - DNA, 20 bp, synthetic construct
  source 1..20: mol_type = other DNA
ttttagtagagatggggttt

SEQ ID NO: 116957 - DNA, 20 bp, synthetic construct
  source 1..20: mol_type = other DNA
attttagtagagatggggtt

SEQ ID NO: 116958 - DNA, 20 bp, synthetic construct
  source 1..20: mol_type = other DNA
tattttagtagagatggggt

SEQ ID NO: 116959 - DNA, 20 bp, synthetic construct
  source 1..20: mol_type = other DNA
gtattttagtagagatgggg

SEQ ID NO: 116960 - DNA, 20 bp, synthetic construct
  source 1..20: mol_type = other DNA
tgtattttagtagagatggg

SEQ ID NO: 116961 - DNA, 20 bp, synthetic construct
  source 1..20: mol_type = other DNA
ttgtattttagtagagatgg

SEQ ID NO: 116962 - DNA, 20 bp, synthetic construct
  source 1..20: mol_type = other DNA
tttgtattttagtagagatg

SEQ ID NO: 116963 - DNA, 20 bp, synthetic construct
  source 1..20: mol_type = other DNA
ttttgtattttagtagagat

SEQ ID NO: 116964 - DNA, 20 bp, synthetic construct
  source 1..20: mol_type = other DNA
tttttgtattttagtagaga

SEQ ID NO: 116965 - DNA, 20 bp, synthetic construct
  source 1..20: mol_type = other DNA
atttttgtattttagtagag

SEQ ID NO: 116966 - DNA, 20 bp, synthetic construct
  source 1..20: mol_type = other DNA
aatttttgtattttagtaga

SEQ ID NO: 116967 - DNA, 20 bp, synthetic construct
  source 1..20: mol_type = other DNA
taatttttgtattttagtag

SEQ ID NO: 116968 - DNA, 20 bp, synthetic construct
  source 1..20: mol_type = other DNA
ctaatttttgtattttagta

SEQ ID NO: 116969 - DNA, 20 bp, synthetic construct
  source 1..20: mol_type = other DNA
gctaatttttgtattttagt

SEQ ID NO: 116970 - DNA, 20 bp, synthetic construct
  source 1..20: mol_type = other DNA
ggctaatttttgtattttag

SEQ ID NO: 116971 - DNA, 20 bp, synthetic construct
  source 1..20: mol_type = other DNA
cggctaatttttgtatttta

SEQ ID NO: 116972 - DNA, 20 bp, synthetic construct
  source 1..20: mol_type = other DNA
ccggctaatttttgtatttt

SEQ ID NO: 116973 - DNA, 20 bp, synthetic construct
  source 1..20: mol_type = other DNA
tccggctaatttttgtattt

SEQ ID NO: 116974 - DNA, 20 bp, synthetic construct
  source 1..20: mol_type = other DNA
gtccggctaatttttgtatt

SEQ ID NO: 116975 - DNA, 20 bp, synthetic construct
  source 1..20: mol_type = other DNA
tgtccggctaatttttgtat

SEQ ID NO: 116976 - DNA, 20 bp, synthetic construct
  source 1..20: mol_type = other DNA
atgtccggctaatttttgta

SEQ ID NO: 116977 - DNA, 20 bp, synthetic construct
  source 1..20: mol_type = other DNA
catgtccggctaatttttgt

SEQ ID NO: 116978 - DNA, 20 bp, synthetic construct
  source 1..20: mol_type = other DNA
ccatgtccggctaatttttg

SEQ ID NO: 116979 - DNA, 20 bp, synthetic construct
  source 1..20: mol_type = other DNA
accatgtccggctaattttt

SEQ ID NO: 116980 - DNA, 20 bp, synthetic construct
  source 1..20: mol_type = other DNA
caccatgtccggctaatttt

SEQ ID NO: 116981 - DNA, 20 bp, synthetic construct
  source 1..20: mol_type = other DNA
ccaccatgtccggctaattt

SEQ ID NO: 116982 - DNA, 20 bp, synthetic construct
  source 1..20: mol_type = other DNA
gccaccatgtccggctaatt

SEQ ID NO: 116983 - DNA, 20 bp, synthetic construct
  source 1..20: mol_type = other DNA
tgccaccatgtccggctaat

SEQ ID NO: 116984 - DNA, 20 bp, synthetic construct
  source 1..20: mol_type = other DNA
gtgccaccatgtccggctaa

SEQ ID NO: 116985 - DNA, 20 bp, synthetic construct
  source 1..20: mol_type = other DNA
ggtgccaccatgtccggcta

SEQ ID NO: 116986 - DNA, 20 bp, synthetic construct
  source 1..20: mol_type = other DNA
aggtgccaccatgtccggct

SEQ ID NO: 116987 - DNA, 20 bp, synthetic construct
  source 1..20: mol_type = other DNA
caggtgccaccatgtccggc

SEQ ID NO: 116988 - DNA, 20 bp, synthetic construct
  source 1..20: mol_type = other DNA
gcaggtgccaccatgtccgg

SEQ ID NO: 116989 - DNA, 20 bp, synthetic construct
  source 1..20: mol_type = other DNA
ggcaggtgccaccatgtccg

SEQ ID NO: 116990 - DNA, 20 bp, synthetic construct
  source 1..20: mol_type = other DNA
cggcaggtgccaccatgtcc

SEQ ID NO: 116991 - DNA, 20 bp, synthetic construct
  source 1..20: mol_type = other DNA
gcggcaggtgccaccatgtc

SEQ ID NO: 116992 - DNA, 20 bp, synthetic construct
  source 1..20: mol_type = other DNA
ggcggcaggtgccaccatgt

SEQ ID NO: 116993 - DNA, 20 bp, synthetic construct
  source 1..20: mol_type = other DNA
aggcggcaggtgccaccatg

SEQ ID NO: 116994 - DNA, 20 bp, synthetic construct
  source 1..20: mol_type = other DNA
caggcggcaggtgccaccat

SEQ ID NO: 116995 - DNA, 20 bp, synthetic construct
  source 1..20: mol_type = other DNA
acaggcggcaggtgccacca

SEQ ID NO: 116996 - DNA, 20 bp, synthetic construct
  source 1..20: mol_type = other DNA
tacaggcggcaggtgccacc

SEQ ID NO: 116997 - DNA, 20 bp, synthetic construct
  source 1..20: mol_type = other DNA
ttacaggcggcaggtgccac

SEQ ID NO: 116998 - DNA, 20 bp, synthetic construct
  source 1..20: mol_type = other DNA
attacaggcggcaggtgcca

SEQ ID NO: 116999 - DNA, 20 bp, synthetic construct
  source 1..20: mol_type = other DNA
gattacaggcggcaggtgcc

SEQ ID NO: 117000 - DNA, 20 bp, synthetic construct
  source 1..20: mol_type = other DNA
ggattacaggcggcaggtgc

SEQ ID NO: 117001 - DNA, 20 bp, synthetic construct
  source 1..20: mol_type = other DNA
gggattacaggcggcaggtg

SEQ ID NO: 117002 - DNA, 20 bp, synthetic construct
  source 1..20: mol_type = other DNA
tgggattacaggcggcaggt

SEQ ID NO: 117003 - DNA, 20 bp, synthetic construct
  source 1..20: mol_type = other DNA
ctgggattacaggcggcagg

SEQ ID NO: 117004 - DNA, 20 bp, synthetic construct
  source 1..20: mol_type = other DNA
gctgggattacaggcggcag

SEQ ID NO: 117005 - DNA, 20 bp, synthetic construct
  source 1..20: mol_type = other DNA
agctgggattacaggcggca

SEQ ID NO: 117006 - DNA, 20 bp, synthetic construct
  source 1..20: mol_type = other DNA
tagctgggattacaggcggc

SEQ ID NO: 117007 - DNA, 20 bp, synthetic construct
  source 1..20: mol_type = other DNA
gtagctgggattacaggcgg

SEQ ID NO: 117008 - DNA, 20 bp, synthetic construct
  source 1..20: mol_type = other DNA
agtagctgggattacaggcg

SEQ ID NO: 117009 - DNA, 20 bp, synthetic construct
  source 1..20: mol_type = other DNA
tagtagctgggattacaggc

SEQ ID NO: 117010 - DNA, 20 bp, synthetic construct
  source 1..20: mol_type = other DNA
ctagtagctgggattacagg

SEQ ID NO: 117011 - DNA, 20 bp, synthetic construct
  source 1..20: mol_type = other DNA
cctagtagctgggattacag

SEQ ID NO: 117012 - DNA, 20 bp, synthetic construct
  source 1..20: mol_type = other DNA
acctagtagctgggattaca

SEQ ID NO: 117013 - DNA, 20 bp, synthetic construct
  source 1..20: mol_type = other DNA
cacctagtagctgggattac

SEQ ID NO: 117014 - DNA, 20 bp, synthetic construct
  source 1..20: mol_type = other DNA
ccacctagtagctgggatta

SEQ ID NO: 117015 - DNA, 20 bp, synthetic construct
  source 1..20: mol_type = other DNA
cccacctagtagctgggatt

SEQ ID NO: 117016 - DNA, 20 bp, synthetic construct
  source 1..20: mol_type = other DNA
ccccacctagtagctgggat

SEQ ID NO: 117017 - DNA, 20 bp, synthetic construct
  source 1..20: mol_type = other DNA
gccccacctagtagctggga

SEQ ID NO: 117018 - DNA, 20 bp, synthetic construct
  source 1..20: mol_type = other DNA
agccccacctagtagctggg

SEQ ID NO: 117019 - DNA, 20 bp, synthetic construct
  source 1..20: mol_type = other DNA
cagccccacctagtagctgg

SEQ ID NO: 117020 - DNA, 20 bp, synthetic construct
  source 1..20: mol_type = other DNA
tcagccccacctagtagctg

SEQ ID NO: 117021 - DNA, 20 bp, synthetic construct
  source 1..20: mol_type = other DNA
ctcagccccacctagtagct

SEQ ID NO: 117022 - DNA, 20 bp, synthetic construct
  source 1..20: mol_type = other DNA
cctcagccccacctagtagc

SEQ ID NO: 117023 - DNA, 20 bp, synthetic construct
  source 1..20: mol_type = other DNA
gcctcagccccacctagtag

SEQ ID NO: 117024 - DNA, 20 bp, synthetic construct
  source 1..20: mol_type = other DNA
tgcctcagccccacctagta

SEQ ID NO: 117025 - DNA, 20 bp, synthetic construct
  source 1..20: mol_type = other DNA
ctgcctcagccccacctagt

SEQ ID NO: 117026 - DNA, 20 bp, synthetic construct
  source 1..20: mol_type = other DNA
cctgcctcagccccacctag

SEQ ID NO: 117027 - DNA, 20 bp, synthetic construct
  source 1..20: mol_type = other DNA
tcctgcctcagccccaccta

SEQ ID NO: 117028 - DNA, 20 bp, synthetic construct
  source 1..20: mol_type = other DNA
ctcctgcctcagccccacct

SEQ ID NO: 117029 - DNA, 20 bp, synthetic construct
  source 1..20: mol_type = other DNA
tctcctgcctcagccccacc

SEQ ID NO: 117030 - DNA, 20 bp, synthetic construct
  source 1..20: mol_type = other DNA
ttctcctgcctcagccccac

SEQ ID NO: 117031 - DNA, 20 bp, synthetic construct
  source 1..20: mol_type = other DNA
attctcctgcctcagcccca

SEQ ID NO: 117032 - DNA, 20 bp, synthetic construct
  source 1..20: mol_type = other DNA
aattctcctgcctcagcccc

SEQ ID NO: 117033 - DNA, 20 bp, synthetic construct
  source 1..20: mol_type = other DNA
caattctcctgcctcagccc

SEQ ID NO: 117034 - DNA, 20 bp, synthetic construct
  source 1..20: mol_type = other DNA
gcaattctcctgcctcagcc

SEQ ID NO: 117035 - DNA, 20 bp, synthetic construct
  source 1..20: mol_type = other DNA
agcaattctcctgcctcagc

SEQ ID NO: 117036 - DNA, 20 bp, synthetic construct
  source 1..20: mol_type = other DNA
aagcaattctcctgcctcag

SEQ ID NO: 117037 - DNA, 20 bp, synthetic construct
  source 1..20: mol_type = other DNA
caagcaattctcctgcctca

SEQ ID NO: 117038 - DNA, 20 bp, synthetic construct
  source 1..20: mol_type = other DNA
tcaagcaattctcctgcctc

SEQ ID NO: 117039 - DNA, 20 bp, synthetic construct
  source 1..20: mol_type = other DNA
ttcaagcaattctcctgcct

SEQ ID NO: 117040 - DNA, 20 bp, synthetic construct
  source 1..20: mol_type = other DNA
gttcaagcaattctcctgcc

SEQ ID NO: 117041 - DNA, 20 bp, synthetic construct
  source 1..20: mol_type = other DNA
ggttcaagcaattctcctgc

SEQ ID NO: 117042 - DNA, 20 bp, synthetic construct
  source 1..20: mol_type = other DNA
gggttcaagcaattctcctg

SEQ ID NO: 117043 - DNA, 20 bp, synthetic construct
  source 1..20: mol_type = other DNA
cgggttcaagcaattctcct

SEQ ID NO: 117044 - DNA, 20 bp, synthetic construct
  source 1..20: mol_type = other DNA
ccgggttcaagcaattctcc

SEQ ID NO: 117045 - DNA, 20 bp, synthetic construct
  source 1..20: mol_type = other DNA
cccgggttcaagcaattctc

SEQ ID NO: 117046 - DNA, 20 bp, synthetic construct
  source 1..20: mol_type = other DNA
tcccgggttcaagcaattct

SEQ ID NO: 117047 - DNA, 20 bp, synthetic construct
  source 1..20: mol_type = other DNA
ctcccgggttcaagcaattc

SEQ ID NO: 117048 - DNA, 20 bp, synthetic construct
  source 1..20: mol_type = other DNA
cctcccgggttcaagcaatt

SEQ ID NO: 117049 - DNA, 20 bp, synthetic construct
  source 1..20: mol_type = other DNA
gcctcccgggttcaagcaat

SEQ ID NO: 117050 - DNA, 20 bp, synthetic construct
  source 1..20: mol_type = other DNA
tgcctcccgggttcaagcaa

SEQ ID NO: 117051 - DNA, 20 bp, synthetic construct
  source 1..20: mol_type = other DNA
ctgcctcccgggttcaagca

SEQ ID NO: 117052 - DNA, 20 bp, synthetic construct
  source 1..20: mol_type = other DNA
cctgcctcccgggttcaagc

SEQ ID NO: 117053 - DNA, 20 bp, synthetic construct
  source 1..20: mol_type = other DNA
ccctgcctcccgggttcaag

SEQ ID NO: 117054 - DNA, 20 bp, synthetic construct
  source 1..20: mol_type = other DNA
cccctgcctcccgggttcaa

SEQ ID NO: 117055 - DNA, 20 bp, synthetic construct
  source 1..20: mol_type = other DNA
acccctgcctcccgggttca

SEQ ID NO: 117056 - DNA, 20 bp, synthetic construct
  source 1..20: mol_type = other DNA
aacccctgcctcccgggttc

SEQ ID NO: 117057 - DNA, 20 bp, synthetic construct
  source 1..20: mol_type = other DNA
caacccctgcctcccgggtt

SEQ ID NO: 117058 - DNA, 20 bp, synthetic construct
  source 1..20: mol_type = other DNA
gcaacccctgcctcccgggt

SEQ ID NO: 117059 - DNA, 20 bp, synthetic construct
  source 1..20: mol_type = other DNA
tgcaacccctgcctcccggg

SEQ ID NO: 117060 - DNA, 20 bp, synthetic construct
  source 1..20: mol_type = other DNA
ctgcaacccctgcctcccgg

SEQ ID NO: 117061 - DNA, 20 bp, synthetic construct
  source 1..20: mol_type = other DNA
actgcaacccctgcctcccg

SEQ ID NO: 117062 - DNA, 20 bp, synthetic construct
  source 1..20: mol_type = other DNA
cactgcaacccctgcctccc

SEQ ID NO: 117063 - DNA, 20 bp, synthetic construct
  source 1..20: mol_type = other DNA
tcactgcaacccctgcctcc

SEQ ID NO: 117064 - DNA, 20 bp, synthetic construct
  source 1..20: mol_type = other DNA
ctcactgcaacccctgcctc

SEQ ID NO: 117065 - DNA, 20 bp, synthetic construct
  source 1..20: mol_type = other DNA
gctcactgcaacccctgcct

SEQ ID NO: 117066 - DNA, 20 bp, synthetic construct
  source 1..20: mol_type = other DNA
ggctcactgcaacccctgcc

SEQ ID NO: 117067 - DNA, 20 bp, synthetic construct
  source 1..20: mol_type = other DNA
tggctcactgcaacccctgc

SEQ ID NO: 117068 - DNA, 20 bp, synthetic construct
  source 1..20: mol_type = other DNA
ttggctcactgcaacccctg

SEQ ID NO: 117069 - DNA, 20 bp, synthetic construct
  source 1..20: mol_type = other DNA
cttggctcactgcaacccct

SEQ ID NO: 117070 - DNA, 20 bp, synthetic construct
  source 1..20: mol_type = other DNA
tcttggctcactgcaacccc

SEQ ID NO: 117071 - DNA, 20 bp, synthetic construct
  source 1..20: mol_type = other DNA
atcttggctcactgcaaccc

SEQ ID NO: 117072 - DNA, 20 bp, synthetic construct
  source 1..20: mol_type = other DNA
gatcttggctcactgcaacc

SEQ ID NO: 117073 - DNA, 20 bp, synthetic construct
  source 1..20: mol_type = other DNA
cgatcttggctcactgcaac

SEQ ID NO: 117074 - DNA, 20 bp, synthetic construct
  source 1..20: mol_type = other DNA
acgatcttggctcactgcaa

SEQ ID NO: 117075 - DNA, 20 bp, synthetic construct
  source 1..20: mol_type = other DNA
cacgatcttggctcactgca

SEQ ID NO: 117076 - DNA, 20 bp, synthetic construct
  source 1..20: mol_type = other DNA
gcacgatcttggctcactgc

SEQ ID NO: 117077 - DNA, 20 bp, synthetic construct
  source 1..20: mol_type = other DNA
ggcacgatcttggctcactg

SEQ ID NO: 117078 - DNA, 20 bp, synthetic construct
  source 1..20: mol_type = other DNA
tggcacgatcttggctcact

SEQ ID NO: 117079 - DNA, 20 bp, synthetic construct
  source 1..20: mol_type = other DNA
gtggcacgatcttggctcac

SEQ ID NO: 117080 - DNA, 20 bp, synthetic construct
  source 1..20: mol_type = other DNA
agtggcacgatcttggctca

SEQ ID NO: 117081 - DNA, 20 bp, synthetic construct
  source 1..20: mol_type = other DNA
cagtggcacgatcttggctc

SEQ ID NO: 117082 - DNA, 20 bp, synthetic construct
  source 1..20: mol_type = other DNA
gcagtggcacgatcttggct

SEQ ID NO: 117083 - DNA, 20 bp, synthetic construct
  source 1..20: mol_type = other DNA
tgcagtggcacgatcttggc

SEQ ID NO: 117084 - DNA, 20 bp, synthetic construct
  source 1..20: mol_type = other DNA
gtgcagtggcacgatcttgg

SEQ ID NO: 117085 - DNA, 20 bp, synthetic construct
  source 1..20: mol_type = other DNA
agtgcagtggcacgatcttg

SEQ ID NO: 117086 - DNA, 20 bp, synthetic construct
  source 1..20: mol_type = other DNA
aagtgcagtggcacgatctt

SEQ ID NO: 117087 - DNA, 20 bp, synthetic construct
  source 1..20: mol_type = other DNA
gaagtgcagtggcacgatct

SEQ ID NO: 117088 - DNA, 20 bp, synthetic construct
  source 1..20: mol_type = other DNA
tgaagtgcagtggcacgatc

SEQ ID NO: 117089 - DNA, 20 bp, synthetic construct
  source 1..20: mol_type = other DNA
ctgaagtgcagtggcacgat

SEQ ID NO: 117090 - DNA, 20 bp, synthetic construct
  source 1..20: mol_type = other DNA
gctgaagtgcagtggcacga

SEQ ID NO: 117091 - DNA, 20 bp, synthetic construct
  source 1..20: mol_type = other DNA
ggctgaagtgcagtggcacg

SEQ ID NO: 117092 - DNA, 20 bp, synthetic construct
  source 1..20: mol_type = other DNA
aggctgaagtgcagtggcac

SEQ ID NO: 117093 - DNA, 20 bp, synthetic construct
  source 1..20: mol_type = other DNA
caggctgaagtgcagtggca

SEQ ID NO: 117094 - DNA, 20 bp, synthetic construct
  source 1..20: mol_type = other DNA
ccaggctgaagtgcagtggc

SEQ ID NO: 117095 - DNA, 20 bp, synthetic construct
  source 1..20: mol_type = other DNA
cccaggctgaagtgcagtgg

SEQ ID NO: 117096 - DNA, 20 bp, synthetic construct
  source 1..20: mol_type = other DNA
gcccaggctgaagtgcagtg

SEQ ID NO: 117097 - DNA, 20 bp, synthetic construct
  source 1..20: mol_type = other DNA
tgcccaggctgaagtgcagt

SEQ ID NO: 117098 - DNA, 20 bp, synthetic construct
  source 1..20: mol_type = other DNA
ttgcccaggctgaagtgcag

SEQ ID NO: 117099 - DNA, 20 bp, synthetic construct
  source 1..20: mol_type = other DNA
gttgcccaggctgaagtgca

SEQ ID NO: 117100 - DNA, 20 bp, synthetic construct
  source 1..20: mol_type = other DNA
tgttgcccaggctgaagtgc

SEQ ID NO: 117101 - DNA, 20 bp, synthetic construct
  source 1..20: mol_type = other DNA
ctgttgcccaggctgaagtg

SEQ ID NO: 117102 - DNA, 20 bp, synthetic construct
  source 1..20: mol_type = other DNA
tctgttgcccaggctgaagt

SEQ ID NO: 117103 - DNA, 20 bp, synthetic construct
  source 1..20: mol_type = other DNA
ctctgttgcccaggctgaag

SEQ ID NO: 117104 - DNA, 20 bp, synthetic construct
  source 1..20: mol_type = other DNA
actctgttgcccaggctgaa

SEQ ID NO: 117105 - DNA, 20 bp, synthetic construct
  source 1..20: mol_type = other DNA
cactctgttgcccaggctga

SEQ ID NO: 117106 - DNA, 20 bp, synthetic construct
  source 1..20: mol_type = other DNA
tcactctgttgcccaggctg

SEQ ID NO: 117107 - DNA, 20 bp, synthetic construct
  source 1..20: mol_type = other DNA
ctcactctgttgcccaggct

SEQ ID NO: 117108 - DNA, 20 bp, synthetic construct
  source 1..20: mol_type = other DNA
tctcactctgttgcccaggc

SEQ ID NO: 117109 - DNA, 20 bp, synthetic construct
  source 1..20: mol_type = other DNA
gtctcactctgttgcccagg

SEQ ID NO: 117110 - DNA, 20 bp, synthetic construct
  source 1..20: mol_type = other DNA
agtctcactctgttgcccag

SEQ ID NO: 117111 - DNA, 20 bp, synthetic construct
  source 1..20: mol_type = other DNA
gagtctcactctgttgccca

SEQ ID NO: 117112 - DNA, 20 bp, synthetic construct
  source 1..20: mol_type = other DNA
ggagtctcactctgttgccc

SEQ ID NO: 117113 - DNA, 20 bp, synthetic construct
  source 1..20: mol_type = other DNA
tggagtctcactctgttgcc

SEQ ID NO: 117114 - DNA, 20 bp, synthetic construct
  source 1..20: mol_type = other DNA
atggagtctcactctgttgc

SEQ ID NO: 117115 - DNA, 20 bp, synthetic construct
  source 1..20: mol_type = other DNA
gatggagtctcactctgttg

SEQ ID NO: 117116 - DNA, 20 bp, synthetic construct
  source 1..20: mol_type = other DNA
agatggagtctcactctgtt

SEQ ID NO: 117117 - DNA, 20 bp, synthetic construct
  source 1..20: mol_type = other DNA
gagatggagtctcactctgt

SEQ ID NO: 117118 - DNA, 20 bp, synthetic construct
  source 1..20: mol_type = other DNA
tgagatggagtctcactctg

SEQ ID NO: 117119 - DNA, 20 bp, synthetic construct
  source 1..20: mol_type = other DNA
ttgagatggagtctcactct

SEQ ID NO: 117120 - DNA, 20 bp, synthetic construct
  source 1..20: mol_type = other DNA
tttgagatggagtctcactc

SEQ ID NO: 117121 - DNA, 20 bp, synthetic construct
  source 1..20: mol_type = other DNA
ttttgagatggagtctcact

SEQ ID NO: 117122 - DNA, 20 bp, synthetic construct
  source 1..20: mol_type = other DNA
gttttgagatggagtctcac

SEQ ID NO: 117123 - DNA, 20 bp, synthetic construct
  source 1..20: mol_type = other DNA
tgttttgagatggagtctca

SEQ ID NO: 117124 - DNA, 20 bp, synthetic construct
  source 1..20: mol_type = other DNA
ttgttttgagatggagtctc

SEQ ID NO: 117125 - DNA, 20 bp, synthetic construct
  source 1..20: mol_type = other DNA
tttgttttgagatggagtct

SEQ ID NO: 117126 - DNA, 20 bp, synthetic construct
  source 1..20: mol_type = other DNA
gtttgttttgagatggagtc

SEQ ID NO: 117127 - DNA, 20 bp, synthetic construct
  source 1..20: mol_type = other DNA
tgtttgttttgagatggagt

SEQ ID NO: 117128 - DNA, 20 bp, synthetic construct
  source 1..20: mol_type = other DNA
ttgtttgttttgagatggag

SEQ ID NO: 117129 - DNA, 20 bp, synthetic construct
  source 1..20: mol_type = other DNA
tttgtttgttttgagatgga

SEQ ID NO: 117130 - DNA, 20 bp, synthetic construct
  source 1..20: mol_type = other DNA
gtttgtttgttttgagatgg

SEQ ID NO: 117131 - DNA, 20 bp, synthetic construct
  source 1..20: mol_type = other DNA
tgtttgtttgttttgagatg

SEQ ID NO: 117132 - DNA, 20 bp, synthetic construct
  source 1..20: mol_type = other DNA
ttgtttgtttgttttgagat

SEQ ID NO: 117133 - DNA, 20 bp, synthetic construct
  source 1..20: mol_type = other DNA
tttgtttgtttgttttgaga

SEQ ID NO: 117134 - DNA, 20 bp, synthetic construct
  source 1..20: mol_type = other DNA
gtttgtttgtttgttttgag

SEQ ID NO: 117135 - DNA, 20 bp, synthetic construct
  source 1..20: mol_type = other DNA
tgtttgtttgtttgttttga

SEQ ID NO: 117136 - DNA, 20 bp, synthetic construct
  source 1..20: mol_type = other DNA
ttgtttgtttgtttgttttg

SEQ ID NO: 117137 - DNA, 20 bp, synthetic construct
  source 1..20: mol_type = other DNA
tttgtttgtttgtttgtttt

SEQ ID NO: 117138 - DNA, 20 bp, synthetic construct
  source 1..20: mol_type = other DNA
ttttgtttgtttgtttgttt

SEQ ID NO: 117139 - DNA, 20 bp, synthetic construct
  source 1..20: mol_type = other DNA
tttttgtttgtttgtttgtt

SEQ ID NO: 117140 - DNA, 20 bp, synthetic construct
  source 1..20: mol_type = other DNA
ttttttgtttgtttgtttgt

SEQ ID NO: 117141 - DNA, 20 bp, synthetic construct
  source 1..20: mol_type = other DNA
gttttttgtttgtttgtttg

SEQ ID NO: 117142 - DNA, 20 bp, synthetic construct
  source 1..20: mol_type = other DNA
tgttttttgtttgtttgttt

SEQ ID NO: 117143 - DNA, 20 bp, synthetic construct
  source 1..20: mol_type = other DNA
ttgttttttgtttgtttgtt

SEQ ID NO: 117144 - DNA, 20 bp, synthetic construct
  source 1..20: mol_type = other DNA
tttgttttttgtttgtttgt

SEQ ID NO: 117145 - DNA, 20 bp, synthetic construct
  source 1..20: mol_type = other DNA
gtttgttttttgtttgtttg

SEQ ID NO: 117146 - DNA, 20 bp, synthetic construct
  source 1..20: mol_type = other DNA
tgtttgttttttgtttgttt

SEQ ID NO: 117147 - DNA, 20 bp, synthetic construct
  source 1..20: mol_type = other DNA
ttgtttgttttttgtttgtt

SEQ ID NO: 117148 - DNA, 20 bp, synthetic construct
  source 1..20: mol_type = other DNA
tttgtttgttttttgtttgt

SEQ ID NO: 117149 - DNA, 20 bp, synthetic construct
  source 1..20: mol_type = other DNA
gtttgtttgttttttgtttg

SEQ ID NO: 117150 - DNA, 20 bp, synthetic construct
  source 1..20: mol_type = other DNA
tgtttgtttgttttttgttt

SEQ ID NO: 117151 - DNA, 20 bp, synthetic construct
  source 1..20: mol_type = other DNA
ttgtttgtttgttttttgtt

SEQ ID NO: 117152 - DNA, 20 bp, synthetic construct
  source 1..20: mol_type = other DNA
tttgtttgtttgttttttgt

SEQ ID NO: 117153 - DNA, 20 bp, synthetic construct
  source 1..20: mol_type = other DNA
ttttgtttgtttgttttttg

SEQ ID NO: 117154 - DNA, 20 bp, synthetic construct
  source 1..20: mol_type = other DNA
tttttgtttgtttgtttttt

SEQ ID NO: 117155 - DNA, 20 bp, synthetic construct
  source 1..20: mol_type = other DNA
ttttttgtttgtttgttttt

SEQ ID NO: 117156 - DNA, 20 bp, synthetic construct
  source 1..20: mol_type = other DNA
tttttttgtttgtttgtttt

SEQ ID NO: 117157 - DNA, 20 bp, synthetic construct
  source 1..20: mol_type = other DNA
gtttttttgtttgtttgttt

SEQ ID NO: 117158 - DNA, 20 bp, synthetic construct
  source 1..20: mol_type = other DNA
ggtttttttgtttgtttgtt

SEQ ID NO: 117159 - DNA, 20 bp, synthetic construct
  source 1..20: mol_type = other DNA
tggtttttttgtttgtttgt

SEQ ID NO: 117160 - DNA, 20 bp, synthetic construct
  source 1..20: mol_type = other DNA
ctggtttttttgtttgtttg

SEQ ID NO: 117161 - DNA, 20 bp, synthetic construct
  source 1..20: mol_type = other DNA
tctggtttttttgtttgttt

SEQ ID NO: 117162 - DNA, 20 bp, synthetic construct
  source 1..20: mol_type = other DNA
gtctggtttttttgtttgtt

SEQ ID NO: 117163 - DNA, 20 bp, synthetic construct
  source 1..20: mol_type = other DNA
agtctggtttttttgtttgt

SEQ ID NO: 117164 - DNA, 20 bp, synthetic construct
  source 1..20: mol_type = other DNA
tagtctggtttttttgtttg

SEQ ID NO: 117165 - DNA, 20 bp, synthetic construct
  source 1..20: mol_type = other DNA
ttagtctggtttttttgttt

SEQ ID NO: 117166 - DNA, 20 bp, synthetic construct
  source 1..20: mol_type = other DNA
attagtctggtttttttgtt

SEQ ID NO: 117167 - DNA, 20 bp, synthetic construct
  source 1..20: mol_type = other DNA
aattagtctggtttttttgt

SEQ ID NO: 117168 - DNA, 20 bp, synthetic construct
  source 1..20: mol_type = other DNA
caattagtctggtttttttg

SEQ ID NO: 117169 - DNA, 20 bp, synthetic construct
  source 1..20: mol_type = other DNA
ccaattagtctggttttttt

SEQ ID NO: 117170 - DNA, 20 bp, synthetic construct
  source 1..20: mol_type = other DNA
gccaattagtctggtttttt

SEQ ID NO: 117171 - DNA, 20 bp, synthetic construct
  source 1..20: mol_type = other DNA
agccaattagtctggttttt

SEQ ID NO: 117172 - DNA, 20 bp, synthetic construct
  source 1..20: mol_type = other DNA
cagccaattagtctggtttt

SEQ ID NO: 117173 - DNA, 20 bp, synthetic construct
  source 1..20: mol_type = other DNA
ccagccaattagtctggttt

SEQ ID NO: 117174 - DNA, 20 bp, synthetic construct
  source 1..20: mol_type = other DNA
tccagccaattagtctggtt

SEQ ID NO: 117175 - DNA, 20 bp, synthetic construct
  source 1..20: mol_type = other DNA
gtccagccaattagtctggt

SEQ ID NO: 117176 - DNA, 20 bp, synthetic construct
  source 1..20: mol_type = other DNA
tgtccagccaattagtctgg

SEQ ID NO: 117177 - DNA, 20 bp, synthetic construct
  source 1..20: mol_type = other DNA
gtgtccagccaattagtctg

SEQ ID NO: 117178 - DNA, 20 bp, synthetic construct
  source 1..20: mol_type = other DNA
tgtgtccagccaattagtct

SEQ ID NO: 117179 - DNA, 20 bp, synthetic construct
  source 1..20: mol_type = other DNA
ctgtgtccagccaattagtc

SEQ ID NO: 117180 - DNA, 20 bp, synthetic construct
  source 1..20: mol_type = other DNA
actgtgtccagccaattagt

SEQ ID NO: 117181 - DNA, 20 bp, synthetic construct
  source 1..20: mol_type = other DNA
cactgtgtccagccaattag

SEQ ID NO: 117182 - DNA, 20 bp, synthetic construct
  source 1..20: mol_type = other DNA
ccactgtgtccagccaatta

SEQ ID NO: 117183 - DNA, 20 bp, synthetic construct
  source 1..20: mol_type = other DNA
gccactgtgtccagccaatt

SEQ ID NO: 117184 - DNA, 20 bp, synthetic construct
  source 1..20: mol_type = other DNA
agccactgtgtccagccaat

SEQ ID NO: 117185 - DNA, 20 bp, synthetic construct
  source 1..20: mol_type = other DNA
gagccactgtgtccagccaa

SEQ ID NO: 117186 - DNA, 20 bp, synthetic construct
  source 1..20: mol_type = other DNA
ggagccactgtgtccagcca

SEQ ID NO: 117187 - DNA, 20 bp, synthetic construct
  source 1..20: mol_type = other DNA
tggagccactgtgtccagcc

SEQ ID NO: 117188 - DNA, 20 bp, synthetic construct
  source 1..20: mol_type = other DNA
atggagccactgtgtccagc

SEQ ID NO: 117189 - DNA, 20 bp, synthetic construct
  source 1..20: mol_type = other DNA
catggagccactgtgtccag

SEQ ID NO: 117190 - DNA, 20 bp, synthetic construct
  source 1..20: mol_type = other DNA
gcatggagccactgtgtcca

SEQ ID NO: 117191 - DNA, 20 bp, synthetic construct
  source 1..20: mol_type = other DNA
ggcatggagccactgtgtcc

SEQ ID NO: 117192 - DNA, 20 bp, synthetic construct
  source 1..20: mol_type = other DNA
aggcatggagccactgtgtc

SEQ ID NO: 117193 - DNA, 20 bp, synthetic construct
  source 1..20: mol_type = other DNA
caggcatggagccactgtgt

SEQ ID NO: 117194 - DNA, 20 bp, synthetic construct
  source 1..20: mol_type = other DNA
tcaggcatggagccactgtg

SEQ ID NO: 117195 - DNA, 20 bp, synthetic construct
  source 1..20: mol_type = other DNA
atcaggcatggagccactgt

SEQ ID NO: 117196 - DNA, 20 bp, synthetic construct
  source 1..20: mol_type = other DNA
tatcaggcatggagccactg

SEQ ID NO: 117197 - DNA, 20 bp, synthetic construct
  source 1..20: mol_type = other DNA
atatcaggcatggagccact

SEQ ID NO: 117198 - DNA, 20 bp, synthetic construct
  source 1..20: mol_type = other DNA
gatatcaggcatggagccac

SEQ ID NO: 117199 - DNA, 20 bp, synthetic construct
  source 1..20: mol_type = other DNA
ggatatcaggcatggagcca

SEQ ID NO: 117200 - DNA, 20 bp, synthetic construct
  source 1..20: mol_type = other DNA
gggatatcaggcatggagcc

SEQ ID NO: 117201 - DNA, 20 bp, synthetic construct
  source 1..20: mol_type = other DNA
tgggatatcaggcatggagc

SEQ ID NO: 117202 - DNA, 20 bp, synthetic construct
  source 1..20: mol_type = other DNA
ctgggatatcaggcatggag

SEQ ID NO: 117203 - DNA, 20 bp, synthetic construct
  source 1..20: mol_type = other DNA
gctgggatatcaggcatgga

SEQ ID NO: 117204 - DNA, 20 bp, synthetic construct
  source 1..20: mol_type = other DNA
agctgggatatcaggcatgg

SEQ ID NO: 117205 - DNA, 20 bp, synthetic construct
  source 1..20: mol_type = other DNA
cagctgggatatcaggcatg

SEQ ID NO: 117206 - DNA, 20 bp, synthetic construct
  source 1..20: mol_type = other DNA
ccagctgggatatcaggcat

SEQ ID NO: 117207 - DNA, 20 bp, synthetic construct
  source 1..20: mol_type = other DNA
tccagctgggatatcaggca

SEQ ID NO: 117208 - DNA, 20 bp, synthetic construct
  source 1..20: mol_type = other DNA
ctccagctgggatatcaggc

SEQ ID NO: 117209 - DNA, 20 bp, synthetic construct
  source 1..20: mol_type = other DNA
cctccagctgggatatcagg

SEQ ID NO: 117210 - DNA, 20 bp, synthetic construct
  source 1..20: mol_type = other DNA
tcctccagctgggatatcag

SEQ ID NO: 117211 - DNA, 20 bp, synthetic construct
  source 1..20: mol_type = other DNA
atcctccagctgggatatca

SEQ ID NO: 117212 - DNA, 20 bp, synthetic construct
  source 1..20: mol_type = other DNA
catcctccagctgggatatc

SEQ ID NO: 117213 - DNA, 20 bp, synthetic construct
  source 1..20: mol_type = other DNA
tcatcctccagctgggatat

SEQ ID NO: 117214 - DNA, 20 bp, synthetic construct
  source 1..20: mol_type = other DNA
gtcatcctccagctgggata

SEQ ID NO: 117215 - DNA, 20 bp, synthetic construct
  source 1..20: mol_type = other DNA
agtcatcctccagctgggat

SEQ ID NO: 117216 - DNA, 20 bp, synthetic construct
  source 1..20: mol_type = other DNA
aagtcatcctccagctggga

SEQ ID NO: 117217 - DNA, 20 bp, synthetic construct
  source 1..20: mol_type = other DNA
caagtcatcctccagctggg

SEQ ID NO: 117218 - DNA, 20 bp, synthetic construct
  source 1..20: mol_type = other DNA
tcaagtcatcctccagctgg

SEQ ID NO: 117219 - DNA, 20 bp, synthetic construct
  source 1..20: mol_type = other DNA
ttcaagtcatcctccagctg

SEQ ID NO: 117220 - DNA, 20 bp, synthetic construct
  source 1..20: mol_type = other DNA
gttcaagtcatcctccagct

SEQ ID NO: 117221 - DNA, 20 bp, synthetic construct
  source 1..20: mol_type = other DNA
ggttcaagtcatcctccagc

SEQ ID NO: 117222 - DNA, 20 bp, synthetic construct
  source 1..20: mol_type = other DNA
gggttcaagtcatcctccag

SEQ ID NO: 117223 - DNA, 20 bp, synthetic construct
  source 1..20: mol_type = other DNA
tgggttcaagtcatcctcca

SEQ ID NO: 117224 - DNA, 20 bp, synthetic construct
  source 1..20: mol_type = other DNA
atgggttcaagtcatcctcc

SEQ ID NO: 117225 - DNA, 20 bp, synthetic construct
  source 1..20: mol_type = other DNA
catgggttcaagtcatcctc

SEQ ID NO: 117226 - DNA, 20 bp, synthetic construct
  source 1..20: mol_type = other DNA
tcatgggttcaagtcatcct

SEQ ID NO: 117227 - DNA, 20 bp, synthetic construct
  source 1..20: mol_type = other DNA
ctcatgggttcaagtcatcc

SEQ ID NO: 117228 - DNA, 20 bp, synthetic construct
  source 1..20: mol_type = other DNA
actcatgggttcaagtcatc

SEQ ID NO: 117229 - DNA, 20 bp, synthetic construct
  source 1..20: mol_type = other DNA
aactcatgggttcaagtcat

SEQ ID NO: 117230 - DNA, 20 bp, synthetic construct
  source 1..20: mol_type = other DNA
gaactcatgggttcaagtca

SEQ ID NO: 117231 - DNA, 20 bp, synthetic construct
  source 1..20: mol_type = other DNA
cgaactcatgggttcaagtc

SEQ ID NO: 117232 - DNA, 20 bp, synthetic construct
  source 1..20: mol_type = other DNA
tcgaactcatgggttcaagt

SEQ ID NO: 117233 - DNA, 20 bp, synthetic construct
  source 1..20: mol_type = other DNA
ctcgaactcatgggttcaag

SEQ ID NO: 117234 - DNA, 20 bp, synthetic construct
  source 1..20: mol_type = other DNA
tctcgaactcatgggttcaa

SEQ ID NO: 117235 - DNA, 20 bp, synthetic construct
  source 1..20: mol_type = other DNA
ctctcgaactcatgggttca

SEQ ID NO: 117236 - DNA, 20 bp, synthetic construct
  source 1..20: mol_type = other DNA
gctctcgaactcatgggttc

SEQ ID NO: 117237 - DNA, 20 bp, synthetic construct
  source 1..20: mol_type = other DNA
tgctctcgaactcatgggtt

SEQ ID NO: 117238 - DNA, 20 bp, synthetic construct
  source 1..20: mol_type = other DNA
ctgctctcgaactcatgggt

SEQ ID NO: 117239 - DNA, 20 bp, synthetic construct
  source 1..20: mol_type = other DNA
gctgctctcgaactcatggg

SEQ ID NO: 117240 - DNA, 20 bp, synthetic construct
  source 1..20: mol_type = other DNA
tgctgctctcgaactcatgg

SEQ ID NO: 117241 - DNA, 20 bp, synthetic construct
  source 1..20: mol_type = other DNA
atgctgctctcgaactcatg

SEQ ID NO: 117242 - DNA, 20 bp, synthetic construct
  source 1..20: mol_type = other DNA
catgctgctctcgaactcat

SEQ ID NO: 117243 - DNA, 20 bp, synthetic construct
  source 1..20: mol_type = other DNA
ccatgctgctctcgaactca

SEQ ID NO: 117244 - DNA, 20 bp, synthetic construct
  source 1..20: mol_type = other DNA
cccatgctgctctcgaactc

SEQ ID NO: 117245 - DNA, 20 bp, synthetic construct
  source 1..20: mol_type = other DNA
gcccatgctgctctcgaact

SEQ ID NO: 117246 - DNA, 20 bp, synthetic construct
  source 1..20: mol_type = other DNA
tgcccatgctgctctcgaac

SEQ ID NO: 117247 - DNA, 20 bp, synthetic construct
  source 1..20: mol_type = other DNA
ttgcccatgctgctctcgaa

SEQ ID NO: 117248 - DNA, 20 bp, synthetic construct
  source 1..20: mol_type = other DNA
attgcccatgctgctctcga

SEQ ID NO: 117249 - DNA, 20 bp, synthetic construct
  source 1..20: mol_type = other DNA
tattgcccatgctgctctcg

SEQ ID NO: 117250 - DNA, 20 bp, synthetic construct
  source 1..20: mol_type = other DNA
atattgcccatgctgctctc

SEQ ID NO: 117251 - DNA, 20 bp, synthetic construct
  source 1..20: mol_type = other DNA
tatattgcccatgctgctct

SEQ ID NO: 117252 - DNA, 20 bp, synthetic construct
  source 1..20: mol_type = other DNA
ctatattgcccatgctgctc

SEQ ID NO: 117253 - DNA, 20 bp, synthetic construct
  source 1..20: mol_type = other DNA
actatattgcccatgctgct

SEQ ID NO: 117254 - DNA, 20 bp, synthetic construct
  source 1..20: mol_type = other DNA
cactatattgcccatgctgc

SEQ ID NO: 117255 - DNA, 20 bp, synthetic construct
  source 1..20: mol_type = other DNA
tcactatattgcccatgctg

SEQ ID NO: 117256 - DNA, 20 bp, synthetic construct
  source 1..20: mol_type = other DNA
ctcactatattgcccatgct

SEQ ID NO: 117257 - DNA, 20 bp, synthetic construct
  source 1..20: mol_type = other DNA
tctcactatattgcccatgc

SEQ ID NO: 117258 - DNA, 20 bp, synthetic construct
  source 1..20: mol_type = other DNA
gtctcactatattgcccatg

SEQ ID NO: 117259 - DNA, 20 bp, synthetic construct
  source 1..20: mol_type = other DNA
ggtctcactatattgcccat

SEQ ID NO: 117260 - DNA, 20 bp, synthetic construct
  source 1..20: mol_type = other DNA
gggtctcactatattgccca

SEQ ID NO: 117261 - DNA, 20 bp, synthetic construct
  source 1..20: mol_type = other DNA
agggtctcactatattgccc

SEQ ID NO: 117262 - DNA, 20 bp, synthetic construct
  source 1..20: mol_type = other DNA
tagggtctcactatattgcc

SEQ ID NO: 117263 - DNA, 20 bp, synthetic construct
  source 1..20: mol_type = other DNA
atagggtctcactatattgc

SEQ ID NO: 117264 - DNA, 20 bp, synthetic construct
  source 1..20: mol_type = other DNA
gatagggtctcactatattg

SEQ ID NO: 117265 - DNA, 20 bp, synthetic construct
  source 1..20: mol_type = other DNA
agatagggtctcactatatt

SEQ ID NO: 117266 - DNA, 20 bp, synthetic construct
  source 1..20: mol_type = other DNA
gagatagggtctcactatat

SEQ ID NO: 117267 - DNA, 20 bp, synthetic construct
  source 1..20: mol_type = other DNA
tgagatagggtctcactata

SEQ ID NO: 117268 - DNA, 20 bp, synthetic construct
  source 1..20: mol_type = other DNA
ttgagatagggtctcactat

SEQ ID NO: 117269 - DNA, 20 bp, synthetic construct
  source 1..20: mol_type = other DNA
tttgagatagggtctcacta

SEQ ID NO: 117270 - DNA, 20 bp, synthetic construct
  source 1..20: mol_type = other DNA
ttttgagatagggtctcact

SEQ ID NO: 117271 - DNA, 20 bp, synthetic construct
  source 1..20: mol_type = other DNA
tttttgagatagggtctcac

SEQ ID NO: 117272 - DNA, 20 bp, synthetic construct
  source 1..20: mol_type = other DNA
ttttttgagatagggtctca

SEQ ID NO: 117273 - DNA, 20 bp, synthetic construct
  source 1..20: mol_type = other DNA
tttttttgagatagggtctc

SEQ ID NO: 117274 - DNA, 20 bp, synthetic construct
  source 1..20: mol_type = other DNA
ttttttttgagatagggtct

SEQ ID NO: 117275 - DNA, 20 bp, synthetic construct
  source 1..20: mol_type = other DNA
tttttttttgagatagggtc

SEQ ID NO: 117276 - DNA, 20 bp, synthetic construct
  source 1..20: mol_type = other DNA
ttttttttttgagatagggt

SEQ ID NO: 117277 - DNA, 20 bp, synthetic construct
  source 1..20: mol_type = other DNA
tttttttttttgagataggg

SEQ ID NO: 117278 - DNA, 20 bp, synthetic construct
  source 1..20: mol_type = other DNA
ttttttttttttgagatagg

SEQ ID NO: 117279 - DNA, 20 bp, synthetic construct
  source 1..20: mol_type = other DNA
tttttttttttttgagatag

SEQ ID NO: 117280 - DNA, 20 bp, synthetic construct
  source 1..20: mol_type = other DNA
ttttttttttttttgagata

SEQ ID NO: 117281 - DNA, 20 bp, synthetic construct
  source 1..20: mol_type = other DNA
tttttttttttttttgagat

SEQ ID NO: 117282 - DNA, 20 bp, synthetic construct
  source 1..20: mol_type = other DNA
ttttttttttttttttgaga

SEQ ID NO: 117283 - DNA, 20 bp, synthetic construct
  source 1..20: mol_type = other DNA
cttttttttttttttttgag

SEQ ID NO: 117284 - DNA, 20 bp, synthetic construct
  source 1..20: mol_type = other DNA
acttttttttttttttttga

SEQ ID NO: 117285 - DNA, 20 bp, synthetic construct
  source 1..20: mol_type = other DNA
aacttttttttttttttttg

SEQ ID NO: 117286 - DNA, 20 bp, synthetic construct
  source 1..20: mol_type = other DNA
taactttttttttttttttt

SEQ ID NO: 117287 - DNA, 20 bp, synthetic construct
  source 1..20: mol_type = other DNA
ttaacttttttttttttttt

SEQ ID NO: 117288 - DNA, 20 bp, synthetic construct
  source 1..20: mol_type = other DNA
attaactttttttttttttt

SEQ ID NO: 117289 - DNA, 20 bp, synthetic construct
  source 1..20: mol_type = other DNA
aattaacttttttttttttt

SEQ ID NO: 117290 - DNA, 20 bp, synthetic construct
  source 1..20: mol_type = other DNA
gaattaactttttttttttt

SEQ ID NO: 117291 - DNA, 20 bp, synthetic construct
  source 1..20: mol_type = other DNA
ggaattaacttttttttttt

SEQ ID NO: 117292 - DNA, 20 bp, synthetic construct
  source 1..20: mol_type = other DNA
tggaattaactttttttttt

SEQ ID NO: 117293 - DNA, 20 bp, synthetic construct
  source 1..20: mol_type = other DNA
ttggaattaacttttttttt

SEQ ID NO: 117294 - DNA, 20 bp, synthetic construct
  source 1..20: mol_type = other DNA
tttggaattaactttttttt

SEQ ID NO: 117295 - DNA, 20 bp, synthetic construct
  source 1..20: mol_type = other DNA
ctttggaattaacttttttt

SEQ ID NO: 117296 - DNA, 20 bp, synthetic construct
  source 1..20: mol_type = other DNA
gctttggaattaactttttt

SEQ ID NO: 117297 - DNA, 20 bp, synthetic construct
  source 1..20: mol_type = other DNA
agctttggaattaacttttt

SEQ ID NO: 117298 - DNA, 20 bp, synthetic construct
  source 1..20: mol_type = other DNA
aagctttggaattaactttt

SEQ ID NO: 117299 - DNA, 20 bp, synthetic construct
  source 1..20: mol_type = other DNA
aaagctttggaattaacttt

SEQ ID NO: 117300 - DNA, 20 bp, synthetic construct
  source 1..20: mol_type = other DNA
aaaagctttggaattaactt

SEQ ID NO: 117301 - DNA, 20 bp, synthetic construct
  source 1..20: mol_type = other DNA
aaaaagctttggaattaact

SEQ ID NO: 117302 - DNA, 20 bp, synthetic construct
  source 1..20: mol_type = other DNA
caaaaagctttggaattaac

SEQ ID NO: 117303 - DNA, 20 bp, synthetic construct
  source 1..20: mol_type = other DNA
tcaaaaagctttggaattaa

SEQ ID NO: 117304 - DNA, 20 bp, synthetic construct
  source 1..20: mol_type = other DNA
atcaaaaagctttggaatta

SEQ ID NO: 117305 - DNA, 20 bp, synthetic construct
  source 1..20: mol_type = other DNA
gatcaaaaagctttggaatt

SEQ ID NO: 117306 - DNA, 20 bp, synthetic construct
  source 1..20: mol_type = other DNA
agatcaaaaagctttggaat

SEQ ID NO: 117307 - DNA, 20 bp, synthetic construct
  source 1..20: mol_type = other DNA
cagatcaaaaagctttggaa

SEQ ID NO: 117308 - DNA, 20 bp, synthetic construct
  source 1..20: mol_type = other DNA
tcagatcaaaaagctttgga

SEQ ID NO: 117309 - DNA, 20 bp, synthetic construct
  source 1..20: mol_type = other DNA
ttcagatcaaaaagctttgg

SEQ ID NO: 117310 - DNA, 20 bp, synthetic construct
  source 1..20: mol_type = other DNA
tttcagatcaaaaagctttg

SEQ ID NO: 117311 - DNA, 20 bp, synthetic construct
  source 1..20: mol_type = other DNA
atttcagatcaaaaagcttt

SEQ ID NO: 117312 - DNA, 20 bp, synthetic construct
  source 1..20: mol_type = other DNA
gatttcagatcaaaaagctt

SEQ ID NO: 117313 - DNA, 20 bp, synthetic construct
  source 1..20: mol_type = other DNA
agatttcagatcaaaaagct

SEQ ID NO: 117314 - DNA, 20 bp, synthetic construct
  source 1..20: mol_type = other DNA
cagatttcagatcaaaaagc

SEQ ID NO: 117315 - DNA, 20 bp, synthetic construct
  source 1..20: mol_type = other DNA
tcagatttcagatcaaaaag

SEQ ID NO: 117316 - DNA, 20 bp, synthetic construct
  source 1..20: mol_type = other DNA
atcagatttcagatcaaaaa

SEQ ID NO: 117317 - DNA, 20 bp, synthetic construct
  source 1..20: mol_type = other DNA
aatcagatttcagatcaaaa

SEQ ID NO: 117318 - DNA, 20 bp, synthetic construct
  source 1..20: mol_type = other DNA
aaatcagatttcagatcaaa

SEQ ID NO: 117319 - DNA, 20 bp, synthetic construct
  source 1..20: mol_type = other DNA
taaatcagatttcagatcaa

SEQ ID NO: 117320 - DNA, 20 bp, synthetic construct
  source 1..20: mol_type = other DNA
ttaaatcagatttcagatca

SEQ ID NO: 117321 - DNA, 20 bp, synthetic construct
  source 1..20: mol_type = other DNA
tttaaatcagatttcagatc

SEQ ID NO: 117322 - DNA, 20 bp, synthetic construct
  source 1..20: mol_type = other DNA
atttaaatcagatttcagat

SEQ ID NO: 117323 - DNA, 20 bp, synthetic construct
  source 1..20: mol_type = other DNA
gatttaaatcagatttcaga

SEQ ID NO: 117324 - DNA, 20 bp, synthetic construct
  source 1..20: mol_type = other DNA
agatttaaatcagatttcag

SEQ ID NO: 117325 - DNA, 20 bp, synthetic construct
  source 1..20: mol_type = other DNA
cagatttaaatcagatttca

SEQ ID NO: 117326 - DNA, 20 bp, synthetic construct
  source 1..20: mol_type = other DNA
tcagatttaaatcagatttc

SEQ ID NO: 117327 - DNA, 20 bp, synthetic construct
  source 1..20: mol_type = other DNA
ttcagatttaaatcagattt

SEQ ID NO: 117328 - DNA, 20 bp, synthetic construct
  source 1..20: mol_type = other DNA
gttcagatttaaatcagatt

SEQ ID NO: 117329 - DNA, 20 bp, synthetic construct
  source 1..20: mol_type = other DNA
agttcagatttaaatcagat

SEQ ID NO: 117330 - DNA, 20 bp, synthetic construct
  source 1..20: mol_type = other DNA
aagttcagatttaaatcaga

SEQ ID NO: 117331 - DNA, 20 bp, synthetic construct
  source 1..20: mol_type = other DNA
taagttcagatttaaatcag

SEQ ID NO: 117332 - DNA, 20 bp, synthetic construct
  source 1..20: mol_type = other DNA
ttaagttcagatttaaatca

SEQ ID NO: 117333 - DNA, 20 bp, synthetic construct
  source 1..20: mol_type = other DNA
tttaagttcagatttaaatc

SEQ ID NO: 117334 - DNA, 20 bp, synthetic construct
  source 1..20: mol_type = other DNA
atttaagttcagatttaaat

SEQ ID NO: 117335 - DNA, 20 bp, synthetic construct
  source 1..20: mol_type = other DNA
aatttaagttcagatttaaa

SEQ ID NO: 117336 - DNA, 20 bp, synthetic construct
  source 1..20: mol_type = other DNA
aaatttaagttcagatttaa

SEQ ID NO: 117337 - DNA, 20 bp, synthetic construct
  source 1..20: mol_type = other DNA
caaatttaagttcagattta

SEQ ID NO: 117338 - DNA, 20 bp, synthetic construct
  source 1..20: mol_type = other DNA
tcaaatttaagttcagattt

SEQ ID NO: 117339 - DNA, 20 bp, synthetic construct
  source 1..20: mol_type = other DNA
ttcaaatttaagttcagatt

SEQ ID NO: 117340 - DNA, 20 bp, synthetic construct
  source 1..20: mol_type = other DNA
cttcaaatttaagttcagat

SEQ ID NO: 117341 - DNA, 20 bp, synthetic construct
  source 1..20: mol_type = other DNA
tcttcaaatttaagttcaga

SEQ ID NO: 117342 - DNA, 20 bp, synthetic construct
  source 1..20: mol_type = other DNA
ttcttcaaatttaagttcag

SEQ ID NO: 117343 - DNA, 20 bp, synthetic construct
  source 1..20: mol_type = other DNA
cttcttcaaatttaagttca

SEQ ID NO: 117344 - DNA, 20 bp, synthetic construct
  source 1..20: mol_type = other DNA
tcttcttcaaatttaagttc

SEQ ID NO: 117345 - DNA, 20 bp, synthetic construct
  source 1..20: mol_type = other DNA
ctcttcttcaaatttaagtt

SEQ ID NO: 117346 - DNA, 20 bp, synthetic construct
  source 1..20: mol_type = other DNA
cctcttcttcaaatttaagt

SEQ ID NO: 117347 - DNA, 20 bp, synthetic construct
  source 1..20: mol_type = other DNA
ccctcttcttcaaatttaag

SEQ ID NO: 117348 - DNA, 20 bp, synthetic construct
  source 1..20: mol_type = other DNA
accctcttcttcaaatttaa

SEQ ID NO: 117349 - DNA, 20 bp, synthetic construct
  source 1..20: mol_type = other DNA
aaccctcttcttcaaattta

SEQ ID NO: 117350 - DNA, 20 bp, synthetic construct
  source 1..20: mol_type = other DNA
aaaccctcttcttcaaattt

SEQ ID NO: 117351 - DNA, 20 bp, synthetic construct
  source 1..20: mol_type = other DNA
caaaccctcttcttcaaatt

SEQ ID NO: 117352 - DNA, 20 bp, synthetic construct
  source 1..20: mol_type = other DNA
gcaaaccctcttcttcaaat

SEQ ID NO: 117353 - DNA, 20 bp, synthetic construct
  source 1..20: mol_type = other DNA
agcaaaccctcttcttcaaa

SEQ ID NO: 117354 - DNA, 20 bp, synthetic construct
  source 1..20: mol_type = other DNA
tagcaaaccctcttcttcaa

SEQ ID NO: 117355 - DNA, 20 bp, synthetic construct
  source 1..20: mol_type = other DNA
ctagcaaaccctcttcttca

SEQ ID NO: 117356 - DNA, 20 bp, synthetic construct
  source 1..20: mol_type = other DNA
tctagcaaaccctcttcttc

SEQ ID NO: 117357 - DNA, 20 bp, synthetic construct
  source 1..20: mol_type = other DNA
atctagcaaaccctcttctt

SEQ ID NO: 117358 - DNA, 20 bp, synthetic construct
  source 1..20: mol_type = other DNA
aatctagcaaaccctcttct

SEQ ID NO: 117359 - DNA, 20 bp, synthetic construct
  source 1..20: mol_type = other DNA
taatctagcaaaccctcttc

SEQ ID NO: 117360 - DNA, 20 bp, synthetic construct
  source 1..20: mol_type = other DNA
ttaatctagcaaaccctctt

SEQ ID NO: 117361 - DNA, 20 bp, synthetic construct
  source 1..20: mol_type = other DNA
attaatctagcaaaccctct

SEQ ID NO: 117362 - DNA, 20 bp, synthetic construct
  source 1..20: mol_type = other DNA
aattaatctagcaaaccctc

SEQ ID NO: 117363 - DNA, 20 bp, synthetic construct
  source 1..20: mol_type = other DNA
aaattaatctagcaaaccct

SEQ ID NO: 117364 - DNA, 20 bp, synthetic construct
  source 1..20: mol_type = other DNA
taaattaatctagcaaaccc

SEQ ID NO: 117365 - DNA, 20 bp, synthetic construct
  source 1..20: mol_type = other DNA
gtaaattaatctagcaaacc

SEQ ID NO: 117366 - DNA, 20 bp, synthetic construct
  source 1..20: mol_type = other DNA
agtaaattaatctagcaaac

SEQ ID NO: 117367 - DNA, 20 bp, synthetic construct
  source 1..20: mol_type = other DNA
tagtaaattaatctagcaaa

SEQ ID NO: 117368 - DNA, 20 bp, synthetic construct
  source 1..20: mol_type = other DNA
ctagtaaattaatctagcaa

SEQ ID NO: 117369 - DNA, 20 bp, synthetic construct
  source 1..20: mol_type = other DNA
tctagtaaattaatctagca

SEQ ID NO: 117370 - DNA, 20 bp, synthetic construct
  source 1..20: mol_type = other DNA
atctagtaaattaatctagc

SEQ ID NO: 117371 - DNA, 20 bp, synthetic construct
  source 1..20: mol_type = other DNA
aatctagtaaattaatctag

SEQ ID NO: 117372 - DNA, 20 bp, synthetic construct
  source 1..20: mol_type = other DNA
caatctagtaaattaatcta

SEQ ID NO: 117373 - DNA, 20 bp, synthetic construct
  source 1..20: mol_type = other DNA
gcaatctagtaaattaatct

SEQ ID NO: 117374 - DNA, 20 bp, synthetic construct
  source 1..20: mol_type = other DNA
agcaatctagtaaattaatc

SEQ ID NO: 117375 - DNA, 20 bp, synthetic construct
  source 1..20: mol_type = other DNA
tagcaatctagtaaattaat

SEQ ID NO: 117376 - DNA, 20 bp, synthetic construct
  source 1..20: mol_type = other DNA
ttagcaatctagtaaattaa

SEQ ID NO: 117377 - DNA, 20 bp, synthetic construct
  source 1..20: mol_type = other DNA
gttagcaatctagtaaatta

SEQ ID NO: 117378 - DNA, 20 bp, synthetic construct
  source 1..20: mol_type = other DNA
ggttagcaatctagtaaatt

SEQ ID NO: 117379 - DNA, 20 bp, synthetic construct
  source 1..20: mol_type = other DNA
aggttagcaatctagtaaat

SEQ ID NO: 117380 - DNA, 20 bp, synthetic construct
  source 1..20: mol_type = other DNA
aaggttagcaatctagtaaa

SEQ ID NO: 117381 - DNA, 20 bp, synthetic construct
  source 1..20: mol_type = other DNA
caaggttagcaatctagtaa

SEQ ID NO: 117382 - DNA, 20 bp, synthetic construct
  source 1..20: mol_type = other DNA
gcaaggttagcaatctagta

SEQ ID NO: 117383 - DNA, 20 bp, synthetic construct
  source 1..20: mol_type = other DNA
agcaaggttagcaatctagt

SEQ ID NO: 117384 - DNA, 20 bp, synthetic construct
  source 1..20: mol_type = other DNA
aagcaaggttagcaatctag

SEQ ID NO: 117385 - DNA, 20 bp, synthetic construct
  source 1..20: mol_type = other DNA
aaagcaaggttagcaatcta

SEQ ID NO: 117386 - DNA, 20 bp, synthetic construct
  source 1..20: mol_type = other DNA
taaagcaaggttagcaatct

SEQ ID NO: 117387 - DNA, 20 bp, synthetic construct
  source 1..20: mol_type = other DNA
ataaagcaaggttagcaatc

SEQ ID NO: 117388 - DNA, 20 bp, synthetic construct
  source 1..20: mol_type = other DNA
tataaagcaaggttagcaat

SEQ ID NO: 117389 - DNA, 20 bp, synthetic construct
  source 1..20: mol_type = other DNA
atataaagcaaggttagcaa

SEQ ID NO: 117390 - DNA, 20 bp, synthetic construct
  source 1..20: mol_type = other DNA
tatataaagcaaggttagca

SEQ ID NO: 117391 - DNA, 20 bp, synthetic construct
  source 1..20: mol_type = other DNA
atatataaagcaaggttagc

SEQ ID NO: 117392 - DNA, 20 bp, synthetic construct
  source 1..20: mol_type = other DNA
tatatataaagcaaggttag

SEQ ID NO: 117393 - DNA, 20 bp, synthetic construct
  source 1..20: mol_type = other DNA
gtatatataaagcaaggtta

SEQ ID NO: 117394 - DNA, 20 bp, synthetic construct
  source 1..20: mol_type = other DNA
ggtatatataaagcaaggtt

SEQ ID NO: 117395 - DNA, 20 bp, synthetic construct
  source 1..20: mol_type = other DNA
aggtatatataaagcaaggt

SEQ ID NO: 117396 - DNA, 20 bp, synthetic construct
  source 1..20: mol_type = other DNA
taggtatatataaagcaagg

SEQ ID NO: 117397 - DNA, 20 bp, synthetic construct
  source 1..20: mol_type = other DNA
gtaggtatatataaagcaag

SEQ ID NO: 117398 - DNA, 20 bp, synthetic construct
  source 1..20: mol_type = other DNA
tgtaggtatatataaagcaa

SEQ ID NO: 117399 - DNA, 20 bp, synthetic construct
  source 1..20: mol_type = other DNA
ctgtaggtatatataaagca

SEQ ID NO: 117400 - DNA, 20 bp, synthetic construct
  source 1..20: mol_type = other DNA
actgtaggtatatataaagc

SEQ ID NO: 117401 - DNA, 20 bp, synthetic construct
  source 1..20: mol_type = other DNA
aactgtaggtatatataaag

SEQ ID NO: 117402 - DNA, 20 bp, synthetic construct
  source 1..20: mol_type = other DNA
taactgtaggtatatataaa

SEQ ID NO: 117403 - DNA, 20 bp, synthetic construct
  source 1..20: mol_type = other DNA
ataactgtaggtatatataa

SEQ ID NO: 117404 - DNA, 20 bp, synthetic construct
  source 1..20: mol_type = other DNA
aataactgtaggtatatata

SEQ ID NO: 117405 - DNA, 20 bp, synthetic construct
  source 1..20: mol_type = other DNA
aaataactgtaggtatatat

SEQ ID NO: 117406 - DNA, 20 bp, synthetic construct
  source 1..20: mol_type = other DNA
gaaataactgtaggtatata

SEQ ID NO: 117407 - DNA, 20 bp, synthetic construct
  source 1..20: mol_type = other DNA
ggaaataactgtaggtatat

SEQ ID NO: 117408 - DNA, 20 bp, synthetic construct
  source 1..20: mol_type = other DNA
gggaaataactgtaggtata

SEQ ID NO: 117409 - DNA, 20 bp, synthetic construct
  source 1..20: mol_type = other DNA
ggggaaataactgtaggtat

SEQ ID NO: 117410 - DNA, 20 bp, synthetic construct
  source 1..20: mol_type = other DNA
tggggaaataactgtaggta

SEQ ID NO: 117411 - DNA, 20 bp, synthetic construct
  source 1..20: mol_type = other DNA
ttggggaaataactgtaggt

SEQ ID NO: 117412 - DNA, 20 bp, synthetic construct
  source 1..20: mol_type = other DNA
tttggggaaataactgtagg

SEQ ID NO: 117413 - DNA, 20 bp, synthetic construct
  source 1..20: mol_type = other DNA
ctttggggaaataactgtag

SEQ ID NO: 117414 - DNA, 20 bp, synthetic construct
  source 1..20: mol_type = other DNA
gctttggggaaataactgta

SEQ ID NO: 117415 - DNA, 20 bp, synthetic construct
  source 1..20: mol_type = other DNA
ggctttggggaaataactgt

SEQ ID NO: 117416 - DNA, 20 bp, synthetic construct
  source 1..20: mol_type = other DNA
tggctttggggaaataactg

SEQ ID NO: 117417 - DNA, 20 bp, synthetic construct
  source 1..20: mol_type = other DNA
ctggctttggggaaataact

SEQ ID NO: 117418 - DNA, 20 bp, synthetic construct
  source 1..20: mol_type = other DNA
tctggctttggggaaataac

SEQ ID NO: 117419 - DNA, 20 bp, synthetic construct
  source 1..20: mol_type = other DNA
ttctggctttggggaaataa

SEQ ID NO: 117420 - DNA, 20 bp, synthetic construct
  source 1..20: mol_type = other DNA
attctggctttggggaaata

SEQ ID NO: 117421 - DNA, 20 bp, synthetic construct
  source 1..20: mol_type = other DNA
aattctggctttggggaaat

SEQ ID NO: 117422 - DNA, 20 bp, synthetic construct
  source 1..20: mol_type = other DNA
aaattctggctttggggaaa

SEQ ID NO: 117423 - DNA, 20 bp, synthetic construct
  source 1..20: mol_type = other DNA
gaaattctggctttggggaa

SEQ ID NO: 117424 - DNA, 20 bp, synthetic construct
  source 1..20: mol_type = other DNA
agaaattctggctttgggga

SEQ ID NO: 117425 - DNA, 20 bp, synthetic construct
  source 1..20: mol_type = other DNA
aagaaattctggctttgggg

SEQ ID NO: 117426 - DNA, 20 bp, synthetic construct
  source 1..20: mol_type = other DNA
aaagaaattctggctttggg

SEQ ID NO: 117427 - DNA, 20 bp, synthetic construct
  source 1..20: mol_type = other DNA
aaaagaaattctggctttgg

SEQ ID NO: 117428 - DNA, 20 bp, synthetic construct
  source 1..20: mol_type = other DNA
caaaagaaattctggctttg

SEQ ID NO: 117429 - DNA, 20 bp, synthetic construct
  source 1..20: mol_type = other DNA
tcaaaagaaattctggcttt

SEQ ID NO: 117430 - DNA, 20 bp, synthetic construct
  source 1..20: mol_type = other DNA
ttcaaaagaaattctggctt

SEQ ID NO: 117431 - DNA, 20 bp, synthetic construct
  source 1..20: mol_type = other DNA
cttcaaaagaaattctggct

SEQ ID NO: 117432 - DNA, 20 bp, synthetic construct
  source 1..20: mol_type = other DNA
gcttcaaaagaaattctggc

SEQ ID NO: 117433 - DNA, 20 bp, synthetic construct
  source 1..20: mol_type = other DNA
tgcttcaaaagaaattctgg

SEQ ID NO: 117434 - DNA, 20 bp, synthetic construct
  source 1..20: mol_type = other DNA
ctgcttcaaaagaaattctg

SEQ ID NO: 117435 - DNA, 20 bp, synthetic construct
  source 1..20: mol_type = other DNA
tctgcttcaaaagaaattct

SEQ ID NO: 117436 - DNA, 20 bp, synthetic construct
  source 1..20: mol_type = other DNA
ctctgcttcaaaagaaattc

SEQ ID NO: 117437 - DNA, 20 bp, synthetic construct
  source 1..20: mol_type = other DNA
cctctgcttcaaaagaaatt

SEQ ID NO: 117438 - DNA, 20 bp, synthetic construct
  source 1..20: mol_type = other DNA
ccctctgcttcaaaagaaat

SEQ ID NO: 117439 - DNA, 20 bp, synthetic construct
  source 1..20: mol_type = other DNA
cccctctgcttcaaaagaaa

SEQ ID NO: 117440 - DNA, 20 bp, synthetic construct
  source 1..20: mol_type = other DNA
gcccctctgcttcaaaagaa

SEQ ID NO: 117441 - DNA, 20 bp, synthetic construct
  source 1..20: mol_type = other DNA
tgcccctctgcttcaaaaga

SEQ ID NO: 117442 - DNA, 20 bp, synthetic construct
  source 1..20: mol_type = other DNA
ttgcccctctgcttcaaaag

SEQ ID NO: 117443 - DNA, 20 bp, synthetic construct
  source 1..20: mol_type = other DNA
gttgcccctctgcttcaaaa

SEQ ID NO: 117444 - DNA, 20 bp, synthetic construct
  source 1..20: mol_type = other DNA
agttgcccctctgcttcaaa

SEQ ID NO: 117445 - DNA, 20 bp, synthetic construct
  source 1..20: mol_type = other DNA
tagttgcccctctgcttcaa

SEQ ID NO: 117446 - DNA, 20 bp, synthetic construct
  source 1..20: mol_type = other DNA
ttagttgcccctctgcttca

SEQ ID NO: 117447 - DNA, 20 bp, synthetic construct
  source 1..20: mol_type = other DNA
gttagttgcccctctgcttc

SEQ ID NO: 117448 - DNA, 20 bp, synthetic construct
  source 1..20: mol_type = other DNA
agttagttgcccctctgctt

SEQ ID NO: 117449 - DNA, 20 bp, synthetic construct
  source 1..20: mol_type = other DNA
aagttagttgcccctctgct

SEQ ID NO: 117450 - DNA, 20 bp, synthetic construct
  source 1..20: mol_type = other DNA
gaagttagttgcccctctgc

SEQ ID NO: 117451 - DNA, 20 bp, synthetic construct
  source 1..20: mol_type = other DNA
tgaagttagttgcccctctg

SEQ ID NO: 117452 - DNA, 20 bp, synthetic construct
  source 1..20: mol_type = other DNA
ttgaagttagttgcccctct

SEQ ID NO: 117453 - DNA, 20 bp, synthetic construct
  source 1..20: mol_type = other DNA
gttgaagttagttgcccctc

SEQ ID NO: 117454 - DNA, 20 bp, synthetic construct
  source 1..20: mol_type = other DNA
ggttgaagttagttgcccct

SEQ ID NO: 117455 - DNA, 20 bp, synthetic construct
  source 1..20: mol_type = other DNA
tggttgaagttagttgcccc

SEQ ID NO: 117456 - DNA, 20 bp, synthetic construct
  source 1..20: mol_type = other DNA
ttggttgaagttagttgccc

SEQ ID NO: 117457 - DNA, 20 bp, synthetic construct
  source 1..20: mol_type = other DNA
attggttgaagttagttgcc

SEQ ID NO: 117458 - DNA, 20 bp, synthetic construct
  source 1..20: mol_type = other DNA
cattggttgaagttagttgc

SEQ ID NO: 117459 - DNA, 20 bp, synthetic construct
  source 1..20: mol_type = other DNA
acattggttgaagttagttg

SEQ ID NO: 117460 - DNA, 20 bp, synthetic construct
  source 1..20: mol_type = other DNA
aacattggttgaagttagtt

SEQ ID NO: 117461 - DNA, 20 bp, synthetic construct
  source 1..20: mol_type = other DNA
taacattggttgaagttagt

SEQ ID NO: 117462 - DNA, 20 bp, synthetic construct
  source 1..20: mol_type = other DNA
ttaacattggttgaagttag

SEQ ID NO: 117463 - DNA, 20 bp, synthetic construct
  source 1..20: mol_type = other DNA
cttaacattggttgaagtta

SEQ ID NO: 117464 - DNA, 20 bp, synthetic construct
  source 1..20: mol_type = other DNA
tcttaacattggttgaagtt

SEQ ID NO: 117465 - DNA, 20 bp, synthetic construct
  source 1..20: mol_type = other DNA
atcttaacattggttgaagt

SEQ ID NO: 117466 - DNA, 20 bp, synthetic construct
  source 1..20: mol_type = other DNA
gatcttaacattggttgaag

SEQ ID NO: 117467 - DNA, 20 bp, synthetic construct
  source 1..20: mol_type = other DNA
ggatcttaacattggttgaa

SEQ ID NO: 117468 - DNA, 20 bp, synthetic construct
  source 1..20: mol_type = other DNA
aggatcttaacattggttga

SEQ ID NO: 117469 - DNA, 20 bp, synthetic construct
  source 1..20: mol_type = other DNA
taggatcttaacattggttg

SEQ ID NO: 117470 - DNA, 20 bp, synthetic construct
  source 1..20: mol_type = other DNA
ataggatcttaacattggtt

SEQ ID NO: 117471 - DNA, 20 bp, synthetic construct
  source 1..20: mol_type = other DNA
aataggatcttaacattggt

SEQ ID NO: 117472 - DNA, 20 bp, synthetic construct
  source 1..20: mol_type = other DNA
taataggatcttaacattgg

SEQ ID NO: 117473 - DNA, 20 bp, synthetic construct
  source 1..20: mol_type = other DNA
ctaataggatcttaacattg

SEQ ID NO: 117474 - DNA, 20 bp, synthetic construct
  source 1..20: mol_type = other DNA
tctaataggatcttaacatt

SEQ ID NO: 117475 - DNA, 20 bp, synthetic construct
  source 1..20: mol_type = other DNA
ttctaataggatcttaacat

SEQ ID NO: 117476 - DNA, 20 bp, synthetic construct
  source 1..20: mol_type = other DNA
cttctaataggatcttaaca

SEQ ID NO: 117477 - DNA, 20 bp, synthetic construct
  source 1..20: mol_type = other DNA
ccttctaataggatcttaac

SEQ ID NO: 117478 - DNA, 20 bp, synthetic construct
  source 1..20: mol_type = other DNA
tccttctaataggatcttaa

SEQ ID NO: 117479 - DNA, 20 bp, synthetic construct
  source 1..20: mol_type = other DNA
atccttctaataggatctta

SEQ ID NO: 117480 - DNA, 20 bp, synthetic construct
  source 1..20: mol_type = other DNA
catccttctaataggatctt

SEQ ID NO: 117481 - DNA, 20 bp, synthetic construct
  source 1..20: mol_type = other DNA
acatccttctaataggatct

SEQ ID NO: 117482 - DNA, 20 bp, synthetic construct
  source 1..20: mol_type = other DNA
aacatccttctaataggatc

SEQ ID NO: 117483 - DNA, 20 bp, synthetic construct
  source 1..20: mol_type = other DNA
aaacatccttctaataggat

SEQ ID NO: 117484 - DNA, 20 bp, synthetic construct
  source 1..20: mol_type = other DNA
gaaacatccttctaatagga

SEQ ID NO: 117485 - DNA, 20 bp, synthetic construct
  source 1..20: mol_type = other DNA
cgaaacatccttctaatagg

SEQ ID NO: 117486 - DNA, 20 bp, synthetic construct
  source 1..20: mol_type = other DNA
ccgaaacatccttctaatag

SEQ ID NO: 117487 - DNA, 20 bp, synthetic construct
  source 1..20: mol_type = other DNA
gccgaaacatccttctaata

SEQ ID NO: 117488 - DNA, 20 bp, synthetic construct
  source 1..20: mol_type = other DNA
agccgaaacatccttctaat

SEQ ID NO: 117489 - DNA, 20 bp, synthetic construct
  source 1..20: mol_type = other DNA
tagccgaaacatccttctaa

SEQ ID NO: 117490 - DNA, 20 bp, synthetic construct
  source 1..20: mol_type = other DNA
ctagccgaaacatccttcta

SEQ ID NO: 117491 - DNA, 20 bp, synthetic construct
  source 1..20: mol_type = other DNA
cctagccgaaacatccttct

SEQ ID NO: 117492 - DNA, 20 bp, synthetic construct
  source 1..20: mol_type = other DNA
gcctagccgaaacatccttc

SEQ ID NO: 117493 - DNA, 20 bp, synthetic construct
  source 1..20: mol_type = other DNA
agcctagccgaaacatcctt

SEQ ID NO: 117494 - DNA, 20 bp, synthetic construct
  source 1..20: mol_type = other DNA
aagcctagccgaaacatcct

SEQ ID NO: 117495 - DNA, 20 bp, synthetic construct
  source 1..20: mol_type = other DNA
caagcctagccgaaacatcc

SEQ ID NO: 117496 - DNA, 20 bp, synthetic construct
  source 1..20: mol_type = other DNA
ccaagcctagccgaaacatc

SEQ ID NO: 117497 - DNA, 20 bp, synthetic construct
  source 1..20: mol_type = other DNA
accaagcctagccgaaacat

SEQ ID NO: 117498 - DNA, 20 bp, synthetic construct
  source 1..20: mol_type = other DNA
caccaagcctagccgaaaca

SEQ ID NO: 117499 - DNA, 20 bp, synthetic construct
  source 1..20: mol_type = other DNA
ccaccaagcctagccgaaac

SEQ ID NO: 117500 - DNA, 20 bp, synthetic construct
  source 1..20: mol_type = other DNA
gccaccaagcctagccgaaa

SEQ ID NO: 117501 - DNA, 20 bp, synthetic construct
  source 1..20: mol_type = other DNA
agccaccaagcctagccgaa

SEQ ID NO: 117502 - DNA, 20 bp, synthetic construct
  source 1..20: mol_type = other DNA
gagccaccaagcctagccga

SEQ ID NO: 117503 - DNA, 20 bp, synthetic construct
  source 1..20: mol_type = other DNA
tgagccaccaagcctagccg

SEQ ID NO: 117504 - DNA, 20 bp, synthetic construct
  source 1..20: mol_type = other DNA
gtgagccaccaagcctagcc

SEQ ID NO: 117505 - DNA, 20 bp, synthetic construct
  source 1..20: mol_type = other DNA
cgtgagccaccaagcctagc

SEQ ID NO: 117506 - DNA, 20 bp, synthetic construct
  source 1..20: mol_type = other DNA
acgtgagccaccaagcctag

SEQ ID NO: 117507 - DNA, 20 bp, synthetic construct
  source 1..20: mol_type = other DNA
cacgtgagccaccaagccta

SEQ ID NO: 117508 - DNA, 20 bp, synthetic construct
  source 1..20: mol_type = other DNA
acacgtgagccaccaagcct

SEQ ID NO: 117509 - DNA, 20 bp, synthetic construct
  source 1..20: mol_type = other DNA
tacacgtgagccaccaagcc

SEQ ID NO: 117510 - DNA, 20 bp, synthetic construct
  source 1..20: mol_type = other DNA
ttacacgtgagccaccaagc

SEQ ID NO: 117511 - DNA, 20 bp, synthetic construct
  source 1..20: mol_type = other DNA
attacacgtgagccaccaag

SEQ ID NO: 117512 - DNA, 20 bp, synthetic construct
  source 1..20: mol_type = other DNA
aattacacgtgagccaccaa

SEQ ID NO: 117513 - DNA, 20 bp, synthetic construct
  source 1..20: mol_type = other DNA
gaattacacgtgagccacca

SEQ ID NO: 117514 - DNA, 20 bp, synthetic construct
  source 1..20: mol_type = other DNA
ggaattacacgtgagccacc

SEQ ID NO: 117515 - DNA, 20 bp, synthetic construct
  source 1..20: mol_type = other DNA
tggaattacacgtgagccac

SEQ ID NO: 117516 - DNA, 20 bp, synthetic construct
  source 1..20: mol_type = other DNA
ctggaattacacgtgagcca

SEQ ID NO: 117517 - DNA, 20 bp, synthetic construct
  source 1..20: mol_type = other DNA
gctggaattacacgtgagcc

SEQ ID NO: 117518 - DNA, 20 bp, synthetic construct
  source 1..20: mol_type = other DNA
tgctggaattacacgtgagc

SEQ ID NO: 117519 - DNA, 20 bp, synthetic construct
  source 1..20: mol_type = other DNA
gtgctggaattacacgtgag

SEQ ID NO: 117520 - DNA, 20 bp, synthetic construct
  source 1..20: mol_type = other DNA
agtgctggaattacacgtga

SEQ ID NO: 117521 - DNA, 20 bp, synthetic construct
  source 1..20: mol_type = other DNA
aagtgctggaattacacgtg

SEQ ID NO: 117522 - DNA, 20 bp, synthetic construct
  source 1..20: mol_type = other DNA
aaagtgctggaattacacgt

SEQ ID NO: 117523 - DNA, 20 bp, synthetic construct
  source 1..20: mol_type = other DNA
caaagtgctggaattacacg

SEQ ID NO: 117524 - DNA, 20 bp, synthetic construct
  source 1..20: mol_type = other DNA
tcaaagtgctggaattacac

SEQ ID NO: 117525 - DNA, 20 bp, synthetic construct
  source 1..20: mol_type = other DNA
ctcaaagtgctggaattaca

SEQ ID NO: 117526 - DNA, 20 bp, synthetic construct
  source 1..20: mol_type = other DNA
tctcaaagtgctggaattac

SEQ ID NO: 117527 - DNA, 20 bp, synthetic construct
  source 1..20: mol_type = other DNA
ctctcaaagtgctggaatta

SEQ ID NO: 117528 - DNA, 20 bp, synthetic construct
  source 1..20: mol_type = other DNA
cctctcaaagtgctggaatt

SEQ ID NO: 117529 - DNA, 20 bp, synthetic construct
  source 1..20: mol_type = other DNA
gcctctcaaagtgctggaat

SEQ ID NO: 117530 - DNA, 20 bp, synthetic construct
  source 1..20: mol_type = other DNA
agcctctcaaagtgctggaa

SEQ ID NO: 117531 - DNA, 20 bp, synthetic construct
  source 1..20: mol_type = other DNA
cagcctctcaaagtgctgga

SEQ ID NO: 117532 - DNA, 20 bp, synthetic construct
  source 1..20: mol_type = other DNA
tcagcctctcaaagtgctgg

SEQ ID NO: 117533 - DNA, 20 bp, synthetic construct
  source 1..20: mol_type = other DNA
ctcagcctctcaaagtgctg

SEQ ID NO: 117534 - DNA, 20 bp, synthetic construct
  source 1..20: mol_type = other DNA
cctcagcctctcaaagtgct

SEQ ID NO: 117535 - DNA, 20 bp, synthetic construct
  source 1..20: mol_type = other DNA
acctcagcctctcaaagtgc

SEQ ID NO: 117536 - DNA, 20 bp, synthetic construct
  source 1..20: mol_type = other DNA
cacctcagcctctcaaagtg

SEQ ID NO: 117537 - DNA, 20 bp, synthetic construct
  source 1..20: mol_type = other DNA
ccacctcagcctctcaaagt

SEQ ID NO: 117538 - DNA, 20 bp, synthetic construct
  source 1..20: mol_type = other DNA
cccacctcagcctctcaaag

SEQ ID NO: 117539 - DNA, 20 bp, synthetic construct
  source 1..20: mol_type = other DNA
gcccacctcagcctctcaaa

SEQ ID NO: 117540 - DNA, 20 bp, synthetic construct
  source 1..20: mol_type = other DNA
tgcccacctcagcctctcaa

SEQ ID NO: 117541 - DNA, 20 bp, synthetic construct
  source 1..20: mol_type = other DNA
ctgcccacctcagcctctca

SEQ ID NO: 117542 - DNA, 20 bp, synthetic construct
  source 1..20: mol_type = other DNA
tctgcccacctcagcctctc

SEQ ID NO: 117543 - DNA, 20 bp, synthetic construct
  source 1..20: mol_type = other DNA
atctgcccacctcagcctct

SEQ ID NO: 117544 - DNA, 20 bp, synthetic construct
  source 1..20: mol_type = other DNA
gatctgcccacctcagcctc

SEQ ID NO: 117545 - DNA, 20 bp, synthetic construct
  source 1..20: mol_type = other DNA
tgatctgcccacctcagcct

SEQ ID NO: 117546 - DNA, 20 bp, synthetic construct
  source 1..20: mol_type = other DNA
gtgatctgcccacctcagcc

SEQ ID NO: 117547 - DNA, 20 bp, synthetic construct
  source 1..20: mol_type = other DNA
tgtgatctgcccacctcagc

SEQ ID NO: 117548 - DNA, 20 bp, synthetic construct
  source 1..20: mol_type = other DNA
atgtgatctgcccacctcag

SEQ ID NO: 117549 - DNA, 20 bp, synthetic construct
  source 1..20: mol_type = other DNA
catgtgatctgcccacctca

SEQ ID NO: 117550 - DNA, 20 bp, synthetic construct
  source 1..20: mol_type = other DNA
tcatgtgatctgcccacctc

SEQ ID NO: 117551 - DNA, 20 bp, synthetic construct
  source 1..20: mol_type = other DNA
gtcatgtgatctgcccacct

SEQ ID NO: 117552 - DNA, 20 bp, synthetic construct
  source 1..20: mol_type = other DNA
ggtcatgtgatctgcccacc

SEQ ID NO: 117553 - DNA, 20 bp, synthetic construct
  source 1..20: mol_type = other DNA
cggtcatgtgatctgcccac

SEQ ID NO: 117554 - DNA, 20 bp, synthetic construct
  source 1..20: mol_type = other DNA
ccggtcatgtgatctgccca

SEQ ID NO: 117555 - DNA, 20 bp, synthetic construct
  source 1..20: mol_type = other DNA
cccggtcatgtgatctgccc

SEQ ID NO: 117556 - DNA, 20 bp, synthetic construct
  source 1..20: mol_type = other DNA
tcccggtcatgtgatctgcc

SEQ ID NO: 117557 - DNA, 20 bp, synthetic construct
  source 1..20: mol_type = other DNA
ctcccggtcatgtgatctgc

SEQ ID NO: 117558 - DNA, 20 bp, synthetic construct
  source 1..20: mol_type = other DNA
actcccggtcatgtgatctg

SEQ ID NO: 117559 - DNA, 20 bp, synthetic construct
  source 1..20: mol_type = other DNA
aactcccggtcatgtgatct

SEQ ID NO: 117560 - DNA, 20 bp, synthetic construct
  source 1..20: mol_type = other DNA
aaactcccggtcatgtgatc

SEQ ID NO: 117561 - DNA, 20 bp, synthetic construct
  source 1..20: mol_type = other DNA
aaaactcccggtcatgtgat

SEQ ID NO: 117562 - DNA, 20 bp, synthetic construct
  source 1..20: mol_type = other DNA
taaaactcccggtcatgtga

SEQ ID NO: 117563 - DNA, 20 bp, synthetic construct
  source 1..20: mol_type = other DNA
ttaaaactcccggtcatgtg

SEQ ID NO: 117564 - DNA, 20 bp, synthetic construct
  source 1..20: mol_type = other DNA
cttaaaactcccggtcatgt

SEQ ID NO: 117565 - DNA, 20 bp, synthetic construct
  source 1..20: mol_type = other DNA
tcttaaaactcccggtcatg

SEQ ID NO: 117566 - DNA, 20 bp, synthetic construct
  source 1..20: mol_type = other DNA
gtcttaaaactcccggtcat

SEQ ID NO: 117567 - DNA, 20 bp, synthetic construct
  source 1..20: mol_type = other DNA
ggtcttaaaactcccggtca

SEQ ID NO: 117568 - DNA, 20 bp, synthetic construct
  source 1..20: mol_type = other DNA
tggtcttaaaactcccggtc

SEQ ID NO: 117569 - DNA, 20 bp, synthetic construct
  source 1..20: mol_type = other DNA
ctggtcttaaaactcccggt

SEQ ID NO: 117570 - DNA, 20 bp, synthetic construct
  source 1..20: mol_type = other DNA
gctggtcttaaaactcccgg

SEQ ID NO: 117571 - DNA, 20 bp, synthetic construct
  source 1..20: mol_type = other DNA
ggctggtcttaaaactcccg

SEQ ID NO: 117572 - DNA, 20 bp, synthetic construct
  source 1..20: mol_type = other DNA
aggctggtcttaaaactccc

SEQ ID NO: 117573 - DNA, 20 bp, synthetic construct
  source 1..20: mol_type = other DNA
caggctggtcttaaaactcc

SEQ ID NO: 117574 - DNA, 20 bp, synthetic construct
  source 1..20: mol_type = other DNA
ccaggctggtcttaaaactc

SEQ ID NO: 117575 - DNA, 20 bp, synthetic construct
  source 1..20: mol_type = other DNA
cccaggctggtcttaaaact

SEQ ID NO: 117576 - DNA, 20 bp, synthetic construct
  source 1..20: mol_type = other DNA
gcccaggctggtcttaaaac

SEQ ID NO: 117577 - DNA, 20 bp, synthetic construct
  source 1..20: mol_type = other DNA
tgcccaggctggtcttaaaa

SEQ ID NO: 117578 - DNA, 20 bp, synthetic construct
  source 1..20: mol_type = other DNA
ttgcccaggctggtcttaaa

SEQ ID NO: 117579 - DNA, 20 bp, synthetic construct
  source 1..20: mol_type = other DNA
gttgcccaggctggtcttaa

SEQ ID NO: 117580 - DNA, 20 bp, synthetic construct
  source 1..20: mol_type = other DNA
tgttgcccaggctggtctta

SEQ ID NO: 117581 - DNA, 20 bp, synthetic construct
  source 1..20: mol_type = other DNA
atgttgcccaggctggtctt

SEQ ID NO: 117582 - DNA, 20 bp, synthetic construct
  source 1..20: mol_type = other DNA
catgttgcccaggctggtct

SEQ ID NO: 117583 - DNA, 20 bp, synthetic construct
  source 1..20: mol_type = other DNA
ccatgttgcccaggctggtc

SEQ ID NO: 117584 - DNA, 20 bp, synthetic construct
  source 1..20: mol_type = other DNA
gccatgttgcccaggctggt

SEQ ID NO: 117585 - DNA, 20 bp, synthetic construct
  source 1..20: mol_type = other DNA
tgccatgttgcccaggctgg

SEQ ID NO: 117586 - DNA, 20 bp, synthetic construct
  source 1..20: mol_type = other DNA
ttgccatgttgcccaggctg

SEQ ID NO: 117587 - DNA, 20 bp, synthetic construct
  source 1..20: mol_type = other DNA
tttgccatgttgcccaggct

SEQ ID NO: 117588 - DNA, 20 bp, synthetic construct
  source 1..20: mol_type = other DNA
ttttgccatgttgcccaggc

SEQ ID NO: 117589 - DNA, 20 bp, synthetic construct
  source 1..20: mol_type = other DNA
tttttgccatgttgcccagg

SEQ ID NO: 117590 - DNA, 20 bp, synthetic construct
  source 1..20: mol_type = other DNA
gtttttgccatgttgcccag

SEQ ID NO: 117591 - DNA, 20 bp, synthetic construct
  source 1..20: mol_type = other DNA
ggtttttgccatgttgccca

SEQ ID NO: 117592 - DNA, 20 bp, synthetic construct
  source 1..20: mol_type = other DNA
aggtttttgccatgttgccc

SEQ ID NO: 117593 - DNA, 20 bp, synthetic construct
  source 1..20: mol_type = other DNA
taggtttttgccatgttgcc

SEQ ID NO: 117594 - DNA, 20 bp, synthetic construct
  source 1..20: mol_type = other DNA
ataggtttttgccatgttgc

SEQ ID NO: 117595 - DNA, 20 bp, synthetic construct
  source 1..20: mol_type = other DNA
gataggtttttgccatgttg

SEQ ID NO: 117596 - DNA, 20 bp, synthetic construct
  source 1..20: mol_type = other DNA
agataggtttttgccatgtt

SEQ ID NO: 117597 - DNA, 20 bp, synthetic construct
  source 1..20: mol_type = other DNA
gagataggtttttgccatgt

SEQ ID NO: 117598 - DNA, 20 bp, synthetic construct
  source 1..20: mol_type = other DNA
agagataggtttttgccatg

SEQ ID NO: 117599 - DNA, 20 bp, synthetic construct
  source 1..20: mol_type = other DNA
cagagataggtttttgccat

SEQ ID NO: 117600 - DNA, 20 bp, synthetic construct
  source 1..20: mol_type = other DNA
gcagagataggtttttgcca

SEQ ID NO: 117601 - DNA, 20 bp, synthetic construct
  source 1..20: mol_type = other DNA
tgcagagataggtttttgcc

SEQ ID NO: 117602 - DNA, 20 bp, synthetic construct
  source 1..20: mol_type = other DNA
ttgcagagataggtttttgc

SEQ ID NO: 117603 - DNA, 20 bp, synthetic construct
  source 1..20: mol_type = other DNA
tttgcagagataggtttttg

SEQ ID NO: 117604 - DNA, 20 bp, synthetic construct
  source 1..20: mol_type = other DNA
ttttgcagagataggttttt

SEQ ID NO: 117605 - DNA, 20 bp, synthetic construct
  source 1..20: mol_type = other DNA
tttttgcagagataggtttt

SEQ ID NO: 117606 - DNA, 20 bp, synthetic construct
  source 1..20: mol_type = other DNA
ttttttgcagagataggttt

SEQ ID NO: 117607 - DNA, 20 bp, synthetic construct
  source 1..20: mol_type = other DNA
tttttttgcagagataggtt

SEQ ID NO: 117608 - DNA, 20 bp, synthetic construct
  source 1..20: mol_type = other DNA
ttttttttgcagagataggt

SEQ ID NO: 117609 - DNA, 20 bp, synthetic construct
  source 1..20: mol_type = other DNA
tttttttttgcagagatagg

SEQ ID NO: 117610 - DNA, 20 bp, synthetic construct
  source 1..20: mol_type = other DNA
ttttttttttgcagagatag

SEQ ID NO: 117611 - DNA, 20 bp, synthetic construct
  source 1..20: mol_type = other DNA
attttttttttgcagagata

SEQ ID NO: 117612 - DNA, 20 bp, synthetic construct
  source 1..20: mol_type = other DNA
tattttttttttgcagagat

SEQ ID NO: 117613 - DNA, 20 bp, synthetic construct
  source 1..20: mol_type = other DNA
ctattttttttttgcagaga

SEQ ID NO: 117614 - DNA, 20 bp, synthetic construct
  source 1..20: mol_type = other DNA
tctattttttttttgcagag

SEQ ID NO: 117615 - DNA, 20 bp, synthetic construct
  source 1..20: mol_type = other DNA
ttctattttttttttgcaga

SEQ ID NO: 117616 - DNA, 20 bp, synthetic construct
  source 1..20: mol_type = other DNA
tttctattttttttttgcag

SEQ ID NO: 117617 - DNA, 20 bp, synthetic construct
  source 1..20: mol_type = other DNA
atttctattttttttttgca

SEQ ID NO: 117618 - DNA, 20 bp, synthetic construct
  source 1..20: mol_type = other DNA
gatttctattttttttttgc

SEQ ID NO: 117619 - DNA, 20 bp, synthetic construct
  source 1..20: mol_type = other DNA
agatttctattttttttttg

SEQ ID NO: 117620 - DNA, 20 bp, synthetic construct
  source 1..20: mol_type = other DNA
aagatttctatttttttttt

SEQ ID NO: 117621 - DNA, 20 bp, synthetic construct
  source 1..20: mol_type = other DNA
taagatttctattttttttt

SEQ ID NO: 117622 - DNA, 20 bp, synthetic construct
  source 1..20: mol_type = other DNA
ctaagatttctatttttttt

SEQ ID NO: 117623 - DNA, 20 bp, synthetic construct
  source 1..20: mol_type = other DNA
gctaagatttctattttttt

SEQ ID NO: 117624 - DNA, 20 bp, synthetic construct
  source 1..20: mol_type = other DNA
ggctaagatttctatttttt

SEQ ID NO: 117625 - DNA, 20 bp, synthetic construct
  source 1..20: mol_type = other DNA
tggctaagatttctattttt

SEQ ID NO: 117626 - DNA, 20 bp, synthetic construct
  source 1..20: mol_type = other DNA
ctggctaagatttctatttt

SEQ ID NO: 117627 - DNA, 20 bp, synthetic construct
  source 1..20: mol_type = other DNA
gctggctaagatttctattt

SEQ ID NO: 117628 - DNA, 20 bp, synthetic construct
  source 1..20: mol_type = other DNA
ggctggctaagatttctatt

SEQ ID NO: 117629 - DNA, 20 bp, synthetic construct
  source 1..20: mol_type = other DNA
cggctggctaagatttctat

SEQ ID NO: 117630 - DNA, 20 bp, synthetic construct
  source 1..20: mol_type = other DNA
acggctggctaagatttcta

SEQ ID NO: 117631 - DNA, 20 bp, synthetic construct
  source 1..20: mol_type = other DNA
gacggctggctaagatttct

SEQ ID NO: 117632 - DNA, 20 bp, synthetic construct
  source 1..20: mol_type = other DNA
tgacggctggctaagatttc

SEQ ID NO: 117633 - DNA, 20 bp, synthetic construct
  source 1..20: mol_type = other DNA
atgacggctggctaagattt

SEQ ID NO: 117634 - DNA, 20 bp, synthetic construct
  source 1..20: mol_type = other DNA
catgacggctggctaagatt

SEQ ID NO: 117635 - DNA, 20 bp, synthetic construct
  source 1..20: mol_type = other DNA
ccatgacggctggctaagat

SEQ ID NO: 117636 - DNA, 20 bp, synthetic construct
  source 1..20: mol_type = other DNA
accatgacggctggctaaga

SEQ ID NO: 117637 - DNA, 20 bp, synthetic construct
  source 1..20: mol_type = other DNA
caccatgacggctggctaag

SEQ ID NO: 117638 - DNA, 20 bp, synthetic construct
  source 1..20: mol_type = other DNA
acaccatgacggctggctaa

SEQ ID NO: 117639 - DNA, 20 bp, synthetic construct
  source 1..20: mol_type = other DNA
cacaccatgacggctggcta

SEQ ID NO: 117640 - DNA, 20 bp, synthetic construct
  source 1..20: mol_type = other DNA
gcacaccatgacggctggct

SEQ ID NO: 117641 - DNA, 20 bp, synthetic construct
  source 1..20: mol_type = other DNA
agcacaccatgacggctggc

SEQ ID NO: 117642 - DNA, 20 bp, synthetic construct
  source 1..20: mol_type = other DNA
gagcacaccatgacggctgg

SEQ ID NO: 117643 - DNA, 20 bp, synthetic construct
  source 1..20: mol_type = other DNA
ggagcacaccatgacggctg

SEQ ID NO: 117644 - DNA, 20 bp, synthetic construct
  source 1..20: mol_type = other DNA
aggagcacaccatgacggct

SEQ ID NO: 117645 - DNA, 20 bp, synthetic construct
  source 1..20: mol_type = other DNA
caggagcacaccatgacggc

SEQ ID NO: 117646 - DNA, 20 bp, synthetic construct
  source 1..20: mol_type = other DNA
acaggagcacaccatgacgg

SEQ ID NO: 117647 - DNA, 20 bp, synthetic construct
  source 1..20: mol_type = other DNA
tacaggagcacaccatgacg

SEQ ID NO: 117648 - DNA, 20 bp, synthetic construct
  source 1..20: mol_type = other DNA
ctacaggagcacaccatgac

SEQ ID NO: 117649 - DNA, 20 bp, synthetic construct
  source 1..20: mol_type = other DNA
actacaggagcacaccatga

SEQ ID NO: 117650 - DNA, 20 bp, synthetic construct
  source 1..20: mol_type = other DNA
gactacaggagcacaccatg

SEQ ID NO: 117651 - DNA, 20 bp, synthetic construct
  source 1..20: mol_type = other DNA
ggactacaggagcacaccat

SEQ ID NO: 117652 - DNA, 20 bp, synthetic construct
  source 1..20: mol_type = other DNA
aggactacaggagcacacca

SEQ ID NO: 117653 - DNA, 20 bp, synthetic construct
  source 1..20: mol_type = other DNA
taggactacaggagcacacc

SEQ ID NO: 117654 - DNA, 20 bp, synthetic construct
  source 1..20: mol_type = other DNA
ctaggactacaggagcacac

SEQ ID NO: 117655 - DNA, 20 bp, synthetic construct
  source 1..20: mol_type = other DNA
gctaggactacaggagcaca

SEQ ID NO: 117656 - DNA, 20 bp, synthetic construct
  source 1..20: mol_type = other DNA
agctaggactacaggagcac

SEQ ID NO: 117657 - DNA, 20 bp, synthetic construct
  source 1..20: mol_type = other DNA
tagctaggactacaggagca

SEQ ID NO: 117658 - DNA, 20 bp, synthetic construct
  source 1..20: mol_type = other DNA
gtagctaggactacaggagc

SEQ ID NO: 117659 - DNA, 20 bp, synthetic construct
  source 1..20: mol_type = other DNA
agtagctaggactacaggag

SEQ ID NO: 117660 - DNA, 20 bp, synthetic construct
  source 1..20: mol_type = other DNA
aagtagctaggactacagga

SEQ ID NO: 117661 - DNA, 20 bp, synthetic construct
  source 1..20: mol_type = other DNA
caagtagctaggactacagg

SEQ ID NO: 117662 - DNA, 20 bp, synthetic construct
  source 1..20: mol_type = other DNA
ccaagtagctaggactacag

SEQ ID NO: 117663 - DNA, 20 bp, synthetic construct
  source 1..20: mol_type = other DNA
cccaagtagctaggactaca

SEQ ID NO: 117664 - DNA, 20 bp, synthetic construct
  source 1..20: mol_type = other DNA
tcccaagtagctaggactac

SEQ ID NO: 117665 - DNA, 20 bp, synthetic construct
  source 1..20: mol_type = other DNA
ctcccaagtagctaggacta

SEQ ID NO: 117666 - DNA, 20 bp, synthetic construct
  source 1..20: mol_type = other DNA
tctcccaagtagctaggact

SEQ ID NO: 117667 - DNA, 20 bp, synthetic construct
  source 1..20: mol_type = other DNA
gtctcccaagtagctaggac

SEQ ID NO: 117668 - DNA, 20 bp, synthetic construct
  source 1..20: mol_type = other DNA
agtctcccaagtagctagga

SEQ ID NO: 117669 - DNA, 20 bp, synthetic construct
  source 1..20: mol_type = other DNA
cagtctcccaagtagctagg

SEQ ID NO: 117670 - DNA, 20 bp, synthetic construct
  source 1..20: mol_type = other DNA
tcagtctcccaagtagctag

SEQ ID NO: 117671 - DNA, 20 bp, synthetic construct
  source 1..20: mol_type = other DNA
ctcagtctcccaagtagcta

SEQ ID NO: 117672 - DNA, 20 bp, synthetic construct
  source 1..20: mol_type = other DNA
cctcagtctcccaagtagct

SEQ ID NO: 117673 - DNA, 20 bp, synthetic construct
  source 1..20: mol_type = other DNA
acctcagtctcccaagtagc

SEQ ID NO: 117674 - DNA, 20 bp, synthetic construct
  source 1..20: mol_type = other DNA
cacctcagtctcccaagtag

SEQ ID NO: 117675 - DNA, 20 bp, synthetic construct
  source 1..20: mol_type = other DNA
ccacctcagtctcccaagta

SEQ ID NO: 117676 - DNA, 20 bp, synthetic construct
  source 1..20: mol_type = other DNA
cccacctcagtctcccaagt

SEQ ID NO: 117677 - DNA, 20 bp, synthetic construct
  source 1..20: mol_type = other DNA
tcccacctcagtctcccaag

SEQ ID NO: 117678 - DNA, 20 bp, synthetic construct
  source 1..20: mol_type = other DNA
ctcccacctcagtctcccaa

SEQ ID NO: 117679 - DNA, 20 bp, synthetic construct
  source 1..20: mol_type = other DNA
cctcccacctcagtctccca

SEQ ID NO: 117680 - DNA, 20 bp, synthetic construct
  source 1..20: mol_type = other DNA
tcctcccacctcagtctccc

SEQ ID NO: 117681 - DNA, 20 bp, synthetic construct
  source 1..20: mol_type = other DNA
atcctcccacctcagtctcc

SEQ ID NO: 117682 - DNA, 20 bp, synthetic construct
  source 1..20: mol_type = other DNA
gatcctcccacctcagtctc

SEQ ID NO: 117683 - DNA, 20 bp, synthetic construct
  source 1..20: mol_type = other DNA
tgatcctcccacctcagtct

SEQ ID NO: 117684 - DNA, 20 bp, synthetic construct
  source 1..20: mol_type = other DNA
ttgatcctcccacctcagtc

SEQ ID NO: 117685 - DNA, 20 bp, synthetic construct
  source 1..20: mol_type = other DNA
attgatcctcccacctcagt

SEQ ID NO: 117686 - DNA, 20 bp, synthetic construct
  source 1..20: mol_type = other DNA
aattgatcctcccacctcag

SEQ ID NO: 117687 - DNA, 20 bp, synthetic construct
  source 1..20: mol_type = other DNA
caattgatcctcccacctca

SEQ ID NO: 117688 - DNA, 20 bp, synthetic construct
  source 1..20: mol_type = other DNA
tcaattgatcctcccacctc

SEQ ID NO: 117689 - DNA, 20 bp, synthetic construct
  source 1..20: mol_type = other DNA
ttcaattgatcctcccacct

SEQ ID NO: 117690 - DNA, 20 bp, synthetic construct
  source 1..20: mol_type = other DNA
tttcaattgatcctcccacc

SEQ ID NO: 117691 - DNA, 20 bp, synthetic construct
  source 1..20: mol_type = other DNA
gtttcaattgatcctcccac

SEQ ID NO: 117692 - DNA, 20 bp, synthetic construct
  source 1..20: mol_type = other DNA
ggtttcaattgatcctccca

SEQ ID NO: 117693 - DNA, 20 bp, synthetic construct
  source 1..20: mol_type = other DNA
tggtttcaattgatcctccc

SEQ ID NO: 117694 - DNA, 20 bp, synthetic construct
  source 1..20: mol_type = other DNA
ctggtttcaattgatcctcc

SEQ ID NO: 117695 - DNA, 20 bp, synthetic construct
  source 1..20: mol_type = other DNA
tctggtttcaattgatcctc

SEQ ID NO: 117696 - DNA, 20 bp, synthetic construct
  source 1..20: mol_type = other DNA
ttctggtttcaattgatcct

SEQ ID NO: 117697 - DNA, 20 bp, synthetic construct
  source 1..20: mol_type = other DNA
cttctggtttcaattgatcc

SEQ ID NO: 117698 - DNA, 20 bp, synthetic construct
  source 1..20: mol_type = other DNA
ccttctggtttcaattgatc

SEQ ID NO: 117699 - DNA, 20 bp, synthetic construct
  source 1..20: mol_type = other DNA
accttctggtttcaattgat

SEQ ID NO: 117700 - DNA, 20 bp, synthetic construct
  source 1..20: mol_type = other DNA
gaccttctggtttcaattga

SEQ ID NO: 117701 - DNA, 20 bp, synthetic construct
  source 1..20: mol_type = other DNA
ggaccttctggtttcaattg

SEQ ID NO: 117702 - DNA, 20 bp, synthetic construct
  source 1..20: mol_type = other DNA
tggaccttctggtttcaatt

SEQ ID NO: 117703 - DNA, 20 bp, synthetic construct
  source 1..20: mol_type = other DNA
ctggaccttctggtttcaat

SEQ ID NO: 117704 - DNA, 20 bp, synthetic construct
  source 1..20: mol_type = other DNA
cctggaccttctggtttcaa

SEQ ID NO: 117705 - DNA, 20 bp, synthetic construct
  source 1..20: mol_type = other DNA
gcctggaccttctggtttca

SEQ ID NO: 117706 - DNA, 20 bp, synthetic construct
  source 1..20: mol_type = other DNA
agcctggaccttctggtttc

SEQ ID NO: 117707 - DNA, 20 bp, synthetic construct
  source 1..20: mol_type = other DNA
cagcctggaccttctggttt

SEQ ID NO: 117708 - DNA, 20 bp, synthetic construct
  source 1..20: mol_type = other DNA
gcagcctggaccttctggtt

SEQ ID NO: 117709 - DNA, 20 bp, synthetic construct
  source 1..20: mol_type = other DNA
tgcagcctggaccttctggt

SEQ ID NO: 117710 - DNA, 20 bp, synthetic construct
  source 1..20: mol_type = other DNA
ctgcagcctggaccttctgg

SEQ ID NO: 117711 - DNA, 20 bp, synthetic construct
  source 1..20: mol_type = other DNA
cctgcagcctggaccttctg

SEQ ID NO: 117712 - DNA, 20 bp, synthetic construct
  source 1..20: mol_type = other DNA
ccctgcagcctggaccttct

SEQ ID NO: 117713 - DNA, 20 bp, synthetic construct
  source 1..20: mol_type = other DNA
tccctgcagcctggaccttc

SEQ ID NO: 117714 - DNA, 20 bp, synthetic construct
  source 1..20: mol_type = other DNA
ttccctgcagcctggacctt

SEQ ID NO: 117715 - DNA, 20 bp, synthetic construct
  source 1..20: mol_type = other DNA
gttccctgcagcctggacct

SEQ ID NO: 117716 - DNA, 20 bp, synthetic construct
  source 1..20: mol_type = other DNA
agttccctgcagcctggacc

SEQ ID NO: 117717 - DNA, 20 bp, synthetic construct
  source 1..20: mol_type = other DNA
cagttccctgcagcctggac

SEQ ID NO: 117718 - DNA, 20 bp, synthetic construct
  source 1..20: mol_type = other DNA
acagttccctgcagcctgga

SEQ ID NO: 117719 - DNA, 20 bp, synthetic construct
  source 1..20: mol_type = other DNA
cacagttccctgcagcctgg

SEQ ID NO: 117720 - DNA, 20 bp, synthetic construct
  source 1..20: mol_type = other DNA
tcacagttccctgcagcctg

SEQ ID NO: 117721 - DNA, 20 bp, synthetic construct
  source 1..20: mol_type = other DNA
gtcacagttccctgcagcct

SEQ ID NO: 117722 - DNA, 20 bp, synthetic construct
  source 1..20: mol_type = other DNA
agtcacagttccctgcagcc

SEQ ID NO: 117723 - DNA, 20 bp, synthetic construct
  source 1..20: mol_type = other DNA
cagtcacagttccctgcagc

SEQ ID NO: 117724 - DNA, 20 bp, synthetic construct
  source 1..20: mol_type = other DNA
gcagtcacagttccctgcag

SEQ ID NO: 117725 - DNA, 20 bp, synthetic construct
  source 1..20: mol_type = other DNA
tgcagtcacagttccctgca

SEQ ID NO: 117726 - DNA, 20 bp, synthetic construct
  source 1..20: mol_type = other DNA
gtgcagtcacagttccctgc

SEQ ID NO: 117727 - DNA, 20 bp, synthetic construct
  source 1..20: mol_type = other DNA
ggtgcagtcacagttccctg

SEQ ID NO: 117728 - DNA, 20 bp, synthetic construct
  source 1..20: mol_type = other DNA
tggtgcagtcacagttccct

SEQ ID NO: 117729 - DNA, 20 bp, synthetic construct
  source 1..20: mol_type = other DNA
gtggtgcagtcacagttccc

SEQ ID NO: 117730 - DNA, 20 bp, synthetic construct
  source 1..20: mol_type = other DNA
agtggtgcagtcacagttcc

SEQ ID NO: 117731 - DNA, 20 bp, synthetic construct
  source 1..20: mol_type = other DNA
cagtggtgcagtcacagttc

SEQ ID NO: 117732 - DNA, 20 bp, synthetic construct
  source 1..20: mol_type = other DNA
ccagtggtgcagtcacagtt

SEQ ID NO: 117733 - DNA, 20 bp, synthetic construct
  source 1..20: mol_type = other DNA
cccagtggtgcagtcacagt

SEQ ID NO: 117734 - DNA, 20 bp, synthetic construct
  source 1..20: mol_type = other DNA
gcccagtggtgcagtcacag

SEQ ID NO: 117735 - DNA, 20 bp, synthetic construct
  source 1..20: mol_type = other DNA
agcccagtggtgcagtcaca

SEQ ID NO: 117736 - DNA, 20 bp, synthetic construct
  source 1..20: mol_type = other DNA
gagcccagtggtgcagtcac

SEQ ID NO: 117737 - DNA, 20 bp, synthetic construct
  source 1..20: mol_type = other DNA
ggagcccagtggtgcagtca

SEQ ID NO: 117738 - DNA, 20 bp, synthetic construct
  source 1..20: mol_type = other DNA
tggagcccagtggtgcagtc

SEQ ID NO: 117739 - DNA, 20 bp, synthetic construct
  source 1..20: mol_type = other DNA
ctggagcccagtggtgcagt

SEQ ID NO: 117740 - DNA, 20 bp, synthetic construct
  source 1..20: mol_type = other DNA
gctggagcccagtggtgcag

SEQ ID NO: 117741 - DNA, 20 bp, synthetic construct
  source 1..20: mol_type = other DNA
agctggagcccagtggtgca

SEQ ID NO: 117742 - DNA, 20 bp, synthetic construct
  source 1..20: mol_type = other DNA
aagctggagcccagtggtgc

SEQ ID NO: 117743 - DNA, 20 bp, synthetic construct
  source 1..20: mol_type = other DNA
caagctggagcccagtggtg

SEQ ID NO: 117744 - DNA, 20 bp, synthetic construct
  source 1..20: mol_type = other DNA
ccaagctggagcccagtggt

SEQ ID NO: 117745 - DNA, 20 bp, synthetic construct
  source 1..20: mol_type = other DNA
cccaagctggagcccagtgg

SEQ ID NO: 117746 - DNA, 20 bp, synthetic construct
  source 1..20: mol_type = other DNA
acccaagctggagcccagtg

SEQ ID NO: 117747 - DNA, 20 bp, synthetic construct
  source 1..20: mol_type = other DNA
cacccaagctggagcccagt

SEQ ID NO: 117748 - DNA, 20 bp, synthetic construct
  source 1..20: mol_type = other DNA
tcacccaagctggagcccag

SEQ ID NO: 117749 - DNA, 20 bp, synthetic construct
  source 1..20: mol_type = other DNA
ttcacccaagctggagccca

SEQ ID NO: 117750 - DNA, 20 bp, synthetic construct
  source 1..20: mol_type = other DNA
tttcacccaagctggagccc

SEQ ID NO: 117751 - DNA, 20 bp, synthetic construct
  source 1..20: mol_type = other DNA
ctttcacccaagctggagcc

SEQ ID NO: 117752 - DNA, 20 bp, synthetic construct
  source 1..20: mol_type = other DNA
tctttcacccaagctggagc

SEQ ID NO: 117753 - DNA, 20 bp, synthetic construct
  source 1..20: mol_type = other DNA
ctctttcacccaagctggag

SEQ ID NO: 117754 - DNA, 20 bp, synthetic construct
  source 1..20: mol_type = other DNA
gctctttcacccaagctgga

SEQ ID NO: 117755 - DNA, 20 bp, synthetic construct
  source 1..20: mol_type = other DNA
cgctctttcacccaagctgg

SEQ ID NO: 117756 - DNA, 20 bp, synthetic construct
  source 1..20: mol_type = other DNA
tcgctctttcacccaagctg

SEQ ID NO: 117757 - DNA, 20 bp, synthetic construct
  source 1..20: mol_type = other DNA
ttcgctctttcacccaagct

SEQ ID NO: 117758 - DNA, 20 bp, synthetic construct
  source 1..20: mol_type = other DNA
tttcgctctttcacccaagc

SEQ ID NO: 117759 - DNA, 20 bp, synthetic construct
  source 1..20: mol_type = other DNA
gtttcgctctttcacccaag

SEQ ID NO: 117760 - DNA, 20 bp, synthetic construct
  source 1..20: mol_type = other DNA
ggtttcgctctttcacccaa

SEQ ID NO: 117761 - DNA, 20 bp, synthetic construct
  source 1..20: mol_type = other DNA
gggtttcgctctttcaccca

SEQ ID NO: 117762 - DNA, 20 bp, synthetic construct
  source 1..20: mol_type = other DNA
agggtttcgctctttcaccc

SEQ ID NO: 117763 - DNA, 20 bp, synthetic construct
  source 1..20: mol_type = other DNA
cagggtttcgctctttcacc

SEQ ID NO: 117764 - DNA, 20 bp, synthetic construct
  source 1..20: mol_type = other DNA
gcagggtttcgctctttcac

SEQ ID NO: 117765 - DNA, 20 bp, synthetic construct
  source 1..20: mol_type = other DNA
ggcagggtttcgctctttca

SEQ ID NO: 117766 - DNA, 20 bp, synthetic construct
  source 1..20: mol_type = other DNA
aggcagggtttcgctctttc

SEQ ID NO: 117767 - DNA, 20 bp, synthetic construct
  source 1..20: mol_type = other DNA
gaggcagggtttcgctcttt

SEQ ID NO: 117768 - DNA, 20 bp, synthetic construct
  source 1..20: mol_type = other DNA
tgaggcagggtttcgctctt

SEQ ID NO: 117769 - DNA, 20 bp, synthetic construct
  source 1..20: mol_type = other DNA
ttgaggcagggtttcgctct

SEQ ID NO: 117770 - DNA, 20 bp, synthetic construct
  source 1..20: mol_type = other DNA
tttgaggcagggtttcgctc

SEQ ID NO: 117771 - DNA, 20 bp, synthetic construct
  source 1..20: mol_type = other DNA
ttttgaggcagggtttcgct

SEQ ID NO: 117772 - DNA, 20 bp, synthetic construct
  source 1..20: mol_type = other DNA
tttttgaggcagggtttcgc

SEQ ID NO: 117773 - DNA, 20 bp, synthetic construct
  source 1..20: mol_type = other DNA
ctttttgaggcagggtttcg

SEQ ID NO: 117774 - DNA, 20 bp, synthetic construct
  source 1..20: mol_type = other DNA
tctttttgaggcagggtttc

SEQ ID NO: 117775 - DNA, 20 bp, synthetic construct
  source 1..20: mol_type = other DNA
ttctttttgaggcagggttt

SEQ ID NO: 117776 - DNA, 20 bp, synthetic construct
  source 1..20: mol_type = other DNA
tttctttttgaggcagggtt

SEQ ID NO: 117777 - DNA, 20 bp, synthetic construct
  source 1..20: mol_type = other DNA
ttttctttttgaggcagggt

SEQ ID NO: 117778 - DNA, 20 bp, synthetic construct
  source 1..20: mol_type = other DNA
tttttctttttgaggcaggg

SEQ ID NO: 117779 - DNA, 20 bp, synthetic construct
  source 1..20: mol_type = other DNA
atttttctttttgaggcagg

SEQ ID NO: 117780 - DNA, 20 bp, synthetic construct
  source 1..20: mol_type = other DNA
tatttttctttttgaggcag

SEQ ID NO: 117781 - DNA, 20 bp, synthetic construct
  source 1..20: mol_type = other DNA
ttatttttctttttgaggca

SEQ ID NO: 117782 - DNA, 20 bp, synthetic construct
  source 1..20: mol_type = other DNA
cttatttttctttttgaggc

SEQ ID NO: 117783 - DNA, 20 bp, synthetic construct
  source 1..20: mol_type = other DNA
tcttatttttctttttgagg

SEQ ID NO: 117784 - DNA, 20 bp, synthetic construct
  source 1..20: mol_type = other DNA
atcttatttttctttttgag

SEQ ID NO: 117785 - DNA, 20 bp, synthetic construct
  source 1..20: mol_type = other DNA
catcttatttttctttttga

SEQ ID NO: 117786 - DNA, 20 bp, synthetic construct
  source 1..20: mol_type = other DNA
ccatcttatttttctttttg

SEQ ID NO: 117787 - DNA, 20 bp, synthetic construct
  source 1..20: mol_type = other DNA
tccatcttatttttcttttt

SEQ ID NO: 117788 - DNA, 20 bp, synthetic construct
  source 1..20: mol_type = other DNA
atccatcttatttttctttt

SEQ ID NO: 117789 - DNA, 20 bp, synthetic construct
  source 1..20: mol_type = other DNA
catccatcttatttttcttt

SEQ ID NO: 117790 - DNA, 20 bp, synthetic construct
  source 1..20: mol_type = other DNA
acatccatcttatttttctt

SEQ ID NO: 117791 - DNA, 20 bp, synthetic construct
  source 1..20: mol_type = other DNA
aacatccatcttatttttct

SEQ ID NO: 117792 - DNA, 20 bp, synthetic construct
  source 1..20: mol_type = other DNA
aaacatccatcttatttttc

SEQ ID NO: 117793 - DNA, 20 bp, synthetic construct
  source 1..20: mol_type = other DNA
gaaacatccatcttattttt

SEQ ID NO: 117794 - DNA, 20 bp, synthetic construct
  source 1..20: mol_type = other DNA
agaaacatccatcttatttt

SEQ ID NO: 117795 - DNA, 20 bp, synthetic construct
  source 1..20: mol_type = other DNA
cagaaacatccatcttattt

SEQ ID NO: 117796 - DNA, 20 bp, synthetic construct
  source 1..20: mol_type = other DNA
gcagaaacatccatcttatt

SEQ ID NO: 117797 - DNA, 20 bp, synthetic construct
  source 1..20: mol_type = other DNA
tgcagaaacatccatcttat

SEQ ID NO: 117798 - DNA, 20 bp, synthetic construct
  source 1..20: mol_type = other DNA
atgcagaaacatccatctta

SEQ ID NO: 117799 - DNA, 20 bp, synthetic construct
  source 1..20: mol_type = other DNA
aatgcagaaacatccatctt

SEQ ID NO: 117800 - DNA, 20 bp, synthetic construct
  source 1..20: mol_type = other DNA
taatgcagaaacatccatct

SEQ ID NO: 117801 - DNA, 20 bp, synthetic construct
  source 1..20: mol_type = other DNA
ttaatgcagaaacatccatc

SEQ ID NO: 117802 - DNA, 20 bp, synthetic construct
  source 1..20: mol_type = other DNA
tttaatgcagaaacatccat

SEQ ID NO: 117803 - DNA, 20 bp, synthetic construct
  source 1..20: mol_type = other DNA
ttttaatgcagaaacatcca

SEQ ID NO: 117804 - DNA, 20 bp, synthetic construct
  source 1..20: mol_type = other DNA
attttaatgcagaaacatcc

SEQ ID NO: 117805 - DNA, 20 bp, synthetic construct
  source 1..20: mol_type = other DNA
aattttaatgcagaaacatc

SEQ ID NO: 117806 - DNA, 20 bp, synthetic construct
  source 1..20: mol_type = other DNA
taattttaatgcagaaacat

SEQ ID NO: 117807 - DNA, 20 bp, synthetic construct
  source 1..20: mol_type = other DNA
ctaattttaatgcagaaaca

SEQ ID NO: 117808 - DNA, 20 bp, synthetic construct
  source 1..20: mol_type = other DNA
cctaattttaatgcagaaac

SEQ ID NO: 117809 - DNA, 20 bp, synthetic construct
  source 1..20: mol_type = other DNA
ccctaattttaatgcagaaa

SEQ ID NO: 117810 - DNA, 20 bp, synthetic construct
  source 1..20: mol_type = other DNA
tccctaattttaatgcagaa

SEQ ID NO: 117811 - DNA, 20 bp, synthetic construct
  source 1..20: mol_type = other DNA
ctccctaattttaatgcaga

SEQ ID NO: 117812 - DNA, 20 bp, synthetic construct
  source 1..20: mol_type = other DNA
actccctaattttaatgcag

SEQ ID NO: 117813 - DNA, 20 bp, synthetic construct
  source 1..20: mol_type = other DNA
aactccctaattttaatgca

SEQ ID NO: 117814 - DNA, 20 bp, synthetic construct
  source 1..20: mol_type = other DNA
caactccctaattttaatgc

SEQ ID NO: 117815 - DNA, 20 bp, synthetic construct
  source 1..20: mol_type = other DNA
acaactccctaattttaatg

SEQ ID NO: 117816 - DNA, 20 bp, synthetic construct
  source 1..20: mol_type = other DNA
gacaactccctaattttaat

SEQ ID NO: 117817 - DNA, 20 bp, synthetic construct
  source 1..20: mol_type = other DNA
cgacaactccctaattttaa

SEQ ID NO: 117818 - DNA, 20 bp, synthetic construct
  source 1..20: mol_type = other DNA
acgacaactccctaatttta

SEQ ID NO: 117819 - DNA, 20 bp, synthetic construct
  source 1..20: mol_type = other DNA
tacgacaactccctaatttt

SEQ ID NO: 117820 - DNA, 20 bp, synthetic construct
  source 1..20: mol_type = other DNA
atacgacaactccctaattt

SEQ ID NO: 117821 - DNA, 20 bp, synthetic construct
  source 1..20: mol_type = other DNA
tatacgacaactccctaatt

SEQ ID NO: 117822 - DNA, 20 bp, synthetic construct
  source 1..20: mol_type = other DNA
ttatacgacaactccctaat

SEQ ID NO: 117823 - DNA, 20 bp, synthetic construct
  source 1..20: mol_type = other DNA
attatacgacaactccctaa

SEQ ID NO: 117824 - DNA, 20 bp, synthetic construct
  source 1..20: mol_type = other DNA
cattatacgacaactcccta

SEQ ID NO: 117825 - DNA, 20 bp, synthetic construct
  source 1..20: mol_type = other DNA
acattatacgacaactccct

SEQ ID NO: 117826 - DNA, 20 bp, synthetic construct
  source 1..20: mol_type = other DNA
tacattatacgacaactccc

SEQ ID NO: 117827 - DNA, 20 bp, synthetic construct
  source 1..20: mol_type = other DNA
ctacattatacgacaactcc

SEQ ID NO: 117828 - DNA, 20 bp, synthetic construct
  source 1..20: mol_type = other DNA
actacattatacgacaactc

SEQ ID NO: 117829 - DNA, 20 bp, synthetic construct
  source 1..20: mol_type = other DNA
aactacattatacgacaact

SEQ ID NO: 117830 - DNA, 20 bp, synthetic construct
  source 1..20: mol_type = other DNA
caactacattatacgacaac

SEQ ID NO: 117831 - DNA, 20 bp, synthetic construct
  source 1..20: mol_type = other DNA
gcaactacattatacgacaa

SEQ ID NO: 117832 - DNA, 20 bp, synthetic construct
  source 1..20: mol_type = other DNA
tgcaactacattatacgaca

SEQ ID NO: 117833 - DNA, 20 bp, synthetic construct
  source 1..20: mol_type = other DNA
atgcaactacattatacgac

SEQ ID NO: 117834 - DNA, 20 bp, synthetic construct
  source 1..20: mol_type = other DNA
tatgcaactacattatacga

SEQ ID NO: 117835 - DNA, 20 bp, synthetic construct
  source 1..20: mol_type = other DNA
ttatgcaactacattatacg

SEQ ID NO: 117836 - DNA, 20 bp, synthetic construct
  source 1..20: mol_type = other DNA
tttatgcaactacattatac

SEQ ID NO: 117837 - DNA, 20 bp, synthetic construct
  source 1..20: mol_type = other DNA
gtttatgcaactacattata

SEQ ID NO: 117838 - DNA, 20 bp, synthetic construct
  source 1..20: mol_type = other DNA
agtttatgcaactacattat

SEQ ID NO: 117839 - DNA, 20 bp, synthetic construct
  source 1..20: mol_type = other DNA
tagtttatgcaactacatta

SEQ ID NO: 117840 - DNA, 20 bp, synthetic construct
  source 1..20: mol_type = other DNA
ctagtttatgcaactacatt

SEQ ID NO: 117841 - DNA, 20 bp, synthetic construct
  source 1..20: mol_type = other DNA
actagtttatgcaactacat

SEQ ID NO: 117842 - DNA, 20 bp, synthetic construct
  source 1..20: mol_type = other DNA
tactagtttatgcaactaca

SEQ ID NO: 117843 - DNA, 20 bp, synthetic construct
  source 1..20: mol_type = other DNA
atactagtttatgcaactac

SEQ ID NO: 117844 - DNA, 20 bp, synthetic construct
  source 1..20: mol_type = other DNA
aatactagtttatgcaacta

SEQ ID NO: 117845 - DNA, 20 bp, synthetic construct
  source 1..20: mol_type = other DNA
gaatactagtttatgcaact

SEQ ID NO: 117846 - DNA, 20 bp, synthetic construct
  source 1..20: mol_type = other DNA
agaatactagtttatgcaac

SEQ ID NO: 117847 - DNA, 20 bp, synthetic construct
  source 1..20: mol_type = other DNA
cagaatactagtttatgcaa

SEQ ID NO: 117848 - DNA, 20 bp, synthetic construct
  source 1..20: mol_type = other DNA
acagaatactagtttatgca

SEQ ID NO: 117849 - DNA, 20 bp, synthetic construct
  source 1..20: mol_type = other DNA
cacagaatactagtttatgc

SEQ ID NO: 117850 - DNA, 20 bp, synthetic construct
  source 1..20: mol_type = other DNA
gcacagaatactagtttatg

SEQ ID NO: 117851 - DNA, 20 bp, synthetic construct
  source 1..20: mol_type = other DNA
agcacagaatactagtttat

SEQ ID NO: 117852 - DNA, 20 bp, synthetic construct
  source 1..20: mol_type = other DNA
aagcacagaatactagttta

SEQ ID NO: 117853 - DNA, 20 bp, synthetic construct
  source 1..20: mol_type = other DNA
caagcacagaatactagttt

SEQ ID NO: 117854 - DNA, 20 bp, synthetic construct
  source 1..20: mol_type = other DNA
acaagcacagaatactagtt

SEQ ID NO: 117855 - DNA, 20 bp, synthetic construct
  source 1..20: mol_type = other DNA
cacaagcacagaatactagt

SEQ ID NO: 117856 - DNA, 20 bp, synthetic construct
  source 1..20: mol_type = other DNA
acacaagcacagaatactag

SEQ ID NO: 117857 - DNA, 20 bp, synthetic construct
  source 1..20: mol_type = other DNA
cacacaagcacagaatacta

SEQ ID NO: 117858 - DNA, 20 bp, synthetic construct
  source 1..20: mol_type = other DNA
ccacacaagcacagaatact

SEQ ID NO: 117859 - DNA, 20 bp, synthetic construct
  source 1..20: mol_type = other DNA
accacacaagcacagaatac

SEQ ID NO: 117860 - DNA, 20 bp, synthetic construct
  source 1..20: mol_type = other DNA
aaccacacaagcacagaata

SEQ ID NO: 117861 - DNA, 20 bp, synthetic construct
  source 1..20: mol_type = other DNA
taaccacacaagcacagaat

SEQ ID NO: 117862 - DNA, 20 bp, synthetic construct
  source 1..20: mol_type = other DNA
ttaaccacacaagcacagaa

SEQ ID NO: 117863 - DNA, 20 bp, synthetic construct
  source 1..20: mol_type = other DNA
tttaaccacacaagcacaga

SEQ ID NO: 117864 - DNA, 20 bp, synthetic construct
  source 1..20: mol_type = other DNA
ctttaaccacacaagcacag

SEQ ID NO: 117865 - DNA, 20 bp, synthetic construct
  source 1..20: mol_type = other DNA
tctttaaccacacaagcaca

SEQ ID NO: 117866 - DNA, 20 bp, synthetic construct
  source 1..20: mol_type = other DNA
ctctttaaccacacaagcac

SEQ ID NO: 117867 - DNA, 20 bp, synthetic construct
  source 1..20: mol_type = other DNA
gctctttaaccacacaagca

SEQ ID NO: 117868 - DNA, 20 bp, synthetic construct
  source 1..20: mol_type = other DNA
ggctctttaaccacacaagc

SEQ ID NO: 117869 - DNA, 20 bp, synthetic construct
  source 1..20: mol_type = other DNA
aggctctttaaccacacaag

SEQ ID NO: 117870 - DNA, 20 bp, synthetic construct
  source 1..20: mol_type = other DNA
aaggctctttaaccacacaa

SEQ ID NO: 117871 - DNA, 20 bp, synthetic construct
  source 1..20: mol_type = other DNA
gaaggctctttaaccacaca

SEQ ID NO: 117872 - DNA, 20 bp, synthetic construct
  source 1..20: mol_type = other DNA
cgaaggctctttaaccacac

SEQ ID NO: 117873 - DNA, 20 bp, synthetic construct
  source 1..20: mol_type = other DNA
acgaaggctctttaaccaca

SEQ ID NO: 117874 - DNA, 20 bp, synthetic construct
  source 1..20: mol_type = other DNA
tacgaaggctctttaaccac

SEQ ID NO: 117875 - DNA, 20 bp, synthetic construct
  source 1..20: mol_type = other DNA
ctacgaaggctctttaacca

SEQ ID NO: 117876 - DNA, 20 bp, synthetic construct
  source 1..20: mol_type = other DNA
tctacgaaggctctttaacc

SEQ ID NO: 117877 - DNA, 20 bp, synthetic construct
  source 1..20: mol_type = other DNA
ttctacgaaggctctttaac

SEQ ID NO: 117878 - DNA, 20 bp, synthetic construct
  source 1..20: mol_type = other DNA
tttctacgaaggctctttaa

SEQ ID NO: 117879 - DNA, 20 bp, synthetic construct
  source 1..20: mol_type = other DNA
ttttctacgaaggctcttta

SEQ ID NO: 117880 - DNA, 20 bp, synthetic construct
  source 1..20: mol_type = other DNA
tttttctacgaaggctcttt

SEQ ID NO: 117881 - DNA, 20 bp, synthetic construct
  source 1..20: mol_type = other DNA
ttttttctacgaaggctctt

SEQ ID NO: 117882 - DNA, 20 bp, synthetic construct
  source 1..20: mol_type = other DNA
attttttctacgaaggctct

SEQ ID NO: 117883 - DNA, 20 bp, synthetic construct
  source 1..20: mol_type = other DNA
gattttttctacgaaggctc

SEQ ID NO: 117884 - DNA, 20 bp, synthetic construct
  source 1..20: mol_type = other DNA
ggattttttctacgaaggct

SEQ ID NO: 117885 - DNA, 20 bp, synthetic construct
  source 1..20: mol_type = other DNA
gggattttttctacgaaggc

SEQ ID NO: 117886 - DNA, 20 bp, synthetic construct
  source 1..20: mol_type = other DNA
tgggattttttctacgaagg

SEQ ID NO: 117887 - DNA, 20 bp, synthetic construct
  source 1..20: mol_type = other DNA
gtgggattttttctacgaag

SEQ ID NO: 117888 - DNA, 20 bp, synthetic construct
  source 1..20: mol_type = other DNA
tgtgggattttttctacgaa

SEQ ID NO: 117889 - DNA, 20 bp, synthetic construct
  source 1..20: mol_type = other DNA
atgtgggattttttctacga

SEQ ID NO: 117890 - DNA, 20 bp, synthetic construct
  source 1..20: mol_type = other DNA
aatgtgggattttttctacg

SEQ ID NO: 117891 - DNA, 20 bp, synthetic construct
  source 1..20: mol_type = other DNA
aaatgtgggattttttctac

SEQ ID NO: 117892 - DNA, 20 bp, synthetic construct
  source 1..20: mol_type = other DNA
aaaatgtgggattttttcta

SEQ ID NO: 117893 - DNA, 20 bp, synthetic construct
  source 1..20: mol_type = other DNA
aaaaatgtgggattttttct

SEQ ID NO: 117894 - DNA, 20 bp, synthetic construct
  source 1..20: mol_type = other DNA
gaaaaatgtgggattttttc

SEQ ID NO: 117895 - DNA, 20 bp, synthetic construct
  source 1..20: mol_type = other DNA
agaaaaatgtgggatttttt

SEQ ID NO: 117896 - DNA, 20 bp, synthetic construct
  source 1..20: mol_type = other DNA
aagaaaaatgtgggattttt

SEQ ID NO: 117897 - DNA, 20 bp, synthetic construct
  source 1..20: mol_type = other DNA
taagaaaaatgtgggatttt

SEQ ID NO: 117898 - DNA, 20 bp, synthetic construct
  source 1..20: mol_type = other DNA
ttaagaaaaatgtgggattt

SEQ ID NO: 117899 - DNA, 20 bp, synthetic construct
  source 1..20: mol_type = other DNA
tttaagaaaaatgtgggatt

SEQ ID NO: 117900 - DNA, 20 bp, synthetic construct
  source 1..20: mol_type = other DNA
ttttaagaaaaatgtgggat

SEQ ID NO: 117901 - DNA, 20 bp, synthetic construct
  source 1..20: mol_type = other DNA
cttttaagaaaaatgtggga

SEQ ID NO: 117902 - DNA, 20 bp, synthetic construct
  source 1..20: mol_type = other DNA
ccttttaagaaaaatgtggg

SEQ ID NO: 117903 - DNA, 20 bp, synthetic construct
  source 1..20: mol_type = other DNA
tccttttaagaaaaatgtgg

SEQ ID NO: 117904 - DNA, 20 bp, synthetic construct
  source 1..20: mol_type = other DNA
ttccttttaagaaaaatgtg

SEQ ID NO: 117905 - DNA, 20 bp, synthetic construct
  source 1..20: mol_type = other DNA
tttccttttaagaaaaatgt

SEQ ID NO: 117906 - DNA, 20 bp, synthetic construct
  source 1..20: mol_type = other DNA
atttccttttaagaaaaatg

SEQ ID NO: 117907 - DNA, 20 bp, synthetic construct
  source 1..20: mol_type = other DNA
gatttccttttaagaaaaat

SEQ ID NO: 117908 - DNA, 20 bp, synthetic construct
  source 1..20: mol_type = other DNA
agatttccttttaagaaaaa

SEQ ID NO: 117909 - DNA, 20 bp, synthetic construct
  source 1..20: mol_type = other DNA
aagatttccttttaagaaaa

SEQ ID NO: 117910 - DNA, 20 bp, synthetic construct
  source 1..20: mol_type = other DNA
aaagatttccttttaagaaa

SEQ ID NO: 117911 - DNA, 20 bp, synthetic construct
  source 1..20: mol_type = other DNA
aaaagatttccttttaagaa

SEQ ID NO: 117912 - DNA, 20 bp, synthetic construct
  source 1..20: mol_type = other DNA
caaaagatttccttttaaga

SEQ ID NO: 117913 - DNA, 20 bp, synthetic construct
  source 1..20: mol_type = other DNA
ccaaaagatttccttttaag

SEQ ID NO: 117914 - DNA, 20 bp, synthetic construct
  source 1..20: mol_type = other DNA
gccaaaagatttccttttaa

SEQ ID NO: 117915 - DNA, 20 bp, synthetic construct
  source 1..20: mol_type = other DNA
ggccaaaagatttcctttta

SEQ ID NO: 117916 - DNA, 20 bp, synthetic construct
  source 1..20: mol_type = other DNA
tggccaaaagatttcctttt

SEQ ID NO: 117917 - DNA, 20 bp, synthetic construct
  source 1..20: mol_type = other DNA
ctggccaaaagatttccttt

SEQ ID NO: 117918 - DNA, 20 bp, synthetic construct
  source 1..20: mol_type = other DNA
cctggccaaaagatttcctt

SEQ ID NO: 117919 - DNA, 20 bp, synthetic construct
  source 1..20: mol_type = other DNA
acctggccaaaagatttcct

SEQ ID NO: 117920 - DNA, 20 bp, synthetic construct
  source 1..20: mol_type = other DNA
cacctggccaaaagatttcc

SEQ ID NO: 117921 - DNA, 20 bp, synthetic construct
  source 1..20: mol_type = other DNA
acacctggccaaaagatttc

SEQ ID NO: 117922 - DNA, 20 bp, synthetic construct
  source 1..20: mol_type = other DNA
cacacctggccaaaagattt

SEQ ID NO: 117923 - DNA, 20 bp, synthetic construct
  source 1..20: mol_type = other DNA
ccacacctggccaaaagatt

SEQ ID NO: 117924 - DNA, 20 bp, synthetic construct
  source 1..20: mol_type = other DNA
accacacctggccaaaagat

SEQ ID NO: 117925 - DNA, 20 bp, synthetic construct
  source 1..20: mol_type = other DNA
caccacacctggccaaaaga

SEQ ID NO: 117926 - DNA, 20 bp, synthetic construct
  source 1..20: mol_type = other DNA
ccaccacacctggccaaaag

SEQ ID NO: 117927 - DNA, 20 bp, synthetic construct
  source 1..20: mol_type = other DNA
gccaccacacctggccaaaa

SEQ ID NO: 117928 - DNA, 20 bp, synthetic construct
  source 1..20: mol_type = other DNA
agccaccacacctggccaaa

SEQ ID NO: 117929 - DNA, 20 bp, synthetic construct
  source 1..20: mol_type = other DNA
gagccaccacacctggccaa

SEQ ID NO: 117930 - DNA, 20 bp, synthetic construct
  source 1..20: mol_type = other DNA
tgagccaccacacctggcca

SEQ ID NO: 117931 - DNA, 20 bp, synthetic construct
  source 1..20: mol_type = other DNA
gtgagccaccacacctggcc

SEQ ID NO: 117932 - DNA, 20 bp, synthetic construct
  source 1..20: mol_type = other DNA
tgtgagccaccacacctggc

SEQ ID NO: 117933 - DNA, 20 bp, synthetic construct
  source 1..20: mol_type = other DNA
atgtgagccaccacacctgg

SEQ ID NO: 117934 - DNA, 20 bp, synthetic construct
  source 1..20: mol_type = other DNA
gatgtgagccaccacacctg

SEQ ID NO: 117935 - DNA, 20 bp, synthetic construct
  source 1..20: mol_type = other DNA
agatgtgagccaccacacct

SEQ ID NO: 117936 - DNA, 20 bp, synthetic construct
  source 1..20: mol_type = other DNA
cagatgtgagccaccacacc

SEQ ID NO: 117937 - DNA, 20 bp, synthetic construct
  source 1..20: mol_type = other DNA
acagatgtgagccaccacac

SEQ ID NO: 117938 - DNA, 20 bp, synthetic construct
  source 1..20: mol_type = other DNA
tacagatgtgagccaccaca

SEQ ID NO: 117939 - DNA, 20 bp, synthetic construct
  source 1..20: mol_type = other DNA
ttacagatgtgagccaccac

SEQ ID NO: 117940 - DNA, 20 bp, synthetic construct
  source 1..20: mol_type = other DNA
cttacagatgtgagccacca

SEQ ID NO: 117941 - DNA, 20 bp, synthetic construct
  source 1..20: mol_type = other DNA
gcttacagatgtgagccacc

SEQ ID NO: 117942 - DNA, 20 bp, synthetic construct
  source 1..20: mol_type = other DNA
ggcttacagatgtgagccac

SEQ ID NO: 117943 - DNA, 20 bp, synthetic construct
  source 1..20: mol_type = other DNA
gggcttacagatgtgagcca

SEQ ID NO: 117944 - DNA, 20 bp, synthetic construct
  source 1..20: mol_type = other DNA
tgggcttacagatgtgagcc

SEQ ID NO: 117945 - DNA, 20 bp, synthetic construct
  source 1..20: mol_type = other DNA
ttgggcttacagatgtgagc

SEQ ID NO: 117946 - DNA, 20 bp, synthetic construct
  source 1..20: mol_type = other DNA
gttgggcttacagatgtgag

SEQ ID NO: 117947 - DNA, 20 bp, synthetic construct
  source 1..20: mol_type = other DNA
tgttgggcttacagatgtga

SEQ ID NO: 117948 - DNA, 20 bp, synthetic construct
  source 1..20: mol_type = other DNA
gtgttgggcttacagatgtg

SEQ ID NO: 117949 - DNA, 20 bp, synthetic construct
  source 1..20: mol_type = other DNA
agtgttgggcttacagatgt

SEQ ID NO: 117950 - DNA, 20 bp, synthetic construct
  source 1..20: mol_type = other DNA
gagtgttgggcttacagatg

SEQ ID NO: 117951 - DNA, 20 bp, synthetic construct
  source 1..20: mol_type = other DNA
agagtgttgggcttacagat

SEQ ID NO: 117952 - DNA, 20 bp, synthetic construct
  source 1..20: mol_type = other DNA
cagagtgttgggcttacaga

SEQ ID NO: 117953 - DNA, 20 bp, synthetic construct
  source 1..20: mol_type = other DNA
ccagagtgttgggcttacag

SEQ ID NO: 117954 - DNA, 20 bp, synthetic construct
  source 1..20: mol_type = other DNA
cccagagtgttgggcttaca

SEQ ID NO: 117955 - DNA, 20 bp, synthetic construct
  source 1..20: mol_type = other DNA
tcccagagtgttgggcttac

SEQ ID NO: 117956 - DNA, 20 bp, synthetic construct
  source 1..20: mol_type = other DNA
ttcccagagtgttgggctta

SEQ ID NO: 117957 - DNA, 20 bp, synthetic construct
  source 1..20: mol_type = other DNA
cttcccagagtgttgggctt

SEQ ID NO: 117958 - DNA, 20 bp, synthetic construct
  source 1..20: mol_type = other DNA
gcttcccagagtgttgggct

SEQ ID NO: 117959 - DNA, 20 bp, synthetic construct
  source 1..20: mol_type = other DNA
ggcttcccagagtgttgggc

SEQ ID NO: 117960 - DNA, 20 bp, synthetic construct
  source 1..20: mol_type = other DNA
cggcttcccagagtgttggg

SEQ ID NO: 117961 - DNA, 20 bp, synthetic construct
  source 1..20: mol_type = other DNA
tcggcttcccagagtgttgg

SEQ ID NO: 117962 - DNA, 20 bp, synthetic construct
  source 1..20: mol_type = other DNA
ctcggcttcccagagtgttg

SEQ ID NO: 117963 - DNA, 20 bp, synthetic construct
  source 1..20: mol_type = other DNA
cctcggcttcccagagtgtt

SEQ ID NO: 117964 - DNA, 20 bp, synthetic construct
  source 1..20: mol_type = other DNA
acctcggcttcccagagtgt

SEQ ID NO: 117965 - DNA, 20 bp, synthetic construct
  source 1..20: mol_type = other DNA
cacctcggcttcccagagtg

SEQ ID NO: 117966 - DNA, 20 bp, synthetic construct
  source 1..20: mol_type = other DNA
ccacctcggcttcccagagt

SEQ ID NO: 117967 - DNA, 20 bp, synthetic construct
  source 1..20: mol_type = other DNA
cccacctcggcttcccagag

SEQ ID NO: 117968 - DNA, 20 bp, synthetic construct
  source 1..20: mol_type = other DNA
gcccacctcggcttcccaga

SEQ ID NO: 117969 - DNA, 20 bp, synthetic construct
  source 1..20: mol_type = other DNA
tgcccacctcggcttcccag

SEQ ID NO: 117970 - DNA, 20 bp, synthetic construct
  source 1..20: mol_type = other DNA
ctgcccacctcggcttccca

SEQ ID NO: 117971 - DNA, 20 bp, synthetic construct
  source 1..20: mol_type = other DNA
tctgcccacctcggcttccc

SEQ ID NO: 117972 - DNA, 20 bp, synthetic construct
  source 1..20: mol_type = other DNA
atctgcccacctcggcttcc

SEQ ID NO: 117973 - DNA, 20 bp, synthetic construct
  source 1..20: mol_type = other DNA
gatctgcccacctcggcttc

SEQ ID NO: 117974 - DNA, 20 bp, synthetic construct
  source 1..20: mol_type = other DNA
tgatctgcccacctcggctt

SEQ ID NO: 117975 - DNA, 20 bp, synthetic construct
  source 1..20: mol_type = other DNA
gtgatctgcccacctcggct

SEQ ID NO: 117976 - DNA, 20 bp, synthetic construct
  source 1..20: mol_type = other DNA
agtgatctgcccacctcggc

SEQ ID NO: 117977 - DNA, 20 bp, synthetic construct
  source 1..20: mol_type = other DNA
aagtgatctgcccacctcgg

SEQ ID NO: 117978 - DNA, 20 bp, synthetic construct
  source 1..20: mol_type = other DNA
caagtgatctgcccacctcg

SEQ ID NO: 117979 - DNA, 20 bp, synthetic construct
  source 1..20: mol_type = other DNA
tcaagtgatctgcccacctc

SEQ ID NO: 117980 - DNA, 20 bp, synthetic construct
  source 1..20: mol_type = other DNA
ctcaagtgatctgcccacct

SEQ ID NO: 117981 - DNA, 20 bp, synthetic construct
  source 1..20: mol_type = other DNA
cctcaagtgatctgcccacc

SEQ ID NO: 117982 - DNA, 20 bp, synthetic construct
  source 1..20: mol_type = other DNA
acctcaagtgatctgcccac

SEQ ID NO: 117983 - DNA, 20 bp, synthetic construct
  source 1..20: mol_type = other DNA
gacctcaagtgatctgccca

SEQ ID NO: 117984 - DNA, 20 bp, synthetic construct
  source 1..20: mol_type = other DNA
tgacctcaagtgatctgccc

SEQ ID NO: 117985 - DNA, 20 bp, synthetic construct
  source 1..20: mol_type = other DNA
ctgacctcaagtgatctgcc

SEQ ID NO: 117986 - DNA, 20 bp, synthetic construct
  source 1..20: mol_type = other DNA
cctgacctcaagtgatctgc

SEQ ID NO: 117987 - DNA, 20 bp, synthetic construct
  source 1..20: mol_type = other DNA
tcctgacctcaagtgatctg

SEQ ID NO: 117988 - DNA, 20 bp, synthetic construct
  source 1..20: mol_type = other DNA
ctcctgacctcaagtgatct

SEQ ID NO: 117989 - DNA, 20 bp, synthetic construct
  source 1..20: mol_type = other DNA
actcctgacctcaagtgatc

SEQ ID NO: 117990 - DNA, 20 bp, synthetic construct
  source 1..20: mol_type = other DNA
tactcctgacctcaagtgat

SEQ ID NO: 117991 - DNA, 20 bp, synthetic construct
  source 1..20: mol_type = other DNA
gtactcctgacctcaagtga

SEQ ID NO: 117992 - DNA, 20 bp, synthetic construct
  source 1..20: mol_type = other DNA
tgtactcctgacctcaagtg

SEQ ID NO: 117993 - DNA, 20 bp, synthetic construct
  source 1..20: mol_type = other DNA
ttgtactcctgacctcaagt

SEQ ID NO: 117994 - DNA, 20 bp, synthetic construct
  source 1..20: mol_type = other DNA
tttgtactcctgacctcaag

SEQ ID NO: 117995 - DNA, 20 bp, synthetic construct
  source 1..20: mol_type = other DNA
ttttgtactcctgacctcaa

SEQ ID NO: 117996 - DNA, 20 bp, synthetic construct
  source 1..20: mol_type = other DNA
gttttgtactcctgacctca

SEQ ID NO: 117997 - DNA, 20 bp, synthetic construct
  source 1..20: mol_type = other DNA
ggttttgtactcctgacctc

SEQ ID NO: 117998 - DNA, 20 bp, synthetic construct
  source 1..20: mol_type = other DNA
tggttttgtactcctgacct

SEQ ID NO: 117999 - DNA, 20 bp, synthetic construct
  source 1..20: mol_type = other DNA
atggttttgtactcctgacc

SEQ ID NO: 118000 - DNA, 20 bp, synthetic construct
  source 1..20: mol_type = other DNA
gatggttttgtactcctgac

SEQ ID NO: 118001 - DNA, 20 bp, synthetic construct
  source 1..20: mol_type = other DNA
ggatggttttgtactcctga

SEQ ID NO: 118002 - DNA, 20 bp, synthetic construct
  source 1..20: mol_type = other DNA
aggatggttttgtactcctg

SEQ ID NO: 118003 - DNA, 20 bp, synthetic construct
  source 1..20: mol_type = other DNA
caggatggttttgtactcct

SEQ ID NO: 118004 - DNA, 20 bp, synthetic construct
  source 1..20: mol_type = other DNA
ccaggatggttttgtactcc

SEQ ID NO: 118005 - DNA, 20 bp, synthetic construct
  source 1..20: mol_type = other DNA
gccaggatggttttgtactc

SEQ ID NO: 118006 - DNA, 20 bp, synthetic construct
  source 1..20: mol_type = other DNA
ggccaggatggttttgtact

SEQ ID NO: 118007 - DNA, 20 bp, synthetic construct
  source 1..20: mol_type = other DNA
tggccaggatggttttgtac

SEQ ID NO: 118008 - DNA, 20 bp, synthetic construct
  source 1..20: mol_type = other DNA
ttggccaggatggttttgta

SEQ ID NO: 118009 - DNA, 20 bp, synthetic construct
  source 1..20: mol_type = other DNA
gttggccaggatggttttgt

SEQ ID NO: 118010 - DNA, 20 bp, synthetic construct
  source 1..20: mol_type = other DNA
tgttggccaggatggttttg

SEQ ID NO: 118011 - DNA, 20 bp, synthetic construct
  source 1..20: mol_type = other DNA
atgttggccaggatggtttt

SEQ ID NO: 118012 - DNA, 20 bp, synthetic construct
  source 1..20: mol_type = other DNA
catgttggccaggatggttt

SEQ ID NO: 118013 - DNA, 20 bp, synthetic construct
  source 1..20: mol_type = other DNA
ccatgttggccaggatggtt

SEQ ID NO: 118014 - DNA, 20 bp, synthetic construct
  source 1..20: mol_type = other DNA
accatgttggccaggatggt

SEQ ID NO: 118015 - DNA, 20 bp, synthetic construct
  source 1..20: mol_type = other DNA
caccatgttggccaggatgg

SEQ ID NO: 118016 - DNA, 20 bp, synthetic construct
  source 1..20: mol_type = other DNA
tcaccatgttggccaggatg

SEQ ID NO: 118017 - DNA, 20 bp, synthetic construct
  source 1..20: mol_type = other DNA
ttcaccatgttggccaggat

SEQ ID NO: 118018 - DNA, 20 bp, synthetic construct
  source 1..20: mol_type = other DNA
tttcaccatgttggccagga

SEQ ID NO: 118019 - DNA, 20 bp, synthetic construct
  source 1..20: mol_type = other DNA
ttttcaccatgttggccagg

SEQ ID NO: 118020 - DNA, 20 bp, synthetic construct
  source 1..20: mol_type = other DNA
gttttcaccatgttggccag

SEQ ID NO: 118021 - DNA, 20 bp, synthetic construct
  source 1..20: mol_type = other DNA
ggttttcaccatgttggcca

SEQ ID NO: 118022 - DNA, 20 bp, synthetic construct
  source 1..20: mol_type = other DNA
gggttttcaccatgttggcc

SEQ ID NO: 118023 - DNA, 20 bp, synthetic construct
  source 1..20: mol_type = other DNA
cgggttttcaccatgttggc

SEQ ID NO: 118024 - DNA, 20 bp, synthetic construct
  source 1..20: mol_type = other DNA
acgggttttcaccatgttgg

SEQ ID NO: 118025 - DNA, 20 bp, synthetic construct
  source 1..20: mol_type = other DNA
gacgggttttcaccatgttg

SEQ ID NO: 118026 - DNA, 20 bp, synthetic construct
  source 1..20: mol_type = other DNA
agacgggttttcaccatgtt

SEQ ID NO: 118027 - DNA, 20 bp, synthetic construct
  source 1..20: mol_type = other DNA
gagacgggttttcaccatgt

SEQ ID NO: 118028 - DNA, 20 bp, synthetic construct
  source 1..20: mol_type = other DNA
agagacgggttttcaccatg

SEQ ID NO: 118029 - DNA, 20 bp, synthetic construct
  source 1..20: mol_type = other DNA
tagagacgggttttcaccat

SEQ ID NO: 118030 - DNA, 20 bp, synthetic construct
  source 1..20: mol_type = other DNA
gtagagacgggttttcacca

SEQ ID NO: 118031 - DNA, 20 bp, synthetic construct
  source 1..20: mol_type = other DNA
agtagagacgggttttcacc

SEQ ID NO: 118032 - DNA, 20 bp, synthetic construct
  source 1..20: mol_type = other DNA
tagtagagacgggttttcac

SEQ ID NO: 118033 - DNA, 20 bp, synthetic construct
  source 1..20: mol_type = other DNA
ttagtagagacgggttttca

SEQ ID NO: 118034 - DNA, 20 bp, synthetic construct
  source 1..20: mol_type = other DNA
tttagtagagacgggttttc

SEQ ID NO: 118035 - DNA, 20 bp, synthetic construct
  source 1..20: mol_type = other DNA
ttttagtagagacgggtttt

SEQ ID NO: 118036 - DNA, 20 bp, synthetic construct
  source 1..20: mol_type = other DNA
tttttagtagagacgggttt

SEQ ID NO: 118037 - DNA, 20 bp, synthetic construct
  source 1..20: mol_type = other DNA
atttttagtagagacgggtt

SEQ ID NO: 118038 - DNA, 20 bp, synthetic construct
  source 1..20: mol_type = other DNA
tatttttagtagagacgggt

SEQ ID NO: 118039 - DNA, 20 bp, synthetic construct
  source 1..20: mol_type = other DNA
gtatttttagtagagacggg

SEQ ID NO: 118040 - DNA, 20 bp, synthetic construct
  source 1..20: mol_type = other DNA
tgtatttttagtagagacgg

SEQ ID NO: 118041 - DNA, 20 bp, synthetic construct
  source 1..20: mol_type = other DNA
ttgtatttttagtagagacg

SEQ ID NO: 118042 - DNA, 20 bp, synthetic construct
  source 1..20: mol_type = other DNA
tttgtatttttagtagagac

SEQ ID NO: 118043 - DNA, 20 bp, synthetic construct
  source 1..20: mol_type = other DNA
ctttgtatttttagtagaga

SEQ ID NO: 118044 - DNA, 20 bp, synthetic construct
  source 1..20: mol_type = other DNA
tctttgtatttttagtagag

SEQ ID NO: 118045 - DNA, 20 bp, synthetic construct
  source 1..20: mol_type = other DNA
atctttgtatttttagtaga

SEQ ID NO: 118046 - DNA, 20 bp, synthetic construct
  source 1..20: mol_type = other DNA
gatctttgtatttttagtag

SEQ ID NO: 118047 - DNA, 20 bp, synthetic construct
  source 1..20: mol_type = other DNA
tgatctttgtatttttagta

SEQ ID NO: 118048 - DNA, 20 bp, synthetic construct
  source 1..20: mol_type = other DNA
ctgatctttgtatttttagt

SEQ ID NO: 118049 - DNA, 20 bp, synthetic construct
  source 1..20: mol_type = other DNA
gctgatctttgtatttttag

SEQ ID NO: 118050 - DNA, 20 bp, synthetic construct
  source 1..20: mol_type = other DNA
agctgatctttgtattttta

SEQ ID NO: 118051 - DNA, 20 bp, synthetic construct
  source 1..20: mol_type = other DNA
cagctgatctttgtattttt

SEQ ID NO: 118052 - DNA, 20 bp, synthetic construct
  source 1..20: mol_type = other DNA
ccagctgatctttgtatttt

SEQ ID NO: 118053 - DNA, 20 bp, synthetic construct
  source 1..20: mol_type = other DNA
cccagctgatctttgtattt

SEQ ID NO: 118054 - DNA, 20 bp, synthetic construct
  source 1..20: mol_type = other DNA
gcccagctgatctttgtatt

SEQ ID NO: 118055 - DNA, 20 bp, synthetic construct
  source 1..20: mol_type = other DNA
tgcccagctgatctttgtat

SEQ ID NO: 118056 - DNA, 20 bp, synthetic construct
  source 1..20: mol_type = other DNA
atgcccagctgatctttgta

SEQ ID NO: 118057 - DNA, 20 bp, synthetic construct
  source 1..20: mol_type = other DNA
catgcccagctgatctttgt

SEQ ID NO: 118058 - DNA, 20 bp, synthetic construct
  source 1..20: mol_type = other DNA
ccatgcccagctgatctttg

SEQ ID NO: 118059 - DNA, 20 bp, synthetic construct
  source 1..20: mol_type = other DNA
accatgcccagctgatcttt

SEQ ID NO: 118060 - DNA, 20 bp, synthetic construct
  source 1..20: mol_type = other DNA
caccatgcccagctgatctt

SEQ ID NO: 118061 - DNA, 20 bp, synthetic construct
  source 1..20: mol_type = other DNA
ccaccatgcccagctgatct

SEQ ID NO: 118062 - DNA, 20 bp, synthetic construct
  source 1..20: mol_type = other DNA
accaccatgcccagctgatc

SEQ ID NO: 118063 - DNA, 20 bp, synthetic construct
  source 1..20: mol_type = other DNA
caccaccatgcccagctgat

SEQ ID NO: 118064 - DNA, 20 bp, synthetic construct
  source 1..20: mol_type = other DNA
gcaccaccatgcccagctga

SEQ ID NO: 118065 - DNA, 20 bp, synthetic construct
  source 1..20: mol_type = other DNA
cgcaccaccatgcccagctg

SEQ ID NO: 118066 - DNA, 20 bp, synthetic construct
  source 1..20: mol_type = other DNA
acgcaccaccatgcccagct

SEQ ID NO: 118067 - DNA, 20 bp, synthetic construct
  source 1..20: mol_type = other DNA
cacgcaccaccatgcccagc

SEQ ID NO: 118068 - DNA, 20 bp, synthetic construct
  source 1..20: mol_type = other DNA
gcacgcaccaccatgcccag

SEQ ID NO: 118069 - DNA, 20 bp, synthetic construct
  source 1..20: mol_type = other DNA
ggcacgcaccaccatgccca

SEQ ID NO: 118070 - DNA, 20 bp, synthetic construct
  source 1..20: mol_type = other DNA
aggcacgcaccaccatgccc

SEQ ID NO: 118071 - DNA, 20 bp, synthetic construct
  source 1..20: mol_type = other DNA
caggcacgcaccaccatgcc

SEQ ID NO: 118072 - DNA, 20 bp, synthetic construct
  source 1..20: mol_type = other DNA
ccaggcacgcaccaccatgc

SEQ ID NO: 118073 - DNA, 20 bp, synthetic construct
  source 1..20: mol_type = other DNA
cccaggcacgcaccaccatg

SEQ ID NO: 118074 - DNA, 20 bp, synthetic construct
  source 1..20: mol_type = other DNA
acccaggcacgcaccaccat

SEQ ID NO: 118075 - DNA, 20 bp, synthetic construct
  source 1..20: mol_type = other DNA
cacccaggcacgcaccacca

SEQ ID NO: 118076 - DNA, 20 bp, synthetic construct
  source 1..20: mol_type = other DNA
tcacccaggcacgcaccacc

SEQ ID NO: 118077 - DNA, 20 bp, synthetic construct
  source 1..20: mol_type = other DNA
gtcacccaggcacgcaccac

SEQ ID NO: 118078 - DNA, 20 bp, synthetic construct
  source 1..20: mol_type = other DNA
tgtcacccaggcacgcacca

SEQ ID NO: 118079 - DNA, 20 bp, synthetic construct
  source 1..20: mol_type = other DNA
ctgtcacccaggcacgcacc

SEQ ID NO: 118080 - DNA, 20 bp, synthetic construct
  source 1..20: mol_type = other DNA
tctgtcacccaggcacgcac

SEQ ID NO: 118081 - DNA, 20 bp, synthetic construct
  source 1..20: mol_type = other DNA
ctctgtcacccaggcacgca

SEQ ID NO: 118082 - DNA, 20 bp, synthetic construct
  source 1..20: mol_type = other DNA
gctctgtcacccaggcacgc

SEQ ID NO: 118083 - DNA, 20 bp, synthetic construct
  source 1..20: mol_type = other DNA
cgctctgtcacccaggcacg

SEQ ID NO: 118084 - DNA, 20 bp, synthetic construct
  source 1..20: mol_type = other DNA
tcgctctgtcacccaggcac

SEQ ID NO: 118085 - DNA, 20 bp, synthetic construct
  source 1..20: mol_type = other DNA
ctcgctctgtcacccaggca

SEQ ID NO: 118086 - DNA, 20 bp, synthetic construct
  source 1..20: mol_type = other DNA
tctcgctctgtcacccaggc

SEQ ID NO: 118087 - DNA, 20 bp, synthetic construct
  source 1..20: mol_type = other DNA
gtctcgctctgtcacccagg

SEQ ID NO: 118088 - DNA, 20 bp, synthetic construct
  source 1..20: mol_type = other DNA
agtctcgctctgtcacccag

SEQ ID NO: 118089 - DNA, 20 bp, synthetic construct
  source 1..20: mol_type = other DNA
gagtctcgctctgtcaccca

SEQ ID NO: 118090 - DNA, 20 bp, synthetic construct
  source 1..20: mol_type = other DNA
ggagtctcgctctgtcaccc

SEQ ID NO: 118091 - DNA, 20 bp, synthetic construct
  source 1..20: mol_type = other DNA
cggagtctcgctctgtcacc

SEQ ID NO: 118092 - DNA, 20 bp, synthetic construct
  source 1..20: mol_type = other DNA
acggagtctcgctctgtcac

SEQ ID NO: 118093 - DNA, 20 bp, synthetic construct
  source 1..20: mol_type = other DNA
gacggagtctcgctctgtca

SEQ ID NO: 118094 - DNA, 20 bp, synthetic construct
  source 1..20: mol_type = other DNA
ggacggagtctcgctctgtc

SEQ ID NO: 118095 - DNA, 20 bp, synthetic construct
  source 1..20: mol_type = other DNA
tggacggagtctcgctctgt

SEQ ID NO: 118096 - DNA, 20 bp, synthetic construct
  source 1..20: mol_type = other DNA
ttggacggagtctcgctctg

SEQ ID NO: 118097 - DNA, 20 bp, synthetic construct
  source 1..20: mol_type = other DNA
tttggacggagtctcgctct

SEQ ID NO: 118098 - DNA, 20 bp, synthetic construct
  source 1..20: mol_type = other DNA
ttttggacggagtctcgctc

SEQ ID NO: 118099 - DNA, 20 bp, synthetic construct
  source 1..20: mol_type = other DNA
tttttggacggagtctcgct

SEQ ID NO: 118100 - DNA, 20 bp, synthetic construct
  source 1..20: mol_type = other DNA
ttttttggacggagtctcgc

SEQ ID NO: 118101 - DNA, 20 bp, synthetic construct
  source 1..20: mol_type = other DNA
tttttttggacggagtctcg

SEQ ID NO: 118102 - DNA, 20 bp, synthetic construct
  source 1..20: mol_type = other DNA
ttttttttggacggagtctc

SEQ ID NO: 118103 - DNA, 20 bp, synthetic construct
  source 1..20: mol_type = other DNA
tttttttttggacggagtct

SEQ ID NO: 118104 - DNA, 20 bp, synthetic construct
  source 1..20: mol_type = other DNA
ttttttttttggacggagtc

SEQ ID NO: 118105 - DNA, 20 bp, synthetic construct
  source 1..20: mol_type = other DNA
tttttttttttggacggagt

SEQ ID NO: 118106 - DNA, 20 bp, synthetic construct
  source 1..20: mol_type = other DNA
ttttttttttttggacggag

SEQ ID NO: 118107 - DNA, 20 bp, synthetic construct
  source 1..20: mol_type = other DNA
tttttttttttttggacgga

SEQ ID NO: 118108 - DNA, 20 bp, synthetic construct
  source 1..20: mol_type = other DNA
ttttttttttttttggacgg

SEQ ID NO: 118109 - DNA, 20 bp, synthetic construct
  source 1..20: mol_type = other DNA
tttttttttttttttggacg

SEQ ID NO: 118110 - DNA, 20 bp, synthetic construct
  source 1..20: mol_type = other DNA
ttttttttttttttttggac

SEQ ID NO: 118111 - DNA, 20 bp, synthetic construct
  source 1..20: mol_type = other DNA
tttttttttttttttttgga

SEQ ID NO: 118112 - DNA, 20 bp, synthetic construct
  source 1..20: mol_type = other DNA
ttttttttttttttttttgg

SEQ ID NO: 118113 - DNA, 20 bp, synthetic construct
  source 1..20: mol_type = other DNA
tttttttttttttttttttg

SEQ ID NO: 118114 - DNA, 20 bp, synthetic construct
  source 1..20: mol_type = other DNA
tttttttttttttttttttt

SEQ ID NO: 118115 - DNA, 20 bp, synthetic construct
  source 1..20: mol_type = other DNA
tttttttttttttttttttt

SEQ ID NO: 118116 - DNA, 20 bp, synthetic construct
  source 1..20: mol_type = other DNA
cttttttttttttttttttt

SEQ ID NO: 118117 - DNA, 20 bp, synthetic construct
  source 1..20: mol_type = other DNA
tctttttttttttttttttt

SEQ ID NO: 118118 - DNA, 20 bp, synthetic construct
  source 1..20: mol_type = other DNA
ctcttttttttttttttttt

SEQ ID NO: 118119 - DNA, 20 bp, synthetic construct
  source 1..20: mol_type = other DNA
actctttttttttttttttt

SEQ ID NO: 118120 - DNA, 20 bp, synthetic construct
  source 1..20: mol_type = other DNA
aactcttttttttttttttt

SEQ ID NO: 118121 - DNA, 20 bp, synthetic construct
  source 1..20: mol_type = other DNA
gaactctttttttttttttt

SEQ ID NO: 118122 - DNA, 20 bp, synthetic construct
  source 1..20: mol_type = other DNA
agaactcttttttttttttt

SEQ ID NO: 118123 - DNA, 20 bp, synthetic construct
  source 1..20: mol_type = other DNA
aagaactctttttttttttt

SEQ ID NO: 118124 - DNA, 20 bp, synthetic construct
  source 1..20: mol_type = other DNA
aaagaactcttttttttttt

SEQ ID NO: 118125 - DNA, 20 bp, synthetic construct
  source 1..20: mol_type = other DNA
aaaagaactctttttttttt

SEQ ID NO: 118126 - DNA, 20 bp, synthetic construct
  source 1..20: mol_type = other DNA
taaaagaactcttttttttt

SEQ ID NO: 118127 - DNA, 20 bp, synthetic construct
  source 1..20: mol_type = other DNA
ttaaaagaactctttttttt

SEQ ID NO: 118128 - DNA, 20 bp, synthetic construct
  source 1..20: mol_type = other DNA
attaaaagaactcttttttt

SEQ ID NO: 118129 - DNA, 20 bp, synthetic construct
  source 1..20: mol_type = other DNA
cattaaaagaactctttttt

SEQ ID NO: 118130 - DNA, 20 bp, synthetic construct
  source 1..20: mol_type = other DNA
acattaaaagaactcttttt

SEQ ID NO: 118131 - DNA, 20 bp, synthetic construct
  source 1..20: mol_type = other DNA
aacattaaaagaactctttt

SEQ ID NO: 118132 - DNA, 20 bp, synthetic construct
  source 1..20: mol_type = other DNA
caacattaaaagaactcttt

SEQ ID NO: 118133 - DNA, 20 bp, synthetic construct
  source 1..20: mol_type = other DNA
ccaacattaaaagaactctt

SEQ ID NO: 118134 - DNA, 20 bp, synthetic construct
  source 1..20: mol_type = other DNA
tccaacattaaaagaactct

SEQ ID NO: 118135 - DNA, 20 bp, synthetic construct
  source 1..20: mol_type = other DNA
ttccaacattaaaagaactc

SEQ ID NO: 118136 - DNA, 20 bp, synthetic construct
  source 1..20: mol_type = other DNA
tttccaacattaaaagaact

SEQ ID NO: 118137 - DNA, 20 bp, synthetic construct
  source 1..20: mol_type = other DNA
ttttccaacattaaaagaac

SEQ ID NO: 118138 - DNA, 20 bp, synthetic construct
  source 1..20: mol_type = other DNA
attttccaacattaaaagaa

SEQ ID NO: 118139 - DNA, 20 bp, synthetic construct
  source 1..20: mol_type = other DNA
cattttccaacattaaaaga

SEQ ID NO: 118140 - DNA, 20 bp, synthetic construct
  source 1..20: mol_type = other DNA
gcattttccaacattaaaag

SEQ ID NO: 118141 - DNA, 20 bp, synthetic construct
  source 1..20: mol_type = other DNA
agcattttccaacattaaaa

SEQ ID NO: 118142 - DNA, 20 bp, synthetic construct
  source 1..20: mol_type = other DNA
tagcattttccaacattaaa

SEQ ID NO: 118143 - DNA, 20 bp, synthetic construct
  source 1..20: mol_type = other DNA
ttagcattttccaacattaa

SEQ ID NO: 118144 - DNA, 20 bp, synthetic construct
  source 1..20: mol_type = other DNA
tttagcattttccaacatta

SEQ ID NO: 118145 - DNA, 20 bp, synthetic construct
  source 1..20: mol_type = other DNA
ctttagcattttccaacatt

SEQ ID NO: 118146 - DNA, 20 bp, synthetic construct
  source 1..20: mol_type = other DNA
cctttagcattttccaacat

SEQ ID NO: 118147 - DNA, 20 bp, synthetic construct
  source 1..20: mol_type = other DNA
ccctttagcattttccaaca

SEQ ID NO: 118148 - DNA, 20 bp, synthetic construct
  source 1..20: mol_type = other DNA
accctttagcattttccaac

SEQ ID NO: 118149 - DNA, 20 bp, synthetic construct
  source 1..20: mol_type = other DNA
aaccctttagcattttccaa

SEQ ID NO: 118150 - DNA, 20 bp, synthetic construct
  source 1..20: mol_type = other DNA
aaaccctttagcattttcca

SEQ ID NO: 118151 - DNA, 20 bp, synthetic construct
  source 1..20: mol_type = other DNA
aaaaccctttagcattttcc

SEQ ID NO: 118152 - DNA, 20 bp, synthetic construct
  source 1..20: mol_type = other DNA
aaaaaccctttagcattttc

SEQ ID NO: 118153 - DNA, 20 bp, synthetic construct
  source 1..20: mol_type = other DNA
aaaaaaccctttagcatttt

SEQ ID NO: 118154 - DNA, 20 bp, synthetic construct
  source 1..20: mol_type = other DNA
aaaaaaaccctttagcattt

SEQ ID NO: 118155 - DNA, 20 bp, synthetic construct
  source 1..20: mol_type = other DNA
aaaaaaaaccctttagcatt

SEQ ID NO: 118156 - DNA, 20 bp, synthetic construct
  source 1..20: mol_type = other DNA
aaaaaaaaaccctttagcat

SEQ ID NO: 118157 - DNA, 20 bp, synthetic construct
  source 1..20: mol_type = other DNA
aaaaaaaaaaccctttagca

SEQ ID NO: 118158 - DNA, 20 bp, synthetic construct
  source 1..20: mol_type = other DNA
caaaaaaaaaaccctttagc

SEQ ID NO: 118159 - DNA, 20 bp, synthetic construct
  source 1..20: mol_type = other DNA
gcaaaaaaaaaaccctttag

SEQ ID NO: 118160 - DNA, 20 bp, synthetic construct
  source 1..20: mol_type = other DNA
ggcaaaaaaaaaacccttta

SEQ ID NO: 118161 - DNA, 20 bp, synthetic construct
  source 1..20: mol_type = other DNA
tggcaaaaaaaaaacccttt

SEQ ID NO: 118162 - DNA, 20 bp, synthetic construct
  source 1..20: mol_type = other DNA
ttggcaaaaaaaaaaccctt

SEQ ID NO: 118163 - DNA, 20 bp, synthetic construct
  source 1..20: mol_type = other DNA
gttggcaaaaaaaaaaccct

SEQ ID NO: 118164 - DNA, 20 bp, synthetic construct
  source 1..20: mol_type = other DNA
ggttggcaaaaaaaaaaccc

SEQ ID NO: 118165 - DNA, 20 bp, synthetic construct
  source 1..20: mol_type = other DNA
tggttggcaaaaaaaaaacc

SEQ ID NO: 118166 - DNA, 20 bp, synthetic construct
  source 1..20: mol_type = other DNA
ctggttggcaaaaaaaaaac

SEQ ID NO: 118167 - DNA, 20 bp, synthetic construct
  source 1..20: mol_type = other DNA
actggttggcaaaaaaaaaa

SEQ ID NO: 118168 - DNA, 20 bp, synthetic construct
  source 1..20: mol_type = other DNA
aactggttggcaaaaaaaaa

SEQ ID NO: 118169 - DNA, 20 bp, synthetic construct
  source 1..20: mol_type = other DNA
taactggttggcaaaaaaaa

SEQ ID NO: 118170 - DNA, 20 bp, synthetic construct
  source 1..20: mol_type = other DNA
ttaactggttggcaaaaaaa

SEQ ID NO: 118171 - DNA, 20 bp, synthetic construct
  source 1..20: mol_type = other DNA
attaactggttggcaaaaaa

SEQ ID NO: 118172 - DNA, 20 bp, synthetic construct
  source 1..20: mol_type = other DNA
aattaactggttggcaaaaa

SEQ ID NO: 118173 - DNA, 20 bp, synthetic construct
  source 1..20: mol_type = other DNA
aaattaactggttggcaaaa

SEQ ID NO: 118174 - DNA, 20 bp, synthetic construct
  source 1..20: mol_type = other DNA
taaattaactggttggcaaa

SEQ ID NO: 118175 - DNA, 20 bp, synthetic construct
  source 1..20: mol_type = other DNA
ctaaattaactggttggcaa

SEQ ID NO: 118176 - DNA, 20 bp, synthetic construct
  source 1..20: mol_type = other DNA
tctaaattaactggttggca

SEQ ID NO: 118177 - DNA, 20 bp, synthetic construct
  source 1..20: mol_type = other DNA
ctctaaattaactggttggc

SEQ ID NO: 118178 - DNA, 20 bp, synthetic construct
  source 1..20: mol_type = other DNA
actctaaattaactggttgg

SEQ ID NO: 118179 - DNA, 20 bp, synthetic construct
  source 1..20: mol_type = other DNA
cactctaaattaactggttg

SEQ ID NO: 118180 - DNA, 20 bp, synthetic construct
  source 1..20: mol_type = other DNA
tcactctaaattaactggtt

SEQ ID NO: 118181 - DNA, 20 bp, synthetic construct
  source 1..20: mol_type = other DNA
atcactctaaattaactggt

SEQ ID NO: 118182 - DNA, 20 bp, synthetic construct
  source 1..20: mol_type = other DNA
aatcactctaaattaactgg

SEQ ID NO: 118183 - DNA, 20 bp, synthetic construct
  source 1..20: mol_type = other DNA
taatcactctaaattaactg

SEQ ID NO: 118184 - DNA, 20 bp, synthetic construct
  source 1..20: mol_type = other DNA
ttaatcactctaaattaact

SEQ ID NO: 118185 - DNA, 20 bp, synthetic construct
  source 1..20: mol_type = other DNA
gttaatcactctaaattaac

SEQ ID NO: 118186 - DNA, 20 bp, synthetic construct
  source 1..20: mol_type = other DNA
agttaatcactctaaattaa

SEQ ID NO: 118187 - DNA, 20 bp, synthetic construct
  source 1..20: mol_type = other DNA
cagttaatcactctaaatta

SEQ ID NO: 118188 - DNA, 20 bp, synthetic construct
  source 1..20: mol_type = other DNA
gcagttaatcactctaaatt

SEQ ID NO: 118189 - DNA, 20 bp, synthetic construct
  source 1..20: mol_type = other DNA
agcagttaatcactctaaat

SEQ ID NO: 118190 - DNA, 20 bp, synthetic construct
  source 1..20: mol_type = other DNA
tagcagttaatcactctaaa

SEQ ID NO: 118191 - DNA, 20 bp, synthetic construct
  source 1..20: mol_type = other DNA
atagcagttaatcactctaa

SEQ ID NO: 118192 - DNA, 20 bp, synthetic construct
  source 1..20: mol_type = other DNA
gatagcagttaatcactcta

SEQ ID NO: 118193 - DNA, 20 bp, synthetic construct
  source 1..20: mol_type = other DNA
tgatagcagttaatcactct

SEQ ID NO: 118194 - DNA, 20 bp, synthetic construct
  source 1..20: mol_type = other DNA
ctgatagcagttaatcactc

SEQ ID NO: 118195 - DNA, 20 bp, synthetic construct
  source 1..20: mol_type = other DNA
actgatagcagttaatcact

SEQ ID NO: 118196 - DNA, 20 bp, synthetic construct
  source 1..20: mol_type = other DNA
aactgatagcagttaatcac

SEQ ID NO: 118197 - DNA, 20 bp, synthetic construct
  source 1..20: mol_type = other DNA
caactgatagcagttaatca

SEQ ID NO: 118198 - DNA, 20 bp, synthetic construct
  source 1..20: mol_type = other DNA
tcaactgatagcagttaatc

SEQ ID NO: 118199 - DNA, 20 bp, synthetic construct
  source 1..20: mol_type = other DNA
ctcaactgatagcagttaat

SEQ ID NO: 118200 - DNA, 20 bp, synthetic construct
  source 1..20: mol_type = other DNA
tctcaactgatagcagttaa

SEQ ID NO: 118201 - DNA, 20 bp, synthetic construct
  source 1..20: mol_type = other DNA
ttctcaactgatagcagtta

SEQ ID NO: 118202 - DNA, 20 bp, synthetic construct
  source 1..20: mol_type = other DNA
tttctcaactgatagcagtt

SEQ ID NO: 118203 - DNA, 20 bp, synthetic construct
  source 1..20: mol_type = other DNA
gtttctcaactgatagcagt

SEQ ID NO: 118204 - DNA, 20 bp, synthetic construct
  source 1..20: mol_type = other DNA
agtttctcaactgatagcag

SEQ ID NO: 118205 - DNA, 20 bp, synthetic construct
  source 1..20: mol_type = other DNA
tagtttctcaactgatagca

SEQ ID NO: 118206 - DNA, 20 bp, synthetic construct
  source 1..20: mol_type = other DNA
atagtttctcaactgatagc

SEQ ID NO: 118207 - DNA, 20 bp, synthetic construct
  source 1..20: mol_type = other DNA
tatagtttctcaactgatag

SEQ ID NO: 118208 - DNA, 20 bp, synthetic construct
  source 1..20: mol_type = other DNA
ctatagtttctcaactgata

SEQ ID NO: 118209 - DNA, 20 bp, synthetic construct
  source 1..20: mol_type = other DNA
tctatagtttctcaactgat

SEQ ID NO: 118210 - DNA, 20 bp, synthetic construct
  source 1..20: mol_type = other DNA
ttctatagtttctcaactga

SEQ ID NO: 118211 - DNA, 20 bp, synthetic construct
  source 1..20: mol_type = other DNA
tttctatagtttctcaactg

SEQ ID NO: 118212 - DNA, 20 bp, synthetic construct
  source 1..20: mol_type = other DNA
ctttctatagtttctcaact

SEQ ID NO: 118213 - DNA, 20 bp, synthetic construct
  source 1..20: mol_type = other DNA
actttctatagtttctcaac

SEQ ID NO: 118214 - DNA, 20 bp, synthetic construct
  source 1..20: mol_type = other DNA
tactttctatagtttctcaa

SEQ ID NO: 118215 - DNA, 20 bp, synthetic construct
  source 1..20: mol_type = other DNA
ctactttctatagtttctca

SEQ ID NO: 118216 - DNA, 20 bp, synthetic construct
  source 1..20: mol_type = other DNA
tctactttctatagtttctc

SEQ ID NO: 118217 - DNA, 20 bp, synthetic construct
  source 1..20: mol_type = other DNA
ttctactttctatagtttct

SEQ ID NO: 118218 - DNA, 20 bp, synthetic construct
  source 1..20: mol_type = other DNA
attctactttctatagtttc

SEQ ID NO: 118219 - DNA, 20 bp, synthetic construct
  source 1..20: mol_type = other DNA
tattctactttctatagttt

SEQ ID NO: 118220 - DNA, 20 bp, synthetic construct
  source 1..20: mol_type = other DNA
ttattctactttctatagtt

SEQ ID NO: 118221 - DNA, 20 bp, synthetic construct
  source 1..20: mol_type = other DNA
attattctactttctatagt

SEQ ID NO: 118222 - DNA, 20 bp, synthetic construct
  source 1..20: mol_type = other DNA
aattattctactttctatag

SEQ ID NO: 118223 - DNA, 20 bp, synthetic construct
  source 1..20: mol_type = other DNA
aaattattctactttctata

SEQ ID NO: 118224 - DNA, 20 bp, synthetic construct
  source 1..20: mol_type = other DNA
taaattattctactttctat

SEQ ID NO: 118225 - DNA, 20 bp, synthetic construct
  source 1..20: mol_type = other DNA
ataaattattctactttcta

SEQ ID NO: 118226 - DNA, 20 bp, synthetic construct
  source 1..20: mol_type = other DNA
tataaattattctactttct

SEQ ID NO: 118227 - DNA, 20 bp, synthetic construct
  source 1..20: mol_type = other DNA
gtataaattattctactttc

SEQ ID NO: 118228 - DNA, 20 bp, synthetic construct
  source 1..20: mol_type = other DNA
tgtataaattattctacttt

SEQ ID NO: 118229 - DNA, 20 bp, synthetic construct
  source 1..20: mol_type = other DNA
ctgtataaattattctactt

SEQ ID NO: 118230 - DNA, 20 bp, synthetic construct
  source 1..20: mol_type = other DNA
tctgtataaattattctact

SEQ ID NO: 118231 - DNA, 20 bp, synthetic construct
  source 1..20: mol_type = other DNA
ttctgtataaattattctac

SEQ ID NO: 118232 - DNA, 20 bp, synthetic construct
  source 1..20: mol_type = other DNA
tttctgtataaattattcta

SEQ ID NO: 118233 - DNA, 20 bp, synthetic construct
  source 1..20: mol_type = other DNA
ttttctgtataaattattct

SEQ ID NO: 118234 - DNA, 20 bp, synthetic construct
  source 1..20: mol_type = other DNA
cttttctgtataaattattc

SEQ ID NO: 118235 - DNA, 20 bp, synthetic construct
  source 1..20: mol_type = other DNA
tcttttctgtataaattatt

SEQ ID NO: 118236 - DNA, 20 bp, synthetic construct
  source 1..20: mol_type = other DNA
gtcttttctgtataaattat

SEQ ID NO: 118237 - DNA, 20 bp, synthetic construct
  source 1..20: mol_type = other DNA
tgtcttttctgtataaatta

SEQ ID NO: 118238 - DNA, 20 bp, synthetic construct
  source 1..20: mol_type = other DNA
atgtcttttctgtataaatt

SEQ ID NO: 118239 - DNA, 20 bp, synthetic construct
  source 1..20: mol_type = other DNA
aatgtcttttctgtataaat

SEQ ID NO: 118240 - DNA, 20 bp, synthetic construct
  source 1..20: mol_type = other DNA
aaatgtcttttctgtataaa

SEQ ID NO: 118241 - DNA, 20 bp, synthetic construct
  source 1..20: mol_type = other DNA
gaaatgtcttttctgtataa

SEQ ID NO: 118242 - DNA, 20 bp, synthetic construct
  source 1..20: mol_type = other DNA
agaaatgtcttttctgtata

SEQ ID NO: 118243 - DNA, 20 bp, synthetic construct
  source 1..20: mol_type = other DNA
gagaaatgtcttttctgtat

SEQ ID NO: 118244 - DNA, 20 bp, synthetic construct
  source 1..20: mol_type = other DNA
tgagaaatgtcttttctgta

SEQ ID NO: 118245 - DNA, 20 bp, synthetic construct
  source 1..20: mol_type = other DNA
ctgagaaatgtcttttctgt

SEQ ID NO: 118246 - DNA, 20 bp, synthetic construct
  source 1..20: mol_type = other DNA
actgagaaatgtcttttctg

SEQ ID NO: 118247 - DNA, 20 bp, synthetic construct
  source 1..20: mol_type = other DNA
cactgagaaatgtcttttct

SEQ ID NO: 118248 - DNA, 20 bp, synthetic construct
  source 1..20: mol_type = other DNA
gcactgagaaatgtcttttc

SEQ ID NO: 118249 - DNA, 20 bp, synthetic construct
  source 1..20: mol_type = other DNA
ggcactgagaaatgtctttt

SEQ ID NO: 118250 - DNA, 20 bp, synthetic construct
  source 1..20: mol_type = other DNA
gggcactgagaaatgtcttt

SEQ ID NO: 118251 - DNA, 20 bp, synthetic construct
  source 1..20: mol_type = other DNA
tgggcactgagaaatgtctt

SEQ ID NO: 118252 - DNA, 20 bp, synthetic construct
  source 1..20: mol_type = other DNA
ttgggcactgagaaatgtct

SEQ ID NO: 118253 - DNA, 20 bp, synthetic construct
  source 1..20: mol_type = other DNA
attgggcactgagaaatgtc

SEQ ID NO: 118254 - DNA, 20 bp, synthetic construct
  source 1..20: mol_type = other DNA
tattgggcactgagaaatgt

SEQ ID NO: 118255 - DNA, 20 bp, synthetic construct
  source 1..20: mol_type = other DNA
ttattgggcactgagaaatg

SEQ ID NO: 118256 - DNA, 20 bp, synthetic construct
  source 1..20: mol_type = other DNA
attattgggcactgagaaat

SEQ ID NO: 118257 - DNA, 20 bp, synthetic construct
  source 1..20: mol_type = other DNA
aattattgggcactgagaaa

SEQ ID NO: 118258 - DNA, 20 bp, synthetic construct
  source 1..20: mol_type = other DNA
caattattgggcactgagaa

SEQ ID NO: 118259 - DNA, 20 bp, synthetic construct
  source 1..20: mol_type = other DNA
gcaattattgggcactgaga

SEQ ID NO: 118260 - DNA, 20 bp, synthetic construct
  source 1..20: mol_type = other DNA
ggcaattattgggcactgag

SEQ ID NO: 118261 - DNA, 20 bp, synthetic construct
  source 1..20: mol_type = other DNA
aggcaattattgggcactga

SEQ ID NO: 118262 - DNA, 20 bp, synthetic construct
  source 1..20: mol_type = other DNA
aaggcaattattgggcactg

SEQ ID NO: 118263 - DNA, 20 bp, synthetic construct
  source 1..20: mol_type = other DNA
aaaggcaattattgggcact

SEQ ID NO: 118264 - DNA, 20 bp, synthetic construct
  source 1..20: mol_type = other DNA
gaaaggcaattattgggcac

SEQ ID NO: 118265 - DNA, 20 bp, synthetic construct
  source 1..20: mol_type = other DNA
agaaaggcaattattgggca

SEQ ID NO: 118266 - DNA, 20 bp, synthetic construct
  source 1..20: mol_type = other DNA
cagaaaggcaattattgggc

SEQ ID NO: 118267 - DNA, 20 bp, synthetic construct
  source 1..20: mol_type = other DNA
tcagaaaggcaattattggg

SEQ ID NO: 118268 - DNA, 20 bp, synthetic construct
  source 1..20: mol_type = other DNA
gtcagaaaggcaattattgg

SEQ ID NO: 118269 - DNA, 20 bp, synthetic construct
  source 1..20: mol_type = other DNA
tgtcagaaaggcaattattg

SEQ ID NO: 118270 - DNA, 20 bp, synthetic construct
  source 1..20: mol_type = other DNA
atgtcagaaaggcaattatt

SEQ ID NO: 118271 - DNA, 20 bp, synthetic construct
  source 1..20: mol_type = other DNA
tatgtcagaaaggcaattat

SEQ ID NO: 118272 - DNA, 20 bp, synthetic construct
  source 1..20: mol_type = other DNA
ttatgtcagaaaggcaatta

SEQ ID NO: 118273 - DNA, 20 bp, synthetic construct
  source 1..20: mol_type = other DNA
tttatgtcagaaaggcaatt

SEQ ID NO: 118274 - DNA, 20 bp, synthetic construct
  source 1..20: mol_type = other DNA
ctttatgtcagaaaggcaat

SEQ ID NO: 118275 - DNA, 20 bp, synthetic construct
  source 1..20: mol_type = other DNA
actttatgtcagaaaggcaa

SEQ ID NO: 118276 - DNA, 20 bp, synthetic construct
  source 1..20: mol_type = other DNA
aactttatgtcagaaaggca

SEQ ID NO: 118277 - DNA, 20 bp, synthetic construct
  source 1..20: mol_type = other DNA
aaactttatgtcagaaaggc

SEQ ID NO: 118278 - DNA, 20 bp, synthetic construct
  source 1..20: mol_type = other DNA
aaaactttatgtcagaaagg

SEQ ID NO: 118279 - DNA, 20 bp, synthetic construct
  source 1..20: mol_type = other DNA
gaaaactttatgtcagaaag

SEQ ID NO: 118280 - DNA, 20 bp, synthetic construct
  source 1..20: mol_type = other DNA
tgaaaactttatgtcagaaa

SEQ ID NO: 118281 - DNA, 20 bp, synthetic construct
  source 1..20: mol_type = other DNA
atgaaaactttatgtcagaa

SEQ ID NO: 118282 - DNA, 20 bp, synthetic construct
  source 1..20: mol_type = other DNA
aatgaaaactttatgtcaga

SEQ ID NO: 118283 - DNA, 20 bp, synthetic construct
  source 1..20: mol_type = other DNA
aaatgaaaactttatgtcag

SEQ ID NO: 118284 - DNA, 20 bp, synthetic construct
  source 1..20: mol_type = other DNA
aaaatgaaaactttatgtca

SEQ ID NO: 118285 - DNA, 20 bp, synthetic construct
  source 1..20: mol_type = other DNA
aaaaatgaaaactttatgtc

SEQ ID NO: 118286 - DNA, 20 bp, synthetic construct
  source 1..20: mol_type = other DNA
gaaaaatgaaaactttatgt

SEQ ID NO: 118287 - DNA, 20 bp, synthetic construct
  source 1..20: mol_type = other DNA
ggaaaaatgaaaactttatg

SEQ ID NO: 118288 - DNA, 20 bp, synthetic construct
  source 1..20: mol_type = other DNA
aggaaaaatgaaaactttat

SEQ ID NO: 118289 - DNA, 20 bp, synthetic construct
  source 1..20: mol_type = other DNA
caggaaaaatgaaaacttta

SEQ ID NO: 118290 - DNA, 20 bp, synthetic construct
  source 1..20: mol_type = other DNA
tcaggaaaaatgaaaacttt

SEQ ID NO: 118291 - DNA, 20 bp, synthetic construct
  source 1..20: mol_type = other DNA
ttcaggaaaaatgaaaactt

SEQ ID NO: 118292 - DNA, 20 bp, synthetic construct
  source 1..20: mol_type = other DNA
attcaggaaaaatgaaaact

SEQ ID NO: 118293 - DNA, 20 bp, synthetic construct
  source 1..20: mol_type = other DNA
aattcaggaaaaatgaaaac

SEQ ID NO: 118294 - DNA, 20 bp, synthetic construct
  source 1..20: mol_type = other DNA
taattcaggaaaaatgaaaa

SEQ ID NO: 118295 - DNA, 20 bp, synthetic construct
  source 1..20: mol_type = other DNA
ttaattcaggaaaaatgaaa

SEQ ID NO: 118296 - DNA, 20 bp, synthetic construct
  source 1..20: mol_type = other DNA
attaattcaggaaaaatgaa

SEQ ID NO: 118297 - DNA, 20 bp, synthetic construct
  source 1..20: mol_type = other DNA
tattaattcaggaaaaatga

SEQ ID NO: 118298 - DNA, 20 bp, synthetic construct
  source 1..20: mol_type = other DNA
ttattaattcaggaaaaatg

SEQ ID NO: 118299 - DNA, 20 bp, synthetic construct
  source 1..20: mol_type = other DNA
cttattaattcaggaaaaat

SEQ ID NO: 118300 - DNA, 20 bp, synthetic construct
  source 1..20: mol_type = other DNA
tcttattaattcaggaaaaa

SEQ ID NO: 118301 - DNA, 20 bp, synthetic construct
  source 1..20: mol_type = other DNA
atcttattaattcaggaaaa

SEQ ID NO: 118302 - DNA, 20 bp, synthetic construct
  source 1..20: mol_type = other DNA
aatcttattaattcaggaaa

SEQ ID NO: 118303 - DNA, 20 bp, synthetic construct
  source 1..20: mol_type = other DNA
aaatcttattaattcaggaa

SEQ ID NO: 118304 - DNA, 20 bp, synthetic construct
  source 1..20: mol_type = other DNA
gaaatcttattaattcagga

SEQ ID NO: 118305 - DNA, 20 bp, synthetic construct
  source 1..20: mol_type = other DNA
ggaaatcttattaattcagg

SEQ ID NO: 118306 - DNA, 20 bp, synthetic construct
  source 1..20: mol_type = other DNA
aggaaatcttattaattcag

SEQ ID NO: 118307 - DNA, 20 bp, synthetic construct
  source 1..20: mol_type = other DNA
gaggaaatcttattaattca

SEQ ID NO: 118308 - DNA, 20 bp, synthetic construct
  source 1..20: mol_type = other DNA
tgaggaaatcttattaattc

SEQ ID NO: 118309 - DNA, 20 bp, synthetic construct
  source 1..20: mol_type = other DNA
ttgaggaaatcttattaatt

SEQ ID NO: 118310 - DNA, 20 bp, synthetic construct
  source 1..20: mol_type = other DNA
attgaggaaatcttattaat

SEQ ID NO: 118311 - DNA, 20 bp, synthetic construct
  source 1..20: mol_type = other DNA
cattgaggaaatcttattaa

SEQ ID NO: 118312 - DNA, 20 bp, synthetic construct
  source 1..20: mol_type = other DNA
acattgaggaaatcttatta

SEQ ID NO: 118313 - DNA, 20 bp, synthetic construct
  source 1..20: mol_type = other DNA
cacattgaggaaatcttatt

SEQ ID NO: 118314 - DNA, 20 bp, synthetic construct
  source 1..20: mol_type = other DNA
acacattgaggaaatcttat

SEQ ID NO: 118315 - DNA, 20 bp, synthetic construct
  source 1..20: mol_type = other DNA
aacacattgaggaaatctta

SEQ ID NO: 118316 - DNA, 20 bp, synthetic construct
  source 1..20: mol_type = other DNA
aaacacattgaggaaatctt

SEQ ID NO: 118317 - DNA, 20 bp, synthetic construct
  source 1..20: mol_type = other DNA
aaaacacattgaggaaatct

SEQ ID NO: 118318 - DNA, 20 bp, synthetic construct
  source 1..20: mol_type = other DNA
aaaaacacattgaggaaatc

SEQ ID NO: 118319 - DNA, 20 bp, synthetic construct
  source 1..20: mol_type = other DNA
aaaaaacacattgaggaaat

SEQ ID NO: 118320 - DNA, 20 bp, synthetic construct
  source 1..20: mol_type = other DNA
aaaaaaacacattgaggaaa

SEQ ID NO: 118321 - DNA, 20 bp, synthetic construct
  source 1..20: mol_type = other DNA
caaaaaaacacattgaggaa

SEQ ID NO: 118322 - DNA, 20 bp, synthetic construct
  source 1..20: mol_type = other DNA
ccaaaaaaacacattgagga

SEQ ID NO: 118323 - DNA, 20 bp, synthetic construct
  source 1..20: mol_type = other DNA
cccaaaaaaacacattgagg

SEQ ID NO: 118324 - DNA, 20 bp, synthetic construct
  source 1..20: mol_type = other DNA
acccaaaaaaacacattgag

SEQ ID NO: 118325 - DNA, 20 bp, synthetic construct
  source 1..20: mol_type = other DNA
cacccaaaaaaacacattga

SEQ ID NO: 118326 - DNA, 20 bp, synthetic construct
  source 1..20: mol_type = other DNA
acacccaaaaaaacacattg

SEQ ID NO: 118327 - DNA, 20 bp, synthetic construct
  source 1..20: mol_type = other DNA
aacacccaaaaaaacacatt

SEQ ID NO: 118328 - DNA, 20 bp, synthetic construct
  source 1..20: mol_type = other DNA
aaacacccaaaaaaacacat

SEQ ID NO: 118329 - DNA, 20 bp, synthetic construct
  source 1..20: mol_type = other DNA
aaaacacccaaaaaaacaca

SEQ ID NO: 118330 - DNA, 20 bp, synthetic construct
  source 1..20: mol_type = other DNA
caaaacacccaaaaaaacac

SEQ ID NO: 118331 - DNA, 20 bp, synthetic construct
  source 1..20: mol_type = other DNA
acaaaacacccaaaaaaaca

SEQ ID NO: 118332 - DNA, 20 bp, synthetic construct
  source 1..20: mol_type = other DNA
cacaaaacacccaaaaaaac

SEQ ID NO: 118333 - DNA, 20 bp, synthetic construct
  source 1..20: mol_type = other DNA
acacaaaacacccaaaaaaa

SEQ ID NO: 118334 - DNA, 20 bp, synthetic construct
  source 1..20: mol_type = other DNA
cacacaaaacacccaaaaaa

SEQ ID NO: 118335 - DNA, 20 bp, synthetic construct
  source 1..20: mol_type = other DNA
acacacaaaacacccaaaaa

SEQ ID NO: 118336 - DNA, 20 bp, synthetic construct
  source 1..20: mol_type = other DNA
cacacacaaaacacccaaaa

SEQ ID NO: 118337 - DNA, 20 bp, synthetic construct
  source 1..20: mol_type = other DNA
acacacacaaaacacccaaa

SEQ ID NO: 118338 - DNA, 20 bp, synthetic construct
  source 1..20: mol_type = other DNA
cacacacacaaaacacccaa

SEQ ID NO: 118339 - DNA, 20 bp, synthetic construct
  source 1..20: mol_type = other DNA
acacacacacaaaacaccca

SEQ ID NO: 118340 - DNA, 20 bp, synthetic construct
  source 1..20: mol_type = other DNA
cacacacacacaaaacaccc

SEQ ID NO: 118341 - DNA, 20 bp, synthetic construct
  source 1..20: mol_type = other DNA
acacacacacacaaaacacc

SEQ ID NO: 118342 - DNA, 20 bp, synthetic construct
  source 1..20: mol_type = other DNA
cacacacacacacaaaacac

SEQ ID NO: 118343 - DNA, 20 bp, synthetic construct
  source 1..20: mol_type = other DNA
acacacacacacacaaaaca

SEQ ID NO: 118344 - DNA, 20 bp, synthetic construct
  source 1..20: mol_type = other DNA
cacacacacacacacaaaac

SEQ ID NO: 118345 - DNA, 20 bp, synthetic construct
  source 1..20: mol_type = other DNA
acacacacacacacacaaaa

SEQ ID NO: 118346 - DNA, 20 bp, synthetic construct
  source 1..20: mol_type = other DNA
cacacacacacacacacaaa

SEQ ID NO: 118347 - DNA, 20 bp, synthetic construct
  source 1..20: mol_type = other DNA
acacacacacacacacacaa

SEQ ID NO: 118348 - DNA, 20 bp, synthetic construct
  source 1..20: mol_type = other DNA
cacacacacacacacacaca

SEQ ID NO: 118349 - DNA, 20 bp, synthetic construct
  source 1..20: mol_type = other DNA
acacacacacacacacacac

SEQ ID NO: 118350 - DNA, 20 bp, synthetic construct
  source 1..20: mol_type = other DNA
cacacacacacacacacaca

SEQ ID NO: 118351 - DNA, 20 bp, synthetic construct
  source 1..20: mol_type = other DNA
acacacacacacacacacac

SEQ ID NO: 118352 - DNA, 20 bp, synthetic construct
  source 1..20: mol_type = other DNA
cacacacacacacacacaca

SEQ ID NO: 118353 - DNA, 20 bp, synthetic construct
  source 1..20: mol_type = other DNA
acacacacacacacacacac

SEQ ID NO: 118354 - DNA, 20 bp, synthetic construct
  source 1..20: mol_type = other DNA
cacacacacacacacacaca

SEQ ID NO: 118355 - DNA, 20 bp, synthetic construct
  source 1..20: mol_type = other DNA
acacacacacacacacacac

SEQ ID NO: 118356 - DNA, 20 bp, synthetic construct
  source 1..20: mol_type = other DNA
cacacacacacacacacaca

SEQ ID NO: 118357 - DNA, 20 bp, synthetic construct
  source 1..20: mol_type = other DNA
acacacacacacacacacac

SEQ ID NO: 118358 - DNA, 20 bp, synthetic construct
  source 1..20: mol_type = other DNA
cacacacacacacacacaca

SEQ ID NO: 118359 - DNA, 20 bp, synthetic construct
  source 1..20: mol_type = other DNA
acacacacacacacacacac

SEQ ID NO: 118360 - DNA, 20 bp, synthetic construct
  source 1..20: mol_type = other DNA
cacacacacacacacacaca

SEQ ID NO: 118361 - DNA, 20 bp, synthetic construct
  source 1..20: mol_type = other DNA
acacacacacacacacacac

SEQ ID NO: 118362 - DNA, 20 bp, synthetic construct
  source 1..20: mol_type = other DNA
cacacacacacacacacaca

SEQ ID NO: 118363 - DNA, 20 bp, synthetic construct
  source 1..20: mol_type = other DNA
acacacacacacacacacac

SEQ ID NO: 118364 - DNA, 20 bp, synthetic construct
  source 1..20: mol_type = other DNA
cacacacacacacacacaca

SEQ ID NO: 118365 - DNA, 20 bp, synthetic construct
  source 1..20: mol_type = other DNA
acacacacacacacacacac

SEQ ID NO: 118366 - DNA, 20 bp, synthetic construct
  source 1..20: mol_type = other DNA
cacacacacacacacacaca

SEQ ID NO: 118367 - DNA, 20 bp, synthetic construct
  source 1..20: mol_type = other DNA
acacacacacacacacacac

SEQ ID NO: 118368 - DNA, 20 bp, synthetic construct
  source 1..20: mol_type = other DNA
cacacacacacacacacaca

SEQ ID NO: 118369 - DNA, 20 bp, synthetic construct
  source 1..20: mol_type = other DNA
acacacacacacacacacac

SEQ ID NO: 118370 - DNA, 20 bp, synthetic construct
  source 1..20: mol_type = other DNA
cacacacacacacacacaca

SEQ ID NO: 118371 - DNA, 20 bp, synthetic construct
  source 1..20: mol_type = other DNA
acacacacacacacacacac

SEQ ID NO: 118372 - DNA, 20 bp, synthetic construct
  source 1..20: mol_type = other DNA
cacacacacacacacacaca

SEQ ID NO: 118373 - DNA, 20 bp, synthetic construct
  source 1..20: mol_type = other DNA
acacacacacacacacacac

SEQ ID NO: 118374 - DNA, 20 bp, synthetic construct
  source 1..20: mol_type = other DNA
tacacacacacacacacaca

SEQ ID NO: 118375 - DNA, 20 bp, synthetic construct
  source 1..20: mol_type = other DNA
atacacacacacacacacac

SEQ ID NO: 118376 - DNA, 20 bp, synthetic construct
  source 1..20: mol_type = other DNA
catacacacacacacacaca

SEQ ID NO: 118377 - DNA, 20 bp, synthetic construct
  source 1..20: mol_type = other DNA
acatacacacacacacacac

SEQ ID NO: 118378 - DNA, 20 bp, synthetic construct
  source 1..20: mol_type = other DNA
cacatacacacacacacaca

SEQ ID NO: 118379 - DNA, 20 bp, synthetic construct
  source 1..20: mol_type = other DNA
acacatacacacacacacac

SEQ ID NO: 118380 - DNA, 20 bp, synthetic construct
  source 1..20: mol_type = other DNA
aacacatacacacacacaca

SEQ ID NO: 118381 - DNA, 20 bp, synthetic construct
  source 1..20: mol_type = other DNA
aaacacatacacacacacac

SEQ ID NO: 118382 - DNA, 20 bp, synthetic construct
  source 1..20: mol_type = other DNA
caaacacatacacacacaca

SEQ ID NO: 118383 - DNA, 20 bp, synthetic construct
  source 1..20: mol_type = other DNA
tcaaacacatacacacacac

SEQ ID NO: 118384 - DNA, 20 bp, synthetic construct
  source 1..20: mol_type = other DNA
atcaaacacatacacacaca

SEQ ID NO: 118385 - DNA, 20 bp, synthetic construct
  source 1..20: mol_type = other DNA
tatcaaacacatacacacac

SEQ ID NO: 118386 - DNA, 20 bp, synthetic construct
  source 1..20: mol_type = other DNA
gtatcaaacacatacacaca

SEQ ID NO: 118387 - DNA, 20 bp, synthetic construct
  source 1..20: mol_type = other DNA
tgtatcaaacacatacacac

SEQ ID NO: 118388 - DNA, 20 bp, synthetic construct
  source 1..20: mol_type = other DNA
ctgtatcaaacacatacaca

SEQ ID NO: 118389 - DNA, 20 bp, synthetic construct
  source 1..20: mol_type = other DNA
cctgtatcaaacacatacac

SEQ ID NO: 118390 - DNA, 20 bp, synthetic construct
  source 1..20: mol_type = other DNA
ccctgtatcaaacacataca

SEQ ID NO: 118391 - DNA, 20 bp, synthetic construct
  source 1..20: mol_type = other DNA
accctgtatcaaacacatac

SEQ ID NO: 118392 - DNA, 20 bp, synthetic construct
  source 1..20: mol_type = other DNA
gaccctgtatcaaacacata

SEQ ID NO: 118393 - DNA, 20 bp, synthetic construct
  source 1..20: mol_type = other DNA
agaccctgtatcaaacacat

SEQ ID NO: 118394 - DNA, 20 bp, synthetic construct
  source 1..20: mol_type = other DNA
aagaccctgtatcaaacaca

SEQ ID NO: 118395 - DNA, 20 bp, synthetic construct
  source 1..20: mol_type = other DNA
caagaccctgtatcaaacac

SEQ ID NO: 118396 - DNA, 20 bp, synthetic construct
  source 1..20: mol_type = other DNA
gcaagaccctgtatcaaaca

SEQ ID NO: 118397 - DNA, 20 bp, synthetic construct
  source 1..20: mol_type = other DNA
agcaagaccctgtatcaaac

SEQ ID NO: 118398 - DNA, 20 bp, synthetic construct
  source 1..20: mol_type = other DNA
aagcaagaccctgtatcaaa

SEQ ID NO: 118399 - DNA, 20 bp, synthetic construct
  source 1..20: mol_type = other DNA
aaagcaagaccctgtatcaa

SEQ ID NO: 118400 - DNA, 20 bp, synthetic construct
  source 1..20: mol_type = other DNA
caaagcaagaccctgtatca

SEQ ID NO: 118401 - DNA, 20 bp, synthetic construct
  source 1..20: mol_type = other DNA
gcaaagcaagaccctgtatc

SEQ ID NO: 118402 - DNA, 20 bp, synthetic construct
  source 1..20: mol_type = other DNA
agcaaagcaagaccctgtat

SEQ ID NO: 118403 - DNA, 20 bp, synthetic construct
  source 1..20: mol_type = other DNA
cagcaaagcaagaccctgta

SEQ ID NO: 118404 - DNA, 20 bp, synthetic construct
  source 1..20: mol_type = other DNA
gcagcaaagcaagaccctgt

SEQ ID NO: 118405 - DNA, 20 bp, synthetic construct
  source 1..20: mol_type = other DNA
agcagcaaagcaagaccctg

SEQ ID NO: 118406 - DNA, 20 bp, synthetic construct
  source 1..20: mol_type = other DNA
cagcagcaaagcaagaccct

SEQ ID NO: 118407 - DNA, 20 bp, synthetic construct
  source 1..20: mol_type = other DNA
tcagcagcaaagcaagaccc

SEQ ID NO: 118408 - DNA, 20 bp, synthetic construct
  source 1..20: mol_type = other DNA
ctcagcagcaaagcaagacc

SEQ ID NO: 118409 - DNA, 20 bp, synthetic construct
  source 1..20: mol_type = other DNA
cctcagcagcaaagcaagac

SEQ ID NO: 118410 - DNA, 20 bp, synthetic construct
  source 1..20: mol_type = other DNA
gcctcagcagcaaagcaaga

SEQ ID NO: 118411 - DNA, 20 bp, synthetic construct
  source 1..20: mol_type = other DNA
agcctcagcagcaaagcaag

SEQ ID NO: 118412 - DNA, 20 bp, synthetic construct
  source 1..20: mol_type = other DNA
cagcctcagcagcaaagcaa

SEQ ID NO: 118413 - DNA, 20 bp, synthetic construct
  source 1..20: mol_type = other DNA
ccagcctcagcagcaaagca

SEQ ID NO: 118414 - DNA, 20 bp, synthetic construct
  source 1..20: mol_type = other DNA
tccagcctcagcagcaaagc

SEQ ID NO: 118415 - DNA, 20 bp, synthetic construct
  source 1..20: mol_type = other DNA
ttccagcctcagcagcaaag

SEQ ID NO: 118416 - DNA, 20 bp, synthetic construct
  source 1..20: mol_type = other DNA
gttccagcctcagcagcaaa

SEQ ID NO: 118417 - DNA, 20 bp, synthetic construct
  source 1..20: mol_type = other DNA
cgttccagcctcagcagcaa

SEQ ID NO: 118418 - DNA, 20 bp, synthetic construct
  source 1..20: mol_type = other DNA
gcgttccagcctcagcagca

SEQ ID NO: 118419 - DNA, 20 bp, synthetic construct
  source 1..20: mol_type = other DNA
tgcgttccagcctcagcagc

SEQ ID NO: 118420 - DNA, 20 bp, synthetic construct
  source 1..20: mol_type = other DNA
ctgcgttccagcctcagcag

SEQ ID NO: 118421 - DNA, 20 bp, synthetic construct
  source 1..20: mol_type = other DNA
actgcgttccagcctcagca

SEQ ID NO: 118422 - DNA, 20 bp, synthetic construct
  source 1..20: mol_type = other DNA
cactgcgttccagcctcagc

SEQ ID NO: 118423 - DNA, 20 bp, synthetic construct
  source 1..20: mol_type = other DNA
ccactgcgttccagcctcag

SEQ ID NO: 118424 - DNA, 20 bp, synthetic construct
  source 1..20: mol_type = other DNA
gccactgcgttccagcctca

SEQ ID NO: 118425 - DNA, 20 bp, synthetic construct
  source 1..20: mol_type = other DNA
cgccactgcgttccagcctc

SEQ ID NO: 118426 - DNA, 20 bp, synthetic construct
  source 1..20: mol_type = other DNA
gcgccactgcgttccagcct

SEQ ID NO: 118427 - DNA, 20 bp, synthetic construct
  source 1..20: mol_type = other DNA
agcgccactgcgttccagcc

SEQ ID NO: 118428 - DNA, 20 bp, synthetic construct
  source 1..20: mol_type = other DNA
tagcgccactgcgttccagc

SEQ ID NO: 118429 - DNA, 20 bp, synthetic construct
  source 1..20: mol_type = other DNA
atagcgccactgcgttccag

SEQ ID NO: 118430 - DNA, 20 bp, synthetic construct
  source 1..20: mol_type = other DNA
gatagcgccactgcgttcca

SEQ ID NO: 118431 - DNA, 20 bp, synthetic construct
  source 1..20: mol_type = other DNA
tgatagcgccactgcgttcc

SEQ ID NO: 118432 - DNA, 20 bp, synthetic construct
  source 1..20: mol_type = other DNA
atgatagcgccactgcgttc

SEQ ID NO: 118433 - DNA, 20 bp, synthetic construct
  source 1..20: mol_type = other DNA
catgatagcgccactgcgtt

SEQ ID NO: 118434 - DNA, 20 bp, synthetic construct
  source 1..20: mol_type = other DNA
ccatgatagcgccactgcgt

SEQ ID NO: 118435 - DNA, 20 bp, synthetic construct
  source 1..20: mol_type = other DNA
gccatgatagcgccactgcg

SEQ ID NO: 118436 - DNA, 20 bp, synthetic construct
  source 1..20: mol_type = other DNA
agccatgatagcgccactgc

SEQ ID NO: 118437 - DNA, 20 bp, synthetic construct
  source 1..20: mol_type = other DNA
gagccatgatagcgccactg

SEQ ID NO: 118438 - DNA, 20 bp, synthetic construct
  source 1..20: mol_type = other DNA
tgagccatgatagcgccact

SEQ ID NO: 118439 - DNA, 20 bp, synthetic construct
  source 1..20: mol_type = other DNA
ttgagccatgatagcgccac

SEQ ID NO: 118440 - DNA, 20 bp, synthetic construct
  source 1..20: mol_type = other DNA
attgagccatgatagcgcca

SEQ ID NO: 118441 - DNA, 20 bp, synthetic construct
  source 1..20: mol_type = other DNA
cattgagccatgatagcgcc

SEQ ID NO: 118442 - DNA, 20 bp, synthetic construct
  source 1..20: mol_type = other DNA
gcattgagccatgatagcgc

SEQ ID NO: 118443 - DNA, 20 bp, synthetic construct
  source 1..20: mol_type = other DNA
tgcattgagccatgatagcg

SEQ ID NO: 118444 - DNA, 20 bp, synthetic construct
  source 1..20: mol_type = other DNA
ctgcattgagccatgatagc

SEQ ID NO: 118445 - DNA, 20 bp, synthetic construct
  source 1..20: mol_type = other DNA
gctgcattgagccatgatag

SEQ ID NO: 118446 - DNA, 20 bp, synthetic construct
  source 1..20: mol_type = other DNA
ggctgcattgagccatgata

SEQ ID NO: 118447 - DNA, 20 bp, synthetic construct
  source 1..20: mol_type = other DNA
aggctgcattgagccatgat

SEQ ID NO: 118448 - DNA, 20 bp, synthetic construct
  source 1..20: mol_type = other DNA
aaggctgcattgagccatga

SEQ ID NO: 118449 - DNA, 20 bp, synthetic construct
  source 1..20: mol_type = other DNA
caaggctgcattgagccatg

SEQ ID NO: 118450 - DNA, 20 bp, synthetic construct
  source 1..20: mol_type = other DNA
tcaaggctgcattgagccat

SEQ ID NO: 118451 - DNA, 20 bp, synthetic construct
  source 1..20: mol_type = other DNA
gtcaaggctgcattgagcca

SEQ ID NO: 118452 - DNA, 20 bp, synthetic construct
  source 1..20: mol_type = other DNA
ggtcaaggctgcattgagcc

SEQ ID NO: 118453 - DNA, 20 bp, synthetic construct
  source 1..20: mol_type = other DNA
aggtcaaggctgcattgagc

SEQ ID NO: 118454 - DNA, 20 bp, synthetic construct
  source 1..20: mol_type = other DNA
gaggtcaaggctgcattgag

SEQ ID NO: 118455 - DNA, 20 bp, synthetic construct
  source 1..20: mol_type = other DNA
ggaggtcaaggctgcattga

SEQ ID NO: 118456 - DNA, 20 bp, synthetic construct
  source 1..20: mol_type = other DNA
aggaggtcaaggctgcattg

SEQ ID NO: 118457 - DNA, 20 bp, synthetic construct
  source 1..20: mol_type = other DNA
caggaggtcaaggctgcatt

SEQ ID NO: 118458 - DNA, 20 bp, synthetic construct
  source 1..20: mol_type = other DNA
ccaggaggtcaaggctgcat

SEQ ID NO: 118459 - DNA, 20 bp, synthetic construct
  source 1..20: mol_type = other DNA
cccaggaggtcaaggctgca

SEQ ID NO: 118460 - DNA, 20 bp, synthetic construct
  source 1..20: mol_type = other DNA
gcccaggaggtcaaggctgc

SEQ ID NO: 118461 - DNA, 20 bp, synthetic construct
  source 1..20: mol_type = other DNA
agcccaggaggtcaaggctg

SEQ ID NO: 118462 - DNA, 20 bp, synthetic construct
  source 1..20: mol_type = other DNA
gagcccaggaggtcaaggct

SEQ ID NO: 118463 - DNA, 20 bp, synthetic construct
  source 1..20: mol_type = other DNA
tgagcccaggaggtcaaggc

SEQ ID NO: 118464 - DNA, 20 bp, synthetic construct
  source 1..20: mol_type = other DNA
ttgagcccaggaggtcaagg

SEQ ID NO: 118465 - DNA, 20 bp, synthetic construct
  source 1..20: mol_type = other DNA
cttgagcccaggaggtcaag

SEQ ID NO: 118466 - DNA, 20 bp, synthetic construct
  source 1..20: mol_type = other DNA
gcttgagcccaggaggtcaa

SEQ ID NO: 118467 - DNA, 20 bp, synthetic construct
  source 1..20: mol_type = other DNA
cgcttgagcccaggaggtca

SEQ ID NO: 118468 - DNA, 20 bp, synthetic construct
  source 1..20: mol_type = other DNA
tcgcttgagcccaggaggtc

SEQ ID NO: 118469 - DNA, 20 bp, synthetic construct
  source 1..20: mol_type = other DNA
atcgcttgagcccaggaggt

SEQ ID NO: 118470 - DNA, 20 bp, synthetic construct
  source 1..20: mol_type = other DNA
gatcgcttgagcccaggagg

SEQ ID NO: 118471 - DNA, 20 bp, synthetic construct
  source 1..20: mol_type = other DNA
ggatcgcttgagcccaggag

SEQ ID NO: 118472 - DNA, 20 bp, synthetic construct
  source 1..20: mol_type = other DNA
aggatcgcttgagcccagga

SEQ ID NO: 118473 - DNA, 20 bp, synthetic construct
  source 1..20: mol_type = other DNA
gaggatcgcttgagcccagg

SEQ ID NO: 118474 - DNA, 20 bp, synthetic construct
  source 1..20: mol_type = other DNA
ggaggatcgcttgagcccag

SEQ ID NO: 118475 - DNA, 20 bp, synthetic construct
  source 1..20: mol_type = other DNA
gggaggatcgcttgagccca

SEQ ID NO: 118476 - DNA, 20 bp, synthetic construct
  source 1..20: mol_type = other DNA
agggaggatcgcttgagccc

SEQ ID NO: 118477 - DNA, 20 bp, synthetic construct
  source 1..20: mol_type = other DNA
aagggaggatcgcttgagcc

SEQ ID NO: 118478 - DNA, 20 bp, synthetic construct
  source 1..20: mol_type = other DNA
gaagggaggatcgcttgagc

SEQ ID NO: 118479 - DNA, 20 bp, synthetic construct
  source 1..20: mol_type = other DNA
agaagggaggatcgcttgag

SEQ ID NO: 118480 - DNA, 20 bp, synthetic construct
  source 1..20: mol_type = other DNA
gagaagggaggatcgcttga

SEQ ID NO: 118481 - DNA, 20 bp, synthetic construct
  source 1..20: mol_type = other DNA
tgagaagggaggatcgcttg

SEQ ID NO: 118482 - DNA, 20 bp, synthetic construct
  source 1..20: mol_type = other DNA
ctgagaagggaggatcgctt

SEQ ID NO: 118483 - DNA, 20 bp, synthetic construct
  source 1..20: mol_type = other DNA
actgagaagggaggatcgct

SEQ ID NO: 118484 - DNA, 20 bp, synthetic construct
  source 1..20: mol_type = other DNA
gactgagaagggaggatcgc

SEQ ID NO: 118485 - DNA, 20 bp, synthetic construct
  source 1..20: mol_type = other DNA
ggactgagaagggaggatcg

SEQ ID NO: 118486 - DNA, 20 bp, synthetic construct
  source 1..20: mol_type = other DNA
gggactgagaagggaggatc

SEQ ID NO: 118487 - DNA, 20 bp, synthetic construct
  source 1..20: mol_type = other DNA
ggggactgagaagggaggat

SEQ ID NO: 118488 - DNA, 20 bp, synthetic construct
  source 1..20: mol_type = other DNA
aggggactgagaagggagga

SEQ ID NO: 118489 - DNA, 20 bp, synthetic construct
  source 1..20: mol_type = other DNA
caggggactgagaagggagg

SEQ ID NO: 118490 - DNA, 20 bp, synthetic construct
  source 1..20: mol_type = other DNA
ccaggggactgagaagggag

SEQ ID NO: 118491 - DNA, 20 bp, synthetic construct
  source 1..20: mol_type = other DNA
tccaggggactgagaaggga

SEQ ID NO: 118492 - DNA, 20 bp, synthetic construct
  source 1..20: mol_type = other DNA
atccaggggactgagaaggg

SEQ ID NO: 118493 - DNA, 20 bp, synthetic construct
  source 1..20: mol_type = other DNA
tatccaggggactgagaagg

SEQ ID NO: 118494 - DNA, 20 bp, synthetic construct
  source 1..20: mol_type = other DNA
ctatccaggggactgagaag

SEQ ID NO: 118495 - DNA, 20 bp, synthetic construct
  source 1..20: mol_type = other DNA
gctatccaggggactgagaa

SEQ ID NO: 118496 - DNA, 20 bp, synthetic construct
  source 1..20: mol_type = other DNA
cgctatccaggggactgaga

SEQ ID NO: 118497 - DNA, 20 bp, synthetic construct
  source 1..20: mol_type = other DNA
ccgctatccaggggactgag

SEQ ID NO: 118498 - DNA, 20 bp, synthetic construct
  source 1..20: mol_type = other DNA
cccgctatccaggggactga

SEQ ID NO: 118499 - DNA, 20 bp, synthetic construct
  source 1..20: mol_type = other DNA
ccccgctatccaggggactg

SEQ ID NO: 118500 - DNA, 20 bp, synthetic construct
  source 1..20: mol_type = other DNA
cccccgctatccaggggact

SEQ ID NO: 118501 - DNA, 20 bp, synthetic construct
  source 1..20: mol_type = other DNA
gcccccgctatccaggggac

SEQ ID NO: 118502 - DNA, 20 bp, synthetic construct
  source 1..20: mol_type = other DNA
agcccccgctatccagggga

SEQ ID NO: 118503 - DNA, 20 bp, synthetic construct
  source 1..20: mol_type = other DNA
tagcccccgctatccagggg

SEQ ID NO: 118504 - DNA, 20 bp, synthetic construct
  source 1..20: mol_type = other DNA
gtagcccccgctatccaggg

SEQ ID NO: 118505 - DNA, 20 bp, synthetic construct
  source 1..20: mol_type = other DNA
tgtagcccccgctatccagg

SEQ ID NO: 118506 - DNA, 20 bp, synthetic construct
  source 1..20: mol_type = other DNA
ctgtagcccccgctatccag

SEQ ID NO: 118507 - DNA, 20 bp, synthetic construct
  source 1..20: mol_type = other DNA
cctgtagcccccgctatcca

SEQ ID NO: 118508 - DNA, 20 bp, synthetic construct
  source 1..20: mol_type = other DNA
acctgtagcccccgctatcc

SEQ ID NO: 118509 - DNA, 20 bp, synthetic construct
  source 1..20: mol_type = other DNA
cacctgtagcccccgctatc

SEQ ID NO: 118510 - DNA, 20 bp, synthetic construct
  source 1..20: mol_type = other DNA
gcacctgtagcccccgctat

SEQ ID NO: 118511 - DNA, 20 bp, synthetic construct
  source 1..20: mol_type = other DNA
tgcacctgtagcccccgcta

SEQ ID NO: 118512 - DNA, 20 bp, synthetic construct
  source 1..20: mol_type = other DNA
gtgcacctgtagcccccgct

SEQ ID NO: 118513 - DNA, 20 bp, synthetic construct
  source 1..20: mol_type = other DNA
tgtgcacctgtagcccccgc

SEQ ID NO: 118514 - DNA, 20 bp, synthetic construct
  source 1..20: mol_type = other DNA
gtgtgcacctgtagcccccg

SEQ ID NO: 118515 - DNA, 20 bp, synthetic construct
  source 1..20: mol_type = other DNA
ggtgtgcacctgtagccccc

SEQ ID NO: 118516 - DNA, 20 bp, synthetic construct
  source 1..20: mol_type = other DNA
tggtgtgcacctgtagcccc

SEQ ID NO: 118517 - DNA, 20 bp, synthetic construct
  source 1..20: mol_type = other DNA
gtggtgtgcacctgtagccc

SEQ ID NO: 118518 - DNA, 20 bp, synthetic construct
  source 1..20: mol_type = other DNA
ggtggtgtgcacctgtagcc

SEQ ID NO: 118519 - DNA, 20 bp, synthetic construct
  source 1..20: mol_type = other DNA
tggtggtgtgcacctgtagc

SEQ ID NO: 118520 - DNA, 20 bp, synthetic construct
  source 1..20: mol_type = other DNA
gtggtggtgtgcacctgtag

SEQ ID NO: 118521 - DNA, 20 bp, synthetic construct
  source 1..20: mol_type = other DNA
tgtggtggtgtgcacctgta

SEQ ID NO: 118522 - DNA, 20 bp, synthetic construct
  source 1..20: mol_type = other DNA
gtgtggtggtgtgcacctgt

SEQ ID NO: 118523 - DNA, 20 bp, synthetic construct
  source 1..20: mol_type = other DNA
ggtgtggtggtgtgcacctg

SEQ ID NO: 118524 - DNA, 20 bp, synthetic construct
  source 1..20: mol_type = other DNA
aggtgtggtggtgtgcacct

SEQ ID NO: 118525 - DNA, 20 bp, synthetic construct
  source 1..20: mol_type = other DNA
taggtgtggtggtgtgcacc

SEQ ID NO: 118526 - DNA, 20 bp, synthetic construct
  source 1..20: mol_type = other DNA
ctaggtgtggtggtgtgcac

SEQ ID NO: 118527 - DNA, 20 bp, synthetic construct
  source 1..20: mol_type = other DNA
gctaggtgtggtggtgtgca

SEQ ID NO: 118528 - DNA, 20 bp, synthetic construct
  source 1..20: mol_type = other DNA
agctaggtgtggtggtgtgc

SEQ ID NO: 118529 - DNA, 20 bp, synthetic construct
  source 1..20: mol_type = other DNA
tagctaggtgtggtggtgtg

SEQ ID NO: 118530 - DNA, 20 bp, synthetic construct
  source 1..20: mol_type = other DNA
ttagctaggtgtggtggtgt

SEQ ID NO: 118531 - DNA, 20 bp, synthetic construct
  source 1..20: mol_type = other DNA
attagctaggtgtggtggtg

SEQ ID NO: 118532 - DNA, 20 bp, synthetic construct
  source 1..20: mol_type = other DNA
aattagctaggtgtggtggt

SEQ ID NO: 118533 - DNA, 20 bp, synthetic construct
  source 1..20: mol_type = other DNA
aaattagctaggtgtggtgg

SEQ ID NO: 118534 - DNA, 20 bp, synthetic construct
  source 1..20: mol_type = other DNA
aaaattagctaggtgtggtg

SEQ ID NO: 118535 - DNA, 20 bp, synthetic construct
  source 1..20: mol_type = other DNA
aaaaattagctaggtgtggt

SEQ ID NO: 118536 - DNA, 20 bp, synthetic construct
  source 1..20: mol_type = other DNA
caaaaattagctaggtgtgg

SEQ ID NO: 118537 - DNA, 20 bp, synthetic construct
  source 1..20: mol_type = other DNA
acaaaaattagctaggtgtg

SEQ ID NO: 118538 - DNA, 20 bp, synthetic construct
  source 1..20: mol_type = other DNA
tacaaaaattagctaggtgt

SEQ ID NO: 118539 - DNA, 20 bp, synthetic construct
  source 1..20: mol_type = other DNA
atacaaaaattagctaggtg

SEQ ID NO: 118540 - DNA, 20 bp, synthetic construct
  source 1..20: mol_type = other DNA
aatacaaaaattagctaggt

SEQ ID NO: 118541 - DNA, 20 bp, synthetic construct
  source 1..20: mol_type = other DNA
aaatacaaaaattagctagg

SEQ ID NO: 118542 - DNA, 20 bp, synthetic construct
  source 1..20: mol_type = other DNA
aaaatacaaaaattagctag

SEQ ID NO: 118543 - DNA, 20 bp, synthetic construct
  source 1..20: mol_type = other DNA
aaaaatacaaaaattagcta

SEQ ID NO: 118544 - DNA, 20 bp, synthetic construct
  source 1..20: mol_type = other DNA
aaaaaatacaaaaattagct

SEQ ID NO: 118545 - DNA, 20 bp, synthetic construct
  source 1..20: mol_type = other DNA
caaaaaatacaaaaattagc

SEQ ID NO: 118546 - DNA, 20 bp, synthetic construct
  source 1..20: mol_type = other DNA
acaaaaaatacaaaaattag

SEQ ID NO: 118547 - DNA, 20 bp, synthetic construct
  source 1..20: mol_type = other DNA
tacaaaaaatacaaaaatta

SEQ ID NO: 118548 - DNA, 20 bp, synthetic construct
  source 1..20: mol_type = other DNA
ctacaaaaaatacaaaaatt

SEQ ID NO: 118549 - DNA, 20 bp, synthetic construct
  source 1..20: mol_type = other DNA
tctacaaaaaatacaaaaat

SEQ ID NO: 118550 - DNA, 20 bp, synthetic construct
  source 1..20: mol_type = other DNA
ctctacaaaaaatacaaaaa

SEQ ID NO: 118551 - DNA, 20 bp, synthetic construct
  source 1..20: mol_type = other DNA
tctctacaaaaaatacaaaa

SEQ ID NO: 118552 - DNA, 20 bp, synthetic construct
  source 1..20: mol_type = other DNA
atctctacaaaaaatacaaa

SEQ ID NO: 118553 - DNA, 20 bp, synthetic construct
  source 1..20: mol_type = other DNA
catctctacaaaaaatacaa

SEQ ID NO: 118554 - DNA, 20 bp, synthetic construct
  source 1..20: mol_type = other DNA
ccatctctacaaaaaataca

SEQ ID NO: 118555 - DNA, 20 bp, synthetic construct
  source 1..20: mol_type = other DNA
cccatctctacaaaaaatac

SEQ ID NO: 118556 - DNA, 20 bp, synthetic construct
  source 1..20: mol_type = other DNA
acccatctctacaaaaaata

SEQ ID NO: 118557 - DNA, 20 bp, synthetic construct
  source 1..20: mol_type = other DNA
aacccatctctacaaaaaat

SEQ ID NO: 118558 - DNA, 20 bp, synthetic construct
  source 1..20: mol_type = other DNA
aaacccatctctacaaaaaa

SEQ ID NO: 118559 - DNA, 20 bp, synthetic construct
  source 1..20: mol_type = other DNA
aaaacccatctctacaaaaa

SEQ ID NO: 118560 - DNA, 20 bp, synthetic construct
  source 1..20: mol_type = other DNA
caaaacccatctctacaaaa

SEQ ID NO: 118561 - DNA, 20 bp, synthetic construct
  source 1..20: mol_type = other DNA
gcaaaacccatctctacaaa

SEQ ID NO: 118562 - DNA, 20 bp, synthetic construct
  source 1..20: mol_type = other DNA
ggcaaaacccatctctacaa

SEQ ID NO: 118563 - DNA, 20 bp, synthetic construct
  source 1..20: mol_type = other DNA
tggcaaaacccatctctaca

SEQ ID NO: 118564 - DNA, 20 bp, synthetic construct
  source 1..20: mol_type = other DNA
atggcaaaacccatctctac

SEQ ID NO: 118565 - DNA, 20 bp, synthetic construct
  source 1..20: mol_type = other DNA
catggcaaaacccatctcta

SEQ ID NO: 118566 - DNA, 20 bp, synthetic construct
  source 1..20: mol_type = other DNA
acatggcaaaacccatctct

SEQ ID NO: 118567 - DNA, 20 bp, synthetic construct
  source 1..20: mol_type = other DNA
aacatggcaaaacccatctc

SEQ ID NO: 118568 - DNA, 20 bp, synthetic construct
  source 1..20: mol_type = other DNA
caacatggcaaaacccatct

SEQ ID NO: 118569 - DNA, 20 bp, synthetic construct
  source 1..20: mol_type = other DNA
gcaacatggcaaaacccatc

SEQ ID NO: 118570 - DNA, 20 bp, synthetic construct
  source 1..20: mol_type = other DNA
ggcaacatggcaaaacccat

SEQ ID NO: 118571 - DNA, 20 bp, synthetic construct
  source 1..20: mol_type = other DNA
aggcaacatggcaaaaccca

SEQ ID NO: 118572 - DNA, 20 bp, synthetic construct
  source 1..20: mol_type = other DNA
taggcaacatggcaaaaccc

SEQ ID NO: 118573 - DNA, 20 bp, synthetic construct
  source 1..20: mol_type = other DNA
ctaggcaacatggcaaaacc

SEQ ID NO: 118574 - DNA, 20 bp, synthetic construct
  source 1..20: mol_type = other DNA
cctaggcaacatggcaaaac

SEQ ID NO: 118575 - DNA, 20 bp, synthetic construct
  source 1..20: mol_type = other DNA
gcctaggcaacatggcaaaa

SEQ ID NO: 118576 - DNA, 20 bp, synthetic construct
  source 1..20: mol_type = other DNA
agcctaggcaacatggcaaa

SEQ ID NO: 118577 - DNA, 20 bp, synthetic construct
  source 1..20: mol_type = other DNA
cagcctaggcaacatggcaa

SEQ ID NO: 118578 - DNA, 20 bp, synthetic construct
  source 1..20: mol_type = other DNA
ccagcctaggcaacatggca

SEQ ID NO: 118579 - DNA, 20 bp, synthetic construct
  source 1..20: mol_type = other DNA
accagcctaggcaacatggc

SEQ ID NO: 118580 - DNA, 20 bp, synthetic construct
  source 1..20: mol_type = other DNA
gaccagcctaggcaacatgg

SEQ ID NO: 118581 - DNA, 20 bp, synthetic construct
  source 1..20: mol_type = other DNA
agaccagcctaggcaacatg

SEQ ID NO: 118582 - DNA, 20 bp, synthetic construct
  source 1..20: mol_type = other DNA
gagaccagcctaggcaacat

SEQ ID NO: 118583 - DNA, 20 bp, synthetic construct
  source 1..20: mol_type = other DNA
tgagaccagcctaggcaaca

SEQ ID NO: 118584 - DNA, 20 bp, synthetic construct
  source 1..20: mol_type = other DNA
ttgagaccagcctaggcaac

SEQ ID NO: 118585 - DNA, 20 bp, synthetic construct
  source 1..20: mol_type = other DNA
tttgagaccagcctaggcaa

SEQ ID NO: 118586 - DNA, 20 bp, synthetic construct
  source 1..20: mol_type = other DNA
gtttgagaccagcctaggca

SEQ ID NO: 118587 - DNA, 20 bp, synthetic construct
  source 1..20: mol_type = other DNA
agtttgagaccagcctaggc

SEQ ID NO: 118588 - DNA, 20 bp, synthetic construct
  source 1..20: mol_type = other DNA
gagtttgagaccagcctagg

SEQ ID NO: 118589 - DNA, 20 bp, synthetic construct
  source 1..20: mol_type = other DNA
ggagtttgagaccagcctag

SEQ ID NO: 118590 - DNA, 20 bp, synthetic construct
  source 1..20: mol_type = other DNA
aggagtttgagaccagccta

SEQ ID NO: 118591 - DNA, 20 bp, synthetic construct
  source 1..20: mol_type = other DNA
caggagtttgagaccagcct

SEQ ID NO: 118592 - DNA, 20 bp, synthetic construct
  source 1..20: mol_type = other DNA
ccaggagtttgagaccagcc

SEQ ID NO: 118593 - DNA, 20 bp, synthetic construct
  source 1..20: mol_type = other DNA
cccaggagtttgagaccagc

SEQ ID NO: 118594 - DNA, 20 bp, synthetic construct
  source 1..20: mol_type = other DNA
gcccaggagtttgagaccag

SEQ ID NO: 118595 - DNA, 20 bp, synthetic construct
  source 1..20: mol_type = other DNA
agcccaggagtttgagacca

SEQ ID NO: 118596 - DNA, 20 bp, synthetic construct
  source 1..20: mol_type = other DNA
gagcccaggagtttgagacc

SEQ ID NO: 118597 - DNA, 20 bp, synthetic construct
  source 1..20: mol_type = other DNA
tgagcccaggagtttgagac

SEQ ID NO: 118598 - DNA, 20 bp, synthetic construct
  source 1..20: mol_type = other DNA
ttgagcccaggagtttgaga

SEQ ID NO: 118599 - DNA, 20 bp, synthetic construct
  source 1..20: mol_type = other DNA
cttgagcccaggagtttgag

SEQ ID NO: 118600 - DNA, 20 bp, synthetic construct
  source 1..20: mol_type = other DNA
gcttgagcccaggagtttga

SEQ ID NO: 118601 - DNA, 20 bp, synthetic construct
  source 1..20: mol_type = other DNA
cgcttgagcccaggagtttg

SEQ ID NO: 118602 - DNA, 20 bp, synthetic construct
  source 1..20: mol_type = other DNA
tcgcttgagcccaggagttt

SEQ ID NO: 118603 - DNA, 20 bp, synthetic construct
  source 1..20: mol_type = other DNA
atcgcttgagcccaggagtt

SEQ ID NO: 118604 - DNA, 20 bp, synthetic construct
  source 1..20: mol_type = other DNA
gatcgcttgagcccaggagt

SEQ ID NO: 118605 - DNA, 20 bp, synthetic construct
  source 1..20: mol_type = other DNA
agatcgcttgagcccaggag

SEQ ID NO: 118606 - DNA, 20 bp, synthetic construct
  source 1..20: mol_type = other DNA
cagatcgcttgagcccagga

SEQ ID NO: 118607 - DNA, 20 bp, synthetic construct
  source 1..20: mol_type = other DNA
gcagatcgcttgagcccagg

SEQ ID NO: 118608 - DNA, 20 bp, synthetic construct
  source 1..20: mol_type = other DNA
ggcagatcgcttgagcccag

SEQ ID NO: 118609 - DNA, 20 bp, synthetic construct
  source 1..20: mol_type = other DNA
aggcagatcgcttgagccca

SEQ ID NO: 118610 - DNA, 20 bp, synthetic construct
  source 1..20: mol_type = other DNA
caggcagatcgcttgagccc

SEQ ID NO: 118611 - DNA, 20 bp, synthetic construct
  source 1..20: mol_type = other DNA
ccaggcagatcgcttgagcc

SEQ ID NO: 118612 - DNA, 20 bp, synthetic construct
  source 1..20: mol_type = other DNA
gccaggcagatcgcttgagc

SEQ ID NO: 118613 - DNA, 20 bp, synthetic construct
  source 1..20: mol_type = other DNA
agccaggcagatcgcttgag

SEQ ID NO: 118614 - DNA, 20 bp, synthetic construct
  source 1..20: mol_type = other DNA
gagccaggcagatcgcttga

SEQ ID NO: 118615 - DNA, 20 bp, synthetic construct
  source 1..20: mol_type = other DNA
agagccaggcagatcgcttg

SEQ ID NO: 118616 - DNA, 20 bp, synthetic construct
  source 1..20: mol_type = other DNA
cagagccaggcagatcgctt

SEQ ID NO: 118617 - DNA, 20 bp, synthetic construct
  source 1..20: mol_type = other DNA
gcagagccaggcagatcgct

SEQ ID NO: 118618 - DNA, 20 bp, synthetic construct
  source 1..20: mol_type = other DNA
agcagagccaggcagatcgc

SEQ ID NO: 118619 - DNA, 20 bp, synthetic construct
  source 1..20: mol_type = other DNA
aagcagagccaggcagatcg

SEQ ID NO: 118620 - DNA, 20 bp, synthetic construct
  source 1..20: mol_type = other DNA
gaagcagagccaggcagatc

SEQ ID NO: 118621 - DNA, 20 bp, synthetic construct
  source 1..20: mol_type = other DNA
ggaagcagagccaggcagat

SEQ ID NO: 118622 - DNA, 20 bp, synthetic construct
  source 1..20: mol_type = other DNA
gggaagcagagccaggcaga

SEQ ID NO: 118623 - DNA, 20 bp, synthetic construct
  source 1..20: mol_type = other DNA
tgggaagcagagccaggcag

SEQ ID NO: 118624 - DNA, 20 bp, synthetic construct
  source 1..20: mol_type = other DNA
ttgggaagcagagccaggca

SEQ ID NO: 118625 - DNA, 20 bp, synthetic construct
  source 1..20: mol_type = other DNA
tttgggaagcagagccaggc

SEQ ID NO: 118626 - DNA, 20 bp, synthetic construct
  source 1..20: mol_type = other DNA
ctttgggaagcagagccagg

SEQ ID NO: 118627 - DNA, 20 bp, synthetic construct
  source 1..20: mol_type = other DNA
actttgggaagcagagccag

SEQ ID NO: 118628 - DNA, 20 bp, synthetic construct
  source 1..20: mol_type = other DNA
cactttgggaagcagagcca

SEQ ID NO: 118629 - DNA, 20 bp, synthetic construct
  source 1..20: mol_type = other DNA
gcactttgggaagcagagcc

SEQ ID NO: 118630 - DNA, 20 bp, synthetic construct
  source 1..20: mol_type = other DNA
ggcactttgggaagcagagc

SEQ ID NO: 118631 - DNA, 20 bp, synthetic construct
  source 1..20: mol_type = other DNA
aggcactttgggaagcagag

SEQ ID NO: 118632 - DNA, 20 bp, synthetic construct
  source 1..20: mol_type = other DNA
caggcactttgggaagcaga

SEQ ID NO: 118633 - DNA, 20 bp, synthetic construct
  source 1..20: mol_type = other DNA
gcaggcactttgggaagcag

SEQ ID NO: 118634 - DNA, 20 bp, synthetic construct
  source 1..20: mol_type = other DNA
cgcaggcactttgggaagca

SEQ ID NO: 118635 - DNA, 20 bp, synthetic construct
  source 1..20: mol_type = other DNA
gcgcaggcactttgggaagc

SEQ ID NO: 118636 - DNA, 20 bp, synthetic construct
  source 1..20: mol_type = other DNA
ggcgcaggcactttgggaag

SEQ ID NO: 118637 - DNA, 20 bp, synthetic construct
  source 1..20: mol_type = other DNA
gggcgcaggcactttgggaa

SEQ ID NO: 118638 - DNA, 20 bp, synthetic construct
  source 1..20: mol_type = other DNA
tgggcgcaggcactttggga

SEQ ID NO: 118639 - DNA, 20 bp, synthetic construct
  source 1..20: mol_type = other DNA
ctgggcgcaggcactttggg

SEQ ID NO: 118640 - DNA, 20 bp, synthetic construct
  source 1..20: mol_type = other DNA
gctgggcgcaggcactttgg

SEQ ID NO: 118641 - DNA, 20 bp, synthetic construct
  source 1..20: mol_type = other DNA
ggctgggcgcaggcactttg

SEQ ID NO: 118642 - DNA, 20 bp, synthetic construct
  source 1..20: mol_type = other DNA
tggctgggcgcaggcacttt

SEQ ID NO: 118643 - DNA, 20 bp, synthetic construct
  source 1..20: mol_type = other DNA
ttggctgggcgcaggcactt

SEQ ID NO: 118644 - DNA, 20 bp, synthetic construct
  source 1..20: mol_type = other DNA
attggctgggcgcaggcact

SEQ ID NO: 118645 - DNA, 20 bp, synthetic construct
  source 1..20: mol_type = other DNA
aattggctgggcgcaggcac

SEQ ID NO: 118646 - DNA, 20 bp, synthetic construct
  source 1..20: mol_type = other DNA
aaattggctgggcgcaggca

SEQ ID NO: 118647 - DNA, 20 bp, synthetic construct
  source 1..20: mol_type = other DNA
aaaattggctgggcgcaggc

SEQ ID NO: 118648 - DNA, 20 bp, synthetic construct
  source 1..20: mol_type = other DNA
gaaaattggctgggcgcagg

SEQ ID NO: 118649 - DNA, 20 bp, synthetic construct
  source 1..20: mol_type = other DNA
agaaaattggctgggcgcag

SEQ ID NO: 118650 - DNA, 20 bp, synthetic construct
  source 1..20: mol_type = other DNA
gagaaaattggctgggcgca

SEQ ID NO: 118651 - DNA, 20 bp, synthetic construct
  source 1..20: mol_type = other DNA
ggagaaaattggctgggcgc

SEQ ID NO: 118652 - DNA, 20 bp, synthetic construct
  source 1..20: mol_type = other DNA
tggagaaaattggctgggcg

SEQ ID NO: 118653 - DNA, 20 bp, synthetic construct
  source 1..20: mol_type = other DNA
atggagaaaattggctgggc

SEQ ID NO: 118654 - DNA, 20 bp, synthetic construct
  source 1..20: mol_type = other DNA
catggagaaaattggctggg

SEQ ID NO: 118655 - DNA, 20 bp, synthetic construct
  source 1..20: mol_type = other DNA
acatggagaaaattggctgg

SEQ ID NO: 118656 - DNA, 20 bp, synthetic construct
  source 1..20: mol_type = other DNA
aacatggagaaaattggctg

SEQ ID NO: 118657 - DNA, 20 bp, synthetic construct
  source 1..20: mol_type = other DNA
aaacatggagaaaattggct

SEQ ID NO: 118658 - DNA, 20 bp, synthetic construct
  source 1..20: mol_type = other DNA
caaacatggagaaaattggc

SEQ ID NO: 118659 - DNA, 20 bp, synthetic construct
  source 1..20: mol_type = other DNA
tcaaacatggagaaaattgg

SEQ ID NO: 118660 - DNA, 20 bp, synthetic construct
  source 1..20: mol_type = other DNA
gtcaaacatggagaaaattg

SEQ ID NO: 118661 - DNA, 20 bp, synthetic construct
  source 1..20: mol_type = other DNA
ggtcaaacatggagaaaatt

SEQ ID NO: 118662 - DNA, 20 bp, synthetic construct
  source 1..20: mol_type = other DNA
aggtcaaacatggagaaaat

SEQ ID NO: 118663 - DNA, 20 bp, synthetic construct
  source 1..20: mol_type = other DNA
taggtcaaacatggagaaaa

SEQ ID NO: 118664 - DNA, 20 bp, synthetic construct
  source 1..20: mol_type = other DNA
ttaggtcaaacatggagaaa

SEQ ID NO: 118665 - DNA, 20 bp, synthetic construct
  source 1..20: mol_type = other DNA
attaggtcaaacatggagaa

SEQ ID NO: 118666 - DNA, 20 bp, synthetic construct
  source 1..20: mol_type = other DNA
aattaggtcaaacatggaga

SEQ ID NO: 118667 - DNA, 20 bp, synthetic construct
  source 1..20: mol_type = other DNA
caattaggtcaaacatggag

SEQ ID NO: 118668 - DNA, 20 bp, synthetic construct
  source 1..20: mol_type = other DNA
acaattaggtcaaacatgga

SEQ ID NO: 118669 - DNA, 20 bp, synthetic construct
  source 1..20: mol_type = other DNA
cacaattaggtcaaacatgg

SEQ ID NO: 118670 - DNA, 20 bp, synthetic construct
  source 1..20: mol_type = other DNA
tcacaattaggtcaaacatg

SEQ ID NO: 118671 - DNA, 20 bp, synthetic construct
  source 1..20: mol_type = other DNA
atcacaattaggtcaaacat

SEQ ID NO: 118672 - DNA, 20 bp, synthetic construct
  source 1..20: mol_type = other DNA
aatcacaattaggtcaaaca

SEQ ID NO: 118673 - DNA, 20 bp, synthetic construct
  source 1..20: mol_type = other DNA
aaatcacaattaggtcaaac

SEQ ID NO: 118674 - DNA, 20 bp, synthetic construct
  source 1..20: mol_type = other DNA
gaaatcacaattaggtcaaa

SEQ ID NO: 118675 - DNA, 20 bp, synthetic construct
  source 1..20: mol_type = other DNA
tgaaatcacaattaggtcaa

SEQ ID NO: 118676 - DNA, 20 bp, synthetic construct
  source 1..20: mol_type = other DNA
atgaaatcacaattaggtca

SEQ ID NO: 118677 - DNA, 20 bp, synthetic construct
  source 1..20: mol_type = other DNA
tatgaaatcacaattaggtc

SEQ ID NO: 118678 - DNA, 20 bp, synthetic construct
  source 1..20: mol_type = other DNA
ctatgaaatcacaattaggt

SEQ ID NO: 118679 - DNA, 20 bp, synthetic construct
  source 1..20: mol_type = other DNA
tctatgaaatcacaattagg

SEQ ID NO: 118680 - DNA, 20 bp, synthetic construct
  source 1..20: mol_type = other DNA
atctatgaaatcacaattag

SEQ ID NO: 118681 - DNA, 20 bp, synthetic construct
  source 1..20: mol_type = other DNA
catctatgaaatcacaatta

SEQ ID NO: 118682 - DNA, 20 bp, synthetic construct
  source 1..20: mol_type = other DNA
acatctatgaaatcacaatt

SEQ ID NO: 118683 - DNA, 20 bp, synthetic construct
  source 1..20: mol_type = other DNA
aacatctatgaaatcacaat

SEQ ID NO: 118684 - DNA, 20 bp, synthetic construct
  source 1..20: mol_type = other DNA
taacatctatgaaatcacaa

SEQ ID NO: 118685 - DNA, 20 bp, synthetic construct
  source 1..20: mol_type = other DNA
ttaacatctatgaaatcaca

SEQ ID NO: 118686 - DNA, 20 bp, synthetic construct
  source 1..20: mol_type = other DNA
gttaacatctatgaaatcac

SEQ ID NO: 118687 - DNA, 20 bp, synthetic construct
  source 1..20: mol_type = other DNA
agttaacatctatgaaatca

SEQ ID NO: 118688 - DNA, 20 bp, synthetic construct
  source 1..20: mol_type = other DNA
tagttaacatctatgaaatc

SEQ ID NO: 118689 - DNA, 20 bp, synthetic construct
  source 1..20: mol_type = other DNA
ttagttaacatctatgaaat

SEQ ID NO: 118690 - DNA, 20 bp, synthetic construct
  source 1..20: mol_type = other DNA
tttagttaacatctatgaaa

SEQ ID NO: 118691 - DNA, 20 bp, synthetic construct
  source 1..20: mol_type = other DNA
ttttagttaacatctatgaa

SEQ ID NO: 118692 - DNA, 20 bp, synthetic construct
  source 1..20: mol_type = other DNA
gttttagttaacatctatga

SEQ ID NO: 118693 - DNA, 20 bp, synthetic construct
  source 1..20: mol_type = other DNA
agttttagttaacatctatg

SEQ ID NO: 118694 - DNA, 20 bp, synthetic construct
  source 1..20: mol_type = other DNA
gagttttagttaacatctat

SEQ ID NO: 118695 - DNA, 20 bp, synthetic construct
  source 1..20: mol_type = other DNA
agagttttagttaacatcta

SEQ ID NO: 118696 - DNA, 20 bp, synthetic construct
  source 1..20: mol_type = other DNA
aagagttttagttaacatct

SEQ ID NO: 118697 - DNA, 20 bp, synthetic construct
  source 1..20: mol_type = other DNA
taagagttttagttaacatc

SEQ ID NO: 118698 - DNA, 20 bp, synthetic construct
  source 1..20: mol_type = other DNA
ttaagagttttagttaacat

SEQ ID NO: 118699 - DNA, 20 bp, synthetic construct
  source 1..20: mol_type = other DNA
attaagagttttagttaaca

SEQ ID NO: 118700 - DNA, 20 bp, synthetic construct
  source 1..20: mol_type = other DNA
aattaagagttttagttaac

SEQ ID NO: 118701 - DNA, 20 bp, synthetic construct
  source 1..20: mol_type = other DNA
aaattaagagttttagttaa

SEQ ID NO: 118702 - DNA, 20 bp, synthetic construct
  source 1..20: mol_type = other DNA
aaaattaagagttttagtta

SEQ ID NO: 118703 - DNA, 20 bp, synthetic construct
  source 1..20: mol_type = other DNA
gaaaattaagagttttagtt

SEQ ID NO: 118704 - DNA, 20 bp, synthetic construct
  source 1..20: mol_type = other DNA
cgaaaattaagagttttagt

SEQ ID NO: 118705 - DNA, 20 bp, synthetic construct
  source 1..20: mol_type = other DNA
acgaaaattaagagttttag

SEQ ID NO: 118706 - DNA, 20 bp, synthetic construct
  source 1..20: mol_type = other DNA
aacgaaaattaagagtttta

SEQ ID NO: 118707 - DNA, 20 bp, synthetic construct
  source 1..20: mol_type = other DNA
aaacgaaaattaagagtttt

SEQ ID NO: 118708 - DNA, 20 bp, synthetic construct
  source 1..20: mol_type = other DNA
aaaacgaaaattaagagttt

SEQ ID NO: 118709 - DNA, 20 bp, synthetic construct
  source 1..20: mol_type = other DNA
gaaaacgaaaattaagagtt

SEQ ID NO: 118710 - DNA, 20 bp, synthetic construct
  source 1..20: mol_type = other DNA
agaaaacgaaaattaagagt

SEQ ID NO: 118711 - DNA, 20 bp, synthetic construct
  source 1..20: mol_type = other DNA
gagaaaacgaaaattaagag

SEQ ID NO: 118712 - DNA, 20 bp, synthetic construct
  source 1..20: mol_type = other DNA
tgagaaaacgaaaattaaga

SEQ ID NO: 118713 - DNA, 20 bp, synthetic construct
  source 1..20: mol_type = other DNA
ctgagaaaacgaaaattaag

SEQ ID NO: 118714 - DNA, 20 bp, synthetic construct
  source 1..20: mol_type = other DNA
actgagaaaacgaaaattaa

SEQ ID NO: 118715 - DNA, 20 bp, synthetic construct
  source 1..20: mol_type = other DNA
tactgagaaaacgaaaatta

SEQ ID NO: 118716 - DNA, 20 bp, synthetic construct
  source 1..20: mol_type = other DNA
atactgagaaaacgaaaatt

SEQ ID NO: 118717 - DNA, 20 bp, synthetic construct
  source 1..20: mol_type = other DNA
catactgagaaaacgaaaat

SEQ ID NO: 118718 - DNA, 20 bp, synthetic construct
  source 1..20: mol_type = other DNA
gcatactgagaaaacgaaaa

SEQ ID NO: 118719 - DNA, 20 bp, synthetic construct
  source 1..20: mol_type = other DNA
agcatactgagaaaacgaaa

SEQ ID NO: 118720 - DNA, 20 bp, synthetic construct
  source 1..20: mol_type = other DNA
tagcatactgagaaaacgaa

SEQ ID NO: 118721 - DNA, 20 bp, synthetic construct
  source 1..20: mol_type = other DNA
atagcatactgagaaaacga

SEQ ID NO: 118722 - DNA, 20 bp, synthetic construct
  source 1..20: mol_type = other DNA
aatagcatactgagaaaacg

SEQ ID NO: 118723 - DNA, 20 bp, synthetic construct
  source 1..20: mol_type = other DNA
aaatagcatactgagaaaac

SEQ ID NO: 118724 - DNA, 20 bp, synthetic construct
  source 1..20: mol_type = other DNA
aaaatagcatactgagaaaa

SEQ ID NO: 118725 - DNA, 20 bp, synthetic construct
  source 1..20: mol_type = other DNA
aaaaatagcatactgagaaa

SEQ ID NO: 118726 - DNA, 20 bp, synthetic construct
  source 1..20: mol_type = other DNA
aaaaaatagcatactgagaa

SEQ ID NO: 118727 - DNA, 20 bp, synthetic construct
  source 1..20: mol_type = other DNA
aaaaaaatagcatactgaga

SEQ ID NO: 118728 - DNA, 20 bp, synthetic construct
  source 1..20: mol_type = other DNA
aaaaaaaatagcatactgag

SEQ ID NO: 118729 - DNA, 20 bp, synthetic construct
  source 1..20: mol_type = other DNA
aaaaaaaaatagcatactga

SEQ ID NO: 118730 - DNA, 20 bp, synthetic construct
  source 1..20: mol_type = other DNA
aaaaaaaaaatagcatactg

SEQ ID NO: 118731 - DNA, 20 bp, synthetic construct
  source 1..20: mol_type = other DNA
aaaaaaaaaaatagcatact

SEQ ID NO: 118732 - DNA, 20 bp, synthetic construct
  source 1..20: mol_type = other DNA
aaaaaaaaaaaatagcatac

SEQ ID NO: 118733 - DNA, 20 bp, synthetic construct
  source 1..20: mol_type = other DNA
aaaaaaaaaaaaatagcata

SEQ ID NO: 118734 - DNA, 20 bp, synthetic construct
  source 1..20: mol_type = other DNA
aaaaaaaaaaaaaatagcat

SEQ ID NO: 118735 - DNA, 20 bp, synthetic construct
  source 1..20: mol_type = other DNA
taaaaaaaaaaaaaatagca

SEQ ID NO: 118736 - DNA, 20 bp, synthetic construct
  source 1..20: mol_type = other DNA
ctaaaaaaaaaaaaaatagc

SEQ ID NO: 118737 - DNA, 20 bp, synthetic construct
  source 1..20: mol_type = other DNA
gctaaaaaaaaaaaaaatag

SEQ ID NO: 118738 - DNA, 20 bp, synthetic construct
  source 1..20: mol_type = other DNA
ggctaaaaaaaaaaaaaata

SEQ ID NO: 118739 - DNA, 20 bp, synthetic construct
  source 1..20: mol_type = other DNA
aggctaaaaaaaaaaaaaat

SEQ ID NO: 118740 - DNA, 20 bp, synthetic construct
  source 1..20: mol_type = other DNA
aaggctaaaaaaaaaaaaaa

SEQ ID NO: 118741 - DNA, 20 bp, synthetic construct
  source 1..20: mol_type = other DNA
caaggctaaaaaaaaaaaaa

SEQ ID NO: 118742 - DNA, 20 bp, synthetic construct
  source 1..20: mol_type = other DNA
ccaaggctaaaaaaaaaaaa

SEQ ID NO: 118743 - DNA, 20 bp, synthetic construct
  source 1..20: mol_type = other DNA
tccaaggctaaaaaaaaaaa

SEQ ID NO: 118744 - DNA, 20 bp, synthetic construct
  source 1..20: mol_type = other DNA
ttccaaggctaaaaaaaaaa

SEQ ID NO: 118745 - DNA, 20 bp, synthetic construct
  source 1..20: mol_type = other DNA
gttccaaggctaaaaaaaaa

SEQ ID NO: 118746 - DNA, 20 bp, synthetic construct
  source 1..20: mol_type = other DNA
tgttccaaggctaaaaaaaa

SEQ ID NO: 118747 - DNA, 20 bp, synthetic construct
  source 1..20: mol_type = other DNA
atgttccaaggctaaaaaaa

SEQ ID NO: 118748 - DNA, 20 bp, synthetic construct
  source 1..20: mol_type = other DNA
tatgttccaaggctaaaaaa

SEQ ID NO: 118749 - DNA, 20 bp, synthetic construct
  source 1..20: mol_type = other DNA
atatgttccaaggctaaaaa

SEQ ID NO: 118750 - DNA, 20 bp, synthetic construct
  source 1..20: mol_type = other DNA
catatgttccaaggctaaaa

SEQ ID NO: 118751 - DNA, 20 bp, synthetic construct
  source 1..20: mol_type = other DNA
tcatatgttccaaggctaaa

SEQ ID NO: 118752 - DNA, 20 bp, synthetic construct
  source 1..20: mol_type = other DNA
ttcatatgttccaaggctaa

SEQ ID NO: 118753 - DNA, 20 bp, synthetic construct
  source 1..20: mol_type = other DNA
gttcatatgttccaaggcta

SEQ ID NO: 118754 - DNA, 20 bp, synthetic construct
  source 1..20: mol_type = other DNA
ggttcatatgttccaaggct

SEQ ID NO: 118755 - DNA, 20 bp, synthetic construct
  source 1..20: mol_type = other DNA
aggttcatatgttccaaggc

SEQ ID NO: 118756 - DNA, 20 bp, synthetic construct
  source 1..20: mol_type = other DNA
caggttcatatgttccaagg

SEQ ID NO: 118757 - DNA, 20 bp, synthetic construct
  source 1..20: mol_type = other DNA
acaggttcatatgttccaag

SEQ ID NO: 118758 - DNA, 20 bp, synthetic construct
  source 1..20: mol_type = other DNA
aacaggttcatatgttccaa

SEQ ID NO: 118759 - DNA, 20 bp, synthetic construct
  source 1..20: mol_type = other DNA
caacaggttcatatgttcca

SEQ ID NO: 118760 - DNA, 20 bp, synthetic construct
  source 1..20: mol_type = other DNA
tcaacaggttcatatgttcc

SEQ ID NO: 118761 - DNA, 20 bp, synthetic construct
  source 1..20: mol_type = other DNA
ttcaacaggttcatatgttc

SEQ ID NO: 118762 - DNA, 20 bp, synthetic construct
  source 1..20: mol_type = other DNA
tttcaacaggttcatatgtt

SEQ ID NO: 118763 - DNA, 20 bp, synthetic construct
  source 1..20: mol_type = other DNA
ctttcaacaggttcatatgt

SEQ ID NO: 118764 - DNA, 20 bp, synthetic construct
  source 1..20: mol_type = other DNA
tctttcaacaggttcatatg

SEQ ID NO: 118765 - DNA, 20 bp, synthetic construct
  source 1..20: mol_type = other DNA
ttctttcaacaggttcatat

SEQ ID NO: 118766 - DNA, 20 bp, synthetic construct
  source 1..20: mol_type = other DNA
gttctttcaacaggttcata

SEQ ID NO: 118767 - DNA, 20 bp, synthetic construct
  source 1..20: mol_type = other DNA
agttctttcaacaggttcat

SEQ ID NO: 118768 - DNA, 20 bp, synthetic construct
  source 1..20: mol_type = other DNA
gagttctttcaacaggttca

SEQ ID NO: 118769 - DNA, 20 bp, synthetic construct
  source 1..20: mol_type = other DNA
agagttctttcaacaggttc

SEQ ID NO: 118770 - DNA, 20 bp, synthetic construct
  source 1..20: mol_type = other DNA
cagagttctttcaacaggtt

SEQ ID NO: 118771 - DNA, 20 bp, synthetic construct
  source 1..20: mol_type = other DNA
gcagagttctttcaacaggt

SEQ ID NO: 118772 - DNA, 20 bp, synthetic construct
  source 1..20: mol_type = other DNA
ggcagagttctttcaacagg

SEQ ID NO: 118773 - DNA, 20 bp, synthetic construct
  source 1..20: mol_type = other DNA
aggcagagttctttcaacag

SEQ ID NO: 118774 - DNA, 20 bp, synthetic construct
  source 1..20: mol_type = other DNA
caggcagagttctttcaaca

SEQ ID NO: 118775 - DNA, 20 bp, synthetic construct
  source 1..20: mol_type = other DNA
tcaggcagagttctttcaac

SEQ ID NO: 118776 - DNA, 20 bp, synthetic construct
  source 1..20: mol_type = other DNA
ttcaggcagagttctttcaa

SEQ ID NO: 118777 - DNA, 20 bp, synthetic construct
  source 1..20: mol_type = other DNA
tttcaggcagagttctttca

SEQ ID NO: 118778 - DNA, 20 bp, synthetic construct
  source 1..20: mol_type = other DNA
atttcaggcagagttctttc

SEQ ID NO: 118779 - DNA, 20 bp, synthetic construct
  source 1..20: mol_type = other DNA
tatttcaggcagagttcttt

SEQ ID NO: 118780 - DNA, 20 bp, synthetic construct
  source 1..20: mol_type = other DNA
ttatttcaggcagagttctt

SEQ ID NO: 118781 - DNA, 20 bp, synthetic construct
  source 1..20: mol_type = other DNA
attatttcaggcagagttct

SEQ ID NO: 118782 - DNA, 20 bp, synthetic construct
  source 1..20: mol_type = other DNA
cattatttcaggcagagttc

SEQ ID NO: 118783 - DNA, 20 bp, synthetic construct
  source 1..20: mol_type = other DNA
acattatttcaggcagagtt

SEQ ID NO: 118784 - DNA, 20 bp, synthetic construct
  source 1..20: mol_type = other DNA
tacattatttcaggcagagt

SEQ ID NO: 118785 - DNA, 20 bp, synthetic construct
  source 1..20: mol_type = other DNA
ttacattatttcaggcagag

SEQ ID NO: 118786 - DNA, 20 bp, synthetic construct
  source 1..20: mol_type = other DNA
attacattatttcaggcaga

SEQ ID NO: 118787 - DNA, 20 bp, synthetic construct
  source 1..20: mol_type = other DNA
gattacattatttcaggcag

SEQ ID NO: 118788 - DNA, 20 bp, synthetic construct
  source 1..20: mol_type = other DNA
tgattacattatttcaggca

SEQ ID NO: 118789 - DNA, 20 bp, synthetic construct
  source 1..20: mol_type = other DNA
ttgattacattatttcaggc

SEQ ID NO: 118790 - DNA, 20 bp, synthetic construct
  source 1..20: mol_type = other DNA
tttgattacattatttcagg

SEQ ID NO: 118791 - DNA, 20 bp, synthetic construct
  source 1..20: mol_type = other DNA
atttgattacattatttcag

SEQ ID NO: 118792 - DNA, 20 bp, synthetic construct
  source 1..20: mol_type = other DNA
aatttgattacattatttca

SEQ ID NO: 118793 - DNA, 20 bp, synthetic construct
  source 1..20: mol_type = other DNA
taatttgattacattatttc

SEQ ID NO: 118794 - DNA, 20 bp, synthetic construct
  source 1..20: mol_type = other DNA
ataatttgattacattattt

SEQ ID NO: 118795 - DNA, 20 bp, synthetic construct
  source 1..20: mol_type = other DNA
tataatttgattacattatt

SEQ ID NO: 118796 - DNA, 20 bp, synthetic construct
  source 1..20: mol_type = other DNA
ctataatttgattacattat

SEQ ID NO: 118797 - DNA, 20 bp, synthetic construct
  source 1..20: mol_type = other DNA
tctataatttgattacatta

SEQ ID NO: 118798 - DNA, 20 bp, synthetic construct
  source 1..20: mol_type = other DNA
ctctataatttgattacatt

SEQ ID NO: 118799 - DNA, 20 bp, synthetic construct
  source 1..20: mol_type = other DNA
actctataatttgattacat

SEQ ID NO: 118800 - DNA, 20 bp, synthetic construct
  source 1..20: mol_type = other DNA
aactctataatttgattaca

SEQ ID NO: 118801 - DNA, 20 bp, synthetic construct
  source 1..20: mol_type = other DNA
aaactctataatttgattac

SEQ ID NO: 118802 - DNA, 20 bp, synthetic construct
  source 1..20: mol_type = other DNA
taaactctataatttgatta

SEQ ID NO: 118803 - DNA, 20 bp, synthetic construct
  source 1..20: mol_type = other DNA
ttaaactctataatttgatt

SEQ ID NO: 118804 - DNA, 20 bp, synthetic construct
  source 1..20: mol_type = other DNA
attaaactctataatttgat

SEQ ID NO: 118805 - DNA, 20 bp, synthetic construct
  source 1..20: mol_type = other DNA
gattaaactctataatttga

SEQ ID NO: 118806 - DNA, 20 bp, synthetic construct
  source 1..20: mol_type = other DNA
agattaaactctataatttg

SEQ ID NO: 118807 - DNA, 20 bp, synthetic construct
  source 1..20: mol_type = other DNA
aagattaaactctataattt

SEQ ID NO: 118808 - DNA, 20 bp, synthetic construct
  source 1..20: mol_type = other DNA
taagattaaactctataatt

SEQ ID NO: 118809 - DNA, 20 bp, synthetic construct
  source 1..20: mol_type = other DNA
ataagattaaactctataat

SEQ ID NO: 118810 - DNA, 20 bp, synthetic construct
  source 1..20: mol_type = other DNA
aataagattaaactctataa

SEQ ID NO: 118811 - DNA, 20 bp, synthetic construct
  source 1..20: mol_type = other DNA
aaataagattaaactctata

SEQ ID NO: 118812 - DNA, 20 bp, synthetic construct
  source 1..20: mol_type = other DNA
aaaataagattaaactctat

SEQ ID NO: 118813 - DNA, 20 bp, synthetic construct
  source 1..20: mol_type = other DNA
caaaataagattaaactcta

SEQ ID NO: 118814 - DNA, 20 bp, synthetic construct
  source 1..20: mol_type = other DNA
tcaaaataagattaaactct

SEQ ID NO: 118815 - DNA, 20 bp, synthetic construct
  source 1..20: mol_type = other DNA
ctcaaaataagattaaactc

SEQ ID NO: 118816 - DNA, 20 bp, synthetic construct
  source 1..20: mol_type = other DNA
cctcaaaataagattaaact

SEQ ID NO: 118817 - DNA, 20 bp, synthetic construct
  source 1..20: mol_type = other DNA
ccctcaaaataagattaaac

SEQ ID NO: 118818 - DNA, 20 bp, synthetic construct
  source 1..20: mol_type = other DNA
gccctcaaaataagattaaa

SEQ ID NO: 118819 - DNA, 20 bp, synthetic construct
  source 1..20: mol_type = other DNA
ggccctcaaaataagattaa

SEQ ID NO: 118820 - DNA, 20 bp, synthetic construct
  source 1..20: mol_type = other DNA
aggccctcaaaataagatta

SEQ ID NO: 118821 - DNA, 20 bp, synthetic construct
  source 1..20: mol_type = other DNA
aaggccctcaaaataagatt

SEQ ID NO: 118822 - DNA, 20 bp, synthetic construct
  source 1..20: mol_type = other DNA
aaaggccctcaaaataagat

SEQ ID NO: 118823 - DNA, 20 bp, synthetic construct
  source 1..20: mol_type = other DNA
taaaggccctcaaaataaga

SEQ ID NO: 118824 - DNA, 20 bp, synthetic construct
  source 1..20: mol_type = other DNA
ctaaaggccctcaaaataag

SEQ ID NO: 118825 - DNA, 20 bp, synthetic construct
  source 1..20: mol_type = other DNA
tctaaaggccctcaaaataa

SEQ ID NO: 118826 - DNA, 20 bp, synthetic construct
  source 1..20: mol_type = other DNA
ttctaaaggccctcaaaata

SEQ ID NO: 118827 - DNA, 20 bp, synthetic construct
  source 1..20: mol_type = other DNA
tttctaaaggccctcaaaat

SEQ ID NO: 118828 - DNA, 20 bp, synthetic construct
  source 1..20: mol_type = other DNA
atttctaaaggccctcaaaa

SEQ ID NO: 118829 - DNA, 20 bp, synthetic construct
  source 1..20: mol_type = other DNA
aatttctaaaggccctcaaa

SEQ ID NO: 118830 - DNA, 20 bp, synthetic construct
  source 1..20: mol_type = other DNA
gaatttctaaaggccctcaa

SEQ ID NO: 118831 - DNA, 20 bp, synthetic construct
  source 1..20: mol_type = other DNA
agaatttctaaaggccctca

SEQ ID NO: 118832 - DNA, 20 bp, synthetic construct
  source 1..20: mol_type = other DNA
cagaatttctaaaggccctc

SEQ ID NO: 118833 - DNA, 20 bp, synthetic construct
  source 1..20: mol_type = other DNA
tcagaatttctaaaggccct

SEQ ID NO: 118834 - DNA, 20 bp, synthetic construct
  source 1..20: mol_type = other DNA
ctcagaatttctaaaggccc

SEQ ID NO: 118835 - DNA, 20 bp, synthetic construct
  source 1..20: mol_type = other DNA
tctcagaatttctaaaggcc

SEQ ID NO: 118836 - DNA, 20 bp, synthetic construct
  source 1..20: mol_type = other DNA
ttctcagaatttctaaaggc

SEQ ID NO: 118837 - DNA, 20 bp, synthetic construct
  source 1..20: mol_type = other DNA
cttctcagaatttctaaagg

SEQ ID NO: 118838 - DNA, 20 bp, synthetic construct
  source 1..20: mol_type = other DNA
tcttctcagaatttctaaag

SEQ ID NO: 118839 - DNA, 20 bp, synthetic construct
  source 1..20: mol_type = other DNA
ttcttctcagaatttctaaa

SEQ ID NO: 118840 - DNA, 20 bp, synthetic construct
  source 1..20: mol_type = other DNA
tttcttctcagaatttctaa

SEQ ID NO: 118841 - DNA, 20 bp, synthetic construct
  source 1..20: mol_type = other DNA
ctttcttctcagaatttcta

SEQ ID NO: 118842 - DNA, 20 bp, synthetic construct
  source 1..20: mol_type = other DNA
actttcttctcagaatttct

SEQ ID NO: 118843 - DNA, 20 bp, synthetic construct
  source 1..20: mol_type = other DNA
cactttcttctcagaatttc

SEQ ID NO: 118844 - DNA, 20 bp, synthetic construct
  source 1..20: mol_type = other DNA
ccactttcttctcagaattt

SEQ ID NO: 118845 - DNA, 20 bp, synthetic construct
  source 1..20: mol_type = other DNA
cccactttcttctcagaatt

SEQ ID NO: 118846 - DNA, 20 bp, synthetic construct
  source 1..20: mol_type = other DNA
acccactttcttctcagaat

SEQ ID NO: 118847 - DNA, 20 bp, synthetic construct
  source 1..20: mol_type = other DNA
aacccactttcttctcagaa

SEQ ID NO: 118848 - DNA, 20 bp, synthetic construct
  source 1..20: mol_type = other DNA
aaacccactttcttctcaga

SEQ ID NO: 118849 - DNA, 20 bp, synthetic construct
  source 1..20: mol_type = other DNA
aaaacccactttcttctcag

SEQ ID NO: 118850 - DNA, 20 bp, synthetic construct
  source 1..20: mol_type = other DNA
aaaaacccactttcttctca

SEQ ID NO: 118851 - DNA, 20 bp, synthetic construct
  source 1..20: mol_type = other DNA
aaaaaacccactttcttctc

SEQ ID NO: 118852 - DNA, 20 bp, synthetic construct
  source 1..20: mol_type = other DNA
aaaaaaacccactttcttct

SEQ ID NO: 118853 - DNA, 20 bp, synthetic construct
  source 1..20: mol_type = other DNA
aaaaaaaacccactttcttc

SEQ ID NO: 118854 - DNA, 20 bp, synthetic construct
  source 1..20: mol_type = other DNA
aaaaaaaaacccactttctt

SEQ ID NO: 118855 - DNA, 20 bp, synthetic construct
  source 1..20: mol_type = other DNA
aaaaaaaaaacccactttct

SEQ ID NO: 118856 - DNA, 20 bp, synthetic construct
  source 1..20: mol_type = other DNA
aaaaaaaaaaacccactttc

SEQ ID NO: 118857 - DNA, 20 bp, synthetic construct
  source 1..20: mol_type = other DNA
taaaaaaaaaaacccacttt

SEQ ID NO: 118858 - DNA, 20 bp, synthetic construct
  source 1..20: mol_type = other DNA
gtaaaaaaaaaaacccactt

SEQ ID NO: 118859 - DNA, 20 bp, synthetic construct
  source 1..20: mol_type = other DNA
agtaaaaaaaaaaacccact

SEQ ID NO: 118860 - DNA, 20 bp, synthetic construct
  source 1..20: mol_type = other DNA
cagtaaaaaaaaaaacccac

SEQ ID NO: 118861 - DNA, 20 bp, synthetic construct
  source 1..20: mol_type = other DNA
gcagtaaaaaaaaaaaccca

SEQ ID NO: 118862 - DNA, 20 bp, synthetic construct
  source 1..20: mol_type = other DNA
ggcagtaaaaaaaaaaaccc

SEQ ID NO: 118863 - DNA, 20 bp, synthetic construct
  source 1..20: mol_type = other DNA
tggcagtaaaaaaaaaaacc

SEQ ID NO: 118864 - DNA, 20 bp, synthetic construct
  source 1..20: mol_type = other DNA
atggcagtaaaaaaaaaaac

SEQ ID NO: 118865 - DNA, 20 bp, synthetic construct
  source 1..20: mol_type = other DNA
aatggcagtaaaaaaaaaaa

SEQ ID NO: 118866 - DNA, 20 bp, synthetic construct
  source 1..20: mol_type = other DNA
aaatggcagtaaaaaaaaaa

SEQ ID NO: 118867 - DNA, 20 bp, synthetic construct
  source 1..20: mol_type = other DNA
aaaatggcagtaaaaaaaaa

SEQ ID NO: 118868 - DNA, 20 bp, synthetic construct
  source 1..20: mol_type = other DNA
taaaatggcagtaaaaaaaa

SEQ ID NO: 118869 - DNA, 20 bp, synthetic construct
  source 1..20: mol_type = other DNA
ttaaaatggcagtaaaaaaa

SEQ ID NO: 118870 - DNA, 20 bp, synthetic construct
  source 1..20: mol_type = other DNA
attaaaatggcagtaaaaaa

SEQ ID NO: 118871 - DNA, 20 bp, synthetic construct
  source 1..20: mol_type = other DNA
cattaaaatggcagtaaaaa

SEQ ID NO: 118872 - DNA, 20 bp, synthetic construct
  source 1..20: mol_type = other DNA
acattaaaatggcagtaaaa

SEQ ID NO: 118873 - DNA, 20 bp, synthetic construct
  source 1..20: mol_type = other DNA
tacattaaaatggcagtaaa

SEQ ID NO: 118874 - DNA, 20 bp, synthetic construct
  source 1..20: mol_type = other DNA
ctacattaaaatggcagtaa

SEQ ID NO: 118875 - DNA, 20 bp, synthetic construct
  source 1..20: mol_type = other DNA
actacattaaaatggcagta

SEQ ID NO: 118876 - DNA, 20 bp, synthetic construct
  source 1..20: mol_type = other DNA
cactacattaaaatggcagt

SEQ ID NO: 118877 - DNA, 20 bp, synthetic construct
  source 1..20: mol_type = other DNA
acactacattaaaatggcag

SEQ ID NO: 118878 - DNA, 20 bp, synthetic construct
  source 1..20: mol_type = other DNA
aacactacattaaaatggca

SEQ ID NO: 118879 - DNA, 20 bp, synthetic construct
  source 1..20: mol_type = other DNA
taacactacattaaaatggc

SEQ ID NO: 118880 - DNA, 20 bp, synthetic construct
  source 1..20: mol_type = other DNA
ttaacactacattaaaatgg

SEQ ID NO: 118881 - DNA, 20 bp, synthetic construct
  source 1..20: mol_type = other DNA
cttaacactacattaaaatg

SEQ ID NO: 118882 - DNA, 20 bp, synthetic construct
  source 1..20: mol_type = other DNA
ccttaacactacattaaaat

SEQ ID NO: 118883 - DNA, 20 bp, synthetic construct
  source 1..20: mol_type = other DNA
accttaacactacattaaaa

SEQ ID NO: 118884 - DNA, 20 bp, synthetic construct
  source 1..20: mol_type = other DNA
caccttaacactacattaaa

SEQ ID NO: 118885 - DNA, 20 bp, synthetic construct
  source 1..20: mol_type = other DNA
acaccttaacactacattaa

SEQ ID NO: 118886 - DNA, 20 bp, synthetic construct
  source 1..20: mol_type = other DNA
aacaccttaacactacatta

SEQ ID NO: 118887 - DNA, 20 bp, synthetic construct
  source 1..20: mol_type = other DNA
gaacaccttaacactacatt

SEQ ID NO: 118888 - DNA, 20 bp, synthetic construct
  source 1..20: mol_type = other DNA
tgaacaccttaacactacat

SEQ ID NO: 118889 - DNA, 20 bp, synthetic construct
  source 1..20: mol_type = other DNA
atgaacaccttaacactaca

SEQ ID NO: 118890 - DNA, 20 bp, synthetic construct
  source 1..20: mol_type = other DNA
catgaacaccttaacactac

SEQ ID NO: 118891 - DNA, 20 bp, synthetic construct
  source 1..20: mol_type = other DNA
acatgaacaccttaacacta

SEQ ID NO: 118892 - DNA, 20 bp, synthetic construct
  source 1..20: mol_type = other DNA
tacatgaacaccttaacact

SEQ ID NO: 118893 - DNA, 20 bp, synthetic construct
  source 1..20: mol_type = other DNA
atacatgaacaccttaacac

SEQ ID NO: 118894 - DNA, 20 bp, synthetic construct
  source 1..20: mol_type = other DNA
gatacatgaacaccttaaca

SEQ ID NO: 118895 - DNA, 20 bp, synthetic construct
  source 1..20: mol_type = other DNA
tgatacatgaacaccttaac

SEQ ID NO: 118896 - DNA, 20 bp, synthetic construct
  source 1..20: mol_type = other DNA
gtgatacatgaacaccttaa

SEQ ID NO: 118897 - DNA, 20 bp, synthetic construct
  source 1..20: mol_type = other DNA
ggtgatacatgaacacctta

SEQ ID NO: 118898 - DNA, 20 bp, synthetic construct
  source 1..20: mol_type = other DNA
tggtgatacatgaacacctt

SEQ ID NO: 118899 - DNA, 20 bp, synthetic construct
  source 1..20: mol_type = other DNA
ctggtgatacatgaacacct

SEQ ID NO: 118900 - DNA, 20 bp, synthetic construct
  source 1..20: mol_type = other DNA
gctggtgatacatgaacacc

SEQ ID NO: 118901 - DNA, 20 bp, synthetic construct
  source 1..20: mol_type = other DNA
tgctggtgatacatgaacac

SEQ ID NO: 118902 - DNA, 20 bp, synthetic construct
  source 1..20: mol_type = other DNA
ctgctggtgatacatgaaca

SEQ ID NO: 118903 - DNA, 20 bp, synthetic construct
  source 1..20: mol_type = other DNA
cctgctggtgatacatgaac

SEQ ID NO: 118904 - DNA, 20 bp, synthetic construct
  source 1..20: mol_type = other DNA
acctgctggtgatacatgaa

SEQ ID NO: 118905 - DNA, 20 bp, synthetic construct
  source 1..20: mol_type = other DNA
cacctgctggtgatacatga

SEQ ID NO: 118906 - DNA, 20 bp, synthetic construct
  source 1..20: mol_type = other DNA
acacctgctggtgatacatg

SEQ ID NO: 118907 - DNA, 20 bp, synthetic construct
  source 1..20: mol_type = other DNA
tacacctgctggtgatacat

SEQ ID NO: 118908 - DNA, 20 bp, synthetic construct
  source 1..20: mol_type = other DNA
ctacacctgctggtgataca

SEQ ID NO: 118909 - DNA, 20 bp, synthetic construct
  source 1..20: mol_type = other DNA
gctacacctgctggtgatac

SEQ ID NO: 118910 - DNA, 20 bp, synthetic construct
  source 1..20: mol_type = other DNA
agctacacctgctggtgata

SEQ ID NO: 118911 - DNA, 20 bp, synthetic construct
  source 1..20: mol_type = other DNA
cagctacacctgctggtgat

SEQ ID NO: 118912 - DNA, 20 bp, synthetic construct
  source 1..20: mol_type = other DNA
acagctacacctgctggtga

SEQ ID NO: 118913 - DNA, 20 bp, synthetic construct
  source 1..20: mol_type = other DNA
aacagctacacctgctggtg

SEQ ID NO: 118914 - DNA, 20 bp, synthetic construct
  source 1..20: mol_type = other DNA
aaacagctacacctgctggt

SEQ ID NO: 118915 - DNA, 20 bp, synthetic construct
  source 1..20: mol_type = other DNA
aaaacagctacacctgctgg

SEQ ID NO: 118916 - DNA, 20 bp, synthetic construct
  source 1..20: mol_type = other DNA
gaaaacagctacacctgctg

SEQ ID NO: 118917 - DNA, 20 bp, synthetic construct
  source 1..20: mol_type = other DNA
tgaaaacagctacacctgct

SEQ ID NO: 118918 - DNA, 20 bp, synthetic construct
  source 1..20: mol_type = other DNA
ttgaaaacagctacacctgc

SEQ ID NO: 118919 - DNA, 20 bp, synthetic construct
  source 1..20: mol_type = other DNA
attgaaaacagctacacctg

SEQ ID NO: 118920 - DNA, 20 bp, synthetic construct
  source 1..20: mol_type = other DNA
cattgaaaacagctacacct

SEQ ID NO: 118921 - DNA, 20 bp, synthetic construct
  source 1..20: mol_type = other DNA
tcattgaaaacagctacacc

SEQ ID NO: 118922 - DNA, 20 bp, synthetic construct
  source 1..20: mol_type = other DNA
atcattgaaaacagctacac

SEQ ID NO: 118923 - DNA, 20 bp, synthetic construct
  source 1..20: mol_type = other DNA
aatcattgaaaacagctaca

SEQ ID NO: 118924 - DNA, 20 bp, synthetic construct
  source 1..20: mol_type = other DNA
taatcattgaaaacagctac

SEQ ID NO: 118925 - DNA, 20 bp, synthetic construct
  source 1..20: mol_type = other DNA
gtaatcattgaaaacagcta

SEQ ID NO: 118926 - DNA, 20 bp, synthetic construct
  source 1..20: mol_type = other DNA
agtaatcattgaaaacagct

SEQ ID NO: 118927 - DNA, 20 bp, synthetic construct
  source 1..20: mol_type = other DNA
aagtaatcattgaaaacagc

SEQ ID NO: 118928 - DNA, 20 bp, synthetic construct
  source 1..20: mol_type = other DNA
taagtaatcattgaaaacag

SEQ ID NO: 118929 - DNA, 20 bp, synthetic construct
  source 1..20: mol_type = other DNA
ttaagtaatcattgaaaaca

SEQ ID NO: 118930 - DNA, 20 bp, synthetic construct
  source 1..20: mol_type = other DNA
tttaagtaatcattgaaaac

SEQ ID NO: 118931 - DNA, 20 bp, synthetic construct
  source 1..20: mol_type = other DNA
ttttaagtaatcattgaaaa

SEQ ID NO: 118932 - DNA, 20 bp, synthetic construct
  source 1..20: mol_type = other DNA
gttttaagtaatcattgaaa

SEQ ID NO: 118933 - DNA, 20 bp, synthetic construct
  source 1..20: mol_type = other DNA
tgttttaagtaatcattgaa

SEQ ID NO: 118934 - DNA, 20 bp, synthetic construct
  source 1..20: mol_type = other DNA
ttgttttaagtaatcattga

SEQ ID NO: 118935 - DNA, 20 bp, synthetic construct
  source 1..20: mol_type = other DNA
attgttttaagtaatcattg

SEQ ID NO: 118936 - DNA, 20 bp, synthetic construct
  source 1..20: mol_type = other DNA
cattgttttaagtaatcatt

SEQ ID NO: 118937 - DNA, 20 bp, synthetic construct
  source 1..20: mol_type = other DNA
gcattgttttaagtaatcat

SEQ ID NO: 118938 - DNA, 20 bp, synthetic construct
  source 1..20: mol_type = other DNA
tgcattgttttaagtaatca

SEQ ID NO: 118939 - DNA, 20 bp, synthetic construct
  source 1..20: mol_type = other DNA
ttgcattgttttaagtaatc

SEQ ID NO: 118940 - DNA, 20 bp, synthetic construct
  source 1..20: mol_type = other DNA
attgcattgttttaagtaat

SEQ ID NO: 118941 - DNA, 20 bp, synthetic construct
  source 1..20: mol_type = other DNA
cattgcattgttttaagtaa

SEQ ID NO: 118942 - DNA, 20 bp, synthetic construct
  source 1..20: mol_type = other DNA
ccattgcattgttttaagta

SEQ ID NO: 118943 - DNA, 20 bp, synthetic construct
  source 1..20: mol_type = other DNA
cccattgcattgttttaagt

SEQ ID NO: 118944 - DNA, 20 bp, synthetic construct
  source 1..20: mol_type = other DNA
tcccattgcattgttttaag

SEQ ID NO: 118945 - DNA, 20 bp, synthetic construct
  source 1..20: mol_type = other DNA
ttcccattgcattgttttaa

SEQ ID NO: 118946 - DNA, 20 bp, synthetic construct
  source 1..20: mol_type = other DNA
gttcccattgcattgtttta

SEQ ID NO: 118947 - DNA, 20 bp, synthetic construct
  source 1..20: mol_type = other DNA
agttcccattgcattgtttt

SEQ ID NO: 118948 - DNA, 20 bp, synthetic construct
  source 1..20: mol_type = other DNA
aagttcccattgcattgttt

SEQ ID NO: 118949 - DNA, 20 bp, synthetic construct
  source 1..20: mol_type = other DNA
aaagttcccattgcattgtt

SEQ ID NO: 118950 - DNA, 20 bp, synthetic construct
  source 1..20: mol_type = other DNA
aaaagttcccattgcattgt

SEQ ID NO: 118951 - DNA, 20 bp, synthetic construct
  source 1..20: mol_type = other DNA
aaaaagttcccattgcattg

SEQ ID NO: 118952 - DNA, 20 bp, synthetic construct
  source 1..20: mol_type = other DNA
caaaaagttcccattgcatt

SEQ ID NO: 118953 - DNA, 20 bp, synthetic construct
  source 1..20: mol_type = other DNA
acaaaaagttcccattgcat

SEQ ID NO: 118954 - DNA, 20 bp, synthetic construct
  source 1..20: mol_type = other DNA
aacaaaaagttcccattgca

SEQ ID NO: 118955 - DNA, 20 bp, synthetic construct
  source 1..20: mol_type = other DNA
caacaaaaagttcccattgc

SEQ ID NO: 118956 - DNA, 20 bp, synthetic construct
  source 1..20: mol_type = other DNA
acaacaaaaagttcccattg

SEQ ID NO: 118957 - DNA, 20 bp, synthetic construct
  source 1..20: mol_type = other DNA
gacaacaaaaagttcccatt

SEQ ID NO: 118958 - DNA, 20 bp, synthetic construct
  source 1..20: mol_type = other DNA
tgacaacaaaaagttcccat

SEQ ID NO: 118959 - DNA, 20 bp, synthetic construct
  source 1..20: mol_type = other DNA
atgacaacaaaaagttccca

SEQ ID NO: 118960 - DNA, 20 bp, synthetic construct
  source 1..20: mol_type = other DNA
aatgacaacaaaaagttccc

SEQ ID NO: 118961 - DNA, 20 bp, synthetic construct
  source 1..20: mol_type = other DNA
taatgacaacaaaaagttcc

SEQ ID NO: 118962 - DNA, 20 bp, synthetic construct
  source 1..20: mol_type = other DNA
ttaatgacaacaaaaagttc

SEQ ID NO: 118963 - DNA, 20 bp, synthetic construct
  source 1..20: mol_type = other DNA
tttaatgacaacaaaaagtt

SEQ ID NO: 118964 - DNA, 20 bp, synthetic construct
  source 1..20: mol_type = other DNA
ttttaatgacaacaaaaagt

SEQ ID NO: 118965 - DNA, 20 bp, synthetic construct
  source 1..20: mol_type = other DNA
attttaatgacaacaaaaag

SEQ ID NO: 118966 - DNA, 20 bp, synthetic construct
  source 1..20: mol_type = other DNA
tattttaatgacaacaaaaa

SEQ ID NO: 118967 - DNA, 20 bp, synthetic construct
  source 1..20: mol_type = other DNA
atattttaatgacaacaaaa

SEQ ID NO: 118968 - DNA, 20 bp, synthetic construct
  source 1..20: mol_type = other DNA
tatattttaatgacaacaaa

SEQ ID NO: 118969 - DNA, 20 bp, synthetic construct
  source 1..20: mol_type = other DNA
ttatattttaatgacaacaa

SEQ ID NO: 118970 - DNA, 20 bp, synthetic construct
  source 1..20: mol_type = other DNA
tttatattttaatgacaaca

SEQ ID NO: 118971 - DNA, 20 bp, synthetic construct
  source 1..20: mol_type = other DNA
ttttatattttaatgacaac

SEQ ID NO: 118972 - DNA, 20 bp, synthetic construct
  source 1..20: mol_type = other DNA
cttttatattttaatgacaa

SEQ ID NO: 118973 - DNA, 20 bp, synthetic construct
  source 1..20: mol_type = other DNA
ccttttatattttaatgaca

SEQ ID NO: 118974 - DNA, 20 bp, synthetic construct
  source 1..20: mol_type = other DNA
accttttatattttaatgac

SEQ ID NO: 118975 - DNA, 20 bp, synthetic construct
  source 1..20: mol_type = other DNA
aaccttttatattttaatga

SEQ ID NO: 118976 - DNA, 20 bp, synthetic construct
  source 1..20: mol_type = other DNA
taaccttttatattttaatg

SEQ ID NO: 118977 - DNA, 20 bp, synthetic construct
  source 1..20: mol_type = other DNA
gtaaccttttatattttaat

SEQ ID NO: 118978 - DNA, 20 bp, synthetic construct
  source 1..20: mol_type = other DNA
agtaaccttttatattttaa

SEQ ID NO: 118979 - DNA, 20 bp, synthetic construct
  source 1..20: mol_type = other DNA
cagtaaccttttatatttta

SEQ ID NO: 118980 - DNA, 20 bp, synthetic construct
  source 1..20: mol_type = other DNA
acagtaaccttttatatttt

SEQ ID NO: 118981 - DNA, 20 bp, synthetic construct
  source 1..20: mol_type = other DNA
tacagtaaccttttatattt

SEQ ID NO: 118982 - DNA, 20 bp, synthetic construct
  source 1..20: mol_type = other DNA
ctacagtaaccttttatatt

SEQ ID NO: 118983 - DNA, 20 bp, synthetic construct
  source 1..20: mol_type = other DNA
actacagtaaccttttatat

SEQ ID NO: 118984 - DNA, 20 bp, synthetic construct
  source 1..20: mol_type = other DNA
tactacagtaaccttttata

SEQ ID NO: 118985 - DNA, 20 bp, synthetic construct
  source 1..20: mol_type = other DNA
ttactacagtaaccttttat

SEQ ID NO: 118986 - DNA, 20 bp, synthetic construct
  source 1..20: mol_type = other DNA
cttactacagtaacctttta

SEQ ID NO: 118987 - DNA, 20 bp, synthetic construct
  source 1..20: mol_type = other DNA
tcttactacagtaacctttt

SEQ ID NO: 118988 - DNA, 20 bp, synthetic construct
  source 1..20: mol_type = other DNA
ctcttactacagtaaccttt

SEQ ID NO: 118989 - DNA, 20 bp, synthetic construct
  source 1..20: mol_type = other DNA
gctcttactacagtaacctt

SEQ ID NO: 118990 - DNA, 20 bp, synthetic construct
  source 1..20: mol_type = other DNA
tgctcttactacagtaacct

SEQ ID NO: 118991 - DNA, 20 bp, synthetic construct
  source 1..20: mol_type = other DNA
ttgctcttactacagtaacc

SEQ ID NO: 118992 - DNA, 20 bp, synthetic construct
  source 1..20: mol_type = other DNA
cttgctcttactacagtaac

SEQ ID NO: 118993 - DNA, 20 bp, synthetic construct
  source 1..20: mol_type = other DNA
gcttgctcttactacagtaa

SEQ ID NO: 118994 - DNA, 20 bp, synthetic construct
  source 1..20: mol_type = other DNA
tgcttgctcttactacagta

SEQ ID NO: 118995 - DNA, 20 bp, synthetic construct
  source 1..20: mol_type = other DNA
atgcttgctcttactacagt

SEQ ID NO: 118996 - DNA, 20 bp, synthetic construct
  source 1..20: mol_type = other DNA
catgcttgctcttactacag

SEQ ID NO: 118997 - DNA, 20 bp, synthetic construct
  source 1..20: mol_type = other DNA
tcatgcttgctcttactaca

SEQ ID NO: 118998 - DNA, 20 bp, synthetic construct
  source 1..20: mol_type = other DNA
gtcatgcttgctcttactac

SEQ ID NO: 118999 - DNA, 20 bp, synthetic construct
  source 1..20: mol_type = other DNA
tgtcatgcttgctcttacta

SEQ ID NO: 119000 - DNA, 20 bp, synthetic construct
  source 1..20: mol_type = other DNA
ctgtcatgcttgctcttact

SEQ ID NO: 119001 - DNA, 20 bp, synthetic construct
  source 1..20: mol_type = other DNA
actgtcatgcttgctcttac

SEQ ID NO: 119002 - DNA, 20 bp, synthetic construct
  source 1..20: mol_type = other DNA
aactgtcatgcttgctctta

SEQ ID NO: 119003 - DNA, 20 bp, synthetic construct
  source 1..20: mol_type = other DNA
aaactgtcatgcttgctctt

SEQ ID NO: 119004 - DNA, 20 bp, synthetic construct
  source 1..20: mol_type = other DNA
caaactgtcatgcttgctct

SEQ ID NO: 119005 - DNA, 20 bp, synthetic construct
  source 1..20: mol_type = other DNA
ccaaactgtcatgcttgctc

SEQ ID NO: 119006 - DNA, 20 bp, synthetic construct
  source 1..20: mol_type = other DNA
gccaaactgtcatgcttgct

SEQ ID NO: 119007 - DNA, 20 bp, synthetic construct
  source 1..20: mol_type = other DNA
agccaaactgtcatgcttgc

SEQ ID NO: 119008 - DNA, 20 bp, synthetic construct
  source 1..20: mol_type = other DNA
tagccaaactgtcatgcttg

SEQ ID NO: 119009 - DNA, 20 bp, synthetic construct
  source 1..20: mol_type = other DNA
atagccaaactgtcatgctt

SEQ ID NO: 119010 - DNA, 20 bp, synthetic construct
  source 1..20: mol_type = other DNA
gatagccaaactgtcatgct

SEQ ID NO: 119011 - DNA, 20 bp, synthetic construct
  source 1..20: mol_type = other DNA
agatagccaaactgtcatgc

SEQ ID NO: 119012 - DNA, 20 bp, synthetic construct
  source 1..20: mol_type = other DNA
cagatagccaaactgtcatg

SEQ ID NO: 119013 - DNA, 20 bp, synthetic construct
  source 1..20: mol_type = other DNA
tcagatagccaaactgtcat

SEQ ID NO: 119014 - DNA, 20 bp, synthetic construct
  source 1..20: mol_type = other DNA
atcagatagccaaactgtca

SEQ ID NO: 119015 - DNA, 20 bp, synthetic construct
  source 1..20: mol_type = other DNA
catcagatagccaaactgtc

SEQ ID NO: 119016 - DNA, 20 bp, synthetic construct
  source 1..20: mol_type = other DNA
ccatcagatagccaaactgt

SEQ ID NO: 119017 - DNA, 20 bp, synthetic construct
  source 1..20: mol_type = other DNA
cccatcagatagccaaactg

SEQ ID NO: 119018 - DNA, 20 bp, synthetic construct
  source 1..20: mol_type = other DNA
tcccatcagatagccaaact

SEQ ID NO: 119019 - DNA, 20 bp, synthetic construct
  source 1..20: mol_type = other DNA
ctcccatcagatagccaaac

SEQ ID NO: 119020 - DNA, 20 bp, synthetic construct
  source 1..20: mol_type = other DNA
tctcccatcagatagccaaa

SEQ ID NO: 119021 - DNA, 20 bp, synthetic construct
  source 1..20: mol_type = other DNA
ctctcccatcagatagccaa

SEQ ID NO: 119022 - DNA, 20 bp, synthetic construct
  source 1..20: mol_type = other DNA
actctcccatcagatagcca

SEQ ID NO: 119023 - DNA, 20 bp, synthetic construct
  source 1..20: mol_type = other DNA
gactctcccatcagatagcc

SEQ ID NO: 119024 - DNA, 20 bp, synthetic construct
  source 1..20: mol_type = other DNA
tgactctcccatcagatagc

SEQ ID NO: 119025 - DNA, 20 bp, synthetic construct
  source 1..20: mol_type = other DNA
gtgactctcccatcagatag

SEQ ID NO: 119026 - DNA, 20 bp, synthetic construct
  source 1..20: mol_type = other DNA
tgtgactctcccatcagata

SEQ ID NO: 119027 - DNA, 20 bp, synthetic construct
  source 1..20: mol_type = other DNA
atgtgactctcccatcagat

SEQ ID NO: 119028 - DNA, 20 bp, synthetic construct
  source 1..20: mol_type = other DNA
aatgtgactctcccatcaga

SEQ ID NO: 119029 - DNA, 20 bp, synthetic construct
  source 1..20: mol_type = other DNA
gaatgtgactctcccatcag

SEQ ID NO: 119030 - DNA, 20 bp, synthetic construct
  source 1..20: mol_type = other DNA
agaatgtgactctcccatca

SEQ ID NO: 119031 - DNA, 20 bp, synthetic construct
  source 1..20: mol_type = other DNA
tagaatgtgactctcccatc

SEQ ID NO: 119032 - DNA, 20 bp, synthetic construct
  source 1..20: mol_type = other DNA
ttagaatgtgactctcccat

SEQ ID NO: 119033 - DNA, 20 bp, synthetic construct
  source 1..20: mol_type = other DNA
gttagaatgtgactctccca

SEQ ID NO: 119034 - DNA, 20 bp, synthetic construct
  source 1..20: mol_type = other DNA
agttagaatgtgactctccc

SEQ ID NO: 119035 - DNA, 20 bp, synthetic construct
  source 1..20: mol_type = other DNA
aagttagaatgtgactctcc

SEQ ID NO: 119036 - DNA, 20 bp, synthetic construct
  source 1..20: mol_type = other DNA
gaagttagaatgtgactctc

SEQ ID NO: 119037 - DNA, 20 bp, synthetic construct
  source 1..20: mol_type = other DNA
tgaagttagaatgtgactct

SEQ ID NO: 119038 - DNA, 20 bp, synthetic construct
  source 1..20: mol_type = other DNA
ctgaagttagaatgtgactc

SEQ ID NO: 119039 - DNA, 20 bp, synthetic construct
  source 1..20: mol_type = other DNA
cctgaagttagaatgtgact

SEQ ID NO: 119040 - DNA, 20 bp, synthetic construct
  source 1..20: mol_type = other DNA
tcctgaagttagaatgtgac

SEQ ID NO: 119041 - DNA, 20 bp, synthetic construct
  source 1..20: mol_type = other DNA
ctcctgaagttagaatgtga

SEQ ID NO: 119042 - DNA, 20 bp, synthetic construct
  source 1..20: mol_type = other DNA
cctcctgaagttagaatgtg

SEQ ID NO: 119043 - DNA, 20 bp, synthetic construct
  source 1..20: mol_type = other DNA
acctcctgaagttagaatgt

SEQ ID NO: 119044 - DNA, 20 bp, synthetic construct
  source 1..20: mol_type = other DNA
tacctcctgaagttagaatg

SEQ ID NO: 119045 - DNA, 20 bp, synthetic construct
  source 1..20: mol_type = other DNA
gtacctcctgaagttagaat

SEQ ID NO: 119046 - DNA, 20 bp, synthetic construct
  source 1..20: mol_type = other DNA
agtacctcctgaagttagaa

SEQ ID NO: 119047 - DNA, 20 bp, synthetic construct
  source 1..20: mol_type = other DNA
cagtacctcctgaagttaga

SEQ ID NO: 119048 - DNA, 20 bp, synthetic construct
  source 1..20: mol_type = other DNA
acagtacctcctgaagttag

SEQ ID NO: 119049 - DNA, 20 bp, synthetic construct
  source 1..20: mol_type = other DNA
gacagtacctcctgaagtta

SEQ ID NO: 119050 - DNA, 20 bp, synthetic construct
  source 1..20: mol_type = other DNA
agacagtacctcctgaagtt

SEQ ID NO: 119051 - DNA, 20 bp, synthetic construct
  source 1..20: mol_type = other DNA
aagacagtacctcctgaagt

SEQ ID NO: 119052 - DNA, 20 bp, synthetic construct
  source 1..20: mol_type = other DNA
aaagacagtacctcctgaag

SEQ ID NO: 119053 - DNA, 20 bp, synthetic construct
  source 1..20: mol_type = other DNA
aaaagacagtacctcctgaa

SEQ ID NO: 119054 - DNA, 20 bp, synthetic construct
  source 1..20: mol_type = other DNA
aaaaagacagtacctcctga

SEQ ID NO: 119055 - DNA, 20 bp, synthetic construct
  source 1..20: mol_type = other DNA
taaaaagacagtacctcctg

SEQ ID NO: 119056 - DNA, 20 bp, synthetic construct
  source 1..20: mol_type = other DNA
ttaaaaagacagtacctcct

SEQ ID NO: 119057 - DNA, 20 bp, synthetic construct
  source 1..20: mol_type = other DNA
attaaaaagacagtacctcc

SEQ ID NO: 119058 - DNA, 20 bp, synthetic construct
  source 1..20: mol_type = other DNA
tattaaaaagacagtacctc

SEQ ID NO: 119059 - DNA, 20 bp, synthetic construct
  source 1..20: mol_type = other DNA
ctattaaaaagacagtacct

SEQ ID NO: 119060 - DNA, 20 bp, synthetic construct
  source 1..20: mol_type = other DNA
tctattaaaaagacagtacc

SEQ ID NO: 119061 - DNA, 20 bp, synthetic construct
  source 1..20: mol_type = other DNA
ttctattaaaaagacagtac

SEQ ID NO: 119062 - DNA, 20 bp, synthetic construct
  source 1..20: mol_type = other DNA
tttctattaaaaagacagta

SEQ ID NO: 119063 - DNA, 20 bp, synthetic construct
  source 1..20: mol_type = other DNA
atttctattaaaaagacagt

SEQ ID NO: 119064 - DNA, 20 bp, synthetic construct
  source 1..20: mol_type = other DNA
catttctattaaaaagacag

SEQ ID NO: 119065 - DNA, 20 bp, synthetic construct
  source 1..20: mol_type = other DNA
tcatttctattaaaaagaca

SEQ ID NO: 119066 - DNA, 20 bp, synthetic construct
  source 1..20: mol_type = other DNA
atcatttctattaaaaagac

SEQ ID NO: 119067 - DNA, 20 bp, synthetic construct
  source 1..20: mol_type = other DNA
tatcatttctattaaaaaga

SEQ ID NO: 119068 - DNA, 20 bp, synthetic construct
  source 1..20: mol_type = other DNA
atatcatttctattaaaaag

SEQ ID NO: 119069 - DNA, 20 bp, synthetic construct
  source 1..20: mol_type = other DNA
tatatcatttctattaaaaa

SEQ ID NO: 119070 - DNA, 20 bp, synthetic construct
  source 1..20: mol_type = other DNA
gtatatcatttctattaaaa

SEQ ID NO: 119071 - DNA, 20 bp, synthetic construct
  source 1..20: mol_type = other DNA
agtatatcatttctattaaa

SEQ ID NO: 119072 - DNA, 20 bp, synthetic construct
  source 1..20: mol_type = other DNA
gagtatatcatttctattaa

SEQ ID NO: 119073 - DNA, 20 bp, synthetic construct
  source 1..20: mol_type = other DNA
tgagtatatcatttctatta

SEQ ID NO: 119074 - DNA, 20 bp, synthetic construct
  source 1..20: mol_type = other DNA
ctgagtatatcatttctatt

SEQ ID NO: 119075 - DNA, 20 bp, synthetic construct
  source 1..20: mol_type = other DNA
tctgagtatatcatttctat

SEQ ID NO: 119076 - DNA, 20 bp, synthetic construct
  source 1..20: mol_type = other DNA
ctctgagtatatcatttcta

SEQ ID NO: 119077 - DNA, 20 bp, synthetic construct
  source 1..20: mol_type = other DNA
actctgagtatatcatttct

SEQ ID NO: 119078 - DNA, 20 bp, synthetic construct
  source 1..20: mol_type = other DNA
gactctgagtatatcatttc

SEQ ID NO: 119079 - DNA, 20 bp, synthetic construct
  source 1..20: mol_type = other DNA
agactctgagtatatcattt

SEQ ID NO: 119080 - DNA, 20 bp, synthetic construct
  source 1..20: mol_type = other DNA
cagactctgagtatatcatt

SEQ ID NO: 119081 - DNA, 20 bp, synthetic construct
  source 1..20: mol_type = other DNA
ccagactctgagtatatcat

SEQ ID NO: 119082 - DNA, 20 bp, synthetic construct
  source 1..20: mol_type = other DNA
cccagactctgagtatatca

SEQ ID NO: 119083 - DNA, 20 bp, synthetic construct
  source 1..20: mol_type = other DNA
gcccagactctgagtatatc

SEQ ID NO: 119084 - DNA, 20 bp, synthetic construct
  source 1..20: mol_type = other DNA
tgcccagactctgagtatat

SEQ ID NO: 119085 - DNA, 20 bp, synthetic construct
  source 1..20: mol_type = other DNA
gtgcccagactctgagtata

SEQ ID NO: 119086 - DNA, 20 bp, synthetic construct
  source 1..20: mol_type = other DNA
cgtgcccagactctgagtat

SEQ ID NO: 119087 - DNA, 20 bp, synthetic construct
  source 1..20: mol_type = other DNA
ccgtgcccagactctgagta

SEQ ID NO: 119088 - DNA, 20 bp, synthetic construct
  source 1..20: mol_type = other DNA
accgtgcccagactctgagt

SEQ ID NO: 119089 - DNA, 20 bp, synthetic construct
  source 1..20: mol_type = other DNA
caccgtgcccagactctgag

SEQ ID NO: 119090 - DNA, 20 bp, synthetic construct
  source 1..20: mol_type = other DNA
ccaccgtgcccagactctga

SEQ ID NO: 119091 - DNA, 20 bp, synthetic construct
  source 1..20: mol_type = other DNA
gccaccgtgcccagactctg

SEQ ID NO: 119092 - DNA, 20 bp, synthetic construct
  source 1..20: mol_type = other DNA
agccaccgtgcccagactct

SEQ ID NO: 119093 - DNA, 20 bp, synthetic construct
  source 1..20: mol_type = other DNA
gagccaccgtgcccagactc

SEQ ID NO: 119094 - DNA, 20 bp, synthetic construct
  source 1..20: mol_type = other DNA
tgagccaccgtgcccagact

SEQ ID NO: 119095 - DNA, 20 bp, synthetic construct
  source 1..20: mol_type = other DNA
gtgagccaccgtgcccagac

SEQ ID NO: 119096 - DNA, 20 bp, synthetic construct
  source 1..20: mol_type = other DNA
cgtgagccaccgtgcccaga

SEQ ID NO: 119097 - DNA, 20 bp, synthetic construct
  source 1..20: mol_type = other DNA
gcgtgagccaccgtgcccag

SEQ ID NO: 119098 - DNA, 20 bp, synthetic construct
  source 1..20: mol_type = other DNA
ggcgtgagccaccgtgccca

SEQ ID NO: 119099 - DNA, 20 bp, synthetic construct
  source 1..20: mol_type = other DNA
aggcgtgagccaccgtgccc

SEQ ID NO: 119100 - DNA, 20 bp, synthetic construct
  source 1..20: mol_type = other DNA
caggcgtgagccaccgtgcc

SEQ ID NO: 119101 - DNA, 20 bp, synthetic construct
  source 1..20: mol_type = other DNA
acaggcgtgagccaccgtgc

SEQ ID NO: 119102 - DNA, 20 bp, synthetic construct
  source 1..20: mol_type = other DNA
tacaggcgtgagccaccgtg

SEQ ID NO: 119103 - DNA, 20 bp, synthetic construct
  source 1..20: mol_type = other DNA
ttacaggcgtgagccaccgt

SEQ ID NO: 119104 - DNA, 20 bp, synthetic construct
  source 1..20: mol_type = other DNA
attacaggcgtgagccaccg

SEQ ID NO: 119105 - DNA, 20 bp, synthetic construct
  source 1..20: mol_type = other DNA
gattacaggcgtgagccacc

SEQ ID NO: 119106 - DNA, 20 bp, synthetic construct
  source 1..20: mol_type = other DNA
ggattacaggcgtgagccac

SEQ ID NO: 119107 - DNA, 20 bp, synthetic construct
  source 1..20: mol_type = other DNA
tggattacaggcgtgagcca

SEQ ID NO: 119108 - DNA, 20 bp, synthetic construct
  source 1..20: mol_type = other DNA
ctggattacaggcgtgagcc

SEQ ID NO: 119109 - DNA, 20 bp, synthetic construct
  source 1..20: mol_type = other DNA
gctggattacaggcgtgagc

SEQ ID NO: 119110 - DNA, 20 bp, synthetic construct
  source 1..20: mol_type = other DNA
tgctggattacaggcgtgag

SEQ ID NO: 119111 - DNA, 20 bp, synthetic construct
  source 1..20: mol_type = other DNA
gtgctggattacaggcgtga

SEQ ID NO: 119112 - DNA, 20 bp, synthetic construct
  source 1..20: mol_type = other DNA
agtgctggattacaggcgtg

SEQ ID NO: 119113 - DNA, 20 bp, synthetic construct
  source 1..20: mol_type = other DNA
aagtgctggattacaggcgt

SEQ ID NO: 119114 - DNA, 20 bp, synthetic construct
  source 1..20: mol_type = other DNA
aaagtgctggattacaggcg

SEQ ID NO: 119115 - DNA, 20 bp, synthetic construct
  source 1..20: mol_type = other DNA
caaagtgctggattacaggc

SEQ ID NO: 119116 - DNA, 20 bp, synthetic construct
  source 1..20: mol_type = other DNA
ccaaagtgctggattacagg

SEQ ID NO: 119117 - DNA, 20 bp, synthetic construct
  source 1..20: mol_type = other DNA
cccaaagtgctggattacag

SEQ ID NO: 119118 - DNA, 20 bp, synthetic construct
  source 1..20: mol_type = other DNA
tcccaaagtgctggattaca

SEQ ID NO: 119119 - DNA, 20 bp, synthetic construct
  source 1..20: mol_type = other DNA
ctcccaaagtgctggattac

SEQ ID NO: 119120 - DNA, 20 bp, synthetic construct
  source 1..20: mol_type = other DNA
cctcccaaagtgctggatta

SEQ ID NO: 119121 - DNA, 20 bp, synthetic construct
  source 1..20: mol_type = other DNA
gcctcccaaagtgctggatt

SEQ ID NO: 119122 - DNA, 20 bp, synthetic construct
  source 1..20: mol_type = other DNA
ggcctcccaaagtgctggat

SEQ ID NO: 119123 - DNA, 20 bp, synthetic construct
  source 1..20: mol_type = other DNA
cggcctcccaaagtgctgga

SEQ ID NO: 119124 - DNA, 20 bp, synthetic construct
  source 1..20: mol_type = other DNA
tcggcctcccaaagtgctgg

SEQ ID NO: 119125 - DNA, 20 bp, synthetic construct
  source 1..20: mol_type = other DNA
ctcggcctcccaaagtgctg

SEQ ID NO: 119126 - DNA, 20 bp, synthetic construct
  source 1..20: mol_type = other DNA
cctcggcctcccaaagtgct

SEQ ID NO: 119127 - DNA, 20 bp, synthetic construct
  source 1..20: mol_type = other DNA
acctcggcctcccaaagtgc

SEQ ID NO: 119128 - DNA, 20 bp, synthetic construct
  source 1..20: mol_type = other DNA
cacctcggcctcccaaagtg

SEQ ID NO: 119129 - DNA, 20 bp, synthetic construct
  source 1..20: mol_type = other DNA
ccacctcggcctcccaaagt

SEQ ID NO: 119130 - DNA, 20 bp, synthetic construct
  source 1..20: mol_type = other DNA
cccacctcggcctcccaaag

SEQ ID NO: 119131 - DNA, 20 bp, synthetic construct
  source 1..20: mol_type = other DNA
gcccacctcggcctcccaaa

SEQ ID NO: 119132 - DNA, 20 bp, synthetic construct
  source 1..20: mol_type = other DNA
tgcccacctcggcctcccaa

SEQ ID NO: 119133 - DNA, 20 bp, synthetic construct
  source 1..20: mol_type = other DNA
ctgcccacctcggcctccca

SEQ ID NO: 119134 - DNA, 20 bp, synthetic construct
  source 1..20: mol_type = other DNA
tctgcccacctcggcctccc

SEQ ID NO: 119135 - DNA, 20 bp, synthetic construct
  source 1..20: mol_type = other DNA
atctgcccacctcggcctcc

SEQ ID NO: 119136 - DNA, 20 bp, synthetic construct
  source 1..20: mol_type = other DNA
gatctgcccacctcggcctc

SEQ ID NO: 119137 - DNA, 20 bp, synthetic construct
  source 1..20: mol_type = other DNA
tgatctgcccacctcggcct

SEQ ID NO: 119138 - DNA, 20 bp, synthetic construct
  source 1..20: mol_type = other DNA
gtgatctgcccacctcggcc

SEQ ID NO: 119139 - DNA, 20 bp, synthetic construct
  source 1..20: mol_type = other DNA
cgtgatctgcccacctcggc

SEQ ID NO: 119140 - DNA, 20 bp, synthetic construct
  source 1..20: mol_type = other DNA
tcgtgatctgcccacctcgg

SEQ ID NO: 119141 - DNA, 20 bp, synthetic construct
  source 1..20: mol_type = other DNA
ctcgtgatctgcccacctcg

SEQ ID NO: 119142 - DNA, 20 bp, synthetic construct
  source 1..20: mol_type = other DNA
cctcgtgatctgcccacctc

SEQ ID NO: 119143 - DNA, 20 bp, synthetic construct
  source 1..20: mol_type = other DNA
acctcgtgatctgcccacct

SEQ ID NO: 119144 - DNA, 20 bp, synthetic construct
  source 1..20: mol_type = other DNA
gacctcgtgatctgcccacc

SEQ ID NO: 119145 - DNA, 20 bp, synthetic construct
  source 1..20: mol_type = other DNA
tgacctcgtgatctgcccac

SEQ ID NO: 119146 - DNA, 20 bp, synthetic construct
  source 1..20: mol_type = other DNA
ctgacctcgtgatctgccca

SEQ ID NO: 119147 - DNA, 20 bp, synthetic construct
  source 1..20: mol_type = other DNA
cctgacctcgtgatctgccc

SEQ ID NO: 119148 - DNA, 20 bp, synthetic construct
  source 1..20: mol_type = other DNA
tcctgacctcgtgatctgcc

SEQ ID NO: 119149 - DNA, 20 bp, synthetic construct
  source 1..20: mol_type = other DNA
ctcctgacctcgtgatctgc

SEQ ID NO: 119150 - DNA, 20 bp, synthetic construct
  source 1..20: mol_type = other DNA
tctcctgacctcgtgatctg

SEQ ID NO: 119151 - DNA, 20 bp, synthetic construct
  source 1..20: mol_type = other DNA
atctcctgacctcgtgatct

SEQ ID NO: 119152 - DNA, 20 bp, synthetic construct
  source 1..20: mol_type = other DNA
gatctcctgacctcgtgatc

SEQ ID NO: 119153 - DNA, 20 bp, synthetic construct
  source 1..20: mol_type = other DNA
tgatctcctgacctcgtgat

SEQ ID NO: 119154 - DNA, 20 bp, synthetic construct
  source 1..20: mol_type = other DNA
ttgatctcctgacctcgtga

SEQ ID NO: 119155 - DNA, 20 bp, synthetic construct
  source 1..20: mol_type = other DNA
cttgatctcctgacctcgtg

SEQ ID NO: 119156 - DNA, 20 bp, synthetic construct
  source 1..20: mol_type = other DNA
tcttgatctcctgacctcgt

SEQ ID NO: 119157 - DNA, 20 bp, synthetic construct
  source 1..20: mol_type = other DNA
gtcttgatctcctgacctcg

SEQ ID NO: 119158 - DNA, 20 bp, synthetic construct
  source 1..20: mol_type = other DNA
ggtcttgatctcctgacctc

SEQ ID NO: 119159 - DNA, 20 bp, synthetic construct
  source 1..20: mol_type = other DNA
tggtcttgatctcctgacct

SEQ ID NO: 119160 - DNA, 20 bp, synthetic construct
  source 1..20: mol_type = other DNA
atggtcttgatctcctgacc

SEQ ID NO: 119161 - DNA, 20 bp, synthetic construct
  source 1..20: mol_type = other DNA
gatggtcttgatctcctgac

SEQ ID NO: 119162 - DNA, 20 bp, synthetic construct
  source 1..20: mol_type = other DNA
ggatggtcttgatctcctga

SEQ ID NO: 119163 - DNA, 20 bp, synthetic construct
  source 1..20: mol_type = other DNA
aggatggtcttgatctcctg

SEQ ID NO: 119164 - DNA, 20 bp, synthetic construct
  source 1..20: mol_type = other DNA
caggatggtcttgatctcct

SEQ ID NO: 119165 - DNA, 20 bp, synthetic construct
  source 1..20: mol_type = other DNA
ccaggatggtcttgatctcc

SEQ ID NO: 119166 - DNA, 20 bp, synthetic construct
  source 1..20: mol_type = other DNA
gccaggatggtcttgatctc

SEQ ID NO: 119167 - DNA, 20 bp, synthetic construct
  source 1..20: mol_type = other DNA
agccaggatggtcttgatct

SEQ ID NO: 119168 - DNA, 20 bp, synthetic construct
  source 1..20: mol_type = other DNA
tagccaggatggtcttgatc

SEQ ID NO: 119169 - DNA, 20 bp, synthetic construct
  source 1..20: mol_type = other DNA
ttagccaggatggtcttgat

SEQ ID NO: 119170 - DNA, 20 bp, synthetic construct
  source 1..20: mol_type = other DNA
attagccaggatggtcttga

SEQ ID NO: 119171 - DNA, 20 bp, synthetic construct
  source 1..20: mol_type = other DNA
tattagccaggatggtcttg

SEQ ID NO: 119172 - DNA, 20 bp, synthetic construct
  source 1..20: mol_type = other DNA
gtattagccaggatggtctt

SEQ ID NO: 119173 - DNA, 20 bp, synthetic construct
  source 1..20: mol_type = other DNA
tgtattagccaggatggtct

SEQ ID NO: 119174 - DNA, 20 bp, synthetic construct
  source 1..20: mol_type = other DNA
ctgtattagccaggatggtc

SEQ ID NO: 119175 - DNA, 20 bp, synthetic construct
  source 1..20: mol_type = other DNA
actgtattagccaggatggt

SEQ ID NO: 119176 - DNA, 20 bp, synthetic construct
  source 1..20: mol_type = other DNA
cactgtattagccaggatgg

SEQ ID NO: 119177 - DNA, 20 bp, synthetic construct
  source 1..20: mol_type = other DNA
tcactgtattagccaggatg

SEQ ID NO: 119178 - DNA, 20 bp, synthetic construct
  source 1..20: mol_type = other DNA
ttcactgtattagccaggat

SEQ ID NO: 119179 - DNA, 20 bp, synthetic construct
  source 1..20: mol_type = other DNA
tttcactgtattagccagga

SEQ ID NO: 119180 - DNA, 20 bp, synthetic construct
  source 1..20: mol_type = other DNA
gtttcactgtattagccagg

SEQ ID NO: 119181 - DNA, 20 bp, synthetic construct
  source 1..20: mol_type = other DNA
ggtttcactgtattagccag

SEQ ID NO: 119182 - DNA, 20 bp, synthetic construct
  source 1..20: mol_type = other DNA
cggtttcactgtattagcca

SEQ ID NO: 119183 - DNA, 20 bp, synthetic construct
  source 1..20: mol_type = other DNA
acggtttcactgtattagcc

SEQ ID NO: 119184 - DNA, 20 bp, synthetic construct
  source 1..20: mol_type = other DNA
cacggtttcactgtattagc

SEQ ID NO: 119185 - DNA, 20 bp, synthetic construct
  source 1..20: mol_type = other DNA
acacggtttcactgtattag

SEQ ID NO: 119186 - DNA, 20 bp, synthetic construct
  source 1..20: mol_type = other DNA
gacacggtttcactgtatta

SEQ ID NO: 119187 - DNA, 20 bp, synthetic construct
  source 1..20: mol_type = other DNA
agacacggtttcactgtatt

SEQ ID NO: 119188 - DNA, 20 bp, synthetic construct
  source 1..20: mol_type = other DNA
gagacacggtttcactgtat

SEQ ID NO: 119189 - DNA, 20 bp, synthetic construct
  source 1..20: mol_type = other DNA
agagacacggtttcactgta

SEQ ID NO: 119190 - DNA, 20 bp, synthetic construct
  source 1..20: mol_type = other DNA
tagagacacggtttcactgt

SEQ ID NO: 119191 - DNA, 20 bp, synthetic construct
  source 1..20: mol_type = other DNA
gtagagacacggtttcactg

SEQ ID NO: 119192 - DNA, 20 bp, synthetic construct
  source 1..20: mol_type = other DNA
agtagagacacggtttcact

SEQ ID NO: 119193 - DNA, 20 bp, synthetic construct
  source 1..20: mol_type = other DNA
tagtagagacacggtttcac

SEQ ID NO: 119194 - DNA, 20 bp, synthetic construct
  source 1..20: mol_type = other DNA
ttagtagagacacggtttca

SEQ ID NO: 119195 - DNA, 20 bp, synthetic construct
  source 1..20: mol_type = other DNA
tttagtagagacacggtttc

SEQ ID NO: 119196 - DNA, 20 bp, synthetic construct
  source 1..20: mol_type = other DNA
ttttagtagagacacggttt

SEQ ID NO: 119197 - DNA, 20 bp, synthetic construct
  source 1..20: mol_type = other DNA
tttttagtagagacacggtt

SEQ ID NO: 119198 - DNA, 20 bp, synthetic construct
  source 1..20: mol_type = other DNA
atttttagtagagacacggt

SEQ ID NO: 119199 - DNA, 20 bp, synthetic construct
  source 1..20: mol_type = other DNA
tatttttagtagagacacgg

SEQ ID NO: 119200 - DNA, 20 bp, synthetic construct
  source 1..20: mol_type = other DNA
gtatttttagtagagacacg

SEQ ID NO: 119201 - DNA, 20 bp, synthetic construct
  source 1..20: mol_type = other DNA
tgtatttttagtagagacac

SEQ ID NO: 119202 - DNA, 20 bp, synthetic construct
  source 1..20: mol_type = other DNA
ttgtatttttagtagagaca

SEQ ID NO: 119203 - DNA, 20 bp, synthetic construct
  source 1..20: mol_type = other DNA
tttgtatttttagtagagac

SEQ ID NO: 119204 - DNA, 20 bp, synthetic construct
  source 1..20: mol_type = other DNA
gtttgtatttttagtagaga

SEQ ID NO: 119205 - DNA, 20 bp, synthetic construct
  source 1..20: mol_type = other DNA
tgtttgtatttttagtagag

SEQ ID NO: 119206 - DNA, 20 bp, synthetic construct
  source 1..20: mol_type = other DNA
ttgtttgtatttttagtaga

SEQ ID NO: 119207 - DNA, 20 bp, synthetic construct
  source 1..20: mol_type = other DNA
attgtttgtatttttagtag

SEQ ID NO: 119208 - DNA, 20 bp, synthetic construct
  source 1..20: mol_type = other DNA
aattgtttgtatttttagta

SEQ ID NO: 119209 - DNA, 20 bp, synthetic construct
  source 1..20: mol_type = other DNA
taattgtttgtatttttagt

SEQ ID NO: 119210 - DNA, 20 bp, synthetic construct
  source 1..20: mol_type = other DNA
ctaattgtttgtatttttag

SEQ ID NO: 119211 - DNA, 20 bp, synthetic construct
  source 1..20: mol_type = other DNA
gctaattgtttgtattttta

SEQ ID NO: 119212 - DNA, 20 bp, synthetic construct
  source 1..20: mol_type = other DNA
agctaattgtttgtattttt

SEQ ID NO: 119213 - DNA, 20 bp, synthetic construct
  source 1..20: mol_type = other DNA
cagctaattgtttgtatttt

SEQ ID NO: 119214 - DNA, 20 bp, synthetic construct
  source 1..20: mol_type = other DNA
tcagctaattgtttgtattt

SEQ ID NO: 119215 - DNA, 20 bp, synthetic construct
  source 1..20: mol_type = other DNA
ctcagctaattgtttgtatt

SEQ ID NO: 119216 - DNA, 20 bp, synthetic construct
  source 1..20: mol_type = other DNA
gctcagctaattgtttgtat

SEQ ID NO: 119217 - DNA, 20 bp, synthetic construct
  source 1..20: mol_type = other DNA
cgctcagctaattgtttgta

SEQ ID NO: 119218 - DNA, 20 bp, synthetic construct
  source 1..20: mol_type = other DNA
acgctcagctaattgtttgt

SEQ ID NO: 119219 - DNA, 20 bp, synthetic construct
  source 1..20: mol_type = other DNA
cacgctcagctaattgtttg

SEQ ID NO: 119220 - DNA, 20 bp, synthetic construct
  source 1..20: mol_type = other DNA
ccacgctcagctaattgttt

SEQ ID NO: 119221 - DNA, 20 bp, synthetic construct
  source 1..20: mol_type = other DNA
accacgctcagctaattgtt

SEQ ID NO: 119222 - DNA, 20 bp, synthetic construct
  source 1..20: mol_type = other DNA
caccacgctcagctaattgt

SEQ ID NO: 119223 - DNA, 20 bp, synthetic construct
  source 1..20: mol_type = other DNA
ccaccacgctcagctaattg

SEQ ID NO: 119224 - DNA, 20 bp, synthetic construct
  source 1..20: mol_type = other DNA
gccaccacgctcagctaatt

SEQ ID NO: 119225 - DNA, 20 bp, synthetic construct
  source 1..20: mol_type = other DNA
tgccaccacgctcagctaat

SEQ ID NO: 119226 - DNA, 20 bp, synthetic construct
  source 1..20: mol_type = other DNA
ctgccaccacgctcagctaa

SEQ ID NO: 119227 - DNA, 20 bp, synthetic construct
  source 1..20: mol_type = other DNA
cctgccaccacgctcagcta

SEQ ID NO: 119228 - DNA, 20 bp, synthetic construct
  source 1..20: mol_type = other DNA
acctgccaccacgctcagct

SEQ ID NO: 119229 - DNA, 20 bp, synthetic construct
  source 1..20: mol_type = other DNA
cacctgccaccacgctcagc

SEQ ID NO: 119230 - DNA, 20 bp, synthetic construct
  source 1..20: mol_type = other DNA
gcacctgccaccacgctcag

SEQ ID NO: 119231 - DNA, 20 bp, synthetic construct
  source 1..20: mol_type = other DNA
ggcacctgccaccacgctca

SEQ ID NO: 119232 - DNA, 20 bp, synthetic construct
  source 1..20: mol_type = other DNA
aggcacctgccaccacgctc

SEQ ID NO: 119233 - DNA, 20 bp, synthetic construct
  source 1..20: mol_type = other DNA
taggcacctgccaccacgct

SEQ ID NO: 119234 - DNA, 20 bp, synthetic construct
  source 1..20: mol_type = other DNA
ataggcacctgccaccacgc

SEQ ID NO: 119235 - DNA, 20 bp, synthetic construct
  source 1..20: mol_type = other DNA
tataggcacctgccaccacg

SEQ ID NO: 119236 - DNA, 20 bp, synthetic construct
  source 1..20: mol_type = other DNA
ctataggcacctgccaccac

SEQ ID NO: 119237 - DNA, 20 bp, synthetic construct
  source 1..20: mol_type = other DNA
actataggcacctgccacca

SEQ ID NO: 119238 - DNA, 20 bp, synthetic construct
  source 1..20: mol_type = other DNA
gactataggcacctgccacc

SEQ ID NO: 119239 - DNA, 20 bp, synthetic construct
  source 1..20: mol_type = other DNA
ggactataggcacctgccac

SEQ ID NO: 119240 - DNA, 20 bp, synthetic construct
  source 1..20: mol_type = other DNA
gggactataggcacctgcca

SEQ ID NO: 119241 - DNA, 20 bp, synthetic construct
  source 1..20: mol_type = other DNA
tgggactataggcacctgcc

SEQ ID NO: 119242 - DNA, 20 bp, synthetic construct
  source 1..20: mol_type = other DNA
ctgggactataggcacctgc

SEQ ID NO: 119243 - DNA, 20 bp, synthetic construct
  source 1..20: mol_type = other DNA
gctgggactataggcacctg

SEQ ID NO: 119244 - DNA, 20 bp, synthetic construct
  source 1..20: mol_type = other DNA
agctgggactataggcacct

SEQ ID NO: 119245 - DNA, 20 bp, synthetic construct
  source 1..20: mol_type = other DNA
tagctgggactataggcacc

SEQ ID NO: 119246 - DNA, 20 bp, synthetic construct
  source 1..20: mol_type = other DNA
gtagctgggactataggcac

SEQ ID NO: 119247 - DNA, 20 bp, synthetic construct
  source 1..20: mol_type = other DNA
agtagctgggactataggca

SEQ ID NO: 119248 - DNA, 20 bp, synthetic construct
  source 1..20: mol_type = other DNA
gagtagctgggactataggc

SEQ ID NO: 119249 - DNA, 20 bp, synthetic construct
  source 1..20: mol_type = other DNA
cgagtagctgggactatagg

SEQ ID NO: 119250 - DNA, 20 bp, synthetic construct
  source 1..20: mol_type = other DNA
ccgagtagctgggactatag

SEQ ID NO: 119251 - DNA, 20 bp, synthetic construct
  source 1..20: mol_type = other DNA
cccgagtagctgggactata

SEQ ID NO: 119252 - DNA, 20 bp, synthetic construct
  source 1..20: mol_type = other DNA
tcccgagtagctgggactat

SEQ ID NO: 119253 - DNA, 20 bp, synthetic construct
  source 1..20: mol_type = other DNA
ctcccgagtagctgggacta

SEQ ID NO: 119254 - DNA, 20 bp, synthetic construct
  source 1..20: mol_type = other DNA
cctcccgagtagctgggact

SEQ ID NO: 119255 - DNA, 20 bp, synthetic construct
  source 1..20: mol_type = other DNA
gcctcccgagtagctgggac

SEQ ID NO: 119256 - DNA, 20 bp, synthetic construct
  source 1..20: mol_type = other DNA
agcctcccgagtagctggga

SEQ ID NO: 119257 - DNA, 20 bp, synthetic construct
  source 1..20: mol_type = other DNA
cagcctcccgagtagctggg

SEQ ID NO: 119258 - DNA, 20 bp, synthetic construct
  source 1..20: mol_type = other DNA
tcagcctcccgagtagctgg

SEQ ID NO: 119259 - DNA, 20 bp, synthetic construct
  source 1..20: mol_type = other DNA
ctcagcctcccgagtagctg

SEQ ID NO: 119260 - DNA, 20 bp, synthetic construct
  source 1..20: mol_type = other DNA
cctcagcctcccgagtagct

SEQ ID NO: 119261 - DNA, 20 bp, synthetic construct
  source 1..20: mol_type = other DNA
gcctcagcctcccgagtagc

SEQ ID NO: 119262 - DNA, 20 bp, synthetic construct
  source 1..20: mol_type = other DNA
tgcctcagcctcccgagtag

SEQ ID NO: 119263 - DNA, 20 bp, synthetic construct
  source 1..20: mol_type = other DNA
ctgcctcagcctcccgagta

SEQ ID NO: 119264 - DNA, 20 bp, synthetic construct
  source 1..20: mol_type = other DNA
cctgcctcagcctcccgagt

SEQ ID NO: 119265 - DNA, 20 bp, synthetic construct
  source 1..20: mol_type = other DNA
tcctgcctcagcctcccgag

SEQ ID NO: 119266 - DNA, 20 bp, synthetic construct
  source 1..20: mol_type = other DNA
ctcctgcctcagcctcccga

SEQ ID NO: 119267 - DNA, 20 bp, synthetic construct
  source 1..20: mol_type = other DNA
tctcctgcctcagcctcccg

SEQ ID NO: 119268 - DNA, 20 bp, synthetic construct
  source 1..20: mol_type = other DNA
ttctcctgcctcagcctccc

SEQ ID NO: 119269 - DNA, 20 bp, synthetic construct
  source 1..20: mol_type = other DNA
attctcctgcctcagcctcc

SEQ ID NO: 119270 - DNA, 20 bp, synthetic construct
  source 1..20: mol_type = other DNA
cattctcctgcctcagcctc

SEQ ID NO: 119271 - DNA, 20 bp, synthetic construct
  source 1..20: mol_type = other DNA
ccattctcctgcctcagcct

SEQ ID NO: 119272 - DNA, 20 bp, synthetic construct
  source 1..20: mol_type = other DNA
gccattctcctgcctcagcc

SEQ ID NO: 119273 - DNA, 20 bp, synthetic construct
  source 1..20: mol_type = other DNA
tgccattctcctgcctcagc

SEQ ID NO: 119274 - DNA, 20 bp, synthetic construct
  source 1..20: mol_type = other DNA
atgccattctcctgcctcag

SEQ ID NO: 119275 - DNA, 20 bp, synthetic construct
  source 1..20: mol_type = other DNA
catgccattctcctgcctca

SEQ ID NO: 119276 - DNA, 20 bp, synthetic construct
  source 1..20: mol_type = other DNA
tcatgccattctcctgcctc

SEQ ID NO: 119277 - DNA, 20 bp, synthetic construct
  source 1..20: mol_type = other DNA
ttcatgccattctcctgcct

SEQ ID NO: 119278 - DNA, 20 bp, synthetic construct
  source 1..20: mol_type = other DNA
gttcatgccattctcctgcc

SEQ ID NO: 119279 - DNA, 20 bp, synthetic construct
  source 1..20: mol_type = other DNA
ggttcatgccattctcctgc

SEQ ID NO: 119280 - DNA, 20 bp, synthetic construct
  source 1..20: mol_type = other DNA
aggttcatgccattctcctg

SEQ ID NO: 119281 - DNA, 20 bp, synthetic construct
  source 1..20: mol_type = other DNA
caggttcatgccattctcct

SEQ ID NO: 119282 - DNA, 20 bp, synthetic construct
  source 1..20: mol_type = other DNA
ccaggttcatgccattctcc

SEQ ID NO: 119283 - DNA, 20 bp, synthetic construct
  source 1..20: mol_type = other DNA
cccaggttcatgccattctc

SEQ ID NO: 119284 - DNA, 20 bp, synthetic construct
  source 1..20: mol_type = other DNA
tcccaggttcatgccattct

SEQ ID NO: 119285 - DNA, 20 bp, synthetic construct
  source 1..20: mol_type = other DNA
ctcccaggttcatgccattc

SEQ ID NO: 119286 - DNA, 20 bp, synthetic construct
  source 1..20: mol_type = other DNA
cctcccaggttcatgccatt

SEQ ID NO: 119287 - DNA, 20 bp, synthetic construct
  source 1..20: mol_type = other DNA
gcctcccaggttcatgccat

SEQ ID NO: 119288 - DNA, 20 bp, synthetic construct
  source 1..20: mol_type = other DNA
tgcctcccaggttcatgcca

SEQ ID NO: 119289 - DNA, 20 bp, synthetic construct
  source 1..20: mol_type = other DNA
ctgcctcccaggttcatgcc

SEQ ID NO: 119290 - DNA, 20 bp, synthetic construct
  source 1..20: mol_type = other DNA
tctgcctcccaggttcatgc

SEQ ID NO: 119291 - DNA, 20 bp, synthetic construct
  source 1..20: mol_type = other DNA
ctctgcctcccaggttcatg

SEQ ID NO: 119292 - DNA, 20 bp, synthetic construct
  source 1..20: mol_type = other DNA
gctctgcctcccaggttcat

SEQ ID NO: 119293 - DNA, 20 bp, synthetic construct
  source 1..20: mol_type = other DNA
agctctgcctcccaggttca

SEQ ID NO: 119294 - DNA, 20 bp, synthetic construct
  source 1..20: mol_type = other DNA
cagctctgcctcccaggttc

SEQ ID NO: 119295 - DNA, 20 bp, synthetic construct
  source 1..20: mol_type = other DNA
ccagctctgcctcccaggtt

SEQ ID NO: 119296 - DNA, 20 bp, synthetic construct
  source 1..20: mol_type = other DNA
gccagctctgcctcccaggt

SEQ ID NO: 119297 - DNA, 20 bp, synthetic construct
  source 1..20: mol_type = other DNA
tgccagctctgcctcccagg

SEQ ID NO: 119298 - DNA, 20 bp, synthetic construct
  source 1..20: mol_type = other DNA
ctgccagctctgcctcccag

SEQ ID NO: 119299 - DNA, 20 bp, synthetic construct
  source 1..20: mol_type = other DNA
actgccagctctgcctccca

SEQ ID NO: 119300 - DNA, 20 bp, synthetic construct
  source 1..20: mol_type = other DNA
cactgccagctctgcctccc

SEQ ID NO: 119301 - DNA, 20 bp, synthetic construct
  source 1..20: mol_type = other DNA
tcactgccagctctgcctcc

SEQ ID NO: 119302 - DNA, 20 bp, synthetic construct
  source 1..20: mol_type = other DNA
ctcactgccagctctgcctc

SEQ ID NO: 119303 - DNA, 20 bp, synthetic construct
  source 1..20: mol_type = other DNA
gctcactgccagctctgcct

SEQ ID NO: 119304 - DNA, 20 bp, synthetic construct
  source 1..20: mol_type = other DNA
agctcactgccagctctgcc

SEQ ID NO: 119305 - DNA, 20 bp, synthetic construct
  source 1..20: mol_type = other DNA
cagctcactgccagctctgc

SEQ ID NO: 119306 - DNA, 20 bp, synthetic construct
  source 1..20: mol_type = other DNA
tcagctcactgccagctctg

SEQ ID NO: 119307 - DNA, 20 bp, synthetic construct
  source 1..20: mol_type = other DNA
ctcagctcactgccagctct

SEQ ID NO: 119308 - DNA, 20 bp, synthetic construct
  source 1..20: mol_type = other DNA
tctcagctcactgccagctc

SEQ ID NO: 119309 - DNA, 20 bp, synthetic construct
  source 1..20: mol_type = other DNA
atctcagctcactgccagct

SEQ ID NO: 119310 - DNA, 20 bp, synthetic construct
  source 1..20: mol_type = other DNA
catctcagctcactgccagc

SEQ ID NO: 119311 - DNA, 20 bp, synthetic construct
  source 1..20: mol_type = other DNA
ccatctcagctcactgccag

SEQ ID NO: 119312 - DNA, 20 bp, synthetic construct
  source 1..20: mol_type = other DNA
accatctcagctcactgcca

SEQ ID NO: 119313 - DNA, 20 bp, synthetic construct
  source 1..20: mol_type = other DNA
caccatctcagctcactgcc

SEQ ID NO: 119314 - DNA, 20 bp, synthetic construct
  source 1..20: mol_type = other DNA
gcaccatctcagctcactgc

SEQ ID NO: 119315 - DNA, 20 bp, synthetic construct
  source 1..20: mol_type = other DNA
ggcaccatctcagctcactg

SEQ ID NO: 119316 - DNA, 20 bp, synthetic construct
  source 1..20: mol_type = other DNA
tggcaccatctcagctcact

SEQ ID NO: 119317 - DNA, 20 bp, synthetic construct
  source 1..20: mol_type = other DNA
gtggcaccatctcagctcac

SEQ ID NO: 119318 - DNA, 20 bp, synthetic construct
  source 1..20: mol_type = other DNA
agtggcaccatctcagctca

SEQ ID NO: 119319 - DNA, 20 bp, synthetic construct
  source 1..20: mol_type = other DNA
cagtggcaccatctcagctc

SEQ ID NO: 119320 - DNA, 20 bp, synthetic construct
  source 1..20: mol_type = other DNA
gcagtggcaccatctcagct

SEQ ID NO: 119321 - DNA, 20 bp, synthetic construct
  source 1..20: mol_type = other DNA
tgcagtggcaccatctcagc

SEQ ID NO: 119322 - DNA, 20 bp, synthetic construct
  source 1..20: mol_type = other DNA
gtgcagtggcaccatctcag

SEQ ID NO: 119323 - DNA, 20 bp, synthetic construct
  source 1..20: mol_type = other DNA
agtgcagtggcaccatctca

SEQ ID NO: 119324 - DNA, 20 bp, synthetic construct
  source 1..20: mol_type = other DNA
gagtgcagtggcaccatctc

SEQ ID NO: 119325 - DNA, 20 bp, synthetic construct
  source 1..20: mol_type = other DNA
ggagtgcagtggcaccatct

SEQ ID NO: 119326 - DNA, 20 bp, synthetic construct
  source 1..20: mol_type = other DNA
tggagtgcagtggcaccatc

SEQ ID NO: 119327 - DNA, 20 bp, synthetic construct
  source 1..20: mol_type = other DNA
ctggagtgcagtggcaccat

SEQ ID NO: 119328 - DNA, 20 bp, synthetic construct
  source 1..20: mol_type = other DNA
gctggagtgcagtggcacca

SEQ ID NO: 119329 - DNA, 20 bp, synthetic construct
  source 1..20: mol_type = other DNA
ggctggagtgcagtggcacc

SEQ ID NO: 119330 - DNA, 20 bp, synthetic construct
  source 1..20: mol_type = other DNA
aggctggagtgcagtggcac

SEQ ID NO: 119331 - DNA, 20 bp, synthetic construct
  source 1..20: mol_type = other DNA
caggctggagtgcagtggca

SEQ ID NO: 119332 - DNA, 20 bp, synthetic construct
  source 1..20: mol_type = other DNA
ccaggctggagtgcagtggc

SEQ ID NO: 119333 - DNA, 20 bp, synthetic construct
  source 1..20: mol_type = other DNA
cccaggctggagtgcagtgg

SEQ ID NO: 119334 - DNA, 20 bp, synthetic construct
  source 1..20: mol_type = other DNA
acccaggctggagtgcagtg

SEQ ID NO: 119335 - DNA, 20 bp, synthetic construct
  source 1..20: mol_type = other DNA
cacccaggctggagtgcagt

SEQ ID NO: 119336 - DNA, 20 bp, synthetic construct
  source 1..20: mol_type = other DNA
tcacccaggctggagtgcag

SEQ ID NO: 119337 - DNA, 20 bp, synthetic construct
  source 1..20: mol_type = other DNA
gtcacccaggctggagtgca

SEQ ID NO: 119338 - DNA, 20 bp, synthetic construct
  source 1..20: mol_type = other DNA
tgtcacccaggctggagtgc

SEQ ID NO: 119339 - DNA, 20 bp, synthetic construct
  source 1..20: mol_type = other DNA
ctgtcacccaggctggagtg

SEQ ID NO: 119340 - DNA, 20 bp, synthetic construct
  source 1..20: mol_type = other DNA
tctgtcacccaggctggagt

SEQ ID NO: 119341 - DNA, 20 bp, synthetic construct
  source 1..20: mol_type = other DNA
ctctgtcacccaggctggag

SEQ ID NO: 119342 - DNA, 20 bp, synthetic construct
  source 1..20: mol_type = other DNA
gctctgtcacccaggctgga

SEQ ID NO: 119343 - DNA, 20 bp, synthetic construct
  source 1..20: mol_type = other DNA
cgctctgtcacccaggctgg

SEQ ID NO: 119344 - DNA, 20 bp, synthetic construct
  source 1..20: mol_type = other DNA
tcgctctgtcacccaggctg

SEQ ID NO: 119345 - DNA, 20 bp, synthetic construct
  source 1..20: mol_type = other DNA
ctcgctctgtcacccaggct

SEQ ID NO: 119346 - DNA, 20 bp, synthetic construct
  source 1..20: mol_type = other DNA
tctcgctctgtcacccaggc

SEQ ID NO: 119347 - DNA, 20 bp, synthetic construct
  source 1..20: mol_type = other DNA
gtctcgctctgtcacccagg

SEQ ID NO: 119348 - DNA, 20 bp, synthetic construct
  source 1..20: mol_type = other DNA
agtctcgctctgtcacccag

SEQ ID NO: 119349 - DNA, 20 bp, synthetic construct
  source 1..20: mol_type = other DNA
gagtctcgctctgtcaccca

SEQ ID NO: 119350 - DNA, 20 bp, synthetic construct
  source 1..20: mol_type = other DNA
ggagtctcgctctgtcaccc

SEQ ID NO: 119351 - DNA, 20 bp, synthetic construct
  source 1..20: mol_type = other DNA
cggagtctcgctctgtcacc

SEQ ID NO: 119352 - DNA, 20 bp, synthetic construct
  source 1..20: mol_type = other DNA
acggagtctcgctctgtcac

SEQ ID NO: 119353 - DNA, 20 bp, synthetic construct
  source 1..20: mol_type = other DNA
gacggagtctcgctctgtca

SEQ ID NO: 119354 - DNA, 20 bp, synthetic construct
  source 1..20: mol_type = other DNA
agacggagtctcgctctgtc

SEQ ID NO: 119355 - DNA, 20 bp, synthetic construct
  source 1..20: mol_type = other DNA
gagacggagtctcgctctgt

SEQ ID NO: 119356 - DNA, 20 bp, synthetic construct
  source 1..20: mol_type = other DNA
tgagacggagtctcgctctg

SEQ ID NO: 119357 - DNA, 20 bp, synthetic construct
  source 1..20: mol_type = other DNA
ttgagacggagtctcgctct

SEQ ID NO: 119358 - DNA, 20 bp, synthetic construct
  source 1..20: mol_type = other DNA
tttgagacggagtctcgctc

SEQ ID NO: 119359 - DNA, 20 bp, synthetic construct
  source 1..20: mol_type = other DNA
ttttgagacggagtctcgct

SEQ ID NO: 119360 - DNA, 20 bp, synthetic construct
  source 1..20: mol_type = other DNA
tttttgagacggagtctcgc

SEQ ID NO: 119361 - DNA, 20 bp, synthetic construct
  source 1..20: mol_type = other DNA
ttttttgagacggagtctcg

SEQ ID NO: 119362 - DNA, 20 bp, synthetic construct
  source 1..20: mol_type = other DNA
tttttttgagacggagtctc

SEQ ID NO: 119363 - DNA, 20 bp, synthetic construct
  source 1..20: mol_type = other DNA
ttttttttgagacggagtct

SEQ ID NO: 119364 - DNA, 20 bp, synthetic construct
  source 1..20: mol_type = other DNA
tttttttttgagacggagtc

SEQ ID NO: 119365 - DNA, 20 bp, synthetic construct
  source 1..20: mol_type = other DNA
ttttttttttgagacggagt

SEQ ID NO: 119366 - DNA, 20 bp, synthetic construct
  source 1..20: mol_type = other DNA
tttttttttttgagacggag

SEQ ID NO: 119367 - DNA, 20 bp, synthetic construct
  source 1..20: mol_type = other DNA
ttttttttttttgagacgga

SEQ ID NO: 119368 - DNA, 20 bp, synthetic construct
  source 1..20: mol_type = other DNA
tttttttttttttgagacgg

SEQ ID NO: 119369 - DNA, 20 bp, synthetic construct
  source 1..20: mol_type = other DNA
ttttttttttttttgagacg

SEQ ID NO: 119370 - DNA, 20 bp, synthetic construct
  source 1..20: mol_type = other DNA
tttttttttttttttgagac

SEQ ID NO: 119371 - DNA, 20 bp, synthetic construct
  source 1..20: mol_type = other DNA
ttttttttttttttttgaga

SEQ ID NO: 119372 - DNA, 20 bp, synthetic construct
  source 1..20: mol_type = other DNA
tttttttttttttttttgag

SEQ ID NO: 119373 - DNA, 20 bp, synthetic construct
  source 1..20: mol_type = other DNA
ttttttttttttttttttga

SEQ ID NO: 119374 - DNA, 20 bp, synthetic construct
  source 1..20: mol_type = other DNA
tttttttttttttttttttg

SEQ ID NO: 119375 - DNA, 20 bp, synthetic construct
  source 1..20: mol_type = other DNA
tttttttttttttttttttt

SEQ ID NO: 119376 - DNA, 20 bp, synthetic construct
  source 1..20: mol_type = other DNA
tttttttttttttttttttt

SEQ ID NO: 119377 - DNA, 20 bp, synthetic construct
  source 1..20: mol_type = other DNA
tttttttttttttttttttt

SEQ ID NO: 119378 - DNA, 20 bp, synthetic construct
  source 1..20: mol_type = other DNA
attttttttttttttttttt

SEQ ID NO: 119379 - DNA, 20 bp, synthetic construct
  source 1..20: mol_type = other DNA
tatttttttttttttttttt

SEQ ID NO: 119380 - DNA, 20 bp, synthetic construct
  source 1..20: mol_type = other DNA
ctattttttttttttttttt

SEQ ID NO: 119381 - DNA, 20 bp, synthetic construct
  source 1..20: mol_type = other DNA
actatttttttttttttttt

SEQ ID NO: 119382 - DNA, 20 bp, synthetic construct
  source 1..20: mol_type = other DNA
tactattttttttttttttt

SEQ ID NO: 119383 - DNA, 20 bp, synthetic construct
  source 1..20: mol_type = other DNA
ctactatttttttttttttt

SEQ ID NO: 119384 - DNA, 20 bp, synthetic construct
  source 1..20: mol_type = other DNA
tctactattttttttttttt

SEQ ID NO: 119385 - DNA, 20 bp, synthetic construct
  source 1..20: mol_type = other DNA
ctctactatttttttttttt

SEQ ID NO: 119386 - DNA, 20 bp, synthetic construct
  source 1..20: mol_type = other DNA
tctctactattttttttttt

SEQ ID NO: 119387 - DNA, 20 bp, synthetic construct
  source 1..20: mol_type = other DNA
ttctctactatttttttttt

SEQ ID NO: 119388 - DNA, 20 bp, synthetic construct
  source 1..20: mol_type = other DNA
tttctctactattttttttt

SEQ ID NO: 119389 - DNA, 20 bp, synthetic construct
  source 1..20: mol_type = other DNA
ctttctctactatttttttt

SEQ ID NO: 119390 - DNA, 20 bp, synthetic construct
  source 1..20: mol_type = other DNA
cctttctctactattttttt

SEQ ID NO: 119391 - DNA, 20 bp, synthetic construct
  source 1..20: mol_type = other DNA
ccctttctctactatttttt

SEQ ID NO: 119392 - DNA, 20 bp, synthetic construct
  source 1..20: mol_type = other DNA
gccctttctctactattttt

SEQ ID NO: 119393 - DNA, 20 bp, synthetic construct
  source 1..20: mol_type = other DNA
agccctttctctactatttt

SEQ ID NO: 119394 - DNA, 20 bp, synthetic construct
  source 1..20: mol_type = other DNA
aagccctttctctactattt

SEQ ID NO: 119395 - DNA, 20 bp, synthetic construct
  source 1..20: mol_type = other DNA
aaagccctttctctactatt

SEQ ID NO: 119396 - DNA, 20 bp, synthetic construct
  source 1..20: mol_type = other DNA
caaagccctttctctactat

SEQ ID NO: 119397 - DNA, 20 bp, synthetic construct
  source 1..20: mol_type = other DNA
gcaaagccctttctctacta

SEQ ID NO: 119398 - DNA, 20 bp, synthetic construct
  source 1..20: mol_type = other DNA
ggcaaagccctttctctact

SEQ ID NO: 119399 - DNA, 20 bp, synthetic construct
  source 1..20: mol_type = other DNA
tggcaaagccctttctctac

SEQ ID NO: 119400 - DNA, 20 bp, synthetic construct
  source 1..20: mol_type = other DNA
atggcaaagccctttctcta

SEQ ID NO: 119401 - DNA, 20 bp, synthetic construct
  source 1..20: mol_type = other DNA
catggcaaagccctttctct

SEQ ID NO: 119402 - DNA, 20 bp, synthetic construct
  source 1..20: mol_type = other DNA
acatggcaaagccctttctc

SEQ ID NO: 119403 - DNA, 20 bp, synthetic construct
  source 1..20: mol_type = other DNA
aacatggcaaagccctttct

SEQ ID NO: 119404 - DNA, 20 bp, synthetic construct
  source 1..20: mol_type = other DNA
caacatggcaaagccctttc

SEQ ID NO: 119405 - DNA, 20 bp, synthetic construct
  source 1..20: mol_type = other DNA
ccaacatggcaaagcccttt

SEQ ID NO: 119406 - DNA, 20 bp, synthetic construct
  source 1..20: mol_type = other DNA
gccaacatggcaaagccctt

SEQ ID NO: 119407 - DNA, 20 bp, synthetic construct
  source 1..20: mol_type = other DNA
ggccaacatggcaaagccct

SEQ ID NO: 119408 - DNA, 20 bp, synthetic construct
  source 1..20: mol_type = other DNA
cggccaacatggcaaagccc

SEQ ID NO: 119409 - DNA, 20 bp, synthetic construct
  source 1..20: mol_type = other DNA
ccggccaacatggcaaagcc

SEQ ID NO: 119410 - DNA, 20 bp, synthetic construct
  source 1..20: mol_type = other DNA
cccggccaacatggcaaagc

SEQ ID NO: 119411 - DNA, 20 bp, synthetic construct
  source 1..20: mol_type = other DNA
gcccggccaacatggcaaag

SEQ ID NO: 119412 - DNA, 20 bp, synthetic construct
  source 1..20: mol_type = other DNA
agcccggccaacatggcaaa

SEQ ID NO: 119413 - DNA, 20 bp, synthetic construct
  source 1..20: mol_type = other DNA
cagcccggccaacatggcaa

SEQ ID NO: 119414 - DNA, 20 bp, synthetic construct
  source 1..20: mol_type = other DNA
ccagcccggccaacatggca

SEQ ID NO: 119415 - DNA, 20 bp, synthetic construct
  source 1..20: mol_type = other DNA
accagcccggccaacatggc

SEQ ID NO: 119416 - DNA, 20 bp, synthetic construct
  source 1..20: mol_type = other DNA
gaccagcccggccaacatgg

SEQ ID NO: 119417 - DNA, 20 bp, synthetic construct
  source 1..20: mol_type = other DNA
agaccagcccggccaacatg

SEQ ID NO: 119418 - DNA, 20 bp, synthetic construct
  source 1..20: mol_type = other DNA
aagaccagcccggccaacat

SEQ ID NO: 119419 - DNA, 20 bp, synthetic construct
  source 1..20: mol_type = other DNA
caagaccagcccggccaaca

SEQ ID NO: 119420 - DNA, 20 bp, synthetic construct
  source 1..20: mol_type = other DNA
tcaagaccagcccggccaac

SEQ ID NO: 119421 - DNA, 20 bp, synthetic construct
  source 1..20: mol_type = other DNA
ttcaagaccagcccggccaa

SEQ ID NO: 119422 - DNA, 20 bp, synthetic construct
  source 1..20: mol_type = other DNA
gttcaagaccagcccggcca

SEQ ID NO: 119423 - DNA, 20 bp, synthetic construct
  source 1..20: mol_type = other DNA
agttcaagaccagcccggcc

SEQ ID NO: 119424 - DNA, 20 bp, synthetic construct
  source 1..20: mol_type = other DNA
gagttcaagaccagcccggc

SEQ ID NO: 119425 - DNA, 20 bp, synthetic construct
  source 1..20: mol_type = other DNA
ggagttcaagaccagcccgg

SEQ ID NO: 119426 - DNA, 20 bp, synthetic construct
  source 1..20: mol_type = other DNA
aggagttcaagaccagcccg

SEQ ID NO: 119427 - DNA, 20 bp, synthetic construct
  source 1..20: mol_type = other DNA
caggagttcaagaccagccc

SEQ ID NO: 119428 - DNA, 20 bp, synthetic construct
  source 1..20: mol_type = other DNA
ccaggagttcaagaccagcc

SEQ ID NO: 119429 - DNA, 20 bp, synthetic construct
  source 1..20: mol_type = other DNA
gccaggagttcaagaccagc

SEQ ID NO: 119430 - DNA, 20 bp, synthetic construct
  source 1..20: mol_type = other DNA
ggccaggagttcaagaccag

SEQ ID NO: 119431 - DNA, 20 bp, synthetic construct
  source 1..20: mol_type = other DNA
aggccaggagttcaagacca

SEQ ID NO: 119432 - DNA, 20 bp, synthetic construct
  source 1..20: mol_type = other DNA
gaggccaggagttcaagacc

SEQ ID NO: 119433 - DNA, 20 bp, synthetic construct
  source 1..20: mol_type = other DNA
tgaggccaggagttcaagac

SEQ ID NO: 119434 - DNA, 20 bp, synthetic construct
  source 1..20: mol_type = other DNA
ttgaggccaggagttcaaga

SEQ ID NO: 119435 - DNA, 20 bp, synthetic construct
  source 1..20: mol_type = other DNA
cttgaggccaggagttcaag

SEQ ID NO: 119436 - DNA, 20 bp, synthetic construct
  source 1..20: mol_type = other DNA
acttgaggccaggagttcaa

SEQ ID NO: 119437 - DNA, 20 bp, synthetic construct
  source 1..20: mol_type = other DNA
cacttgaggccaggagttca

SEQ ID NO: 119438 - DNA, 20 bp, synthetic construct
  source 1..20: mol_type = other DNA
tcacttgaggccaggagttc

SEQ ID NO: 119439 - DNA, 20 bp, synthetic construct
  source 1..20: mol_type = other DNA
atcacttgaggccaggagtt

SEQ ID NO: 119440 - DNA, 20 bp, synthetic construct
  source 1..20: mol_type = other DNA
gatcacttgaggccaggagt

SEQ ID NO: 119441 - DNA, 20 bp, synthetic construct
  source 1..20: mol_type = other DNA
ggatcacttgaggccaggag

SEQ ID NO: 119442 - DNA, 20 bp, synthetic construct
  source 1..20: mol_type = other DNA
tggatcacttgaggccagga

SEQ ID NO: 119443 - DNA, 20 bp, synthetic construct
  source 1..20: mol_type = other DNA
gtggatcacttgaggccagg

SEQ ID NO: 119444 - DNA, 20 bp, synthetic construct
  source 1..20: mol_type = other DNA
ggtggatcacttgaggccag

SEQ ID NO: 119445 - DNA, 20 bp, synthetic construct
  source 1..20: mol_type = other DNA
aggtggatcacttgaggcca

SEQ ID NO: 119446 - DNA, 20 bp, synthetic construct
  source 1..20: mol_type = other DNA
gaggtggatcacttgaggcc

SEQ ID NO: 119447 - DNA, 20 bp, synthetic construct
  source 1..20: mol_type = other DNA
ggaggtggatcacttgaggc

SEQ ID NO: 119448 - DNA, 20 bp, synthetic construct
  source 1..20: mol_type = other DNA
gggaggtggatcacttgagg

SEQ ID NO: 119449 - DNA, 20 bp, synthetic construct
  source 1..20: mol_type = other DNA
agggaggtggatcacttgag

SEQ ID NO: 119450 - DNA, 20 bp, synthetic construct
  source 1..20: mol_type = other DNA
gagggaggtggatcacttga

SEQ ID NO: 119451 - DNA, 20 bp, synthetic construct
  source 1..20: mol_type = other DNA
cgagggaggtggatcacttg

SEQ ID NO: 119452 - DNA, 20 bp, synthetic construct
  source 1..20: mol_type = other DNA
ccgagggaggtggatcactt

SEQ ID NO: 119453 - DNA, 20 bp, synthetic construct
  source 1..20: mol_type = other DNA
gccgagggaggtggatcact

SEQ ID NO: 119454 - DNA, 20 bp, synthetic construct
  source 1..20: mol_type = other DNA
ggccgagggaggtggatcac

SEQ ID NO: 119455 - DNA, 20 bp, synthetic construct
  source 1..20: mol_type = other DNA
aggccgagggaggtggatca

SEQ ID NO: 119456 - DNA, 20 bp, synthetic construct
  source 1..20: mol_type = other DNA
gaggccgagggaggtggatc

SEQ ID NO: 119457 - DNA, 20 bp, synthetic construct
  source 1..20: mol_type = other DNA
ggaggccgagggaggtggat

SEQ ID NO: 119458 - DNA, 20 bp, synthetic construct
  source 1..20: mol_type = other DNA
gggaggccgagggaggtgga

SEQ ID NO: 119459 - DNA, 20 bp, synthetic construct
  source 1..20: mol_type = other DNA
tgggaggccgagggaggtgg

SEQ ID NO: 119460 - DNA, 20 bp, synthetic construct
  source 1..20: mol_type = other DNA
ttgggaggccgagggaggtg

SEQ ID NO: 119461 - DNA, 20 bp, synthetic construct
  source 1..20: mol_type = other DNA
tttgggaggccgagggaggt

SEQ ID NO: 119462 - DNA, 20 bp, synthetic construct
  source 1..20: mol_type = other DNA
ctttgggaggccgagggagg

SEQ ID NO: 119463 - DNA, 20 bp, synthetic construct
  source 1..20: mol_type = other DNA
actttgggaggccgagggag

SEQ ID NO: 119464 - DNA, 20 bp, synthetic construct
  source 1..20: mol_type = other DNA
cactttgggaggccgaggga

SEQ ID NO: 119465 - DNA, 20 bp, synthetic construct
  source 1..20: mol_type = other DNA
gcactttgggaggccgaggg

SEQ ID NO: 119466 - DNA, 20 bp, synthetic construct
  source 1..20: mol_type = other DNA
agcactttgggaggccgagg

SEQ ID NO: 119467 - DNA, 20 bp, synthetic construct
  source 1..20: mol_type = other DNA
cagcactttgggaggccgag

SEQ ID NO: 119468 - DNA, 20 bp, synthetic construct
  source 1..20: mol_type = other DNA
ccagcactttgggaggccga

SEQ ID NO: 119469 - DNA, 20 bp, synthetic construct
  source 1..20: mol_type = other DNA
cccagcactttgggaggccg

SEQ ID NO: 119470 - DNA, 20 bp, synthetic construct
  source 1..20: mol_type = other DNA
tcccagcactttgggaggcc

SEQ ID NO: 119471 - DNA, 20 bp, synthetic construct
  source 1..20: mol_type = other DNA
atcccagcactttgggaggc

SEQ ID NO: 119472 - DNA, 20 bp, synthetic construct
  source 1..20: mol_type = other DNA
aatcccagcactttgggagg

SEQ ID NO: 119473 - DNA, 20 bp, synthetic construct
  source 1..20: mol_type = other DNA
taatcccagcactttgggag

SEQ ID NO: 119474 - DNA, 20 bp, synthetic construct
  source 1..20: mol_type = other DNA
gtaatcccagcactttggga

SEQ ID NO: 119475 - DNA, 20 bp, synthetic construct
  source 1..20: mol_type = other DNA
tgtaatcccagcactttggg

SEQ ID NO: 119476 - DNA, 20 bp, synthetic construct
  source 1..20: mol_type = other DNA
ctgtaatcccagcactttgg

SEQ ID NO: 119477 - DNA, 20 bp, synthetic construct
  source 1..20: mol_type = other DNA
cctgtaatcccagcactttg

SEQ ID NO: 119478 - DNA, 20 bp, synthetic construct
  source 1..20: mol_type = other DNA
acctgtaatcccagcacttt

SEQ ID NO: 119479 - DNA, 20 bp, synthetic construct
  source 1..20: mol_type = other DNA
cacctgtaatcccagcactt

SEQ ID NO: 119480 - DNA, 20 bp, synthetic construct
  source 1..20: mol_type = other DNA
acacctgtaatcccagcact

SEQ ID NO: 119481 - DNA, 20 bp, synthetic construct
  source 1..20: mol_type = other DNA
cacacctgtaatcccagcac

SEQ ID NO: 119482 - DNA, 20 bp, synthetic construct
  source 1..20: mol_type = other DNA
tcacacctgtaatcccagca

SEQ ID NO: 119483 - DNA, 20 bp, synthetic construct
  source 1..20: mol_type = other DNA
ctcacacctgtaatcccagc

SEQ ID NO: 119484 - DNA, 20 bp, synthetic construct
  source 1..20: mol_type = other DNA
gctcacacctgtaatcccag

SEQ ID NO: 119485 - DNA, 20 bp, synthetic construct
  source 1..20: mol_type = other DNA
ggctcacacctgtaatccca

SEQ ID NO: 119486 - DNA, 20 bp, synthetic construct
  source 1..20: mol_type = other DNA
tggctcacacctgtaatccc

SEQ ID NO: 119487 - DNA, 20 bp, synthetic construct
  source 1..20: mol_type = other DNA
gtggctcacacctgtaatcc

SEQ ID NO: 119488 - DNA, 20 bp, synthetic construct
  source 1..20: mol_type = other DNA
agtggctcacacctgtaatc

SEQ ID NO: 119489 - DNA, 20 bp, synthetic construct
  source 1..20: mol_type = other DNA
cagtggctcacacctgtaat

SEQ ID NO: 119490 - DNA, 20 bp, synthetic construct
  source 1..20: mol_type = other DNA
gcagtggctcacacctgtaa

SEQ ID NO: 119491 - DNA, 20 bp, synthetic construct
  source 1..20: mol_type = other DNA
agcagtggctcacacctgta

SEQ ID NO: 119492 - DNA, 20 bp, synthetic construct
  source 1..20: mol_type = other DNA
gagcagtggctcacacctgt

SEQ ID NO: 119493 - DNA, 20 bp, synthetic construct
  source 1..20: mol_type = other DNA
ggagcagtggctcacacctg

SEQ ID NO: 119494 - DNA, 20 bp, synthetic construct
  source 1..20: mol_type = other DNA
aggagcagtggctcacacct

SEQ ID NO: 119495 - DNA, 20 bp, synthetic construct
  source 1..20: mol_type = other DNA
caggagcagtggctcacacc

SEQ ID NO: 119496 - DNA, 20 bp, synthetic construct
  source 1..20: mol_type = other DNA
ccaggagcagtggctcacac

SEQ ID NO: 119497 - DNA, 20 bp, synthetic construct
  source 1..20: mol_type = other DNA
gccaggagcagtggctcaca

SEQ ID NO: 119498 - DNA, 20 bp, synthetic construct
  source 1..20: mol_type = other DNA
ggccaggagcagtggctcac

SEQ ID NO: 119499 - DNA, 20 bp, synthetic construct
  source 1..20: mol_type = other DNA
aggccaggagcagtggctca

SEQ ID NO: 119500 - DNA, 20 bp, synthetic construct
  source 1..20: mol_type = other DNA
caggccaggagcagtggctc

SEQ ID NO: 119501 - DNA, 20 bp, synthetic construct
  source 1..20: mol_type = other DNA
tcaggccaggagcagtggct

SEQ ID NO: 119502 - DNA, 20 bp, synthetic construct
  source 1..20: mol_type = other DNA
ttcaggccaggagcagtggc

SEQ ID NO: 119503 - DNA, 20 bp, synthetic construct
  source 1..20: mol_type = other DNA
attcaggccaggagcagtgg

SEQ ID NO: 119504 - DNA, 20 bp, synthetic construct
  source 1..20: mol_type = other DNA
tattcaggccaggagcagtg

SEQ ID NO: 119505 - DNA, 20 bp, synthetic construct
  source 1..20: mol_type = other DNA
atattcaggccaggagcagt

SEQ ID NO: 119506 - DNA, 20 bp, synthetic construct
  source 1..20: mol_type = other DNA
tatattcaggccaggagcag

SEQ ID NO: 119507 - DNA, 20 bp, synthetic construct
  source 1..20: mol_type = other DNA
gtatattcaggccaggagca

SEQ ID NO: 119508 - DNA, 20 bp, synthetic construct
  source 1..20: mol_type = other DNA
ggtatattcaggccaggagc

SEQ ID NO: 119509 - DNA, 20 bp, synthetic construct
  source 1..20: mol_type = other DNA
tggtatattcaggccaggag

SEQ ID NO: 119510 - DNA, 20 bp, synthetic construct
  source 1..20: mol_type = other DNA
gtggtatattcaggccagga

SEQ ID NO: 119511 - DNA, 20 bp, synthetic construct
  source 1..20: mol_type = other DNA
agtggtatattcaggccagg

SEQ ID NO: 119512 - DNA, 20 bp, synthetic construct
  source 1..20: mol_type = other DNA
aagtggtatattcaggccag

SEQ ID NO: 119513 - DNA, 20 bp, synthetic construct
  source 1..20: mol_type = other DNA
aaagtggtatattcaggcca

SEQ ID NO: 119514 - DNA, 20 bp, synthetic construct
  source 1..20: mol_type = other DNA
aaaagtggtatattcaggcc

SEQ ID NO: 119515 - DNA, 20 bp, synthetic construct
  source 1..20: mol_type = other DNA
taaaagtggtatattcaggc

SEQ ID NO: 119516 - DNA, 20 bp, synthetic construct
  source 1..20: mol_type = other DNA
gtaaaagtggtatattcagg

SEQ ID NO: 119517 - DNA, 20 bp, synthetic construct
  source 1..20: mol_type = other DNA
ggtaaaagtggtatattcag

SEQ ID NO: 119518 - DNA, 20 bp, synthetic construct
  source 1..20: mol_type = other DNA
aggtaaaagtggtatattca

SEQ ID NO: 119519 - DNA, 20 bp, synthetic construct
  source 1..20: mol_type = other DNA
taggtaaaagtggtatattc

SEQ ID NO: 119520 - DNA, 20 bp, synthetic construct
  source 1..20: mol_type = other DNA
ataggtaaaagtggtatatt

SEQ ID NO: 119521 - DNA, 20 bp, synthetic construct
  source 1..20: mol_type = other DNA
gataggtaaaagtggtatat

SEQ ID NO: 119522 - DNA, 20 bp, synthetic construct
  source 1..20: mol_type = other DNA
tgataggtaaaagtggtata

SEQ ID NO: 119523 - DNA, 20 bp, synthetic construct
  source 1..20: mol_type = other DNA
atgataggtaaaagtggtat

SEQ ID NO: 119524 - DNA, 20 bp, synthetic construct
  source 1..20: mol_type = other DNA
gatgataggtaaaagtggta

SEQ ID NO: 119525 - DNA, 20 bp, synthetic construct
  source 1..20: mol_type = other DNA
tgatgataggtaaaagtggt

SEQ ID NO: 119526 - DNA, 20 bp, synthetic construct
  source 1..20: mol_type = other DNA
ctgatgataggtaaaagtgg

SEQ ID NO: 119527 - DNA, 20 bp, synthetic construct
  source 1..20: mol_type = other DNA
actgatgataggtaaaagtg

SEQ ID NO: 119528 - DNA, 20 bp, synthetic construct
  source 1..20: mol_type = other DNA
aactgatgataggtaaaagt

SEQ ID NO: 119529 - DNA, 20 bp, synthetic construct
  source 1..20: mol_type = other DNA
caactgatgataggtaaaag

SEQ ID NO: 119530 - DNA, 20 bp, synthetic construct
  source 1..20: mol_type = other DNA
tcaactgatgataggtaaaa

SEQ ID NO: 119531 - DNA, 20 bp, synthetic construct
  source 1..20: mol_type = other DNA
atcaactgatgataggtaaa

SEQ ID NO: 119532 - DNA, 20 bp, synthetic construct
  source 1..20: mol_type = other DNA
catcaactgatgataggtaa

SEQ ID NO: 119533 - DNA, 20 bp, synthetic construct
  source 1..20: mol_type = other DNA
tcatcaactgatgataggta

SEQ ID NO: 119534 - DNA, 20 bp, synthetic construct
  source 1..20: mol_type = other DNA
ttcatcaactgatgataggt

SEQ ID NO: 119535 - DNA, 20 bp, synthetic construct
  source 1..20: mol_type = other DNA
gttcatcaactgatgatagg

SEQ ID NO: 119536 - DNA, 20 bp, synthetic construct
  source 1..20: mol_type = other DNA
tgttcatcaactgatgatag

SEQ ID NO: 119537 - DNA, 20 bp, synthetic construct
  source 1..20: mol_type = other DNA
atgttcatcaactgatgata

SEQ ID NO: 119538 - DNA, 20 bp, synthetic construct
  source 1..20: mol_type = other DNA
aatgttcatcaactgatgat

SEQ ID NO: 119539 - DNA, 20 bp, synthetic construct
  source 1..20: mol_type = other DNA
aaatgttcatcaactgatga

SEQ ID NO: 119540 - DNA, 20 bp, synthetic construct
  source 1..20: mol_type = other DNA
caaatgttcatcaactgatg

SEQ ID NO: 119541 - DNA, 20 bp, synthetic construct
  source 1..20: mol_type = other DNA
ccaaatgttcatcaactgat

SEQ ID NO: 119542 - DNA, 20 bp, synthetic construct
  source 1..20: mol_type = other DNA
tccaaatgttcatcaactga

SEQ ID NO: 119543 - DNA, 20 bp, synthetic construct
  source 1..20: mol_type = other DNA
atccaaatgttcatcaactg

SEQ ID NO: 119544 - DNA, 20 bp, synthetic construct
  source 1..20: mol_type = other DNA
aatccaaatgttcatcaact

SEQ ID NO: 119545 - DNA, 20 bp, synthetic construct
  source 1..20: mol_type = other DNA
taatccaaatgttcatcaac

SEQ ID NO: 119546 - DNA, 20 bp, synthetic construct
  source 1..20: mol_type = other DNA
ataatccaaatgttcatcaa

SEQ ID NO: 119547 - DNA, 20 bp, synthetic construct
  source 1..20: mol_type = other DNA
aataatccaaatgttcatca

SEQ ID NO: 119548 - DNA, 20 bp, synthetic construct
  source 1..20: mol_type = other DNA
aaataatccaaatgttcatc

SEQ ID NO: 119549 - DNA, 20 bp, synthetic construct
  source 1..20: mol_type = other DNA
gaaataatccaaatgttcat

SEQ ID NO: 119550 - DNA, 20 bp, synthetic construct
  source 1..20: mol_type = other DNA
ggaaataatccaaatgttca

SEQ ID NO: 119551 - DNA, 20 bp, synthetic construct
  source 1..20: mol_type = other DNA
aggaaataatccaaatgttc

SEQ ID NO: 119552 - DNA, 20 bp, synthetic construct
  source 1..20: mol_type = other DNA
aaggaaataatccaaatgtt

SEQ ID NO: 119553 - DNA, 20 bp, synthetic construct
  source 1..20: mol_type = other DNA
aaaggaaataatccaaatgt

SEQ ID NO: 119554 - DNA, 20 bp, synthetic construct
  source 1..20: mol_type = other DNA
aaaaggaaataatccaaatg

SEQ ID NO: 119555 - DNA, 20 bp, synthetic construct
  source 1..20: mol_type = other DNA
aaaaaggaaataatccaaat

SEQ ID NO: 119556 - DNA, 20 bp, synthetic construct
  source 1..20: mol_type = other DNA
gaaaaaggaaataatccaaa

SEQ ID NO: 119557 - DNA, 20 bp, synthetic construct
  source 1..20: mol_type = other DNA
agaaaaaggaaataatccaa

SEQ ID NO: 119558 - DNA, 20 bp, synthetic construct
  source 1..20: mol_type = other DNA
cagaaaaaggaaataatcca

SEQ ID NO: 119559 - DNA, 20 bp, synthetic construct
  source 1..20: mol_type = other DNA
ccagaaaaaggaaataatcc

SEQ ID NO: 119560 - DNA, 20 bp, synthetic construct
  source 1..20: mol_type = other DNA
gccagaaaaaggaaataatc

SEQ ID NO: 119561 - DNA, 20 bp, synthetic construct
  source 1..20: mol_type = other DNA
tgccagaaaaaggaaataat

SEQ ID NO: 119562 - DNA, 20 bp, synthetic construct
  source 1..20: mol_type = other DNA
ttgccagaaaaaggaaataa

SEQ ID NO: 119563 - DNA, 20 bp, synthetic construct
  source 1..20: mol_type = other DNA
attgccagaaaaaggaaata

SEQ ID NO: 119564 - DNA, 20 bp, synthetic construct
  source 1..20: mol_type = other DNA
cattgccagaaaaaggaaat

SEQ ID NO: 119565 - DNA, 20 bp, synthetic construct
  source 1..20: mol_type = other DNA
tcattgccagaaaaaggaaa

SEQ ID NO: 119566 - DNA, 20 bp, synthetic construct
  source 1..20: mol_type = other DNA
ctcattgccagaaaaaggaa

SEQ ID NO: 119567 - DNA, 20 bp, synthetic construct
  source 1..20: mol_type = other DNA
actcattgccagaaaaagga

SEQ ID NO: 119568 - DNA, 20 bp, synthetic construct
  source 1..20: mol_type = other DNA
tactcattgccagaaaaagg

SEQ ID NO: 119569 - DNA, 20 bp, synthetic construct
  source 1..20: mol_type = other DNA
ttactcattgccagaaaaag

SEQ ID NO: 119570 - DNA, 20 bp, synthetic construct
  source 1..20: mol_type = other DNA
attactcattgccagaaaaa

SEQ ID NO: 119571 - DNA, 20 bp, synthetic construct
  source 1..20: mol_type = other DNA
cattactcattgccagaaaa

SEQ ID NO: 119572 - DNA, 20 bp, synthetic construct
  source 1..20: mol_type = other DNA
gcattactcattgccagaaa

SEQ ID NO: 119573 - DNA, 20 bp, synthetic construct
  source 1..20: mol_type = other DNA
agcattactcattgccagaa

SEQ ID NO: 119574 - DNA, 20 bp, synthetic construct
  source 1..20: mol_type = other DNA
aagcattactcattgccaga

SEQ ID NO: 119575 - DNA, 20 bp, synthetic construct
  source 1..20: mol_type = other DNA
aaagcattactcattgccag

SEQ ID NO: 119576 - DNA, 20 bp, synthetic construct
  source 1..20: mol_type = other DNA
aaaagcattactcattgcca

SEQ ID NO: 119577 - DNA, 20 bp, synthetic construct
  source 1..20: mol_type = other DNA
caaaagcattactcattgcc

SEQ ID NO: 119578 - DNA, 20 bp, synthetic construct
  source 1..20: mol_type = other DNA
acaaaagcattactcattgc

SEQ ID NO: 119579 - DNA, 20 bp, synthetic construct
  source 1..20: mol_type = other DNA
cacaaaagcattactcattg

SEQ ID NO: 119580 - DNA, 20 bp, synthetic construct
  source 1..20: mol_type = other DNA
ccacaaaagcattactcatt

SEQ ID NO: 119581 - DNA, 20 bp, synthetic construct
  source 1..20: mol_type = other DNA
tccacaaaagcattactcat

SEQ ID NO: 119582 - DNA, 20 bp, synthetic construct
  source 1..20: mol_type = other DNA
atccacaaaagcattactca

SEQ ID NO: 119583 - DNA, 20 bp, synthetic construct
  source 1..20: mol_type = other DNA
aatccacaaaagcattactc

SEQ ID NO: 119584 - DNA, 20 bp, synthetic construct
  source 1..20: mol_type = other DNA
aaatccacaaaagcattact

SEQ ID NO: 119585 - DNA, 20 bp, synthetic construct
  source 1..20: mol_type = other DNA
aaaatccacaaaagcattac

SEQ ID NO: 119586 - DNA, 20 bp, synthetic construct
  source 1..20: mol_type = other DNA
gaaaatccacaaaagcatta

SEQ ID NO: 119587 - DNA, 20 bp, synthetic construct
  source 1..20: mol_type = other DNA
tgaaaatccacaaaagcatt

SEQ ID NO: 119588 - DNA, 20 bp, synthetic construct
  source 1..20: mol_type = other DNA
atgaaaatccacaaaagcat

SEQ ID NO: 119589 - DNA, 20 bp, synthetic construct
  source 1..20: mol_type = other DNA
catgaaaatccacaaaagca

SEQ ID NO: 119590 - DNA, 20 bp, synthetic construct
  source 1..20: mol_type = other DNA
acatgaaaatccacaaaagc

SEQ ID NO: 119591 - DNA, 20 bp, synthetic construct
  source 1..20: mol_type = other DNA
tacatgaaaatccacaaaag

SEQ ID NO: 119592 - DNA, 20 bp, synthetic construct
  source 1..20: mol_type = other DNA
gtacatgaaaatccacaaaa

SEQ ID NO: 119593 - DNA, 20 bp, synthetic construct
  source 1..20: mol_type = other DNA
tgtacatgaaaatccacaaa

SEQ ID NO: 119594 - DNA, 20 bp, synthetic construct
  source 1..20: mol_type = other DNA
ttgtacatgaaaatccacaa

SEQ ID NO: 119595 - DNA, 20 bp, synthetic construct
  source 1..20: mol_type = other DNA
tttgtacatgaaaatccaca

SEQ ID NO: 119596 - DNA, 20 bp, synthetic construct
  source 1..20: mol_type = other DNA
atttgtacatgaaaatccac

SEQ ID NO: 119597 - DNA, 20 bp, synthetic construct
  source 1..20: mol_type = other DNA
aatttgtacatgaaaatcca

SEQ ID NO: 119598 - DNA, 20 bp, synthetic construct
  source 1..20: mol_type = other DNA
aaatttgtacatgaaaatcc

SEQ ID NO: 119599 - DNA, 20 bp, synthetic construct
  source 1..20: mol_type = other DNA
aaaatttgtacatgaaaatc

SEQ ID NO: 119600 - DNA, 20 bp, synthetic construct
  source 1..20: mol_type = other DNA
gaaaatttgtacatgaaaat

SEQ ID NO: 119601 - DNA, 20 bp, synthetic construct
  source 1..20: mol_type = other DNA
tgaaaatttgtacatgaaaa

SEQ ID NO: 119602 - DNA, 20 bp, synthetic construct
  source 1..20: mol_type = other DNA
atgaaaatttgtacatgaaa

SEQ ID NO: 119603 - DNA, 20 bp, synthetic construct
  source 1..20: mol_type = other DNA
tatgaaaatttgtacatgaa

SEQ ID NO: 119604 - DNA, 20 bp, synthetic construct
  source 1..20: mol_type = other DNA
atatgaaaatttgtacatga

SEQ ID NO: 119605 - DNA, 20 bp, synthetic construct
  source 1..20: mol_type = other DNA
catatgaaaatttgtacatg

SEQ ID NO: 119606 - DNA, 20 bp, synthetic construct
  source 1..20: mol_type = other DNA
tcatatgaaaatttgtacat

SEQ ID NO: 119607 - DNA, 20 bp, synthetic construct
  source 1..20: mol_type = other DNA
ctcatatgaaaatttgtaca

SEQ ID NO: 119608 - DNA, 20 bp, synthetic construct
  source 1..20: mol_type = other DNA
cctcatatgaaaatttgtac

SEQ ID NO: 119609 - DNA, 20 bp, synthetic construct
  source 1..20: mol_type = other DNA
gcctcatatgaaaatttgta

SEQ ID NO: 119610 - DNA, 20 bp, synthetic construct
  source 1..20: mol_type = other DNA
agcctcatatgaaaatttgt

SEQ ID NO: 119611 - DNA, 20 bp, synthetic construct
  source 1..20: mol_type = other DNA
cagcctcatatgaaaatttg

SEQ ID NO: 119612 - DNA, 20 bp, synthetic construct
  source 1..20: mol_type = other DNA
ccagcctcatatgaaaattt

SEQ ID NO: 119613 - DNA, 20 bp, synthetic construct
  source 1..20: mol_type = other DNA
cccagcctcatatgaaaatt

SEQ ID NO: 119614 - DNA, 20 bp, synthetic construct
  source 1..20: mol_type = other DNA
tcccagcctcatatgaaaat

SEQ ID NO: 119615 - DNA, 20 bp, synthetic construct
  source 1..20: mol_type = other DNA
ctcccagcctcatatgaaaa

SEQ ID NO: 119616 - DNA, 20 bp, synthetic construct
  source 1..20: mol_type = other DNA
gctcccagcctcatatgaaa

SEQ ID NO: 119617 - DNA, 20 bp, synthetic construct
  source 1..20: mol_type = other DNA
tgctcccagcctcatatgaa

SEQ ID NO: 119618 - DNA, 20 bp, synthetic construct
  source 1..20: mol_type = other DNA
ctgctcccagcctcatatga

SEQ ID NO: 119619 - DNA, 20 bp, synthetic construct
  source 1..20: mol_type = other DNA
actgctcccagcctcatatg

SEQ ID NO: 119620 - DNA, 20 bp, synthetic construct
  source 1..20: mol_type = other DNA
cactgctcccagcctcatat

SEQ ID NO: 119621 - DNA, 20 bp, synthetic construct
  source 1..20: mol_type = other DNA
ccactgctcccagcctcata

SEQ ID NO: 119622 - DNA, 20 bp, synthetic construct
  source 1..20: mol_type = other DNA
gccactgctcccagcctcat

SEQ ID NO: 119623 - DNA, 20 bp, synthetic construct
  source 1..20: mol_type = other DNA
agccactgctcccagcctca

SEQ ID NO: 119624 - DNA, 20 bp, synthetic construct
  source 1..20: mol_type = other DNA
gagccactgctcccagcctc

SEQ ID NO: 119625 - DNA, 20 bp, synthetic construct
  source 1..20: mol_type = other DNA
tgagccactgctcccagcct

SEQ ID NO: 119626 - DNA, 20 bp, synthetic construct
  source 1..20: mol_type = other DNA
atgagccactgctcccagcc

SEQ ID NO: 119627 - DNA, 20 bp, synthetic construct
  source 1..20: mol_type = other DNA
catgagccactgctcccagc

SEQ ID NO: 119628 - DNA, 20 bp, synthetic construct
  source 1..20: mol_type = other DNA
gcatgagccactgctcccag

SEQ ID NO: 119629 - DNA, 20 bp, synthetic construct
  source 1..20: mol_type = other DNA
ggcatgagccactgctccca

SEQ ID NO: 119630 - DNA, 20 bp, synthetic construct
  source 1..20: mol_type = other DNA
aggcatgagccactgctccc

SEQ ID NO: 119631 - DNA, 20 bp, synthetic construct
  source 1..20: mol_type = other DNA
taggcatgagccactgctcc

SEQ ID NO: 119632 - DNA, 20 bp, synthetic construct
  source 1..20: mol_type = other DNA
ataggcatgagccactgctc

SEQ ID NO: 119633 - DNA, 20 bp, synthetic construct
  source 1..20: mol_type = other DNA
tataggcatgagccactgct

SEQ ID NO: 119634 - DNA, 20 bp, synthetic construct
  source 1..20: mol_type = other DNA
ttataggcatgagccactgc

SEQ ID NO: 119635 - DNA, 20 bp, synthetic construct
  source 1..20: mol_type = other DNA
attataggcatgagccactg

SEQ ID NO: 119636 - DNA, 20 bp, synthetic construct
  source 1..20: mol_type = other DNA
gattataggcatgagccact

SEQ ID NO: 119637 - DNA, 20 bp, synthetic construct
  source 1..20: mol_type = other DNA
ggattataggcatgagccac

SEQ ID NO: 119638 - DNA, 20 bp, synthetic construct
  source 1..20: mol_type = other DNA
gggattataggcatgagcca

SEQ ID NO: 119639 - DNA, 20 bp, synthetic construct
  source 1..20: mol_type = other DNA
tgggattataggcatgagcc

SEQ ID NO: 119640 - DNA, 20 bp, synthetic construct
  source 1..20: mol_type = other DNA
ctgggattataggcatgagc

SEQ ID NO: 119641 - DNA, 20 bp, synthetic construct
  source 1..20: mol_type = other DNA
gctgggattataggcatgag

SEQ ID NO: 119642 - DNA, 20 bp, synthetic construct
  source 1..20: mol_type = other DNA
tgctgggattataggcatga

SEQ ID NO: 119643 - DNA, 20 bp, synthetic construct
  source 1..20: mol_type = other DNA
ctgctgggattataggcatg

SEQ ID NO: 119644 - DNA, 20 bp, synthetic construct
  source 1..20: mol_type = other DNA
actgctgggattataggcat

SEQ ID NO: 119645 - DNA, 20 bp, synthetic construct
  source 1..20: mol_type = other DNA
gactgctgggattataggca

SEQ ID NO: 119646 - DNA, 20 bp, synthetic construct
  source 1..20: mol_type = other DNA
agactgctgggattataggc

SEQ ID NO: 119647 - DNA, 20 bp, synthetic construct
  source 1..20: mol_type = other DNA
cagactgctgggattatagg

SEQ ID NO: 119648 - DNA, 20 bp, synthetic construct
  source 1..20: mol_type = other DNA
ccagactgctgggattatag

SEQ ID NO: 119649 - DNA, 20 bp, synthetic construct
  source 1..20: mol_type = other DNA
cccagactgctgggattata

SEQ ID NO: 119650 - DNA, 20 bp, synthetic construct
  source 1..20: mol_type = other DNA
tcccagactgctgggattat

SEQ ID NO: 119651 - DNA, 20 bp, synthetic construct
  source 1..20: mol_type = other DNA
ctcccagactgctgggatta

SEQ ID NO: 119652 - DNA, 20 bp, synthetic construct
  source 1..20: mol_type = other DNA
cctcccagactgctgggatt

SEQ ID NO: 119653 - DNA, 20 bp, synthetic construct
  source 1..20: mol_type = other DNA
gcctcccagactgctgggat

SEQ ID NO: 119654 - DNA, 20 bp, synthetic construct
  source 1..20: mol_type = other DNA
agcctcccagactgctggga

SEQ ID NO: 119655 - DNA, 20 bp, synthetic construct
  source 1..20: mol_type = other DNA
cagcctcccagactgctggg

SEQ ID NO: 119656 - DNA, 20 bp, synthetic construct
  source 1..20: mol_type = other DNA
tcagcctcccagactgctgg

SEQ ID NO: 119657 - DNA, 20 bp, synthetic construct
  source 1..20: mol_type = other DNA
ctcagcctcccagactgctg

SEQ ID NO: 119658 - DNA, 20 bp, synthetic construct
  source 1..20: mol_type = other DNA
cctcagcctcccagactgct

SEQ ID NO: 119659 - DNA, 20 bp, synthetic construct
  source 1..20: mol_type = other DNA
acctcagcctcccagactgc

SEQ ID NO: 119660 - DNA, 20 bp, synthetic construct
  source 1..20: mol_type = other DNA
cacctcagcctcccagactg

SEQ ID NO: 119661 - DNA, 20 bp, synthetic construct
  source 1..20: mol_type = other DNA
ccacctcagcctcccagact

SEQ ID NO: 119662 - DNA, 20 bp, synthetic construct
  source 1..20: mol_type = other DNA
cccacctcagcctcccagac

SEQ ID NO: 119663 - DNA, 20 bp, synthetic construct
  source 1..20: mol_type = other DNA
gcccacctcagcctcccaga

SEQ ID NO: 119664 - DNA, 20 bp, synthetic construct
  source 1..20: mol_type = other DNA
tgcccacctcagcctcccag

SEQ ID NO: 119665 - DNA, 20 bp, synthetic construct
  source 1..20: mol_type = other DNA
ctgcccacctcagcctccca

SEQ ID NO: 119666 - DNA, 20 bp, synthetic construct
  source 1..20: mol_type = other DNA
tctgcccacctcagcctccc

SEQ ID NO: 119667 - DNA, 20 bp, synthetic construct
  source 1..20: mol_type = other DNA
atctgcccacctcagcctcc

SEQ ID NO: 119668 - DNA, 20 bp, synthetic construct
  source 1..20: mol_type = other DNA
catctgcccacctcagcctc

SEQ ID NO: 119669 - DNA, 20 bp, synthetic construct
  source 1..20: mol_type = other DNA
tcatctgcccacctcagcct

SEQ ID NO: 119670 - DNA, 20 bp, synthetic construct
  source 1..20: mol_type = other DNA
gtcatctgcccacctcagcc

SEQ ID NO: 119671 - DNA, 20 bp, synthetic construct
  source 1..20: mol_type = other DNA
agtcatctgcccacctcagc

SEQ ID NO: 119672 - DNA, 20 bp, synthetic construct
  source 1..20: mol_type = other DNA
aagtcatctgcccacctcag

SEQ ID NO: 119673 - DNA, 20 bp, synthetic construct
  source 1..20: mol_type = other DNA
caagtcatctgcccacctca

SEQ ID NO: 119674 - DNA, 20 bp, synthetic construct
  source 1..20: mol_type = other DNA
tcaagtcatctgcccacctc

SEQ ID NO: 119675 - DNA, 20 bp, synthetic construct
  source 1..20: mol_type = other DNA
ctcaagtcatctgcccacct

SEQ ID NO: 119676 - DNA, 20 bp, synthetic construct
  source 1..20: mol_type = other DNA
cctcaagtcatctgcccacc

SEQ ID NO: 119677 - DNA, 20 bp, synthetic construct
  source 1..20: mol_type = other DNA
acctcaagtcatctgcccac

SEQ ID NO: 119678 - DNA, 20 bp, synthetic construct
  source 1..20: mol_type = other DNA
gacctcaagtcatctgccca

SEQ ID NO: 119679 - DNA, 20 bp, synthetic construct
  source 1..20: mol_type = other DNA
tgacctcaagtcatctgccc

SEQ ID NO: 119680 - DNA, 20 bp, synthetic construct
  source 1..20: mol_type = other DNA
ctgacctcaagtcatctgcc

SEQ ID NO: 119681 - DNA, 20 bp, synthetic construct
  source 1..20: mol_type = other DNA
cctgacctcaagtcatctgc

SEQ ID NO: 119682 - DNA, 20 bp, synthetic construct
  source 1..20: mol_type = other DNA
tcctgacctcaagtcatctg

SEQ ID NO: 119683 - DNA, 20 bp, synthetic construct
  source 1..20: mol_type = other DNA
ctcctgacctcaagtcatct

SEQ ID NO: 119684 - DNA, 20 bp, synthetic construct
  source 1..20: mol_type = other DNA
actcctgacctcaagtcatc

SEQ ID NO: 119685 - DNA, 20 bp, synthetic construct
  source 1..20: mol_type = other DNA
aactcctgacctcaagtcat

SEQ ID NO: 119686 - DNA, 20 bp, synthetic construct
  source 1..20: mol_type = other DNA
aaactcctgacctcaagtca

SEQ ID NO: 119687 - DNA, 20 bp, synthetic construct
  source 1..20: mol_type = other DNA
caaactcctgacctcaagtc

SEQ ID NO: 119688 - DNA, 20 bp, synthetic construct
  source 1..20: mol_type = other DNA
tcaaactcctgacctcaagt

SEQ ID NO: 119689 - DNA, 20 bp, synthetic construct
  source 1..20: mol_type = other DNA
ctcaaactcctgacctcaag

SEQ ID NO: 119690 - DNA, 20 bp, synthetic construct
  source 1..20: mol_type = other DNA
tctcaaactcctgacctcaa

SEQ ID NO: 119691 - DNA, 20 bp, synthetic construct
  source 1..20: mol_type = other DNA
gtctcaaactcctgacctca

SEQ ID NO: 119692 - DNA, 20 bp, synthetic construct
  source 1..20: mol_type = other DNA
ggtctcaaactcctgacctc

SEQ ID NO: 119693 - DNA, 20 bp, synthetic construct
  source 1..20: mol_type = other DNA
tggtctcaaactcctgacct

SEQ ID NO: 119694 - DNA, 20 bp, synthetic construct
  source 1..20: mol_type = other DNA
ctggtctcaaactcctgacc

SEQ ID NO: 119695 - DNA, 20 bp, synthetic construct
  source 1..20: mol_type = other DNA
gctggtctcaaactcctgac

SEQ ID NO: 119696 - DNA, 20 bp, synthetic construct
  source 1..20: mol_type = other DNA
ggctggtctcaaactcctga

SEQ ID NO: 119697 - DNA, 20 bp, synthetic construct
  source 1..20: mol_type = other DNA
aggctggtctcaaactcctg

SEQ ID NO: 119698 - DNA, 20 bp, synthetic construct
  source 1..20: mol_type = other DNA
caggctggtctcaaactcct

SEQ ID NO: 119699 - DNA, 20 bp, synthetic construct
  source 1..20: mol_type = other DNA
ccaggctggtctcaaactcc

SEQ ID NO: 119700 - DNA, 20 bp, synthetic construct
  source 1..20: mol_type = other DNA
gccaggctggtctcaaactc

SEQ ID NO: 119701 - DNA, 20 bp, synthetic construct
  source 1..20: mol_type = other DNA
ggccaggctggtctcaaact

SEQ ID NO: 119702 - DNA, 20 bp, synthetic construct
  source 1..20: mol_type = other DNA
tggccaggctggtctcaaac

SEQ ID NO: 119703 - DNA, 20 bp, synthetic construct
  source 1..20: mol_type = other DNA
ttggccaggctggtctcaaa

SEQ ID NO: 119704 - DNA, 20 bp, synthetic construct
  source 1..20: mol_type = other DNA
gttggccaggctggtctcaa

SEQ ID NO: 119705 - DNA, 20 bp, synthetic construct
  source 1..20: mol_type = other DNA
tgttggccaggctggtctca

SEQ ID NO: 119706 - DNA, 20 bp, synthetic construct
  source 1..20: mol_type = other DNA
atgttggccaggctggtctc

SEQ ID NO: 119707 - DNA, 20 bp, synthetic construct
  source 1..20: mol_type = other DNA
catgttggccaggctggtct

SEQ ID NO: 119708 - DNA, 20 bp, synthetic construct
  source 1..20: mol_type = other DNA
ccatgttggccaggctggtc

SEQ ID NO: 119709 - DNA, 20 bp, synthetic construct
  source 1..20: mol_type = other DNA
accatgttggccaggctggt

SEQ ID NO: 119710 - DNA, 20 bp, synthetic construct
  source 1..20: mol_type = other DNA
caccatgttggccaggctgg

SEQ ID NO: 119711 - DNA, 20 bp, synthetic construct
  source 1..20: mol_type = other DNA
tcaccatgttggccaggctg

SEQ ID NO: 119712 - DNA, 20 bp, synthetic construct
  source 1..20: mol_type = other DNA
ttcaccatgttggccaggct

SEQ ID NO: 119713 - DNA, 20 bp, synthetic construct
  source 1..20: mol_type = other DNA
tttcaccatgttggccaggc

SEQ ID NO: 119714 - DNA, 20 bp, synthetic construct
  source 1..20: mol_type = other DNA
atttcaccatgttggccagg

SEQ ID NO: 119715 - DNA, 20 bp, synthetic construct
  source 1..20: mol_type = other DNA
gatttcaccatgttggccag

SEQ ID NO: 119716 - DNA, 20 bp, synthetic construct
  source 1..20: mol_type = other DNA
ggatttcaccatgttggcca

SEQ ID NO: 119717 - DNA, 20 bp, synthetic construct
  source 1..20: mol_type = other DNA
gggatttcaccatgttggcc

SEQ ID NO: 119718 - DNA, 20 bp, synthetic construct
  source 1..20: mol_type = other DNA
tgggatttcaccatgttggc

SEQ ID NO: 119719 - DNA, 20 bp, synthetic construct
  source 1..20: mol_type = other DNA
atgggatttcaccatgttgg

SEQ ID NO: 119720 - DNA, 20 bp, synthetic construct
  source 1..20: mol_type = other DNA
gatgggatttcaccatgttg

SEQ ID NO: 119721 - DNA, 20 bp, synthetic construct
  source 1..20: mol_type = other DNA
agatgggatttcaccatgtt

SEQ ID NO: 119722 - DNA, 20 bp, synthetic construct
  source 1..20: mol_type = other DNA
gagatgggatttcaccatgt

SEQ ID NO: 119723 - DNA, 20 bp, synthetic construct
  source 1..20: mol_type = other DNA
agagatgggatttcaccatg

SEQ ID NO: 119724 - DNA, 20 bp, synthetic construct
  source 1..20: mol_type = other DNA
tagagatgggatttcaccat

SEQ ID NO: 119725 - DNA, 20 bp, synthetic construct
  source 1..20: mol_type = other DNA
gtagagatgggatttcacca

SEQ ID NO: 119726 - DNA, 20 bp, synthetic construct
  source 1..20: mol_type = other DNA
agtagagatgggatttcacc

SEQ ID NO: 119727 - DNA, 20 bp, synthetic construct
  source 1..20: mol_type = other DNA
tagtagagatgggatttcac

SEQ ID NO: 119728 - DNA, 20 bp, synthetic construct
  source 1..20: mol_type = other DNA
ttagtagagatgggatttca

SEQ ID NO: 119729 - DNA, 20 bp, synthetic construct
  source 1..20: mol_type = other DNA
tttagtagagatgggatttc

SEQ ID NO: 119730 - DNA, 20 bp, synthetic construct
  source 1..20: mol_type = other DNA
ttttagtagagatgggattt

SEQ ID NO: 119731 - DNA, 20 bp, synthetic construct
  source 1..20: mol_type = other DNA
tttttagtagagatgggatt

SEQ ID NO: 119732 - DNA, 20 bp, synthetic construct
  source 1..20: mol_type = other DNA
atttttagtagagatgggat

SEQ ID NO: 119733 - DNA, 20 bp, synthetic construct
  source 1..20: mol_type = other DNA
tatttttagtagagatggga

SEQ ID NO: 119734 - DNA, 20 bp, synthetic construct
  source 1..20: mol_type = other DNA
gtatttttagtagagatggg

SEQ ID NO: 119735 - DNA, 20 bp, synthetic construct
  source 1..20: mol_type = other DNA
tgtatttttagtagagatgg

SEQ ID NO: 119736 - DNA, 20 bp, synthetic construct
  source 1..20: mol_type = other DNA
ttgtatttttagtagagatg

SEQ ID NO: 119737 - DNA, 20 bp, synthetic construct
  source 1..20: mol_type = other DNA
tttgtatttttagtagagat

SEQ ID NO: 119738 - DNA, 20 bp, synthetic construct
  source 1..20: mol_type = other DNA
ttttgtatttttagtagaga

SEQ ID NO: 119739 - DNA, 20 bp, synthetic construct
  source 1..20: mol_type = other DNA
tttttgtatttttagtagag

SEQ ID NO: 119740 - DNA, 20 bp, synthetic construct
  source 1..20: mol_type = other DNA
atttttgtatttttagtaga

SEQ ID NO: 119741 - DNA, 20 bp, synthetic construct
  source 1..20: mol_type = other DNA
aatttttgtatttttagtag

SEQ ID NO: 119742 - DNA, 20 bp, synthetic construct
  source 1..20: mol_type = other DNA
taatttttgtatttttagta

SEQ ID NO: 119743 - DNA, 20 bp, synthetic construct
  source 1..20: mol_type = other DNA
gtaatttttgtatttttagt

SEQ ID NO: 119744 - DNA, 20 bp, synthetic construct
  source 1..20: mol_type = other DNA
tgtaatttttgtatttttag

SEQ ID NO: 119745 - DNA, 20 bp, synthetic construct
  source 1..20: mol_type = other DNA
gtgtaatttttgtattttta

SEQ ID NO: 119746 - DNA, 20 bp, synthetic construct
  source 1..20: mol_type = other DNA
agtgtaatttttgtattttt

SEQ ID NO: 119747 - DNA, 20 bp, synthetic construct
  source 1..20: mol_type = other DNA
cagtgtaatttttgtatttt

SEQ ID NO: 119748 - DNA, 20 bp, synthetic construct
  source 1..20: mol_type = other DNA
ccagtgtaatttttgtattt

SEQ ID NO: 119749 - DNA, 20 bp, synthetic construct
  source 1..20: mol_type = other DNA
gccagtgtaatttttgtatt

SEQ ID NO: 119750 - DNA, 20 bp, synthetic construct
  source 1..20: mol_type = other DNA
tgccagtgtaatttttgtat

SEQ ID NO: 119751 - DNA, 20 bp, synthetic construct
  source 1..20: mol_type = other DNA
atgccagtgtaatttttgta

SEQ ID NO: 119752 - DNA, 20 bp, synthetic construct
  source 1..20: mol_type = other DNA
catgccagtgtaatttttgt

SEQ ID NO: 119753 - DNA, 20 bp, synthetic construct
  source 1..20: mol_type = other DNA
ccatgccagtgtaatttttg

SEQ ID NO: 119754 - DNA, 20 bp, synthetic construct
  source 1..20: mol_type = other DNA
accatgccagtgtaattttt

SEQ ID NO: 119755 - DNA, 20 bp, synthetic construct
  source 1..20: mol_type = other DNA
taccatgccagtgtaatttt

SEQ ID NO: 119756 - DNA, 20 bp, synthetic construct
  source 1..20: mol_type = other DNA
ctaccatgccagtgtaattt

SEQ ID NO: 119757 - DNA, 20 bp, synthetic construct
  source 1..20: mol_type = other DNA
gctaccatgccagtgtaatt

SEQ ID NO: 119758 - DNA, 20 bp, synthetic construct
  source 1..20: mol_type = other DNA
cgctaccatgccagtgtaat

SEQ ID NO: 119759 - DNA, 20 bp, synthetic construct
  source 1..20: mol_type = other DNA
acgctaccatgccagtgtaa

SEQ ID NO: 119760 - DNA, 20 bp, synthetic construct
  source 1..20: mol_type = other DNA
cacgctaccatgccagtgta

SEQ ID NO: 119761 - DNA, 20 bp, synthetic construct
  source 1..20: mol_type = other DNA
gcacgctaccatgccagtgt

SEQ ID NO: 119762 - DNA, 20 bp, synthetic construct
  source 1..20: mol_type = other DNA
tgcacgctaccatgccagtg

SEQ ID NO: 119763 - DNA, 20 bp, synthetic construct
  source 1..20: mol_type = other DNA
gtgcacgctaccatgccagt

SEQ ID NO: 119764 - DNA, 20 bp, synthetic construct
  source 1..20: mol_type = other DNA
ggtgcacgctaccatgccag

SEQ ID NO: 119765 - DNA, 20 bp, synthetic construct
  source 1..20: mol_type = other DNA
aggtgcacgctaccatgcca

SEQ ID NO: 119766 - DNA, 20 bp, synthetic construct
  source 1..20: mol_type = other DNA
taggtgcacgctaccatgcc

SEQ ID NO: 119767 - DNA, 20 bp, synthetic construct
  source 1..20: mol_type = other DNA
ataggtgcacgctaccatgc

SEQ ID NO: 119768 - DNA, 20 bp, synthetic construct
  source 1..20: mol_type = other DNA
tataggtgcacgctaccatg

SEQ ID NO: 119769 - DNA, 20 bp, synthetic construct
  source 1..20: mol_type = other DNA
ttataggtgcacgctaccat

SEQ ID NO: 119770 - DNA, 20 bp, synthetic construct
  source 1..20: mol_type = other DNA
attataggtgcacgctacca

SEQ ID NO: 119771 - DNA, 20 bp, synthetic construct
  source 1..20: mol_type = other DNA
gattataggtgcacgctacc

SEQ ID NO: 119772 - DNA, 20 bp, synthetic construct
  source 1..20: mol_type = other DNA
ggattataggtgcacgctac

SEQ ID NO: 119773 - DNA, 20 bp, synthetic construct
  source 1..20: mol_type = other DNA
gggattataggtgcacgcta

SEQ ID NO: 119774 - DNA, 20 bp, synthetic construct
  source 1..20: mol_type = other DNA
tgggattataggtgcacgct

SEQ ID NO: 119775 - DNA, 20 bp, synthetic construct
  source 1..20: mol_type = other DNA
ctgggattataggtgcacgc

SEQ ID NO: 119776 - DNA, 20 bp, synthetic construct
  source 1..20: mol_type = other DNA
gctgggattataggtgcacg

SEQ ID NO: 119777 - DNA, 20 bp, synthetic construct
  source 1..20: mol_type = other DNA
agctgggattataggtgcac

SEQ ID NO: 119778 - DNA, 20 bp, synthetic construct
  source 1..20: mol_type = other DNA
tagctgggattataggtgca

SEQ ID NO: 119779 - DNA, 20 bp, synthetic construct
  source 1..20: mol_type = other DNA
atagctgggattataggtgc

SEQ ID NO: 119780 - DNA, 20 bp, synthetic construct
  source 1..20: mol_type = other DNA
aatagctgggattataggtg

SEQ ID NO: 119781 - DNA, 20 bp, synthetic construct
  source 1..20: mol_type = other DNA
gaatagctgggattataggt

SEQ ID NO: 119782 - DNA, 20 bp, synthetic construct
  source 1..20: mol_type = other DNA
tgaatagctgggattatagg

SEQ ID NO: 119783 - DNA, 20 bp, synthetic construct
  source 1..20: mol_type = other DNA
ctgaatagctgggattatag

SEQ ID NO: 119784 - DNA, 20 bp, synthetic construct
  source 1..20: mol_type = other DNA
cctgaatagctgggattata

SEQ ID NO: 119785 - DNA, 20 bp, synthetic construct
  source 1..20: mol_type = other DNA
tcctgaatagctgggattat

SEQ ID NO: 119786 - DNA, 20 bp, synthetic construct
  source 1..20: mol_type = other DNA
ctcctgaatagctgggatta

SEQ ID NO: 119787 - DNA, 20 bp, synthetic construct
  source 1..20: mol_type = other DNA
cctcctgaatagctgggatt

SEQ ID NO: 119788 - DNA, 20 bp, synthetic construct
  source 1..20: mol_type = other DNA
gcctcctgaatagctgggat

SEQ ID NO: 119789 - DNA, 20 bp, synthetic construct
  source 1..20: mol_type = other DNA
agcctcctgaatagctggga

SEQ ID NO: 119790 - DNA, 20 bp, synthetic construct
  source 1..20: mol_type = other DNA
cagcctcctgaatagctggg

SEQ ID NO: 119791 - DNA, 20 bp, synthetic construct
  source 1..20: mol_type = other DNA
tcagcctcctgaatagctgg

SEQ ID NO: 119792 - DNA, 20 bp, synthetic construct
  source 1..20: mol_type = other DNA
ctcagcctcctgaatagctg

SEQ ID NO: 119793 - DNA, 20 bp, synthetic construct
  source 1..20: mol_type = other DNA
cctcagcctcctgaatagct

SEQ ID NO: 119794 - DNA, 20 bp, synthetic construct
  source 1..20: mol_type = other DNA
gcctcagcctcctgaatagc

SEQ ID NO: 119795 - DNA, 20 bp, synthetic construct
  source 1..20: mol_type = other DNA
tgcctcagcctcctgaatag

SEQ ID NO: 119796 - DNA, 20 bp, synthetic construct
  source 1..20: mol_type = other DNA
ctgcctcagcctcctgaata

SEQ ID NO: 119797 - DNA, 20 bp, synthetic construct
  source 1..20: mol_type = other DNA
cctgcctcagcctcctgaat

SEQ ID NO: 119798 - DNA, 20 bp, synthetic construct
  source 1..20: mol_type = other DNA
tcctgcctcagcctcctgaa

SEQ ID NO: 119799 - DNA, 20 bp, synthetic construct
  source 1..20: mol_type = other DNA
ctcctgcctcagcctcctga

SEQ ID NO: 119800 - DNA, 20 bp, synthetic construct
  source 1..20: mol_type = other DNA
gctcctgcctcagcctcctg

SEQ ID NO: 119801 - DNA, 20 bp, synthetic construct
  source 1..20: mol_type = other DNA
tgctcctgcctcagcctcct

SEQ ID NO: 119802 - DNA, 20 bp, synthetic construct
  source 1..20: mol_type = other DNA
atgctcctgcctcagcctcc

SEQ ID NO: 119803 - DNA, 20 bp, synthetic construct
  source 1..20: mol_type = other DNA
gatgctcctgcctcagcctc

SEQ ID NO: 119804 - DNA, 20 bp, synthetic construct
  source 1..20: mol_type = other DNA
tgatgctcctgcctcagcct

SEQ ID NO: 119805 - DNA, 20 bp, synthetic construct
  source 1..20: mol_type = other DNA
ctgatgctcctgcctcagcc

SEQ ID NO: 119806 - DNA, 20 bp, synthetic construct
  source 1..20: mol_type = other DNA
tctgatgctcctgcctcagc

SEQ ID NO: 119807 - DNA, 20 bp, synthetic construct
  source 1..20: mol_type = other DNA
ttctgatgctcctgcctcag

SEQ ID NO: 119808 - DNA, 20 bp, synthetic construct
  source 1..20: mol_type = other DNA
attctgatgctcctgcctca

SEQ ID NO: 119809 - DNA, 20 bp, synthetic construct
  source 1..20: mol_type = other DNA
gattctgatgctcctgcctc

SEQ ID NO: 119810 - DNA, 20 bp, synthetic construct
  source 1..20: mol_type = other DNA
cgattctgatgctcctgcct

SEQ ID NO: 119811 - DNA, 20 bp, synthetic construct
  source 1..20: mol_type = other DNA
gcgattctgatgctcctgcc

SEQ ID NO: 119812 - DNA, 20 bp, synthetic construct
  source 1..20: mol_type = other DNA
agcgattctgatgctcctgc

SEQ ID NO: 119813 - DNA, 20 bp, synthetic construct
  source 1..20: mol_type = other DNA
aagcgattctgatgctcctg

SEQ ID NO: 119814 - DNA, 20 bp, synthetic construct
  source 1..20: mol_type = other DNA
caagcgattctgatgctcct

SEQ ID NO: 119815 - DNA, 20 bp, synthetic construct
  source 1..20: mol_type = other DNA
tcaagcgattctgatgctcc

SEQ ID NO: 119816 - DNA, 20 bp, synthetic construct
  source 1..20: mol_type = other DNA
ttcaagcgattctgatgctc

SEQ ID NO: 119817 - DNA, 20 bp, synthetic construct
  source 1..20: mol_type = other DNA
gttcaagcgattctgatgct

SEQ ID NO: 119818 - DNA, 20 bp, synthetic construct
  source 1..20: mol_type = other DNA
ggttcaagcgattctgatgc

SEQ ID NO: 119819 - DNA, 20 bp, synthetic construct
  source 1..20: mol_type = other DNA
aggttcaagcgattctgatg

SEQ ID NO: 119820 - DNA, 20 bp, synthetic construct
  source 1..20: mol_type = other DNA
caggttcaagcgattctgat

SEQ ID NO: 119821 - DNA, 20 bp, synthetic construct
  source 1..20: mol_type = other DNA
ccaggttcaagcgattctga

SEQ ID NO: 119822 - DNA, 20 bp, synthetic construct
  source 1..20: mol_type = other DNA
cccaggttcaagcgattctg

SEQ ID NO: 119823 - DNA, 20 bp, synthetic construct
  source 1..20: mol_type = other DNA
tcccaggttcaagcgattct

SEQ ID NO: 119824 - DNA, 20 bp, synthetic construct
  source 1..20: mol_type = other DNA
ctcccaggttcaagcgattc

SEQ ID NO: 119825 - DNA, 20 bp, synthetic construct
  source 1..20: mol_type = other DNA
cctcccaggttcaagcgatt

SEQ ID NO: 119826 - DNA, 20 bp, synthetic construct
  source 1..20: mol_type = other DNA
gcctcccaggttcaagcgat

SEQ ID NO: 119827 - DNA, 20 bp, synthetic construct
  source 1..20: mol_type = other DNA
cgcctcccaggttcaagcga

SEQ ID NO: 119828 - DNA, 20 bp, synthetic construct
  source 1..20: mol_type = other DNA
ccgcctcccaggttcaagcg

SEQ ID NO: 119829 - DNA, 20 bp, synthetic construct
  source 1..20: mol_type = other DNA
tccgcctcccaggttcaagc

SEQ ID NO: 119830 - DNA, 20 bp, synthetic construct
  source 1..20: mol_type = other DNA
ctccgcctcccaggttcaag

SEQ ID NO: 119831 - DNA, 20 bp, synthetic construct
  source 1..20: mol_type = other DNA
cctccgcctcccaggttcaa

SEQ ID NO: 119832 - DNA, 20 bp, synthetic construct
  source 1..20: mol_type = other DNA
gcctccgcctcccaggttca

SEQ ID NO: 119833 - DNA, 20 bp, synthetic construct
  source 1..20: mol_type = other DNA
agcctccgcctcccaggttc

SEQ ID NO: 119834 - DNA, 20 bp, synthetic construct
  source 1..20: mol_type = other DNA
cagcctccgcctcccaggtt

SEQ ID NO: 119835 - DNA, 20 bp, synthetic construct
  source 1..20: mol_type = other DNA
gcagcctccgcctcccaggt

SEQ ID NO: 119836 - DNA, 20 bp, synthetic construct
  source 1..20: mol_type = other DNA
tgcagcctccgcctcccagg

SEQ ID NO: 119837 - DNA, 20 bp, synthetic construct
  source 1..20: mol_type = other DNA
ctgcagcctccgcctcccag

SEQ ID NO: 119838 - DNA, 20 bp, synthetic construct
  source 1..20: mol_type = other DNA
actgcagcctccgcctccca

SEQ ID NO: 119839 - DNA, 20 bp, synthetic construct
  source 1..20: mol_type = other DNA
cactgcagcctccgcctccc

SEQ ID NO: 119840 - DNA, 20 bp, synthetic construct
  source 1..20: mol_type = other DNA
tcactgcagcctccgcctcc

SEQ ID NO: 119841 - DNA, 20 bp, synthetic construct
  source 1..20: mol_type = other DNA
ctcactgcagcctccgcctc

SEQ ID NO: 119842 - DNA, 20 bp, synthetic construct
  source 1..20: mol_type = other DNA
gctcactgcagcctccgcct

SEQ ID NO: 119843 - DNA, 20 bp, synthetic construct
  source 1..20: mol_type = other DNA
agctcactgcagcctccgcc

SEQ ID NO: 119844 - DNA, 20 bp, synthetic construct
  source 1..20: mol_type = other DNA
cagctcactgcagcctccgc

SEQ ID NO: 119845 - DNA, 20 bp, synthetic construct
  source 1..20: mol_type = other DNA
tcagctcactgcagcctccg

SEQ ID NO: 119846 - DNA, 20 bp, synthetic construct
  source 1..20: mol_type = other DNA
ctcagctcactgcagcctcc

SEQ ID NO: 119847 - DNA, 20 bp, synthetic construct
  source 1..20: mol_type = other DNA
tctcagctcactgcagcctc

SEQ ID NO: 119848 - DNA, 20 bp, synthetic construct
  source 1..20: mol_type = other DNA
atctcagctcactgcagcct

SEQ ID NO: 119849 - DNA, 20 bp, synthetic construct
  source 1..20: mol_type = other DNA
gatctcagctcactgcagcc

SEQ ID NO: 119850 - DNA, 20 bp, synthetic construct
  source 1..20: mol_type = other DNA
tgatctcagctcactgcagc

SEQ ID NO: 119851 - DNA, 20 bp, synthetic construct
  source 1..20: mol_type = other DNA
gtgatctcagctcactgcag

SEQ ID NO: 119852 - DNA, 20 bp, synthetic construct
  source 1..20: mol_type = other DNA
tgtgatctcagctcactgca

SEQ ID NO: 119853 - DNA, 20 bp, synthetic construct
  source 1..20: mol_type = other DNA
gtgtgatctcagctcactgc

SEQ ID NO: 119854 - DNA, 20 bp, synthetic construct
  source 1..20: mol_type = other DNA
ggtgtgatctcagctcactg

SEQ ID NO: 119855 - DNA, 20 bp, synthetic construct
  source 1..20: mol_type = other DNA
tggtgtgatctcagctcact

SEQ ID NO: 119856 - DNA, 20 bp, synthetic construct
  source 1..20: mol_type = other DNA
gtggtgtgatctcagctcac

SEQ ID NO: 119857 - DNA, 20 bp, synthetic construct
  source 1..20: mol_type = other DNA
agtggtgtgatctcagctca

SEQ ID NO: 119858 - DNA, 20 bp, synthetic construct
  source 1..20: mol_type = other DNA
cagtggtgtgatctcagctc

SEQ ID NO: 119859 - DNA, 20 bp, synthetic construct
  source 1..20: mol_type = other DNA
gcagtggtgtgatctcagct

SEQ ID NO: 119860 - DNA, 20 bp, synthetic construct
  source 1..20: mol_type = other DNA
tgcagtggtgtgatctcagc

SEQ ID NO: 119861 - DNA, 20 bp, synthetic construct
  source 1..20: mol_type = other DNA
gtgcagtggtgtgatctcag

SEQ ID NO: 119862 - DNA, 20 bp, synthetic construct
  source 1..20: mol_type = other DNA
ggtgcagtggtgtgatctca

SEQ ID NO: 119863 - DNA, 20 bp, synthetic construct
  source 1..20: mol_type = other DNA
gggtgcagtggtgtgatctc

SEQ ID NO: 119864 - DNA, 20 bp, synthetic construct
  source 1..20: mol_type = other DNA
ggggtgcagtggtgtgatct

SEQ ID NO: 119865 - DNA, 20 bp, synthetic construct
  source 1..20: mol_type = other DNA
tggggtgcagtggtgtgatc

SEQ ID NO: 119866 - DNA, 20 bp, synthetic construct
  source 1..20: mol_type = other DNA
ctggggtgcagtggtgtgat

SEQ ID NO: 119867 - DNA, 20 bp, synthetic construct
  source 1..20: mol_type = other DNA
gctggggtgcagtggtgtga

SEQ ID NO: 119868 - DNA, 20 bp, synthetic construct
  source 1..20: mol_type = other DNA
ggctggggtgcagtggtgtg

SEQ ID NO: 119869 - DNA, 20 bp, synthetic construct
  source 1..20: mol_type = other DNA
aggctggggtgcagtggtgt

SEQ ID NO: 119870 - DNA, 20 bp, synthetic construct
  source 1..20: mol_type = other DNA
caggctggggtgcagtggtg

SEQ ID NO: 119871 - DNA, 20 bp, synthetic construct
  source 1..20: mol_type = other DNA
tcaggctggggtgcagtggt

SEQ ID NO: 119872 - DNA, 20 bp, synthetic construct
  source 1..20: mol_type = other DNA
ctcaggctggggtgcagtgg

SEQ ID NO: 119873 - DNA, 20 bp, synthetic construct
  source 1..20: mol_type = other DNA
actcaggctggggtgcagtg

SEQ ID NO: 119874 - DNA, 20 bp, synthetic construct
  source 1..20: mol_type = other DNA
cactcaggctggggtgcagt

SEQ ID NO: 119875 - DNA, 20 bp, synthetic construct
  source 1..20: mol_type = other DNA
tcactcaggctggggtgcag

SEQ ID NO: 119876 - DNA, 20 bp, synthetic construct
  source 1..20: mol_type = other DNA
ttcactcaggctggggtgca

SEQ ID NO: 119877 - DNA, 20 bp, synthetic construct
  source 1..20: mol_type = other DNA
tttcactcaggctggggtgc

SEQ ID NO: 119878 - DNA, 20 bp, synthetic construct
  source 1..20: mol_type = other DNA
ctttcactcaggctggggtg

SEQ ID NO: 119879 - DNA, 20 bp, synthetic construct
  source 1..20: mol_type = other DNA
tctttcactcaggctggggt

SEQ ID NO: 119880 - DNA, 20 bp, synthetic construct
  source 1..20: mol_type = other DNA
ctctttcactcaggctgggg

SEQ ID NO: 119881 - DNA, 20 bp, synthetic construct
  source 1..20: mol_type = other DNA
actctttcactcaggctggg

SEQ ID NO: 119882 - DNA, 20 bp, synthetic construct
  source 1..20: mol_type = other DNA
cactctttcactcaggctgg

SEQ ID NO: 119883 - DNA, 20 bp, synthetic construct
  source 1..20: mol_type = other DNA
tcactctttcactcaggctg

SEQ ID NO: 119884 - DNA, 20 bp, synthetic construct
  source 1..20: mol_type = other DNA
ctcactctttcactcaggct

SEQ ID NO: 119885 - DNA, 20 bp, synthetic construct
  source 1..20: mol_type = other DNA
actcactctttcactcaggc

SEQ ID NO: 119886 - DNA, 20 bp, synthetic construct
  source 1..20: mol_type = other DNA
gactcactctttcactcagg

SEQ ID NO: 119887 - DNA, 20 bp, synthetic construct
  source 1..20: mol_type = other DNA
agactcactctttcactcag

SEQ ID NO: 119888 - DNA, 20 bp, synthetic construct
  source 1..20: mol_type = other DNA
gagactcactctttcactca

SEQ ID NO: 119889 - DNA, 20 bp, synthetic construct
  source 1..20: mol_type = other DNA
tgagactcactctttcactc

SEQ ID NO: 119890 - DNA, 20 bp, synthetic construct
  source 1..20: mol_type = other DNA
ttgagactcactctttcact

SEQ ID NO: 119891 - DNA, 20 bp, synthetic construct
  source 1..20: mol_type = other DNA
tttgagactcactctttcac

SEQ ID NO: 119892 - DNA, 20 bp, synthetic construct
  source 1..20: mol_type = other DNA
ttttgagactcactctttca

SEQ ID NO: 119893 - DNA, 20 bp, synthetic construct
  source 1..20: mol_type = other DNA
tttttgagactcactctttc

SEQ ID NO: 119894 - DNA, 20 bp, synthetic construct
  source 1..20: mol_type = other DNA
ttttttgagactcactcttt

SEQ ID NO: 119895 - DNA, 20 bp, synthetic construct
  source 1..20: mol_type = other DNA
attttttgagactcactctt

SEQ ID NO: 119896 - DNA, 20 bp, synthetic construct
  source 1..20: mol_type = other DNA
tattttttgagactcactct

SEQ ID NO: 119897 - DNA, 20 bp, synthetic construct
  source 1..20: mol_type = other DNA
ttattttttgagactcactc

SEQ ID NO: 119898 - DNA, 20 bp, synthetic construct
  source 1..20: mol_type = other DNA
tttattttttgagactcact

SEQ ID NO: 119899 - DNA, 20 bp, synthetic construct
  source 1..20: mol_type = other DNA
ttttattttttgagactcac

SEQ ID NO: 119900 - DNA, 20 bp, synthetic construct
  source 1..20: mol_type = other DNA
tttttattttttgagactca

SEQ ID NO: 119901 - DNA, 20 bp, synthetic construct
  source 1..20: mol_type = other DNA
ttttttattttttgagactc

SEQ ID NO: 119902 - DNA, 20 bp, synthetic construct
  source 1..20: mol_type = other DNA
attttttattttttgagact

SEQ ID NO: 119903 - DNA, 20 bp, synthetic construct
  source 1..20: mol_type = other DNA
tattttttattttttgagac

SEQ ID NO: 119904 - DNA, 20 bp, synthetic construct
  source 1..20: mol_type = other DNA
ttattttttattttttgaga

SEQ ID NO: 119905 - DNA, 20 bp, synthetic construct
  source 1..20: mol_type = other DNA
tttattttttattttttgag

SEQ ID NO: 119906 - DNA, 20 bp, synthetic construct
  source 1..20: mol_type = other DNA
ttttattttttattttttga

SEQ ID NO: 119907 - DNA, 20 bp, synthetic construct
  source 1..20: mol_type = other DNA
attttattttttattttttg

SEQ ID NO: 119908 - DNA, 20 bp, synthetic construct
  source 1..20: mol_type = other DNA
aattttattttttatttttt

SEQ ID NO: 119909 - DNA, 20 bp, synthetic construct
  source 1..20: mol_type = other DNA
aaattttattttttattttt

SEQ ID NO: 119910 - DNA, 20 bp, synthetic construct
  source 1..20: mol_type = other DNA
aaaattttattttttatttt

SEQ ID NO: 119911 - DNA, 20 bp, synthetic construct
  source 1..20: mol_type = other DNA
aaaaattttattttttattt

SEQ ID NO: 119912 - DNA, 20 bp, synthetic construct
  source 1..20: mol_type = other DNA
aaaaaattttattttttatt

SEQ ID NO: 119913 - DNA, 20 bp, synthetic construct
  source 1..20: mol_type = other DNA
aaaaaaattttattttttat

SEQ ID NO: 119914 - DNA, 20 bp, synthetic construct
  source 1..20: mol_type = other DNA
aaaaaaaattttatttttta

SEQ ID NO: 119915 - DNA, 20 bp, synthetic construct
  source 1..20: mol_type = other DNA
gaaaaaaaattttatttttt

SEQ ID NO: 119916 - DNA, 20 bp, synthetic construct
  source 1..20: mol_type = other DNA
tgaaaaaaaattttattttt

SEQ ID NO: 119917 - DNA, 20 bp, synthetic construct
  source 1..20: mol_type = other DNA
atgaaaaaaaattttatttt

SEQ ID NO: 119918 - DNA, 20 bp, synthetic construct
  source 1..20: mol_type = other DNA
catgaaaaaaaattttattt

SEQ ID NO: 119919 - DNA, 20 bp, synthetic construct
  source 1..20: mol_type = other DNA
acatgaaaaaaaattttatt

SEQ ID NO: 119920 - DNA, 20 bp, synthetic construct
  source 1..20: mol_type = other DNA
cacatgaaaaaaaattttat

SEQ ID NO: 119921 - DNA, 20 bp, synthetic construct
  source 1..20: mol_type = other DNA
ccacatgaaaaaaaatttta

SEQ ID NO: 119922 - DNA, 20 bp, synthetic construct
  source 1..20: mol_type = other DNA
gccacatgaaaaaaaatttt

SEQ ID NO: 119923 - DNA, 20 bp, synthetic construct
  source 1..20: mol_type = other DNA
ggccacatgaaaaaaaattt

SEQ ID NO: 119924 - DNA, 20 bp, synthetic construct
  source 1..20: mol_type = other DNA
aggccacatgaaaaaaaatt

SEQ ID NO: 119925 - DNA, 20 bp, synthetic construct
  source 1..20: mol_type = other DNA
aaggccacatgaaaaaaaat

SEQ ID NO: 119926 - DNA, 20 bp, synthetic construct
  source 1..20: mol_type = other DNA
taaggccacatgaaaaaaaa

SEQ ID NO: 119927 - DNA, 20 bp, synthetic construct
  source 1..20: mol_type = other DNA
ctaaggccacatgaaaaaaa

SEQ ID NO: 119928 - DNA, 20 bp, synthetic construct
  source 1..20: mol_type = other DNA
tctaaggccacatgaaaaaa

SEQ ID NO: 119929 - DNA, 20 bp, synthetic construct
  source 1..20: mol_type = other DNA
atctaaggccacatgaaaaa

SEQ ID NO: 119930 - DNA, 20 bp, synthetic construct
  source 1..20: mol_type = other DNA
aatctaaggccacatgaaaa

SEQ ID NO: 119931 - DNA, 20 bp, synthetic construct
  source 1..20: mol_type = other DNA
aaatctaaggccacatgaaa

SEQ ID NO: 119932 - DNA, 20 bp, synthetic construct
  source 1..20: mol_type = other DNA
aaaatctaaggccacatgaa

SEQ ID NO: 119933 - DNA, 20 bp, synthetic construct
  source 1..20: mol_type = other DNA
gaaaatctaaggccacatga

SEQ ID NO: 119934 - DNA, 20 bp, synthetic construct
  source 1..20: mol_type = other DNA
tgaaaatctaaggccacatg

SEQ ID NO: 119935 - DNA, 20 bp, synthetic construct
  source 1..20: mol_type = other DNA
atgaaaatctaaggccacat

SEQ ID NO: 119936 - DNA, 20 bp, synthetic construct
  source 1..20: mol_type = other DNA
aatgaaaatctaaggccaca

SEQ ID NO: 119937 - DNA, 20 bp, synthetic construct
  source 1..20: mol_type = other DNA
aaatgaaaatctaaggccac

SEQ ID NO: 119938 - DNA, 20 bp, synthetic construct
  source 1..20: mol_type = other DNA
gaaatgaaaatctaaggcca

SEQ ID NO: 119939 - DNA, 20 bp, synthetic construct
  source 1..20: mol_type = other DNA
agaaatgaaaatctaaggcc

SEQ ID NO: 119940 - DNA, 20 bp, synthetic construct
  source 1..20: mol_type = other DNA
gagaaatgaaaatctaaggc

SEQ ID NO: 119941 - DNA, 20 bp, synthetic construct
  source 1..20: mol_type = other DNA
ggagaaatgaaaatctaagg

SEQ ID NO: 119942 - DNA, 20 bp, synthetic construct
  source 1..20: mol_type = other DNA
aggagaaatgaaaatctaag

SEQ ID NO: 119943 - DNA, 20 bp, synthetic construct
  source 1..20: mol_type = other DNA
taggagaaatgaaaatctaa

SEQ ID NO: 119944 - DNA, 20 bp, synthetic construct
  source 1..20: mol_type = other DNA
ttaggagaaatgaaaatcta

SEQ ID NO: 119945 - DNA, 20 bp, synthetic construct
  source 1..20: mol_type = other DNA
tttaggagaaatgaaaatct

SEQ ID NO: 119946 - DNA, 20 bp, synthetic construct
  source 1..20: mol_type = other DNA
ctttaggagaaatgaaaatc

SEQ ID NO: 119947 - DNA, 20 bp, synthetic construct
  source 1..20: mol_type = other DNA
actttaggagaaatgaaaat

SEQ ID NO: 119948 - DNA, 20 bp, synthetic construct
  source 1..20: mol_type = other DNA
tactttaggagaaatgaaaa

SEQ ID NO: 119949 - DNA, 20 bp, synthetic construct
  source 1..20: mol_type = other DNA
ctactttaggagaaatgaaa

SEQ ID NO: 119950 - DNA, 20 bp, synthetic construct
  source 1..20: mol_type = other DNA
tctactttaggagaaatgaa

SEQ ID NO: 119951 - DNA, 20 bp, synthetic construct
  source 1..20: mol_type = other DNA
ttctactttaggagaaatga

SEQ ID NO: 119952 - DNA, 20 bp, synthetic construct
  source 1..20: mol_type = other DNA
tttctactttaggagaaatg

SEQ ID NO: 119953 - DNA, 20 bp, synthetic construct
  source 1..20: mol_type = other DNA
atttctactttaggagaaat

SEQ ID NO: 119954 - DNA, 20 bp, synthetic construct
  source 1..20: mol_type = other DNA
catttctactttaggagaaa

SEQ ID NO: 119955 - DNA, 20 bp, synthetic construct
  source 1..20: mol_type = other DNA
gcatttctactttaggagaa

SEQ ID NO: 119956 - DNA, 20 bp, synthetic construct
  source 1..20: mol_type = other DNA
agcatttctactttaggaga

SEQ ID NO: 119957 - DNA, 20 bp, synthetic construct
  source 1..20: mol_type = other DNA
cagcatttctactttaggag

SEQ ID NO: 119958 - DNA, 20 bp, synthetic construct
  source 1..20: mol_type = other DNA
acagcatttctactttagga

SEQ ID NO: 119959 - DNA, 20 bp, synthetic construct
  source 1..20: mol_type = other DNA
cacagcatttctactttagg

SEQ ID NO: 119960 - DNA, 20 bp, synthetic construct
  source 1..20: mol_type = other DNA
tcacagcatttctactttag

SEQ ID NO: 119961 - DNA, 20 bp, synthetic construct
  source 1..20: mol_type = other DNA
atcacagcatttctacttta

SEQ ID NO: 119962 - DNA, 20 bp, synthetic construct
  source 1..20: mol_type = other DNA
catcacagcatttctacttt

SEQ ID NO: 119963 - DNA, 20 bp, synthetic construct
  source 1..20: mol_type = other DNA
ccatcacagcatttctactt

SEQ ID NO: 119964 - DNA, 20 bp, synthetic construct
  source 1..20: mol_type = other DNA
tccatcacagcatttctact

SEQ ID NO: 119965 - DNA, 20 bp, synthetic construct
  source 1..20: mol_type = other DNA
ttccatcacagcatttctac

SEQ ID NO: 119966 - DNA, 20 bp, synthetic construct
  source 1..20: mol_type = other DNA
gttccatcacagcatttcta

SEQ ID NO: 119967 - DNA, 20 bp, synthetic construct
  source 1..20: mol_type = other DNA
agttccatcacagcatttct

SEQ ID NO: 119968 - DNA, 20 bp, synthetic construct
  source 1..20: mol_type = other DNA
cagttccatcacagcatttc

SEQ ID NO: 119969 - DNA, 20 bp, synthetic construct
  source 1..20: mol_type = other DNA
gcagttccatcacagcattt

SEQ ID NO: 119970 - DNA, 20 bp, synthetic construct
  source 1..20: mol_type = other DNA
ggcagttccatcacagcatt

SEQ ID NO: 119971 - DNA, 20 bp, synthetic construct
  source 1..20: mol_type = other DNA
tggcagttccatcacagcat

SEQ ID NO: 119972 - DNA, 20 bp, synthetic construct
  source 1..20: mol_type = other DNA
ttggcagttccatcacagca

SEQ ID NO: 119973 - DNA, 20 bp, synthetic construct
  source 1..20: mol_type = other DNA
tttggcagttccatcacagc

SEQ ID NO: 119974 - DNA, 20 bp, synthetic construct
  source 1..20: mol_type = other DNA
gtttggcagttccatcacag

SEQ ID NO: 119975 - DNA, 20 bp, synthetic construct
  source 1..20: mol_type = other DNA
agtttggcagttccatcaca

SEQ ID NO: 119976 - DNA, 20 bp, synthetic construct
  source 1..20: mol_type = other DNA
aagtttggcagttccatcac

SEQ ID NO: 119977 - DNA, 20 bp, synthetic construct
  source 1..20: mol_type = other DNA
aaagtttggcagttccatca

SEQ ID NO: 119978 - DNA, 20 bp, synthetic construct
  source 1..20: mol_type = other DNA
aaaagtttggcagttccatc

SEQ ID NO: 119979 - DNA, 20 bp, synthetic construct
  source 1..20: mol_type = other DNA
gaaaagtttggcagttccat

SEQ ID NO: 119980 - DNA, 20 bp, synthetic construct
  source 1..20: mol_type = other DNA
ggaaaagtttggcagttcca

SEQ ID NO: 119981 - DNA, 20 bp, synthetic construct
  source 1..20: mol_type = other DNA
tggaaaagtttggcagttcc

SEQ ID NO: 119982 - DNA, 20 bp, synthetic construct
  source 1..20: mol_type = other DNA
ttggaaaagtttggcagttc

SEQ ID NO: 119983 - DNA, 20 bp, synthetic construct
  source 1..20: mol_type = other DNA
tttggaaaagtttggcagtt

SEQ ID NO: 119984 - DNA, 20 bp, synthetic construct
  source 1..20: mol_type = other DNA
ctttggaaaagtttggcagt

SEQ ID NO: 119985 - DNA, 20 bp, synthetic construct
  source 1..20: mol_type = other DNA
gctttggaaaagtttggcag

SEQ ID NO: 119986 - DNA, 20 bp, synthetic construct
  source 1..20: mol_type = other DNA
tgctttggaaaagtttggca

SEQ ID NO: 119987 - DNA, 20 bp, synthetic construct
  source 1..20: mol_type = other DNA
ctgctttggaaaagtttggc

SEQ ID NO: 119988 - DNA, 20 bp, synthetic construct
  source 1..20: mol_type = other DNA
gctgctttggaaaagtttgg

SEQ ID NO: 119989 - DNA, 20 bp, synthetic construct
  source 1..20: mol_type = other DNA
agctgctttggaaaagtttg

SEQ ID NO: 119990 - DNA, 20 bp, synthetic construct
  source 1..20: mol_type = other DNA
cagctgctttggaaaagttt

SEQ ID NO: 119991 - DNA, 20 bp, synthetic construct
  source 1..20: mol_type = other DNA
gcagctgctttggaaaagtt

SEQ ID NO: 119992 - DNA, 20 bp, synthetic construct
  source 1..20: mol_type = other DNA
tgcagctgctttggaaaagt

SEQ ID NO: 119993 - DNA, 20 bp, synthetic construct
  source 1..20: mol_type = other DNA
atgcagctgctttggaaaag

SEQ ID NO: 119994 - DNA, 20 bp, synthetic construct
  source 1..20: mol_type = other DNA
gatgcagctgctttggaaaa

SEQ ID NO: 119995 - DNA, 20 bp, synthetic construct
  source 1..20: mol_type = other DNA
tgatgcagctgctttggaaa

SEQ ID NO: 119996 - DNA, 20 bp, synthetic construct
  source 1..20: mol_type = other DNA
atgatgcagctgctttggaa

SEQ ID NO: 119997 - DNA, 20 bp, synthetic construct
  source 1..20: mol_type = other DNA
aatgatgcagctgctttgga

SEQ ID NO: 119998 - DNA, 20 bp, synthetic construct
  source 1..20: mol_type = other DNA
aaatgatgcagctgctttgg

SEQ ID NO: 119999 - DNA, 20 bp, synthetic construct
  source 1..20: mol_type = other DNA
aaaatgatgcagctgctttg

SEQ ID NO: 120000 - DNA, 20 bp, synthetic construct
  source 1..20: mol_type = other DNA
caaaatgatgcagctgcttt

SEQ ID NO: 120001 - DNA, 20 bp, synthetic construct
  source 1..20: mol_type = other DNA
acaaaatgatgcagctgctt

SEQ ID NO: 120002 - DNA, 20 bp, synthetic construct
  source 1..20: mol_type = other DNA
tacaaaatgatgcagctgct

SEQ ID NO: 120003 - DNA, 20 bp, synthetic construct
  source 1..20: mol_type = other DNA
atacaaaatgatgcagctgc

SEQ ID NO: 120004 - DNA, 20 bp, synthetic construct
  source 1..20: mol_type = other DNA
aatacaaaatgatgcagctg

SEQ ID NO: 120005 - DNA, 20 bp, synthetic construct
  source 1..20: mol_type = other DNA
aaatacaaaatgatgcagct

SEQ ID NO: 120006 - DNA, 20 bp, synthetic construct
  source 1..20: mol_type = other DNA
gaaatacaaaatgatgcagc

SEQ ID NO: 120007 - DNA, 20 bp, synthetic construct
  source 1..20: mol_type = other DNA
agaaatacaaaatgatgcag

SEQ ID NO: 120008 - DNA, 20 bp, synthetic construct
  source 1..20: mol_type = other DNA
tagaaatacaaaatgatgca

SEQ ID NO: 120009 - DNA, 20 bp, synthetic construct
  source 1..20: mol_type = other DNA
gtagaaatacaaaatgatgc

SEQ ID NO: 120010 - DNA, 20 bp, synthetic construct
  source 1..20: mol_type = other DNA
ggtagaaatacaaaatgatg

SEQ ID NO: 120011 - DNA, 20 bp, synthetic construct
  source 1..20: mol_type = other DNA
tggtagaaatacaaaatgat

SEQ ID NO: 120012 - DNA, 20 bp, synthetic construct
  source 1..20: mol_type = other DNA
ctggtagaaatacaaaatga

SEQ ID NO: 120013 - DNA, 20 bp, synthetic construct
  source 1..20: mol_type = other DNA
actggtagaaatacaaaatg

SEQ ID NO: 120014 - DNA, 20 bp, synthetic construct
  source 1..20: mol_type = other DNA
tactggtagaaatacaaaat

SEQ ID NO: 120015 - DNA, 20 bp, synthetic construct
  source 1..20: mol_type = other DNA
ttactggtagaaatacaaaa

SEQ ID NO: 120016 - DNA, 20 bp, synthetic construct
  source 1..20: mol_type = other DNA
attactggtagaaatacaaa

SEQ ID NO: 120017 - DNA, 20 bp, synthetic construct
  source 1..20: mol_type = other DNA
cattactggtagaaatacaa

SEQ ID NO: 120018 - DNA, 20 bp, synthetic construct
  source 1..20: mol_type = other DNA
acattactggtagaaataca

SEQ ID NO: 120019 - DNA, 20 bp, synthetic construct
  source 1..20: mol_type = other DNA
tacattactggtagaaatac

SEQ ID NO: 120020 - DNA, 20 bp, synthetic construct
  source 1..20: mol_type = other DNA
gtacattactggtagaaata

SEQ ID NO: 120021 - DNA, 20 bp, synthetic construct
  source 1..20: mol_type = other DNA
tgtacattactggtagaaat

SEQ ID NO: 120022 - DNA, 20 bp, synthetic construct
  source 1..20: mol_type = other DNA
ttgtacattactggtagaaa

SEQ ID NO: 120023 - DNA, 20 bp, synthetic construct
  source 1..20: mol_type = other DNA
cttgtacattactggtagaa

SEQ ID NO: 120024 - DNA, 20 bp, synthetic construct
  source 1..20: mol_type = other DNA
acttgtacattactggtaga

SEQ ID NO: 120025 - DNA, 20 bp, synthetic construct
  source 1..20: mol_type = other DNA
cacttgtacattactggtag

SEQ ID NO: 120026 - DNA, 20 bp, synthetic construct
  source 1..20: mol_type = other DNA
acacttgtacattactggta

SEQ ID NO: 120027 - DNA, 20 bp, synthetic construct
  source 1..20: mol_type = other DNA
aacacttgtacattactggt

SEQ ID NO: 120028 - DNA, 20 bp, synthetic construct
  source 1..20: mol_type = other DNA
gaacacttgtacattactgg

SEQ ID NO: 120029 - DNA, 20 bp, synthetic construct
  source 1..20: mol_type = other DNA
ggaacacttgtacattactg

SEQ ID NO: 120030 - DNA, 20 bp, synthetic construct
  source 1..20: mol_type = other DNA
tggaacacttgtacattact

SEQ ID NO: 120031 - DNA, 20 bp, synthetic construct
  source 1..20: mol_type = other DNA
ctggaacacttgtacattac

SEQ ID NO: 120032 - DNA, 20 bp, synthetic construct
  source 1..20: mol_type = other DNA
actggaacacttgtacatta

SEQ ID NO: 120033 - DNA, 20 bp, synthetic construct
  source 1..20: mol_type = other DNA
aactggaacacttgtacatt

SEQ ID NO: 120034 - DNA, 20 bp, synthetic construct
  source 1..20: mol_type = other DNA
aaactggaacacttgtacat

SEQ ID NO: 120035 - DNA, 20 bp, synthetic construct
  source 1..20: mol_type = other DNA
gaaactggaacacttgtaca

SEQ ID NO: 120036 - DNA, 20 bp, synthetic construct
  source 1..20: mol_type = other DNA
agaaactggaacacttgtac

SEQ ID NO: 120037 - DNA, 20 bp, synthetic construct
  source 1..20: mol_type = other DNA
gagaaactggaacacttgta

SEQ ID NO: 120038 - DNA, 20 bp, synthetic construct
  source 1..20: mol_type = other DNA
ggagaaactggaacacttgt

SEQ ID NO: 120039 - DNA, 20 bp, synthetic construct
  source 1..20: mol_type = other DNA
tggagaaactggaacacttg

SEQ ID NO: 120040 - DNA, 20 bp, synthetic construct
  source 1..20: mol_type = other DNA
gtggagaaactggaacactt

SEQ ID NO: 120041 - DNA, 20 bp, synthetic construct
  source 1..20: mol_type = other DNA
tgtggagaaactggaacact

SEQ ID NO: 120042 - DNA, 20 bp, synthetic construct
  source 1..20: mol_type = other DNA
atgtggagaaactggaacac

SEQ ID NO: 120043 - DNA, 20 bp, synthetic construct
  source 1..20: mol_type = other DNA
gatgtggagaaactggaaca

SEQ ID NO: 120044 - DNA, 20 bp, synthetic construct
  source 1..20: mol_type = other DNA
ggatgtggagaaactggaac

SEQ ID NO: 120045 - DNA, 20 bp, synthetic construct
  source 1..20: mol_type = other DNA
aggatgtggagaaactggaa

SEQ ID NO: 120046 - DNA, 20 bp, synthetic construct
  source 1..20: mol_type = other DNA
gaggatgtggagaaactgga

SEQ ID NO: 120047 - DNA, 20 bp, synthetic construct
  source 1..20: mol_type = other DNA
tgaggatgtggagaaactgg

SEQ ID NO: 120048 - DNA, 20 bp, synthetic construct
  source 1..20: mol_type = other DNA
atgaggatgtggagaaactg

SEQ ID NO: 120049 - DNA, 20 bp, synthetic construct
  source 1..20: mol_type = other DNA
tatgaggatgtggagaaact

SEQ ID NO: 120050 - DNA, 20 bp, synthetic construct
  source 1..20: mol_type = other DNA
ttatgaggatgtggagaaac

SEQ ID NO: 120051 - DNA, 20 bp, synthetic construct
  source 1..20: mol_type = other DNA
tttatgaggatgtggagaaa

SEQ ID NO: 120052 - DNA, 20 bp, synthetic construct
  source 1..20: mol_type = other DNA
atttatgaggatgtggagaa

SEQ ID NO: 120053 - DNA, 20 bp, synthetic construct
  source 1..20: mol_type = other DNA
tatttatgaggatgtggaga

SEQ ID NO: 120054 - DNA, 20 bp, synthetic construct
  source 1..20: mol_type = other DNA
ttatttatgaggatgtggag

SEQ ID NO: 120055 - DNA, 20 bp, synthetic construct
  source 1..20: mol_type = other DNA
gttatttatgaggatgtgga

SEQ ID NO: 120056 - DNA, 20 bp, synthetic construct
  source 1..20: mol_type = other DNA
ggttatttatgaggatgtgg

SEQ ID NO: 120057 - DNA, 20 bp, synthetic construct
  source 1..20: mol_type = other DNA
cggttatttatgaggatgtg

SEQ ID NO: 120058 - DNA, 20 bp, synthetic construct
  source 1..20: mol_type = other DNA
tcggttatttatgaggatgt

SEQ ID NO: 120059 - DNA, 20 bp, synthetic construct
  source 1..20: mol_type = other DNA
atcggttatttatgaggatg

SEQ ID NO: 120060 - DNA, 20 bp, synthetic construct
  source 1..20: mol_type = other DNA
tatcggttatttatgaggat

SEQ ID NO: 120061 - DNA, 20 bp, synthetic construct
  source 1..20: mol_type = other DNA
atatcggttatttatgagga

SEQ ID NO: 120062 - DNA, 20 bp, synthetic construct
  source 1..20: mol_type = other DNA
catatcggttatttatgagg

SEQ ID NO: 120063 - DNA, 20 bp, synthetic construct
  source 1..20: mol_type = other DNA
acatatcggttatttatgag

SEQ ID NO: 120064 - DNA, 20 bp, synthetic construct
  source 1..20: mol_type = other DNA
gacatatcggttatttatga

SEQ ID NO: 120065 - DNA, 20 bp, synthetic construct
  source 1..20: mol_type = other DNA
agacatatcggttatttatg

SEQ ID NO: 120066 - DNA, 20 bp, synthetic construct
  source 1..20: mol_type = other DNA
aagacatatcggttatttat

SEQ ID NO: 120067 - DNA, 20 bp, synthetic construct
  source 1..20: mol_type = other DNA
aaagacatatcggttattta

SEQ ID NO: 120068 - DNA, 20 bp, synthetic construct
  source 1..20: mol_type = other DNA
caaagacatatcggttattt

SEQ ID NO: 120069 - DNA, 20 bp, synthetic construct
  source 1..20: mol_type = other DNA
ccaaagacatatcggttatt

SEQ ID NO: 120070 - DNA, 20 bp, synthetic construct
  source 1..20: mol_type = other DNA
accaaagacatatcggttat

SEQ ID NO: 120071 - DNA, 20 bp, synthetic construct
  source 1..20: mol_type = other DNA
aaccaaagacatatcggtta

SEQ ID NO: 120072 - DNA, 20 bp, synthetic construct
  source 1..20: mol_type = other DNA
aaaccaaagacatatcggtt

SEQ ID NO: 120073 - DNA, 20 bp, synthetic construct
  source 1..20: mol_type = other DNA
caaaccaaagacatatcggt

SEQ ID NO: 120074 - DNA, 20 bp, synthetic construct
  source 1..20: mol_type = other DNA
ccaaaccaaagacatatcgg

SEQ ID NO: 120075 - DNA, 20 bp, synthetic construct
  source 1..20: mol_type = other DNA
cccaaaccaaagacatatcg

SEQ ID NO: 120076 - DNA, 20 bp, synthetic construct
  source 1..20: mol_type = other DNA
acccaaaccaaagacatatc

SEQ ID NO: 120077 - DNA, 20 bp, synthetic construct
  source 1..20: mol_type = other DNA
aacccaaaccaaagacatat

SEQ ID NO: 120078 - DNA, 20 bp, synthetic construct
  source 1..20: mol_type = other DNA
taacccaaaccaaagacata

SEQ ID NO: 120079 - DNA, 20 bp, synthetic construct
  source 1..20: mol_type = other DNA
ataacccaaaccaaagacat

SEQ ID NO: 120080 - DNA, 20 bp, synthetic construct
  source 1..20: mol_type = other DNA
cataacccaaaccaaagaca

SEQ ID NO: 120081 - DNA, 20 bp, synthetic construct
  source 1..20: mol_type = other DNA
acataacccaaaccaaagac

SEQ ID NO: 120082 - DNA, 20 bp, synthetic construct
  source 1..20: mol_type = other DNA
gacataacccaaaccaaaga

SEQ ID NO: 120083 - DNA, 20 bp, synthetic construct
  source 1..20: mol_type = other DNA
ggacataacccaaaccaaag

SEQ ID NO: 120084 - DNA, 20 bp, synthetic construct
  source 1..20: mol_type = other DNA
tggacataacccaaaccaaa

SEQ ID NO: 120085 - DNA, 20 bp, synthetic construct
  source 1..20: mol_type = other DNA
atggacataacccaaaccaa

SEQ ID NO: 120086 - DNA, 20 bp, synthetic construct
  source 1..20: mol_type = other DNA
aatggacataacccaaacca

SEQ ID NO: 120087 - DNA, 20 bp, synthetic construct
  source 1..20: mol_type = other DNA
gaatggacataacccaaacc

SEQ ID NO: 120088 - DNA, 20 bp, synthetic construct
  source 1..20: mol_type = other DNA
agaatggacataacccaaac

SEQ ID NO: 120089 - DNA, 20 bp, synthetic construct
  source 1..20: mol_type = other DNA
tagaatggacataacccaaa

SEQ ID NO: 120090 - DNA, 20 bp, synthetic construct
  source 1..20: mol_type = other DNA
ctagaatggacataacccaa

SEQ ID NO: 120091 - DNA, 20 bp, synthetic construct
  source 1..20: mol_type = other DNA
actagaatggacataaccca

SEQ ID NO: 120092 - DNA, 20 bp, synthetic construct
  source 1..20: mol_type = other DNA
cactagaatggacataaccc

SEQ ID NO: 120093 - DNA, 20 bp, synthetic construct
  source 1..20: mol_type = other DNA
ccactagaatggacataacc

SEQ ID NO: 120094 - DNA, 20 bp, synthetic construct
  source 1..20: mol_type = other DNA
accactagaatggacataac

SEQ ID NO: 120095 - DNA, 20 bp, synthetic construct
  source 1..20: mol_type = other DNA
aaccactagaatggacataa

SEQ ID NO: 120096 - DNA, 20 bp, synthetic construct
  source 1..20: mol_type = other DNA
taaccactagaatggacata

SEQ ID NO: 120097 - DNA, 20 bp, synthetic construct
  source 1..20: mol_type = other DNA
ataaccactagaatggacat

SEQ ID NO: 120098 - DNA, 20 bp, synthetic construct
  source 1..20: mol_type = other DNA
cataaccactagaatggaca

SEQ ID NO: 120099 - DNA, 20 bp, synthetic construct
  source 1..20: mol_type = other DNA
tcataaccactagaatggac

SEQ ID NO: 120100 - DNA, 20 bp, synthetic construct
  source 1..20: mol_type = other DNA
ttcataaccactagaatgga

SEQ ID NO: 120101 - DNA, 20 bp, synthetic construct
  source 1..20: mol_type = other DNA
cttcataaccactagaatgg

SEQ ID NO: 120102 - DNA, 20 bp, synthetic construct
  source 1..20: mol_type = other DNA
acttcataaccactagaatg

SEQ ID NO: 120103 - DNA, 20 bp, synthetic construct
  source 1..20: mol_type = other DNA
cacttcataaccactagaat

SEQ ID NO: 120104 - DNA, 20 bp, synthetic construct
  source 1..20: mol_type = other DNA
acacttcataaccactagaa

SEQ ID NO: 120105 - DNA, 20 bp, synthetic construct
  source 1..20: mol_type = other DNA
gacacttcataaccactaga

SEQ ID NO: 120106 - DNA, 20 bp, synthetic construct
  source 1..20: mol_type = other DNA
tgacacttcataaccactag

SEQ ID NO: 120107 - DNA, 20 bp, synthetic construct
  source 1..20: mol_type = other DNA
atgacacttcataaccacta

SEQ ID NO: 120108 - DNA, 20 bp, synthetic construct
  source 1..20: mol_type = other DNA
aatgacacttcataaccact

SEQ ID NO: 120109 - DNA, 20 bp, synthetic construct
  source 1..20: mol_type = other DNA
caatgacacttcataaccac

SEQ ID NO: 120110 - DNA, 20 bp, synthetic construct
  source 1..20: mol_type = other DNA
acaatgacacttcataacca

SEQ ID NO: 120111 - DNA, 20 bp, synthetic construct
  source 1..20: mol_type = other DNA
cacaatgacacttcataacc

SEQ ID NO: 120112 - DNA, 20 bp, synthetic construct
  source 1..20: mol_type = other DNA
ccacaatgacacttcataac

SEQ ID NO: 120113 - DNA, 20 bp, synthetic construct
  source 1..20: mol_type = other DNA
accacaatgacacttcataa

SEQ ID NO: 120114 - DNA, 20 bp, synthetic construct
  source 1..20: mol_type = other DNA
aaccacaatgacacttcata

SEQ ID NO: 120115 - DNA, 20 bp, synthetic construct
  source 1..20: mol_type = other DNA
aaaccacaatgacacttcat

SEQ ID NO: 120116 - DNA, 20 bp, synthetic construct
  source 1..20: mol_type = other DNA
aaaaccacaatgacacttca

SEQ ID NO: 120117 - DNA, 20 bp, synthetic construct
  source 1..20: mol_type = other DNA
aaaaaccacaatgacacttc

SEQ ID NO: 120118 - DNA, 20 bp, synthetic construct
  source 1..20: mol_type = other DNA
aaaaaaccacaatgacactt

SEQ ID NO: 120119 - DNA, 20 bp, synthetic construct
  source 1..20: mol_type = other DNA
caaaaaaccacaatgacact

SEQ ID NO: 120120 - DNA, 20 bp, synthetic construct
  source 1..20: mol_type = other DNA
acaaaaaaccacaatgacac

SEQ ID NO: 120121 - DNA, 20 bp, synthetic construct
  source 1..20: mol_type = other DNA
aacaaaaaaccacaatgaca

SEQ ID NO: 120122 - DNA, 20 bp, synthetic construct
  source 1..20: mol_type = other DNA
aaacaaaaaaccacaatgac

SEQ ID NO: 120123 - DNA, 20 bp, synthetic construct
  source 1..20: mol_type = other DNA
aaaacaaaaaaccacaatga

SEQ ID NO: 120124 - DNA, 20 bp, synthetic construct
  source 1..20: mol_type = other DNA
aaaaacaaaaaaccacaatg

SEQ ID NO: 120125 - DNA, 20 bp, synthetic construct
  source 1..20: mol_type = other DNA
aaaaaacaaaaaaccacaat

SEQ ID NO: 120126 - DNA, 20 bp, synthetic construct
  source 1..20: mol_type = other DNA
aaaaaaacaaaaaaccacaa

SEQ ID NO: 120127 - DNA, 20 bp, synthetic construct
  source 1..20: mol_type = other DNA
caaaaaaacaaaaaaccaca

SEQ ID NO: 120128 - DNA, 20 bp, synthetic construct
  source 1..20: mol_type = other DNA
acaaaaaaacaaaaaaccac

SEQ ID NO: 120129 - DNA, 20 bp, synthetic construct
  source 1..20: mol_type = other DNA
tacaaaaaaacaaaaaacca

SEQ ID NO: 120130 - DNA, 20 bp, synthetic construct
  source 1..20: mol_type = other DNA
atacaaaaaaacaaaaaacc

SEQ ID NO: 120131 - DNA, 20 bp, synthetic construct
  source 1..20: mol_type = other DNA
aatacaaaaaaacaaaaaac

SEQ ID NO: 120132 - DNA, 20 bp, synthetic construct
  source 1..20: mol_type = other DNA
caatacaaaaaaacaaaaaa

SEQ ID NO: 120133 - DNA, 20 bp, synthetic construct
  source 1..20: mol_type = other DNA
acaatacaaaaaaacaaaaa

SEQ ID NO: 120134 - DNA, 20 bp, synthetic construct
  source 1..20: mol_type = other DNA
aacaatacaaaaaaacaaaa

SEQ ID NO: 120135 - DNA, 20 bp, synthetic construct
  source 1..20: mol_type = other DNA
aaacaatacaaaaaaacaaa

SEQ ID NO: 120136 - DNA, 20 bp, synthetic construct
  source 1..20: mol_type = other DNA
aaaacaatacaaaaaaacaa

SEQ ID NO: 120137 - DNA, 20 bp, synthetic construct
  source 1..20: mol_type = other DNA
caaaacaatacaaaaaaaca

SEQ ID NO: 120138 - DNA, 20 bp, synthetic construct
  source 1..20: mol_type = other DNA
tcaaaacaatacaaaaaaac

SEQ ID NO: 120139 - DNA, 20 bp, synthetic construct
  source 1..20: mol_type = other DNA
ctcaaaacaatacaaaaaaa

SEQ ID NO: 120140 - DNA, 20 bp, synthetic construct
  source 1..20: mol_type = other DNA
tctcaaaacaatacaaaaaa

SEQ ID NO: 120141 - DNA, 20 bp, synthetic construct
  source 1..20: mol_type = other DNA
atctcaaaacaatacaaaaa

SEQ ID NO: 120142 - DNA, 20 bp, synthetic construct
  source 1..20: mol_type = other DNA
gatctcaaaacaatacaaaa

SEQ ID NO: 120143 - DNA, 20 bp, synthetic construct
  source 1..20: mol_type = other DNA
cgatctcaaaacaatacaaa

SEQ ID NO: 120144 - DNA, 20 bp, synthetic construct
  source 1..20: mol_type = other DNA
acgatctcaaaacaatacaa

SEQ ID NO: 120145 - DNA, 20 bp, synthetic construct
  source 1..20: mol_type = other DNA
cacgatctcaaaacaataca

SEQ ID NO: 120146 - DNA, 20 bp, synthetic construct
  source 1..20: mol_type = other DNA
gcacgatctcaaaacaatac

SEQ ID NO: 120147 - DNA, 20 bp, synthetic construct
  source 1..20: mol_type = other DNA
ggcacgatctcaaaacaata

SEQ ID NO: 120148 - DNA, 20 bp, synthetic construct
  source 1..20: mol_type = other DNA
gggcacgatctcaaaacaat

SEQ ID NO: 120149 - DNA, 20 bp, synthetic construct
  source 1..20: mol_type = other DNA
tgggcacgatctcaaaacaa

SEQ ID NO: 120150 - DNA, 20 bp, synthetic construct
  source 1..20: mol_type = other DNA
ctgggcacgatctcaaaaca

SEQ ID NO: 120151 - DNA, 20 bp, synthetic construct
  source 1..20: mol_type = other DNA
cctgggcacgatctcaaaac

SEQ ID NO: 120152 - DNA, 20 bp, synthetic construct
  source 1..20: mol_type = other DNA
gcctgggcacgatctcaaaa

SEQ ID NO: 120153 - DNA, 20 bp, synthetic construct
  source 1..20: mol_type = other DNA
agcctgggcacgatctcaaa

SEQ ID NO: 120154 - DNA, 20 bp, synthetic construct
  source 1..20: mol_type = other DNA
cagcctgggcacgatctcaa

SEQ ID NO: 120155 - DNA, 20 bp, synthetic construct
  source 1..20: mol_type = other DNA
ccagcctgggcacgatctca

SEQ ID NO: 120156 - DNA, 20 bp, synthetic construct
  source 1..20: mol_type = other DNA
tccagcctgggcacgatctc

SEQ ID NO: 120157 - DNA, 20 bp, synthetic construct
  source 1..20: mol_type = other DNA
ctccagcctgggcacgatct

SEQ ID NO: 120158 - DNA, 20 bp, synthetic construct
  source 1..20: mol_type = other DNA
gctccagcctgggcacgatc

SEQ ID NO: 120159 - DNA, 20 bp, synthetic construct
  source 1..20: mol_type = other DNA
tgctccagcctgggcacgat

SEQ ID NO: 120160 - DNA, 20 bp, synthetic construct
  source 1..20: mol_type = other DNA
gtgctccagcctgggcacga

SEQ ID NO: 120161 - DNA, 20 bp, synthetic construct
  source 1..20: mol_type = other DNA
tgtgctccagcctgggcacg

SEQ ID NO: 120162 - DNA, 20 bp, synthetic construct
  source 1..20: mol_type = other DNA
ctgtgctccagcctgggcac

SEQ ID NO: 120163 - DNA, 20 bp, synthetic construct
  source 1..20: mol_type = other DNA
actgtgctccagcctgggca

SEQ ID NO: 120164 - DNA, 20 bp, synthetic construct
  source 1..20: mol_type = other DNA
cactgtgctccagcctgggc

SEQ ID NO: 120165 - DNA, 20 bp, synthetic construct
  source 1..20: mol_type = other DNA
ccactgtgctccagcctggg

SEQ ID NO: 120166 - DNA, 20 bp, synthetic construct
  source 1..20: mol_type = other DNA
gccactgtgctccagcctgg

SEQ ID NO: 120167 - DNA, 20 bp, synthetic construct
  source 1..20: mol_type = other DNA
tgccactgtgctccagcctg

SEQ ID NO: 120168 - DNA, 20 bp, synthetic construct
  source 1..20: mol_type = other DNA
gtgccactgtgctccagcct

SEQ ID NO: 120169 - DNA, 20 bp, synthetic construct
  source 1..20: mol_type = other DNA
tgtgccactgtgctccagcc

SEQ ID NO: 120170 - DNA, 20 bp, synthetic construct
  source 1..20: mol_type = other DNA
ttgtgccactgtgctccagc

SEQ ID NO: 120171 - DNA, 20 bp, synthetic construct
  source 1..20: mol_type = other DNA
attgtgccactgtgctccag

SEQ ID NO: 120172 - DNA, 20 bp, synthetic construct
  source 1..20: mol_type = other DNA
gattgtgccactgtgctcca

SEQ ID NO: 120173 - DNA, 20 bp, synthetic construct
  source 1..20: mol_type = other DNA
agattgtgccactgtgctcc

SEQ ID NO: 120174 - DNA, 20 bp, synthetic construct
  source 1..20: mol_type = other DNA
gagattgtgccactgtgctc

SEQ ID NO: 120175 - DNA, 20 bp, synthetic construct
  source 1..20: mol_type = other DNA
cgagattgtgccactgtgct

SEQ ID NO: 120176 - DNA, 20 bp, synthetic construct
  source 1..20: mol_type = other DNA
ccgagattgtgccactgtgc

SEQ ID NO: 120177 - DNA, 20 bp, synthetic construct
  source 1..20: mol_type = other DNA
gccgagattgtgccactgtg

SEQ ID NO: 120178 - DNA, 20 bp, synthetic construct
  source 1..20: mol_type = other DNA
agccgagattgtgccactgt

SEQ ID NO: 120179 - DNA, 20 bp, synthetic construct
  source 1..20: mol_type = other DNA
gagccgagattgtgccactg

SEQ ID NO: 120180 - DNA, 20 bp, synthetic construct
  source 1..20: mol_type = other DNA
tgagccgagattgtgccact

SEQ ID NO: 120181 - DNA, 20 bp, synthetic construct
  source 1..20: mol_type = other DNA
gtgagccgagattgtgccac

SEQ ID NO: 120182 - DNA, 20 bp, synthetic construct
  source 1..20: mol_type = other DNA
agtgagccgagattgtgcca

SEQ ID NO: 120183 - DNA, 20 bp, synthetic construct
  source 1..20: mol_type = other DNA
cagtgagccgagattgtgcc

SEQ ID NO: 120184 - DNA, 20 bp, synthetic construct
  source 1..20: mol_type = other DNA
gcagtgagccgagattgtgc

SEQ ID NO: 120185 - DNA, 20 bp, synthetic construct
  source 1..20: mol_type = other DNA
tgcagtgagccgagattgtg

SEQ ID NO: 120186 - DNA, 20 bp, synthetic construct
  source 1..20: mol_type = other DNA
ctgcagtgagccgagattgt

SEQ ID NO: 120187 - DNA, 20 bp, synthetic construct
  source 1..20: mol_type = other DNA
gctgcagtgagccgagattg

SEQ ID NO: 120188 - DNA, 20 bp, synthetic construct
  source 1..20: mol_type = other DNA
ggctgcagtgagccgagatt

SEQ ID NO: 120189 - DNA, 20 bp, synthetic construct
  source 1..20: mol_type = other DNA
aggctgcagtgagccgagat

SEQ ID NO: 120190 - DNA, 20 bp, synthetic construct
  source 1..20: mol_type = other DNA
aaggctgcagtgagccgaga

SEQ ID NO: 120191 - DNA, 20 bp, synthetic construct
  source 1..20: mol_type = other DNA
gaaggctgcagtgagccgag

SEQ ID NO: 120192 - DNA, 20 bp, synthetic construct
  source 1..20: mol_type = other DNA
cgaaggctgcagtgagccga

SEQ ID NO: 120193 - DNA, 20 bp, synthetic construct
  source 1..20: mol_type = other DNA
gcgaaggctgcagtgagccg

SEQ ID NO: 120194 - DNA, 20 bp, synthetic construct
  source 1..20: mol_type = other DNA
agcgaaggctgcagtgagcc

SEQ ID NO: 120195 - DNA, 20 bp, synthetic construct
  source 1..20: mol_type = other DNA
aagcgaaggctgcagtgagc

SEQ ID NO: 120196 - DNA, 20 bp, synthetic construct
  source 1..20: mol_type = other DNA
gaagcgaaggctgcagtgag

SEQ ID NO: 120197 - DNA, 20 bp, synthetic construct
  source 1..20: mol_type = other DNA
ggaagcgaaggctgcagtga

SEQ ID NO: 120198 - DNA, 20 bp, synthetic construct
  source 1..20: mol_type = other DNA
aggaagcgaaggctgcagtg

SEQ ID NO: 120199 - DNA, 20 bp, synthetic construct
  source 1..20: mol_type = other DNA
caggaagcgaaggctgcagt

SEQ ID NO: 120200 - DNA, 20 bp, synthetic construct
  source 1..20: mol_type = other DNA
ccaggaagcgaaggctgcag

SEQ ID NO: 120201 - DNA, 20 bp, synthetic construct
  source 1..20: mol_type = other DNA
cccaggaagcgaaggctgca

SEQ ID NO: 120202 - DNA, 20 bp, synthetic construct
  source 1..20: mol_type = other DNA
acccaggaagcgaaggctgc

SEQ ID NO: 120203 - DNA, 20 bp, synthetic construct
  source 1..20: mol_type = other DNA
aacccaggaagcgaaggctg

SEQ ID NO: 120204 - DNA, 20 bp, synthetic construct
  source 1..20: mol_type = other DNA
gaacccaggaagcgaaggct

SEQ ID NO: 120205 - DNA, 20 bp, synthetic construct
  source 1..20: mol_type = other DNA
tgaacccaggaagcgaaggc

SEQ ID NO: 120206 - DNA, 20 bp, synthetic construct
  source 1..20: mol_type = other DNA
ttgaacccaggaagcgaagg

SEQ ID NO: 120207 - DNA, 20 bp, synthetic construct
  source 1..20: mol_type = other DNA
cttgaacccaggaagcgaag

SEQ ID NO: 120208 - DNA, 20 bp, synthetic construct
  source 1..20: mol_type = other DNA
gcttgaacccaggaagcgaa

SEQ ID NO: 120209 - DNA, 20 bp, synthetic construct
  source 1..20: mol_type = other DNA
tgcttgaacccaggaagcga

SEQ ID NO: 120210 - DNA, 20 bp, synthetic construct
  source 1..20: mol_type = other DNA
ttgcttgaacccaggaagcg

SEQ ID NO: 120211 - DNA, 20 bp, synthetic construct
  source 1..20: mol_type = other DNA
attgcttgaacccaggaagc

SEQ ID NO: 120212 - DNA, 20 bp, synthetic construct
  source 1..20: mol_type = other DNA
aattgcttgaacccaggaag

SEQ ID NO: 120213 - DNA, 20 bp, synthetic construct
  source 1..20: mol_type = other DNA
gaattgcttgaacccaggaa

SEQ ID NO: 120214 - DNA, 20 bp, synthetic construct
  source 1..20: mol_type = other DNA
agaattgcttgaacccagga

SEQ ID NO: 120215 - DNA, 20 bp, synthetic construct
  source 1..20: mol_type = other DNA
gagaattgcttgaacccagg

SEQ ID NO: 120216 - DNA, 20 bp, synthetic construct
  source 1..20: mol_type = other DNA
ggagaattgcttgaacccag

SEQ ID NO: 120217 - DNA, 20 bp, synthetic construct
  source 1..20: mol_type = other DNA
aggagaattgcttgaaccca

SEQ ID NO: 120218 - DNA, 20 bp, synthetic construct
  source 1..20: mol_type = other DNA
caggagaattgcttgaaccc

SEQ ID NO: 120219 - DNA, 20 bp, synthetic construct
  source 1..20: mol_type = other DNA
gcaggagaattgcttgaacc

SEQ ID NO: 120220 - DNA, 20 bp, synthetic construct
  source 1..20: mol_type = other DNA
ggcaggagaattgcttgaac

SEQ ID NO: 120221 - DNA, 20 bp, synthetic construct
  source 1..20: mol_type = other DNA
aggcaggagaattgcttgaa

SEQ ID NO: 120222 - DNA, 20 bp, synthetic construct
  source 1..20: mol_type = other DNA
gaggcaggagaattgcttga

SEQ ID NO: 120223 - DNA, 20 bp, synthetic construct
  source 1..20: mol_type = other DNA
tgaggcaggagaattgcttg

SEQ ID NO: 120224 - DNA, 20 bp, synthetic construct
  source 1..20: mol_type = other DNA
gtgaggcaggagaattgctt

SEQ ID NO: 120225 - DNA, 20 bp, synthetic construct
  source 1..20: mol_type = other DNA
ggtgaggcaggagaattgct

SEQ ID NO: 120226 - DNA, 20 bp, synthetic construct
  source 1..20: mol_type = other DNA
gggtgaggcaggagaattgc

SEQ ID NO: 120227 - DNA, 20 bp, synthetic construct
  source 1..20: mol_type = other DNA
agggtgaggcaggagaattg

SEQ ID NO: 120228 - DNA, 20 bp, synthetic construct
  source 1..20: mol_type = other DNA
gagggtgaggcaggagaatt

SEQ ID NO: 120229 - DNA, 20 bp, synthetic construct
  source 1..20: mol_type = other DNA
ggagggtgaggcaggagaat

SEQ ID NO: 120230 - DNA, 20 bp, synthetic construct
  source 1..20: mol_type = other DNA
gggagggtgaggcaggagaa

SEQ ID NO: 120231 - DNA, 20 bp, synthetic construct
  source 1..20: mol_type = other DNA
tgggagggtgaggcaggaga

SEQ ID NO: 120232 - DNA, 20 bp, synthetic construct
  source 1..20: mol_type = other DNA
ctgggagggtgaggcaggag

SEQ ID NO: 120233 - DNA, 20 bp, synthetic construct
  source 1..20: mol_type = other DNA
tctgggagggtgaggcagga

SEQ ID NO: 120234 - DNA, 20 bp, synthetic construct
  source 1..20: mol_type = other DNA
atctgggagggtgaggcagg

SEQ ID NO: 120235 - DNA, 20 bp, synthetic construct
  source 1..20: mol_type = other DNA
tatctgggagggtgaggcag

SEQ ID NO: 120236 - DNA, 20 bp, synthetic construct
  source 1..20: mol_type = other DNA
ctatctgggagggtgaggca

SEQ ID NO: 120237 - DNA, 20 bp, synthetic construct
  source 1..20: mol_type = other DNA
gctatctgggagggtgaggc

SEQ ID NO: 120238 - DNA, 20 bp, synthetic construct
  source 1..20: mol_type = other DNA
agctatctgggagggtgagg

SEQ ID NO: 120239 - DNA, 20 bp, synthetic construct
  source 1..20: mol_type = other DNA
cagctatctgggagggtgag

SEQ ID NO: 120240 - DNA, 20 bp, synthetic construct
  source 1..20: mol_type = other DNA
ccagctatctgggagggtga

SEQ ID NO: 120241 - DNA, 20 bp, synthetic construct
  source 1..20: mol_type = other DNA
cccagctatctgggagggtg

SEQ ID NO: 120242 - DNA, 20 bp, synthetic construct
  source 1..20: mol_type = other DNA
ccccagctatctgggagggt

SEQ ID NO: 120243 - DNA, 20 bp, synthetic construct
  source 1..20: mol_type = other DNA
gccccagctatctgggaggg

SEQ ID NO: 120244 - DNA, 20 bp, synthetic construct
  source 1..20: mol_type = other DNA
agccccagctatctgggagg

SEQ ID NO: 120245 - DNA, 20 bp, synthetic construct
  source 1..20: mol_type = other DNA
cagccccagctatctgggag

SEQ ID NO: 120246 - DNA, 20 bp, synthetic construct
  source 1..20: mol_type = other DNA
gcagccccagctatctggga

SEQ ID NO: 120247 - DNA, 20 bp, synthetic construct
  source 1..20: mol_type = other DNA
tgcagccccagctatctggg

SEQ ID NO: 120248 - DNA, 20 bp, synthetic construct
  source 1..20: mol_type = other DNA
ctgcagccccagctatctgg

SEQ ID NO: 120249 - DNA, 20 bp, synthetic construct
  source 1..20: mol_type = other DNA
cctgcagccccagctatctg

SEQ ID NO: 120250 - DNA, 20 bp, synthetic construct
  source 1..20: mol_type = other DNA
gcctgcagccccagctatct

SEQ ID NO: 120251 - DNA, 20 bp, synthetic construct
  source 1..20: mol_type = other DNA
tgcctgcagccccagctatc

SEQ ID NO: 120252 - DNA, 20 bp, synthetic construct
  source 1..20: mol_type = other DNA
atgcctgcagccccagctat

SEQ ID NO: 120253 - DNA, 20 bp, synthetic construct
  source 1..20: mol_type = other DNA
tatgcctgcagccccagcta

SEQ ID NO: 120254 - DNA, 20 bp, synthetic construct
  source 1..20: mol_type = other DNA
gtatgcctgcagccccagct

SEQ ID NO: 120255 - DNA, 20 bp, synthetic construct
  source 1..20: mol_type = other DNA
cgtatgcctgcagccccagc

SEQ ID NO: 120256 - DNA, 20 bp, synthetic construct
  source 1..20: mol_type = other DNA
gcgtatgcctgcagccccag

SEQ ID NO: 120257 - DNA, 20 bp, synthetic construct
  source 1..20: mol_type = other DNA
ggcgtatgcctgcagcccca

SEQ ID NO: 120258 - DNA, 20 bp, synthetic construct
  source 1..20: mol_type = other DNA
tggcgtatgcctgcagcccc

SEQ ID NO: 120259 - DNA, 20 bp, synthetic construct
  source 1..20: mol_type = other DNA
gtggcgtatgcctgcagccc

SEQ ID NO: 120260 - DNA, 20 bp, synthetic construct
  source 1..20: mol_type = other DNA
ggtggcgtatgcctgcagcc

SEQ ID NO: 120261 - DNA, 20 bp, synthetic construct
  source 1..20: mol_type = other DNA
tggtggcgtatgcctgcagc

SEQ ID NO: 120262 - DNA, 20 bp, synthetic construct
  source 1..20: mol_type = other DNA
gtggtggcgtatgcctgcag

SEQ ID NO: 120263 - DNA, 20 bp, synthetic construct
  source 1..20: mol_type = other DNA
tgtggtggcgtatgcctgca

SEQ ID NO: 120264 - DNA, 20 bp, synthetic construct
  source 1..20: mol_type = other DNA
gtgtggtggcgtatgcctgc

SEQ ID NO: 120265 - DNA, 20 bp, synthetic construct
  source 1..20: mol_type = other DNA
ggtgtggtggcgtatgcctg

SEQ ID NO: 120266 - DNA, 20 bp, synthetic construct
  source 1..20: mol_type = other DNA
tggtgtggtggcgtatgcct

SEQ ID NO: 120267 - DNA, 20 bp, synthetic construct
  source 1..20: mol_type = other DNA
ctggtgtggtggcgtatgcc

SEQ ID NO: 120268 - DNA, 20 bp, synthetic construct
  source 1..20: mol_type = other DNA
cctggtgtggtggcgtatgc

SEQ ID NO: 120269 - DNA, 20 bp, synthetic construct
  source 1..20: mol_type = other DNA
gcctggtgtggtggcgtatg

SEQ ID NO: 120270 - DNA, 20 bp, synthetic construct
  source 1..20: mol_type = other DNA
agcctggtgtggtggcgtat

SEQ ID NO: 120271 - DNA, 20 bp, synthetic construct
  source 1..20: mol_type = other DNA
tagcctggtgtggtggcgta

SEQ ID NO: 120272 - DNA, 20 bp, synthetic construct
  source 1..20: mol_type = other DNA
ttagcctggtgtggtggcgt

SEQ ID NO: 120273 - DNA, 20 bp, synthetic construct
  source 1..20: mol_type = other DNA
attagcctggtgtggtggcg

SEQ ID NO: 120274 - DNA, 20 bp, synthetic construct
  source 1..20: mol_type = other DNA
aattagcctggtgtggtggc

SEQ ID NO: 120275 - DNA, 20 bp, synthetic construct
  source 1..20: mol_type = other DNA
aaattagcctggtgtggtgg

SEQ ID NO: 120276 - DNA, 20 bp, synthetic construct
  source 1..20: mol_type = other DNA
aaaattagcctggtgtggtg

SEQ ID NO: 120277 - DNA, 20 bp, synthetic construct
  source 1..20: mol_type = other DNA
aaaaattagcctggtgtggt

SEQ ID NO: 120278 - DNA, 20 bp, synthetic construct
  source 1..20: mol_type = other DNA
taaaaattagcctggtgtgg

SEQ ID NO: 120279 - DNA, 20 bp, synthetic construct
  source 1..20: mol_type = other DNA
ataaaaattagcctggtgtg

SEQ ID NO: 120280 - DNA, 20 bp, synthetic construct
  source 1..20: mol_type = other DNA
tataaaaattagcctggtgt

SEQ ID NO: 120281 - DNA, 20 bp, synthetic construct
  source 1..20: mol_type = other DNA
atataaaaattagcctggtg

SEQ ID NO: 120282 - DNA, 20 bp, synthetic construct
  source 1..20: mol_type = other DNA
aatataaaaattagcctggt

SEQ ID NO: 120283 - DNA, 20 bp, synthetic construct
  source 1..20: mol_type = other DNA
aaatataaaaattagcctgg

SEQ ID NO: 120284 - DNA, 20 bp, synthetic construct
  source 1..20: mol_type = other DNA
aaaatataaaaattagcctg

SEQ ID NO: 120285 - DNA, 20 bp, synthetic construct
  source 1..20: mol_type = other DNA
aaaaatataaaaattagcct

SEQ ID NO: 120286 - DNA, 20 bp, synthetic construct
  source 1..20: mol_type = other DNA
aaaaaatataaaaattagcc

SEQ ID NO: 120287 - DNA, 20 bp, synthetic construct
  source 1..20: mol_type = other DNA
caaaaaatataaaaattagc

SEQ ID NO: 120288 - DNA, 20 bp, synthetic construct
  source 1..20: mol_type = other DNA
acaaaaaatataaaaattag

SEQ ID NO: 120289 - DNA, 20 bp, synthetic construct
  source 1..20: mol_type = other DNA
tacaaaaaatataaaaatta

SEQ ID NO: 120290 - DNA, 20 bp, synthetic construct
  source 1..20: mol_type = other DNA
ctacaaaaaatataaaaatt

SEQ ID NO: 120291 - DNA, 20 bp, synthetic construct
  source 1..20: mol_type = other DNA
tctacaaaaaatataaaaat

SEQ ID NO: 120292 - DNA, 20 bp, synthetic construct
  source 1..20: mol_type = other DNA
ctctacaaaaaatataaaaa

SEQ ID NO: 120293 - DNA, 20 bp, synthetic construct
  source 1..20: mol_type = other DNA
tctctacaaaaaatataaaa

SEQ ID NO: 120294 - DNA, 20 bp, synthetic construct
  source 1..20: mol_type = other DNA
atctctacaaaaaatataaa

SEQ ID NO: 120295 - DNA, 20 bp, synthetic construct
  source 1..20: mol_type = other DNA
catctctacaaaaaatataa

SEQ ID NO: 120296 - DNA, 20 bp, synthetic construct
  source 1..20: mol_type = other DNA
ccatctctacaaaaaatata

SEQ ID NO: 120297 - DNA, 20 bp, synthetic construct
  source 1..20: mol_type = other DNA
tccatctctacaaaaaatat

SEQ ID NO: 120298 - DNA, 20 bp, synthetic construct
  source 1..20: mol_type = other DNA
ctccatctctacaaaaaata

SEQ ID NO: 120299 - DNA, 20 bp, synthetic construct
  source 1..20: mol_type = other DNA
gctccatctctacaaaaaat

SEQ ID NO: 120300 - DNA, 20 bp, synthetic construct
  source 1..20: mol_type = other DNA
agctccatctctacaaaaaa

SEQ ID NO: 120301 - DNA, 20 bp, synthetic construct
  source 1..20: mol_type = other DNA
aagctccatctctacaaaaa

SEQ ID NO: 120302 - DNA, 20 bp, synthetic construct
  source 1..20: mol_type = other DNA
gaagctccatctctacaaaa

SEQ ID NO: 120303 - DNA, 20 bp, synthetic construct
  source 1..20: mol_type = other DNA
agaagctccatctctacaaa

SEQ ID NO: 120304 - DNA, 20 bp, synthetic construct
  source 1..20: mol_type = other DNA
gagaagctccatctctacaa

SEQ ID NO: 120305 - DNA, 20 bp, synthetic construct
  source 1..20: mol_type = other DNA
ggagaagctccatctctaca

SEQ ID NO: 120306 - DNA, 20 bp, synthetic construct
  source 1..20: mol_type = other DNA
cggagaagctccatctctac

SEQ ID NO: 120307 - DNA, 20 bp, synthetic construct
  source 1..20: mol_type = other DNA
acggagaagctccatctcta

SEQ ID NO: 120308 - DNA, 20 bp, synthetic construct
  source 1..20: mol_type = other DNA
cacggagaagctccatctct

SEQ ID NO: 120309 - DNA, 20 bp, synthetic construct
  source 1..20: mol_type = other DNA
gcacggagaagctccatctc

SEQ ID NO: 120310 - DNA, 20 bp, synthetic construct
  source 1..20: mol_type = other DNA
agcacggagaagctccatct

SEQ ID NO: 120311 - DNA, 20 bp, synthetic construct
  source 1..20: mol_type = other DNA
aagcacggagaagctccatc

SEQ ID NO: 120312 - DNA, 20 bp, synthetic construct
  source 1..20: mol_type = other DNA
gaagcacggagaagctccat

SEQ ID NO: 120313 - DNA, 20 bp, synthetic construct
  source 1..20: mol_type = other DNA
ggaagcacggagaagctcca

SEQ ID NO: 120314 - DNA, 20 bp, synthetic construct
  source 1..20: mol_type = other DNA
gggaagcacggagaagctcc

SEQ ID NO: 120315 - DNA, 20 bp, synthetic construct
  source 1..20: mol_type = other DNA
tgggaagcacggagaagctc

SEQ ID NO: 120316 - DNA, 20 bp, synthetic construct
  source 1..20: mol_type = other DNA
ctgggaagcacggagaagct

SEQ ID NO: 120317 - DNA, 20 bp, synthetic construct
  source 1..20: mol_type = other DNA
cctgggaagcacggagaagc

SEQ ID NO: 120318 - DNA, 20 bp, synthetic construct
  source 1..20: mol_type = other DNA
gcctgggaagcacggagaag

SEQ ID NO: 120319 - DNA, 20 bp, synthetic construct
  source 1..20: mol_type = other DNA
agcctgggaagcacggagaa

SEQ ID NO: 120320 - DNA, 20 bp, synthetic construct
  source 1..20: mol_type = other DNA
cagcctgggaagcacggaga

SEQ ID NO: 120321 - DNA, 20 bp, synthetic construct
  source 1..20: mol_type = other DNA
ccagcctgggaagcacggag

SEQ ID NO: 120322 - DNA, 20 bp, synthetic construct
  source 1..20: mol_type = other DNA
accagcctgggaagcacgga

SEQ ID NO: 120323 - DNA, 20 bp, synthetic construct
  source 1..20: mol_type = other DNA
gaccagcctgggaagcacgg

SEQ ID NO: 120324 - DNA, 20 bp, synthetic construct
  source 1..20: mol_type = other DNA
agaccagcctgggaagcacg

SEQ ID NO: 120325 - DNA, 20 bp, synthetic construct
  source 1..20: mol_type = other DNA
gagaccagcctgggaagcac

SEQ ID NO: 120326 - DNA, 20 bp, synthetic construct
  source 1..20: mol_type = other DNA
cgagaccagcctgggaagca

SEQ ID NO: 120327 - DNA, 20 bp, synthetic construct
  source 1..20: mol_type = other DNA
tcgagaccagcctgggaagc

SEQ ID NO: 120328 - DNA, 20 bp, synthetic construct
  source 1..20: mol_type = other DNA
ttcgagaccagcctgggaag

SEQ ID NO: 120329 - DNA, 20 bp, synthetic construct
  source 1..20: mol_type = other DNA
attcgagaccagcctgggaa

SEQ ID NO: 120330 - DNA, 20 bp, synthetic construct
  source 1..20: mol_type = other DNA
aattcgagaccagcctggga

SEQ ID NO: 120331 - DNA, 20 bp, synthetic construct
  source 1..20: mol_type = other DNA
gaattcgagaccagcctggg

SEQ ID NO: 120332 - DNA, 20 bp, synthetic construct
  source 1..20: mol_type = other DNA
ggaattcgagaccagcctgg

SEQ ID NO: 120333 - DNA, 20 bp, synthetic construct
  source 1..20: mol_type = other DNA
aggaattcgagaccagcctg

SEQ ID NO: 120334 - DNA, 20 bp, synthetic construct
  source 1..20: mol_type = other DNA
caggaattcgagaccagcct

SEQ ID NO: 120335 - DNA, 20 bp, synthetic construct
  source 1..20: mol_type = other DNA
tcaggaattcgagaccagcc

SEQ ID NO: 120336 - DNA, 20 bp, synthetic construct
  source 1..20: mol_type = other DNA
ctcaggaattcgagaccagc

SEQ ID NO: 120337 - DNA, 20 bp, synthetic construct
  source 1..20: mol_type = other DNA
gctcaggaattcgagaccag

SEQ ID NO: 120338 - DNA, 20 bp, synthetic construct
  source 1..20: mol_type = other DNA
agctcaggaattcgagacca

SEQ ID NO: 120339 - DNA, 20 bp, synthetic construct
  source 1..20: mol_type = other DNA
gagctcaggaattcgagacc

SEQ ID NO: 120340 - DNA, 20 bp, synthetic construct
  source 1..20: mol_type = other DNA
tgagctcaggaattcgagac

SEQ ID NO: 120341 - DNA, 20 bp, synthetic construct
  source 1..20: mol_type = other DNA
ttgagctcaggaattcgaga

SEQ ID NO: 120342 - DNA, 20 bp, synthetic construct
  source 1..20: mol_type = other DNA
cttgagctcaggaattcgag

SEQ ID NO: 120343 - DNA, 20 bp, synthetic construct
  source 1..20: mol_type = other DNA
gcttgagctcaggaattcga

SEQ ID NO: 120344 - DNA, 20 bp, synthetic construct
  source 1..20: mol_type = other DNA
cgcttgagctcaggaattcg

SEQ ID NO: 120345 - DNA, 20 bp, synthetic construct
  source 1..20: mol_type = other DNA
tcgcttgagctcaggaattc

SEQ ID NO: 120346 - DNA, 20 bp, synthetic construct
  source 1..20: mol_type = other DNA
atcgcttgagctcaggaatt

SEQ ID NO: 120347 - DNA, 20 bp, synthetic construct
  source 1..20: mol_type = other DNA
gatcgcttgagctcaggaat

SEQ ID NO: 120348 - DNA, 20 bp, synthetic construct
  source 1..20: mol_type = other DNA
ggatcgcttgagctcaggaa

SEQ ID NO: 120349 - DNA, 20 bp, synthetic construct
  source 1..20: mol_type = other DNA
gggatcgcttgagctcagga

SEQ ID NO: 120350 - DNA, 20 bp, synthetic construct
  source 1..20: mol_type = other DNA
ggggatcgcttgagctcagg

SEQ ID NO: 120351 - DNA, 20 bp, synthetic construct
  source 1..20: mol_type = other DNA
gggggatcgcttgagctcag

SEQ ID NO: 120352 - DNA, 20 bp, synthetic construct
  source 1..20: mol_type = other DNA
agggggatcgcttgagctca

SEQ ID NO: 120353 - DNA, 20 bp, synthetic construct
  source 1..20: mol_type = other DNA
cagggggatcgcttgagctc

SEQ ID NO: 120354 - DNA, 20 bp, synthetic construct
  source 1..20: mol_type = other DNA
gcagggggatcgcttgagct

SEQ ID NO: 120355 - DNA, 20 bp, synthetic construct
  source 1..20: mol_type = other DNA
cgcagggggatcgcttgagc

SEQ ID NO: 120356 - DNA, 20 bp, synthetic construct
  source 1..20: mol_type = other DNA
acgcagggggatcgcttgag

SEQ ID NO: 120357 - DNA, 20 bp, synthetic construct
  source 1..20: mol_type = other DNA
gacgcagggggatcgcttga

SEQ ID NO: 120358 - DNA, 20 bp, synthetic construct
  source 1..20: mol_type = other DNA
tgacgcagggggatcgcttg

SEQ ID NO: 120359 - DNA, 20 bp, synthetic construct
  source 1..20: mol_type = other DNA
ctgacgcagggggatcgctt

SEQ ID NO: 120360 - DNA, 20 bp, synthetic construct
  source 1..20: mol_type = other DNA
gctgacgcagggggatcgct

SEQ ID NO: 120361 - DNA, 20 bp, synthetic construct
  source 1..20: mol_type = other DNA
ggctgacgcagggggatcgc

SEQ ID NO: 120362 - DNA, 20 bp, synthetic construct
  source 1..20: mol_type = other DNA
aggctgacgcagggggatcg

SEQ ID NO: 120363 - DNA, 20 bp, synthetic construct
  source 1..20: mol_type = other DNA
gaggctgacgcagggggatc

SEQ ID NO: 120364 - DNA, 20 bp, synthetic construct
  source 1..20: mol_type = other DNA
ggaggctgacgcagggggat

SEQ ID NO: 120365 - DNA, 20 bp, synthetic construct
  source 1..20: mol_type = other DNA
tggaggctgacgcaggggga

SEQ ID NO: 120366 - DNA, 20 bp, synthetic construct
  source 1..20: mol_type = other DNA
ctggaggctgacgcaggggg

SEQ ID NO: 120367 - DNA, 20 bp, synthetic construct
  source 1..20: mol_type = other DNA
tctggaggctgacgcagggg

SEQ ID NO: 120368 - DNA, 20 bp, synthetic construct
  source 1..20: mol_type = other DNA
ctctggaggctgacgcaggg

SEQ ID NO: 120369 - DNA, 20 bp, synthetic construct
  source 1..20: mol_type = other DNA
actctggaggctgacgcagg

SEQ ID NO: 120370 - DNA, 20 bp, synthetic construct
  source 1..20: mol_type = other DNA
tactctggaggctgacgcag

SEQ ID NO: 120371 - DNA, 20 bp, synthetic construct
  source 1..20: mol_type = other DNA
ctactctggaggctgacgca

SEQ ID NO: 120372 - DNA, 20 bp, synthetic construct
  source 1..20: mol_type = other DNA
gctactctggaggctgacgc

SEQ ID NO: 120373 - DNA, 20 bp, synthetic construct
  source 1..20: mol_type = other DNA
agctactctggaggctgacg

SEQ ID NO: 120374 - DNA, 20 bp, synthetic construct
  source 1..20: mol_type = other DNA
cagctactctggaggctgac

SEQ ID NO: 120375 - DNA, 20 bp, synthetic construct
  source 1..20: mol_type = other DNA
ccagctactctggaggctga

SEQ ID NO: 120376 - DNA, 20 bp, synthetic construct
  source 1..20: mol_type = other DNA
cccagctactctggaggctg

SEQ ID NO: 120377 - DNA, 20 bp, synthetic construct
  source 1..20: mol_type = other DNA
ccccagctactctggaggct

SEQ ID NO: 120378 - DNA, 20 bp, synthetic construct
  source 1..20: mol_type = other DNA
accccagctactctggaggc

SEQ ID NO: 120379 - DNA, 20 bp, synthetic construct
  source 1..20: mol_type = other DNA
aaccccagctactctggagg

SEQ ID NO: 120380 - DNA, 20 bp, synthetic construct
  source 1..20: mol_type = other DNA
taaccccagctactctggag

SEQ ID NO: 120381 - DNA, 20 bp, synthetic construct
  source 1..20: mol_type = other DNA
ataaccccagctactctgga

SEQ ID NO: 120382 - DNA, 20 bp, synthetic construct
  source 1..20: mol_type = other DNA
tataaccccagctactctgg

SEQ ID NO: 120383 - DNA, 20 bp, synthetic construct
  source 1..20: mol_type = other DNA
ctataaccccagctactctg

SEQ ID NO: 120384 - DNA, 20 bp, synthetic construct
  source 1..20: mol_type = other DNA
cctataaccccagctactct

SEQ ID NO: 120385 - DNA, 20 bp, synthetic construct
  source 1..20: mol_type = other DNA
gcctataaccccagctactc

SEQ ID NO: 120386 - DNA, 20 bp, synthetic construct
  source 1..20: mol_type = other DNA
cgcctataaccccagctact

SEQ ID NO: 120387 - DNA, 20 bp, synthetic construct
  source 1..20: mol_type = other DNA
acgcctataaccccagctac

SEQ ID NO: 120388 - DNA, 20 bp, synthetic construct
  source 1..20: mol_type = other DNA
cacgcctataaccccagcta

SEQ ID NO: 120389 - DNA, 20 bp, synthetic construct
  source 1..20: mol_type = other DNA
gcacgcctataaccccagct

SEQ ID NO: 120390 - DNA, 20 bp, synthetic construct
  source 1..20: mol_type = other DNA
tgcacgcctataaccccagc

SEQ ID NO: 120391 - DNA, 20 bp, synthetic construct
  source 1..20: mol_type = other DNA
gtgcacgcctataaccccag

SEQ ID NO: 120392 - DNA, 20 bp, synthetic construct
  source 1..20: mol_type = other DNA
ggtgcacgcctataacccca

SEQ ID NO: 120393 - DNA, 20 bp, synthetic construct
  source 1..20: mol_type = other DNA
tggtgcacgcctataacccc

SEQ ID NO: 120394 - DNA, 20 bp, synthetic construct
  source 1..20: mol_type = other DNA
gtggtgcacgcctataaccc

SEQ ID NO: 120395 - DNA, 20 bp, synthetic construct
  source 1..20: mol_type = other DNA
ggtggtgcacgcctataacc

SEQ ID NO: 120396 - DNA, 20 bp, synthetic construct
  source 1..20: mol_type = other DNA
cggtggtgcacgcctataac

SEQ ID NO: 120397 - DNA, 20 bp, synthetic construct
  source 1..20: mol_type = other DNA
gcggtggtgcacgcctataa

SEQ ID NO: 120398 - DNA, 20 bp, synthetic construct
  source 1..20: mol_type = other DNA
cgcggtggtgcacgcctata

SEQ ID NO: 120399 - DNA, 20 bp, synthetic construct
  source 1..20: mol_type = other DNA
gcgcggtggtgcacgcctat

SEQ ID NO: 120400 - DNA, 20 bp, synthetic construct
  source 1..20: mol_type = other DNA
agcgcggtggtgcacgccta

SEQ ID NO: 120401 - DNA, 20 bp, synthetic construct
  source 1..20: mol_type = other DNA
gagcgcggtggtgcacgcct

SEQ ID NO: 120402 - DNA, 20 bp, synthetic construct
  source 1..20: mol_type = other DNA
cgagcgcggtggtgcacgcc

SEQ ID NO: 120403 - DNA, 20 bp, synthetic construct
  source 1..20: mol_type = other DNA
ccgagcgcggtggtgcacgc

SEQ ID NO: 120404 - DNA, 20 bp, synthetic construct
  source 1..20: mol_type = other DNA
gccgagcgcggtggtgcacg

SEQ ID NO: 120405 - DNA, 20 bp, synthetic construct
  source 1..20: mol_type = other DNA
ggccgagcgcggtggtgcac

SEQ ID NO: 120406 - DNA, 20 bp, synthetic construct
  source 1..20: mol_type = other DNA
gggccgagcgcggtggtgca

SEQ ID NO: 120407 - DNA, 20 bp, synthetic construct
  source 1..20: mol_type = other DNA
tgggccgagcgcggtggtgc

SEQ ID NO: 120408 - DNA, 20 bp, synthetic construct
  source 1..20: mol_type = other DNA
atgggccgagcgcggtggtg

SEQ ID NO: 120409 - DNA, 20 bp, synthetic construct
  source 1..20: mol_type = other DNA
aatgggccgagcgcggtggt

SEQ ID NO: 120410 - DNA, 20 bp, synthetic construct
  source 1..20: mol_type = other DNA
aaatgggccgagcgcggtgg

SEQ ID NO: 120411 - DNA, 20 bp, synthetic construct
  source 1..20: mol_type = other DNA
aaaatgggccgagcgcggtg

SEQ ID NO: 120412 - DNA, 20 bp, synthetic construct
  source 1..20: mol_type = other DNA
aaaaatgggccgagcgcggt

SEQ ID NO: 120413 - DNA, 20 bp, synthetic construct
  source 1..20: mol_type = other DNA
caaaaatgggccgagcgcgg

SEQ ID NO: 120414 - DNA, 20 bp, synthetic construct
  source 1..20: mol_type = other DNA
acaaaaatgggccgagcgcg

SEQ ID NO: 120415 - DNA, 20 bp, synthetic construct
  source 1..20: mol_type = other DNA
tacaaaaatgggccgagcgc

SEQ ID NO: 120416 - DNA, 20 bp, synthetic construct
  source 1..20: mol_type = other DNA
atacaaaaatgggccgagcg

SEQ ID NO: 120417 - DNA, 20 bp, synthetic construct
  source 1..20: mol_type = other DNA
aatacaaaaatgggccgagc

SEQ ID NO: 120418 - DNA, 20 bp, synthetic construct
  source 1..20: mol_type = other DNA
aaatacaaaaatgggccgag

SEQ ID NO: 120419 - DNA, 20 bp, synthetic construct
  source 1..20: mol_type = other DNA
aaaatacaaaaatgggccga

SEQ ID NO: 120420 - DNA, 20 bp, synthetic construct
  source 1..20: mol_type = other DNA
aaaaatacaaaaatgggccg

SEQ ID NO: 120421 - DNA, 20 bp, synthetic construct
  source 1..20: mol_type = other DNA
taaaaatacaaaaatgggcc

SEQ ID NO: 120422 - DNA, 20 bp, synthetic construct
  source 1..20: mol_type = other DNA
ctaaaaatacaaaaatgggc

SEQ ID NO: 120423 - DNA, 20 bp, synthetic construct
  source 1..20: mol_type = other DNA
actaaaaatacaaaaatggg

SEQ ID NO: 120424 - DNA, 20 bp, synthetic construct
  source 1..20: mol_type = other DNA
tactaaaaatacaaaaatgg

SEQ ID NO: 120425 - DNA, 20 bp, synthetic construct
  source 1..20: mol_type = other DNA
ctactaaaaatacaaaaatg

SEQ ID NO: 120426 - DNA, 20 bp, synthetic construct
  source 1..20: mol_type = other DNA
tctactaaaaatacaaaaat

SEQ ID NO: 120427 - DNA, 20 bp, synthetic construct
  source 1..20: mol_type = other DNA
ctctactaaaaatacaaaaa

SEQ ID NO: 120428 - DNA, 20 bp, synthetic construct
  source 1..20: mol_type = other DNA
tctctactaaaaatacaaaa

SEQ ID NO: 120429 - DNA, 20 bp, synthetic construct
  source 1..20: mol_type = other DNA
atctctactaaaaatacaaa

SEQ ID NO: 120430 - DNA, 20 bp, synthetic construct
  source 1..20: mol_type = other DNA
catctctactaaaaatacaa

SEQ ID NO: 120431 - DNA, 20 bp, synthetic construct
  source 1..20: mol_type = other DNA
ccatctctactaaaaataca

SEQ ID NO: 120432 - DNA, 20 bp, synthetic construct
  source 1..20: mol_type = other DNA
tccatctctactaaaaatac

SEQ ID NO: 120433 - DNA, 20 bp, synthetic construct
  source 1..20: mol_type = other DNA
ttccatctctactaaaaata

SEQ ID NO: 120434 - DNA, 20 bp, synthetic construct
  source 1..20: mol_type = other DNA
attccatctctactaaaaat

SEQ ID NO: 120435 - DNA, 20 bp, synthetic construct
  source 1..20: mol_type = other DNA
aattccatctctactaaaaa

SEQ ID NO: 120436 - DNA, 20 bp, synthetic construct
  source 1..20: mol_type = other DNA
aaattccatctctactaaaa

SEQ ID NO: 120437 - DNA, 20 bp, synthetic construct
  source 1..20: mol_type = other DNA
gaaattccatctctactaaa

SEQ ID NO: 120438 - DNA, 20 bp, synthetic construct
  source 1..20: mol_type = other DNA
tgaaattccatctctactaa

SEQ ID NO: 120439 - DNA, 20 bp, synthetic construct
  source 1..20: mol_type = other DNA
gtgaaattccatctctacta

SEQ ID NO: 120440 - DNA, 20 bp, synthetic construct
  source 1..20: mol_type = other DNA
ggtgaaattccatctctact

SEQ ID NO: 120441 - DNA, 20 bp, synthetic construct
  source 1..20: mol_type = other DNA
tggtgaaattccatctctac

SEQ ID NO: 120442 - DNA, 20 bp, synthetic construct
  source 1..20: mol_type = other DNA
atggtgaaattccatctcta

SEQ ID NO: 120443 - DNA, 20 bp, synthetic construct
  source 1..20: mol_type = other DNA
catggtgaaattccatctct

SEQ ID NO: 120444 - DNA, 20 bp, synthetic construct
  source 1..20: mol_type = other DNA
acatggtgaaattccatctc

SEQ ID NO: 120445 - DNA, 20 bp, synthetic construct
  source 1..20: mol_type = other DNA
aacatggtgaaattccatct

SEQ ID NO: 120446 - DNA, 20 bp, synthetic construct
  source 1..20: mol_type = other DNA
caacatggtgaaattccatc

SEQ ID NO: 120447 - DNA, 20 bp, synthetic construct
  source 1..20: mol_type = other DNA
ccaacatggtgaaattccat

SEQ ID NO: 120448 - DNA, 20 bp, synthetic construct
  source 1..20: mol_type = other DNA
gccaacatggtgaaattcca

SEQ ID NO: 120449 - DNA, 20 bp, synthetic construct
  source 1..20: mol_type = other DNA
ggccaacatggtgaaattcc

SEQ ID NO: 120450 - DNA, 20 bp, synthetic construct
  source 1..20: mol_type = other DNA
tggccaacatggtgaaattc

SEQ ID NO: 120451 - DNA, 20 bp, synthetic construct
  source 1..20: mol_type = other DNA
ctggccaacatggtgaaatt

SEQ ID NO: 120452 - DNA, 20 bp, synthetic construct
  source 1..20: mol_type = other DNA
cctggccaacatggtgaaat

SEQ ID NO: 120453 - DNA, 20 bp, synthetic construct
  source 1..20: mol_type = other DNA
gcctggccaacatggtgaaa

SEQ ID NO: 120454 - DNA, 20 bp, synthetic construct
  source 1..20: mol_type = other DNA
agcctggccaacatggtgaa

SEQ ID NO: 120455 - DNA, 20 bp, synthetic construct
  source 1..20: mol_type = other DNA
cagcctggccaacatggtga

SEQ ID NO: 120456 - DNA, 20 bp, synthetic construct
  source 1..20: mol_type = other DNA
ccagcctggccaacatggtg

SEQ ID NO: 120457 - DNA, 20 bp, synthetic construct
  source 1..20: mol_type = other DNA
accagcctggccaacatggt

SEQ ID NO: 120458 - DNA, 20 bp, synthetic construct
  source 1..20: mol_type = other DNA
gaccagcctggccaacatgg

SEQ ID NO: 120459 - DNA, 20 bp, synthetic construct
  source 1..20: mol_type = other DNA
agaccagcctggccaacatg

SEQ ID NO: 120460 - DNA, 20 bp, synthetic construct
  source 1..20: mol_type = other DNA
aagaccagcctggccaacat

SEQ ID NO: 120461 - DNA, 20 bp, synthetic construct
  source 1..20: mol_type = other DNA
caagaccagcctggccaaca

SEQ ID NO: 120462 - DNA, 20 bp, synthetic construct
  source 1..20: mol_type = other DNA
tcaagaccagcctggccaac

SEQ ID NO: 120463 - DNA, 20 bp, synthetic construct
  source 1..20: mol_type = other DNA
ttcaagaccagcctggccaa

SEQ ID NO: 120464 - DNA, 20 bp, synthetic construct
  source 1..20: mol_type = other DNA
gttcaagaccagcctggcca

SEQ ID NO: 120465 - DNA, 20 bp, synthetic construct
  source 1..20: mol_type = other DNA
agttcaagaccagcctggcc

SEQ ID NO: 120466 - DNA, 20 bp, synthetic construct
  source 1..20: mol_type = other DNA
gagttcaagaccagcctggc

SEQ ID NO: 120467 - DNA, 20 bp, synthetic construct
  source 1..20: mol_type = other DNA
ggagttcaagaccagcctgg

SEQ ID NO: 120468 - DNA, 20 bp, synthetic construct
  source 1..20: mol_type = other DNA
aggagttcaagaccagcctg

SEQ ID NO: 120469 - DNA, 20 bp, synthetic construct
  source 1..20: mol_type = other DNA
caggagttcaagaccagcct

SEQ ID NO: 120470 - DNA, 20 bp, synthetic construct
  source 1..20: mol_type = other DNA
tcaggagttcaagaccagcc

SEQ ID NO: 120471 - DNA, 20 bp, synthetic construct
  source 1..20: mol_type = other DNA
gtcaggagttcaagaccagc

SEQ ID NO: 120472 - DNA, 20 bp, synthetic construct
  source 1..20: mol_type = other DNA
ggtcaggagttcaagaccag

SEQ ID NO: 120473 - DNA, 20 bp, synthetic construct
  source 1..20: mol_type = other DNA
aggtcaggagttcaagacca

SEQ ID NO: 120474 - DNA, 20 bp, synthetic construct
  source 1..20: mol_type = other DNA
gaggtcaggagttcaagacc

SEQ ID NO: 120475 - DNA, 20 bp, synthetic construct
  source 1..20: mol_type = other DNA
tgaggtcaggagttcaagac

SEQ ID NO: 120476 - DNA, 20 bp, synthetic construct
  source 1..20: mol_type = other DNA
ttgaggtcaggagttcaaga

SEQ ID NO: 120477 - DNA, 20 bp, synthetic construct
  source 1..20: mol_type = other DNA
tttgaggtcaggagttcaag

SEQ ID NO: 120478 - DNA, 20 bp, synthetic construct
  source 1..20: mol_type = other DNA
atttgaggtcaggagttcaa

SEQ ID NO: 120479 - DNA, 20 bp, synthetic construct
  source 1..20: mol_type = other DNA
catttgaggtcaggagttca

SEQ ID NO: 120480 - DNA, 20 bp, synthetic construct
  source 1..20: mol_type = other DNA
tcatttgaggtcaggagttc

SEQ ID NO: 120481 - DNA, 20 bp, synthetic construct
  source 1..20: mol_type = other DNA
atcatttgaggtcaggagtt

SEQ ID NO: 120482 - DNA, 20 bp, synthetic construct
  source 1..20: mol_type = other DNA
gatcatttgaggtcaggagt

SEQ ID NO: 120483 - DNA, 20 bp, synthetic construct
  source 1..20: mol_type = other DNA
ggatcatttgaggtcaggag

SEQ ID NO: 120484 - DNA, 20 bp, synthetic construct
  source 1..20: mol_type = other DNA
cggatcatttgaggtcagga

SEQ ID NO: 120485 - DNA, 20 bp, synthetic construct
  source 1..20: mol_type = other DNA
gcggatcatttgaggtcagg

SEQ ID NO: 120486 - DNA, 20 bp, synthetic construct
  source 1..20: mol_type = other DNA
ggcggatcatttgaggtcag

SEQ ID NO: 120487 - DNA, 20 bp, synthetic construct
  source 1..20: mol_type = other DNA
aggcggatcatttgaggtca

SEQ ID NO: 120488 - DNA, 20 bp, synthetic construct
  source 1..20: mol_type = other DNA
caggcggatcatttgaggtc

SEQ ID NO: 120489 - DNA, 20 bp, synthetic construct
  source 1..20: mol_type = other DNA
gcaggcggatcatttgaggt

SEQ ID NO: 120490 - DNA, 20 bp, synthetic construct
  source 1..20: mol_type = other DNA
ggcaggcggatcatttgagg

SEQ ID NO: 120491 - DNA, 20 bp, synthetic construct
  source 1..20: mol_type = other DNA
aggcaggcggatcatttgag

SEQ ID NO: 120492 - DNA, 20 bp, synthetic construct
  source 1..20: mol_type = other DNA
gaggcaggcggatcatttga

SEQ ID NO: 120493 - DNA, 20 bp, synthetic construct
  source 1..20: mol_type = other DNA
tgaggcaggcggatcatttg

SEQ ID NO: 120494 - DNA, 20 bp, synthetic construct
  source 1..20: mol_type = other DNA
gtgaggcaggcggatcattt

SEQ ID NO: 120495 - DNA, 20 bp, synthetic construct
  source 1..20: mol_type = other DNA
ggtgaggcaggcggatcatt

SEQ ID NO: 120496 - DNA, 20 bp, synthetic construct
  source 1..20: mol_type = other DNA
aggtgaggcaggcggatcat

SEQ ID NO: 120497 - DNA, 20 bp, synthetic construct
  source 1..20: mol_type = other DNA
aaggtgaggcaggcggatca

SEQ ID NO: 120498 - DNA, 20 bp, synthetic construct
  source 1..20: mol_type = other DNA
gaaggtgaggcaggcggatc

SEQ ID NO: 120499 - DNA, 20 bp, synthetic construct
  source 1..20: mol_type = other DNA
ggaaggtgaggcaggcggat

SEQ ID NO: 120500 - DNA, 20 bp, synthetic construct
  source 1..20: mol_type = other DNA
gggaaggtgaggcaggcgga

SEQ ID NO: 120501 - DNA, 20 bp, synthetic construct
  source 1..20: mol_type = other DNA
tgggaaggtgaggcaggcgg

SEQ ID NO: 120502 - DNA, 20 bp, synthetic construct
  source 1..20: mol_type = other DNA
ttgggaaggtgaggcaggcg

SEQ ID NO: 120503 - DNA, 20 bp, synthetic construct
  source 1..20: mol_type = other DNA
tttgggaaggtgaggcaggc

SEQ ID NO: 120504 - DNA, 20 bp, synthetic construct
  source 1..20: mol_type = other DNA
ctttgggaaggtgaggcagg

SEQ ID NO: 120505 - DNA, 20 bp, synthetic construct
  source 1..20: mol_type = other DNA
actttgggaaggtgaggcag

SEQ ID NO: 120506 - DNA, 20 bp, synthetic construct
  source 1..20: mol_type = other DNA
cactttgggaaggtgaggca

SEQ ID NO: 120507 - DNA, 20 bp, synthetic construct
  source 1..20: mol_type = other DNA
gcactttgggaaggtgaggc

SEQ ID NO: 120508 - DNA, 20 bp, synthetic construct
  source 1..20: mol_type = other DNA
agcactttgggaaggtgagg

SEQ ID NO: 120509 - DNA, 20 bp, synthetic construct
  source 1..20: mol_type = other DNA
cagcactttgggaaggtgag

SEQ ID NO: 120510 - DNA, 20 bp, synthetic construct
  source 1..20: mol_type = other DNA
tcagcactttgggaaggtga

SEQ ID NO: 120511 - DNA, 20 bp, synthetic construct
  source 1..20: mol_type = other DNA
ctcagcactttgggaaggtg

SEQ ID NO: 120512 - DNA, 20 bp, synthetic construct
  source 1..20: mol_type = other DNA
tctcagcactttgggaaggt

SEQ ID NO: 120513 - DNA, 20 bp, synthetic construct
  source 1..20: mol_type = other DNA
atctcagcactttgggaagg

SEQ ID NO: 120514 - DNA, 20 bp, synthetic construct
  source 1..20: mol_type = other DNA
aatctcagcactttgggaag

SEQ ID NO: 120515 - DNA, 20 bp, synthetic construct
  source 1..20: mol_type = other DNA
aaatctcagcactttgggaa

SEQ ID NO: 120516 - DNA, 20 bp, synthetic construct
  source 1..20: mol_type = other DNA
aaaatctcagcactttggga

SEQ ID NO: 120517 - DNA, 20 bp, synthetic construct
  source 1..20: mol_type = other DNA
taaaatctcagcactttggg

SEQ ID NO: 120518 - DNA, 20 bp, synthetic construct
  source 1..20: mol_type = other DNA
ctaaaatctcagcactttgg

SEQ ID NO: 120519 - DNA, 20 bp, synthetic construct
  source 1..20: mol_type = other DNA
tctaaaatctcagcactttg

SEQ ID NO: 120520 - DNA, 20 bp, synthetic construct
  source 1..20: mol_type = other DNA
gtctaaaatctcagcacttt

SEQ ID NO: 120521 - DNA, 20 bp, synthetic construct
  source 1..20: mol_type = other DNA
cgtctaaaatctcagcactt

SEQ ID NO: 120522 - DNA, 20 bp, synthetic construct
  source 1..20: mol_type = other DNA
gcgtctaaaatctcagcact

SEQ ID NO: 120523 - DNA, 20 bp, synthetic construct
  source 1..20: mol_type = other DNA
cgcgtctaaaatctcagcac

SEQ ID NO: 120524 - DNA, 20 bp, synthetic construct
  source 1..20: mol_type = other DNA
tcgcgtctaaaatctcagca

SEQ ID NO: 120525 - DNA, 20 bp, synthetic construct
  source 1..20: mol_type = other DNA
ttcgcgtctaaaatctcagc

SEQ ID NO: 120526 - DNA, 20 bp, synthetic construct
  source 1..20: mol_type = other DNA
gttcgcgtctaaaatctcag

SEQ ID NO: 120527 - DNA, 20 bp, synthetic construct
  source 1..20: mol_type = other DNA
ggttcgcgtctaaaatctca

SEQ ID NO: 120528 - DNA, 20 bp, synthetic construct
  source 1..20: mol_type = other DNA
tggttcgcgtctaaaatctc

SEQ ID NO: 120529 - DNA, 20 bp, synthetic construct
  source 1..20: mol_type = other DNA
gtggttcgcgtctaaaatct

SEQ ID NO: 120530 - DNA, 20 bp, synthetic construct
  source 1..20: mol_type = other DNA
ggtggttcgcgtctaaaatc

SEQ ID NO: 120531 - DNA, 20 bp, synthetic construct
  source 1..20: mol_type = other DNA
tggtggttcgcgtctaaaat

SEQ ID NO: 120532 - DNA, 20 bp, synthetic construct
  source 1..20: mol_type = other DNA
atggtggttcgcgtctaaaa

SEQ ID NO: 120533 - DNA, 20 bp, synthetic construct
  source 1..20: mol_type = other DNA
catggtggttcgcgtctaaa

SEQ ID NO: 120534 - DNA, 20 bp, synthetic construct
  source 1..20: mol_type = other DNA
gcatggtggttcgcgtctaa

SEQ ID NO: 120535 - DNA, 20 bp, synthetic construct
  source 1..20: mol_type = other DNA
ggcatggtggttcgcgtcta

SEQ ID NO: 120536 - DNA, 20 bp, synthetic construct
  source 1..20: mol_type = other DNA
gggcatggtggttcgcgtct

SEQ ID NO: 120537 - DNA, 20 bp, synthetic construct
  source 1..20: mol_type = other DNA
agggcatggtggttcgcgtc

SEQ ID NO: 120538 - DNA, 20 bp, synthetic construct
  source 1..20: mol_type = other DNA
cagggcatggtggttcgcgt

SEQ ID NO: 120539 - DNA, 20 bp, synthetic construct
  source 1..20: mol_type = other DNA
tcagggcatggtggttcgcg

SEQ ID NO: 120540 - DNA, 20 bp, synthetic construct
  source 1..20: mol_type = other DNA
gtcagggcatggtggttcgc

SEQ ID NO: 120541 - DNA, 20 bp, synthetic construct
  source 1..20: mol_type = other DNA
agtcagggcatggtggttcg

SEQ ID NO: 120542 - DNA, 20 bp, synthetic construct
  source 1..20: mol_type = other DNA
tagtcagggcatggtggttc

SEQ ID NO: 120543 - DNA, 20 bp, synthetic construct
  source 1..20: mol_type = other DNA
atagtcagggcatggtggtt

SEQ ID NO: 120544 - DNA, 20 bp, synthetic construct
  source 1..20: mol_type = other DNA
tatagtcagggcatggtggt

SEQ ID NO: 120545 - DNA, 20 bp, synthetic construct
  source 1..20: mol_type = other DNA
ctatagtcagggcatggtgg

SEQ ID NO: 120546 - DNA, 20 bp, synthetic construct
  source 1..20: mol_type = other DNA
cctatagtcagggcatggtg

SEQ ID NO: 120547 - DNA, 20 bp, synthetic construct
  source 1..20: mol_type = other DNA
acctatagtcagggcatggt

SEQ ID NO: 120548 - DNA, 20 bp, synthetic construct
  source 1..20: mol_type = other DNA
aacctatagtcagggcatgg

SEQ ID NO: 120549 - DNA, 20 bp, synthetic construct
  source 1..20: mol_type = other DNA
taacctatagtcagggcatg

SEQ ID NO: 120550 - DNA, 20 bp, synthetic construct
  source 1..20: mol_type = other DNA
ataacctatagtcagggcat

SEQ ID NO: 120551 - DNA, 20 bp, synthetic construct
  source 1..20: mol_type = other DNA
gataacctatagtcagggca

SEQ ID NO: 120552 - DNA, 20 bp, synthetic construct
  source 1..20: mol_type = other DNA
agataacctatagtcagggc

SEQ ID NO: 120553 - DNA, 20 bp, synthetic construct
  source 1..20: mol_type = other DNA
aagataacctatagtcaggg

SEQ ID NO: 120554 - DNA, 20 bp, synthetic construct
  source 1..20: mol_type = other DNA
aaagataacctatagtcagg

SEQ ID NO: 120555 - DNA, 20 bp, synthetic construct
  source 1..20: mol_type = other DNA
aaaagataacctatagtcag

SEQ ID NO: 120556 - DNA, 20 bp, synthetic construct
  source 1..20: mol_type = other DNA
aaaaagataacctatagtca

SEQ ID NO: 120557 - DNA, 20 bp, synthetic construct
  source 1..20: mol_type = other DNA
taaaaagataacctatagtc

SEQ ID NO: 120558 - DNA, 20 bp, synthetic construct
  source 1..20: mol_type = other DNA
gtaaaaagataacctatagt

SEQ ID NO: 120559 - DNA, 20 bp, synthetic construct
  source 1..20: mol_type = other DNA
agtaaaaagataacctatag

SEQ ID NO: 120560 - DNA, 20 bp, synthetic construct
  source 1..20: mol_type = other DNA
aagtaaaaagataacctata

SEQ ID NO: 120561 - DNA, 20 bp, synthetic construct
  source 1..20: mol_type = other DNA
caagtaaaaagataacctat

SEQ ID NO: 120562 - DNA, 20 bp, synthetic construct
  source 1..20: mol_type = other DNA
gcaagtaaaaagataaccta

SEQ ID NO: 120563 - DNA, 20 bp, synthetic construct
  source 1..20: mol_type = other DNA
agcaagtaaaaagataacct

SEQ ID NO: 120564 - DNA, 20 bp, synthetic construct
  source 1..20: mol_type = other DNA
aagcaagtaaaaagataacc

SEQ ID NO: 120565 - DNA, 20 bp, synthetic construct
  source 1..20: mol_type = other DNA
caagcaagtaaaaagataac

SEQ ID NO: 120566 - DNA, 20 bp, synthetic construct
  source 1..20: mol_type = other DNA
tcaagcaagtaaaaagataa

SEQ ID NO: 120567 - DNA, 20 bp, synthetic construct
  source 1..20: mol_type = other DNA
atcaagcaagtaaaaagata

SEQ ID NO: 120568 - DNA, 20 bp, synthetic construct
  source 1..20: mol_type = other DNA
catcaagcaagtaaaaagat

SEQ ID NO: 120569 - DNA, 20 bp, synthetic construct
  source 1..20: mol_type = other DNA
ccatcaagcaagtaaaaaga

SEQ ID NO: 120570 - DNA, 20 bp, synthetic construct
  source 1..20: mol_type = other DNA
accatcaagcaagtaaaaag

SEQ ID NO: 120571 - DNA, 20 bp, synthetic construct
  source 1..20: mol_type = other DNA
caccatcaagcaagtaaaaa

SEQ ID NO: 120572 - DNA, 20 bp, synthetic construct
  source 1..20: mol_type = other DNA
acaccatcaagcaagtaaaa

SEQ ID NO: 120573 - DNA, 20 bp, synthetic construct
  source 1..20: mol_type = other DNA
aacaccatcaagcaagtaaa

SEQ ID NO: 120574 - DNA, 20 bp, synthetic construct
  source 1..20: mol_type = other DNA
gaacaccatcaagcaagtaa

SEQ ID NO: 120575 - DNA, 20 bp, synthetic construct
  source 1..20: mol_type = other DNA
agaacaccatcaagcaagta

SEQ ID NO: 120576 - DNA, 20 bp, synthetic construct
  source 1..20: mol_type = other DNA
aagaacaccatcaagcaagt

SEQ ID NO: 120577 - DNA, 20 bp, synthetic construct
  source 1..20: mol_type = other DNA
aaagaacaccatcaagcaag

SEQ ID NO: 120578 - DNA, 20 bp, synthetic construct
  source 1..20: mol_type = other DNA
caaagaacaccatcaagcaa

SEQ ID NO: 120579 - DNA, 20 bp, synthetic construct
  source 1..20: mol_type = other DNA
acaaagaacaccatcaagca

SEQ ID NO: 120580 - DNA, 20 bp, synthetic construct
  source 1..20: mol_type = other DNA
tacaaagaacaccatcaagc

SEQ ID NO: 120581 - DNA, 20 bp, synthetic construct
  source 1..20: mol_type = other DNA
ttacaaagaacaccatcaag

SEQ ID NO: 120582 - DNA, 20 bp, synthetic construct
  source 1..20: mol_type = other DNA
gttacaaagaacaccatcaa

SEQ ID NO: 120583 - DNA, 20 bp, synthetic construct
  source 1..20: mol_type = other DNA
tgttacaaagaacaccatca

SEQ ID NO: 120584 - DNA, 20 bp, synthetic construct
  source 1..20: mol_type = other DNA
gtgttacaaagaacaccatc

SEQ ID NO: 120585 - DNA, 20 bp, synthetic construct
  source 1..20: mol_type = other DNA
tgtgttacaaagaacaccat

SEQ ID NO: 120586 - DNA, 20 bp, synthetic construct
  source 1..20: mol_type = other DNA
ctgtgttacaaagaacacca

SEQ ID NO: 120587 - DNA, 20 bp, synthetic construct
  source 1..20: mol_type = other DNA
actgtgttacaaagaacacc

SEQ ID NO: 120588 - DNA, 20 bp, synthetic construct
  source 1..20: mol_type = other DNA
aactgtgttacaaagaacac

SEQ ID NO: 120589 - DNA, 20 bp, synthetic construct
  source 1..20: mol_type = other DNA
aaactgtgttacaaagaaca

SEQ ID NO: 120590 - DNA, 20 bp, synthetic construct
  source 1..20: mol_type = other DNA
aaaactgtgttacaaagaac

SEQ ID NO: 120591 - DNA, 20 bp, synthetic construct
  source 1..20: mol_type = other DNA
aaaaactgtgttacaaagaa

SEQ ID NO: 120592 - DNA, 20 bp, synthetic construct
  source 1..20: mol_type = other DNA
taaaaactgtgttacaaaga

SEQ ID NO: 120593 - DNA, 20 bp, synthetic construct
  source 1..20: mol_type = other DNA
ttaaaaactgtgttacaaag

SEQ ID NO: 120594 - DNA, 20 bp, synthetic construct
  source 1..20: mol_type = other DNA
attaaaaactgtgttacaaa

SEQ ID NO: 120595 - DNA, 20 bp, synthetic construct
  source 1..20: mol_type = other DNA
aattaaaaactgtgttacaa

SEQ ID NO: 120596 - DNA, 20 bp, synthetic construct
  source 1..20: mol_type = other DNA
aaattaaaaactgtgttaca

SEQ ID NO: 120597 - DNA, 20 bp, synthetic construct
  source 1..20: mol_type = other DNA
aaaattaaaaactgtgttac

SEQ ID NO: 120598 - DNA, 20 bp, synthetic construct
  source 1..20: mol_type = other DNA
caaaattaaaaactgtgtta

SEQ ID NO: 120599 - DNA, 20 bp, synthetic construct
  source 1..20: mol_type = other DNA
tcaaaattaaaaactgtgtt

SEQ ID NO: 120600 - DNA, 20 bp, synthetic construct
  source 1..20: mol_type = other DNA
atcaaaattaaaaactgtgt

SEQ ID NO: 120601 - DNA, 20 bp, synthetic construct
  source 1..20: mol_type = other DNA
catcaaaattaaaaactgtg

SEQ ID NO: 120602 - DNA, 20 bp, synthetic construct
  source 1..20: mol_type = other DNA
tcatcaaaattaaaaactgt

SEQ ID NO: 120603 - DNA, 20 bp, synthetic construct
  source 1..20: mol_type = other DNA
ttcatcaaaattaaaaactg

SEQ ID NO: 120604 - DNA, 20 bp, synthetic construct
  source 1..20: mol_type = other DNA
cttcatcaaaattaaaaact

SEQ ID NO: 120605 - DNA, 20 bp, synthetic construct
  source 1..20: mol_type = other DNA
acttcatcaaaattaaaaac

SEQ ID NO: 120606 - DNA, 20 bp, synthetic construct
  source 1..20: mol_type = other DNA
aacttcatcaaaattaaaaa

SEQ ID NO: 120607 - DNA, 20 bp, synthetic construct
  source 1..20: mol_type = other DNA
gaacttcatcaaaattaaaa

SEQ ID NO: 120608 - DNA, 20 bp, synthetic construct
  source 1..20: mol_type = other DNA
tgaacttcatcaaaattaaa

SEQ ID NO: 120609 - DNA, 20 bp, synthetic construct
  source 1..20: mol_type = other DNA
ttgaacttcatcaaaattaa

SEQ ID NO: 120610 - DNA, 20 bp, synthetic construct
  source 1..20: mol_type = other DNA
attgaacttcatcaaaatta

SEQ ID NO: 120611 - DNA, 20 bp, synthetic construct
  source 1..20: mol_type = other DNA
aattgaacttcatcaaaatt

SEQ ID NO: 120612 - DNA, 20 bp, synthetic construct
  source 1..20: mol_type = other DNA
aaattgaacttcatcaaaat

SEQ ID NO: 120613 - DNA, 20 bp, synthetic construct
  source 1..20: mol_type = other DNA
taaattgaacttcatcaaaa

SEQ ID NO: 120614 - DNA, 20 bp, synthetic construct
  source 1..20: mol_type = other DNA
ataaattgaacttcatcaaa

SEQ ID NO: 120615 - DNA, 20 bp, synthetic construct
  source 1..20: mol_type = other DNA
gataaattgaacttcatcaa

SEQ ID NO: 120616 - DNA, 20 bp, synthetic construct
  source 1..20: mol_type = other DNA
agataaattgaacttcatca

SEQ ID NO: 120617 - DNA, 20 bp, synthetic construct
  source 1..20: mol_type = other DNA
cagataaattgaacttcatc

SEQ ID NO: 120618 - DNA, 20 bp, synthetic construct
  source 1..20: mol_type = other DNA
acagataaattgaacttcat

SEQ ID NO: 120619 - DNA, 20 bp, synthetic construct
  source 1..20: mol_type = other DNA
aacagataaattgaacttca

SEQ ID NO: 120620 - DNA, 20 bp, synthetic construct
  source 1..20: mol_type = other DNA
aaacagataaattgaacttc

SEQ ID NO: 120621 - DNA, 20 bp, synthetic construct
  source 1..20: mol_type = other DNA
caaacagataaattgaactt

SEQ ID NO: 120622 - DNA, 20 bp, synthetic construct
  source 1..20: mol_type = other DNA
acaaacagataaattgaact

SEQ ID NO: 120623 - DNA, 20 bp, synthetic construct
  source 1..20: mol_type = other DNA
aacaaacagataaattgaac

SEQ ID NO: 120624 - DNA, 20 bp, synthetic construct
  source 1..20: mol_type = other DNA
aaacaaacagataaattgaa

SEQ ID NO: 120625 - DNA, 20 bp, synthetic construct
  source 1..20: mol_type = other DNA
aaaacaaacagataaattga

SEQ ID NO: 120626 - DNA, 20 bp, synthetic construct
  source 1..20: mol_type = other DNA
aaaaacaaacagataaattg

SEQ ID NO: 120627 - DNA, 20 bp, synthetic construct
  source 1..20: mol_type = other DNA
aaaaaacaaacagataaatt

SEQ ID NO: 120628 - DNA, 20 bp, synthetic construct
  source 1..20: mol_type = other DNA
gaaaaaacaaacagataaat

SEQ ID NO: 120629 - DNA, 20 bp, synthetic construct
  source 1..20: mol_type = other DNA
agaaaaaacaaacagataaa

SEQ ID NO: 120630 - DNA, 20 bp, synthetic construct
  source 1..20: mol_type = other DNA
aagaaaaaacaaacagataa

SEQ ID NO: 120631 - DNA, 20 bp, synthetic construct
  source 1..20: mol_type = other DNA
aaagaaaaaacaaacagata

SEQ ID NO: 120632 - DNA, 20 bp, synthetic construct
  source 1..20: mol_type = other DNA
aaaagaaaaaacaaacagat

SEQ ID NO: 120633 - DNA, 20 bp, synthetic construct
  source 1..20: mol_type = other DNA
caaaagaaaaaacaaacaga

SEQ ID NO: 120634 - DNA, 20 bp, synthetic construct
  source 1..20: mol_type = other DNA
acaaaagaaaaaacaaacag

SEQ ID NO: 120635 - DNA, 20 bp, synthetic construct
  source 1..20: mol_type = other DNA
aacaaaagaaaaaacaaaca

SEQ ID NO: 120636 - DNA, 20 bp, synthetic construct
  source 1..20: mol_type = other DNA
caacaaaagaaaaaacaaac

SEQ ID NO: 120637 - DNA, 20 bp, synthetic construct
  source 1..20: mol_type = other DNA
gcaacaaaagaaaaaacaaa

SEQ ID NO: 120638 - DNA, 20 bp, synthetic construct
  source 1..20: mol_type = other DNA
agcaacaaaagaaaaaacaa

SEQ ID NO: 120639 - DNA, 20 bp, synthetic construct
  source 1..20: mol_type = other DNA
cagcaacaaaagaaaaaaca

SEQ ID NO: 120640 - DNA, 20 bp, synthetic construct
  source 1..20: mol_type = other DNA
acagcaacaaaagaaaaaac

SEQ ID NO: 120641 - DNA, 20 bp, synthetic construct
  source 1..20: mol_type = other DNA
aacagcaacaaaagaaaaaa

SEQ ID NO: 120642 - DNA, 20 bp, synthetic construct
  source 1..20: mol_type = other DNA
caacagcaacaaaagaaaaa

SEQ ID NO: 120643 - DNA, 20 bp, synthetic construct
  source 1..20: mol_type = other DNA
gcaacagcaacaaaagaaaa

SEQ ID NO: 120644 - DNA, 20 bp, synthetic construct
  source 1..20: mol_type = other DNA
agcaacagcaacaaaagaaa

SEQ ID NO: 120645 - DNA, 20 bp, synthetic construct
  source 1..20: mol_type = other DNA
gagcaacagcaacaaaagaa

SEQ ID NO: 120646 - DNA, 20 bp, synthetic construct
  source 1..20: mol_type = other DNA
ggagcaacagcaacaaaaga

SEQ ID NO: 120647 - DNA, 20 bp, synthetic construct
  source 1..20: mol_type = other DNA
aggagcaacagcaacaaaag

SEQ ID NO: 120648 - DNA, 20 bp, synthetic construct
  source 1..20: mol_type = other DNA
caggagcaacagcaacaaaa

SEQ ID NO: 120649 - DNA, 20 bp, synthetic construct
  source 1..20: mol_type = other DNA
tcaggagcaacagcaacaaa

SEQ ID NO: 120650 - DNA, 20 bp, synthetic construct
  source 1..20: mol_type = other DNA
atcaggagcaacagcaacaa

SEQ ID NO: 120651 - DNA, 20 bp, synthetic construct
  source 1..20: mol_type = other DNA
catcaggagcaacagcaaca

SEQ ID NO: 120652 - DNA, 20 bp, synthetic construct
  source 1..20: mol_type = other DNA
acatcaggagcaacagcaac

SEQ ID NO: 120653 - DNA, 20 bp, synthetic construct
  source 1..20: mol_type = other DNA
gacatcaggagcaacagcaa

SEQ ID NO: 120654 - DNA, 20 bp, synthetic construct
  source 1..20: mol_type = other DNA
tgacatcaggagcaacagca

SEQ ID NO: 120655 - DNA, 20 bp, synthetic construct
  source 1..20: mol_type = other DNA
atgacatcaggagcaacagc

SEQ ID NO: 120656 - DNA, 20 bp, synthetic construct
  source 1..20: mol_type = other DNA
tatgacatcaggagcaacag

SEQ ID NO: 120657 - DNA, 20 bp, synthetic construct
  source 1..20: mol_type = other DNA
atatgacatcaggagcaaca

SEQ ID NO: 120658 - DNA, 20 bp, synthetic construct
  source 1..20: mol_type = other DNA
gatatgacatcaggagcaac

SEQ ID NO: 120659 - DNA, 20 bp, synthetic construct
  source 1..20: mol_type = other DNA
tgatatgacatcaggagcaa

SEQ ID NO: 120660 - DNA, 20 bp, synthetic construct
  source 1..20: mol_type = other DNA
ctgatatgacatcaggagca

SEQ ID NO: 120661 - DNA, 20 bp, synthetic construct
  source 1..20: mol_type = other DNA
tctgatatgacatcaggagc

SEQ ID NO: 120662 - DNA, 20 bp, synthetic construct
  source 1..20: mol_type = other DNA
gtctgatatgacatcaggag

SEQ ID NO: 120663 - DNA, 20 bp, synthetic construct
  source 1..20: mol_type = other DNA
tgtctgatatgacatcagga

SEQ ID NO: 120664 - DNA, 20 bp, synthetic construct
  source 1..20: mol_type = other DNA
ttgtctgatatgacatcagg

SEQ ID NO: 120665 - DNA, 20 bp, synthetic construct
  source 1..20: mol_type = other DNA
tttgtctgatatgacatcag

SEQ ID NO: 120666 - DNA, 20 bp, synthetic construct
  source 1..20: mol_type = other DNA
ctttgtctgatatgacatca

SEQ ID NO: 120667 - DNA, 20 bp, synthetic construct
  source 1..20: mol_type = other DNA
gctttgtctgatatgacatc

SEQ ID NO: 120668 - DNA, 20 bp, synthetic construct
  source 1..20: mol_type = other DNA
tgctttgtctgatatgacat

SEQ ID NO: 120669 - DNA, 20 bp, synthetic construct
  source 1..20: mol_type = other DNA
atgctttgtctgatatgaca

SEQ ID NO: 120670 - DNA, 20 bp, synthetic construct
  source 1..20: mol_type = other DNA
aatgctttgtctgatatgac

SEQ ID NO: 120671 - DNA, 20 bp, synthetic construct
  source 1..20: mol_type = other DNA
caatgctttgtctgatatga

SEQ ID NO: 120672 - DNA, 20 bp, synthetic construct
  source 1..20: mol_type = other DNA
gcaatgctttgtctgatatg

SEQ ID NO: 120673 - DNA, 20 bp, synthetic construct
  source 1..20: mol_type = other DNA
ggcaatgctttgtctgatat

SEQ ID NO: 120674 - DNA, 20 bp, synthetic construct
  source 1..20: mol_type = other DNA
aggcaatgctttgtctgata

SEQ ID NO: 120675 - DNA, 20 bp, synthetic construct
  source 1..20: mol_type = other DNA
taggcaatgctttgtctgat

SEQ ID NO: 120676 - DNA, 20 bp, synthetic construct
  source 1..20: mol_type = other DNA
ttaggcaatgctttgtctga

SEQ ID NO: 120677 - DNA, 20 bp, synthetic construct
  source 1..20: mol_type = other DNA
gttaggcaatgctttgtctg

SEQ ID NO: 120678 - DNA, 20 bp, synthetic construct
  source 1..20: mol_type = other DNA
agttaggcaatgctttgtct

SEQ ID NO: 120679 - DNA, 20 bp, synthetic construct
  source 1..20: mol_type = other DNA
gagttaggcaatgctttgtc

SEQ ID NO: 120680 - DNA, 20 bp, synthetic construct
  source 1..20: mol_type = other DNA
tgagttaggcaatgctttgt

SEQ ID NO: 120681 - DNA, 20 bp, synthetic construct
  source 1..20: mol_type = other DNA
ttgagttaggcaatgctttg

SEQ ID NO: 120682 - DNA, 20 bp, synthetic construct
  source 1..20: mol_type = other DNA
cttgagttaggcaatgcttt

SEQ ID NO: 120683 - DNA, 20 bp, synthetic construct
  source 1..20: mol_type = other DNA
ccttgagttaggcaatgctt

SEQ ID NO: 120684 - DNA, 20 bp, synthetic construct
  source 1..20: mol_type = other DNA
gccttgagttaggcaatgct

SEQ ID NO: 120685 - DNA, 20 bp, synthetic construct
  source 1..20: mol_type = other DNA
ggccttgagttaggcaatgc

SEQ ID NO: 120686 - DNA, 20 bp, synthetic construct
  source 1..20: mol_type = other DNA
tggccttgagttaggcaatg

SEQ ID NO: 120687 - DNA, 20 bp, synthetic construct
  source 1..20: mol_type = other DNA
gtggccttgagttaggcaat

SEQ ID NO: 120688 - DNA, 20 bp, synthetic construct
  source 1..20: mol_type = other DNA
tgtggccttgagttaggcaa

SEQ ID NO: 120689 - DNA, 20 bp, synthetic construct
  source 1..20: mol_type = other DNA
ctgtggccttgagttaggca

SEQ ID NO: 120690 - DNA, 20 bp, synthetic construct
  source 1..20: mol_type = other DNA
tctgtggccttgagttaggc

SEQ ID NO: 120691 - DNA, 20 bp, synthetic construct
  source 1..20: mol_type = other DNA
ctctgtggccttgagttagg

SEQ ID NO: 120692 - DNA, 20 bp, synthetic construct
  source 1..20: mol_type = other DNA
tctctgtggccttgagttag

SEQ ID NO: 120693 - DNA, 20 bp, synthetic construct
  source 1..20: mol_type = other DNA
atctctgtggccttgagtta

SEQ ID NO: 120694 - DNA, 20 bp, synthetic construct
  source 1..20: mol_type = other DNA
aatctctgtggccttgagtt

SEQ ID NO: 120695 - DNA, 20 bp, synthetic construct
  source 1..20: mol_type = other DNA
aaatctctgtggccttgagt

SEQ ID NO: 120696 - DNA, 20 bp, synthetic construct
  source 1..20: mol_type = other DNA
taaatctctgtggccttgag

SEQ ID NO: 120697 - DNA, 20 bp, synthetic construct
  source 1..20: mol_type = other DNA
gtaaatctctgtggccttga

SEQ ID NO: 120698 - DNA, 20 bp, synthetic construct
  source 1..20: mol_type = other DNA
agtaaatctctgtggccttg

SEQ ID NO: 120699 - DNA, 20 bp, synthetic construct
  source 1..20: mol_type = other DNA
gagtaaatctctgtggcctt

SEQ ID NO: 120700 - DNA, 20 bp, synthetic construct
  source 1..20: mol_type = other DNA
ggagtaaatctctgtggcct

SEQ ID NO: 120701 - DNA, 20 bp, synthetic construct
  source 1..20: mol_type = other DNA
aggagtaaatctctgtggcc

SEQ ID NO: 120702 - DNA, 20 bp, synthetic construct
  source 1..20: mol_type = other DNA
taggagtaaatctctgtggc

SEQ ID NO: 120703 - DNA, 20 bp, synthetic construct
  source 1..20: mol_type = other DNA
ataggagtaaatctctgtgg

SEQ ID NO: 120704 - DNA, 20 bp, synthetic construct
  source 1..20: mol_type = other DNA
cataggagtaaatctctgtg

SEQ ID NO: 120705 - DNA, 20 bp, synthetic construct
  source 1..20: mol_type = other DNA
tcataggagtaaatctctgt

SEQ ID NO: 120706 - DNA, 20 bp, synthetic construct
  source 1..20: mol_type = other DNA
ttcataggagtaaatctctg

SEQ ID NO: 120707 - DNA, 20 bp, synthetic construct
  source 1..20: mol_type = other DNA
tttcataggagtaaatctct

SEQ ID NO: 120708 - DNA, 20 bp, synthetic construct
  source 1..20: mol_type = other DNA
gtttcataggagtaaatctc

SEQ ID NO: 120709 - DNA, 20 bp, synthetic construct
  source 1..20: mol_type = other DNA
cgtttcataggagtaaatct

SEQ ID NO: 120710 - DNA, 20 bp, synthetic construct
  source 1..20: mol_type = other DNA
gcgtttcataggagtaaatc

SEQ ID NO: 120711 - DNA, 20 bp, synthetic construct
  source 1..20: mol_type = other DNA
ggcgtttcataggagtaaat

SEQ ID NO: 120712 - DNA, 20 bp, synthetic construct
  source 1..20: mol_type = other DNA
aggcgtttcataggagtaaa

SEQ ID NO: 120713 - DNA, 20 bp, synthetic construct
  source 1..20: mol_type = other DNA
taggcgtttcataggagtaa

SEQ ID NO: 120714 - DNA, 20 bp, synthetic construct
  source 1..20: mol_type = other DNA
ataggcgtttcataggagta

SEQ ID NO: 120715 - DNA, 20 bp, synthetic construct
  source 1..20: mol_type = other DNA
tataggcgtttcataggagt

SEQ ID NO: 120716 - DNA, 20 bp, synthetic construct
  source 1..20: mol_type = other DNA
ttataggcgtttcataggag

SEQ ID NO: 120717 - DNA, 20 bp, synthetic construct
  source 1..20: mol_type = other DNA
tttataggcgtttcatagga

SEQ ID NO: 120718 - DNA, 20 bp, synthetic construct
  source 1..20: mol_type = other DNA
ttttataggcgtttcatagg

SEQ ID NO: 120719 - DNA, 20 bp, synthetic construct
  source 1..20: mol_type = other DNA
gttttataggcgtttcatag

SEQ ID NO: 120720 - DNA, 20 bp, synthetic construct
  source 1..20: mol_type = other DNA
agttttataggcgtttcata

SEQ ID NO: 120721 - DNA, 20 bp, synthetic construct
  source 1..20: mol_type = other DNA
gagttttataggcgtttcat

SEQ ID NO: 120722 - DNA, 20 bp, synthetic construct
  source 1..20: mol_type = other DNA
ggagttttataggcgtttca

SEQ ID NO: 120723 - DNA, 20 bp, synthetic construct
  source 1..20: mol_type = other DNA
aggagttttataggcgtttc

SEQ ID NO: 120724 - DNA, 20 bp, synthetic construct
  source 1..20: mol_type = other DNA
taggagttttataggcgttt

SEQ ID NO: 120725 - DNA, 20 bp, synthetic construct
  source 1..20: mol_type = other DNA
ataggagttttataggcgtt

SEQ ID NO: 120726 - DNA, 20 bp, synthetic construct
  source 1..20: mol_type = other DNA
cataggagttttataggcgt

SEQ ID NO: 120727 - DNA, 20 bp, synthetic construct
  source 1..20: mol_type = other DNA
tcataggagttttataggcg

SEQ ID NO: 120728 - DNA, 20 bp, synthetic construct
  source 1..20: mol_type = other DNA
atcataggagttttataggc

SEQ ID NO: 120729 - DNA, 20 bp, synthetic construct
  source 1..20: mol_type = other DNA
aatcataggagttttatagg

SEQ ID NO: 120730 - DNA, 20 bp, synthetic construct
  source 1..20: mol_type = other DNA
aaatcataggagttttatag

SEQ ID NO: 120731 - DNA, 20 bp, synthetic construct
  source 1..20: mol_type = other DNA
aaaatcataggagttttata

SEQ ID NO: 120732 - DNA, 20 bp, synthetic construct
  source 1..20: mol_type = other DNA
aaaaatcataggagttttat

SEQ ID NO: 120733 - DNA, 20 bp, synthetic construct
  source 1..20: mol_type = other DNA
taaaaatcataggagtttta

SEQ ID NO: 120734 - DNA, 20 bp, synthetic construct
  source 1..20: mol_type = other DNA
ataaaaatcataggagtttt

SEQ ID NO: 120735 - DNA, 20 bp, synthetic construct
  source 1..20: mol_type = other DNA
tataaaaatcataggagttt

SEQ ID NO: 120736 - DNA, 20 bp, synthetic construct
  source 1..20: mol_type = other DNA
ctataaaaatcataggagtt

SEQ ID NO: 120737 - DNA, 20 bp, synthetic construct
  source 1..20: mol_type = other DNA
actataaaaatcataggagt

SEQ ID NO: 120738 - DNA, 20 bp, synthetic construct
  source 1..20: mol_type = other DNA
aactataaaaatcataggag

SEQ ID NO: 120739 - DNA, 20 bp, synthetic construct
  source 1..20: mol_type = other DNA
aaactataaaaatcatagga

SEQ ID NO: 120740 - DNA, 20 bp, synthetic construct
  source 1..20: mol_type = other DNA
taaactataaaaatcatagg

SEQ ID NO: 120741 - DNA, 20 bp, synthetic construct
  source 1..20: mol_type = other DNA
ctaaactataaaaatcatag

SEQ ID NO: 120742 - DNA, 20 bp, synthetic construct
  source 1..20: mol_type = other DNA
gctaaactataaaaatcata

SEQ ID NO: 120743 - DNA, 20 bp, synthetic construct
  source 1..20: mol_type = other DNA
agctaaactataaaaatcat

SEQ ID NO: 120744 - DNA, 20 bp, synthetic construct
  source 1..20: mol_type = other DNA
gagctaaactataaaaatca

SEQ ID NO: 120745 - DNA, 20 bp, synthetic construct
  source 1..20: mol_type = other DNA
agagctaaactataaaaatc

SEQ ID NO: 120746 - DNA, 20 bp, synthetic construct
  source 1..20: mol_type = other DNA
aagagctaaactataaaaat

SEQ ID NO: 120747 - DNA, 20 bp, synthetic construct
  source 1..20: mol_type = other DNA
taagagctaaactataaaaa

SEQ ID NO: 120748 - DNA, 20 bp, synthetic construct
  source 1..20: mol_type = other DNA
ttaagagctaaactataaaa

SEQ ID NO: 120749 - DNA, 20 bp, synthetic construct
  source 1..20: mol_type = other DNA
gttaagagctaaactataaa

SEQ ID NO: 120750 - DNA, 20 bp, synthetic construct
  source 1..20: mol_type = other DNA
tgttaagagctaaactataa

SEQ ID NO: 120751 - DNA, 20 bp, synthetic construct
  source 1..20: mol_type = other DNA
atgttaagagctaaactata

SEQ ID NO: 120752 - DNA, 20 bp, synthetic construct
  source 1..20: mol_type = other DNA
aatgttaagagctaaactat

SEQ ID NO: 120753 - DNA, 20 bp, synthetic construct
  source 1..20: mol_type = other DNA
aaatgttaagagctaaacta

SEQ ID NO: 120754 - DNA, 20 bp, synthetic construct
  source 1..20: mol_type = other DNA
taaatgttaagagctaaact

SEQ ID NO: 120755 - DNA, 20 bp, synthetic construct
  source 1..20: mol_type = other DNA
ttaaatgttaagagctaaac

SEQ ID NO: 120756 - DNA, 20 bp, synthetic construct
  source 1..20: mol_type = other DNA
cttaaatgttaagagctaaa

SEQ ID NO: 120757 - DNA, 20 bp, synthetic construct
  source 1..20: mol_type = other DNA
acttaaatgttaagagctaa

SEQ ID NO: 120758 - DNA, 20 bp, synthetic construct
  source 1..20: mol_type = other DNA
gacttaaatgttaagagcta

SEQ ID NO: 120759 - DNA, 20 bp, synthetic construct
  source 1..20: mol_type = other DNA
agacttaaatgttaagagct

SEQ ID NO: 120760 - DNA, 20 bp, synthetic construct
  source 1..20: mol_type = other DNA
tagacttaaatgttaagagc

SEQ ID NO: 120761 - DNA, 20 bp, synthetic construct
  source 1..20: mol_type = other DNA
gtagacttaaatgttaagag

SEQ ID NO: 120762 - DNA, 20 bp, synthetic construct
  source 1..20: mol_type = other DNA
tgtagacttaaatgttaaga

SEQ ID NO: 120763 - DNA, 20 bp, synthetic construct
  source 1..20: mol_type = other DNA
ttgtagacttaaatgttaag

SEQ ID NO: 120764 - DNA, 20 bp, synthetic construct
  source 1..20: mol_type = other DNA
attgtagacttaaatgttaa

SEQ ID NO: 120765 - DNA, 20 bp, synthetic construct
  source 1..20: mol_type = other DNA
gattgtagacttaaatgtta

SEQ ID NO: 120766 - DNA, 20 bp, synthetic construct
  source 1..20: mol_type = other DNA
agattgtagacttaaatgtt

SEQ ID NO: 120767 - DNA, 20 bp, synthetic construct
  source 1..20: mol_type = other DNA
gagattgtagacttaaatgt

SEQ ID NO: 120768 - DNA, 20 bp, synthetic construct
  source 1..20: mol_type = other DNA
agagattgtagacttaaatg

SEQ ID NO: 120769 - DNA, 20 bp, synthetic construct
  source 1..20: mol_type = other DNA
aagagattgtagacttaaat

SEQ ID NO: 120770 - DNA, 20 bp, synthetic construct
  source 1..20: mol_type = other DNA
aaagagattgtagacttaaa

SEQ ID NO: 120771 - DNA, 20 bp, synthetic construct
  source 1..20: mol_type = other DNA
aaaagagattgtagacttaa

SEQ ID NO: 120772 - DNA, 20 bp, synthetic construct
  source 1..20: mol_type = other DNA
caaaagagattgtagactta

SEQ ID NO: 120773 - DNA, 20 bp, synthetic construct
  source 1..20: mol_type = other DNA
tcaaaagagattgtagactt

SEQ ID NO: 120774 - DNA, 20 bp, synthetic construct
  source 1..20: mol_type = other DNA
ctcaaaagagattgtagact

SEQ ID NO: 120775 - DNA, 20 bp, synthetic construct
  source 1..20: mol_type = other DNA
actcaaaagagattgtagac

SEQ ID NO: 120776 - DNA, 20 bp, synthetic construct
  source 1..20: mol_type = other DNA
aactcaaaagagattgtaga

SEQ ID NO: 120777 - DNA, 20 bp, synthetic construct
  source 1..20: mol_type = other DNA
taactcaaaagagattgtag

SEQ ID NO: 120778 - DNA, 20 bp, synthetic construct
  source 1..20: mol_type = other DNA
ttaactcaaaagagattgta

SEQ ID NO: 120779 - DNA, 20 bp, synthetic construct
  source 1..20: mol_type = other DNA
attaactcaaaagagattgt

SEQ ID NO: 120780 - DNA, 20 bp, synthetic construct
  source 1..20: mol_type = other DNA
aattaactcaaaagagattg

SEQ ID NO: 120781 - DNA, 20 bp, synthetic construct
  source 1..20: mol_type = other DNA
aaattaactcaaaagagatt

SEQ ID NO: 120782 - DNA, 20 bp, synthetic construct
  source 1..20: mol_type = other DNA
aaaattaactcaaaagagat

SEQ ID NO: 120783 - DNA, 20 bp, synthetic construct
  source 1..20: mol_type = other DNA
aaaaattaactcaaaagaga

SEQ ID NO: 120784 - DNA, 20 bp, synthetic construct
  source 1..20: mol_type = other DNA
caaaaattaactcaaaagag

SEQ ID NO: 120785 - DNA, 20 bp, synthetic construct
  source 1..20: mol_type = other DNA
acaaaaattaactcaaaaga

SEQ ID NO: 120786 - DNA, 20 bp, synthetic construct
  source 1..20: mol_type = other DNA
cacaaaaattaactcaaaag

SEQ ID NO: 120787 - DNA, 20 bp, synthetic construct
  source 1..20: mol_type = other DNA
acacaaaaattaactcaaaa

SEQ ID NO: 120788 - DNA, 20 bp, synthetic construct
  source 1..20: mol_type = other DNA
tacacaaaaattaactcaaa

SEQ ID NO: 120789 - DNA, 20 bp, synthetic construct
  source 1..20: mol_type = other DNA
atacacaaaaattaactcaa

SEQ ID NO: 120790 - DNA, 20 bp, synthetic construct
  source 1..20: mol_type = other DNA
catacacaaaaattaactca

SEQ ID NO: 120791 - DNA, 20 bp, synthetic construct
  source 1..20: mol_type = other DNA
tcatacacaaaaattaactc

SEQ ID NO: 120792 - DNA, 20 bp, synthetic construct
  source 1..20: mol_type = other DNA
ctcatacacaaaaattaact

SEQ ID NO: 120793 - DNA, 20 bp, synthetic construct
  source 1..20: mol_type = other DNA
tctcatacacaaaaattaac

SEQ ID NO: 120794 - DNA, 20 bp, synthetic construct
  source 1..20: mol_type = other DNA
atctcatacacaaaaattaa

SEQ ID NO: 120795 - DNA, 20 bp, synthetic construct
  source 1..20: mol_type = other DNA
catctcatacacaaaaatta

SEQ ID NO: 120796 - DNA, 20 bp, synthetic construct
  source 1..20: mol_type = other DNA
tcatctcatacacaaaaatt

SEQ ID NO: 120797 - DNA, 20 bp, synthetic construct
  source 1..20: mol_type = other DNA
ctcatctcatacacaaaaat

SEQ ID NO: 120798 - DNA, 20 bp, synthetic construct
  source 1..20: mol_type = other DNA
tctcatctcatacacaaaaa

SEQ ID NO: 120799 - DNA, 20 bp, synthetic construct
  source 1..20: mol_type = other DNA
ctctcatctcatacacaaaa

SEQ ID NO: 120800 - DNA, 20 bp, synthetic construct
  source 1..20: mol_type = other DNA
actctcatctcatacacaaa

SEQ ID NO: 120801 - DNA, 20 bp, synthetic construct
  source 1..20: mol_type = other DNA
tactctcatctcatacacaa

SEQ ID NO: 120802 - DNA, 20 bp, synthetic construct
  source 1..20: mol_type = other DNA
ctactctcatctcatacaca

SEQ ID NO: 120803 - DNA, 20 bp, synthetic construct
  source 1..20: mol_type = other DNA
actactctcatctcatacac

SEQ ID NO: 120804 - DNA, 20 bp, synthetic construct
  source 1..20: mol_type = other DNA
cactactctcatctcataca

SEQ ID NO: 120805 - DNA, 20 bp, synthetic construct
  source 1..20: mol_type = other DNA
ccactactctcatctcatac

SEQ ID NO: 120806 - DNA, 20 bp, synthetic construct
  source 1..20: mol_type = other DNA
accactactctcatctcata

SEQ ID NO: 120807 - DNA, 20 bp, synthetic construct
  source 1..20: mol_type = other DNA
gaccactactctcatctcat

SEQ ID NO: 120808 - DNA, 20 bp, synthetic construct
  source 1..20: mol_type = other DNA
ggaccactactctcatctca

SEQ ID NO: 120809 - DNA, 20 bp, synthetic construct
  source 1..20: mol_type = other DNA
tggaccactactctcatctc

SEQ ID NO: 120810 - DNA, 20 bp, synthetic construct
  source 1..20: mol_type = other DNA
ctggaccactactctcatct

SEQ ID NO: 120811 - DNA, 20 bp, synthetic construct
  source 1..20: mol_type = other DNA
cctggaccactactctcatc

SEQ ID NO: 120812 - DNA, 20 bp, synthetic construct
  source 1..20: mol_type = other DNA
acctggaccactactctcat

SEQ ID NO: 120813 - DNA, 20 bp, synthetic construct
  source 1..20: mol_type = other DNA
aacctggaccactactctca

SEQ ID NO: 120814 - DNA, 20 bp, synthetic construct
  source 1..20: mol_type = other DNA
aaacctggaccactactctc

SEQ ID NO: 120815 - DNA, 20 bp, synthetic construct
  source 1..20: mol_type = other DNA
aaaacctggaccactactct

SEQ ID NO: 120816 - DNA, 20 bp, synthetic construct
  source 1..20: mol_type = other DNA
aaaaacctggaccactactc

SEQ ID NO: 120817 - DNA, 20 bp, synthetic construct
  source 1..20: mol_type = other DNA
gaaaaacctggaccactact

SEQ ID NO: 120818 - DNA, 20 bp, synthetic construct
  source 1..20: mol_type = other DNA
ggaaaaacctggaccactac

SEQ ID NO: 120819 - DNA, 20 bp, synthetic construct
  source 1..20: mol_type = other DNA
aggaaaaacctggaccacta

SEQ ID NO: 120820 - DNA, 20 bp, synthetic construct
  source 1..20: mol_type = other DNA
aaggaaaaacctggaccact

SEQ ID NO: 120821 - DNA, 20 bp, synthetic construct
  source 1..20: mol_type = other DNA
aaaggaaaaacctggaccac

SEQ ID NO: 120822 - DNA, 20 bp, synthetic construct
  source 1..20: mol_type = other DNA
aaaaggaaaaacctggacca

SEQ ID NO: 120823 - DNA, 20 bp, synthetic construct
  source 1..20: mol_type = other DNA
caaaaggaaaaacctggacc

SEQ ID NO: 120824 - DNA, 20 bp, synthetic construct
  source 1..20: mol_type = other DNA
gcaaaaggaaaaacctggac

SEQ ID NO: 120825 - DNA, 20 bp, synthetic construct
  source 1..20: mol_type = other DNA
agcaaaaggaaaaacctgga

SEQ ID NO: 120826 - DNA, 20 bp, synthetic construct
  source 1..20: mol_type = other DNA
aagcaaaaggaaaaacctgg

SEQ ID NO: 120827 - DNA, 20 bp, synthetic construct
  source 1..20: mol_type = other DNA
caagcaaaaggaaaaacctg

SEQ ID NO: 120828 - DNA, 20 bp, synthetic construct
  source 1..20: mol_type = other DNA
acaagcaaaaggaaaaacct

SEQ ID NO: 120829 - DNA, 20 bp, synthetic construct
  source 1..20: mol_type = other DNA
cacaagcaaaaggaaaaacc

SEQ ID NO: 120830 - DNA, 20 bp, synthetic construct
  source 1..20: mol_type = other DNA
ccacaagcaaaaggaaaaac

SEQ ID NO: 120831 - DNA, 20 bp, synthetic construct
  source 1..20: mol_type = other DNA
tccacaagcaaaaggaaaaa

SEQ ID NO: 120832 - DNA, 20 bp, synthetic construct
  source 1..20: mol_type = other DNA
atccacaagcaaaaggaaaa

SEQ ID NO: 120833 - DNA, 20 bp, synthetic construct
  source 1..20: mol_type = other DNA
tatccacaagcaaaaggaaa

SEQ ID NO: 120834 - DNA, 20 bp, synthetic construct
  source 1..20: mol_type = other DNA
atatccacaagcaaaaggaa

SEQ ID NO: 120835 - DNA, 20 bp, synthetic construct
  source 1..20: mol_type = other DNA
gatatccacaagcaaaagga

SEQ ID NO: 120836 - DNA, 20 bp, synthetic construct
  source 1..20: mol_type = other DNA
ggatatccacaagcaaaagg

SEQ ID NO: 120837 - DNA, 20 bp, synthetic construct
  source 1..20: mol_type = other DNA
cggatatccacaagcaaaag

SEQ ID NO: 120838 - DNA, 20 bp, synthetic construct
  source 1..20: mol_type = other DNA
acggatatccacaagcaaaa

SEQ ID NO: 120839 - DNA, 20 bp, synthetic construct
  source 1..20: mol_type = other DNA
aacggatatccacaagcaaa

SEQ ID NO: 120840 - DNA, 20 bp, synthetic construct
  source 1..20: mol_type = other DNA
caacggatatccacaagcaa

SEQ ID NO: 120841 - DNA, 20 bp, synthetic construct
  source 1..20: mol_type = other DNA
acaacggatatccacaagca

SEQ ID NO: 120842 - DNA, 20 bp, synthetic construct
  source 1..20: mol_type = other DNA
gacaacggatatccacaagc

SEQ ID NO: 120843 - DNA, 20 bp, synthetic construct
  source 1..20: mol_type = other DNA
ggacaacggatatccacaag

SEQ ID NO: 120844 - DNA, 20 bp, synthetic construct
  source 1..20: mol_type = other DNA
gggacaacggatatccacaa

SEQ ID NO: 120845 - DNA, 20 bp, synthetic construct
  source 1..20: mol_type = other DNA
ggggacaacggatatccaca

SEQ ID NO: 120846 - DNA, 20 bp, synthetic construct
  source 1..20: mol_type = other DNA
tggggacaacggatatccac

SEQ ID NO: 120847 - DNA, 20 bp, synthetic construct
  source 1..20: mol_type = other DNA
gtggggacaacggatatcca

SEQ ID NO: 120848 - DNA, 20 bp, synthetic construct
  source 1..20: mol_type = other DNA
ggtggggacaacggatatcc

SEQ ID NO: 120849 - DNA, 20 bp, synthetic construct
  source 1..20: mol_type = other DNA
aggtggggacaacggatatc

SEQ ID NO: 120850 - DNA, 20 bp, synthetic construct
  source 1..20: mol_type = other DNA
gaggtggggacaacggatat

SEQ ID NO: 120851 - DNA, 20 bp, synthetic construct
  source 1..20: mol_type = other DNA
tgaggtggggacaacggata

SEQ ID NO: 120852 - DNA, 20 bp, synthetic construct
  source 1..20: mol_type = other DNA
atgaggtggggacaacggat

SEQ ID NO: 120853 - DNA, 20 bp, synthetic construct
  source 1..20: mol_type = other DNA
aatgaggtggggacaacgga

SEQ ID NO: 120854 - DNA, 20 bp, synthetic construct
  source 1..20: mol_type = other DNA
aaatgaggtggggacaacgg

SEQ ID NO: 120855 - DNA, 20 bp, synthetic construct
  source 1..20: mol_type = other DNA
caaatgaggtggggacaacg

SEQ ID NO: 120856 - DNA, 20 bp, synthetic construct
  source 1..20: mol_type = other DNA
acaaatgaggtggggacaac

SEQ ID NO: 120857 - DNA, 20 bp, synthetic construct
  source 1..20: mol_type = other DNA
aacaaatgaggtggggacaa

SEQ ID NO: 120858 - DNA, 20 bp, synthetic construct
  source 1..20: mol_type = other DNA
caacaaatgaggtggggaca

SEQ ID NO: 120859 - DNA, 20 bp, synthetic construct
  source 1..20: mol_type = other DNA
tcaacaaatgaggtggggac

SEQ ID NO: 120860 - DNA, 20 bp, synthetic construct
  source 1..20: mol_type = other DNA
ttcaacaaatgaggtgggga

SEQ ID NO: 120861 - DNA, 20 bp, synthetic construct
  source 1..20: mol_type = other DNA
tttcaacaaatgaggtgggg

SEQ ID NO: 120862 - DNA, 20 bp, synthetic construct
  source 1..20: mol_type = other DNA
ttttcaacaaatgaggtggg

SEQ ID NO: 120863 - DNA, 20 bp, synthetic construct
  source 1..20: mol_type = other DNA
cttttcaacaaatgaggtgg

SEQ ID NO: 120864 - DNA, 20 bp, synthetic construct
  source 1..20: mol_type = other DNA
tcttttcaacaaatgaggtg

SEQ ID NO: 120865 - DNA, 20 bp, synthetic construct
  source 1..20: mol_type = other DNA
gtcttttcaacaaatgaggt

SEQ ID NO: 120866 - DNA, 20 bp, synthetic construct
  source 1..20: mol_type = other DNA
agtcttttcaacaaatgagg

SEQ ID NO: 120867 - DNA, 20 bp, synthetic construct
  source 1..20: mol_type = other DNA
tagtcttttcaacaaatgag

SEQ ID NO: 120868 - DNA, 20 bp, synthetic construct
  source 1..20: mol_type = other DNA
atagtcttttcaacaaatga

SEQ ID NO: 120869 - DNA, 20 bp, synthetic construct
  source 1..20: mol_type = other DNA
aatagtcttttcaacaaatg

SEQ ID NO: 120870 - DNA, 20 bp, synthetic construct
  source 1..20: mol_type = other DNA
gaatagtcttttcaacaaat

SEQ ID NO: 120871 - DNA, 20 bp, synthetic construct
  source 1..20: mol_type = other DNA
agaatagtcttttcaacaaa

SEQ ID NO: 120872 - DNA, 20 bp, synthetic construct
  source 1..20: mol_type = other DNA
aagaatagtcttttcaacaa

SEQ ID NO: 120873 - DNA, 20 bp, synthetic construct
  source 1..20: mol_type = other DNA
aaagaatagtcttttcaaca

SEQ ID NO: 120874 - DNA, 20 bp, synthetic construct
  source 1..20: mol_type = other DNA
gaaagaatagtcttttcaac

SEQ ID NO: 120875 - DNA, 20 bp, synthetic construct
  source 1..20: mol_type = other DNA
ggaaagaatagtcttttcaa

SEQ ID NO: 120876 - DNA, 20 bp, synthetic construct
  source 1..20: mol_type = other DNA
aggaaagaatagtcttttca

SEQ ID NO: 120877 - DNA, 20 bp, synthetic construct
  source 1..20: mol_type = other DNA
gaggaaagaatagtcttttc

SEQ ID NO: 120878 - DNA, 20 bp, synthetic construct
  source 1..20: mol_type = other DNA
agaggaaagaatagtctttt

SEQ ID NO: 120879 - DNA, 20 bp, synthetic construct
  source 1..20: mol_type = other DNA
aagaggaaagaatagtcttt

SEQ ID NO: 120880 - DNA, 20 bp, synthetic construct
  source 1..20: mol_type = other DNA
taagaggaaagaatagtctt

SEQ ID NO: 120881 - DNA, 20 bp, synthetic construct
  source 1..20: mol_type = other DNA
ttaagaggaaagaatagtct

SEQ ID NO: 120882 - DNA, 20 bp, synthetic construct
  source 1..20: mol_type = other DNA
tttaagaggaaagaatagtc

SEQ ID NO: 120883 - DNA, 20 bp, synthetic construct
  source 1..20: mol_type = other DNA
atttaagaggaaagaatagt

SEQ ID NO: 120884 - DNA, 20 bp, synthetic construct
  source 1..20: mol_type = other DNA
aatttaagaggaaagaatag

SEQ ID NO: 120885 - DNA, 20 bp, synthetic construct
  source 1..20: mol_type = other DNA
caatttaagaggaaagaata

SEQ ID NO: 120886 - DNA, 20 bp, synthetic construct
  source 1..20: mol_type = other DNA
acaatttaagaggaaagaat

SEQ ID NO: 120887 - DNA, 20 bp, synthetic construct
  source 1..20: mol_type = other DNA
aacaatttaagaggaaagaa

SEQ ID NO: 120888 - DNA, 20 bp, synthetic construct
  source 1..20: mol_type = other DNA
aaacaatttaagaggaaaga

SEQ ID NO: 120889 - DNA, 20 bp, synthetic construct
  source 1..20: mol_type = other DNA
caaacaatttaagaggaaag

SEQ ID NO: 120890 - DNA, 20 bp, synthetic construct
  source 1..20: mol_type = other DNA
acaaacaatttaagaggaaa

SEQ ID NO: 120891 - DNA, 20 bp, synthetic construct
  source 1..20: mol_type = other DNA
aacaaacaatttaagaggaa

SEQ ID NO: 120892 - DNA, 20 bp, synthetic construct
  source 1..20: mol_type = other DNA
aaacaaacaatttaagagga

SEQ ID NO: 120893 - DNA, 20 bp, synthetic construct
  source 1..20: mol_type = other DNA
caaacaaacaatttaagagg

SEQ ID NO: 120894 - DNA, 20 bp, synthetic construct
  source 1..20: mol_type = other DNA
acaaacaaacaatttaagag

SEQ ID NO: 120895 - DNA, 20 bp, synthetic construct
  source 1..20: mol_type = other DNA
aacaaacaaacaatttaaga

SEQ ID NO: 120896 - DNA, 20 bp, synthetic construct
  source 1..20: mol_type = other DNA
aaacaaacaaacaatttaag

SEQ ID NO: 120897 - DNA, 20 bp, synthetic construct
  source 1..20: mol_type = other DNA
taaacaaacaaacaatttaa

SEQ ID NO: 120898 - DNA, 20 bp, synthetic construct
  source 1..20: mol_type = other DNA
ataaacaaacaaacaattta

SEQ ID NO: 120899 - DNA, 20 bp, synthetic construct
  source 1..20: mol_type = other DNA
aataaacaaacaaacaattt

SEQ ID NO: 120900 - DNA, 20 bp, synthetic construct
  source 1..20: mol_type = other DNA
aaataaacaaacaaacaatt

SEQ ID NO: 120901 - DNA, 20 bp, synthetic construct
  source 1..20: mol_type = other DNA
taaataaacaaacaaacaat

SEQ ID NO: 120902 - DNA, 20 bp, synthetic construct
  source 1..20: mol_type = other DNA
ataaataaacaaacaaacaa

SEQ ID NO: 120903 - DNA, 20 bp, synthetic construct
  source 1..20: mol_type = other DNA
aataaataaacaaacaaaca

SEQ ID NO: 120904 - DNA, 20 bp, synthetic construct
  source 1..20: mol_type = other DNA
aaataaataaacaaacaaac

SEQ ID NO: 120905 - DNA, 20 bp, synthetic construct
  source 1..20: mol_type = other DNA
aaaataaataaacaaacaaa

SEQ ID NO: 120906 - DNA, 20 bp, synthetic construct
  source 1..20: mol_type = other DNA
aaaaataaataaacaaacaa

SEQ ID NO: 120907 - DNA, 20 bp, synthetic construct
  source 1..20: mol_type = other DNA
caaaaataaataaacaaaca

SEQ ID NO: 120908 - DNA, 20 bp, synthetic construct
  source 1..20: mol_type = other DNA
tcaaaaataaataaacaaac

SEQ ID NO: 120909 - DNA, 20 bp, synthetic construct
  source 1..20: mol_type = other DNA
ctcaaaaataaataaacaaa

SEQ ID NO: 120910 - DNA, 20 bp, synthetic construct
  source 1..20: mol_type = other DNA
tctcaaaaataaataaacaa

SEQ ID NO: 120911 - DNA, 20 bp, synthetic construct
  source 1..20: mol_type = other DNA
atctcaaaaataaataaaca

SEQ ID NO: 120912 - DNA, 20 bp, synthetic construct
  source 1..20: mol_type = other DNA
catctcaaaaataaataaac

SEQ ID NO: 120913 - DNA, 20 bp, synthetic construct
  source 1..20: mol_type = other DNA
ccatctcaaaaataaataaa

SEQ ID NO: 120914 - DNA, 20 bp, synthetic construct
  source 1..20: mol_type = other DNA
tccatctcaaaaataaataa

SEQ ID NO: 120915 - DNA, 20 bp, synthetic construct
  source 1..20: mol_type = other DNA
ctccatctcaaaaataaata

SEQ ID NO: 120916 - DNA, 20 bp, synthetic construct
  source 1..20: mol_type = other DNA
actccatctcaaaaataaat

SEQ ID NO: 120917 - DNA, 20 bp, synthetic construct
  source 1..20: mol_type = other DNA
cactccatctcaaaaataaa

SEQ ID NO: 120918 - DNA, 20 bp, synthetic construct
  source 1..20: mol_type = other DNA
acactccatctcaaaaataa

SEQ ID NO: 120919 - DNA, 20 bp, synthetic construct
  source 1..20: mol_type = other DNA
gacactccatctcaaaaata

SEQ ID NO: 120920 - DNA, 20 bp, synthetic construct
  source 1..20: mol_type = other DNA
cgacactccatctcaaaaat

SEQ ID NO: 120921 - DNA, 20 bp, synthetic construct
  source 1..20: mol_type = other DNA
gcgacactccatctcaaaaa

SEQ ID NO: 120922 - DNA, 20 bp, synthetic construct
  source 1..20: mol_type = other DNA
agcgacactccatctcaaaa

SEQ ID NO: 120923 - DNA, 20 bp, synthetic construct
  source 1..20: mol_type = other DNA
gagcgacactccatctcaaa

SEQ ID NO: 120924 - DNA, 20 bp, synthetic construct
  source 1..20: mol_type = other DNA
agagcgacactccatctcaa

SEQ ID NO: 120925 - DNA, 20 bp, synthetic construct
  source 1..20: mol_type = other DNA
cagagcgacactccatctca

SEQ ID NO: 120926 - DNA, 20 bp, synthetic construct
  source 1..20: mol_type = other DNA
tcagagcgacactccatctc

SEQ ID NO: 120927 - DNA, 20 bp, synthetic construct
  source 1..20: mol_type = other DNA
atcagagcgacactccatct

SEQ ID NO: 120928 - DNA, 20 bp, synthetic construct
  source 1..20: mol_type = other DNA
catcagagcgacactccatc

SEQ ID NO: 120929 - DNA, 20 bp, synthetic construct
  source 1..20: mol_type = other DNA
ccatcagagcgacactccat

SEQ ID NO: 120930 - DNA, 20 bp, synthetic construct
  source 1..20: mol_type = other DNA
tccatcagagcgacactcca

SEQ ID NO: 120931 - DNA, 20 bp, synthetic construct
  source 1..20: mol_type = other DNA
ctccatcagagcgacactcc

SEQ ID NO: 120932 - DNA, 20 bp, synthetic construct
  source 1..20: mol_type = other DNA
actccatcagagcgacactc

SEQ ID NO: 120933 - DNA, 20 bp, synthetic construct
  source 1..20: mol_type = other DNA
cactccatcagagcgacact

SEQ ID NO: 120934 - DNA, 20 bp, synthetic construct
  source 1..20: mol_type = other DNA
ccactccatcagagcgacac

SEQ ID NO: 120935 - DNA, 20 bp, synthetic construct
  source 1..20: mol_type = other DNA
gccactccatcagagcgaca

SEQ ID NO: 120936 - DNA, 20 bp, synthetic construct
  source 1..20: mol_type = other DNA
cgccactccatcagagcgac

SEQ ID NO: 120937 - DNA, 20 bp, synthetic construct
  source 1..20: mol_type = other DNA
gcgccactccatcagagcga

SEQ ID NO: 120938 - DNA, 20 bp, synthetic construct
  source 1..20: mol_type = other DNA
agcgccactccatcagagcg

SEQ ID NO: 120939 - DNA, 20 bp, synthetic construct
  source 1..20: mol_type = other DNA
tagcgccactccatcagagc

SEQ ID NO: 120940 - DNA, 20 bp, synthetic construct
  source 1..20: mol_type = other DNA
ttagcgccactccatcagag

SEQ ID NO: 120941 - DNA, 20 bp, synthetic construct
  source 1..20: mol_type = other DNA
gttagcgccactccatcaga

SEQ ID NO: 120942 - DNA, 20 bp, synthetic construct
  source 1..20: mol_type = other DNA
agttagcgccactccatcag

SEQ ID NO: 120943 - DNA, 20 bp, synthetic construct
  source 1..20: mol_type = other DNA
aagttagcgccactccatca

SEQ ID NO: 120944 - DNA, 20 bp, synthetic construct
  source 1..20: mol_type = other DNA
taagttagcgccactccatc

SEQ ID NO: 120945 - DNA, 20 bp, synthetic construct
  source 1..20: mol_type = other DNA
ctaagttagcgccactccat

SEQ ID NO: 120946 - DNA, 20 bp, synthetic construct
  source 1..20: mol_type = other DNA
gctaagttagcgccactcca

SEQ ID NO: 120947 - DNA, 20 bp, synthetic construct
  source 1..20: mol_type = other DNA
agctaagttagcgccactcc

SEQ ID NO: 120948 - DNA, 20 bp, synthetic construct
  source 1..20: mol_type = other DNA
aagctaagttagcgccactc

SEQ ID NO: 120949 - DNA, 20 bp, synthetic construct
  source 1..20: mol_type = other DNA
gaagctaagttagcgccact

SEQ ID NO: 120950 - DNA, 20 bp, synthetic construct
  source 1..20: mol_type = other DNA
tgaagctaagttagcgccac

SEQ ID NO: 120951 - DNA, 20 bp, synthetic construct
  source 1..20: mol_type = other DNA
gtgaagctaagttagcgcca

SEQ ID NO: 120952 - DNA, 20 bp, synthetic construct
  source 1..20: mol_type = other DNA
agtgaagctaagttagcgcc

SEQ ID NO: 120953 - DNA, 20 bp, synthetic construct
  source 1..20: mol_type = other DNA
cagtgaagctaagttagcgc

SEQ ID NO: 120954 - DNA, 20 bp, synthetic construct
  source 1..20: mol_type = other DNA
gcagtgaagctaagttagcg

SEQ ID NO: 120955 - DNA, 20 bp, synthetic construct
  source 1..20: mol_type = other DNA
tgcagtgaagctaagttagc

SEQ ID NO: 120956 - DNA, 20 bp, synthetic construct
  source 1..20: mol_type = other DNA
ttgcagtgaagctaagttag

SEQ ID NO: 120957 - DNA, 20 bp, synthetic construct
  source 1..20: mol_type = other DNA
gttgcagtgaagctaagtta

SEQ ID NO: 120958 - DNA, 20 bp, synthetic construct
  source 1..20: mol_type = other DNA
ggttgcagtgaagctaagtt

SEQ ID NO: 120959 - DNA, 20 bp, synthetic construct
  source 1..20: mol_type = other DNA
aggttgcagtgaagctaagt

SEQ ID NO: 120960 - DNA, 20 bp, synthetic construct
  source 1..20: mol_type = other DNA
gaggttgcagtgaagctaag

SEQ ID NO: 120961 - DNA, 20 bp, synthetic construct
  source 1..20: mol_type = other DNA
ggaggttgcagtgaagctaa

SEQ ID NO: 120962 - DNA, 20 bp, synthetic construct
  source 1..20: mol_type = other DNA
cggaggttgcagtgaagcta

SEQ ID NO: 120963 - DNA, 20 bp, synthetic construct
  source 1..20: mol_type = other DNA
gcggaggttgcagtgaagct

SEQ ID NO: 120964 - DNA, 20 bp, synthetic construct
  source 1..20: mol_type = other DNA
ggcggaggttgcagtgaagc

SEQ ID NO: 120965 - DNA, 20 bp, synthetic construct
  source 1..20: mol_type = other DNA
aggcggaggttgcagtgaag

SEQ ID NO: 120966 - DNA, 20 bp, synthetic construct
  source 1..20: mol_type = other DNA
gaggcggaggttgcagtgaa

SEQ ID NO: 120967 - DNA, 20 bp, synthetic construct
  source 1..20: mol_type = other DNA
agaggcggaggttgcagtga

SEQ ID NO: 120968 - DNA, 20 bp, synthetic construct
  source 1..20: mol_type = other DNA
gagaggcggaggttgcagtg

SEQ ID NO: 120969 - DNA, 20 bp, synthetic construct
  source 1..20: mol_type = other DNA
tgagaggcggaggttgcagt

SEQ ID NO: 120970 - DNA, 20 bp, synthetic construct
  source 1..20: mol_type = other DNA
ctgagaggcggaggttgcag

SEQ ID NO: 120971 - DNA, 20 bp, synthetic construct
  source 1..20: mol_type = other DNA
tctgagaggcggaggttgca

SEQ ID NO: 120972 - DNA, 20 bp, synthetic construct
  source 1..20: mol_type = other DNA
atctgagaggcggaggttgc

SEQ ID NO: 120973 - DNA, 20 bp, synthetic construct
  source 1..20: mol_type = other DNA
aatctgagaggcggaggttg

SEQ ID NO: 120974 - DNA, 20 bp, synthetic construct
  source 1..20: mol_type = other DNA
gaatctgagaggcggaggtt

SEQ ID NO: 120975 - DNA, 20 bp, synthetic construct
  source 1..20: mol_type = other DNA
tgaatctgagaggcggaggt

SEQ ID NO: 120976 - DNA, 20 bp, synthetic construct
  source 1..20: mol_type = other DNA
ttgaatctgagaggcggagg

SEQ ID NO: 120977 - DNA, 20 bp, synthetic construct
  source 1..20: mol_type = other DNA
cttgaatctgagaggcggag

SEQ ID NO: 120978 - DNA, 20 bp, synthetic construct
  source 1..20: mol_type = other DNA
gcttgaatctgagaggcgga

SEQ ID NO: 120979 - DNA, 20 bp, synthetic construct
  source 1..20: mol_type = other DNA
cgcttgaatctgagaggcgg

SEQ ID NO: 120980 - DNA, 20 bp, synthetic construct
  source 1..20: mol_type = other DNA
tcgcttgaatctgagaggcg

SEQ ID NO: 120981 - DNA, 20 bp, synthetic construct
  source 1..20: mol_type = other DNA
atcgcttgaatctgagaggc

SEQ ID NO: 120982 - DNA, 20 bp, synthetic construct
  source 1..20: mol_type = other DNA
aatcgcttgaatctgagagg

SEQ ID NO: 120983 - DNA, 20 bp, synthetic construct
  source 1..20: mol_type = other DNA
gaatcgcttgaatctgagag

SEQ ID NO: 120984 - DNA, 20 bp, synthetic construct
  source 1..20: mol_type = other DNA
ggaatcgcttgaatctgaga

SEQ ID NO: 120985 - DNA, 20 bp, synthetic construct
  source 1..20: mol_type = other DNA
gggaatcgcttgaatctgag

SEQ ID NO: 120986 - DNA, 20 bp, synthetic construct
  source 1..20: mol_type = other DNA
ggggaatcgcttgaatctga

SEQ ID NO: 120987 - DNA, 20 bp, synthetic construct
  source 1..20: mol_type = other DNA
aggggaatcgcttgaatctg

SEQ ID NO: 120988 - DNA, 20 bp, synthetic construct
  source 1..20: mol_type = other DNA
caggggaatcgcttgaatct

SEQ ID NO: 120989 - DNA, 20 bp, synthetic construct
  source 1..20: mol_type = other DNA
gcaggggaatcgcttgaatc

SEQ ID NO: 120990 - DNA, 20 bp, synthetic construct
  source 1..20: mol_type = other DNA
ggcaggggaatcgcttgaat

SEQ ID NO: 120991 - DNA, 20 bp, synthetic construct
  source 1..20: mol_type = other DNA
aggcaggggaatcgcttgaa

SEQ ID NO: 120992 - DNA, 20 bp, synthetic construct
  source 1..20: mol_type = other DNA
gaggcaggggaatcgcttga

SEQ ID NO: 120993 - DNA, 20 bp, synthetic construct
  source 1..20: mol_type = other DNA
tgaggcaggggaatcgcttg

SEQ ID NO: 120994 - DNA, 20 bp, synthetic construct
  source 1..20: mol_type = other DNA
ctgaggcaggggaatcgctt

SEQ ID NO: 120995 - DNA, 20 bp, synthetic construct
  source 1..20: mol_type = other DNA
gctgaggcaggggaatcgct

SEQ ID NO: 120996 - DNA, 20 bp, synthetic construct
  source 1..20: mol_type = other DNA
ggctgaggcaggggaatcgc

SEQ ID NO: 120997 - DNA, 20 bp, synthetic construct
  source 1..20: mol_type = other DNA
aggctgaggcaggggaatcg

SEQ ID NO: 120998 - DNA, 20 bp, synthetic construct
  source 1..20: mol_type = other DNA
gaggctgaggcaggggaatc

SEQ ID NO: 120999 - DNA, 20 bp, synthetic construct
  source 1..20: mol_type = other DNA
ggaggctgaggcaggggaat

SEQ ID NO: 121000 - DNA, 20 bp, synthetic construct
  source 1..20: mol_type = other DNA
aggaggctgaggcaggggaa

SEQ ID NO: 121001 - DNA, 20 bp, synthetic construct
  source 1..20: mol_type = other DNA
caggaggctgaggcagggga

SEQ ID NO: 121002 - DNA, 20 bp, synthetic construct
  source 1..20: mol_type = other DNA
tcaggaggctgaggcagggg

SEQ ID NO: 121003 - DNA, 20 bp, synthetic construct
  source 1..20: mol_type = other DNA
ctcaggaggctgaggcaggg

SEQ ID NO: 121004 - DNA, 20 bp, synthetic construct
  source 1..20: mol_type = other DNA
actcaggaggctgaggcagg

SEQ ID NO: 121005 - DNA, 20 bp, synthetic construct
  source 1..20: mol_type = other DNA
tactcaggaggctgaggcag

SEQ ID NO: 121006 - DNA, 20 bp, synthetic construct
  source 1..20: mol_type = other DNA
ctactcaggaggctgaggca

SEQ ID NO: 121007 - DNA, 20 bp, synthetic construct
  source 1..20: mol_type = other DNA
gctactcaggaggctgaggc

SEQ ID NO: 121008 - DNA, 20 bp, synthetic construct
  source 1..20: mol_type = other DNA
agctactcaggaggctgagg

SEQ ID NO: 121009 - DNA, 20 bp, synthetic construct
  source 1..20: mol_type = other DNA
cagctactcaggaggctgag

SEQ ID NO: 121010 - DNA, 20 bp, synthetic construct
  source 1..20: mol_type = other DNA
ccagctactcaggaggctga

SEQ ID NO: 121011 - DNA, 20 bp, synthetic construct
  source 1..20: mol_type = other DNA
tccagctactcaggaggctg

SEQ ID NO: 121012 - DNA, 20 bp, synthetic construct
  source 1..20: mol_type = other DNA
ttccagctactcaggaggct

SEQ ID NO: 121013 - DNA, 20 bp, synthetic construct
  source 1..20: mol_type = other DNA
attccagctactcaggaggc

SEQ ID NO: 121014 - DNA, 20 bp, synthetic construct
  source 1..20: mol_type = other DNA
aattccagctactcaggagg

SEQ ID NO: 121015 - DNA, 20 bp, synthetic construct
  source 1..20: mol_type = other DNA
taattccagctactcaggag

SEQ ID NO: 121016 - DNA, 20 bp, synthetic construct
  source 1..20: mol_type = other DNA
gtaattccagctactcagga

SEQ ID NO: 121017 - DNA, 20 bp, synthetic construct
  source 1..20: mol_type = other DNA
tgtaattccagctactcagg

SEQ ID NO: 121018 - DNA, 20 bp, synthetic construct
  source 1..20: mol_type = other DNA
ctgtaattccagctactcag

SEQ ID NO: 121019 - DNA, 20 bp, synthetic construct
  source 1..20: mol_type = other DNA
cctgtaattccagctactca

SEQ ID NO: 121020 - DNA, 20 bp, synthetic construct
  source 1..20: mol_type = other DNA
ccctgtaattccagctactc

SEQ ID NO: 121021 - DNA, 20 bp, synthetic construct
  source 1..20: mol_type = other DNA
cccctgtaattccagctact

SEQ ID NO: 121022 - DNA, 20 bp, synthetic construct
  source 1..20: mol_type = other DNA
acccctgtaattccagctac

SEQ ID NO: 121023 - DNA, 20 bp, synthetic construct
  source 1..20: mol_type = other DNA
cacccctgtaattccagcta

SEQ ID NO: 121024 - DNA, 20 bp, synthetic construct
  source 1..20: mol_type = other DNA
gcacccctgtaattccagct

SEQ ID NO: 121025 - DNA, 20 bp, synthetic construct
  source 1..20: mol_type = other DNA
cgcacccctgtaattccagc

SEQ ID NO: 121026 - DNA, 20 bp, synthetic construct
  source 1..20: mol_type = other DNA
gcgcacccctgtaattccag

SEQ ID NO: 121027 - DNA, 20 bp, synthetic construct
  source 1..20: mol_type = other DNA
ggcgcacccctgtaattcca

SEQ ID NO: 121028 - DNA, 20 bp, synthetic construct
  source 1..20: mol_type = other DNA
tggcgcacccctgtaattcc

SEQ ID NO: 121029 - DNA, 20 bp, synthetic construct
  source 1..20: mol_type = other DNA
gtggcgcacccctgtaattc

SEQ ID NO: 121030 - DNA, 20 bp, synthetic construct
  source 1..20: mol_type = other DNA
ggtggcgcacccctgtaatt

SEQ ID NO: 121031 - DNA, 20 bp, synthetic construct
  source 1..20: mol_type = other DNA
tggtggcgcacccctgtaat

SEQ ID NO: 121032 - DNA, 20 bp, synthetic construct
  source 1..20: mol_type = other DNA
gtggtggcgcacccctgtaa

SEQ ID NO: 121033 - DNA, 20 bp, synthetic construct
  source 1..20: mol_type = other DNA
tgtggtggcgcacccctgta

SEQ ID NO: 121034 - DNA, 20 bp, synthetic construct
  source 1..20: mol_type = other DNA
gtgtggtggcgcacccctgt

SEQ ID NO: 121035 - DNA, 20 bp, synthetic construct
  source 1..20: mol_type = other DNA
ggtgtggtggcgcacccctg

SEQ ID NO: 121036 - DNA, 20 bp, synthetic construct
  source 1..20: mol_type = other DNA
gggtgtggtggcgcacccct

SEQ ID NO: 121037 - DNA, 20 bp, synthetic construct
  source 1..20: mol_type = other DNA
tgggtgtggtggcgcacccc

SEQ ID NO: 121038 - DNA, 20 bp, synthetic construct
  source 1..20: mol_type = other DNA
ctgggtgtggtggcgcaccc

SEQ ID NO: 121039 - DNA, 20 bp, synthetic construct
  source 1..20: mol_type = other DNA
gctgggtgtggtggcgcacc

SEQ ID NO: 121040 - DNA, 20 bp, synthetic construct
  source 1..20: mol_type = other DNA
agctgggtgtggtggcgcac

SEQ ID NO: 121041 - DNA, 20 bp, synthetic construct
  source 1..20: mol_type = other DNA
tagctgggtgtggtggcgca

SEQ ID NO: 121042 - DNA, 20 bp, synthetic construct
  source 1..20: mol_type = other DNA
ttagctgggtgtggtggcgc

SEQ ID NO: 121043 - DNA, 20 bp, synthetic construct
  source 1..20: mol_type = other DNA
attagctgggtgtggtggcg

SEQ ID NO: 121044 - DNA, 20 bp, synthetic construct
  source 1..20: mol_type = other DNA
aattagctgggtgtggtggc

SEQ ID NO: 121045 - DNA, 20 bp, synthetic construct
  source 1..20: mol_type = other DNA
aaattagctgggtgtggtgg

SEQ ID NO: 121046 - DNA, 20 bp, synthetic construct
  source 1..20: mol_type = other DNA
aaaattagctgggtgtggtg

SEQ ID NO: 121047 - DNA, 20 bp, synthetic construct
  source 1..20: mol_type = other DNA
aaaaattagctgggtgtggt

SEQ ID NO: 121048 - DNA, 20 bp, synthetic construct
  source 1..20: mol_type = other DNA
caaaaattagctgggtgtgg

SEQ ID NO: 121049 - DNA, 20 bp, synthetic construct
  source 1..20: mol_type = other DNA
acaaaaattagctgggtgtg

SEQ ID NO: 121050 - DNA, 20 bp, synthetic construct
  source 1..20: mol_type = other DNA
tacaaaaattagctgggtgt

SEQ ID NO: 121051 - DNA, 20 bp, synthetic construct
  source 1..20: mol_type = other DNA
atacaaaaattagctgggtg

SEQ ID NO: 121052 - DNA, 20 bp, synthetic construct
  source 1..20: mol_type = other DNA
aatacaaaaattagctgggt

SEQ ID NO: 121053 - DNA, 20 bp, synthetic construct
  source 1..20: mol_type = other DNA
aaatacaaaaattagctggg

SEQ ID NO: 121054 - DNA, 20 bp, synthetic construct
  source 1..20: mol_type = other DNA
aaaatacaaaaattagctgg

SEQ ID NO: 121055 - DNA, 20 bp, synthetic construct
  source 1..20: mol_type = other DNA
aaaaatacaaaaattagctg

SEQ ID NO: 121056 - DNA, 20 bp, synthetic construct
  source 1..20: mol_type = other DNA
taaaaatacaaaaattagct

SEQ ID NO: 121057 - DNA, 20 bp, synthetic construct
  source 1..20: mol_type = other DNA
ctaaaaatacaaaaattagc

SEQ ID NO: 121058 - DNA, 20 bp, synthetic construct
  source 1..20: mol_type = other DNA
actaaaaatacaaaaattag

SEQ ID NO: 121059 - DNA, 20 bp, synthetic construct
  source 1..20: mol_type = other DNA
tactaaaaatacaaaaatta

SEQ ID NO: 121060 - DNA, 20 bp, synthetic construct
  source 1..20: mol_type = other DNA
ctactaaaaatacaaaaatt

SEQ ID NO: 121061 - DNA, 20 bp, synthetic construct
  source 1..20: mol_type = other DNA
tctactaaaaatacaaaaat

SEQ ID NO: 121062 - DNA, 20 bp, synthetic construct
  source 1..20: mol_type = other DNA
ctctactaaaaatacaaaaa

SEQ ID NO: 121063 - DNA, 20 bp, synthetic construct
  source 1..20: mol_type = other DNA
tctctactaaaaatacaaaa

SEQ ID NO: 121064 - DNA, 20 bp, synthetic construct
  source 1..20: mol_type = other DNA
gtctctactaaaaatacaaa

SEQ ID NO: 121065 - DNA, 20 bp, synthetic construct
  source 1..20: mol_type = other DNA
cgtctctactaaaaatacaa

SEQ ID NO: 121066 - DNA, 20 bp, synthetic construct
  source 1..20: mol_type = other DNA
ccgtctctactaaaaataca

SEQ ID NO: 121067 - DNA, 20 bp, synthetic construct
  source 1..20: mol_type = other DNA
cccgtctctactaaaaatac

SEQ ID NO: 121068 - DNA, 20 bp, synthetic construct
  source 1..20: mol_type = other DNA
ccccgtctctactaaaaata

SEQ ID NO: 121069 - DNA, 20 bp, synthetic construct
  source 1..20: mol_type = other DNA
accccgtctctactaaaaat

SEQ ID NO: 121070 - DNA, 20 bp, synthetic construct
  source 1..20: mol_type = other DNA
aaccccgtctctactaaaaa

SEQ ID NO: 121071 - DNA, 20 bp, synthetic construct
  source 1..20: mol_type = other DNA
aaaccccgtctctactaaaa

SEQ ID NO: 121072 - DNA, 20 bp, synthetic construct
  source 1..20: mol_type = other DNA
aaaaccccgtctctactaaa

SEQ ID NO: 121073 - DNA, 20 bp, synthetic construct
  source 1..20: mol_type = other DNA
taaaaccccgtctctactaa

SEQ ID NO: 121074 - DNA, 20 bp, synthetic construct
  source 1..20: mol_type = other DNA
gtaaaaccccgtctctacta

SEQ ID NO: 121075 - DNA, 20 bp, synthetic construct
  source 1..20: mol_type = other DNA
ggtaaaaccccgtctctact

SEQ ID NO: 121076 - DNA, 20 bp, synthetic construct
  source 1..20: mol_type = other DNA
cggtaaaaccccgtctctac

SEQ ID NO: 121077 - DNA, 20 bp, synthetic construct
  source 1..20: mol_type = other DNA
acggtaaaaccccgtctcta

SEQ ID NO: 121078 - DNA, 20 bp, synthetic construct
  source 1..20: mol_type = other DNA
cacggtaaaaccccgtctct

SEQ ID NO: 121079 - DNA, 20 bp, synthetic construct
  source 1..20: mol_type = other DNA
acacggtaaaaccccgtctc

SEQ ID NO: 121080 - DNA, 20 bp, synthetic construct
  source 1..20: mol_type = other DNA
aacacggtaaaaccccgtct

SEQ ID NO: 121081 - DNA, 20 bp, synthetic construct
  source 1..20: mol_type = other DNA
caacacggtaaaaccccgtc

SEQ ID NO: 121082 - DNA, 20 bp, synthetic construct
  source 1..20: mol_type = other DNA
ccaacacggtaaaaccccgt

SEQ ID NO: 121083 - DNA, 20 bp, synthetic construct
  source 1..20: mol_type = other DNA
accaacacggtaaaaccccg

SEQ ID NO: 121084 - DNA, 20 bp, synthetic construct
  source 1..20: mol_type = other DNA
gaccaacacggtaaaacccc

SEQ ID NO: 121085 - DNA, 20 bp, synthetic construct
  source 1..20: mol_type = other DNA
tgaccaacacggtaaaaccc

SEQ ID NO: 121086 - DNA, 20 bp, synthetic construct
  source 1..20: mol_type = other DNA
ctgaccaacacggtaaaacc

SEQ ID NO: 121087 - DNA, 20 bp, synthetic construct
  source 1..20: mol_type = other DNA
cctgaccaacacggtaaaac

SEQ ID NO: 121088 - DNA, 20 bp, synthetic construct
  source 1..20: mol_type = other DNA
gcctgaccaacacggtaaaa

SEQ ID NO: 121089 - DNA, 20 bp, synthetic construct
  source 1..20: mol_type = other DNA
agcctgaccaacacggtaaa

SEQ ID NO: 121090 - DNA, 20 bp, synthetic construct
  source 1..20: mol_type = other DNA
cagcctgaccaacacggtaa

SEQ ID NO: 121091 - DNA, 20 bp, synthetic construct
  source 1..20: mol_type = other DNA
ccagcctgaccaacacggta

SEQ ID NO: 121092 - DNA, 20 bp, synthetic construct
  source 1..20: mol_type = other DNA
accagcctgaccaacacggt

SEQ ID NO: 121093 - DNA, 20 bp, synthetic construct
  source 1..20: mol_type = other DNA
gaccagcctgaccaacacgg

SEQ ID NO: 121094 - DNA, 20 bp, synthetic construct
  source 1..20: mol_type = other DNA
agaccagcctgaccaacacg

SEQ ID NO: 121095 - DNA, 20 bp, synthetic construct
  source 1..20: mol_type = other DNA
gagaccagcctgaccaacac

SEQ ID NO: 121096 - DNA, 20 bp, synthetic construct
  source 1..20: mol_type = other DNA
cgagaccagcctgaccaaca

SEQ ID NO: 121097 - DNA, 20 bp, synthetic construct
  source 1..20: mol_type = other DNA
tcgagaccagcctgaccaac

SEQ ID NO: 121098 - DNA, 20 bp, synthetic construct
  source 1..20: mol_type = other DNA
ttcgagaccagcctgaccaa

SEQ ID NO: 121099 - DNA, 20 bp, synthetic construct
  source 1..20: mol_type = other DNA
gttcgagaccagcctgacca

SEQ ID NO: 121100 - DNA, 20 bp, synthetic construct
  source 1..20: mol_type = other DNA
agttcgagaccagcctgacc

SEQ ID NO: 121101 - DNA, 20 bp, synthetic construct
  source 1..20: mol_type = other DNA
gagttcgagaccagcctgac

SEQ ID NO: 121102 - DNA, 20 bp, synthetic construct
  source 1..20: mol_type = other DNA
ggagttcgagaccagcctga

SEQ ID NO: 121103 - DNA, 20 bp, synthetic construct
  source 1..20: mol_type = other DNA
aggagttcgagaccagcctg

SEQ ID NO: 121104 - DNA, 20 bp, synthetic construct
  source 1..20: mol_type = other DNA
caggagttcgagaccagcct

SEQ ID NO: 121105 - DNA, 20 bp, synthetic construct
  source 1..20: mol_type = other DNA
tcaggagttcgagaccagcc

SEQ ID NO: 121106 - DNA, 20 bp, synthetic construct
  source 1..20: mol_type = other DNA
atcaggagttcgagaccagc

SEQ ID NO: 121107 - DNA, 20 bp, synthetic construct
  source 1..20: mol_type = other DNA
gatcaggagttcgagaccag

SEQ ID NO: 121108 - DNA, 20 bp, synthetic construct
  source 1..20: mol_type = other DNA
agatcaggagttcgagacca

SEQ ID NO: 121109 - DNA, 20 bp, synthetic construct
  source 1..20: mol_type = other DNA
gagatcaggagttcgagacc

SEQ ID NO: 121110 - DNA, 20 bp, synthetic construct
  source 1..20: mol_type = other DNA
cgagatcaggagttcgagac

SEQ ID NO: 121111 - DNA, 20 bp, synthetic construct
  source 1..20: mol_type = other DNA
acgagatcaggagttcgaga

SEQ ID NO: 121112 - DNA, 20 bp, synthetic construct
  source 1..20: mol_type = other DNA
cacgagatcaggagttcgag

SEQ ID NO: 121113 - DNA, 20 bp, synthetic construct
  source 1..20: mol_type = other DNA
tcacgagatcaggagttcga

SEQ ID NO: 121114 - DNA, 20 bp, synthetic construct
  source 1..20: mol_type = other DNA
atcacgagatcaggagttcg

SEQ ID NO: 121115 - DNA, 20 bp, synthetic construct
  source 1..20: mol_type = other DNA
gatcacgagatcaggagttc

SEQ ID NO: 121116 - DNA, 20 bp, synthetic construct
  source 1..20: mol_type = other DNA
agatcacgagatcaggagtt

SEQ ID NO: 121117 - DNA, 20 bp, synthetic construct
  source 1..20: mol_type = other DNA
cagatcacgagatcaggagt

SEQ ID NO: 121118 - DNA, 20 bp, synthetic construct
  source 1..20: mol_type = other DNA
gcagatcacgagatcaggag

SEQ ID NO: 121119 - DNA, 20 bp, synthetic construct
  source 1..20: mol_type = other DNA
ggcagatcacgagatcagga

SEQ ID NO: 121120 - DNA, 20 bp, synthetic construct
  source 1..20: mol_type = other DNA
aggcagatcacgagatcagg

SEQ ID NO: 121121 - DNA, 20 bp, synthetic construct
  source 1..20: mol_type = other DNA
caggcagatcacgagatcag

SEQ ID NO: 121122 - DNA, 20 bp, synthetic construct
  source 1..20: mol_type = other DNA
acaggcagatcacgagatca

SEQ ID NO: 121123 - DNA, 20 bp, synthetic construct
  source 1..20: mol_type = other DNA
gacaggcagatcacgagatc

SEQ ID NO: 121124 - DNA, 20 bp, synthetic construct
  source 1..20: mol_type = other DNA
agacaggcagatcacgagat

SEQ ID NO: 121125 - DNA, 20 bp, synthetic construct
  source 1..20: mol_type = other DNA
gagacaggcagatcacgaga

SEQ ID NO: 121126 - DNA, 20 bp, synthetic construct
  source 1..20: mol_type = other DNA
ggagacaggcagatcacgag

SEQ ID NO: 121127 - DNA, 20 bp, synthetic construct
  source 1..20: mol_type = other DNA
aggagacaggcagatcacga

SEQ ID NO: 121128 - DNA, 20 bp, synthetic construct
  source 1..20: mol_type = other DNA
caggagacaggcagatcacg

SEQ ID NO: 121129 - DNA, 20 bp, synthetic construct
  source 1..20: mol_type = other DNA
ccaggagacaggcagatcac

SEQ ID NO: 121130 - DNA, 20 bp, synthetic construct
  source 1..20: mol_type = other DNA
gccaggagacaggcagatca

SEQ ID NO: 121131 - DNA, 20 bp, synthetic construct
  source 1..20: mol_type = other DNA
tgccaggagacaggcagatc

SEQ ID NO: 121132 - DNA, 20 bp, synthetic construct
  source 1..20: mol_type = other DNA
gtgccaggagacaggcagat

SEQ ID NO: 121133 - DNA, 20 bp, synthetic construct
  source 1..20: mol_type = other DNA
ggtgccaggagacaggcaga

SEQ ID NO: 121134 - DNA, 20 bp, synthetic construct
  source 1..20: mol_type = other DNA
gggtgccaggagacaggcag

SEQ ID NO: 121135 - DNA, 20 bp, synthetic construct
  source 1..20: mol_type = other DNA
agggtgccaggagacaggca

SEQ ID NO: 121136 - DNA, 20 bp, synthetic construct
  source 1..20: mol_type = other DNA
cagggtgccaggagacaggc

SEQ ID NO: 121137 - DNA, 20 bp, synthetic construct
  source 1..20: mol_type = other DNA
ccagggtgccaggagacagg

SEQ ID NO: 121138 - DNA, 20 bp, synthetic construct
  source 1..20: mol_type = other DNA
cccagggtgccaggagacag

SEQ ID NO: 121139 - DNA, 20 bp, synthetic construct
  source 1..20: mol_type = other DNA
tcccagggtgccaggagaca

SEQ ID NO: 121140 - DNA, 20 bp, synthetic construct
  source 1..20: mol_type = other DNA
ctcccagggtgccaggagac

SEQ ID NO: 121141 - DNA, 20 bp, synthetic construct
  source 1..20: mol_type = other DNA
cctcccagggtgccaggaga

SEQ ID NO: 121142 - DNA, 20 bp, synthetic construct
  source 1..20: mol_type = other DNA
gcctcccagggtgccaggag

SEQ ID NO: 121143 - DNA, 20 bp, synthetic construct
  source 1..20: mol_type = other DNA
agcctcccagggtgccagga

SEQ ID NO: 121144 - DNA, 20 bp, synthetic construct
  source 1..20: mol_type = other DNA
cagcctcccagggtgccagg

SEQ ID NO: 121145 - DNA, 20 bp, synthetic construct
  source 1..20: mol_type = other DNA
tcagcctcccagggtgccag

SEQ ID NO: 121146 - DNA, 20 bp, synthetic construct
  source 1..20: mol_type = other DNA
ctcagcctcccagggtgcca

SEQ ID NO: 121147 - DNA, 20 bp, synthetic construct
  source 1..20: mol_type = other DNA
tctcagcctcccagggtgcc

SEQ ID NO: 121148 - DNA, 20 bp, synthetic construct
  source 1..20: mol_type = other DNA
ctctcagcctcccagggtgc

SEQ ID NO: 121149 - DNA, 20 bp, synthetic construct
  source 1..20: mol_type = other DNA
cctctcagcctcccagggtg

SEQ ID NO: 121150 - DNA, 20 bp, synthetic construct
  source 1..20: mol_type = other DNA
gcctctcagcctcccagggt

SEQ ID NO: 121151 - DNA, 20 bp, synthetic construct
  source 1..20: mol_type = other DNA
agcctctcagcctcccaggg

SEQ ID NO: 121152 - DNA, 20 bp, synthetic construct
  source 1..20: mol_type = other DNA
cagcctctcagcctcccagg

SEQ ID NO: 121153 - DNA, 20 bp, synthetic construct
  source 1..20: mol_type = other DNA
tcagcctctcagcctcccag

SEQ ID NO: 121154 - DNA, 20 bp, synthetic construct
  source 1..20: mol_type = other DNA
ctcagcctctcagcctccca

SEQ ID NO: 121155 - DNA, 20 bp, synthetic construct
  source 1..20: mol_type = other DNA
cctcagcctctcagcctccc

SEQ ID NO: 121156 - DNA, 20 bp, synthetic construct
  source 1..20: mol_type = other DNA
acctcagcctctcagcctcc

SEQ ID NO: 121157 - DNA, 20 bp, synthetic construct
  source 1..20: mol_type = other DNA
cacctcagcctctcagcctc

SEQ ID NO: 121158 - DNA, 20 bp, synthetic construct
  source 1..20: mol_type = other DNA
ccacctcagcctctcagcct

SEQ ID NO: 121159 - DNA, 20 bp, synthetic construct
  source 1..20: mol_type = other DNA
cccacctcagcctctcagcc

SEQ ID NO: 121160 - DNA, 20 bp, synthetic construct
  source 1..20: mol_type = other DNA
tcccacctcagcctctcagc

SEQ ID NO: 121161 - DNA, 20 bp, synthetic construct
  source 1..20: mol_type = other DNA
ctcccacctcagcctctcag

SEQ ID NO: 121162 - DNA, 20 bp, synthetic construct
  source 1..20: mol_type = other DNA
cctcccacctcagcctctca

SEQ ID NO: 121163 - DNA, 20 bp, synthetic construct
  source 1..20: mol_type = other DNA
tcctcccacctcagcctctc

SEQ ID NO: 121164 - DNA, 20 bp, synthetic construct
  source 1..20: mol_type = other DNA
atcctcccacctcagcctct

SEQ ID NO: 121165 - DNA, 20 bp, synthetic construct
  source 1..20: mol_type = other DNA
gatcctcccacctcagcctc

SEQ ID NO: 121166 - DNA, 20 bp, synthetic construct
  source 1..20: mol_type = other DNA
tgatcctcccacctcagcct

SEQ ID NO: 121167 - DNA, 20 bp, synthetic construct
  source 1..20: mol_type = other DNA
gtgatcctcccacctcagcc

SEQ ID NO: 121168 - DNA, 20 bp, synthetic construct
  source 1..20: mol_type = other DNA
agtgatcctcccacctcagc

SEQ ID NO: 121169 - DNA, 20 bp, synthetic construct
  source 1..20: mol_type = other DNA
aagtgatcctcccacctcag

SEQ ID NO: 121170 - DNA, 20 bp, synthetic construct
  source 1..20: mol_type = other DNA
caagtgatcctcccacctca

SEQ ID NO: 121171 - DNA, 20 bp, synthetic construct
  source 1..20: mol_type = other DNA
tcaagtgatcctcccacctc

SEQ ID NO: 121172 - DNA, 20 bp, synthetic construct
  source 1..20: mol_type = other DNA
ctcaagtgatcctcccacct

SEQ ID NO: 121173 - DNA, 20 bp, synthetic construct
  source 1..20: mol_type = other DNA
gctcaagtgatcctcccacc

SEQ ID NO: 121174 - DNA, 20 bp, synthetic construct
  source 1..20: mol_type = other DNA
agctcaagtgatcctcccac

SEQ ID NO: 121175 - DNA, 20 bp, synthetic construct
  source 1..20: mol_type = other DNA
gagctcaagtgatcctccca

SEQ ID NO: 121176 - DNA, 20 bp, synthetic construct
  source 1..20: mol_type = other DNA
tgagctcaagtgatcctccc

SEQ ID NO: 121177 - DNA, 20 bp, synthetic construct
  source 1..20: mol_type = other DNA
ctgagctcaagtgatcctcc

SEQ ID NO: 121178 - DNA, 20 bp, synthetic construct
  source 1..20: mol_type = other DNA
cctgagctcaagtgatcctc

SEQ ID NO: 121179 - DNA, 20 bp, synthetic construct
  source 1..20: mol_type = other DNA
tcctgagctcaagtgatcct

SEQ ID NO: 121180 - DNA, 20 bp, synthetic construct
  source 1..20: mol_type = other DNA
ctcctgagctcaagtgatcc

SEQ ID NO: 121181 - DNA, 20 bp, synthetic construct
  source 1..20: mol_type = other DNA
actcctgagctcaagtgatc

SEQ ID NO: 121182 - DNA, 20 bp, synthetic construct
  source 1..20: mol_type = other DNA
aactcctgagctcaagtgat

SEQ ID NO: 121183 - DNA, 20 bp, synthetic construct
  source 1..20: mol_type = other DNA
aaactcctgagctcaagtga

SEQ ID NO: 121184 - DNA, 20 bp, synthetic construct
  source 1..20: mol_type = other DNA
caaactcctgagctcaagtg

SEQ ID NO: 121185 - DNA, 20 bp, synthetic construct
  source 1..20: mol_type = other DNA
tcaaactcctgagctcaagt

SEQ ID NO: 121186 - DNA, 20 bp, synthetic construct
  source 1..20: mol_type = other DNA
ctcaaactcctgagctcaag

SEQ ID NO: 121187 - DNA, 20 bp, synthetic construct
  source 1..20: mol_type = other DNA
tctcaaactcctgagctcaa

SEQ ID NO: 121188 - DNA, 20 bp, synthetic construct
  source 1..20: mol_type = other DNA
gtctcaaactcctgagctca

SEQ ID NO: 121189 - DNA, 20 bp, synthetic construct
  source 1..20: mol_type = other DNA
ggtctcaaactcctgagctc

SEQ ID NO: 121190 - DNA, 20 bp, synthetic construct
  source 1..20: mol_type = other DNA
tggtctcaaactcctgagct

SEQ ID NO: 121191 - DNA, 20 bp, synthetic construct
  source 1..20: mol_type = other DNA
ctggtctcaaactcctgagc

SEQ ID NO: 121192 - DNA, 20 bp, synthetic construct
  source 1..20: mol_type = other DNA
gctggtctcaaactcctgag

SEQ ID NO: 121193 - DNA, 20 bp, synthetic construct
  source 1..20: mol_type = other DNA
ggctggtctcaaactcctga

SEQ ID NO: 121194 - DNA, 20 bp, synthetic construct
  source 1..20: mol_type = other DNA
aggctggtctcaaactcctg

SEQ ID NO: 121195 - DNA, 20 bp, synthetic construct
  source 1..20: mol_type = other DNA
caggctggtctcaaactcct

SEQ ID NO: 121196 - DNA, 20 bp, synthetic construct
  source 1..20: mol_type = other DNA
acaggctggtctcaaactcc

SEQ ID NO: 121197 - DNA, 20 bp, synthetic construct
  source 1..20: mol_type = other DNA
tacaggctggtctcaaactc

SEQ ID NO: 121198 - DNA, 20 bp, synthetic construct
  source 1..20: mol_type = other DNA
gtacaggctggtctcaaact

SEQ ID NO: 121199 - DNA, 20 bp, synthetic construct
  source 1..20: mol_type = other DNA
ggtacaggctggtctcaaac

SEQ ID NO: 121200 - DNA, 20 bp, synthetic construct
  source 1..20: mol_type = other DNA
tggtacaggctggtctcaaa

SEQ ID NO: 121201 - DNA, 20 bp, synthetic construct
  source 1..20: mol_type = other DNA
atggtacaggctggtctcaa

SEQ ID NO: 121202 - DNA, 20 bp, synthetic construct
  source 1..20: mol_type = other DNA
aatggtacaggctggtctca

SEQ ID NO: 121203 - DNA, 20 bp, synthetic construct
  source 1..20: mol_type = other DNA
taatggtacaggctggtctc

SEQ ID NO: 121204 - DNA, 20 bp, synthetic construct
  source 1..20: mol_type = other DNA
ataatggtacaggctggtct

SEQ ID NO: 121205 - DNA, 20 bp, synthetic construct
  source 1..20: mol_type = other DNA
cataatggtacaggctggtc

SEQ ID NO: 121206 - DNA, 20 bp, synthetic construct
  source 1..20: mol_type = other DNA
gcataatggtacaggctggt

SEQ ID NO: 121207 - DNA, 20 bp, synthetic construct
  source 1..20: mol_type = other DNA
ggcataatggtacaggctgg

SEQ ID NO: 121208 - DNA, 20 bp, synthetic construct
  source 1..20: mol_type = other DNA
aggcataatggtacaggctg

SEQ ID NO: 121209 - DNA, 20 bp, synthetic construct
  source 1..20: mol_type = other DNA
caggcataatggtacaggct

SEQ ID NO: 121210 - DNA, 20 bp, synthetic construct
  source 1..20: mol_type = other DNA
ccaggcataatggtacaggc

SEQ ID NO: 121211 - DNA, 20 bp, synthetic construct
  source 1..20: mol_type = other DNA
gccaggcataatggtacagg

SEQ ID NO: 121212 - DNA, 20 bp, synthetic construct
  source 1..20: mol_type = other DNA
agccaggcataatggtacag

SEQ ID NO: 121213 - DNA, 20 bp, synthetic construct
  source 1..20: mol_type = other DNA
tagccaggcataatggtaca

SEQ ID NO: 121214 - DNA, 20 bp, synthetic construct
  source 1..20: mol_type = other DNA
ttagccaggcataatggtac

SEQ ID NO: 121215 - DNA, 20 bp, synthetic construct
  source 1..20: mol_type = other DNA
attagccaggcataatggta

SEQ ID NO: 121216 - DNA, 20 bp, synthetic construct
  source 1..20: mol_type = other DNA
aattagccaggcataatggt

SEQ ID NO: 121217 - DNA, 20 bp, synthetic construct
  source 1..20: mol_type = other DNA
aaattagccaggcataatgg

SEQ ID NO: 121218 - DNA, 20 bp, synthetic construct
  source 1..20: mol_type = other DNA
aaaattagccaggcataatg

SEQ ID NO: 121219 - DNA, 20 bp, synthetic construct
  source 1..20: mol_type = other DNA
taaaattagccaggcataat

SEQ ID NO: 121220 - DNA, 20 bp, synthetic construct
  source 1..20: mol_type = other DNA
ctaaaattagccaggcataa

SEQ ID NO: 121221 - DNA, 20 bp, synthetic construct
  source 1..20: mol_type = other DNA
tctaaaattagccaggcata

SEQ ID NO: 121222 - DNA, 20 bp, synthetic construct
  source 1..20: mol_type = other DNA
ttctaaaattagccaggcat

SEQ ID NO: 121223 - DNA, 20 bp, synthetic construct
  source 1..20: mol_type = other DNA
attctaaaattagccaggca

SEQ ID NO: 121224 - DNA, 20 bp, synthetic construct
  source 1..20: mol_type = other DNA
aattctaaaattagccaggc

SEQ ID NO: 121225 - DNA, 20 bp, synthetic construct
  source 1..20: mol_type = other DNA
aaattctaaaattagccagg

SEQ ID NO: 121226 - DNA, 20 bp, synthetic construct
  source 1..20: mol_type = other DNA
taaattctaaaattagccag

SEQ ID NO: 121227 - DNA, 20 bp, synthetic construct
  source 1..20: mol_type = other DNA
ataaattctaaaattagcca

SEQ ID NO: 121228 - DNA, 20 bp, synthetic construct
  source 1..20: mol_type = other DNA
gataaattctaaaattagcc

SEQ ID NO: 121229 - DNA, 20 bp, synthetic construct
  source 1..20: mol_type = other DNA
agataaattctaaaattagc

SEQ ID NO: 121230 - DNA, 20 bp, synthetic construct
  source 1..20: mol_type = other DNA
aagataaattctaaaattag

SEQ ID NO: 121231 - DNA, 20 bp, synthetic construct
  source 1..20: mol_type = other DNA
taagataaattctaaaatta

SEQ ID NO: 121232 - DNA, 20 bp, synthetic construct
  source 1..20: mol_type = other DNA
ttaagataaattctaaaatt

SEQ ID NO: 121233 - DNA, 20 bp, synthetic construct
  source 1..20: mol_type = other DNA
tttaagataaattctaaaat

SEQ ID NO: 121234 - DNA, 20 bp, synthetic construct
  source 1..20: mol_type = other DNA
ctttaagataaattctaaaa

SEQ ID NO: 121235 - DNA, 20 bp, synthetic construct
  source 1..20: mol_type = other DNA
actttaagataaattctaaa

SEQ ID NO: 121236 - DNA, 20 bp, synthetic construct
  source 1..20: mol_type = other DNA
tactttaagataaattctaa

SEQ ID NO: 121237 - DNA, 20 bp, synthetic construct
  source 1..20: mol_type = other DNA
atactttaagataaattcta

SEQ ID NO: 121238 - DNA, 20 bp, synthetic construct
  source 1..20: mol_type = other DNA
tatactttaagataaattct

SEQ ID NO: 121239 - DNA, 20 bp, synthetic construct
  source 1..20: mol_type = other DNA
ttatactttaagataaattc

SEQ ID NO: 121240 - DNA, 20 bp, synthetic construct
  source 1..20: mol_type = other DNA
tttatactttaagataaatt

SEQ ID NO: 121241 - DNA, 20 bp, synthetic construct
  source 1..20: mol_type = other DNA
ttttatactttaagataaat

SEQ ID NO: 121242 - DNA, 20 bp, synthetic construct
  source 1..20: mol_type = other DNA
attttatactttaagataaa

SEQ ID NO: 121243 - DNA, 20 bp, synthetic construct
  source 1..20: mol_type = other DNA
cattttatactttaagataa

SEQ ID NO: 121244 - DNA, 20 bp, synthetic construct
  source 1..20: mol_type = other DNA
acattttatactttaagata

SEQ ID NO: 121245 - DNA, 20 bp, synthetic construct
  source 1..20: mol_type = other DNA
cacattttatactttaagat

SEQ ID NO: 121246 - DNA, 20 bp, synthetic construct
  source 1..20: mol_type = other DNA
tcacattttatactttaaga

SEQ ID NO: 121247 - DNA, 20 bp, synthetic construct
  source 1..20: mol_type = other DNA
ttcacattttatactttaag

SEQ ID NO: 121248 - DNA, 20 bp, synthetic construct
  source 1..20: mol_type = other DNA
attcacattttatactttaa

SEQ ID NO: 121249 - DNA, 20 bp, synthetic construct
  source 1..20: mol_type = other DNA
gattcacattttatacttta

SEQ ID NO: 121250 - DNA, 20 bp, synthetic construct
  source 1..20: mol_type = other DNA
ggattcacattttatacttt

SEQ ID NO: 121251 - DNA, 20 bp, synthetic construct
  source 1..20: mol_type = other DNA
tggattcacattttatactt

SEQ ID NO: 121252 - DNA, 20 bp, synthetic construct
  source 1..20: mol_type = other DNA
ttggattcacattttatact

SEQ ID NO: 121253 - DNA, 20 bp, synthetic construct
  source 1..20: mol_type = other DNA
attggattcacattttatac

SEQ ID NO: 121254 - DNA, 20 bp, synthetic construct
  source 1..20: mol_type = other DNA
aattggattcacattttata

SEQ ID NO: 121255 - DNA, 20 bp, synthetic construct
  source 1..20: mol_type = other DNA
aaattggattcacattttat

SEQ ID NO: 121256 - DNA, 20 bp, synthetic construct
  source 1..20: mol_type = other DNA
taaattggattcacatttta

SEQ ID NO: 121257 - DNA, 20 bp, synthetic construct
  source 1..20: mol_type = other DNA
ataaattggattcacatttt

SEQ ID NO: 121258 - DNA, 20 bp, synthetic construct
  source 1..20: mol_type = other DNA
gataaattggattcacattt

SEQ ID NO: 121259 - DNA, 20 bp, synthetic construct
  source 1..20: mol_type = other DNA
agataaattggattcacatt

SEQ ID NO: 121260 - DNA, 20 bp, synthetic construct
  source 1..20: mol_type = other DNA
aagataaattggattcacat

SEQ ID NO: 121261 - DNA, 20 bp, synthetic construct
  source 1..20: mol_type = other DNA
caagataaattggattcaca

SEQ ID NO: 121262 - DNA, 20 bp, synthetic construct
  source 1..20: mol_type = other DNA
acaagataaattggattcac

SEQ ID NO: 121263 - DNA, 20 bp, synthetic construct
  source 1..20: mol_type = other DNA
aacaagataaattggattca

SEQ ID NO: 121264 - DNA, 20 bp, synthetic construct
  source 1..20: mol_type = other DNA
gaacaagataaattggattc

SEQ ID NO: 121265 - DNA, 20 bp, synthetic construct
  source 1..20: mol_type = other DNA
agaacaagataaattggatt

SEQ ID NO: 121266 - DNA, 20 bp, synthetic construct
  source 1..20: mol_type = other DNA
tagaacaagataaattggat

SEQ ID NO: 121267 - DNA, 20 bp, synthetic construct
  source 1..20: mol_type = other DNA
ttagaacaagataaattgga

SEQ ID NO: 121268 - DNA, 20 bp, synthetic construct
  source 1..20: mol_type = other DNA
tttagaacaagataaattgg

SEQ ID NO: 121269 - DNA, 20 bp, synthetic construct
  source 1..20: mol_type = other DNA
atttagaacaagataaattg

SEQ ID NO: 121270 - DNA, 20 bp, synthetic construct
  source 1..20: mol_type = other DNA
catttagaacaagataaatt

SEQ ID NO: 121271 - DNA, 20 bp, synthetic construct
  source 1..20: mol_type = other DNA
tcatttagaacaagataaat

SEQ ID NO: 121272 - DNA, 20 bp, synthetic construct
  source 1..20: mol_type = other DNA
gtcatttagaacaagataaa

SEQ ID NO: 121273 - DNA, 20 bp, synthetic construct
  source 1..20: mol_type = other DNA
agtcatttagaacaagataa

SEQ ID NO: 121274 - DNA, 20 bp, synthetic construct
  source 1..20: mol_type = other DNA
tagtcatttagaacaagata

SEQ ID NO: 121275 - DNA, 20 bp, synthetic construct
  source 1..20: mol_type = other DNA
atagtcatttagaacaagat

SEQ ID NO: 121276 - DNA, 20 bp, synthetic construct
  source 1..20: mol_type = other DNA
gatagtcatttagaacaaga

SEQ ID NO: 121277 - DNA, 20 bp, synthetic construct
  source 1..20: mol_type = other DNA
ggatagtcatttagaacaag

SEQ ID NO: 121278 - DNA, 20 bp, synthetic construct
  source 1..20: mol_type = other DNA
tggatagtcatttagaacaa

SEQ ID NO: 121279 - DNA, 20 bp, synthetic construct
  source 1..20: mol_type = other DNA
ttggatagtcatttagaaca

SEQ ID NO: 121280 - DNA, 20 bp, synthetic construct
  source 1..20: mol_type = other DNA
tttggatagtcatttagaac

SEQ ID NO: 121281 - DNA, 20 bp, synthetic construct
  source 1..20: mol_type = other DNA
ttttggatagtcatttagaa

SEQ ID NO: 121282 - DNA, 20 bp, synthetic construct
  source 1..20: mol_type = other DNA
attttggatagtcatttaga

SEQ ID NO: 121283 - DNA, 20 bp, synthetic construct
  source 1..20: mol_type = other DNA
cattttggatagtcatttag

SEQ ID NO: 121284 - DNA, 20 bp, synthetic construct
  source 1..20: mol_type = other DNA
acattttggatagtcattta

SEQ ID NO: 121285 - DNA, 20 bp, synthetic construct
  source 1..20: mol_type = other DNA
aacattttggatagtcattt

SEQ ID NO: 121286 - DNA, 20 bp, synthetic construct
  source 1..20: mol_type = other DNA
aaacattttggatagtcatt

SEQ ID NO: 121287 - DNA, 20 bp, synthetic construct
  source 1..20: mol_type = other DNA
aaaacattttggatagtcat

SEQ ID NO: 121288 - DNA, 20 bp, synthetic construct
  source 1..20: mol_type = other DNA
taaaacattttggatagtca

SEQ ID NO: 121289 - DNA, 20 bp, synthetic construct
  source 1..20: mol_type = other DNA
ttaaaacattttggatagtc

SEQ ID NO: 121290 - DNA, 20 bp, synthetic construct
  source 1..20: mol_type = other DNA
gttaaaacattttggatagt

SEQ ID NO: 121291 - DNA, 20 bp, synthetic construct
  source 1..20: mol_type = other DNA
ggttaaaacattttggatag

SEQ ID NO: 121292 - DNA, 20 bp, synthetic construct
  source 1..20: mol_type = other DNA
tggttaaaacattttggata

SEQ ID NO: 121293 - DNA, 20 bp, synthetic construct
  source 1..20: mol_type = other DNA
ctggttaaaacattttggat

SEQ ID NO: 121294 - DNA, 20 bp, synthetic construct
  source 1..20: mol_type = other DNA
actggttaaaacattttgga

SEQ ID NO: 121295 - DNA, 20 bp, synthetic construct
  source 1..20: mol_type = other DNA
aactggttaaaacattttgg

SEQ ID NO: 121296 - DNA, 20 bp, synthetic construct
  source 1..20: mol_type = other DNA
aaactggttaaaacattttg

SEQ ID NO: 121297 - DNA, 20 bp, synthetic construct
  source 1..20: mol_type = other DNA
aaaactggttaaaacatttt

SEQ ID NO: 121298 - DNA, 20 bp, synthetic construct
  source 1..20: mol_type = other DNA
taaaactggttaaaacattt

SEQ ID NO: 121299 - DNA, 20 bp, synthetic construct
  source 1..20: mol_type = other DNA
ataaaactggttaaaacatt

SEQ ID NO: 121300 - DNA, 20 bp, synthetic construct
  source 1..20: mol_type = other DNA
aataaaactggttaaaacat

SEQ ID NO: 121301 - DNA, 20 bp, synthetic construct
  source 1..20: mol_type = other DNA
taataaaactggttaaaaca

SEQ ID NO: 121302 - DNA, 20 bp, synthetic construct
  source 1..20: mol_type = other DNA
ctaataaaactggttaaaac

SEQ ID NO: 121303 - DNA, 20 bp, synthetic construct
  source 1..20: mol_type = other DNA
actaataaaactggttaaaa

SEQ ID NO: 121304 - DNA, 20 bp, synthetic construct
  source 1..20: mol_type = other DNA
gactaataaaactggttaaa

SEQ ID NO: 121305 - DNA, 20 bp, synthetic construct
  source 1..20: mol_type = other DNA
agactaataaaactggttaa

SEQ ID NO: 121306 - DNA, 20 bp, synthetic construct
  source 1..20: mol_type = other DNA
cagactaataaaactggtta

SEQ ID NO: 121307 - DNA, 20 bp, synthetic construct
  source 1..20: mol_type = other DNA
acagactaataaaactggtt

SEQ ID NO: 121308 - DNA, 20 bp, synthetic construct
  source 1..20: mol_type = other DNA
tacagactaataaaactggt

SEQ ID NO: 121309 - DNA, 20 bp, synthetic construct
  source 1..20: mol_type = other DNA
ttacagactaataaaactgg

SEQ ID NO: 121310 - DNA, 20 bp, synthetic construct
  source 1..20: mol_type = other DNA
attacagactaataaaactg

SEQ ID NO: 121311 - DNA, 20 bp, synthetic construct
  source 1..20: mol_type = other DNA
aattacagactaataaaact

SEQ ID NO: 121312 - DNA, 20 bp, synthetic construct
  source 1..20: mol_type = other DNA
aaattacagactaataaaac

SEQ ID NO: 121313 - DNA, 20 bp, synthetic construct
  source 1..20: mol_type = other DNA
taaattacagactaataaaa

SEQ ID NO: 121314 - DNA, 20 bp, synthetic construct
  source 1..20: mol_type = other DNA
gtaaattacagactaataaa

SEQ ID NO: 121315 - DNA, 20 bp, synthetic construct
  source 1..20: mol_type = other DNA
tgtaaattacagactaataa

SEQ ID NO: 121316 - DNA, 20 bp, synthetic construct
  source 1..20: mol_type = other DNA
atgtaaattacagactaata

SEQ ID NO: 121317 - DNA, 20 bp, synthetic construct
  source 1..20: mol_type = other DNA
tatgtaaattacagactaat

SEQ ID NO: 121318 - DNA, 20 bp, synthetic construct
  source 1..20: mol_type = other DNA
gtatgtaaattacagactaa

SEQ ID NO: 121319 - DNA, 20 bp, synthetic construct
  source 1..20: mol_type = other DNA
tgtatgtaaattacagacta

SEQ ID NO: 121320 - DNA, 20 bp, synthetic construct
  source 1..20: mol_type = other DNA
ttgtatgtaaattacagact

SEQ ID NO: 121321 - DNA, 20 bp, synthetic construct
  source 1..20: mol_type = other DNA
cttgtatgtaaattacagac

SEQ ID NO: 121322 - DNA, 20 bp, synthetic construct
  source 1..20: mol_type = other DNA
tcttgtatgtaaattacaga

SEQ ID NO: 121323 - DNA, 20 bp, synthetic construct
  source 1..20: mol_type = other DNA
ttcttgtatgtaaattacag

SEQ ID NO: 121324 - DNA, 20 bp, synthetic construct
  source 1..20: mol_type = other DNA
tttcttgtatgtaaattaca

SEQ ID NO: 121325 - DNA, 20 bp, synthetic construct
  source 1..20: mol_type = other DNA
ttttcttgtatgtaaattac

SEQ ID NO: 121326 - DNA, 20 bp, synthetic construct
  source 1..20: mol_type = other DNA
attttcttgtatgtaaatta

SEQ ID NO: 121327 - DNA, 20 bp, synthetic construct
  source 1..20: mol_type = other DNA
cattttcttgtatgtaaatt

SEQ ID NO: 121328 - DNA, 20 bp, synthetic construct
  source 1..20: mol_type = other DNA
gcattttcttgtatgtaaat

SEQ ID NO: 121329 - DNA, 20 bp, synthetic construct
  source 1..20: mol_type = other DNA
agcattttcttgtatgtaaa

SEQ ID NO: 121330 - DNA, 20 bp, synthetic construct
  source 1..20: mol_type = other DNA
gagcattttcttgtatgtaa

SEQ ID NO: 121331 - DNA, 20 bp, synthetic construct
  source 1..20: mol_type = other DNA
tgagcattttcttgtatgta

SEQ ID NO: 121332 - DNA, 20 bp, synthetic construct
  source 1..20: mol_type = other DNA
atgagcattttcttgtatgt

SEQ ID NO: 121333 - DNA, 20 bp, synthetic construct
  source 1..20: mol_type = other DNA
gatgagcattttcttgtatg

SEQ ID NO: 121334 - DNA, 20 bp, synthetic construct
  source 1..20: mol_type = other DNA
agatgagcattttcttgtat

SEQ ID NO: 121335 - DNA, 20 bp, synthetic construct
  source 1..20: mol_type = other DNA
aagatgagcattttcttgta

SEQ ID NO: 121336 - DNA, 20 bp, synthetic construct
  source 1..20: mol_type = other DNA
aaagatgagcattttcttgt

SEQ ID NO: 121337 - DNA, 20 bp, synthetic construct
  source 1..20: mol_type = other DNA
aaaagatgagcattttcttg

SEQ ID NO: 121338 - DNA, 20 bp, synthetic construct
  source 1..20: mol_type = other DNA
aaaaagatgagcattttctt

SEQ ID NO: 121339 - DNA, 20 bp, synthetic construct
  source 1..20: mol_type = other DNA
taaaaagatgagcattttct

SEQ ID NO: 121340 - DNA, 20 bp, synthetic construct
  source 1..20: mol_type = other DNA
ataaaaagatgagcattttc

SEQ ID NO: 121341 - DNA, 20 bp, synthetic construct
  source 1..20: mol_type = other DNA
cataaaaagatgagcatttt

SEQ ID NO: 121342 - DNA, 20 bp, synthetic construct
  source 1..20: mol_type = other DNA
acataaaaagatgagcattt

SEQ ID NO: 121343 - DNA, 20 bp, synthetic construct
  source 1..20: mol_type = other DNA
aacataaaaagatgagcatt

SEQ ID NO: 121344 - DNA, 20 bp, synthetic construct
  source 1..20: mol_type = other DNA
aaacataaaaagatgagcat

SEQ ID NO: 121345 - DNA, 20 bp, synthetic construct
  source 1..20: mol_type = other DNA
taaacataaaaagatgagca

SEQ ID NO: 121346 - DNA, 20 bp, synthetic construct
  source 1..20: mol_type = other DNA
gtaaacataaaaagatgagc

SEQ ID NO: 121347 - DNA, 20 bp, synthetic construct
  source 1..20: mol_type = other DNA
tgtaaacataaaaagatgag

SEQ ID NO: 121348 - DNA, 20 bp, synthetic construct
  source 1..20: mol_type = other DNA
atgtaaacataaaaagatga

SEQ ID NO: 121349 - DNA, 20 bp, synthetic construct
  source 1..20: mol_type = other DNA
aatgtaaacataaaaagatg

SEQ ID NO: 121350 - DNA, 20 bp, synthetic construct
  source 1..20: mol_type = other DNA
aaatgtaaacataaaaagat

SEQ ID NO: 121351 - DNA, 20 bp, synthetic construct
  source 1..20: mol_type = other DNA
aaaatgtaaacataaaaaga

SEQ ID NO: 121352 - DNA, 20 bp, synthetic construct
  source 1..20: mol_type = other DNA
taaaatgtaaacataaaaag

SEQ ID NO: 121353 - DNA, 20 bp, synthetic construct
  source 1..20: mol_type = other DNA
ttaaaatgtaaacataaaaa

SEQ ID NO: 121354 - DNA, 20 bp, synthetic construct
  source 1..20: mol_type = other DNA
attaaaatgtaaacataaaa

SEQ ID NO: 121355 - DNA, 20 bp, synthetic construct
  source 1..20: mol_type = other DNA
cattaaaatgtaaacataaa

SEQ ID NO: 121356 - DNA, 20 bp, synthetic construct
  source 1..20: mol_type = other DNA
tcattaaaatgtaaacataa

SEQ ID NO: 121357 - DNA, 20 bp, synthetic construct
  source 1..20: mol_type = other DNA
ctcattaaaatgtaaacata

SEQ ID NO: 121358 - DNA, 20 bp, synthetic construct
  source 1..20: mol_type = other DNA
actcattaaaatgtaaacat

SEQ ID NO: 121359 - DNA, 20 bp, synthetic construct
  source 1..20: mol_type = other DNA
aactcattaaaatgtaaaca

SEQ ID NO: 121360 - DNA, 20 bp, synthetic construct
  source 1..20: mol_type = other DNA
aaactcattaaaatgtaaac

SEQ ID NO: 121361 - DNA, 20 bp, synthetic construct
  source 1..20: mol_type = other DNA
aaaactcattaaaatgtaaa

SEQ ID NO: 121362 - DNA, 20 bp, synthetic construct
  source 1..20: mol_type = other DNA
caaaactcattaaaatgtaa

SEQ ID NO: 121363 - DNA, 20 bp, synthetic construct
  source 1..20: mol_type = other DNA
tcaaaactcattaaaatgta

SEQ ID NO: 121364 - DNA, 20 bp, synthetic construct
  source 1..20: mol_type = other DNA
gtcaaaactcattaaaatgt

SEQ ID NO: 121365 - DNA, 20 bp, synthetic construct
  source 1..20: mol_type = other DNA
tgtcaaaactcattaaaatg

SEQ ID NO: 121366 - DNA, 20 bp, synthetic construct
  source 1..20: mol_type = other DNA
ttgtcaaaactcattaaaat

SEQ ID NO: 121367 - DNA, 20 bp, synthetic construct
  source 1..20: mol_type = other DNA
tttgtcaaaactcattaaaa

SEQ ID NO: 121368 - DNA, 20 bp, synthetic construct
  source 1..20: mol_type = other DNA
atttgtcaaaactcattaaa

SEQ ID NO: 121369 - DNA, 20 bp, synthetic construct
  source 1..20: mol_type = other DNA
tatttgtcaaaactcattaa

SEQ ID NO: 121370 - DNA, 20 bp, synthetic construct
  source 1..20: mol_type = other DNA
atatttgtcaaaactcatta

SEQ ID NO: 121371 - DNA, 20 bp, synthetic construct
  source 1..20: mol_type = other DNA
tatatttgtcaaaactcatt

SEQ ID NO: 121372 - DNA, 20 bp, synthetic construct
  source 1..20: mol_type = other DNA
atatatttgtcaaaactcat

SEQ ID NO: 121373 - DNA, 20 bp, synthetic construct
  source 1..20: mol_type = other DNA
aatatatttgtcaaaactca

SEQ ID NO: 121374 - DNA, 20 bp, synthetic construct
  source 1..20: mol_type = other DNA
aaatatatttgtcaaaactc

SEQ ID NO: 121375 - DNA, 20 bp, synthetic construct
  source 1..20: mol_type = other DNA
caaatatatttgtcaaaact

SEQ ID NO: 121376 - DNA, 20 bp, synthetic construct
  source 1..20: mol_type = other DNA
gcaaatatatttgtcaaaac

SEQ ID NO: 121377 - DNA, 20 bp, synthetic construct
  source 1..20: mol_type = other DNA
agcaaatatatttgtcaaaa

SEQ ID NO: 121378 - DNA, 20 bp, synthetic construct
  source 1..20: mol_type = other DNA
gagcaaatatatttgtcaaa

SEQ ID NO: 121379 - DNA, 20 bp, synthetic construct
  source 1..20: mol_type = other DNA
tgagcaaatatatttgtcaa

SEQ ID NO: 121380 - DNA, 20 bp, synthetic construct
  source 1..20: mol_type = other DNA
atgagcaaatatatttgtca

SEQ ID NO: 121381 - DNA, 20 bp, synthetic construct
  source 1..20: mol_type = other DNA
catgagcaaatatatttgtc

SEQ ID NO: 121382 - DNA, 20 bp, synthetic construct
  source 1..20: mol_type = other DNA
acatgagcaaatatatttgt

SEQ ID NO: 121383 - DNA, 20 bp, synthetic construct
  source 1..20: mol_type = other DNA
tacatgagcaaatatatttg

SEQ ID NO: 121384 - DNA, 20 bp, synthetic construct
  source 1..20: mol_type = other DNA
ttacatgagcaaatatattt

SEQ ID NO: 121385 - DNA, 20 bp, synthetic construct
  source 1..20: mol_type = other DNA
gttacatgagcaaatatatt

SEQ ID NO: 121386 - DNA, 20 bp, synthetic construct
  source 1..20: mol_type = other DNA
agttacatgagcaaatatat

SEQ ID NO: 121387 - DNA, 20 bp, synthetic construct
  source 1..20: mol_type = other DNA
tagttacatgagcaaatata

SEQ ID NO: 121388 - DNA, 20 bp, synthetic construct
  source 1..20: mol_type = other DNA
gtagttacatgagcaaatat

SEQ ID NO: 121389 - DNA, 20 bp, synthetic construct
  source 1..20: mol_type = other DNA
agtagttacatgagcaaata

SEQ ID NO: 121390 - DNA, 20 bp, synthetic construct
  source 1..20: mol_type = other DNA
aagtagttacatgagcaaat

SEQ ID NO: 121391 - DNA, 20 bp, synthetic construct
  source 1..20: mol_type = other DNA
caagtagttacatgagcaaa

SEQ ID NO: 121392 - DNA, 20 bp, synthetic construct
  source 1..20: mol_type = other DNA
gcaagtagttacatgagcaa

SEQ ID NO: 121393 - DNA, 20 bp, synthetic construct
  source 1..20: mol_type = other DNA
agcaagtagttacatgagca

SEQ ID NO: 121394 - DNA, 20 bp, synthetic construct
  source 1..20: mol_type = other DNA
aagcaagtagttacatgagc

SEQ ID NO: 121395 - DNA, 20 bp, synthetic construct
  source 1..20: mol_type = other DNA
gaagcaagtagttacatgag

SEQ ID NO: 121396 - DNA, 20 bp, synthetic construct
  source 1..20: mol_type = other DNA
tgaagcaagtagttacatga

SEQ ID NO: 121397 - DNA, 20 bp, synthetic construct
  source 1..20: mol_type = other DNA
atgaagcaagtagttacatg

SEQ ID NO: 121398 - DNA, 20 bp, synthetic construct
  source 1..20: mol_type = other DNA
gatgaagcaagtagttacat

SEQ ID NO: 121399 - DNA, 20 bp, synthetic construct
  source 1..20: mol_type = other DNA
tgatgaagcaagtagttaca

SEQ ID NO: 121400 - DNA, 20 bp, synthetic construct
  source 1..20: mol_type = other DNA
ctgatgaagcaagtagttac

SEQ ID NO: 121401 - DNA, 20 bp, synthetic construct
  source 1..20: mol_type = other DNA
actgatgaagcaagtagtta

SEQ ID NO: 121402 - DNA, 20 bp, synthetic construct
  source 1..20: mol_type = other DNA
cactgatgaagcaagtagtt

SEQ ID NO: 121403 - DNA, 20 bp, synthetic construct
  source 1..20: mol_type = other DNA
tcactgatgaagcaagtagt

SEQ ID NO: 121404 - DNA, 20 bp, synthetic construct
  source 1..20: mol_type = other DNA
ttcactgatgaagcaagtag

SEQ ID NO: 121405 - DNA, 20 bp, synthetic construct
  source 1..20: mol_type = other DNA
cttcactgatgaagcaagta

SEQ ID NO: 121406 - DNA, 20 bp, synthetic construct
  source 1..20: mol_type = other DNA
tcttcactgatgaagcaagt

SEQ ID NO: 121407 - DNA, 20 bp, synthetic construct
  source 1..20: mol_type = other DNA
atcttcactgatgaagcaag

SEQ ID NO: 121408 - DNA, 20 bp, synthetic construct
  source 1..20: mol_type = other DNA
catcttcactgatgaagcaa

SEQ ID NO: 121409 - DNA, 20 bp, synthetic construct
  source 1..20: mol_type = other DNA
ccatcttcactgatgaagca

SEQ ID NO: 121410 - DNA, 20 bp, synthetic construct
  source 1..20: mol_type = other DNA
tccatcttcactgatgaagc

SEQ ID NO: 121411 - DNA, 20 bp, synthetic construct
  source 1..20: mol_type = other DNA
ttccatcttcactgatgaag

SEQ ID NO: 121412 - DNA, 20 bp, synthetic construct
  source 1..20: mol_type = other DNA
tttccatcttcactgatgaa

SEQ ID NO: 121413 - DNA, 20 bp, synthetic construct
  source 1..20: mol_type = other DNA
ttttccatcttcactgatga

SEQ ID NO: 121414 - DNA, 20 bp, synthetic construct
  source 1..20: mol_type = other DNA
gttttccatcttcactgatg

SEQ ID NO: 121415 - DNA, 20 bp, synthetic construct
  source 1..20: mol_type = other DNA
tgttttccatcttcactgat

SEQ ID NO: 121416 - DNA, 20 bp, synthetic construct
  source 1..20: mol_type = other DNA
atgttttccatcttcactga

SEQ ID NO: 121417 - DNA, 20 bp, synthetic construct
  source 1..20: mol_type = other DNA
aatgttttccatcttcactg

SEQ ID NO: 121418 - DNA, 20 bp, synthetic construct
  source 1..20: mol_type = other DNA
caatgttttccatcttcact

SEQ ID NO: 121419 - DNA, 20 bp, synthetic construct
  source 1..20: mol_type = other DNA
acaatgttttccatcttcac

SEQ ID NO: 121420 - DNA, 20 bp, synthetic construct
  source 1..20: mol_type = other DNA
cacaatgttttccatcttca

SEQ ID NO: 121421 - DNA, 20 bp, synthetic construct
  source 1..20: mol_type = other DNA
gcacaatgttttccatcttc

SEQ ID NO: 121422 - DNA, 20 bp, synthetic construct
  source 1..20: mol_type = other DNA
ggcacaatgttttccatctt

SEQ ID NO: 121423 - DNA, 20 bp, synthetic construct
  source 1..20: mol_type = other DNA
aggcacaatgttttccatct

SEQ ID NO: 121424 - DNA, 20 bp, synthetic construct
  source 1..20: mol_type = other DNA
caggcacaatgttttccatc

SEQ ID NO: 121425 - DNA, 20 bp, synthetic construct
  source 1..20: mol_type = other DNA
acaggcacaatgttttccat

SEQ ID NO: 121426 - DNA, 20 bp, synthetic construct
  source 1..20: mol_type = other DNA
aacaggcacaatgttttcca

SEQ ID NO: 121427 - DNA, 20 bp, synthetic construct
  source 1..20: mol_type = other DNA
gaacaggcacaatgttttcc

SEQ ID NO: 121428 - DNA, 20 bp, synthetic construct
  source 1..20: mol_type = other DNA
ggaacaggcacaatgttttc

SEQ ID NO: 121429 - DNA, 20 bp, synthetic construct
  source 1..20: mol_type = other DNA
aggaacaggcacaatgtttt

SEQ ID NO: 121430 - DNA, 20 bp, synthetic construct
  source 1..20: mol_type = other DNA
gaggaacaggcacaatgttt

SEQ ID NO: 121431 - DNA, 20 bp, synthetic construct
  source 1..20: mol_type = other DNA
agaggaacaggcacaatgtt

SEQ ID NO: 121432 - DNA, 20 bp, synthetic construct
  source 1..20: mol_type = other DNA
aagaggaacaggcacaatgt

SEQ ID NO: 121433 - DNA, 20 bp, synthetic construct
  source 1..20: mol_type = other DNA
gaagaggaacaggcacaatg

SEQ ID NO: 121434 - DNA, 20 bp, synthetic construct
  source 1..20: mol_type = other DNA
agaagaggaacaggcacaat

SEQ ID NO: 121435 - DNA, 20 bp, synthetic construct
  source 1..20: mol_type = other DNA
gagaagaggaacaggcacaa

SEQ ID NO: 121436 - DNA, 20 bp, synthetic construct
  source 1..20: mol_type = other DNA
agagaagaggaacaggcaca

SEQ ID NO: 121437 - DNA, 20 bp, synthetic construct
  source 1..20: mol_type = other DNA
cagagaagaggaacaggcac

SEQ ID NO: 121438 - DNA, 20 bp, synthetic construct
  source 1..20: mol_type = other DNA
acagagaagaggaacaggca

SEQ ID NO: 121439 - DNA, 20 bp, synthetic construct
  source 1..20: mol_type = other DNA
gacagagaagaggaacaggc

SEQ ID NO: 121440 - DNA, 20 bp, synthetic construct
  source 1..20: mol_type = other DNA
ggacagagaagaggaacagg

SEQ ID NO: 121441 - DNA, 20 bp, synthetic construct
  source 1..20: mol_type = other DNA
tggacagagaagaggaacag

SEQ ID NO: 121442 - DNA, 20 bp, synthetic construct
  source 1..20: mol_type = other DNA
ttggacagagaagaggaaca

SEQ ID NO: 121443 - DNA, 20 bp, synthetic construct
  source 1..20: mol_type = other DNA
gttggacagagaagaggaac

SEQ ID NO: 121444 - DNA, 20 bp, synthetic construct
  source 1..20: mol_type = other DNA
agttggacagagaagaggaa

SEQ ID NO: 121445 - DNA, 20 bp, synthetic construct
  source 1..20: mol_type = other DNA
cagttggacagagaagagga

SEQ ID NO: 121446 - DNA, 20 bp, synthetic construct
  source 1..20: mol_type = other DNA
acagttggacagagaagagg

SEQ ID NO: 121447 - DNA, 20 bp, synthetic construct
  source 1..20: mol_type = other DNA
tacagttggacagagaagag

SEQ ID NO: 121448 - DNA, 20 bp, synthetic construct
  source 1..20: mol_type = other DNA
gtacagttggacagagaaga

SEQ ID NO: 121449 - DNA, 20 bp, synthetic construct
  source 1..20: mol_type = other DNA
agtacagttggacagagaag

SEQ ID NO: 121450 - DNA, 20 bp, synthetic construct
  source 1..20: mol_type = other DNA
aagtacagttggacagagaa

SEQ ID NO: 121451 - DNA, 20 bp, synthetic construct
  source 1..20: mol_type = other DNA
aaagtacagttggacagaga

SEQ ID NO: 121452 - DNA, 20 bp, synthetic construct
  source 1..20: mol_type = other DNA
taaagtacagttggacagag

SEQ ID NO: 121453 - DNA, 20 bp, synthetic construct
  source 1..20: mol_type = other DNA
ataaagtacagttggacaga

SEQ ID NO: 121454 - DNA, 20 bp, synthetic construct
  source 1..20: mol_type = other DNA
aataaagtacagttggacag

SEQ ID NO: 121455 - DNA, 20 bp, synthetic construct
  source 1..20: mol_type = other DNA
taataaagtacagttggaca

SEQ ID NO: 121456 - DNA, 20 bp, synthetic construct
  source 1..20: mol_type = other DNA
gtaataaagtacagttggac

SEQ ID NO: 121457 - DNA, 20 bp, synthetic construct
  source 1..20: mol_type = other DNA
ggtaataaagtacagttgga

SEQ ID NO: 121458 - DNA, 20 bp, synthetic construct
  source 1..20: mol_type = other DNA
tggtaataaagtacagttgg

SEQ ID NO: 121459 - DNA, 20 bp, synthetic construct
  source 1..20: mol_type = other DNA
gtggtaataaagtacagttg

SEQ ID NO: 121460 - DNA, 20 bp, synthetic construct
  source 1..20: mol_type = other DNA
agtggtaataaagtacagtt

SEQ ID NO: 121461 - DNA, 20 bp, synthetic construct
  source 1..20: mol_type = other DNA
tagtggtaataaagtacagt

SEQ ID NO: 121462 - DNA, 20 bp, synthetic construct
  source 1..20: mol_type = other DNA
ctagtggtaataaagtacag

SEQ ID NO: 121463 - DNA, 20 bp, synthetic construct
  source 1..20: mol_type = other DNA
gctagtggtaataaagtaca

SEQ ID NO: 121464 - DNA, 20 bp, synthetic construct
  source 1..20: mol_type = other DNA
agctagtggtaataaagtac

SEQ ID NO: 121465 - DNA, 20 bp, synthetic construct
  source 1..20: mol_type = other DNA
gagctagtggtaataaagta

SEQ ID NO: 121466 - DNA, 20 bp, synthetic construct
  source 1..20: mol_type = other DNA
ggagctagtggtaataaagt

SEQ ID NO: 121467 - DNA, 20 bp, synthetic construct
  source 1..20: mol_type = other DNA
tggagctagtggtaataaag

SEQ ID NO: 121468 - DNA, 20 bp, synthetic construct
  source 1..20: mol_type = other DNA
ctggagctagtggtaataaa

SEQ ID NO: 121469 - DNA, 20 bp, synthetic construct
  source 1..20: mol_type = other DNA
actggagctagtggtaataa

SEQ ID NO: 121470 - DNA, 20 bp, synthetic construct
  source 1..20: mol_type = other DNA
aactggagctagtggtaata

SEQ ID NO: 121471 - DNA, 20 bp, synthetic construct
  source 1..20: mol_type = other DNA
taactggagctagtggtaat

SEQ ID NO: 121472 - DNA, 20 bp, synthetic construct
  source 1..20: mol_type = other DNA
ttaactggagctagtggtaa

SEQ ID NO: 121473 - DNA, 20 bp, synthetic construct
  source 1..20: mol_type = other DNA
gttaactggagctagtggta

SEQ ID NO: 121474 - DNA, 20 bp, synthetic construct
  source 1..20: mol_type = other DNA
ggttaactggagctagtggt

SEQ ID NO: 121475 - DNA, 20 bp, synthetic construct
  source 1..20: mol_type = other DNA
tggttaactggagctagtgg

SEQ ID NO: 121476 - DNA, 20 bp, synthetic construct
  source 1..20: mol_type = other DNA
ctggttaactggagctagtg

SEQ ID NO: 121477 - DNA, 20 bp, synthetic construct
  source 1..20: mol_type = other DNA
actggttaactggagctagt

SEQ ID NO: 121478 - DNA, 20 bp, synthetic construct
  source 1..20: mol_type = other DNA
tactggttaactggagctag

SEQ ID NO: 121479 - DNA, 20 bp, synthetic construct
  source 1..20: mol_type = other DNA
ttactggttaactggagcta

SEQ ID NO: 121480 - DNA, 20 bp, synthetic construct
  source 1..20: mol_type = other DNA
attactggttaactggagct

SEQ ID NO: 121481 - DNA, 20 bp, synthetic construct
  source 1..20: mol_type = other DNA
gattactggttaactggagc

SEQ ID NO: 121482 - DNA, 20 bp, synthetic construct
  source 1..20: mol_type = other DNA
agattactggttaactggag

SEQ ID NO: 121483 - DNA, 20 bp, synthetic construct
  source 1..20: mol_type = other DNA
cagattactggttaactgga

SEQ ID NO: 121484 - DNA, 20 bp, synthetic construct
  source 1..20: mol_type = other DNA
gcagattactggttaactgg

SEQ ID NO: 121485 - DNA, 20 bp, synthetic construct
  source 1..20: mol_type = other DNA
ggcagattactggttaactg

SEQ ID NO: 121486 - DNA, 20 bp, synthetic construct
  source 1..20: mol_type = other DNA
aggcagattactggttaact

SEQ ID NO: 121487 - DNA, 20 bp, synthetic construct
  source 1..20: mol_type = other DNA
aaggcagattactggttaac

SEQ ID NO: 121488 - DNA, 20 bp, synthetic construct
  source 1..20: mol_type = other DNA
gaaggcagattactggttaa

SEQ ID NO: 121489 - DNA, 20 bp, synthetic construct
  source 1..20: mol_type = other DNA
agaaggcagattactggtta

SEQ ID NO: 121490 - DNA, 20 bp, synthetic construct
  source 1..20: mol_type = other DNA
aagaaggcagattactggtt

SEQ ID NO: 121491 - DNA, 20 bp, synthetic construct
  source 1..20: mol_type = other DNA
aaagaaggcagattactggt

SEQ ID NO: 121492 - DNA, 20 bp, synthetic construct
  source 1..20: mol_type = other DNA
aaaagaaggcagattactgg

SEQ ID NO: 121493 - DNA, 20 bp, synthetic construct
  source 1..20: mol_type = other DNA
taaaagaaggcagattactg

SEQ ID NO: 121494 - DNA, 20 bp, synthetic construct
  source 1..20: mol_type = other DNA
gtaaaagaaggcagattact

SEQ ID NO: 121495 - DNA, 20 bp, synthetic construct
  source 1..20: mol_type = other DNA
agtaaaagaaggcagattac

SEQ ID NO: 121496 - DNA, 20 bp, synthetic construct
  source 1..20: mol_type = other DNA
tagtaaaagaaggcagatta

SEQ ID NO: 121497 - DNA, 20 bp, synthetic construct
  source 1..20: mol_type = other DNA
atagtaaaagaaggcagatt

SEQ ID NO: 121498 - DNA, 20 bp, synthetic construct
  source 1..20: mol_type = other DNA
tatagtaaaagaaggcagat

SEQ ID NO: 121499 - DNA, 20 bp, synthetic construct
  source 1..20: mol_type = other DNA
ctatagtaaaagaaggcaga

SEQ ID NO: 121500 - DNA, 20 bp, synthetic construct
  source 1..20: mol_type = other DNA
tctatagtaaaagaaggcag

SEQ ID NO: 121501 - DNA, 20 bp, synthetic construct
  source 1..20: mol_type = other DNA
atctatagtaaaagaaggca

SEQ ID NO: 121502 - DNA, 20 bp, synthetic construct
  source 1..20: mol_type = other DNA
aatctatagtaaaagaaggc

SEQ ID NO: 121503 - DNA, 20 bp, synthetic construct
  source 1..20: mol_type = other DNA
taatctatagtaaaagaagg

SEQ ID NO: 121504 - DNA, 20 bp, synthetic construct
  source 1..20: mol_type = other DNA
ctaatctatagtaaaagaag

SEQ ID NO: 121505 - DNA, 20 bp, synthetic construct
  source 1..20: mol_type = other DNA
tctaatctatagtaaaagaa

SEQ ID NO: 121506 - DNA, 20 bp, synthetic construct
  source 1..20: mol_type = other DNA
atctaatctatagtaaaaga

SEQ ID NO: 121507 - DNA, 20 bp, synthetic construct
  source 1..20: mol_type = other DNA
aatctaatctatagtaaaag

SEQ ID NO: 121508 - DNA, 20 bp, synthetic construct
  source 1..20: mol_type = other DNA
aaatctaatctatagtaaaa

SEQ ID NO: 121509 - DNA, 20 bp, synthetic construct
  source 1..20: mol_type = other DNA
taaatctaatctatagtaaa

SEQ ID NO: 121510 - DNA, 20 bp, synthetic construct
  source 1..20: mol_type = other DNA
ataaatctaatctatagtaa

SEQ ID NO: 121511 - DNA, 20 bp, synthetic construct
  source 1..20: mol_type = other DNA
gataaatctaatctatagta

SEQ ID NO: 121512 - DNA, 20 bp, synthetic construct
  source 1..20: mol_type = other DNA
ggataaatctaatctatagt

SEQ ID NO: 121513 - DNA, 20 bp, synthetic construct
  source 1..20: mol_type = other DNA
aggataaatctaatctatag

SEQ ID NO: 121514 - DNA, 20 bp, synthetic construct
  source 1..20: mol_type = other DNA
gaggataaatctaatctata

SEQ ID NO: 121515 - DNA, 20 bp, synthetic construct
  source 1..20: mol_type = other DNA
agaggataaatctaatctat

SEQ ID NO: 121516 - DNA, 20 bp, synthetic construct
  source 1..20: mol_type = other DNA
aagaggataaatctaatcta

SEQ ID NO: 121517 - DNA, 20 bp, synthetic construct
  source 1..20: mol_type = other DNA
aaagaggataaatctaatct

SEQ ID NO: 121518 - DNA, 20 bp, synthetic construct
  source 1..20: mol_type = other DNA
taaagaggataaatctaatc

SEQ ID NO: 121519 - DNA, 20 bp, synthetic construct
  source 1..20: mol_type = other DNA
ctaaagaggataaatctaat

SEQ ID NO: 121520 - DNA, 20 bp, synthetic construct
  source 1..20: mol_type = other DNA
tctaaagaggataaatctaa

SEQ ID NO: 121521 - DNA, 20 bp, synthetic construct
  source 1..20: mol_type = other DNA
atctaaagaggataaatcta

SEQ ID NO: 121522 - DNA, 20 bp, synthetic construct
  source 1..20: mol_type = other DNA
aatctaaagaggataaatct

SEQ ID NO: 121523 - DNA, 20 bp, synthetic construct
  source 1..20: mol_type = other DNA
aaatctaaagaggataaatc

SEQ ID NO: 121524 - DNA, 20 bp, synthetic construct
  source 1..20: mol_type = other DNA
gaaatctaaagaggataaat

SEQ ID NO: 121525 - DNA, 20 bp, synthetic construct
  source 1..20: mol_type = other DNA
agaaatctaaagaggataaa

SEQ ID NO: 121526 - DNA, 20 bp, synthetic construct
  source 1..20: mol_type = other DNA
aagaaatctaaagaggataa

SEQ ID NO: 121527 - DNA, 20 bp, synthetic construct
  source 1..20: mol_type = other DNA
aaagaaatctaaagaggata

SEQ ID NO: 121528 - DNA, 20 bp, synthetic construct
  source 1..20: mol_type = other DNA
aaaagaaatctaaagaggat

SEQ ID NO: 121529 - DNA, 20 bp, synthetic construct
  source 1..20: mol_type = other DNA
aaaaagaaatctaaagagga

SEQ ID NO: 121530 - DNA, 20 bp, synthetic construct
  source 1..20: mol_type = other DNA
gaaaaagaaatctaaagagg

SEQ ID NO: 121531 - DNA, 20 bp, synthetic construct
  source 1..20: mol_type = other DNA
agaaaaagaaatctaaagag

SEQ ID NO: 121532 - DNA, 20 bp, synthetic construct
  source 1..20: mol_type = other DNA
aagaaaaagaaatctaaaga

SEQ ID NO: 121533 - DNA, 20 bp, synthetic construct
  source 1..20: mol_type = other DNA
aaagaaaaagaaatctaaag

SEQ ID NO: 121534 - DNA, 20 bp, synthetic construct
  source 1..20: mol_type = other DNA
aaaagaaaaagaaatctaaa

SEQ ID NO: 121535 - DNA, 20 bp, synthetic construct
  source 1..20: mol_type = other DNA
aaaaagaaaaagaaatctaa

SEQ ID NO: 121536 - DNA, 20 bp, synthetic construct
  source 1..20: mol_type = other DNA
aaaaaagaaaaagaaatcta

SEQ ID NO: 121537 - DNA, 20 bp, synthetic construct
  source 1..20: mol_type = other DNA
aaaaaaagaaaaagaaatct

SEQ ID NO: 121538 - DNA, 20 bp, synthetic construct
  source 1..20: mol_type = other DNA
aaaaaaaagaaaaagaaatc

SEQ ID NO: 121539 - DNA, 20 bp, synthetic construct
  source 1..20: mol_type = other DNA
aaaaaaaaagaaaaagaaat

SEQ ID NO: 121540 - DNA, 20 bp, synthetic construct
  source 1..20: mol_type = other DNA
aaaaaaaaaagaaaaagaaa

SEQ ID NO: 121541 - DNA, 20 bp, synthetic construct
  source 1..20: mol_type = other DNA
aaaaaaaaaaagaaaaagaa

SEQ ID NO: 121542 - DNA, 20 bp, synthetic construct
  source 1..20: mol_type = other DNA
aaaaaaaaaaaagaaaaaga

SEQ ID NO: 121543 - DNA, 20 bp, synthetic construct
  source 1..20: mol_type = other DNA
aaaaaaaaaaaaagaaaaag

SEQ ID NO: 121544 - DNA, 20 bp, synthetic construct
  source 1..20: mol_type = other DNA
caaaaaaaaaaaaagaaaaa

SEQ ID NO: 121545 - DNA, 20 bp, synthetic construct
  source 1..20: mol_type = other DNA
tcaaaaaaaaaaaaagaaaa

SEQ ID NO: 121546 - DNA, 20 bp, synthetic construct
  source 1..20: mol_type = other DNA
atcaaaaaaaaaaaaagaaa

SEQ ID NO: 121547 - DNA, 20 bp, synthetic construct
  source 1..20: mol_type = other DNA
aatcaaaaaaaaaaaaagaa

SEQ ID NO: 121548 - DNA, 20 bp, synthetic construct
  source 1..20: mol_type = other DNA
taatcaaaaaaaaaaaaaga

SEQ ID NO: 121549 - DNA, 20 bp, synthetic construct
  source 1..20: mol_type = other DNA
ctaatcaaaaaaaaaaaaag

SEQ ID NO: 121550 - DNA, 20 bp, synthetic construct
  source 1..20: mol_type = other DNA
cctaatcaaaaaaaaaaaaa

SEQ ID NO: 121551 - DNA, 20 bp, synthetic construct
  source 1..20: mol_type = other DNA
acctaatcaaaaaaaaaaaa

SEQ ID NO: 121552 - DNA, 20 bp, synthetic construct
  source 1..20: mol_type = other DNA
aacctaatcaaaaaaaaaaa

SEQ ID NO: 121553 - DNA, 20 bp, synthetic construct
  source 1..20: mol_type = other DNA
aaacctaatcaaaaaaaaaa

SEQ ID NO: 121554 - DNA, 20 bp, synthetic construct
  source 1..20: mol_type = other DNA
aaaacctaatcaaaaaaaaa

SEQ ID NO: 121555 - DNA, 20 bp, synthetic construct
  source 1..20: mol_type = other DNA
aaaaacctaatcaaaaaaaa

SEQ ID NO: 121556 - DNA, 20 bp, synthetic construct
  source 1..20: mol_type = other DNA
aaaaaacctaatcaaaaaaa

SEQ ID NO: 121557 - DNA, 20 bp, synthetic construct
  source 1..20: mol_type = other DNA
aaaaaaacctaatcaaaaaa

SEQ ID NO: 121558 - DNA, 20 bp, synthetic construct
  source 1..20: mol_type = other DNA
aaaaaaaacctaatcaaaaa

SEQ ID NO: 121559 - DNA, 20 bp, synthetic construct
  source 1..20: mol_type = other DNA
aaaaaaaaacctaatcaaaa

SEQ ID NO: 121560 - DNA, 20 bp, synthetic construct
  source 1..20: mol_type = other DNA
aaaaaaaaaacctaatcaaa

SEQ ID NO: 121561 - DNA, 20 bp, synthetic construct
  source 1..20: mol_type = other DNA
aaaaaaaaaaacctaatcaa

SEQ ID NO: 121562 - DNA, 20 bp, synthetic construct
  source 1..20: mol_type = other DNA
gaaaaaaaaaaacctaatca

SEQ ID NO: 121563 - DNA, 20 bp, synthetic construct
  source 1..20: mol_type = other DNA
agaaaaaaaaaaacctaatc

SEQ ID NO: 121564 - DNA, 20 bp, synthetic construct
  source 1..20: mol_type = other DNA
aagaaaaaaaaaaacctaat

SEQ ID NO: 121565 - DNA, 20 bp, synthetic construct
  source 1..20: mol_type = other DNA
aaagaaaaaaaaaaacctaa

SEQ ID NO: 121566 - DNA, 20 bp, synthetic construct
  source 1..20: mol_type = other DNA
aaaagaaaaaaaaaaaccta

SEQ ID NO: 121567 - DNA, 20 bp, synthetic construct
  source 1..20: mol_type = other DNA
aaaaagaaaaaaaaaaacct

SEQ ID NO: 121568 - DNA, 20 bp, synthetic construct
  source 1..20: mol_type = other DNA
aaaaaagaaaaaaaaaaacc

SEQ ID NO: 121569 - DNA, 20 bp, synthetic construct
  source 1..20: mol_type = other DNA
aaaaaaagaaaaaaaaaaac

SEQ ID NO: 121570 - DNA, 20 bp, synthetic construct
  source 1..20: mol_type = other DNA
taaaaaaagaaaaaaaaaaa

SEQ ID NO: 121571 - DNA, 20 bp, synthetic construct
  source 1..20: mol_type = other DNA
gtaaaaaaagaaaaaaaaaa

SEQ ID NO: 121572 - DNA, 20 bp, synthetic construct
  source 1..20: mol_type = other DNA
cgtaaaaaaagaaaaaaaaa

SEQ ID NO: 121573 - DNA, 20 bp, synthetic construct
  source 1..20: mol_type = other DNA
acgtaaaaaaagaaaaaaaa

SEQ ID NO: 121574 - DNA, 20 bp, synthetic construct
  source 1..20: mol_type = other DNA
tacgtaaaaaaagaaaaaaa

SEQ ID NO: 121575 - DNA, 20 bp, synthetic construct
  source 1..20: mol_type = other DNA
ttacgtaaaaaaagaaaaaa

SEQ ID NO: 121576 - DNA, 20 bp, synthetic construct
  source 1..20: mol_type = other DNA
tttacgtaaaaaaagaaaaa

SEQ ID NO: 121577 - DNA, 20 bp, synthetic construct
  source 1..20: mol_type = other DNA
ttttacgtaaaaaaagaaaa

SEQ ID NO: 121578 - DNA, 20 bp, synthetic construct
  source 1..20: mol_type = other DNA
tttttacgtaaaaaaagaaa

SEQ ID NO: 121579 - DNA, 20 bp, synthetic construct
  source 1..20: mol_type = other DNA
ttttttacgtaaaaaaagaa

SEQ ID NO: 121580 - DNA, 20 bp, synthetic construct
  source 1..20: mol_type = other DNA
tttttttacgtaaaaaaaga

SEQ ID NO: 121581 - DNA, 20 bp, synthetic construct
  source 1..20: mol_type = other DNA
atttttttacgtaaaaaaag

SEQ ID NO: 121582 - DNA, 20 bp, synthetic construct
  source 1..20: mol_type = other DNA
gatttttttacgtaaaaaaa

SEQ ID NO: 121583 - DNA, 20 bp, synthetic construct
  source 1..20: mol_type = other DNA
agatttttttacgtaaaaaa

SEQ ID NO: 121584 - DNA, 20 bp, synthetic construct
  source 1..20: mol_type = other DNA
aagatttttttacgtaaaaa

SEQ ID NO: 121585 - DNA, 20 bp, synthetic construct
  source 1..20: mol_type = other DNA
aaagatttttttacgtaaaa

SEQ ID NO: 121586 - DNA, 20 bp, synthetic construct
  source 1..20: mol_type = other DNA
aaaagatttttttacgtaaa

SEQ ID NO: 121587 - DNA, 20 bp, synthetic construct
  source 1..20: mol_type = other DNA
aaaaagatttttttacgtaa

SEQ ID NO: 121588 - DNA, 20 bp, synthetic construct
  source 1..20: mol_type = other DNA
aaaaaagatttttttacgta

SEQ ID NO: 121589 - DNA, 20 bp, synthetic construct
  source 1..20: mol_type = other DNA
aaaaaaagatttttttacgt

SEQ ID NO: 121590 - DNA, 20 bp, synthetic construct
  source 1..20: mol_type = other DNA
caaaaaaagatttttttacg

SEQ ID NO: 121591 - DNA, 20 bp, synthetic construct
  source 1..20: mol_type = other DNA
ccaaaaaaagatttttttac

SEQ ID NO: 121592 - DNA, 20 bp, synthetic construct
  source 1..20: mol_type = other DNA
tccaaaaaaagattttttta

SEQ ID NO: 121593 - DNA, 20 bp, synthetic construct
  source 1..20: mol_type = other DNA
ctccaaaaaaagattttttt

SEQ ID NO: 121594 - DNA, 20 bp, synthetic construct
  source 1..20: mol_type = other DNA
tctccaaaaaaagatttttt

SEQ ID NO: 121595 - DNA, 20 bp, synthetic construct
  source 1..20: mol_type = other DNA
gtctccaaaaaaagattttt

SEQ ID NO: 121596 - DNA, 20 bp, synthetic construct
  source 1..20: mol_type = other DNA
cgtctccaaaaaaagatttt

SEQ ID NO: 121597 - DNA, 20 bp, synthetic construct
  source 1..20: mol_type = other DNA
acgtctccaaaaaaagattt

SEQ ID NO: 121598 - DNA, 20 bp, synthetic construct
  source 1..20: mol_type = other DNA
gacgtctccaaaaaaagatt

SEQ ID NO: 121599 - DNA, 20 bp, synthetic construct
  source 1..20: mol_type = other DNA
agacgtctccaaaaaaagat

SEQ ID NO: 121600 - DNA, 20 bp, synthetic construct
  source 1..20: mol_type = other DNA
gagacgtctccaaaaaaaga

SEQ ID NO: 121601 - DNA, 20 bp, synthetic construct
  source 1..20: mol_type = other DNA
tgagacgtctccaaaaaaag

SEQ ID NO: 121602 - DNA, 20 bp, synthetic construct
  source 1..20: mol_type = other DNA
atgagacgtctccaaaaaaa

SEQ ID NO: 121603 - DNA, 20 bp, synthetic construct
  source 1..20: mol_type = other DNA
aatgagacgtctccaaaaaa

SEQ ID NO: 121604 - DNA, 20 bp, synthetic construct
  source 1..20: mol_type = other DNA
taatgagacgtctccaaaaa

SEQ ID NO: 121605 - DNA, 20 bp, synthetic construct
  source 1..20: mol_type = other DNA
ataatgagacgtctccaaaa

SEQ ID NO: 121606 - DNA, 20 bp, synthetic construct
  source 1..20: mol_type = other DNA
tataatgagacgtctccaaa

SEQ ID NO: 121607 - DNA, 20 bp, synthetic construct
  source 1..20: mol_type = other DNA
atataatgagacgtctccaa

SEQ ID NO: 121608 - DNA, 20 bp, synthetic construct
  source 1..20: mol_type = other DNA
aatataatgagacgtctcca

SEQ ID NO: 121609 - DNA, 20 bp, synthetic construct
  source 1..20: mol_type = other DNA
caatataatgagacgtctcc

SEQ ID NO: 121610 - DNA, 20 bp, synthetic construct
  source 1..20: mol_type = other DNA
gcaatataatgagacgtctc

SEQ ID NO: 121611 - DNA, 20 bp, synthetic construct
  source 1..20: mol_type = other DNA
ggcaatataatgagacgtct

SEQ ID NO: 121612 - DNA, 20 bp, synthetic construct
  source 1..20: mol_type = other DNA
gggcaatataatgagacgtc

SEQ ID NO: 121613 - DNA, 20 bp, synthetic construct
  source 1..20: mol_type = other DNA
tgggcaatataatgagacgt

SEQ ID NO: 121614 - DNA, 20 bp, synthetic construct
  source 1..20: mol_type = other DNA
ctgggcaatataatgagacg

SEQ ID NO: 121615 - DNA, 20 bp, synthetic construct
  source 1..20: mol_type = other DNA
cctgggcaatataatgagac

SEQ ID NO: 121616 - DNA, 20 bp, synthetic construct
  source 1..20: mol_type = other DNA
acctgggcaatataatgaga

SEQ ID NO: 121617 - DNA, 20 bp, synthetic construct
  source 1..20: mol_type = other DNA
aacctgggcaatataatgag

SEQ ID NO: 121618 - DNA, 20 bp, synthetic construct
  source 1..20: mol_type = other DNA
caacctgggcaatataatga

SEQ ID NO: 121619 - DNA, 20 bp, synthetic construct
  source 1..20: mol_type = other DNA
ccaacctgggcaatataatg

SEQ ID NO: 121620 - DNA, 20 bp, synthetic construct
  source 1..20: mol_type = other DNA
accaacctgggcaatataat

SEQ ID NO: 121621 - DNA, 20 bp, synthetic construct
  source 1..20: mol_type = other DNA
gaccaacctgggcaatataa

SEQ ID NO: 121622 - DNA, 20 bp, synthetic construct
  source 1..20: mol_type = other DNA
agaccaacctgggcaatata

SEQ ID NO: 121623 - DNA, 20 bp, synthetic construct
  source 1..20: mol_type = other DNA
gagaccaacctgggcaatat

SEQ ID NO: 121624 - DNA, 20 bp, synthetic construct
  source 1..20: mol_type = other DNA
cgagaccaacctgggcaata

SEQ ID NO: 121625 - DNA, 20 bp, synthetic construct
  source 1..20: mol_type = other DNA
tcgagaccaacctgggcaat

SEQ ID NO: 121626 - DNA, 20 bp, synthetic construct
  source 1..20: mol_type = other DNA
ttcgagaccaacctgggcaa

SEQ ID NO: 121627 - DNA, 20 bp, synthetic construct
  source 1..20: mol_type = other DNA
gttcgagaccaacctgggca

SEQ ID NO: 121628 - DNA, 20 bp, synthetic construct
  source 1..20: mol_type = other DNA
agttcgagaccaacctgggc

SEQ ID NO: 121629 - DNA, 20 bp, synthetic construct
  source 1..20: mol_type = other DNA
gagttcgagaccaacctggg

SEQ ID NO: 121630 - DNA, 20 bp, synthetic construct
  source 1..20: mol_type = other DNA
agagttcgagaccaacctgg

SEQ ID NO: 121631 - DNA, 20 bp, synthetic construct
  source 1..20: mol_type = other DNA
aagagttcgagaccaacctg

SEQ ID NO: 121632 - DNA, 20 bp, synthetic construct
  source 1..20: mol_type = other DNA
caagagttcgagaccaacct

SEQ ID NO: 121633 - DNA, 20 bp, synthetic construct
  source 1..20: mol_type = other DNA
tcaagagttcgagaccaacc

SEQ ID NO: 121634 - DNA, 20 bp, synthetic construct
  source 1..20: mol_type = other DNA
ctcaagagttcgagaccaac

SEQ ID NO: 121635 - DNA, 20 bp, synthetic construct
  source 1..20: mol_type = other DNA
gctcaagagttcgagaccaa

SEQ ID NO: 121636 - DNA, 20 bp, synthetic construct
  source 1..20: mol_type = other DNA
agctcaagagttcgagacca

SEQ ID NO: 121637 - DNA, 20 bp, synthetic construct
  source 1..20: mol_type = other DNA
gagctcaagagttcgagacc

SEQ ID NO: 121638 - DNA, 20 bp, synthetic construct
  source 1..20: mol_type = other DNA
tgagctcaagagttcgagac

SEQ ID NO: 121639 - DNA, 20 bp, synthetic construct
  source 1..20: mol_type = other DNA
gtgagctcaagagttcgaga

SEQ ID NO: 121640 - DNA, 20 bp, synthetic construct
  source 1..20: mol_type = other DNA
ggtgagctcaagagttcgag

SEQ ID NO: 121641 - DNA, 20 bp, synthetic construct
  source 1..20: mol_type = other DNA
aggtgagctcaagagttcga

SEQ ID NO: 121642 - DNA, 20 bp, synthetic construct
  source 1..20: mol_type = other DNA
gaggtgagctcaagagttcg

SEQ ID NO: 121643 - DNA, 20 bp, synthetic construct
  source 1..20: mol_type = other DNA
tgaggtgagctcaagagttc

SEQ ID NO: 121644 - DNA, 20 bp, synthetic construct
  source 1..20: mol_type = other DNA
ctgaggtgagctcaagagtt

SEQ ID NO: 121645 - DNA, 20 bp, synthetic construct
  source 1..20: mol_type = other DNA
gctgaggtgagctcaagagt

SEQ ID NO: 121646 - DNA, 20 bp, synthetic construct
  source 1..20: mol_type = other DNA
ggctgaggtgagctcaagag

SEQ ID NO: 121647 - DNA, 20 bp, synthetic construct
  source 1..20: mol_type = other DNA
aggctgaggtgagctcaaga

SEQ ID NO: 121648 - DNA, 20 bp, synthetic construct
  source 1..20: mol_type = other DNA
gaggctgaggtgagctcaag

SEQ ID NO: 121649 - DNA, 20 bp, synthetic construct
  source 1..20: mol_type = other DNA
ggaggctgaggtgagctcaa

SEQ ID NO: 121650 - DNA, 20 bp, synthetic construct
  source 1..20: mol_type = other DNA
gggaggctgaggtgagctca

SEQ ID NO: 121651 - DNA, 20 bp, synthetic construct
  source 1..20: mol_type = other DNA
tgggaggctgaggtgagctc

SEQ ID NO: 121652 - DNA, 20 bp, synthetic construct
  source 1..20: mol_type = other DNA
ctgggaggctgaggtgagct

SEQ ID NO: 121653 - DNA, 20 bp, synthetic construct
  source 1..20: mol_type = other DNA
tctgggaggctgaggtgagc

SEQ ID NO: 121654 - DNA, 20 bp, synthetic construct
  source 1..20: mol_type = other DNA
ctctgggaggctgaggtgag

SEQ ID NO: 121655 - DNA, 20 bp, synthetic construct
  source 1..20: mol_type = other DNA
actctgggaggctgaggtga

SEQ ID NO: 121656 - DNA, 20 bp, synthetic construct
  source 1..20: mol_type = other DNA
cactctgggaggctgaggtg

SEQ ID NO: 121657 - DNA, 20 bp, synthetic construct
  source 1..20: mol_type = other DNA
gcactctgggaggctgaggt

SEQ ID NO: 121658 - DNA, 20 bp, synthetic construct
  source 1..20: mol_type = other DNA
agcactctgggaggctgagg

SEQ ID NO: 121659 - DNA, 20 bp, synthetic construct
  source 1..20: mol_type = other DNA
tagcactctgggaggctgag

SEQ ID NO: 121660 - DNA, 20 bp, synthetic construct
  source 1..20: mol_type = other DNA
ctagcactctgggaggctga

SEQ ID NO: 121661 - DNA, 20 bp, synthetic construct
  source 1..20: mol_type = other DNA
cctagcactctgggaggctg

SEQ ID NO: 121662 - DNA, 20 bp, synthetic construct
  source 1..20: mol_type = other DNA
tcctagcactctgggaggct

SEQ ID NO: 121663 - DNA, 20 bp, synthetic construct
  source 1..20: mol_type = other DNA
atcctagcactctgggaggc

SEQ ID NO: 121664 - DNA, 20 bp, synthetic construct
  source 1..20: mol_type = other DNA
aatcctagcactctgggagg

SEQ ID NO: 121665 - DNA, 20 bp, synthetic construct
  source 1..20: mol_type = other DNA
taatcctagcactctgggag

SEQ ID NO: 121666 - DNA, 20 bp, synthetic construct
  source 1..20: mol_type = other DNA
gtaatcctagcactctggga

SEQ ID NO: 121667 - DNA, 20 bp, synthetic construct
  source 1..20: mol_type = other DNA
tgtaatcctagcactctggg

SEQ ID NO: 121668 - DNA, 20 bp, synthetic construct
  source 1..20: mol_type = other DNA
ctgtaatcctagcactctgg

SEQ ID NO: 121669 - DNA, 20 bp, synthetic construct
  source 1..20: mol_type = other DNA
tctgtaatcctagcactctg

SEQ ID NO: 121670 - DNA, 20 bp, synthetic construct
  source 1..20: mol_type = other DNA
atctgtaatcctagcactct

SEQ ID NO: 121671 - DNA, 20 bp, synthetic construct
  source 1..20: mol_type = other DNA
catctgtaatcctagcactc

SEQ ID NO: 121672 - DNA, 20 bp, synthetic construct
  source 1..20: mol_type = other DNA
acatctgtaatcctagcact

SEQ ID NO: 121673 - DNA, 20 bp, synthetic construct
  source 1..20: mol_type = other DNA
cacatctgtaatcctagcac

SEQ ID NO: 121674 - DNA, 20 bp, synthetic construct
  source 1..20: mol_type = other DNA
tcacatctgtaatcctagca

SEQ ID NO: 121675 - DNA, 20 bp, synthetic construct
  source 1..20: mol_type = other DNA
ctcacatctgtaatcctagc

SEQ ID NO: 121676 - DNA, 20 bp, synthetic construct
  source 1..20: mol_type = other DNA
gctcacatctgtaatcctag

SEQ ID NO: 121677 - DNA, 20 bp, synthetic construct
  source 1..20: mol_type = other DNA
ggctcacatctgtaatccta

SEQ ID NO: 121678 - DNA, 20 bp, synthetic construct
  source 1..20: mol_type = other DNA
tggctcacatctgtaatcct

SEQ ID NO: 121679 - DNA, 20 bp, synthetic construct
  source 1..20: mol_type = other DNA
gtggctcacatctgtaatcc

SEQ ID NO: 121680 - DNA, 20 bp, synthetic construct
  source 1..20: mol_type = other DNA
ggtggctcacatctgtaatc

SEQ ID NO: 121681 - DNA, 20 bp, synthetic construct
  source 1..20: mol_type = other DNA
aggtggctcacatctgtaat

SEQ ID NO: 121682 - DNA, 20 bp, synthetic construct
  source 1..20: mol_type = other DNA
gaggtggctcacatctgtaa

SEQ ID NO: 121683 - DNA, 20 bp, synthetic construct
  source 1..20: mol_type = other DNA
tgaggtggctcacatctgta

SEQ ID NO: 121684 - DNA, 20 bp, synthetic construct
  source 1..20: mol_type = other DNA
ctgaggtggctcacatctgt

SEQ ID NO: 121685 - DNA, 20 bp, synthetic construct
  source 1..20: mol_type = other DNA
gctgaggtggctcacatctg

SEQ ID NO: 121686 - DNA, 20 bp, synthetic construct
  source 1..20: mol_type = other DNA
ggctgaggtggctcacatct

SEQ ID NO: 121687 - DNA, 20 bp, synthetic construct
  source 1..20: mol_type = other DNA
tggctgaggtggctcacatc

SEQ ID NO: 121688 - DNA, 20 bp, synthetic construct
  source 1..20: mol_type = other DNA
ctggctgaggtggctcacat

SEQ ID NO: 121689 - DNA, 20 bp, synthetic construct
  source 1..20: mol_type = other DNA
gctggctgaggtggctcaca

SEQ ID NO: 121690 - DNA, 20 bp, synthetic construct
  source 1..20: mol_type = other DNA
ggctggctgaggtggctcac

SEQ ID NO: 121691 - DNA, 20 bp, synthetic construct
  source 1..20: mol_type = other DNA
gggctggctgaggtggctca

SEQ ID NO: 121692 - DNA, 20 bp, synthetic construct
  source 1..20: mol_type = other DNA
ggggctggctgaggtggctc

SEQ ID NO: 121693 - DNA, 20 bp, synthetic construct
  source 1..20: mol_type = other DNA
aggggctggctgaggtggct

SEQ ID NO: 121694 - DNA, 20 bp, synthetic construct
  source 1..20: mol_type = other DNA
taggggctggctgaggtggc

SEQ ID NO: 121695 - DNA, 20 bp, synthetic construct
  source 1..20: mol_type = other DNA
ctaggggctggctgaggtgg

SEQ ID NO: 121696 - DNA, 20 bp, synthetic construct
  source 1..20: mol_type = other DNA
tctaggggctggctgaggtg

SEQ ID NO: 121697 - DNA, 20 bp, synthetic construct
  source 1..20: mol_type = other DNA
atctaggggctggctgaggt

SEQ ID NO: 121698 - DNA, 20 bp, synthetic construct
  source 1..20: mol_type = other DNA
aatctaggggctggctgagg

SEQ ID NO: 121699 - DNA, 20 bp, synthetic construct
  source 1..20: mol_type = other DNA
aaatctaggggctggctgag

SEQ ID NO: 121700 - DNA, 20 bp, synthetic construct
  source 1..20: mol_type = other DNA
aaaatctaggggctggctga

SEQ ID NO: 121701 - DNA, 20 bp, synthetic construct
  source 1..20: mol_type = other DNA
aaaaatctaggggctggctg

SEQ ID NO: 121702 - DNA, 20 bp, synthetic construct
  source 1..20: mol_type = other DNA
aaaaaatctaggggctggct

SEQ ID NO: 121703 - DNA, 20 bp, synthetic construct
  source 1..20: mol_type = other DNA
aaaaaaatctaggggctggc

SEQ ID NO: 121704 - DNA, 20 bp, synthetic construct
  source 1..20: mol_type = other DNA
aaaaaaaatctaggggctgg

SEQ ID NO: 121705 - DNA, 20 bp, synthetic construct
  source 1..20: mol_type = other DNA
aaaaaaaaatctaggggctg

SEQ ID NO: 121706 - DNA, 20 bp, synthetic construct
  source 1..20: mol_type = other DNA
aaaaaaaaaatctaggggct

SEQ ID NO: 121707 - DNA, 20 bp, synthetic construct
  source 1..20: mol_type = other DNA
aaaaaaaaaaatctaggggc

SEQ ID NO: 121708 - DNA, 20 bp, synthetic construct
  source 1..20: mol_type = other DNA
aaaaaaaaaaaatctagggg

SEQ ID NO: 121709 - DNA, 20 bp, synthetic construct
  source 1..20: mol_type = other DNA
aaaaaaaaaaaaatctaggg

SEQ ID NO: 121710 - DNA, 20 bp, synthetic construct
  source 1..20: mol_type = other DNA
aaaaaaaaaaaaaatctagg

SEQ ID NO: 121711 - DNA, 20 bp, synthetic construct
  source 1..20: mol_type = other DNA
aaaaaaaaaaaaaaatctag

SEQ ID NO: 121712 - DNA, 20 bp, synthetic construct
  source 1..20: mol_type = other DNA
aaaaaaaaaaaaaaaatcta

SEQ ID NO: 121713 - DNA, 20 bp, synthetic construct
  source 1..20: mol_type = other DNA
taaaaaaaaaaaaaaaatct

SEQ ID NO: 121714 - DNA, 20 bp, synthetic construct
  source 1..20: mol_type = other DNA
ttaaaaaaaaaaaaaaaatc

SEQ ID NO: 121715 - DNA, 20 bp, synthetic construct
  source 1..20: mol_type = other DNA
attaaaaaaaaaaaaaaaat

SEQ ID NO: 121716 - DNA, 20 bp, synthetic construct
  source 1..20: mol_type = other DNA
tattaaaaaaaaaaaaaaaa

SEQ ID NO: 121717 - DNA, 20 bp, synthetic construct
  source 1..20: mol_type = other DNA
ttattaaaaaaaaaaaaaaa

SEQ ID NO: 121718 - DNA, 20 bp, synthetic construct
  source 1..20: mol_type = other DNA
tttattaaaaaaaaaaaaaa

SEQ ID NO: 121719 - DNA, 20 bp, synthetic construct
  source 1..20: mol_type = other DNA
atttattaaaaaaaaaaaaa

SEQ ID NO: 121720 - DNA, 20 bp, synthetic construct
  source 1..20: mol_type = other DNA
catttattaaaaaaaaaaaa

SEQ ID NO: 121721 - DNA, 20 bp, synthetic construct
  source 1..20: mol_type = other DNA
ccatttattaaaaaaaaaaa

SEQ ID NO: 121722 - DNA, 20 bp, synthetic construct
  source 1..20: mol_type = other DNA
tccatttattaaaaaaaaaa

SEQ ID NO: 121723 - DNA, 20 bp, synthetic construct
  source 1..20: mol_type = other DNA
ttccatttattaaaaaaaaa

SEQ ID NO: 121724 - DNA, 20 bp, synthetic construct
  source 1..20: mol_type = other DNA
attccatttattaaaaaaaa

SEQ ID NO: 121725 - DNA, 20 bp, synthetic construct
  source 1..20: mol_type = other DNA
gattccatttattaaaaaaa

SEQ ID NO: 121726 - DNA, 20 bp, synthetic construct
  source 1..20: mol_type = other DNA
tgattccatttattaaaaaa

SEQ ID NO: 121727 - DNA, 20 bp, synthetic construct
  source 1..20: mol_type = other DNA
ttgattccatttattaaaaa

SEQ ID NO: 121728 - DNA, 20 bp, synthetic construct
  source 1..20: mol_type = other DNA
tttgattccatttattaaaa

SEQ ID NO: 121729 - DNA, 20 bp, synthetic construct
  source 1..20: mol_type = other DNA
gtttgattccatttattaaa

SEQ ID NO: 121730 - DNA, 20 bp, synthetic construct
  source 1..20: mol_type = other DNA
tgtttgattccatttattaa

SEQ ID NO: 121731 - DNA, 20 bp, synthetic construct
  source 1..20: mol_type = other DNA
ctgtttgattccatttatta

SEQ ID NO: 121732 - DNA, 20 bp, synthetic construct
  source 1..20: mol_type = other DNA
gctgtttgattccatttatt

SEQ ID NO: 121733 - DNA, 20 bp, synthetic construct
  source 1..20: mol_type = other DNA
cgctgtttgattccatttat

SEQ ID NO: 121734 - DNA, 20 bp, synthetic construct
  source 1..20: mol_type = other DNA
acgctgtttgattccattta

SEQ ID NO: 121735 - DNA, 20 bp, synthetic construct
  source 1..20: mol_type = other DNA
cacgctgtttgattccattt

SEQ ID NO: 121736 - DNA, 20 bp, synthetic construct
  source 1..20: mol_type = other DNA
acacgctgtttgattccatt

SEQ ID NO: 121737 - DNA, 20 bp, synthetic construct
  source 1..20: mol_type = other DNA
tacacgctgtttgattccat

SEQ ID NO: 121738 - DNA, 20 bp, synthetic construct
  source 1..20: mol_type = other DNA
ttacacgctgtttgattcca

SEQ ID NO: 121739 - DNA, 20 bp, synthetic construct
  source 1..20: mol_type = other DNA
gttacacgctgtttgattcc

SEQ ID NO: 121740 - DNA, 20 bp, synthetic construct
  source 1..20: mol_type = other DNA
tgttacacgctgtttgattc

SEQ ID NO: 121741 - DNA, 20 bp, synthetic construct
  source 1..20: mol_type = other DNA
ctgttacacgctgtttgatt

SEQ ID NO: 121742 - DNA, 20 bp, synthetic construct
  source 1..20: mol_type = other DNA
tctgttacacgctgtttgat

SEQ ID NO: 121743 - DNA, 20 bp, synthetic construct
  source 1..20: mol_type = other DNA
ctctgttacacgctgtttga

SEQ ID NO: 121744 - DNA, 20 bp, synthetic construct
  source 1..20: mol_type = other DNA
cctctgttacacgctgtttg

SEQ ID NO: 121745 - DNA, 20 bp, synthetic construct
  source 1..20: mol_type = other DNA
acctctgttacacgctgttt

SEQ ID NO: 121746 - DNA, 20 bp, synthetic construct
  source 1..20: mol_type = other DNA
cacctctgttacacgctgtt

SEQ ID NO: 121747 - DNA, 20 bp, synthetic construct
  source 1..20: mol_type = other DNA
acacctctgttacacgctgt

SEQ ID NO: 121748 - DNA, 20 bp, synthetic construct
  source 1..20: mol_type = other DNA
aacacctctgttacacgctg

SEQ ID NO: 121749 - DNA, 20 bp, synthetic construct
  source 1..20: mol_type = other DNA
gaacacctctgttacacgct

SEQ ID NO: 121750 - DNA, 20 bp, synthetic construct
  source 1..20: mol_type = other DNA
tgaacacctctgttacacgc

SEQ ID NO: 121751 - DNA, 20 bp, synthetic construct
  source 1..20: mol_type = other DNA
ttgaacacctctgttacacg

SEQ ID NO: 121752 - DNA, 20 bp, synthetic construct
  source 1..20: mol_type = other DNA
attgaacacctctgttacac

SEQ ID NO: 121753 - DNA, 20 bp, synthetic construct
  source 1..20: mol_type = other DNA
gattgaacacctctgttaca

SEQ ID NO: 121754 - DNA, 20 bp, synthetic construct
  source 1..20: mol_type = other DNA
agattgaacacctctgttac

SEQ ID NO: 121755 - DNA, 20 bp, synthetic construct
  source 1..20: mol_type = other DNA
aagattgaacacctctgtta

SEQ ID NO: 121756 - DNA, 20 bp, synthetic construct
  source 1..20: mol_type = other DNA
aaagattgaacacctctgtt

SEQ ID NO: 121757 - DNA, 20 bp, synthetic construct
  source 1..20: mol_type = other DNA
aaaagattgaacacctctgt

SEQ ID NO: 121758 - DNA, 20 bp, synthetic construct
  source 1..20: mol_type = other DNA
caaaagattgaacacctctg

SEQ ID NO: 121759 - DNA, 20 bp, synthetic construct
  source 1..20: mol_type = other DNA
ccaaaagattgaacacctct

SEQ ID NO: 121760 - DNA, 20 bp, synthetic construct
  source 1..20: mol_type = other DNA
gccaaaagattgaacacctc

SEQ ID NO: 121761 - DNA, 20 bp, synthetic construct
  source 1..20: mol_type = other DNA
agccaaaagattgaacacct

SEQ ID NO: 121762 - DNA, 20 bp, synthetic construct
  source 1..20: mol_type = other DNA
aagccaaaagattgaacacc

SEQ ID NO: 121763 - DNA, 20 bp, synthetic construct
  source 1..20: mol_type = other DNA
gaagccaaaagattgaacac

SEQ ID NO: 121764 - DNA, 20 bp, synthetic construct
  source 1..20: mol_type = other DNA
ggaagccaaaagattgaaca

SEQ ID NO: 121765 - DNA, 20 bp, synthetic construct
  source 1..20: mol_type = other DNA
gggaagccaaaagattgaac

SEQ ID NO: 121766 - DNA, 20 bp, synthetic construct
  source 1..20: mol_type = other DNA
agggaagccaaaagattgaa

SEQ ID NO: 121767 - DNA, 20 bp, synthetic construct
  source 1..20: mol_type = other DNA
cagggaagccaaaagattga

SEQ ID NO: 121768 - DNA, 20 bp, synthetic construct
  source 1..20: mol_type = other DNA
ccagggaagccaaaagattg

SEQ ID NO: 121769 - DNA, 20 bp, synthetic construct
  source 1..20: mol_type = other DNA
cccagggaagccaaaagatt

SEQ ID NO: 121770 - DNA, 20 bp, synthetic construct
  source 1..20: mol_type = other DNA
acccagggaagccaaaagat

SEQ ID NO: 121771 - DNA, 20 bp, synthetic construct
  source 1..20: mol_type = other DNA
gacccagggaagccaaaaga

SEQ ID NO: 121772 - DNA, 20 bp, synthetic construct
  source 1..20: mol_type = other DNA
tgacccagggaagccaaaag

SEQ ID NO: 121773 - DNA, 20 bp, synthetic construct
  source 1..20: mol_type = other DNA
atgacccagggaagccaaaa

SEQ ID NO: 121774 - DNA, 20 bp, synthetic construct
  source 1..20: mol_type = other DNA
tatgacccagggaagccaaa

SEQ ID NO: 121775 - DNA, 20 bp, synthetic construct
  source 1..20: mol_type = other DNA
atatgacccagggaagccaa

SEQ ID NO: 121776 - DNA, 20 bp, synthetic construct
  source 1..20: mol_type = other DNA
aatatgacccagggaagcca

SEQ ID NO: 121777 - DNA, 20 bp, synthetic construct
  source 1..20: mol_type = other DNA
caatatgacccagggaagcc

SEQ ID NO: 121778 - DNA, 20 bp, synthetic construct
  source 1..20: mol_type = other DNA
ccaatatgacccagggaagc

SEQ ID NO: 121779 - DNA, 20 bp, synthetic construct
  source 1..20: mol_type = other DNA
tccaatatgacccagggaag

SEQ ID NO: 121780 - DNA, 20 bp, synthetic construct
  source 1..20: mol_type = other DNA
ttccaatatgacccagggaa

SEQ ID NO: 121781 - DNA, 20 bp, synthetic construct
  source 1..20: mol_type = other DNA
cttccaatatgacccaggga

SEQ ID NO: 121782 - DNA, 20 bp, synthetic construct
  source 1..20: mol_type = other DNA
tcttccaatatgacccaggg

SEQ ID NO: 121783 - DNA, 20 bp, synthetic construct
  source 1..20: mol_type = other DNA
ttcttccaatatgacccagg

SEQ ID NO: 121784 - DNA, 20 bp, synthetic construct
  source 1..20: mol_type = other DNA
cttcttccaatatgacccag

SEQ ID NO: 121785 - DNA, 20 bp, synthetic construct
  source 1..20: mol_type = other DNA
tcttcttccaatatgaccca

SEQ ID NO: 121786 - DNA, 20 bp, synthetic construct
  source 1..20: mol_type = other DNA
ttcttcttccaatatgaccc

SEQ ID NO: 121787 - DNA, 20 bp, synthetic construct
  source 1..20: mol_type = other DNA
attcttcttccaatatgacc

SEQ ID NO: 121788 - DNA, 20 bp, synthetic construct
  source 1..20: mol_type = other DNA
aattcttcttccaatatgac

SEQ ID NO: 121789 - DNA, 20 bp, synthetic construct
  source 1..20: mol_type = other DNA
caattcttcttccaatatga

SEQ ID NO: 121790 - DNA, 20 bp, synthetic construct
  source 1..20: mol_type = other DNA
acaattcttcttccaatatg

SEQ ID NO: 121791 - DNA, 20 bp, synthetic construct
  source 1..20: mol_type = other DNA
cacaattcttcttccaatat

SEQ ID NO: 121792 - DNA, 20 bp, synthetic construct
  source 1..20: mol_type = other DNA
acacaattcttcttccaata

SEQ ID NO: 121793 - DNA, 20 bp, synthetic construct
  source 1..20: mol_type = other DNA
aacacaattcttcttccaat

SEQ ID NO: 121794 - DNA, 20 bp, synthetic construct
  source 1..20: mol_type = other DNA
caacacaattcttcttccaa

SEQ ID NO: 121795 - DNA, 20 bp, synthetic construct
  source 1..20: mol_type = other DNA
ccaacacaattcttcttcca

SEQ ID NO: 121796 - DNA, 20 bp, synthetic construct
  source 1..20: mol_type = other DNA
cccaacacaattcttcttcc

SEQ ID NO: 121797 - DNA, 20 bp, synthetic construct
  source 1..20: mol_type = other DNA
gcccaacacaattcttcttc

SEQ ID NO: 121798 - DNA, 20 bp, synthetic construct
  source 1..20: mol_type = other DNA
ggcccaacacaattcttctt

SEQ ID NO: 121799 - DNA, 20 bp, synthetic construct
  source 1..20: mol_type = other DNA
tggcccaacacaattcttct

SEQ ID NO: 121800 - DNA, 20 bp, synthetic construct
  source 1..20: mol_type = other DNA
gtggcccaacacaattcttc

SEQ ID NO: 121801 - DNA, 20 bp, synthetic construct
  source 1..20: mol_type = other DNA
tgtggcccaacacaattctt

SEQ ID NO: 121802 - DNA, 20 bp, synthetic construct
  source 1..20: mol_type = other DNA
gtgtggcccaacacaattct

SEQ ID NO: 121803 - DNA, 20 bp, synthetic construct
  source 1..20: mol_type = other DNA
tgtgtggcccaacacaattc

SEQ ID NO: 121804 - DNA, 20 bp, synthetic construct
  source 1..20: mol_type = other DNA
atgtgtggcccaacacaatt

SEQ ID NO: 121805 - DNA, 20 bp, synthetic construct
  source 1..20: mol_type = other DNA
tatgtgtggcccaacacaat

SEQ ID NO: 121806 - DNA, 20 bp, synthetic construct
  source 1..20: mol_type = other DNA
ttatgtgtggcccaacacaa

SEQ ID NO: 121807 - DNA, 20 bp, synthetic construct
  source 1..20: mol_type = other DNA
tttatgtgtggcccaacaca

SEQ ID NO: 121808 - DNA, 20 bp, synthetic construct
  source 1..20: mol_type = other DNA
ttttatgtgtggcccaacac

SEQ ID NO: 121809 - DNA, 20 bp, synthetic construct
  source 1..20: mol_type = other DNA
attttatgtgtggcccaaca

SEQ ID NO: 121810 - DNA, 20 bp, synthetic construct
  source 1..20: mol_type = other DNA
tattttatgtgtggcccaac

SEQ ID NO: 121811 - DNA, 20 bp, synthetic construct
  source 1..20: mol_type = other DNA
gtattttatgtgtggcccaa

SEQ ID NO: 121812 - DNA, 20 bp, synthetic construct
  source 1..20: mol_type = other DNA
tgtattttatgtgtggccca

SEQ ID NO: 121813 - DNA, 20 bp, synthetic construct
  source 1..20: mol_type = other DNA
ctgtattttatgtgtggccc

SEQ ID NO: 121814 - DNA, 20 bp, synthetic construct
  source 1..20: mol_type = other DNA
actgtattttatgtgtggcc

SEQ ID NO: 121815 - DNA, 20 bp, synthetic construct
  source 1..20: mol_type = other DNA
tactgtattttatgtgtggc

SEQ ID NO: 121816 - DNA, 20 bp, synthetic construct
  source 1..20: mol_type = other DNA
ttactgtattttatgtgtgg

SEQ ID NO: 121817 - DNA, 20 bp, synthetic construct
  source 1..20: mol_type = other DNA
gttactgtattttatgtgtg

SEQ ID NO: 121818 - DNA, 20 bp, synthetic construct
  source 1..20: mol_type = other DNA
tgttactgtattttatgtgt

SEQ ID NO: 121819 - DNA, 20 bp, synthetic construct
  source 1..20: mol_type = other DNA
gtgttactgtattttatgtg

SEQ ID NO: 121820 - DNA, 20 bp, synthetic construct
  source 1..20: mol_type = other DNA
agtgttactgtattttatgt

SEQ ID NO: 121821 - DNA, 20 bp, synthetic construct
  source 1..20: mol_type = other DNA
tagtgttactgtattttatg

SEQ ID NO: 121822 - DNA, 20 bp, synthetic construct
  source 1..20: mol_type = other DNA
ttagtgttactgtattttat

SEQ ID NO: 121823 - DNA, 20 bp, synthetic construct
  source 1..20: mol_type = other DNA
attagtgttactgtatttta

SEQ ID NO: 121824 - DNA, 20 bp, synthetic construct
  source 1..20: mol_type = other DNA
cattagtgttactgtatttt

SEQ ID NO: 121825 - DNA, 20 bp, synthetic construct
  source 1..20: mol_type = other DNA
tcattagtgttactgtattt

SEQ ID NO: 121826 - DNA, 20 bp, synthetic construct
  source 1..20: mol_type = other DNA
atcattagtgttactgtatt

SEQ ID NO: 121827 - DNA, 20 bp, synthetic construct
  source 1..20: mol_type = other DNA
tatcattagtgttactgtat

SEQ ID NO: 121828 - DNA, 20 bp, synthetic construct
  source 1..20: mol_type = other DNA
ctatcattagtgttactgta

SEQ ID NO: 121829 - DNA, 20 bp, synthetic construct
  source 1..20: mol_type = other DNA
gctatcattagtgttactgt

SEQ ID NO: 121830 - DNA, 20 bp, synthetic construct
  source 1..20: mol_type = other DNA
agctatcattagtgttactg

SEQ ID NO: 121831 - DNA, 20 bp, synthetic construct
  source 1..20: mol_type = other DNA
cagctatcattagtgttact

SEQ ID NO: 121832 - DNA, 20 bp, synthetic construct
  source 1..20: mol_type = other DNA
tcagctatcattagtgttac

SEQ ID NO: 121833 - DNA, 20 bp, synthetic construct
  source 1..20: mol_type = other DNA
atcagctatcattagtgtta

SEQ ID NO: 121834 - DNA, 20 bp, synthetic construct
  source 1..20: mol_type = other DNA
catcagctatcattagtgtt

SEQ ID NO: 121835 - DNA, 20 bp, synthetic construct
  source 1..20: mol_type = other DNA
tcatcagctatcattagtgt

SEQ ID NO: 121836 - DNA, 20 bp, synthetic construct
  source 1..20: mol_type = other DNA
ttcatcagctatcattagtg

SEQ ID NO: 121837 - DNA, 20 bp, synthetic construct
  source 1..20: mol_type = other DNA
gttcatcagctatcattagt

SEQ ID NO: 121838 - DNA, 20 bp, synthetic construct
  source 1..20: mol_type = other DNA
tgttcatcagctatcattag

SEQ ID NO: 121839 - DNA, 20 bp, synthetic construct
  source 1..20: mol_type = other DNA
ttgttcatcagctatcatta

SEQ ID NO: 121840 - DNA, 20 bp, synthetic construct
  source 1..20: mol_type = other DNA
tttgttcatcagctatcatt

SEQ ID NO: 121841 - DNA, 20 bp, synthetic construct
  source 1..20: mol_type = other DNA
ttttgttcatcagctatcat

SEQ ID NO: 121842 - DNA, 20 bp, synthetic construct
  source 1..20: mol_type = other DNA
gttttgttcatcagctatca

SEQ ID NO: 121843 - DNA, 20 bp, synthetic construct
  source 1..20: mol_type = other DNA
tgttttgttcatcagctatc

SEQ ID NO: 121844 - DNA, 20 bp, synthetic construct
  source 1..20: mol_type = other DNA
ttgttttgttcatcagctat

SEQ ID NO: 121845 - DNA, 20 bp, synthetic construct
  source 1..20: mol_type = other DNA
tttgttttgttcatcagcta

SEQ ID NO: 121846 - DNA, 20 bp, synthetic construct
  source 1..20: mol_type = other DNA
ttttgttttgttcatcagct

SEQ ID NO: 121847 - DNA, 20 bp, synthetic construct
  source 1..20: mol_type = other DNA
tttttgttttgttcatcagc

SEQ ID NO: 121848 - DNA, 20 bp, synthetic construct
  source 1..20: mol_type = other DNA
ttttttgttttgttcatcag

SEQ ID NO: 121849 - DNA, 20 bp, synthetic construct
  source 1..20: mol_type = other DNA
tttttttgttttgttcatca

SEQ ID NO: 121850 - DNA, 20 bp, synthetic construct
  source 1..20: mol_type = other DNA
ttttttttgttttgttcatc

SEQ ID NO: 121851 - DNA, 20 bp, synthetic construct
  source 1..20: mol_type = other DNA
tttttttttgttttgttcat

SEQ ID NO: 121852 - DNA, 20 bp, synthetic construct
  source 1..20: mol_type = other DNA
atttttttttgttttgttca

SEQ ID NO: 121853 - DNA, 20 bp, synthetic construct
  source 1..20: mol_type = other DNA
tatttttttttgttttgttc

SEQ ID NO: 121854 - DNA, 20 bp, synthetic construct
  source 1..20: mol_type = other DNA
ctatttttttttgttttgtt

SEQ ID NO: 121855 - DNA, 20 bp, synthetic construct
  source 1..20: mol_type = other DNA
gctatttttttttgttttgt

SEQ ID NO: 121856 - DNA, 20 bp, synthetic construct
  source 1..20: mol_type = other DNA
tgctatttttttttgttttg

SEQ ID NO: 121857 - DNA, 20 bp, synthetic construct
  source 1..20: mol_type = other DNA
ttgctatttttttttgtttt

SEQ ID NO: 121858 - DNA, 20 bp, synthetic construct
  source 1..20: mol_type = other DNA
tttgctatttttttttgttt

SEQ ID NO: 121859 - DNA, 20 bp, synthetic construct
  source 1..20: mol_type = other DNA
ttttgctatttttttttgtt

SEQ ID NO: 121860 - DNA, 20 bp, synthetic construct
  source 1..20: mol_type = other DNA
gttttgctatttttttttgt

SEQ ID NO: 121861 - DNA, 20 bp, synthetic construct
  source 1..20: mol_type = other DNA
agttttgctatttttttttg

SEQ ID NO: 121862 - DNA, 20 bp, synthetic construct
  source 1..20: mol_type = other DNA
aagttttgctattttttttt

SEQ ID NO: 121863 - DNA, 20 bp, synthetic construct
  source 1..20: mol_type = other DNA
taagttttgctatttttttt

SEQ ID NO: 121864 - DNA, 20 bp, synthetic construct
  source 1..20: mol_type = other DNA
ataagttttgctattttttt

SEQ ID NO: 121865 - DNA, 20 bp, synthetic construct
  source 1..20: mol_type = other DNA
tataagttttgctatttttt

SEQ ID NO: 121866 - DNA, 20 bp, synthetic construct
  source 1..20: mol_type = other DNA
ttataagttttgctattttt

SEQ ID NO: 121867 - DNA, 20 bp, synthetic construct
  source 1..20: mol_type = other DNA
attataagttttgctatttt

SEQ ID NO: 121868 - DNA, 20 bp, synthetic construct
  source 1..20: mol_type = other DNA
cattataagttttgctattt

SEQ ID NO: 121869 - DNA, 20 bp, synthetic construct
  source 1..20: mol_type = other DNA
acattataagttttgctatt

SEQ ID NO: 121870 - DNA, 20 bp, synthetic construct
  source 1..20: mol_type = other DNA
aacattataagttttgctat

SEQ ID NO: 121871 - DNA, 20 bp, synthetic construct
  source 1..20: mol_type = other DNA
aaacattataagttttgcta

SEQ ID NO: 121872 - DNA, 20 bp, synthetic construct
  source 1..20: mol_type = other DNA
aaaacattataagttttgct

SEQ ID NO: 121873 - DNA, 20 bp, synthetic construct
  source 1..20: mol_type = other DNA
taaaacattataagttttgc

SEQ ID NO: 121874 - DNA, 20 bp, synthetic construct
  source 1..20: mol_type = other DNA
ttaaaacattataagttttg

SEQ ID NO: 121875 - DNA, 20 bp, synthetic construct
  source 1..20: mol_type = other DNA
cttaaaacattataagtttt

SEQ ID NO: 121876 - DNA, 20 bp, synthetic construct
  source 1..20: mol_type = other DNA
tcttaaaacattataagttt

SEQ ID NO: 121877 - DNA, 20 bp, synthetic construct
  source 1..20: mol_type = other DNA
ttcttaaaacattataagtt

SEQ ID NO: 121878 - DNA, 20 bp, synthetic construct
  source 1..20: mol_type = other DNA
tttcttaaaacattataagt

SEQ ID NO: 121879 - DNA, 20 bp, synthetic construct
  source 1..20: mol_type = other DNA
ctttcttaaaacattataag

SEQ ID NO: 121880 - DNA, 20 bp, synthetic construct
  source 1..20: mol_type = other DNA
actttcttaaaacattataa

SEQ ID NO: 121881 - DNA, 20 bp, synthetic construct
  source 1..20: mol_type = other DNA
aactttcttaaaacattata

SEQ ID NO: 121882 - DNA, 20 bp, synthetic construct
  source 1..20: mol_type = other DNA
aaactttcttaaaacattat

SEQ ID NO: 121883 - DNA, 20 bp, synthetic construct
  source 1..20: mol_type = other DNA
taaactttcttaaaacatta

SEQ ID NO: 121884 - DNA, 20 bp, synthetic construct
  source 1..20: mol_type = other DNA
ataaactttcttaaaacatt

SEQ ID NO: 121885 - DNA, 20 bp, synthetic construct
  source 1..20: mol_type = other DNA
cataaactttcttaaaacat

SEQ ID NO: 121886 - DNA, 20 bp, synthetic construct
  source 1..20: mol_type = other DNA
tcataaactttcttaaaaca

SEQ ID NO: 121887 - DNA, 20 bp, synthetic construct
  source 1..20: mol_type = other DNA
ttcataaactttcttaaaac

SEQ ID NO: 121888 - DNA, 20 bp, synthetic construct
  source 1..20: mol_type = other DNA
attcataaactttcttaaaa

SEQ ID NO: 121889 - DNA, 20 bp, synthetic construct
  source 1..20: mol_type = other DNA
aattcataaactttcttaaa

SEQ ID NO: 121890 - DNA, 20 bp, synthetic construct
  source 1..20: mol_type = other DNA
aaattcataaactttcttaa

SEQ ID NO: 121891 - DNA, 20 bp, synthetic construct
  source 1..20: mol_type = other DNA
caaattcataaactttctta

SEQ ID NO: 121892 - DNA, 20 bp, synthetic construct
  source 1..20: mol_type = other DNA
acaaattcataaactttctt

SEQ ID NO: 121893 - DNA, 20 bp, synthetic construct
  source 1..20: mol_type = other DNA
cacaaattcataaactttct

SEQ ID NO: 121894 - DNA, 20 bp, synthetic construct
  source 1..20: mol_type = other DNA
acacaaattcataaactttc

SEQ ID NO: 121895 - DNA, 20 bp, synthetic construct
  source 1..20: mol_type = other DNA
aacacaaattcataaacttt

SEQ ID NO: 121896 - DNA, 20 bp, synthetic construct
  source 1..20: mol_type = other DNA
caacacaaattcataaactt

SEQ ID NO: 121897 - DNA, 20 bp, synthetic construct
  source 1..20: mol_type = other DNA
ccaacacaaattcataaact

SEQ ID NO: 121898 - DNA, 20 bp, synthetic construct
  source 1..20: mol_type = other DNA
cccaacacaaattcataaac

SEQ ID NO: 121899 - DNA, 20 bp, synthetic construct
  source 1..20: mol_type = other DNA
gcccaacacaaattcataaa

SEQ ID NO: 121900 - DNA, 20 bp, synthetic construct
  source 1..20: mol_type = other DNA
ggcccaacacaaattcataa

SEQ ID NO: 121901 - DNA, 20 bp, synthetic construct
  source 1..20: mol_type = other DNA
tggcccaacacaaattcata

SEQ ID NO: 121902 - DNA, 20 bp, synthetic construct
  source 1..20: mol_type = other DNA
gtggcccaacacaaattcat

SEQ ID NO: 121903 - DNA, 20 bp, synthetic construct
  source 1..20: mol_type = other DNA
tgtggcccaacacaaattca

SEQ ID NO: 121904 - DNA, 20 bp, synthetic construct
  source 1..20: mol_type = other DNA
atgtggcccaacacaaattc

SEQ ID NO: 121905 - DNA, 20 bp, synthetic construct
  source 1..20: mol_type = other DNA
aatgtggcccaacacaaatt

SEQ ID NO: 121906 - DNA, 20 bp, synthetic construct
  source 1..20: mol_type = other DNA
gaatgtggcccaacacaaat

SEQ ID NO: 121907 - DNA, 20 bp, synthetic construct
  source 1..20: mol_type = other DNA
tgaatgtggcccaacacaaa

SEQ ID NO: 121908 - DNA, 20 bp, synthetic construct
  source 1..20: mol_type = other DNA
ttgaatgtggcccaacacaa

SEQ ID NO: 121909 - DNA, 20 bp, synthetic construct
  source 1..20: mol_type = other DNA
tttgaatgtggcccaacaca

SEQ ID NO: 121910 - DNA, 20 bp, synthetic construct
  source 1..20: mol_type = other DNA
ctttgaatgtggcccaacac

SEQ ID NO: 121911 - DNA, 20 bp, synthetic construct
  source 1..20: mol_type = other DNA
gctttgaatgtggcccaaca

SEQ ID NO: 121912 - DNA, 20 bp, synthetic construct
  source 1..20: mol_type = other DNA
ggctttgaatgtggcccaac

SEQ ID NO: 121913 - DNA, 20 bp, synthetic construct
  source 1..20: mol_type = other DNA
cggctttgaatgtggcccaa

SEQ ID NO: 121914 - DNA, 20 bp, synthetic construct
  source 1..20: mol_type = other DNA
acggctttgaatgtggccca

SEQ ID NO: 121915 - DNA, 20 bp, synthetic construct
  source 1..20: mol_type = other DNA
gacggctttgaatgtggccc

SEQ ID NO: 121916 - DNA, 20 bp, synthetic construct
  source 1..20: mol_type = other DNA
ggacggctttgaatgtggcc

SEQ ID NO: 121917 - DNA, 20 bp, synthetic construct
  source 1..20: mol_type = other DNA
gggacggctttgaatgtggc

SEQ ID NO: 121918 - DNA, 20 bp, synthetic construct
  source 1..20: mol_type = other DNA
tgggacggctttgaatgtgg

SEQ ID NO: 121919 - DNA, 20 bp, synthetic construct
  source 1..20: mol_type = other DNA
ctgggacggctttgaatgtg

SEQ ID NO: 121920 - DNA, 20 bp, synthetic construct
  source 1..20: mol_type = other DNA
cctgggacggctttgaatgt

SEQ ID NO: 121921 - DNA, 20 bp, synthetic construct
  source 1..20: mol_type = other DNA
tcctgggacggctttgaatg

SEQ ID NO: 121922 - DNA, 20 bp, synthetic construct
  source 1..20: mol_type = other DNA
gtcctgggacggctttgaat

SEQ ID NO: 121923 - DNA, 20 bp, synthetic construct
  source 1..20: mol_type = other DNA
cgtcctgggacggctttgaa

SEQ ID NO: 121924 - DNA, 20 bp, synthetic construct
  source 1..20: mol_type = other DNA
gcgtcctgggacggctttga

SEQ ID NO: 121925 - DNA, 20 bp, synthetic construct
  source 1..20: mol_type = other DNA
tgcgtcctgggacggctttg

SEQ ID NO: 121926 - DNA, 20 bp, synthetic construct
  source 1..20: mol_type = other DNA
ttgcgtcctgggacggcttt

SEQ ID NO: 121927 - DNA, 20 bp, synthetic construct
  source 1..20: mol_type = other DNA
cttgcgtcctgggacggctt

SEQ ID NO: 121928 - DNA, 20 bp, synthetic construct
  source 1..20: mol_type = other DNA
acttgcgtcctgggacggct

SEQ ID NO: 121929 - DNA, 20 bp, synthetic construct
  source 1..20: mol_type = other DNA
aacttgcgtcctgggacggc

SEQ ID NO: 121930 - DNA, 20 bp, synthetic construct
  source 1..20: mol_type = other DNA
caacttgcgtcctgggacgg

SEQ ID NO: 121931 - DNA, 20 bp, synthetic construct
  source 1..20: mol_type = other DNA
ccaacttgcgtcctgggacg

SEQ ID NO: 121932 - DNA, 20 bp, synthetic construct
  source 1..20: mol_type = other DNA
tccaacttgcgtcctgggac

SEQ ID NO: 121933 - DNA, 20 bp, synthetic construct
  source 1..20: mol_type = other DNA
gtccaacttgcgtcctggga

SEQ ID NO: 121934 - DNA, 20 bp, synthetic construct
  source 1..20: mol_type = other DNA
tgtccaacttgcgtcctggg

SEQ ID NO: 121935 - DNA, 20 bp, synthetic construct
  source 1..20: mol_type = other DNA
ttgtccaacttgcgtcctgg

SEQ ID NO: 121936 - DNA, 20 bp, synthetic construct
  source 1..20: mol_type = other DNA
cttgtccaacttgcgtcctg

SEQ ID NO: 121937 - DNA, 20 bp, synthetic construct
  source 1..20: mol_type = other DNA
gcttgtccaacttgcgtcct

SEQ ID NO: 121938 - DNA, 20 bp, synthetic construct
  source 1..20: mol_type = other DNA
agcttgtccaacttgcgtcc

SEQ ID NO: 121939 - DNA, 20 bp, synthetic construct
  source 1..20: mol_type = other DNA
aagcttgtccaacttgcgtc

SEQ ID NO: 121940 - DNA, 20 bp, synthetic construct
  source 1..20: mol_type = other DNA
caagcttgtccaacttgcgt

SEQ ID NO: 121941 - DNA, 20 bp, synthetic construct
  source 1..20: mol_type = other DNA
ccaagcttgtccaacttgcg

SEQ ID NO: 121942 - DNA, 20 bp, synthetic construct
  source 1..20: mol_type = other DNA
accaagcttgtccaacttgc

SEQ ID NO: 121943 - DNA, 20 bp, synthetic construct
  source 1..20: mol_type = other DNA
taccaagcttgtccaacttg

SEQ ID NO: 121944 - DNA, 20 bp, synthetic construct
  source 1..20: mol_type = other DNA
ataccaagcttgtccaactt

SEQ ID NO: 121945 - DNA, 20 bp, synthetic construct
  source 1..20: mol_type = other DNA
tataccaagcttgtccaact

SEQ ID NO: 121946 - DNA, 20 bp, synthetic construct
  source 1..20: mol_type = other DNA
atataccaagcttgtccaac

SEQ ID NO: 121947 - DNA, 20 bp, synthetic construct
  source 1..20: mol_type = other DNA
tatataccaagcttgtccaa

SEQ ID NO: 121948 - DNA, 20 bp, synthetic construct
  source 1..20: mol_type = other DNA
ttatataccaagcttgtcca

SEQ ID NO: 121949 - DNA, 20 bp, synthetic construct
  source 1..20: mol_type = other DNA
attatataccaagcttgtcc

SEQ ID NO: 121950 - DNA, 20 bp, synthetic construct
  source 1..20: mol_type = other DNA
aattatataccaagcttgtc

SEQ ID NO: 121951 - DNA, 20 bp, synthetic construct
  source 1..20: mol_type = other DNA
aaattatataccaagcttgt

SEQ ID NO: 121952 - DNA, 20 bp, synthetic construct
  source 1..20: mol_type = other DNA
gaaattatataccaagcttg

SEQ ID NO: 121953 - DNA, 20 bp, synthetic construct
  source 1..20: mol_type = other DNA
tgaaattatataccaagctt

SEQ ID NO: 121954 - DNA, 20 bp, synthetic construct
  source 1..20: mol_type = other DNA
atgaaattatataccaagct

SEQ ID NO: 121955 - DNA, 20 bp, synthetic construct
  source 1..20: mol_type = other DNA
tatgaaattatataccaagc

SEQ ID NO: 121956 - DNA, 20 bp, synthetic construct
  source 1..20: mol_type = other DNA
atatgaaattatataccaag

SEQ ID NO: 121957 - DNA, 20 bp, synthetic construct
  source 1..20: mol_type = other DNA
catatgaaattatataccaa

SEQ ID NO: 121958 - DNA, 20 bp, synthetic construct
  source 1..20: mol_type = other DNA
acatatgaaattatatacca

SEQ ID NO: 121959 - DNA, 20 bp, synthetic construct
  source 1..20: mol_type = other DNA
cacatatgaaattatatacc

SEQ ID NO: 121960 - DNA, 20 bp, synthetic construct
  source 1..20: mol_type = other DNA
acacatatgaaattatatac

SEQ ID NO: 121961 - DNA, 20 bp, synthetic construct
  source 1..20: mol_type = other DNA
cacacatatgaaattatata

SEQ ID NO: 121962 - DNA, 20 bp, synthetic construct
  source 1..20: mol_type = other DNA
acacacatatgaaattatat

SEQ ID NO: 121963 - DNA, 20 bp, synthetic construct
  source 1..20: mol_type = other DNA
gacacacatatgaaattata

SEQ ID NO: 121964 - DNA, 20 bp, synthetic construct
  source 1..20: mol_type = other DNA
ggacacacatatgaaattat

SEQ ID NO: 121965 - DNA, 20 bp, synthetic construct
  source 1..20: mol_type = other DNA
aggacacacatatgaaatta

SEQ ID NO: 121966 - DNA, 20 bp, synthetic construct
  source 1..20: mol_type = other DNA
taggacacacatatgaaatt

SEQ ID NO: 121967 - DNA, 20 bp, synthetic construct
  source 1..20: mol_type = other DNA
ttaggacacacatatgaaat

SEQ ID NO: 121968 - DNA, 20 bp, synthetic construct
  source 1..20: mol_type = other DNA
tttaggacacacatatgaaa

SEQ ID NO: 121969 - DNA, 20 bp, synthetic construct
  source 1..20: mol_type = other DNA
gtttaggacacacatatgaa

SEQ ID NO: 121970 - DNA, 20 bp, synthetic construct
  source 1..20: mol_type = other DNA
tgtttaggacacacatatga

SEQ ID NO: 121971 - DNA, 20 bp, synthetic construct
  source 1..20: mol_type = other DNA
ctgtttaggacacacatatg

SEQ ID NO: 121972 - DNA, 20 bp, synthetic construct
  source 1..20: mol_type = other DNA
actgtttaggacacacatat

SEQ ID NO: 121973 - DNA, 20 bp, synthetic construct
  source 1..20: mol_type = other DNA
cactgtttaggacacacata

SEQ ID NO: 121974 - DNA, 20 bp, synthetic construct
  source 1..20: mol_type = other DNA
acactgtttaggacacacat

SEQ ID NO: 121975 - DNA, 20 bp, synthetic construct
  source 1..20: mol_type = other DNA
tacactgtttaggacacaca

SEQ ID NO: 121976 - DNA, 20 bp, synthetic construct
  source 1..20: mol_type = other DNA
ctacactgtttaggacacac

SEQ ID NO: 121977 - DNA, 20 bp, synthetic construct
  source 1..20: mol_type = other DNA
actacactgtttaggacaca

SEQ ID NO: 121978 - DNA, 20 bp, synthetic construct
  source 1..20: mol_type = other DNA
tactacactgtttaggacac

SEQ ID NO: 121979 - DNA, 20 bp, synthetic construct
  source 1..20: mol_type = other DNA
ttactacactgtttaggaca

SEQ ID NO: 121980 - DNA, 20 bp, synthetic construct
  source 1..20: mol_type = other DNA
attactacactgtttaggac

SEQ ID NO: 121981 - DNA, 20 bp, synthetic construct
  source 1..20: mol_type = other DNA
aattactacactgtttagga

SEQ ID NO: 121982 - DNA, 20 bp, synthetic construct
  source 1..20: mol_type = other DNA
aaattactacactgtttagg

SEQ ID NO: 121983 - DNA, 20 bp, synthetic construct
  source 1..20: mol_type = other DNA
caaattactacactgtttag

SEQ ID NO: 121984 - DNA, 20 bp, synthetic construct
  source 1..20: mol_type = other DNA
tcaaattactacactgttta

SEQ ID NO: 121985 - DNA, 20 bp, synthetic construct
  source 1..20: mol_type = other DNA
ttcaaattactacactgttt

SEQ ID NO: 121986 - DNA, 20 bp, synthetic construct
  source 1..20: mol_type = other DNA
attcaaattactacactgtt

SEQ ID NO: 121987 - DNA, 20 bp, synthetic construct
  source 1..20: mol_type = other DNA
aattcaaattactacactgt

SEQ ID NO: 121988 - DNA, 20 bp, synthetic construct
  source 1..20: mol_type = other DNA
aaattcaaattactacactg

SEQ ID NO: 121989 - DNA, 20 bp, synthetic construct
  source 1..20: mol_type = other DNA
gaaattcaaattactacact

SEQ ID NO: 121990 - DNA, 20 bp, synthetic construct
  source 1..20: mol_type = other DNA
tgaaattcaaattactacac

SEQ ID NO: 121991 - DNA, 20 bp, synthetic construct
  source 1..20: mol_type = other DNA
atgaaattcaaattactaca

SEQ ID NO: 121992 - DNA, 20 bp, synthetic construct
  source 1..20: mol_type = other DNA
catgaaattcaaattactac

SEQ ID NO: 121993 - DNA, 20 bp, synthetic construct
  source 1..20: mol_type = other DNA
acatgaaattcaaattacta

SEQ ID NO: 121994 - DNA, 20 bp, synthetic construct
  source 1..20: mol_type = other DNA
aacatgaaattcaaattact

SEQ ID NO: 121995 - DNA, 20 bp, synthetic construct
  source 1..20: mol_type = other DNA
taacatgaaattcaaattac

SEQ ID NO: 121996 - DNA, 20 bp, synthetic construct
  source 1..20: mol_type = other DNA
ctaacatgaaattcaaatta

SEQ ID NO: 121997 - DNA, 20 bp, synthetic construct
  source 1..20: mol_type = other DNA
actaacatgaaattcaaatt

SEQ ID NO: 121998 - DNA, 20 bp, synthetic construct
  source 1..20: mol_type = other DNA
tactaacatgaaattcaaat

SEQ ID NO: 121999 - DNA, 20 bp, synthetic construct
  source 1..20: mol_type = other DNA
atactaacatgaaattcaaa

SEQ ID NO: 122000 - DNA, 20 bp, synthetic construct
  source 1..20: mol_type = other DNA
gatactaacatgaaattcaa

SEQ ID NO: 122001 - DNA, 20 bp, synthetic construct
  source 1..20: mol_type = other DNA
tgatactaacatgaaattca

SEQ ID NO: 122002 - DNA, 20 bp, synthetic construct
  source 1..20: mol_type = other DNA
ctgatactaacatgaaattc

SEQ ID NO: 122003 - DNA, 20 bp, synthetic construct
  source 1..20: mol_type = other DNA
gctgatactaacatgaaatt

SEQ ID NO: 122004 - DNA, 20 bp, synthetic construct
  source 1..20: mol_type = other DNA
agctgatactaacatgaaat

SEQ ID NO: 122005 - DNA, 20 bp, synthetic construct
  source 1..20: mol_type = other DNA
aagctgatactaacatgaaa

SEQ ID NO: 122006 - DNA, 20 bp, synthetic construct
  source 1..20: mol_type = other DNA
taagctgatactaacatgaa

SEQ ID NO: 122007 - DNA, 20 bp, synthetic construct
  source 1..20: mol_type = other DNA
ataagctgatactaacatga

SEQ ID NO: 122008 - DNA, 20 bp, synthetic construct
  source 1..20: mol_type = other DNA
aataagctgatactaacatg

SEQ ID NO: 122009 - DNA, 20 bp, synthetic construct
  source 1..20: mol_type = other DNA
gaataagctgatactaacat

SEQ ID NO: 122010 - DNA, 20 bp, synthetic construct
  source 1..20: mol_type = other DNA
ggaataagctgatactaaca

SEQ ID NO: 122011 - DNA, 20 bp, synthetic construct
  source 1..20: mol_type = other DNA
aggaataagctgatactaac

SEQ ID NO: 122012 - DNA, 20 bp, synthetic construct
  source 1..20: mol_type = other DNA
aaggaataagctgatactaa

SEQ ID NO: 122013 - DNA, 20 bp, synthetic construct
  source 1..20: mol_type = other DNA
aaaggaataagctgatacta

SEQ ID NO: 122014 - DNA, 20 bp, synthetic construct
  source 1..20: mol_type = other DNA
aaaaggaataagctgatact

SEQ ID NO: 122015 - DNA, 20 bp, synthetic construct
  source 1..20: mol_type = other DNA
aaaaaggaataagctgatac

SEQ ID NO: 122016 - DNA, 20 bp, synthetic construct
  source 1..20: mol_type = other DNA
caaaaaggaataagctgata

SEQ ID NO: 122017 - DNA, 20 bp, synthetic construct
  source 1..20: mol_type = other DNA
acaaaaaggaataagctgat

SEQ ID NO: 122018 - DNA, 20 bp, synthetic construct
  source 1..20: mol_type = other DNA
aacaaaaaggaataagctga

SEQ ID NO: 122019 - DNA, 20 bp, synthetic construct
  source 1..20: mol_type = other DNA
aaacaaaaaggaataagctg

SEQ ID NO: 122020 - DNA, 20 bp, synthetic construct
  source 1..20: mol_type = other DNA
caaacaaaaaggaataagct

SEQ ID NO: 122021 - DNA, 20 bp, synthetic construct
  source 1..20: mol_type = other DNA
acaaacaaaaaggaataagc

SEQ ID NO: 122022 - DNA, 20 bp, synthetic construct
  source 1..20: mol_type = other DNA
aacaaacaaaaaggaataag

SEQ ID NO: 122023 - DNA, 20 bp, synthetic construct
  source 1..20: mol_type = other DNA
aaacaaacaaaaaggaataa

SEQ ID NO: 122024 - DNA, 20 bp, synthetic construct
  source 1..20: mol_type = other DNA
caaacaaacaaaaaggaata

SEQ ID NO: 122025 - DNA, 20 bp, synthetic construct
  source 1..20: mol_type = other DNA
acaaacaaacaaaaaggaat

SEQ ID NO: 122026 - DNA, 20 bp, synthetic construct
  source 1..20: mol_type = other DNA
aacaaacaaacaaaaaggaa

SEQ ID NO: 122027 - DNA, 20 bp, synthetic construct
  source 1..20: mol_type = other DNA
aaacaaacaaacaaaaagga

SEQ ID NO: 122028 - DNA, 20 bp, synthetic construct
  source 1..20: mol_type = other DNA
caaacaaacaaacaaaaagg

SEQ ID NO: 122029 - DNA, 20 bp, synthetic construct
  source 1..20: mol_type = other DNA
acaaacaaacaaacaaaaag

SEQ ID NO: 122030 - DNA, 20 bp, synthetic construct
  source 1..20: mol_type = other DNA
aacaaacaaacaaacaaaaa

SEQ ID NO: 122031 - DNA, 20 bp, synthetic construct
  source 1..20: mol_type = other DNA
aaacaaacaaacaaacaaaa

SEQ ID NO: 122032 - DNA, 20 bp, synthetic construct
  source 1..20: mol_type = other DNA
aaaacaaacaaacaaacaaa

SEQ ID NO: 122033 - DNA, 20 bp, synthetic construct
  source 1..20: mol_type = other DNA
aaaaacaaacaaacaaacaa

SEQ ID NO: 122034 - DNA, 20 bp, synthetic construct
  source 1..20: mol_type = other DNA
caaaaacaaacaaacaaaca

SEQ ID NO: 122035 - DNA, 20 bp, synthetic construct
  source 1..20: mol_type = other DNA
tcaaaaacaaacaaacaaac

SEQ ID NO: 122036 - DNA, 20 bp, synthetic construct
  source 1..20: mol_type = other DNA
ctcaaaaacaaacaaacaaa

SEQ ID NO: 122037 - DNA, 20 bp, synthetic construct
  source 1..20: mol_type = other DNA
tctcaaaaacaaacaaacaa

SEQ ID NO: 122038 - DNA, 20 bp, synthetic construct
  source 1..20: mol_type = other DNA
atctcaaaaacaaacaaaca

SEQ ID NO: 122039 - DNA, 20 bp, synthetic construct
  source 1..20: mol_type = other DNA
catctcaaaaacaaacaaac

SEQ ID NO: 122040 - DNA, 20 bp, synthetic construct
  source 1..20: mol_type = other DNA
ccatctcaaaaacaaacaaa

SEQ ID NO: 122041 - DNA, 20 bp, synthetic construct
  source 1..20: mol_type = other DNA
tccatctcaaaaacaaacaa

SEQ ID NO: 122042 - DNA, 20 bp, synthetic construct
  source 1..20: mol_type = other DNA
ctccatctcaaaaacaaaca

SEQ ID NO: 122043 - DNA, 20 bp, synthetic construct
  source 1..20: mol_type = other DNA
actccatctcaaaaacaaac

SEQ ID NO: 122044 - DNA, 20 bp, synthetic construct
  source 1..20: mol_type = other DNA
gactccatctcaaaaacaaa

SEQ ID NO: 122045 - DNA, 20 bp, synthetic construct
  source 1..20: mol_type = other DNA
agactccatctcaaaaacaa

SEQ ID NO: 122046 - DNA, 20 bp, synthetic construct
  source 1..20: mol_type = other DNA
aagactccatctcaaaaaca

SEQ ID NO: 122047 - DNA, 20 bp, synthetic construct
  source 1..20: mol_type = other DNA
caagactccatctcaaaaac

SEQ ID NO: 122048 - DNA, 20 bp, synthetic construct
  source 1..20: mol_type = other DNA
acaagactccatctcaaaaa

SEQ ID NO: 122049 - DNA, 20 bp, synthetic construct
  source 1..20: mol_type = other DNA
aacaagactccatctcaaaa

SEQ ID NO: 122050 - DNA, 20 bp, synthetic construct
  source 1..20: mol_type = other DNA
gaacaagactccatctcaaa

SEQ ID NO: 122051 - DNA, 20 bp, synthetic construct
  source 1..20: mol_type = other DNA
agaacaagactccatctcaa

SEQ ID NO: 122052 - DNA, 20 bp, synthetic construct
  source 1..20: mol_type = other DNA
cagaacaagactccatctca

SEQ ID NO: 122053 - DNA, 20 bp, synthetic construct
  source 1..20: mol_type = other DNA
acagaacaagactccatctc

SEQ ID NO: 122054 - DNA, 20 bp, synthetic construct
  source 1..20: mol_type = other DNA
cacagaacaagactccatct

SEQ ID NO: 122055 - DNA, 20 bp, synthetic construct
  source 1..20: mol_type = other DNA
acacagaacaagactccatc

SEQ ID NO: 122056 - DNA, 20 bp, synthetic construct
  source 1..20: mol_type = other DNA
gacacagaacaagactccat

SEQ ID NO: 122057 - DNA, 20 bp, synthetic construct
  source 1..20: mol_type = other DNA
ggacacagaacaagactcca

SEQ ID NO: 122058 - DNA, 20 bp, synthetic construct
  source 1..20: mol_type = other DNA
gggacacagaacaagactcc

SEQ ID NO: 122059 - DNA, 20 bp, synthetic construct
  source 1..20: mol_type = other DNA
tgggacacagaacaagactc

SEQ ID NO: 122060 - DNA, 20 bp, synthetic construct
  source 1..20: mol_type = other DNA
ctgggacacagaacaagact

SEQ ID NO: 122061 - DNA, 20 bp, synthetic construct
  source 1..20: mol_type = other DNA
tctgggacacagaacaagac

SEQ ID NO: 122062 - DNA, 20 bp, synthetic construct
  source 1..20: mol_type = other DNA
ttctgggacacagaacaaga

SEQ ID NO: 122063 - DNA, 20 bp, synthetic construct
  source 1..20: mol_type = other DNA
attctgggacacagaacaag

SEQ ID NO: 122064 - DNA, 20 bp, synthetic construct
  source 1..20: mol_type = other DNA
aattctgggacacagaacaa

SEQ ID NO: 122065 - DNA, 20 bp, synthetic construct
  source 1..20: mol_type = other DNA
caattctgggacacagaaca

SEQ ID NO: 122066 - DNA, 20 bp, synthetic construct
  source 1..20: mol_type = other DNA
ccaattctgggacacagaac

SEQ ID NO: 122067 - DNA, 20 bp, synthetic construct
  source 1..20: mol_type = other DNA
accaattctgggacacagaa

SEQ ID NO: 122068 - DNA, 20 bp, synthetic construct
  source 1..20: mol_type = other DNA
gaccaattctgggacacaga

SEQ ID NO: 122069 - DNA, 20 bp, synthetic construct
  source 1..20: mol_type = other DNA
agaccaattctgggacacag

SEQ ID NO: 122070 - DNA, 20 bp, synthetic construct
  source 1..20: mol_type = other DNA
cagaccaattctgggacaca

SEQ ID NO: 122071 - DNA, 20 bp, synthetic construct
  source 1..20: mol_type = other DNA
gcagaccaattctgggacac

SEQ ID NO: 122072 - DNA, 20 bp, synthetic construct
  source 1..20: mol_type = other DNA
tgcagaccaattctgggaca

SEQ ID NO: 122073 - DNA, 20 bp, synthetic construct
  source 1..20: mol_type = other DNA
ttgcagaccaattctgggac

SEQ ID NO: 122074 - DNA, 20 bp, synthetic construct
  source 1..20: mol_type = other DNA
attgcagaccaattctggga

SEQ ID NO: 122075 - DNA, 20 bp, synthetic construct
  source 1..20: mol_type = other DNA
aattgcagaccaattctggg

SEQ ID NO: 122076 - DNA, 20 bp, synthetic construct
  source 1..20: mol_type = other DNA
gaattgcagaccaattctgg

SEQ ID NO: 122077 - DNA, 20 bp, synthetic construct
  source 1..20: mol_type = other DNA
ggaattgcagaccaattctg

SEQ ID NO: 122078 - DNA, 20 bp, synthetic construct
  source 1..20: mol_type = other DNA
tggaattgcagaccaattct

SEQ ID NO: 122079 - DNA, 20 bp, synthetic construct
  source 1..20: mol_type = other DNA
gtggaattgcagaccaattc

SEQ ID NO: 122080 - DNA, 20 bp, synthetic construct
  source 1..20: mol_type = other DNA
agtggaattgcagaccaatt

SEQ ID NO: 122081 - DNA, 20 bp, synthetic construct
  source 1..20: mol_type = other DNA
cagtggaattgcagaccaat

SEQ ID NO: 122082 - DNA, 20 bp, synthetic construct
  source 1..20: mol_type = other DNA
gcagtggaattgcagaccaa

SEQ ID NO: 122083 - DNA, 20 bp, synthetic construct
  source 1..20: mol_type = other DNA
ggcagtggaattgcagacca

SEQ ID NO: 122084 - DNA, 20 bp, synthetic construct
  source 1..20: mol_type = other DNA
aggcagtggaattgcagacc

SEQ ID NO: 122085 - DNA, 20 bp, synthetic construct
  source 1..20: mol_type = other DNA
gaggcagtggaattgcagac

SEQ ID NO: 122086 - DNA, 20 bp, synthetic construct
  source 1..20: mol_type = other DNA
tgaggcagtggaattgcaga

SEQ ID NO: 122087 - DNA, 20 bp, synthetic construct
  source 1..20: mol_type = other DNA
ctgaggcagtggaattgcag

SEQ ID NO: 122088 - DNA, 20 bp, synthetic construct
  source 1..20: mol_type = other DNA
gctgaggcagtggaattgca

SEQ ID NO: 122089 - DNA, 20 bp, synthetic construct
  source 1..20: mol_type = other DNA
ggctgaggcagtggaattgc

SEQ ID NO: 122090 - DNA, 20 bp, synthetic construct
  source 1..20: mol_type = other DNA
aggctgaggcagtggaattg

SEQ ID NO: 122091 - DNA, 20 bp, synthetic construct
  source 1..20: mol_type = other DNA
gaggctgaggcagtggaatt

SEQ ID NO: 122092 - DNA, 20 bp, synthetic construct
  source 1..20: mol_type = other DNA
ggaggctgaggcagtggaat

SEQ ID NO: 122093 - DNA, 20 bp, synthetic construct
  source 1..20: mol_type = other DNA
gggaggctgaggcagtggaa

SEQ ID NO: 122094 - DNA, 20 bp, synthetic construct
  source 1..20: mol_type = other DNA
tgggaggctgaggcagtgga

SEQ ID NO: 122095 - DNA, 20 bp, synthetic construct
  source 1..20: mol_type = other DNA
ttgggaggctgaggcagtgg

SEQ ID NO: 122096 - DNA, 20 bp, synthetic construct
  source 1..20: mol_type = other DNA
cttgggaggctgaggcagtg

SEQ ID NO: 122097 - DNA, 20 bp, synthetic construct
  source 1..20: mol_type = other DNA
acttgggaggctgaggcagt

SEQ ID NO: 122098 - DNA, 20 bp, synthetic construct
  source 1..20: mol_type = other DNA
tacttgggaggctgaggcag

SEQ ID NO: 122099 - DNA, 20 bp, synthetic construct
  source 1..20: mol_type = other DNA
ctacttgggaggctgaggca

SEQ ID NO: 122100 - DNA, 20 bp, synthetic construct
  source 1..20: mol_type = other DNA
gctacttgggaggctgaggc

SEQ ID NO: 122101 - DNA, 20 bp, synthetic construct
  source 1..20: mol_type = other DNA
agctacttgggaggctgagg

SEQ ID NO: 122102 - DNA, 20 bp, synthetic construct
  source 1..20: mol_type = other DNA
cagctacttgggaggctgag

SEQ ID NO: 122103 - DNA, 20 bp, synthetic construct
  source 1..20: mol_type = other DNA
ccagctacttgggaggctga

SEQ ID NO: 122104 - DNA, 20 bp, synthetic construct
  source 1..20: mol_type = other DNA
cccagctacttgggaggctg

SEQ ID NO: 122105 - DNA, 20 bp, synthetic construct
  source 1..20: mol_type = other DNA
tcccagctacttgggaggct

SEQ ID NO: 122106 - DNA, 20 bp, synthetic construct
  source 1..20: mol_type = other DNA
atcccagctacttgggaggc

SEQ ID NO: 122107 - DNA, 20 bp, synthetic construct
  source 1..20: mol_type = other DNA
aatcccagctacttgggagg

SEQ ID NO: 122108 - DNA, 20 bp, synthetic construct
  source 1..20: mol_type = other DNA
taatcccagctacttgggag

SEQ ID NO: 122109 - DNA, 20 bp, synthetic construct
  source 1..20: mol_type = other DNA
gtaatcccagctacttggga

SEQ ID NO: 122110 - DNA, 20 bp, synthetic construct
  source 1..20: mol_type = other DNA
tgtaatcccagctacttggg

SEQ ID NO: 122111 - DNA, 20 bp, synthetic construct
  source 1..20: mol_type = other DNA
ctgtaatcccagctacttgg

SEQ ID NO: 122112 - DNA, 20 bp, synthetic construct
  source 1..20: mol_type = other DNA
cctgtaatcccagctacttg

SEQ ID NO: 122113 - DNA, 20 bp, synthetic construct
  source 1..20: mol_type = other DNA
gcctgtaatcccagctactt

SEQ ID NO: 122114 - DNA, 20 bp, synthetic construct
  source 1..20: mol_type = other DNA
tgcctgtaatcccagctact

SEQ ID NO: 122115 - DNA, 20 bp, synthetic construct
  source 1..20: mol_type = other DNA
gtgcctgtaatcccagctac

SEQ ID NO: 122116 - DNA, 20 bp, synthetic construct
  source 1..20: mol_type = other DNA
cgtgcctgtaatcccagcta

SEQ ID NO: 122117 - DNA, 20 bp, synthetic construct
  source 1..20: mol_type = other DNA
acgtgcctgtaatcccagct

SEQ ID NO: 122118 - DNA, 20 bp, synthetic construct
  source 1..20: mol_type = other DNA
cacgtgcctgtaatcccagc

SEQ ID NO: 122119 - DNA, 20 bp, synthetic construct
  source 1..20: mol_type = other DNA
gcacgtgcctgtaatcccag

SEQ ID NO: 122120 - DNA, 20 bp, synthetic construct
  source 1..20: mol_type = other DNA
ggcacgtgcctgtaatccca

SEQ ID NO: 122121 - DNA, 20 bp, synthetic construct
  source 1..20: mol_type = other DNA
tggcacgtgcctgtaatccc

SEQ ID NO: 122122 - DNA, 20 bp, synthetic construct
  source 1..20: mol_type = other DNA
gtggcacgtgcctgtaatcc

SEQ ID NO: 122123 - DNA, 20 bp, synthetic construct
  source 1..20: mol_type = other DNA
ggtggcacgtgcctgtaatc

SEQ ID NO: 122124 - DNA, 20 bp, synthetic construct
  source 1..20: mol_type = other DNA
tggtggcacgtgcctgtaat

SEQ ID NO: 122125 - DNA, 20 bp, synthetic construct
  source 1..20: mol_type = other DNA
gtggtggcacgtgcctgtaa

SEQ ID NO: 122126 - DNA, 20 bp, synthetic construct
  source 1..20: mol_type = other DNA
tgtggtggcacgtgcctgta

SEQ ID NO: 122127 - DNA, 20 bp, synthetic construct
  source 1..20: mol_type = other DNA
gtgtggtggcacgtgcctgt

SEQ ID NO: 122128 - DNA, 20 bp, synthetic construct
  source 1..20: mol_type = other DNA
ggtgtggtggcacgtgcctg

SEQ ID NO: 122129 - DNA, 20 bp, synthetic construct
  source 1..20: mol_type = other DNA
aggtgtggtggcacgtgcct

SEQ ID NO: 122130 - DNA, 20 bp, synthetic construct
  source 1..20: mol_type = other DNA
caggtgtggtggcacgtgcc

SEQ ID NO: 122131 - DNA, 20 bp, synthetic construct
  source 1..20: mol_type = other DNA
ccaggtgtggtggcacgtgc

SEQ ID NO: 122132 - DNA, 20 bp, synthetic construct
  source 1..20: mol_type = other DNA
gccaggtgtggtggcacgtg

SEQ ID NO: 122133 - DNA, 20 bp, synthetic construct
  source 1..20: mol_type = other DNA
agccaggtgtggtggcacgt

SEQ ID NO: 122134 - DNA, 20 bp, synthetic construct
  source 1..20: mol_type = other DNA
tagccaggtgtggtggcacg

SEQ ID NO: 122135 - DNA, 20 bp, synthetic construct
  source 1..20: mol_type = other DNA
ttagccaggtgtggtggcac

SEQ ID NO: 122136 - DNA, 20 bp, synthetic construct
  source 1..20: mol_type = other DNA
attagccaggtgtggtggca

SEQ ID NO: 122137 - DNA, 20 bp, synthetic construct
  source 1..20: mol_type = other DNA
aattagccaggtgtggtggc

SEQ ID NO: 122138 - DNA, 20 bp, synthetic construct
  source 1..20: mol_type = other DNA
aaattagccaggtgtggtgg

SEQ ID NO: 122139 - DNA, 20 bp, synthetic construct
  source 1..20: mol_type = other DNA
aaaattagccaggtgtggtg

SEQ ID NO: 122140 - DNA, 20 bp, synthetic construct
  source 1..20: mol_type = other DNA
aaaaattagccaggtgtggt

SEQ ID NO: 122141 - DNA, 20 bp, synthetic construct
  source 1..20: mol_type = other DNA
caaaaattagccaggtgtgg

SEQ ID NO: 122142 - DNA, 20 bp, synthetic construct
  source 1..20: mol_type = other DNA
acaaaaattagccaggtgtg

SEQ ID NO: 122143 - DNA, 20 bp, synthetic construct
  source 1..20: mol_type = other DNA
gacaaaaattagccaggtgt

SEQ ID NO: 122144 - DNA, 20 bp, synthetic construct
  source 1..20: mol_type = other DNA
agacaaaaattagccaggtg

SEQ ID NO: 122145 - DNA, 20 bp, synthetic construct
  source 1..20: mol_type = other DNA
gagacaaaaattagccaggt

SEQ ID NO: 122146 - DNA, 20 bp, synthetic construct
  source 1..20: mol_type = other DNA
agagacaaaaattagccagg

SEQ ID NO: 122147 - DNA, 20 bp, synthetic construct
  source 1..20: mol_type = other DNA
gagagacaaaaattagccag

SEQ ID NO: 122148 - DNA, 20 bp, synthetic construct
  source 1..20: mol_type = other DNA
agagagacaaaaattagcca

SEQ ID NO: 122149 - DNA, 20 bp, synthetic construct
  source 1..20: mol_type = other DNA
gagagagacaaaaattagcc

SEQ ID NO: 122150 - DNA, 20 bp, synthetic construct
  source 1..20: mol_type = other DNA
agagagagacaaaaattagc

SEQ ID NO: 122151 - DNA, 20 bp, synthetic construct
  source 1..20: mol_type = other DNA
gagagagagacaaaaattag

SEQ ID NO: 122152 - DNA, 20 bp, synthetic construct
  source 1..20: mol_type = other DNA
agagagagagacaaaaatta

SEQ ID NO: 122153 - DNA, 20 bp, synthetic construct
  source 1..20: mol_type = other DNA
aagagagagagacaaaaatt

SEQ ID NO: 122154 - DNA, 20 bp, synthetic construct
  source 1..20: mol_type = other DNA
aaagagagagagacaaaaat

SEQ ID NO: 122155 - DNA, 20 bp, synthetic construct
  source 1..20: mol_type = other DNA
aaaagagagagagacaaaaa

SEQ ID NO: 122156 - DNA, 20 bp, synthetic construct
  source 1..20: mol_type = other DNA
aaaaagagagagagacaaaa

SEQ ID NO: 122157 - DNA, 20 bp, synthetic construct
  source 1..20: mol_type = other DNA
aaaaaagagagagagacaaa

SEQ ID NO: 122158 - DNA, 20 bp, synthetic construct
  source 1..20: mol_type = other DNA
aaaaaaagagagagagacaa

SEQ ID NO: 122159 - DNA, 20 bp, synthetic construct
  source 1..20: mol_type = other DNA
aaaaaaaagagagagagaca

SEQ ID NO: 122160 - DNA, 20 bp, synthetic construct
  source 1..20: mol_type = other DNA
aaaaaaaaagagagagagac

SEQ ID NO: 122161 - DNA, 20 bp, synthetic construct
  source 1..20: mol_type = other DNA
aaaaaaaaaagagagagaga

SEQ ID NO: 122162 - DNA, 20 bp, synthetic construct
  source 1..20: mol_type = other DNA
aaaaaaaaaaagagagagag

SEQ ID NO: 122163 - DNA, 20 bp, synthetic construct
  source 1..20: mol_type = other DNA
aaaaaaaaaaaagagagaga

SEQ ID NO: 122164 - DNA, 20 bp, synthetic construct
  source 1..20: mol_type = other DNA
aaaaaaaaaaaaagagagag

SEQ ID NO: 122165 - DNA, 20 bp, synthetic construct
  source 1..20: mol_type = other DNA
aaaaaaaaaaaaaagagaga

SEQ ID NO: 122166 - DNA, 20 bp, synthetic construct
  source 1..20: mol_type = other DNA
aaaaaaaaaaaaaaagagag

SEQ ID NO: 122167 - DNA, 20 bp, synthetic construct
  source 1..20: mol_type = other DNA
aaaaaaaaaaaaaaaagaga

SEQ ID NO: 122168 - DNA, 20 bp, synthetic construct
  source 1..20: mol_type = other DNA
aaaaaaaaaaaaaaaaagag

SEQ ID NO: 122169 - DNA, 20 bp, synthetic construct
  source 1..20: mol_type = other DNA
aaaaaaaaaaaaaaaaaaga

SEQ ID NO: 122170 - DNA, 20 bp, synthetic construct
  source 1..20: mol_type = other DNA
aaaaaaaaaaaaaaaaaaag

SEQ ID NO: 122171 - DNA, 20 bp, synthetic construct
  source 1..20: mol_type = other DNA
aaaaaaaaaaaaaaaaaaaa

SEQ ID NO: 122172 - DNA, 20 bp, synthetic construct
  source 1..20: mol_type = other DNA
aaaaaaaaaaaaaaaaaaaa

SEQ ID NO: 122173 - DNA, 20 bp, synthetic construct
  source 1..20: mol_type = other DNA
aaaaaaaaaaaaaaaaaaaa

SEQ ID NO: 122174 - DNA, 20 bp, synthetic construct
  source 1..20: mol_type = other DNA
aaaaaaaaaaaaaaaaaaaa

SEQ ID NO: 122175 - DNA, 20 bp, synthetic construct
  source 1..20: mol_type = other DNA
aaaaaaaaaaaaaaaaaaaa

SEQ ID NO: 122176 - DNA, 20 bp, synthetic construct
  source 1..20: mol_type = other DNA
aaaaaaaaaaaaaaaaaaaa

SEQ ID NO: 122177 - DNA, 20 bp, synthetic construct
  source 1..20: mol_type = other DNA
aaaaaaaaaaaaaaaaaaaa

SEQ ID NO: 122178 - DNA, 20 bp, synthetic construct
  source 1..20: mol_type = other DNA
taaaaaaaaaaaaaaaaaaa

SEQ ID NO: 122179 - DNA, 20 bp, synthetic construct
  source 1..20: mol_type = other DNA
ctaaaaaaaaaaaaaaaaaa

SEQ ID NO: 122180 - DNA, 20 bp, synthetic construct
  source 1..20: mol_type = other DNA
gctaaaaaaaaaaaaaaaaa

SEQ ID NO: 122181 - DNA, 20 bp, synthetic construct
  source 1..20: mol_type = other DNA
tgctaaaaaaaaaaaaaaaa

SEQ ID NO: 122182 - DNA, 20 bp, synthetic construct
  source 1..20: mol_type = other DNA
ctgctaaaaaaaaaaaaaaa

SEQ ID NO: 122183 - DNA, 20 bp, synthetic construct
  source 1..20: mol_type = other DNA
tctgctaaaaaaaaaaaaaa

SEQ ID NO: 122184 - DNA, 20 bp, synthetic construct
  source 1..20: mol_type = other DNA
ctctgctaaaaaaaaaaaaa

SEQ ID NO: 122185 - DNA, 20 bp, synthetic construct
  source 1..20: mol_type = other DNA
tctctgctaaaaaaaaaaaa

SEQ ID NO: 122186 - DNA, 20 bp, synthetic construct
  source 1..20: mol_type = other DNA
gtctctgctaaaaaaaaaaa

SEQ ID NO: 122187 - DNA, 20 bp, synthetic construct
  source 1..20: mol_type = other DNA
cgtctctgctaaaaaaaaaa

SEQ ID NO: 122188 - DNA, 20 bp, synthetic construct
  source 1..20: mol_type = other DNA
ccgtctctgctaaaaaaaaa

SEQ ID NO: 122189 - DNA, 20 bp, synthetic construct
  source 1..20: mol_type = other DNA
cccgtctctgctaaaaaaaa

SEQ ID NO: 122190 - DNA, 20 bp, synthetic construct
  source 1..20: mol_type = other DNA
tcccgtctctgctaaaaaaa

SEQ ID NO: 122191 - DNA, 20 bp, synthetic construct
  source 1..20: mol_type = other DNA
atcccgtctctgctaaaaaa

SEQ ID NO: 122192 - DNA, 20 bp, synthetic construct
  source 1..20: mol_type = other DNA
aatcccgtctctgctaaaaa

SEQ ID NO: 122193 - DNA, 20 bp, synthetic construct
  source 1..20: mol_type = other DNA
aaatcccgtctctgctaaaa

SEQ ID NO: 122194 - DNA, 20 bp, synthetic construct
  source 1..20: mol_type = other DNA
gaaatcccgtctctgctaaa

SEQ ID NO: 122195 - DNA, 20 bp, synthetic construct
  source 1..20: mol_type = other DNA
tgaaatcccgtctctgctaa

SEQ ID NO: 122196 - DNA, 20 bp, synthetic construct
  source 1..20: mol_type = other DNA
gtgaaatcccgtctctgcta

SEQ ID NO: 122197 - DNA, 20 bp, synthetic construct
  source 1..20: mol_type = other DNA
ggtgaaatcccgtctctgct

SEQ ID NO: 122198 - DNA, 20 bp, synthetic construct
  source 1..20: mol_type = other DNA
tggtgaaatcccgtctctgc

SEQ ID NO: 122199 - DNA, 20 bp, synthetic construct
  source 1..20: mol_type = other DNA
atggtgaaatcccgtctctg

SEQ ID NO: 122200 - DNA, 20 bp, synthetic construct
  source 1..20: mol_type = other DNA
catggtgaaatcccgtctct

SEQ ID NO: 122201 - DNA, 20 bp, synthetic construct
  source 1..20: mol_type = other DNA
acatggtgaaatcccgtctc

SEQ ID NO: 122202 - DNA, 20 bp, synthetic construct
  source 1..20: mol_type = other DNA
aacatggtgaaatcccgtct

SEQ ID NO: 122203 - DNA, 20 bp, synthetic construct
  source 1..20: mol_type = other DNA
caacatggtgaaatcccgtc

SEQ ID NO: 122204 - DNA, 20 bp, synthetic construct
  source 1..20: mol_type = other DNA
ccaacatggtgaaatcccgt

SEQ ID NO: 122205 - DNA, 20 bp, synthetic construct
  source 1..20: mol_type = other DNA
gccaacatggtgaaatcccg

SEQ ID NO: 122206 - DNA, 20 bp, synthetic construct
  source 1..20: mol_type = other DNA
ggccaacatggtgaaatccc

SEQ ID NO: 122207 - DNA, 20 bp, synthetic construct
  source 1..20: mol_type = other DNA
tggccaacatggtgaaatcc

SEQ ID NO: 122208 - DNA, 20 bp, synthetic construct
  source 1..20: mol_type = other DNA
ctggccaacatggtgaaatc

SEQ ID NO: 122209 - DNA, 20 bp, synthetic construct
  source 1..20: mol_type = other DNA
cctggccaacatggtgaaat

SEQ ID NO: 122210 - DNA, 20 bp, synthetic construct
  source 1..20: mol_type = other DNA
gcctggccaacatggtgaaa

SEQ ID NO: 122211 - DNA, 20 bp, synthetic construct
  source 1..20: mol_type = other DNA
agcctggccaacatggtgaa

SEQ ID NO: 122212 - DNA, 20 bp, synthetic construct
  source 1..20: mol_type = other DNA
cagcctggccaacatggtga

SEQ ID NO: 122213 - DNA, 20 bp, synthetic construct
  source 1..20: mol_type = other DNA
ccagcctggccaacatggtg

SEQ ID NO: 122214 - DNA, 20 bp, synthetic construct
  source 1..20: mol_type = other DNA
accagcctggccaacatggt

SEQ ID NO: 122215 - DNA, 20 bp, synthetic construct
  source 1..20: mol_type = other DNA
gaccagcctggccaacatgg

SEQ ID NO: 122216 - DNA, 20 bp, synthetic construct
  source 1..20: mol_type = other DNA
agaccagcctggccaacatg

SEQ ID NO: 122217 - DNA, 20 bp, synthetic construct
  source 1..20: mol_type = other DNA
gagaccagcctggccaacat

SEQ ID NO: 122218 - DNA, 20 bp, synthetic construct
  source 1..20: mol_type = other DNA
tgagaccagcctggccaaca

SEQ ID NO: 122219 - DNA, 20 bp, synthetic construct
  source 1..20: mol_type = other DNA
ttgagaccagcctggccaac

SEQ ID NO: 122220 - DNA, 20 bp, synthetic construct
  source 1..20: mol_type = other DNA
tttgagaccagcctggccaa

SEQ ID NO: 122221 - DNA, 20 bp, synthetic construct
  source 1..20: mol_type = other DNA
gtttgagaccagcctggcca

SEQ ID NO: 122222 - DNA, 20 bp, synthetic construct
  source 1..20: mol_type = other DNA
agtttgagaccagcctggcc

SEQ ID NO: 122223 - DNA, 20 bp, synthetic construct
  source 1..20: mol_type = other DNA
gagtttgagaccagcctggc

SEQ ID NO: 122224 - DNA, 20 bp, synthetic construct
  source 1..20: mol_type = other DNA
ggagtttgagaccagcctgg

SEQ ID NO: 122225 - DNA, 20 bp, synthetic construct
  source 1..20: mol_type = other DNA
aggagtttgagaccagcctg

SEQ ID NO: 122226 - DNA, 20 bp, synthetic construct
  source 1..20: mol_type = other DNA
caggagtttgagaccagcct

SEQ ID NO: 122227 - DNA, 20 bp, synthetic construct
  source 1..20: mol_type = other DNA
tcaggagtttgagaccagcc

SEQ ID NO: 122228 - DNA, 20 bp, synthetic construct
  source 1..20: mol_type = other DNA
gtcaggagtttgagaccagc

SEQ ID NO: 122229 - DNA, 20 bp, synthetic construct
  source 1..20: mol_type = other DNA
ggtcaggagtttgagaccag

SEQ ID NO: 122230 - DNA, 20 bp, synthetic construct
  source 1..20: mol_type = other DNA
gggtcaggagtttgagacca

SEQ ID NO: 122231 - DNA, 20 bp, synthetic construct
  source 1..20: mol_type = other DNA
ggggtcaggagtttgagacc

SEQ ID NO: 122232 - DNA, 20 bp, synthetic construct
  source 1..20: mol_type = other DNA
tggggtcaggagtttgagac

SEQ ID NO: 122233 - DNA, 20 bp, synthetic construct
  source 1..20: mol_type = other DNA
ttggggtcaggagtttgaga

SEQ ID NO: 122234 - DNA, 20 bp, synthetic construct
  source 1..20: mol_type = other DNA
tttggggtcaggagtttgag

SEQ ID NO: 122235 - DNA, 20 bp, synthetic construct
  source 1..20: mol_type = other DNA
atttggggtcaggagtttga

SEQ ID NO: 122236 - DNA, 20 bp, synthetic construct
  source 1..20: mol_type = other DNA
catttggggtcaggagtttg

SEQ ID NO: 122237 - DNA, 20 bp, synthetic construct
  source 1..20: mol_type = other DNA
tcatttggggtcaggagttt

SEQ ID NO: 122238 - DNA, 20 bp, synthetic construct
  source 1..20: mol_type = other DNA
atcatttggggtcaggagtt

SEQ ID NO: 122239 - DNA, 20 bp, synthetic construct
  source 1..20: mol_type = other DNA
gatcatttggggtcaggagt

SEQ ID NO: 122240 - DNA, 20 bp, synthetic construct
  source 1..20: mol_type = other DNA
ggatcatttggggtcaggag

SEQ ID NO: 122241 - DNA, 20 bp, synthetic construct
  source 1..20: mol_type = other DNA
tggatcatttggggtcagga

SEQ ID NO: 122242 - DNA, 20 bp, synthetic construct
  source 1..20: mol_type = other DNA
gtggatcatttggggtcagg

SEQ ID NO: 122243 - DNA, 20 bp, synthetic construct
  source 1..20: mol_type = other DNA
ggtggatcatttggggtcag

SEQ ID NO: 122244 - DNA, 20 bp, synthetic construct
  source 1..20: mol_type = other DNA
aggtggatcatttggggtca

SEQ ID NO: 122245 - DNA, 20 bp, synthetic construct
  source 1..20: mol_type = other DNA
caggtggatcatttggggtc

SEQ ID NO: 122246 - DNA, 20 bp, synthetic construct
  source 1..20: mol_type = other DNA
gcaggtggatcatttggggt

SEQ ID NO: 122247 - DNA, 20 bp, synthetic construct
  source 1..20: mol_type = other DNA
ggcaggtggatcatttgggg

SEQ ID NO: 122248 - DNA, 20 bp, synthetic construct
  source 1..20: mol_type = other DNA
aggcaggtggatcatttggg

SEQ ID NO: 122249 - DNA, 20 bp, synthetic construct
  source 1..20: mol_type = other DNA
aaggcaggtggatcatttgg

SEQ ID NO: 122250 - DNA, 20 bp, synthetic construct
  source 1..20: mol_type = other DNA
caaggcaggtggatcatttg

SEQ ID NO: 122251 - DNA, 20 bp, synthetic construct
  source 1..20: mol_type = other DNA
ccaaggcaggtggatcattt

SEQ ID NO: 122252 - DNA, 20 bp, synthetic construct
  source 1..20: mol_type = other DNA
gccaaggcaggtggatcatt

SEQ ID NO: 122253 - DNA, 20 bp, synthetic construct
  source 1..20: mol_type = other DNA
ggccaaggcaggtggatcat

SEQ ID NO: 122254 - DNA, 20 bp, synthetic construct
  source 1..20: mol_type = other DNA
aggccaaggcaggtggatca

SEQ ID NO: 122255 - DNA, 20 bp, synthetic construct
  source 1..20: mol_type = other DNA
gaggccaaggcaggtggatc

SEQ ID NO: 122256 - DNA, 20 bp, synthetic construct
  source 1..20: mol_type = other DNA
ggaggccaaggcaggtggat

SEQ ID NO: 122257 - DNA, 20 bp, synthetic construct
  source 1..20: mol_type = other DNA
gggaggccaaggcaggtgga

SEQ ID NO: 122258 - DNA, 20 bp, synthetic construct
  source 1..20: mol_type = other DNA
tgggaggccaaggcaggtgg

SEQ ID NO: 122259 - DNA, 20 bp, synthetic construct
  source 1..20: mol_type = other DNA
ttgggaggccaaggcaggtg

SEQ ID NO: 122260 - DNA, 20 bp, synthetic construct
  source 1..20: mol_type = other DNA
tttgggaggccaaggcaggt

SEQ ID NO: 122261 - DNA, 20 bp, synthetic construct
  source 1..20: mol_type = other DNA
ctttgggaggccaaggcagg

SEQ ID NO: 122262 - DNA, 20 bp, synthetic construct
  source 1..20: mol_type = other DNA
actttgggaggccaaggcag

SEQ ID NO: 122263 - DNA, 20 bp, synthetic construct
  source 1..20: mol_type = other DNA
cactttgggaggccaaggca

SEQ ID NO: 122264 - DNA, 20 bp, synthetic construct
  source 1..20: mol_type = other DNA
gcactttgggaggccaaggc

SEQ ID NO: 122265 - DNA, 20 bp, synthetic construct
  source 1..20: mol_type = other DNA
agcactttgggaggccaagg

SEQ ID NO: 122266 - DNA, 20 bp, synthetic construct
  source 1..20: mol_type = other DNA
cagcactttgggaggccaag

SEQ ID NO: 122267 - DNA, 20 bp, synthetic construct
  source 1..20: mol_type = other DNA
ccagcactttgggaggccaa

SEQ ID NO: 122268 - DNA, 20 bp, synthetic construct
  source 1..20: mol_type = other DNA
cccagcactttgggaggcca

SEQ ID NO: 122269 - DNA, 20 bp, synthetic construct
  source 1..20: mol_type = other DNA
tcccagcactttgggaggcc

SEQ ID NO: 122270 - DNA, 20 bp, synthetic construct
  source 1..20: mol_type = other DNA
atcccagcactttgggaggc

SEQ ID NO: 122271 - DNA, 20 bp, synthetic construct
  source 1..20: mol_type = other DNA
aatcccagcactttgggagg

SEQ ID NO: 122272 - DNA, 20 bp, synthetic construct
  source 1..20: mol_type = other DNA
taatcccagcactttgggag

SEQ ID NO: 122273 - DNA, 20 bp, synthetic construct
  source 1..20: mol_type = other DNA
gtaatcccagcactttggga

SEQ ID NO: 122274 - DNA, 20 bp, synthetic construct
  source 1..20: mol_type = other DNA
tgtaatcccagcactttggg

SEQ ID NO: 122275 - DNA, 20 bp, synthetic construct
  source 1..20: mol_type = other DNA
ctgtaatcccagcactttgg

SEQ ID NO: 122276 - DNA, 20 bp, synthetic construct
  source 1..20: mol_type = other DNA
cctgtaatcccagcactttg

SEQ ID NO: 122277 - DNA, 20 bp, synthetic construct
  source 1..20: mol_type = other DNA
acctgtaatcccagcacttt

SEQ ID NO: 122278 - DNA, 20 bp, synthetic construct
  source 1..20: mol_type = other DNA
cacctgtaatcccagcactt

SEQ ID NO: 122279 - DNA, 20 bp, synthetic construct
  source 1..20: mol_type = other DNA
acacctgtaatcccagcact

SEQ ID NO: 122280 - DNA, 20 bp, synthetic construct
  source 1..20: mol_type = other DNA
cacacctgtaatcccagcac

SEQ ID NO: 122281 - DNA, 20 bp, synthetic construct
  source 1..20: mol_type = other DNA
tcacacctgtaatcccagca

SEQ ID NO: 122282 - DNA, 20 bp, synthetic construct
  source 1..20: mol_type = other DNA
ctcacacctgtaatcccagc

SEQ ID NO: 122283 - DNA, 20 bp, synthetic construct
  source 1..20: mol_type = other DNA
actcacacctgtaatcccag

SEQ ID NO: 122284 - DNA, 20 bp, synthetic construct
  source 1..20: mol_type = other DNA
gactcacacctgtaatccca

SEQ ID NO: 122285 - DNA, 20 bp, synthetic construct
  source 1..20: mol_type = other DNA
tgactcacacctgtaatccc

SEQ ID NO: 122286 - DNA, 20 bp, synthetic construct
  source 1..20: mol_type = other DNA
gtgactcacacctgtaatcc

SEQ ID NO: 122287 - DNA, 20 bp, synthetic construct
  source 1..20: mol_type = other DNA
ggtgactcacacctgtaatc

SEQ ID NO: 122288 - DNA, 20 bp, synthetic construct
  source 1..20: mol_type = other DNA
cggtgactcacacctgtaat

SEQ ID NO: 122289 - DNA, 20 bp, synthetic construct
  source 1..20: mol_type = other DNA
acggtgactcacacctgtaa

SEQ ID NO: 122290 - DNA, 20 bp, synthetic construct
  source 1..20: mol_type = other DNA
cacggtgactcacacctgta

SEQ ID NO: 122291 - DNA, 20 bp, synthetic construct
  source 1..20: mol_type = other DNA
gcacggtgactcacacctgt

SEQ ID NO: 122292 - DNA, 20 bp, synthetic construct
  source 1..20: mol_type = other DNA
ggcacggtgactcacacctg

SEQ ID NO: 122293 - DNA, 20 bp, synthetic construct
  source 1..20: mol_type = other DNA
gggcacggtgactcacacct

SEQ ID NO: 122294 - DNA, 20 bp, synthetic construct
  source 1..20: mol_type = other DNA
tgggcacggtgactcacacc

SEQ ID NO: 122295 - DNA, 20 bp, synthetic construct
  source 1..20: mol_type = other DNA
ctgggcacggtgactcacac

SEQ ID NO: 122296 - DNA, 20 bp, synthetic construct
  source 1..20: mol_type = other DNA
gctgggcacggtgactcaca

SEQ ID NO: 122297 - DNA, 20 bp, synthetic construct
  source 1..20: mol_type = other DNA
ggctgggcacggtgactcac

SEQ ID NO: 122298 - DNA, 20 bp, synthetic construct
  source 1..20: mol_type = other DNA
tggctgggcacggtgactca

SEQ ID NO: 122299 - DNA, 20 bp, synthetic construct
  source 1..20: mol_type = other DNA
ctggctgggcacggtgactc

SEQ ID NO: 122300 - DNA, 20 bp, synthetic construct
  source 1..20: mol_type = other DNA
gctggctgggcacggtgact

SEQ ID NO: 122301 - DNA, 20 bp, synthetic construct
  source 1..20: mol_type = other DNA
agctggctgggcacggtgac

SEQ ID NO: 122302 - DNA, 20 bp, synthetic construct
  source 1..20: mol_type = other DNA
aagctggctgggcacggtga

SEQ ID NO: 122303 - DNA, 20 bp, synthetic construct
  source 1..20: mol_type = other DNA
taagctggctgggcacggtg

SEQ ID NO: 122304 - DNA, 20 bp, synthetic construct
  source 1..20: mol_type = other DNA
ataagctggctgggcacggt

SEQ ID NO: 122305 - DNA, 20 bp, synthetic construct
  source 1..20: mol_type = other DNA
aataagctggctgggcacgg

SEQ ID NO: 122306 - DNA, 20 bp, synthetic construct
  source 1..20: mol_type = other DNA
gaataagctggctgggcacg

SEQ ID NO: 122307 - DNA, 20 bp, synthetic construct
  source 1..20: mol_type = other DNA
ggaataagctggctgggcac

SEQ ID NO: 122308 - DNA, 20 bp, synthetic construct
  source 1..20: mol_type = other DNA
aggaataagctggctgggca

SEQ ID NO: 122309 - DNA, 20 bp, synthetic construct
  source 1..20: mol_type = other DNA
aaggaataagctggctgggc

SEQ ID NO: 122310 - DNA, 20 bp, synthetic construct
  source 1..20: mol_type = other DNA
aaaggaataagctggctggg

SEQ ID NO: 122311 - DNA, 20 bp, synthetic construct
  source 1..20: mol_type = other DNA
aaaaggaataagctggctgg

SEQ ID NO: 122312 - DNA, 20 bp, synthetic construct
  source 1..20: mol_type = other DNA
aaaaaggaataagctggctg

SEQ ID NO: 122313 - DNA, 20 bp, synthetic construct
  source 1..20: mol_type = other DNA
taaaaaggaataagctggct

SEQ ID NO: 122314 - DNA, 20 bp, synthetic construct
  source 1..20: mol_type = other DNA
ataaaaaggaataagctggc

SEQ ID NO: 122315 - DNA, 20 bp, synthetic construct
  source 1..20: mol_type = other DNA
aataaaaaggaataagctgg

SEQ ID NO: 122316 - DNA, 20 bp, synthetic construct
  source 1..20: mol_type = other DNA
caataaaaaggaataagctg

SEQ ID NO: 122317 - DNA, 20 bp, synthetic construct
  source 1..20: mol_type = other DNA
gcaataaaaaggaataagct

SEQ ID NO: 122318 - DNA, 20 bp, synthetic construct
  source 1..20: mol_type = other DNA
agcaataaaaaggaataagc

SEQ ID NO: 122319 - DNA, 20 bp, synthetic construct
  source 1..20: mol_type = other DNA
cagcaataaaaaggaataag

SEQ ID NO: 122320 - DNA, 20 bp, synthetic construct
  source 1..20: mol_type = other DNA
ccagcaataaaaaggaataa

SEQ ID NO: 122321 - DNA, 20 bp, synthetic construct
  source 1..20: mol_type = other DNA
cccagcaataaaaaggaata

SEQ ID NO: 122322 - DNA, 20 bp, synthetic construct
  source 1..20: mol_type = other DNA
acccagcaataaaaaggaat

SEQ ID NO: 122323 - DNA, 20 bp, synthetic construct
  source 1..20: mol_type = other DNA
tacccagcaataaaaaggaa

SEQ ID NO: 122324 - DNA, 20 bp, synthetic construct
  source 1..20: mol_type = other DNA
ctacccagcaataaaaagga

SEQ ID NO: 122325 - DNA, 20 bp, synthetic construct
  source 1..20: mol_type = other DNA
gctacccagcaataaaaagg

SEQ ID NO: 122326 - DNA, 20 bp, synthetic construct
  source 1..20: mol_type = other DNA
tgctacccagcaataaaaag

SEQ ID NO: 122327 - DNA, 20 bp, synthetic construct
  source 1..20: mol_type = other DNA
atgctacccagcaataaaaa

SEQ ID NO: 122328 - DNA, 20 bp, synthetic construct
  source 1..20: mol_type = other DNA
aatgctacccagcaataaaa

SEQ ID NO: 122329 - DNA, 20 bp, synthetic construct
  source 1..20: mol_type = other DNA
aaatgctacccagcaataaa

SEQ ID NO: 122330 - DNA, 20 bp, synthetic construct
  source 1..20: mol_type = other DNA
gaaatgctacccagcaataa

SEQ ID NO: 122331 - DNA, 20 bp, synthetic construct
  source 1..20: mol_type = other DNA
tgaaatgctacccagcaata

SEQ ID NO: 122332 - DNA, 20 bp, synthetic construct
  source 1..20: mol_type = other DNA
atgaaatgctacccagcaat

SEQ ID NO: 122333 - DNA, 20 bp, synthetic construct
  source 1..20: mol_type = other DNA
aatgaaatgctacccagcaa

SEQ ID NO: 122334 - DNA, 20 bp, synthetic construct
  source 1..20: mol_type = other DNA
aaatgaaatgctacccagca

SEQ ID NO: 122335 - DNA, 20 bp, synthetic construct
  source 1..20: mol_type = other DNA
aaaatgaaatgctacccagc

SEQ ID NO: 122336 - DNA, 20 bp, synthetic construct
  source 1..20: mol_type = other DNA
taaaatgaaatgctacccag

SEQ ID NO: 122337 - DNA, 20 bp, synthetic construct
  source 1..20: mol_type = other DNA
ataaaatgaaatgctaccca

SEQ ID NO: 122338 - DNA, 20 bp, synthetic construct
  source 1..20: mol_type = other DNA
cataaaatgaaatgctaccc

SEQ ID NO: 122339 - DNA, 20 bp, synthetic construct
  source 1..20: mol_type = other DNA
tcataaaatgaaatgctacc

SEQ ID NO: 122340 - DNA, 20 bp, synthetic construct
  source 1..20: mol_type = other DNA
atcataaaatgaaatgctac

SEQ ID NO: 122341 - DNA, 20 bp, synthetic construct
  source 1..20: mol_type = other DNA
aatcataaaatgaaatgcta

SEQ ID NO: 122342 - DNA, 20 bp, synthetic construct
  source 1..20: mol_type = other DNA
taatcataaaatgaaatgct

SEQ ID NO: 122343 - DNA, 20 bp, synthetic construct
  source 1..20: mol_type = other DNA
ataatcataaaatgaaatgc

SEQ ID NO: 122344 - DNA, 20 bp, synthetic construct
  source 1..20: mol_type = other DNA
tataatcataaaatgaaatg

SEQ ID NO: 122345 - DNA, 20 bp, synthetic construct
  source 1..20: mol_type = other DNA
gtataatcataaaatgaaat

SEQ ID NO: 122346 - DNA, 20 bp, synthetic construct
  source 1..20: mol_type = other DNA
ggtataatcataaaatgaaa

SEQ ID NO: 122347 - DNA, 20 bp, synthetic construct
  source 1..20: mol_type = other DNA
tggtataatcataaaatgaa

SEQ ID NO: 122348 - DNA, 20 bp, synthetic construct
  source 1..20: mol_type = other DNA
gtggtataatcataaaatga

SEQ ID NO: 122349 - DNA, 20 bp, synthetic construct
  source 1..20: mol_type = other DNA
tgtggtataatcataaaatg

SEQ ID NO: 122350 - DNA, 20 bp, synthetic construct
  source 1..20: mol_type = other DNA
ctgtggtataatcataaaat

SEQ ID NO: 122351 - DNA, 20 bp, synthetic construct
  source 1..20: mol_type = other DNA
actgtggtataatcataaaa

SEQ ID NO: 122352 - DNA, 20 bp, synthetic construct
  source 1..20: mol_type = other DNA
aactgtggtataatcataaa

SEQ ID NO: 122353 - DNA, 20 bp, synthetic construct
  source 1..20: mol_type = other DNA
taactgtggtataatcataa

SEQ ID NO: 122354 - DNA, 20 bp, synthetic construct
  source 1..20: mol_type = other DNA
ttaactgtggtataatcata

SEQ ID NO: 122355 - DNA, 20 bp, synthetic construct
  source 1..20: mol_type = other DNA
attaactgtggtataatcat

SEQ ID NO: 122356 - DNA, 20 bp, synthetic construct
  source 1..20: mol_type = other DNA
aattaactgtggtataatca

SEQ ID NO: 122357 - DNA, 20 bp, synthetic construct
  source 1..20: mol_type = other DNA
aaattaactgtggtataatc

SEQ ID NO: 122358 - DNA, 20 bp, synthetic construct
  source 1..20: mol_type = other DNA
taaattaactgtggtataat

SEQ ID NO: 122359 - DNA, 20 bp, synthetic construct
  source 1..20: mol_type = other DNA
gtaaattaactgtggtataa

SEQ ID NO: 122360 - DNA, 20 bp, synthetic construct
  source 1..20: mol_type = other DNA
ggtaaattaactgtggtata

SEQ ID NO: 122361 - DNA, 20 bp, synthetic construct
  source 1..20: mol_type = other DNA
gggtaaattaactgtggtat

SEQ ID NO: 122362 - DNA, 20 bp, synthetic construct
  source 1..20: mol_type = other DNA
tgggtaaattaactgtggta

SEQ ID NO: 122363 - DNA, 20 bp, synthetic construct
  source 1..20: mol_type = other DNA
atgggtaaattaactgtggt

SEQ ID NO: 122364 - DNA, 20 bp, synthetic construct
  source 1..20: mol_type = other DNA
aatgggtaaattaactgtgg

SEQ ID NO: 122365 - DNA, 20 bp, synthetic construct
  source 1..20: mol_type = other DNA
taatgggtaaattaactgtg

SEQ ID NO: 122366 - DNA, 20 bp, synthetic construct
  source 1..20: mol_type = other DNA
gtaatgggtaaattaactgt

SEQ ID NO: 122367 - DNA, 20 bp, synthetic construct
  source 1..20: mol_type = other DNA
agtaatgggtaaattaactg

SEQ ID NO: 122368 - DNA, 20 bp, synthetic construct
  source 1..20: mol_type = other DNA
tagtaatgggtaaattaact

SEQ ID NO: 122369 - DNA, 20 bp, synthetic construct
  source 1..20: mol_type = other DNA
ctagtaatgggtaaattaac

SEQ ID NO: 122370 - DNA, 20 bp, synthetic construct
  source 1..20: mol_type = other DNA
actagtaatgggtaaattaa

SEQ ID NO: 122371 - DNA, 20 bp, synthetic construct
  source 1..20: mol_type = other DNA
gactagtaatgggtaaatta

SEQ ID NO: 122372 - DNA, 20 bp, synthetic construct
  source 1..20: mol_type = other DNA
cgactagtaatgggtaaatt

SEQ ID NO: 122373 - DNA, 20 bp, synthetic construct
  source 1..20: mol_type = other DNA
tcgactagtaatgggtaaat

SEQ ID NO: 122374 - DNA, 20 bp, synthetic construct
  source 1..20: mol_type = other DNA
atcgactagtaatgggtaaa

SEQ ID NO: 122375 - DNA, 20 bp, synthetic construct
  source 1..20: mol_type = other DNA
catcgactagtaatgggtaa

SEQ ID NO: 122376 - DNA, 20 bp, synthetic construct
  source 1..20: mol_type = other DNA
ccatcgactagtaatgggta

SEQ ID NO: 122377 - DNA, 20 bp, synthetic construct
  source 1..20: mol_type = other DNA
cccatcgactagtaatgggt

SEQ ID NO: 122378 - DNA, 20 bp, synthetic construct
  source 1..20: mol_type = other DNA
gcccatcgactagtaatggg

SEQ ID NO: 122379 - DNA, 20 bp, synthetic construct
  source 1..20: mol_type = other DNA
tgcccatcgactagtaatgg

SEQ ID NO: 122380 - DNA, 20 bp, synthetic construct
  source 1..20: mol_type = other DNA
atgcccatcgactagtaatg

SEQ ID NO: 122381 - DNA, 20 bp, synthetic construct
  source 1..20: mol_type = other DNA
aatgcccatcgactagtaat

SEQ ID NO: 122382 - DNA, 20 bp, synthetic construct
  source 1..20: mol_type = other DNA
aaatgcccatcgactagtaa

SEQ ID NO: 122383 - DNA, 20 bp, synthetic construct
  source 1..20: mol_type = other DNA
caaatgcccatcgactagta

SEQ ID NO: 122384 - DNA, 20 bp, synthetic construct
  source 1..20: mol_type = other DNA
tcaaatgcccatcgactagt

SEQ ID NO: 122385 - DNA, 20 bp, synthetic construct
  source 1..20: mol_type = other DNA
ctcaaatgcccatcgactag

SEQ ID NO: 122386 - DNA, 20 bp, synthetic construct
  source 1..20: mol_type = other DNA
actcaaatgcccatcgacta

SEQ ID NO: 122387 - DNA, 20 bp, synthetic construct
  source 1..20: mol_type = other DNA
aactcaaatgcccatcgact

SEQ ID NO: 122388 - DNA, 20 bp, synthetic construct
  source 1..20: mol_type = other DNA
taactcaaatgcccatcgac

SEQ ID NO: 122389 - DNA, 20 bp, synthetic construct
  source 1..20: mol_type = other DNA
ataactcaaatgcccatcga

SEQ ID NO: 122390 - DNA, 20 bp, synthetic construct
  source 1..20: mol_type = other DNA
aataactcaaatgcccatcg

SEQ ID NO: 122391 - DNA, 20 bp, synthetic construct
  source 1..20: mol_type = other DNA
caataactcaaatgcccatc

SEQ ID NO: 122392 - DNA, 20 bp, synthetic construct
  source 1..20: mol_type = other DNA
gcaataactcaaatgcccat

SEQ ID NO: 122393 - DNA, 20 bp, synthetic construct
  source 1..20: mol_type = other DNA
ggcaataactcaaatgccca

SEQ ID NO: 122394 - DNA, 20 bp, synthetic construct
  source 1..20: mol_type = other DNA
tggcaataactcaaatgccc

SEQ ID NO: 122395 - DNA, 20 bp, synthetic construct
  source 1..20: mol_type = other DNA
ctggcaataactcaaatgcc

SEQ ID NO: 122396 - DNA, 20 bp, synthetic construct
  source 1..20: mol_type = other DNA
gctggcaataactcaaatgc

SEQ ID NO: 122397 - DNA, 20 bp, synthetic construct
  source 1..20: mol_type = other DNA
agctggcaataactcaaatg

SEQ ID NO: 122398 - DNA, 20 bp, synthetic construct
  source 1..20: mol_type = other DNA
aagctggcaataactcaaat

SEQ ID NO: 122399 - DNA, 20 bp, synthetic construct
  source 1..20: mol_type = other DNA
aaagctggcaataactcaaa

SEQ ID NO: 122400 - DNA, 20 bp, synthetic construct
  source 1..20: mol_type = other DNA
aaaagctggcaataactcaa

SEQ ID NO: 122401 - DNA, 20 bp, synthetic construct
  source 1..20: mol_type = other DNA
caaaagctggcaataactca

SEQ ID NO: 122402 - DNA, 20 bp, synthetic construct
  source 1..20: mol_type = other DNA
ccaaaagctggcaataactc

SEQ ID NO: 122403 - DNA, 20 bp, synthetic construct
  source 1..20: mol_type = other DNA
gccaaaagctggcaataact

SEQ ID NO: 122404 - DNA, 20 bp, synthetic construct
  source 1..20: mol_type = other DNA
agccaaaagctggcaataac

SEQ ID NO: 122405 - DNA, 20 bp, synthetic construct
  source 1..20: mol_type = other DNA
tagccaaaagctggcaataa

SEQ ID NO: 122406 - DNA, 20 bp, synthetic construct
  source 1..20: mol_type = other DNA
atagccaaaagctggcaata

SEQ ID NO: 122407 - DNA, 20 bp, synthetic construct
  source 1..20: mol_type = other DNA
aatagccaaaagctggcaat

SEQ ID NO: 122408 - DNA, 20 bp, synthetic construct
  source 1..20: mol_type = other DNA
taatagccaaaagctggcaa

SEQ ID NO: 122409 - DNA, 20 bp, synthetic construct
  source 1..20: mol_type = other DNA
ataatagccaaaagctggca

SEQ ID NO: 122410 - DNA, 20 bp, synthetic construct
  source 1..20: mol_type = other DNA
cataatagccaaaagctggc

SEQ ID NO: 122411 - DNA, 20 bp, synthetic construct
  source 1..20: mol_type = other DNA
tcataatagccaaaagctgg

SEQ ID NO: 122412 - DNA, 20 bp, synthetic construct
  source 1..20: mol_type = other DNA
ttcataatagccaaaagctg

SEQ ID NO: 122413 - DNA, 20 bp, synthetic construct
  source 1..20: mol_type = other DNA
attcataatagccaaaagct

SEQ ID NO: 122414 - DNA, 20 bp, synthetic construct
  source 1..20: mol_type = other DNA
cattcataatagccaaaagc

SEQ ID NO: 122415 - DNA, 20 bp, synthetic construct
  source 1..20: mol_type = other DNA
tcattcataatagccaaaag

SEQ ID NO: 122416 - DNA, 20 bp, synthetic construct
  source 1..20: mol_type = other DNA
ttcattcataatagccaaaa

SEQ ID NO: 122417 - DNA, 20 bp, synthetic construct
  source 1..20: mol_type = other DNA
cttcattcataatagccaaa

SEQ ID NO: 122418 - DNA, 20 bp, synthetic construct
  source 1..20: mol_type = other DNA
gcttcattcataatagccaa

SEQ ID NO: 122419 - DNA, 20 bp, synthetic construct
  source 1..20: mol_type = other DNA
agcttcattcataatagcca

SEQ ID NO: 122420 - DNA, 20 bp, synthetic construct
  source 1..20: mol_type = other DNA
cagcttcattcataatagcc

SEQ ID NO: 122421 - DNA, 20 bp, synthetic construct
  source 1..20: mol_type = other DNA
gcagcttcattcataatagc

SEQ ID NO: 122422 - DNA, 20 bp, synthetic construct
  source 1..20: mol_type = other DNA
agcagcttcattcataatag

SEQ ID NO: 122423 - DNA, 20 bp, synthetic construct
  source 1..20: mol_type = other DNA
cagcagcttcattcataata

SEQ ID NO: 122424 - DNA, 20 bp, synthetic construct
  source 1..20: mol_type = other DNA
acagcagcttcattcataat

SEQ ID NO: 122425 - DNA, 20 bp, synthetic construct
  source 1..20: mol_type = other DNA
cacagcagcttcattcataa

SEQ ID NO: 122426 - DNA, 20 bp, synthetic construct
  source 1..20: mol_type = other DNA
tcacagcagcttcattcata

SEQ ID NO: 122427 - DNA, 20 bp, synthetic construct
  source 1..20: mol_type = other DNA
ctcacagcagcttcattcat

SEQ ID NO: 122428 - DNA, 20 bp, synthetic construct
  source 1..20: mol_type = other DNA
gctcacagcagcttcattca

SEQ ID NO: 122429 - DNA, 20 bp, synthetic construct
  source 1..20: mol_type = other DNA
tgctcacagcagcttcattc

SEQ ID NO: 122430 - DNA, 20 bp, synthetic construct
  source 1..20: mol_type = other DNA
atgctcacagcagcttcatt

SEQ ID NO: 122431 - DNA, 20 bp, synthetic construct
  source 1..20: mol_type = other DNA
aatgctcacagcagcttcat

SEQ ID NO: 122432 - DNA, 20 bp, synthetic construct
  source 1..20: mol_type = other DNA
aaatgctcacagcagcttca

SEQ ID NO: 122433 - DNA, 20 bp, synthetic construct
  source 1..20: mol_type = other DNA
caaatgctcacagcagcttc

SEQ ID NO: 122434 - DNA, 20 bp, synthetic construct
  source 1..20: mol_type = other DNA
acaaatgctcacagcagctt

SEQ ID NO: 122435 - DNA, 20 bp, synthetic construct
  source 1..20: mol_type = other DNA
cacaaatgctcacagcagct

SEQ ID NO: 122436 - DNA, 20 bp, synthetic construct
  source 1..20: mol_type = other DNA
acacaaatgctcacagcagc

SEQ ID NO: 122437 - DNA, 20 bp, synthetic construct
  source 1..20: mol_type = other DNA
tacacaaatgctcacagcag

SEQ ID NO: 122438 - DNA, 20 bp, synthetic construct
  source 1..20: mol_type = other DNA
gtacacaaatgctcacagca

SEQ ID NO: 122439 - DNA, 20 bp, synthetic construct
  source 1..20: mol_type = other DNA
tgtacacaaatgctcacagc

SEQ ID NO: 122440 - DNA, 20 bp, synthetic construct
  source 1..20: mol_type = other DNA
ttgtacacaaatgctcacag

SEQ ID NO: 122441 - DNA, 20 bp, synthetic construct
  source 1..20: mol_type = other DNA
cttgtacacaaatgctcaca

SEQ ID NO: 122442 - DNA, 20 bp, synthetic construct
  source 1..20: mol_type = other DNA
acttgtacacaaatgctcac

SEQ ID NO: 122443 - DNA, 20 bp, synthetic construct
  source 1..20: mol_type = other DNA
cacttgtacacaaatgctca

SEQ ID NO: 122444 - DNA, 20 bp, synthetic construct
  source 1..20: mol_type = other DNA
acacttgtacacaaatgctc

SEQ ID NO: 122445 - DNA, 20 bp, synthetic construct
  source 1..20: mol_type = other DNA
aacacttgtacacaaatgct

SEQ ID NO: 122446 - DNA, 20 bp, synthetic construct
  source 1..20: mol_type = other DNA
aaacacttgtacacaaatgc

SEQ ID NO: 122447 - DNA, 20 bp, synthetic construct
  source 1..20: mol_type = other DNA
caaacacttgtacacaaatg

SEQ ID NO: 122448 - DNA, 20 bp, synthetic construct
  source 1..20: mol_type = other DNA
acaaacacttgtacacaaat

SEQ ID NO: 122449 - DNA, 20 bp, synthetic construct
  source 1..20: mol_type = other DNA
cacaaacacttgtacacaaa

SEQ ID NO: 122450 - DNA, 20 bp, synthetic construct
  source 1..20: mol_type = other DNA
acacaaacacttgtacacaa

SEQ ID NO: 122451 - DNA, 20 bp, synthetic construct
  source 1..20: mol_type = other DNA
aacacaaacacttgtacaca

SEQ ID NO: 122452 - DNA, 20 bp, synthetic construct
  source 1..20: mol_type = other DNA
aaacacaaacacttgtacac

SEQ ID NO: 122453 - DNA, 20 bp, synthetic construct
  source 1..20: mol_type = other DNA
aaaacacaaacacttgtaca

SEQ ID NO: 122454 - DNA, 20 bp, synthetic construct
  source 1..20: mol_type = other DNA
aaaaacacaaacacttgtac

SEQ ID NO: 122455 - DNA, 20 bp, synthetic construct
  source 1..20: mol_type = other DNA
taaaaacacaaacacttgta

SEQ ID NO: 122456 - DNA, 20 bp, synthetic construct
  source 1..20: mol_type = other DNA
ataaaaacacaaacacttgt

SEQ ID NO: 122457 - DNA, 20 bp, synthetic construct
  source 1..20: mol_type = other DNA
aataaaaacacaaacacttg

SEQ ID NO: 122458 - DNA, 20 bp, synthetic construct
  source 1..20: mol_type = other DNA
aaataaaaacacaaacactt

SEQ ID NO: 122459 - DNA, 20 bp, synthetic construct
  source 1..20: mol_type = other DNA
gaaataaaaacacaaacact

SEQ ID NO: 122460 - DNA, 20 bp, synthetic construct
  source 1..20: mol_type = other DNA
agaaataaaaacacaaacac

SEQ ID NO: 122461 - DNA, 20 bp, synthetic construct
  source 1..20: mol_type = other DNA
aagaaataaaaacacaaaca

SEQ ID NO: 122462 - DNA, 20 bp, synthetic construct
  source 1..20: mol_type = other DNA
aaagaaataaaaacacaaac

SEQ ID NO: 122463 - DNA, 20 bp, synthetic construct
  source 1..20: mol_type = other DNA
aaaagaaataaaaacacaaa

SEQ ID NO: 122464 - DNA, 20 bp, synthetic construct
  source 1..20: mol_type = other DNA
taaaagaaataaaaacacaa

SEQ ID NO: 122465 - DNA, 20 bp, synthetic construct
  source 1..20: mol_type = other DNA
ctaaaagaaataaaaacaca

SEQ ID NO: 122466 - DNA, 20 bp, synthetic construct
  source 1..20: mol_type = other DNA
actaaaagaaataaaaacac

SEQ ID NO: 122467 - DNA, 20 bp, synthetic construct
  source 1..20: mol_type = other DNA
aactaaaagaaataaaaaca

SEQ ID NO: 122468 - DNA, 20 bp, synthetic construct
  source 1..20: mol_type = other DNA
taactaaaagaaataaaaac

SEQ ID NO: 122469 - DNA, 20 bp, synthetic construct
  source 1..20: mol_type = other DNA
ttaactaaaagaaataaaaa

SEQ ID NO: 122470 - DNA, 20 bp, synthetic construct
  source 1..20: mol_type = other DNA
tttaactaaaagaaataaaa

SEQ ID NO: 122471 - DNA, 20 bp, synthetic construct
  source 1..20: mol_type = other DNA
atttaactaaaagaaataaa

SEQ ID NO: 122472 - DNA, 20 bp, synthetic construct
  source 1..20: mol_type = other DNA
tatttaactaaaagaaataa

SEQ ID NO: 122473 - DNA, 20 bp, synthetic construct
  source 1..20: mol_type = other DNA
gtatttaactaaaagaaata

SEQ ID NO: 122474 - DNA, 20 bp, synthetic construct
  source 1..20: mol_type = other DNA
ggtatttaactaaaagaaat

SEQ ID NO: 122475 - DNA, 20 bp, synthetic construct
  source 1..20: mol_type = other DNA
aggtatttaactaaaagaaa

SEQ ID NO: 122476 - DNA, 20 bp, synthetic construct
  source 1..20: mol_type = other DNA
taggtatttaactaaaagaa

SEQ ID NO: 122477 - DNA, 20 bp, synthetic construct
  source 1..20: mol_type = other DNA
ctaggtatttaactaaaaga

SEQ ID NO: 122478 - DNA, 20 bp, synthetic construct
  source 1..20: mol_type = other DNA
tctaggtatttaactaaaag

SEQ ID NO: 122479 - DNA, 20 bp, synthetic construct
  source 1..20: mol_type = other DNA
ttctaggtatttaactaaaa

SEQ ID NO: 122480 - DNA, 20 bp, synthetic construct
  source 1..20: mol_type = other DNA
attctaggtatttaactaaa

SEQ ID NO: 122481 - DNA, 20 bp, synthetic construct
  source 1..20: mol_type = other DNA
aattctaggtatttaactaa

SEQ ID NO: 122482 - DNA, 20 bp, synthetic construct
  source 1..20: mol_type = other DNA
caattctaggtatttaacta

SEQ ID NO: 122483 - DNA, 20 bp, synthetic construct
  source 1..20: mol_type = other DNA
ccaattctaggtatttaact

SEQ ID NO: 122484 - DNA, 20 bp, synthetic construct
  source 1..20: mol_type = other DNA
tccaattctaggtatttaac

SEQ ID NO: 122485 - DNA, 20 bp, synthetic construct
  source 1..20: mol_type = other DNA
ttccaattctaggtatttaa

SEQ ID NO: 122486 - DNA, 20 bp, synthetic construct
  source 1..20: mol_type = other DNA
attccaattctaggtattta

SEQ ID NO: 122487 - DNA, 20 bp, synthetic construct
  source 1..20: mol_type = other DNA
aattccaattctaggtattt

SEQ ID NO: 122488 - DNA, 20 bp, synthetic construct
  source 1..20: mol_type = other DNA
caattccaattctaggtatt

SEQ ID NO: 122489 - DNA, 20 bp, synthetic construct
  source 1..20: mol_type = other DNA
gcaattccaattctaggtat

SEQ ID NO: 122490 - DNA, 20 bp, synthetic construct
  source 1..20: mol_type = other DNA
agcaattccaattctaggta

SEQ ID NO: 122491 - DNA, 20 bp, synthetic construct
  source 1..20: mol_type = other DNA
cagcaattccaattctaggt

SEQ ID NO: 122492 - DNA, 20 bp, synthetic construct
  source 1..20: mol_type = other DNA
tcagcaattccaattctagg

SEQ ID NO: 122493 - DNA, 20 bp, synthetic construct
  source 1..20: mol_type = other DNA
ctcagcaattccaattctag

SEQ ID NO: 122494 - DNA, 20 bp, synthetic construct
  source 1..20: mol_type = other DNA
cctcagcaattccaattcta

SEQ ID NO: 122495 - DNA, 20 bp, synthetic construct
  source 1..20: mol_type = other DNA
acctcagcaattccaattct

SEQ ID NO: 122496 - DNA, 20 bp, synthetic construct
  source 1..20: mol_type = other DNA
tacctcagcaattccaattc

SEQ ID NO: 122497 - DNA, 20 bp, synthetic construct
  source 1..20: mol_type = other DNA
atacctcagcaattccaatt

SEQ ID NO: 122498 - DNA, 20 bp, synthetic construct
  source 1..20: mol_type = other DNA
catacctcagcaattccaat

SEQ ID NO: 122499 - DNA, 20 bp, synthetic construct
  source 1..20: mol_type = other DNA
ccatacctcagcaattccaa

SEQ ID NO: 122500 - DNA, 20 bp, synthetic construct
  source 1..20: mol_type = other DNA
accatacctcagcaattcca

SEQ ID NO: 122501 - DNA, 20 bp, synthetic construct
  source 1..20: mol_type = other DNA
taccatacctcagcaattcc

SEQ ID NO: 122502 - DNA, 20 bp, synthetic construct
  source 1..20: mol_type = other DNA
ttaccatacctcagcaattc

SEQ ID NO: 122503 - DNA, 20 bp, synthetic construct
  source 1..20: mol_type = other DNA
cttaccatacctcagcaatt

SEQ ID NO: 122504 - DNA, 20 bp, synthetic construct
  source 1..20: mol_type = other DNA
acttaccatacctcagcaat

SEQ ID NO: 122505 - DNA, 20 bp, synthetic construct
  source 1..20: mol_type = other DNA
cacttaccatacctcagcaa

SEQ ID NO: 122506 - DNA, 20 bp, synthetic construct
  source 1..20: mol_type = other DNA
gcacttaccatacctcagca

SEQ ID NO: 122507 - DNA, 20 bp, synthetic construct
  source 1..20: mol_type = other DNA
tgcacttaccatacctcagc

SEQ ID NO: 122508 - DNA, 20 bp, synthetic construct
  source 1..20: mol_type = other DNA
atgcacttaccatacctcag

SEQ ID NO: 122509 - DNA, 20 bp, synthetic construct
  source 1..20: mol_type = other DNA
tatgcacttaccatacctca

SEQ ID NO: 122510 - DNA, 20 bp, synthetic construct
  source 1..20: mol_type = other DNA
atatgcacttaccatacctc

SEQ ID NO: 122511 - DNA, 20 bp, synthetic construct
  source 1..20: mol_type = other DNA
aatatgcacttaccatacct

SEQ ID NO: 122512 - DNA, 20 bp, synthetic construct
  source 1..20: mol_type = other DNA
aaatatgcacttaccatacc

SEQ ID NO: 122513 - DNA, 20 bp, synthetic construct
  source 1..20: mol_type = other DNA
gaaatatgcacttaccatac

SEQ ID NO: 122514 - DNA, 20 bp, synthetic construct
  source 1..20: mol_type = other DNA
tgaaatatgcacttaccata

SEQ ID NO: 122515 - DNA, 20 bp, synthetic construct
  source 1..20: mol_type = other DNA
atgaaatatgcacttaccat

SEQ ID NO: 122516 - DNA, 20 bp, synthetic construct
  source 1..20: mol_type = other DNA
aatgaaatatgcacttacca

SEQ ID NO: 122517 - DNA, 20 bp, synthetic construct
  source 1..20: mol_type = other DNA
aaatgaaatatgcacttacc

SEQ ID NO: 122518 - DNA, 20 bp, synthetic construct
  source 1..20: mol_type = other DNA
aaaatgaaatatgcacttac

SEQ ID NO: 122519 - DNA, 20 bp, synthetic construct
  source 1..20: mol_type = other DNA
aaaaatgaaatatgcactta

SEQ ID NO: 122520 - DNA, 20 bp, synthetic construct
  source 1..20: mol_type = other DNA
aaaaaatgaaatatgcactt

SEQ ID NO: 122521 - DNA, 20 bp, synthetic construct
  source 1..20: mol_type = other DNA
aaaaaaatgaaatatgcact

SEQ ID NO: 122522 - DNA, 20 bp, synthetic construct
  source 1..20: mol_type = other DNA
taaaaaaatgaaatatgcac

SEQ ID NO: 122523 - DNA, 20 bp, synthetic construct
  source 1..20: mol_type = other DNA
ttaaaaaaatgaaatatgca

SEQ ID NO: 122524 - DNA, 20 bp, synthetic construct
  source 1..20: mol_type = other DNA
tttaaaaaaatgaaatatgc

SEQ ID NO: 122525 - DNA, 20 bp, synthetic construct
  source 1..20: mol_type = other DNA
ttttaaaaaaatgaaatatg

SEQ ID NO: 122526 - DNA, 20 bp, synthetic construct
  source 1..20: mol_type = other DNA
tttttaaaaaaatgaaatat

SEQ ID NO: 122527 - DNA, 20 bp, synthetic construct
  source 1..20: mol_type = other DNA
ttttttaaaaaaatgaaata

SEQ ID NO: 122528 - DNA, 20 bp, synthetic construct
  source 1..20: mol_type = other DNA
attttttaaaaaaatgaaat

SEQ ID NO: 122529 - DNA, 20 bp, synthetic construct
  source 1..20: mol_type = other DNA
aattttttaaaaaaatgaaa

SEQ ID NO: 122530 - DNA, 20 bp, synthetic construct
  source 1..20: mol_type = other DNA
aaattttttaaaaaaatgaa

SEQ ID NO: 122531 - DNA, 20 bp, synthetic construct
  source 1..20: mol_type = other DNA
taaattttttaaaaaaatga

SEQ ID NO: 122532 - DNA, 20 bp, synthetic construct
  source 1..20: mol_type = other DNA
ataaattttttaaaaaaatg

SEQ ID NO: 122533 - DNA, 20 bp, synthetic construct
  source 1..20: mol_type = other DNA
aataaattttttaaaaaaat

SEQ ID NO: 122534 - DNA, 20 bp, synthetic construct
  source 1..20: mol_type = other DNA
aaataaattttttaaaaaaa

SEQ ID NO: 122535 - DNA, 20 bp, synthetic construct
  source 1..20: mol_type = other DNA
aaaataaattttttaaaaaa

SEQ ID NO: 122536 - DNA, 20 bp, synthetic construct
  source 1..20: mol_type = other DNA
taaaataaattttttaaaaa

SEQ ID NO: 122537 - DNA, 20 bp, synthetic construct
  source 1..20: mol_type = other DNA
ataaaataaattttttaaaa

SEQ ID NO: 122538 - DNA, 20 bp, synthetic construct
  source 1..20: mol_type = other DNA
aataaaataaattttttaaa

SEQ ID NO: 122539 - DNA, 20 bp, synthetic construct
  source 1..20: mol_type = other DNA
aaataaaataaattttttaa

SEQ ID NO: 122540 - DNA, 20 bp, synthetic construct
  source 1..20: mol_type = other DNA
aaaataaaataaatttttta

SEQ ID NO: 122541 - DNA, 20 bp, synthetic construct
  source 1..20: mol_type = other DNA
aaaaataaaataaatttttt

SEQ ID NO: 122542 - DNA, 20 bp, synthetic construct
  source 1..20: mol_type = other DNA
aaaaaataaaataaattttt

SEQ ID NO: 122543 - DNA, 20 bp, synthetic construct
  source 1..20: mol_type = other DNA
taaaaaataaaataaatttt

SEQ ID NO: 122544 - DNA, 20 bp, synthetic construct
  source 1..20: mol_type = other DNA
ataaaaaataaaataaattt

SEQ ID NO: 122545 - DNA, 20 bp, synthetic construct
  source 1..20: mol_type = other DNA
aataaaaaataaaataaatt

SEQ ID NO: 122546 - DNA, 20 bp, synthetic construct
  source 1..20: mol_type = other DNA
aaataaaaaataaaataaat

SEQ ID NO: 122547 - DNA, 20 bp, synthetic construct
  source 1..20: mol_type = other DNA
taaataaaaaataaaataaa

SEQ ID NO: 122548 - DNA, 20 bp, synthetic construct
  source 1..20: mol_type = other DNA
ataaataaaaaataaaataa

SEQ ID NO: 122549 - DNA, 20 bp, synthetic construct
  source 1..20: mol_type = other DNA
aataaataaaaaataaaata

SEQ ID NO: 122550 - DNA, 20 bp, synthetic construct
  source 1..20: mol_type = other DNA
aaataaataaaaaataaaat

SEQ ID NO: 122551 - DNA, 20 bp, synthetic construct
  source 1..20: mol_type = other DNA
taaataaataaaaaataaaa

SEQ ID NO: 122552 - DNA, 20 bp, synthetic construct
  source 1..20: mol_type = other DNA
ataaataaataaaaaataaa

SEQ ID NO: 122553 - DNA, 20 bp, synthetic construct
  source 1..20: mol_type = other DNA
aataaataaataaaaaataa

SEQ ID NO: 122554 - DNA, 20 bp, synthetic construct
  source 1..20: mol_type = other DNA
aaataaataaataaaaaata

SEQ ID NO: 122555 - DNA, 20 bp, synthetic construct
  source 1..20: mol_type = other DNA
aaaataaataaataaaaaat

SEQ ID NO: 122556 - DNA, 20 bp, synthetic construct
  source 1..20: mol_type = other DNA
aaaaataaataaataaaaaa

SEQ ID NO: 122557 - DNA, 20 bp, synthetic construct
  source 1..20: mol_type = other DNA
aaaaaataaataaataaaaa

SEQ ID NO: 122558 - DNA, 20 bp, synthetic construct
  source 1..20: mol_type = other DNA
aaaaaaataaataaataaaa

SEQ ID NO: 122559 - DNA, 20 bp, synthetic construct
  source 1..20: mol_type = other DNA
aaaaaaaataaataaataaa

SEQ ID NO: 122560 - DNA, 20 bp, synthetic construct
  source 1..20: mol_type = other DNA
caaaaaaaataaataaataa

SEQ ID NO: 122561 - DNA, 20 bp, synthetic construct
  source 1..20: mol_type = other DNA
tcaaaaaaaataaataaata

SEQ ID NO: 122562 - DNA, 20 bp, synthetic construct
  source 1..20: mol_type = other DNA
ctcaaaaaaaataaataaat

SEQ ID NO: 122563 - DNA, 20 bp, synthetic construct
  source 1..20: mol_type = other DNA
tctcaaaaaaaataaataaa

SEQ ID NO: 122564 - DNA, 20 bp, synthetic construct
  source 1..20: mol_type = other DNA
atctcaaaaaaaataaataa

SEQ ID NO: 122565 - DNA, 20 bp, synthetic construct
  source 1..20: mol_type = other DNA
catctcaaaaaaaataaata

SEQ ID NO: 122566 - DNA, 20 bp, synthetic construct
  source 1..20: mol_type = other DNA
tcatctcaaaaaaaataaat

SEQ ID NO: 122567 - DNA, 20 bp, synthetic construct
  source 1..20: mol_type = other DNA
ttcatctcaaaaaaaataaa

SEQ ID NO: 122568 - DNA, 20 bp, synthetic construct
  source 1..20: mol_type = other DNA
cttcatctcaaaaaaaataa

SEQ ID NO: 122569 - DNA, 20 bp, synthetic construct
  source 1..20: mol_type = other DNA
acttcatctcaaaaaaaata

SEQ ID NO: 122570 - DNA, 20 bp, synthetic construct
  source 1..20: mol_type = other DNA
gacttcatctcaaaaaaaat

SEQ ID NO: 122571 - DNA, 20 bp, synthetic construct
  source 1..20: mol_type = other DNA
agacttcatctcaaaaaaaa

SEQ ID NO: 122572 - DNA, 20 bp, synthetic construct
  source 1..20: mol_type = other DNA
gagacttcatctcaaaaaaa

SEQ ID NO: 122573 - DNA, 20 bp, synthetic construct
  source 1..20: mol_type = other DNA
tgagacttcatctcaaaaaa

SEQ ID NO: 122574 - DNA, 20 bp, synthetic construct
  source 1..20: mol_type = other DNA
gtgagacttcatctcaaaaa

SEQ ID NO: 122575 - DNA, 20 bp, synthetic construct
  source 1..20: mol_type = other DNA
agtgagacttcatctcaaaa

SEQ ID NO: 122576 - DNA, 20 bp, synthetic construct
  source 1..20: mol_type = other DNA
gagtgagacttcatctcaaa

SEQ ID NO: 122577 - DNA, 20 bp, synthetic construct
  source 1..20: mol_type = other DNA
agagtgagacttcatctcaa

SEQ ID NO: 122578 - DNA, 20 bp, synthetic construct
  source 1..20: mol_type = other DNA
cagagtgagacttcatctca

SEQ ID NO: 122579 - DNA, 20 bp, synthetic construct
  source 1..20: mol_type = other DNA
acagagtgagacttcatctc

SEQ ID NO: 122580 - DNA, 20 bp, synthetic construct
  source 1..20: mol_type = other DNA
aacagagtgagacttcatct

SEQ ID NO: 122581 - DNA, 20 bp, synthetic construct
  source 1..20: mol_type = other DNA
caacagagtgagacttcatc

SEQ ID NO: 122582 - DNA, 20 bp, synthetic construct
  source 1..20: mol_type = other DNA
gcaacagagtgagacttcat

SEQ ID NO: 122583 - DNA, 20 bp, synthetic construct
  source 1..20: mol_type = other DNA
ggcaacagagtgagacttca

SEQ ID NO: 122584 - DNA, 20 bp, synthetic construct
  source 1..20: mol_type = other DNA
gggcaacagagtgagacttc

SEQ ID NO: 122585 - DNA, 20 bp, synthetic construct
  source 1..20: mol_type = other DNA
tgggcaacagagtgagactt

SEQ ID NO: 122586 - DNA, 20 bp, synthetic construct
  source 1..20: mol_type = other DNA
ctgggcaacagagtgagact

SEQ ID NO: 122587 - DNA, 20 bp, synthetic construct
  source 1..20: mol_type = other DNA
cctgggcaacagagtgagac

SEQ ID NO: 122588 - DNA, 20 bp, synthetic construct
  source 1..20: mol_type = other DNA
gcctgggcaacagagtgaga

SEQ ID NO: 122589 - DNA, 20 bp, synthetic construct
  source 1..20: mol_type = other DNA
agcctgggcaacagagtgag

SEQ ID NO: 122590 - DNA, 20 bp, synthetic construct
  source 1..20: mol_type = other DNA
cagcctgggcaacagagtga

SEQ ID NO: 122591 - DNA, 20 bp, synthetic construct
  source 1..20: mol_type = other DNA
ccagcctgggcaacagagtg

SEQ ID NO: 122592 - DNA, 20 bp, synthetic construct
  source 1..20: mol_type = other DNA
tccagcctgggcaacagagt

SEQ ID NO: 122593 - DNA, 20 bp, synthetic construct
  source 1..20: mol_type = other DNA
ctccagcctgggcaacagag

SEQ ID NO: 122594 - DNA, 20 bp, synthetic construct
  source 1..20: mol_type = other DNA
actccagcctgggcaacaga

SEQ ID NO: 122595 - DNA, 20 bp, synthetic construct
  source 1..20: mol_type = other DNA
aactccagcctgggcaacag

SEQ ID NO: 122596 - DNA, 20 bp, synthetic construct
  source 1..20: mol_type = other DNA
gaactccagcctgggcaaca

SEQ ID NO: 122597 - DNA, 20 bp, synthetic construct
  source 1..20: mol_type = other DNA
tgaactccagcctgggcaac

SEQ ID NO: 122598 - DNA, 20 bp, synthetic construct
  source 1..20: mol_type = other DNA
ctgaactccagcctgggcaa

SEQ ID NO: 122599 - DNA, 20 bp, synthetic construct
  source 1..20: mol_type = other DNA
actgaactccagcctgggca

SEQ ID NO: 122600 - DNA, 20 bp, synthetic construct
  source 1..20: mol_type = other DNA
cactgaactccagcctgggc

SEQ ID NO: 122601 - DNA, 20 bp, synthetic construct
  source 1..20: mol_type = other DNA
ccactgaactccagcctggg

SEQ ID NO: 122602 - DNA, 20 bp, synthetic construct
  source 1..20: mol_type = other DNA
gccactgaactccagcctgg

SEQ ID NO: 122603 - DNA, 20 bp, synthetic construct
  source 1..20: mol_type = other DNA
cgccactgaactccagcctg

SEQ ID NO: 122604 - DNA, 20 bp, synthetic construct
  source 1..20: mol_type = other DNA
acgccactgaactccagcct

SEQ ID NO: 122605 - DNA, 20 bp, synthetic construct
  source 1..20: mol_type = other DNA
cacgccactgaactccagcc

SEQ ID NO: 122606 - DNA, 20 bp, synthetic construct
  source 1..20: mol_type = other DNA
tcacgccactgaactccagc

SEQ ID NO: 122607 - DNA, 20 bp, synthetic construct
  source 1..20: mol_type = other DNA
atcacgccactgaactccag

SEQ ID NO: 122608 - DNA, 20 bp, synthetic construct
  source 1..20: mol_type = other DNA
aatcacgccactgaactcca

SEQ ID NO: 122609 - DNA, 20 bp, synthetic construct
  source 1..20: mol_type = other DNA
aaatcacgccactgaactcc

SEQ ID NO: 122610 - DNA, 20 bp, synthetic construct
  source 1..20: mol_type = other DNA
gaaatcacgccactgaactc

SEQ ID NO: 122611 - DNA, 20 bp, synthetic construct
  source 1..20: mol_type = other DNA
tgaaatcacgccactgaact

SEQ ID NO: 122612 - DNA, 20 bp, synthetic construct
  source 1..20: mol_type = other DNA
ctgaaatcacgccactgaac

SEQ ID NO: 122613 - DNA, 20 bp, synthetic construct
  source 1..20: mol_type = other DNA
gctgaaatcacgccactgaa

SEQ ID NO: 122614 - DNA, 20 bp, synthetic construct
  source 1..20: mol_type = other DNA
agctgaaatcacgccactga

SEQ ID NO: 122615 - DNA, 20 bp, synthetic construct
  source 1..20: mol_type = other DNA
gagctgaaatcacgccactg

SEQ ID NO: 122616 - DNA, 20 bp, synthetic construct
  source 1..20: mol_type = other DNA
tgagctgaaatcacgccact

SEQ ID NO: 122617 - DNA, 20 bp, synthetic construct
  source 1..20: mol_type = other DNA
atgagctgaaatcacgccac

SEQ ID NO: 122618 - DNA, 20 bp, synthetic construct
  source 1..20: mol_type = other DNA
catgagctgaaatcacgcca

SEQ ID NO: 122619 - DNA, 20 bp, synthetic construct
  source 1..20: mol_type = other DNA
ccatgagctgaaatcacgcc

SEQ ID NO: 122620 - DNA, 20 bp, synthetic construct
  source 1..20: mol_type = other DNA
gccatgagctgaaatcacgc

SEQ ID NO: 122621 - DNA, 20 bp, synthetic construct
  source 1..20: mol_type = other DNA
tgccatgagctgaaatcacg

SEQ ID NO: 122622 - DNA, 20 bp, synthetic construct
  source 1..20: mol_type = other DNA
ttgccatgagctgaaatcac

SEQ ID NO: 122623 - DNA, 20 bp, synthetic construct
  source 1..20: mol_type = other DNA
gttgccatgagctgaaatca

SEQ ID NO: 122624 - DNA, 20 bp, synthetic construct
  source 1..20: mol_type = other DNA
ggttgccatgagctgaaatc

SEQ ID NO: 122625 - DNA, 20 bp, synthetic construct
  source 1..20: mol_type = other DNA
aggttgccatgagctgaaat

SEQ ID NO: 122626 - DNA, 20 bp, synthetic construct
  source 1..20: mol_type = other DNA
gaggttgccatgagctgaaa

SEQ ID NO: 122627 - DNA, 20 bp, synthetic construct
  source 1..20: mol_type = other DNA
ggaggttgccatgagctgaa

SEQ ID NO: 122628 - DNA, 20 bp, synthetic construct
  source 1..20: mol_type = other DNA
gggaggttgccatgagctga

SEQ ID NO: 122629 - DNA, 20 bp, synthetic construct
  source 1..20: mol_type = other DNA
agggaggttgccatgagctg

SEQ ID NO: 122630 - DNA, 20 bp, synthetic construct
  source 1..20: mol_type = other DNA
cagggaggttgccatgagct

SEQ ID NO: 122631 - DNA, 20 bp, synthetic construct
  source 1..20: mol_type = other DNA
acagggaggttgccatgagc

SEQ ID NO: 122632 - DNA, 20 bp, synthetic construct
  source 1..20: mol_type = other DNA
gacagggaggttgccatgag

SEQ ID NO: 122633 - DNA, 20 bp, synthetic construct
  source 1..20: mol_type = other DNA
ggacagggaggttgccatga

SEQ ID NO: 122634 - DNA, 20 bp, synthetic construct
  source 1..20: mol_type = other DNA
gggacagggaggttgccatg

SEQ ID NO: 122635 - DNA, 20 bp, synthetic construct
  source 1..20: mol_type = other DNA
cgggacagggaggttgccat

SEQ ID NO: 122636 - DNA, 20 bp, synthetic construct
  source 1..20: mol_type = other DNA
ccgggacagggaggttgcca

SEQ ID NO: 122637 - DNA, 20 bp, synthetic construct
  source 1..20: mol_type = other DNA
cccgggacagggaggttgcc

SEQ ID NO: 122638 - DNA, 20 bp, synthetic construct
  source 1..20: mol_type = other DNA
acccgggacagggaggttgc

SEQ ID NO: 122639 - DNA, 20 bp, synthetic construct
  source 1..20: mol_type = other DNA
aacccgggacagggaggttg

SEQ ID NO: 122640 - DNA, 20 bp, synthetic construct
  source 1..20: mol_type = other DNA
gaacccgggacagggaggtt

SEQ ID NO: 122641 - DNA, 20 bp, synthetic construct
  source 1..20: mol_type = other DNA
tgaacccgggacagggaggt

SEQ ID NO: 122642 - DNA, 20 bp, synthetic construct
  source 1..20: mol_type = other DNA
ttgaacccgggacagggagg

SEQ ID NO: 122643 - DNA, 20 bp, synthetic construct
  source 1..20: mol_type = other DNA
cttgaacccgggacagggag

SEQ ID NO: 122644 - DNA, 20 bp, synthetic construct
  source 1..20: mol_type = other DNA
gcttgaacccgggacaggga

SEQ ID NO: 122645 - DNA, 20 bp, synthetic construct
  source 1..20: mol_type = other DNA
tgcttgaacccgggacaggg

SEQ ID NO: 122646 - DNA, 20 bp, synthetic construct
  source 1..20: mol_type = other DNA
ttgcttgaacccgggacagg

SEQ ID NO: 122647 - DNA, 20 bp, synthetic construct
  source 1..20: mol_type = other DNA
attgcttgaacccgggacag

SEQ ID NO: 122648 - DNA, 20 bp, synthetic construct
  source 1..20: mol_type = other DNA
aattgcttgaacccgggaca

SEQ ID NO: 122649 - DNA, 20 bp, synthetic construct
  source 1..20: mol_type = other DNA
gaattgcttgaacccgggac

SEQ ID NO: 122650 - DNA, 20 bp, synthetic construct
  source 1..20: mol_type = other DNA
agaattgcttgaacccggga

SEQ ID NO: 122651 - DNA, 20 bp, synthetic construct
  source 1..20: mol_type = other DNA
gagaattgcttgaacccggg

SEQ ID NO: 122652 - DNA, 20 bp, synthetic construct
  source 1..20: mol_type = other DNA
ggagaattgcttgaacccgg

SEQ ID NO: 122653 - DNA, 20 bp, synthetic construct
  source 1..20: mol_type = other DNA
gggagaattgcttgaacccg

SEQ ID NO: 122654 - DNA, 20 bp, synthetic construct
  source 1..20: mol_type = other DNA
cgggagaattgcttgaaccc

SEQ ID NO: 122655 - DNA, 20 bp, synthetic construct
  source 1..20: mol_type = other DNA
gcgggagaattgcttgaacc

SEQ ID NO: 122656 - DNA, 20 bp, synthetic construct
  source 1..20: mol_type = other DNA
ggcgggagaattgcttgaac

SEQ ID NO: 122657 - DNA, 20 bp, synthetic construct
  source 1..20: mol_type = other DNA
aggcgggagaattgcttgaa

SEQ ID NO: 122658 - DNA, 20 bp, synthetic construct
  source 1..20: mol_type = other DNA
gaggcgggagaattgcttga

SEQ ID NO: 122659 - DNA, 20 bp, synthetic construct
  source 1..20: mol_type = other DNA
tgaggcgggagaattgcttg

SEQ ID NO: 122660 - DNA, 20 bp, synthetic construct
  source 1..20: mol_type = other DNA
ctgaggcgggagaattgctt

SEQ ID NO: 122661 - DNA, 20 bp, synthetic construct
  source 1..20: mol_type = other DNA
gctgaggcgggagaattgct

SEQ ID NO: 122662 - DNA, 20 bp, synthetic construct
  source 1..20: mol_type = other DNA
ggctgaggcgggagaattgc

SEQ ID NO: 122663 - DNA, 20 bp, synthetic construct
  source 1..20: mol_type = other DNA
aggctgaggcgggagaattg

SEQ ID NO: 122664 - DNA, 20 bp, synthetic construct
  source 1..20: mol_type = other DNA
gaggctgaggcgggagaatt

SEQ ID NO: 122665 - DNA, 20 bp, synthetic construct
  source 1..20: mol_type = other DNA
ggaggctgaggcgggagaat

SEQ ID NO: 122666 - DNA, 20 bp, synthetic construct
  source 1..20: mol_type = other DNA
gggaggctgaggcgggagaa

SEQ ID NO: 122667 - DNA, 20 bp, synthetic construct
  source 1..20: mol_type = other DNA
tgggaggctgaggcgggaga

SEQ ID NO: 122668 - DNA, 20 bp, synthetic construct
  source 1..20: mol_type = other DNA
ttgggaggctgaggcgggag

SEQ ID NO: 122669 - DNA, 20 bp, synthetic construct
  source 1..20: mol_type = other DNA
cttgggaggctgaggcggga

SEQ ID NO: 122670 - DNA, 20 bp, synthetic construct
  source 1..20: mol_type = other DNA
acttgggaggctgaggcggg

SEQ ID NO: 122671 - DNA, 20 bp, synthetic construct
  source 1..20: mol_type = other DNA
tacttgggaggctgaggcgg

SEQ ID NO: 122672 - DNA, 20 bp, synthetic construct
  source 1..20: mol_type = other DNA
ctacttgggaggctgaggcg

SEQ ID NO: 122673 - DNA, 20 bp, synthetic construct
  source 1..20: mol_type = other DNA
gctacttgggaggctgaggc

SEQ ID NO: 122674 - DNA, 20 bp, synthetic construct
  source 1..20: mol_type = other DNA
agctacttgggaggctgagg

SEQ ID NO: 122675 - DNA, 20 bp, synthetic construct
  source 1..20: mol_type = other DNA
cagctacttgggaggctgag

SEQ ID NO: 122676 - DNA, 20 bp, synthetic construct
  source 1..20: mol_type = other DNA
ccagctacttgggaggctga

SEQ ID NO: 122677 - DNA, 20 bp, synthetic construct
  source 1..20: mol_type = other DNA
cccagctacttgggaggctg

SEQ ID NO: 122678 - DNA, 20 bp, synthetic construct
  source 1..20: mol_type = other DNA
tcccagctacttgggaggct

SEQ ID NO: 122679 - DNA, 20 bp, synthetic construct
  source 1..20: mol_type = other DNA
atcccagctacttgggaggc

SEQ ID NO: 122680 - DNA, 20 bp, synthetic construct
  source 1..20: mol_type = other DNA
aatcccagctacttgggagg

SEQ ID NO: 122681 - DNA, 20 bp, synthetic construct
  source 1..20: mol_type = other DNA
taatcccagctacttgggag

SEQ ID NO: 122682 - DNA, 20 bp, synthetic construct
  source 1..20: mol_type = other DNA
gtaatcccagctacttggga

SEQ ID NO: 122683 - DNA, 20 bp, synthetic construct
  source 1..20: mol_type = other DNA
tgtaatcccagctacttggg

SEQ ID NO: 122684 - DNA, 20 bp, synthetic construct
  source 1..20: mol_type = other DNA
ctgtaatcccagctacttgg

SEQ ID NO: 122685 - DNA, 20 bp, synthetic construct
  source 1..20: mol_type = other DNA
cctgtaatcccagctacttg

SEQ ID NO: 122686 - DNA, 20 bp, synthetic construct
  source 1..20: mol_type = other DNA
gcctgtaatcccagctactt

SEQ ID NO: 122687 - DNA, 20 bp, synthetic construct
  source 1..20: mol_type = other DNA
cgcctgtaatcccagctact

SEQ ID NO: 122688 - DNA, 20 bp, synthetic construct
  source 1..20: mol_type = other DNA
gcgcctgtaatcccagctac

SEQ ID NO: 122689 - DNA, 20 bp, synthetic construct
  source 1..20: mol_type = other DNA
cgcgcctgtaatcccagcta

SEQ ID NO: 122690 - DNA, 20 bp, synthetic construct
  source 1..20: mol_type = other DNA
gcgcgcctgtaatcccagct

SEQ ID NO: 122691 - DNA, 20 bp, synthetic construct
  source 1..20: mol_type = other DNA
tgcgcgcctgtaatcccagc

SEQ ID NO: 122692 - DNA, 20 bp, synthetic construct
  source 1..20: mol_type = other DNA
gtgcgcgcctgtaatcccag

SEQ ID NO: 122693 - DNA, 20 bp, synthetic construct
  source 1..20: mol_type = other DNA
ggtgcgcgcctgtaatccca

SEQ ID NO: 122694 - DNA, 20 bp, synthetic construct
  source 1..20: mol_type = other DNA
tggtgcgcgcctgtaatccc

SEQ ID NO: 122695 - DNA, 20 bp, synthetic construct
  source 1..20: mol_type = other DNA
gtggtgcgcgcctgtaatcc

SEQ ID NO: 122696 - DNA, 20 bp, synthetic construct
  source 1..20: mol_type = other DNA
ggtggtgcgcgcctgtaatc

SEQ ID NO: 122697 - DNA, 20 bp, synthetic construct
  source 1..20: mol_type = other DNA
tggtggtgcgcgcctgtaat

SEQ ID NO: 122698 - DNA, 20 bp, synthetic construct
  source 1..20: mol_type = other DNA
atggtggtgcgcgcctgtaa

SEQ ID NO: 122699 - DNA, 20 bp, synthetic construct
  source 1..20: mol_type = other DNA
catggtggtgcgcgcctgta

SEQ ID NO: 122700 - DNA, 20 bp, synthetic construct
  source 1..20: mol_type = other DNA
gcatggtggtgcgcgcctgt

SEQ ID NO: 122701 - DNA, 20 bp, synthetic construct
  source 1..20: mol_type = other DNA
ggcatggtggtgcgcgcctg

SEQ ID NO: 122702 - DNA, 20 bp, synthetic construct
  source 1..20: mol_type = other DNA
aggcatggtggtgcgcgcct

SEQ ID NO: 122703 - DNA, 20 bp, synthetic construct
  source 1..20: mol_type = other DNA
caggcatggtggtgcgcgcc

SEQ ID NO: 122704 - DNA, 20 bp, synthetic construct
  source 1..20: mol_type = other DNA
ccaggcatggtggtgcgcgc

SEQ ID NO: 122705 - DNA, 20 bp, synthetic construct
  source 1..20: mol_type = other DNA
gccaggcatggtggtgcgcg

SEQ ID NO: 122706 - DNA, 20 bp, synthetic construct
  source 1..20: mol_type = other DNA
agccaggcatggtggtgcgc

SEQ ID NO: 122707 - DNA, 20 bp, synthetic construct
  source 1..20: mol_type = other DNA
tagccaggcatggtggtgcg

SEQ ID NO: 122708 - DNA, 20 bp, synthetic construct
  source 1..20: mol_type = other DNA
ttagccaggcatggtggtgc

SEQ ID NO: 122709 - DNA, 20 bp, synthetic construct
  source 1..20: mol_type = other DNA
attagccaggcatggtggtg

SEQ ID NO: 122710 - DNA, 20 bp, synthetic construct
  source 1..20: mol_type = other DNA
aattagccaggcatggtggt

SEQ ID NO: 122711 - DNA, 20 bp, synthetic construct
  source 1..20: mol_type = other DNA
aaattagccaggcatggtgg

SEQ ID NO: 122712 - DNA, 20 bp, synthetic construct
  source 1..20: mol_type = other DNA
aaaattagccaggcatggtg

SEQ ID NO: 122713 - DNA, 20 bp, synthetic construct
  source 1..20: mol_type = other DNA
aaaaattagccaggcatggt

SEQ ID NO: 122714 - DNA, 20 bp, synthetic construct
  source 1..20: mol_type = other DNA
aaaaaattagccaggcatgg

SEQ ID NO: 122715 - DNA, 20 bp, synthetic construct
  source 1..20: mol_type = other DNA
aaaaaaattagccaggcatg

SEQ ID NO: 122716 - DNA, 20 bp, synthetic construct
  source 1..20: mol_type = other DNA
caaaaaaattagccaggcat

SEQ ID NO: 122717 - DNA, 20 bp, synthetic construct
  source 1..20: mol_type = other DNA
acaaaaaaattagccaggca

SEQ ID NO: 122718 - DNA, 20 bp, synthetic construct
  source 1..20: mol_type = other DNA
tacaaaaaaattagccaggc

SEQ ID NO: 122719 - DNA, 20 bp, synthetic construct
  source 1..20: mol_type = other DNA
atacaaaaaaattagccagg

SEQ ID NO: 122720 - DNA, 20 bp, synthetic construct
  source 1..20: mol_type = other DNA
aatacaaaaaaattagccag

SEQ ID NO: 122721 - DNA, 20 bp, synthetic construct
  source 1..20: mol_type = other DNA
aaatacaaaaaaattagcca

SEQ ID NO: 122722 - DNA, 20 bp, synthetic construct
  source 1..20: mol_type = other DNA
aaaatacaaaaaaattagcc

SEQ ID NO: 122723 - DNA, 20 bp, synthetic construct
  source 1..20: mol_type = other DNA
aaaaatacaaaaaaattagc

SEQ ID NO: 122724 - DNA, 20 bp, synthetic construct
  source 1..20: mol_type = other DNA
taaaaatacaaaaaaattag

SEQ ID NO: 122725 - DNA, 20 bp, synthetic construct
  source 1..20: mol_type = other DNA
ctaaaaatacaaaaaaatta

SEQ ID NO: 122726 - DNA, 20 bp, synthetic construct
  source 1..20: mol_type = other DNA
actaaaaatacaaaaaaatt

SEQ ID NO: 122727 - DNA, 20 bp, synthetic construct
  source 1..20: mol_type = other DNA
tactaaaaatacaaaaaaat

SEQ ID NO: 122728 - DNA, 20 bp, synthetic construct
  source 1..20: mol_type = other DNA
ctactaaaaatacaaaaaaa

SEQ ID NO: 122729 - DNA, 20 bp, synthetic construct
  source 1..20: mol_type = other DNA
tctactaaaaatacaaaaaa

SEQ ID NO: 122730 - DNA, 20 bp, synthetic construct
  source 1..20: mol_type = other DNA
ctctactaaaaatacaaaaa

SEQ ID NO: 122731 - DNA, 20 bp, synthetic construct
  source 1..20: mol_type = other DNA
tctctactaaaaatacaaaa

SEQ ID NO: 122732 - DNA, 20 bp, synthetic construct
  source 1..20: mol_type = other DNA
gtctctactaaaaatacaaa

SEQ ID NO: 122733 - DNA, 20 bp, synthetic construct
  source 1..20: mol_type = other DNA
cgtctctactaaaaatacaa

SEQ ID NO: 122734 - DNA, 20 bp, synthetic construct
  source 1..20: mol_type = other DNA
ccgtctctactaaaaataca

SEQ ID NO: 122735 - DNA, 20 bp, synthetic construct
  source 1..20: mol_type = other DNA
cccgtctctactaaaaatac

SEQ ID NO: 122736 - DNA, 20 bp, synthetic construct
  source 1..20: mol_type = other DNA
ccccgtctctactaaaaata

SEQ ID NO: 122737 - DNA, 20 bp, synthetic construct
  source 1..20: mol_type = other DNA
accccgtctctactaaaaat

SEQ ID NO: 122738 - DNA, 20 bp, synthetic construct
  source 1..20: mol_type = other DNA
aaccccgtctctactaaaaa

SEQ ID NO: 122739 - DNA, 20 bp, synthetic construct
  source 1..20: mol_type = other DNA
aaaccccgtctctactaaaa

SEQ ID NO: 122740 - DNA, 20 bp, synthetic construct
  source 1..20: mol_type = other DNA
gaaaccccgtctctactaaa

SEQ ID NO: 122741 - DNA, 20 bp, synthetic construct
  source 1..20: mol_type = other DNA
tgaaaccccgtctctactaa

SEQ ID NO: 122742 - DNA, 20 bp, synthetic construct
  source 1..20: mol_type = other DNA
gtgaaaccccgtctctacta

SEQ ID NO: 122743 - DNA, 20 bp, synthetic construct
  source 1..20: mol_type = other DNA
ggtgaaaccccgtctctact

SEQ ID NO: 122744 - DNA, 20 bp, synthetic construct
  source 1..20: mol_type = other DNA
tggtgaaaccccgtctctac

SEQ ID NO: 122745 - DNA, 20 bp, synthetic construct
  source 1..20: mol_type = other DNA
gtggtgaaaccccgtctcta

SEQ ID NO: 122746 - DNA, 20 bp, synthetic construct
  source 1..20: mol_type = other DNA
cgtggtgaaaccccgtctct

SEQ ID NO: 122747 - DNA, 20 bp, synthetic construct
  source 1..20: mol_type = other DNA
acgtggtgaaaccccgtctc

SEQ ID NO: 122748 - DNA, 20 bp, synthetic construct
  source 1..20: mol_type = other DNA
aacgtggtgaaaccccgtct

SEQ ID NO: 122749 - DNA, 20 bp, synthetic construct
  source 1..20: mol_type = other DNA
caacgtggtgaaaccccgtc

SEQ ID NO: 122750 - DNA, 20 bp, synthetic construct
  source 1..20: mol_type = other DNA
ccaacgtggtgaaaccccgt

SEQ ID NO: 122751 - DNA, 20 bp, synthetic construct
  source 1..20: mol_type = other DNA
gccaacgtggtgaaaccccg

SEQ ID NO: 122752 - DNA, 20 bp, synthetic construct
  source 1..20: mol_type = other DNA
ggccaacgtggtgaaacccc

SEQ ID NO: 122753 - DNA, 20 bp, synthetic construct
  source 1..20: mol_type = other DNA
tggccaacgtggtgaaaccc

SEQ ID NO: 122754 - DNA, 20 bp, synthetic construct
  source 1..20: mol_type = other DNA
ctggccaacgtggtgaaacc

SEQ ID NO: 122755 - DNA, 20 bp, synthetic construct
  source 1..20: mol_type = other DNA
cctggccaacgtggtgaaac

SEQ ID NO: 122756 - DNA, 20 bp, synthetic construct
  source 1..20: mol_type = other DNA
gcctggccaacgtggtgaaa

SEQ ID NO: 122757 - DNA, 20 bp, synthetic construct
  source 1..20: mol_type = other DNA
agcctggccaacgtggtgaa

SEQ ID NO: 122758 - DNA, 20 bp, synthetic construct
  source 1..20: mol_type = other DNA
cagcctggccaacgtggtga

SEQ ID NO: 122759 - DNA, 20 bp, synthetic construct
  source 1..20: mol_type = other DNA
ccagcctggccaacgtggtg

SEQ ID NO: 122760 - DNA, 20 bp, synthetic construct
  source 1..20: mol_type = other DNA
accagcctggccaacgtggt

SEQ ID NO: 122761 - DNA, 20 bp, synthetic construct
  source 1..20: mol_type = other DNA
gaccagcctggccaacgtgg

SEQ ID NO: 122762 - DNA, 20 bp, synthetic construct
  source 1..20: mol_type = other DNA
agaccagcctggccaacgtg

SEQ ID NO: 122763 - DNA, 20 bp, synthetic construct
  source 1..20: mol_type = other DNA
gagaccagcctggccaacgt

SEQ ID NO: 122764 - DNA, 20 bp, synthetic construct
  source 1..20: mol_type = other DNA
cgagaccagcctggccaacg

SEQ ID NO: 122765 - DNA, 20 bp, synthetic construct
  source 1..20: mol_type = other DNA
tcgagaccagcctggccaac

SEQ ID NO: 122766 - DNA, 20 bp, synthetic construct
  source 1..20: mol_type = other DNA
ttcgagaccagcctggccaa

SEQ ID NO: 122767 - DNA, 20 bp, synthetic construct
  source 1..20: mol_type = other DNA
gttcgagaccagcctggcca

SEQ ID NO: 122768 - DNA, 20 bp, synthetic construct
  source 1..20: mol_type = other DNA
agttcgagaccagcctggcc

SEQ ID NO: 122769 - DNA, 20 bp, synthetic construct
  source 1..20: mol_type = other DNA
gagttcgagaccagcctggc

SEQ ID NO: 122770 - DNA, 20 bp, synthetic construct
  source 1..20: mol_type = other DNA
ggagttcgagaccagcctgg

SEQ ID NO: 122771 - DNA, 20 bp, synthetic construct
  source 1..20: mol_type = other DNA
aggagttcgagaccagcctg

SEQ ID NO: 122772 - DNA, 20 bp, synthetic construct
  source 1..20: mol_type = other DNA
caggagttcgagaccagcct

SEQ ID NO: 122773 - DNA, 20 bp, synthetic construct
  source 1..20: mol_type = other DNA
tcaggagttcgagaccagcc

SEQ ID NO: 122774 - DNA, 20 bp, synthetic construct
  source 1..20: mol_type = other DNA
gtcaggagttcgagaccagc

SEQ ID NO: 122775 - DNA, 20 bp, synthetic construct
  source 1..20: mol_type = other DNA
ggtcaggagttcgagaccag

SEQ ID NO: 122776 - DNA, 20 bp, synthetic construct
  source 1..20: mol_type = other DNA
tggtcaggagttcgagacca

SEQ ID NO: 122777 - DNA, 20 bp, synthetic construct
  source 1..20: mol_type = other DNA
gtggtcaggagttcgagacc

SEQ ID NO: 122778 - DNA, 20 bp, synthetic construct
  source 1..20: mol_type = other DNA
tgtggtcaggagttcgagac

SEQ ID NO: 122779 - DNA, 20 bp, synthetic construct
  source 1..20: mol_type = other DNA
ttgtggtcaggagttcgaga

SEQ ID NO: 122780 - DNA, 20 bp, synthetic construct
  source 1..20: mol_type = other DNA
cttgtggtcaggagttcgag

SEQ ID NO: 122781 - DNA, 20 bp, synthetic construct
  source 1..20: mol_type = other DNA
acttgtggtcaggagttcga

SEQ ID NO: 122782 - DNA, 20 bp, synthetic construct
  source 1..20: mol_type = other DNA
cacttgtggtcaggagttcg

SEQ ID NO: 122783 - DNA, 20 bp, synthetic construct
  source 1..20: mol_type = other DNA
tcacttgtggtcaggagttc

SEQ ID NO: 122784 - DNA, 20 bp, synthetic construct
  source 1..20: mol_type = other DNA
atcacttgtggtcaggagtt

SEQ ID NO: 122785 - DNA, 20 bp, synthetic construct
  source 1..20: mol_type = other DNA
gatcacttgtggtcaggagt

SEQ ID NO: 122786 - DNA, 20 bp, synthetic construct
  source 1..20: mol_type = other DNA
ggatcacttgtggtcaggag

SEQ ID NO: 122787 - DNA, 20 bp, synthetic construct
  source 1..20: mol_type = other DNA
tggatcacttgtggtcagga

SEQ ID NO: 122788 - DNA, 20 bp, synthetic construct
  source 1..20: mol_type = other DNA
gtggatcacttgtggtcagg

SEQ ID NO: 122789 - DNA, 20 bp, synthetic construct
  source 1..20: mol_type = other DNA
ggtggatcacttgtggtcag

SEQ ID NO: 122790 - DNA, 20 bp, synthetic construct
  source 1..20: mol_type = other DNA
gggtggatcacttgtggtca

SEQ ID NO: 122791 - DNA, 20 bp, synthetic construct
  source 1..20: mol_type = other DNA
cgggtggatcacttgtggtc

SEQ ID NO: 122792 - DNA, 20 bp, synthetic construct
  source 1..20: mol_type = other DNA
gcgggtggatcacttgtggt

SEQ ID NO: 122793 - DNA, 20 bp, synthetic construct
  source 1..20: mol_type = other DNA
ggcgggtggatcacttgtgg

SEQ ID NO: 122794 - DNA, 20 bp, synthetic construct
  source 1..20: mol_type = other DNA
gggcgggtggatcacttgtg

SEQ ID NO: 122795 - DNA, 20 bp, synthetic construct
  source 1..20: mol_type = other DNA
ggggcgggtggatcacttgt

SEQ ID NO: 122796 - DNA, 20 bp, synthetic construct
  source 1..20: mol_type = other DNA
tggggcgggtggatcacttg

SEQ ID NO: 122797 - DNA, 20 bp, synthetic construct
  source 1..20: mol_type = other DNA
ctggggcgggtggatcactt

SEQ ID NO: 122798 - DNA, 20 bp, synthetic construct
  source 1..20: mol_type = other DNA
gctggggcgggtggatcact

SEQ ID NO: 122799 - DNA, 20 bp, synthetic construct
  source 1..20: mol_type = other DNA
ggctggggcgggtggatcac

SEQ ID NO: 122800 - DNA, 20 bp, synthetic construct
  source 1..20: mol_type = other DNA
aggctggggcgggtggatca

SEQ ID NO: 122801 - DNA, 20 bp, synthetic construct
  source 1..20: mol_type = other DNA
gaggctggggcgggtggatc

SEQ ID NO: 122802 - DNA, 20 bp, synthetic construct
  source 1..20: mol_type = other DNA
ggaggctggggcgggtggat

SEQ ID NO: 122803 - DNA, 20 bp, synthetic construct
  source 1..20: mol_type = other DNA
gggaggctggggcgggtgga

SEQ ID NO: 122804 - DNA, 20 bp, synthetic construct
  source 1..20: mol_type = other DNA
tgggaggctggggcgggtgg

SEQ ID NO: 122805 - DNA, 20 bp, synthetic construct
  source 1..20: mol_type = other DNA
ttgggaggctggggcgggtg

SEQ ID NO: 122806 - DNA, 20 bp, synthetic construct
  source 1..20: mol_type = other DNA
tttgggaggctggggcgggt

SEQ ID NO: 122807 - DNA, 20 bp, synthetic construct
  source 1..20: mol_type = other DNA
ctttgggaggctggggcggg

SEQ ID NO: 122808 - DNA, 20 bp, synthetic construct
  source 1..20: mol_type = other DNA
actttgggaggctggggcgg

SEQ ID NO: 122809 - DNA, 20 bp, synthetic construct
  source 1..20: mol_type = other DNA
cactttgggaggctggggcg

SEQ ID NO: 122810 - DNA, 20 bp, synthetic construct
  source 1..20: mol_type = other DNA
acactttgggaggctggggc

SEQ ID NO: 122811 - DNA, 20 bp, synthetic construct
  source 1..20: mol_type = other DNA
aacactttgggaggctgggg

SEQ ID NO: 122812 - DNA, 20 bp, synthetic construct
  source 1..20: mol_type = other DNA
caacactttgggaggctggg

SEQ ID NO: 122813 - DNA, 20 bp, synthetic construct
  source 1..20: mol_type = other DNA
ccaacactttgggaggctgg

SEQ ID NO: 122814 - DNA, 20 bp, synthetic construct
  source 1..20: mol_type = other DNA
cccaacactttgggaggctg

SEQ ID NO: 122815 - DNA, 20 bp, synthetic construct
  source 1..20: mol_type = other DNA
tcccaacactttgggaggct

SEQ ID NO: 122816 - DNA, 20 bp, synthetic construct
  source 1..20: mol_type = other DNA
atcccaacactttgggaggc

SEQ ID NO: 122817 - DNA, 20 bp, synthetic construct
  source 1..20: mol_type = other DNA
aatcccaacactttgggagg

SEQ ID NO: 122818 - DNA, 20 bp, synthetic construct
  source 1..20: mol_type = other DNA
taatcccaacactttgggag

SEQ ID NO: 122819 - DNA, 20 bp, synthetic construct
  source 1..20: mol_type = other DNA
gtaatcccaacactttggga

SEQ ID NO: 122820 - DNA, 20 bp, synthetic construct
  source 1..20: mol_type = other DNA
tgtaatcccaacactttggg

SEQ ID NO: 122821 - DNA, 20 bp, synthetic construct
  source 1..20: mol_type = other DNA
ctgtaatcccaacactttgg

SEQ ID NO: 122822 - DNA, 20 bp, synthetic construct
  source 1..20: mol_type = other DNA
tctgtaatcccaacactttg

SEQ ID NO: 122823 - DNA, 20 bp, synthetic construct
  source 1..20: mol_type = other DNA
atctgtaatcccaacacttt

SEQ ID NO: 122824 - DNA, 20 bp, synthetic construct
  source 1..20: mol_type = other DNA
catctgtaatcccaacactt

SEQ ID NO: 122825 - DNA, 20 bp, synthetic construct
  source 1..20: mol_type = other DNA
acatctgtaatcccaacact

SEQ ID NO: 122826 - DNA, 20 bp, synthetic construct
  source 1..20: mol_type = other DNA
cacatctgtaatcccaacac

SEQ ID NO: 122827 - DNA, 20 bp, synthetic construct
  source 1..20: mol_type = other DNA
tcacatctgtaatcccaaca

SEQ ID NO: 122828 - DNA, 20 bp, synthetic construct
  source 1..20: mol_type = other DNA
ctcacatctgtaatcccaac

SEQ ID NO: 122829 - DNA, 20 bp, synthetic construct
  source 1..20: mol_type = other DNA
gctcacatctgtaatcccaa

SEQ ID NO: 122830 - DNA, 20 bp, synthetic construct
  source 1..20: mol_type = other DNA
ggctcacatctgtaatccca

SEQ ID NO: 122831 - DNA, 20 bp, synthetic construct
  source 1..20: mol_type = other DNA
tggctcacatctgtaatccc

SEQ ID NO: 122832 - DNA, 20 bp, synthetic construct
  source 1..20: mol_type = other DNA
gtggctcacatctgtaatcc

SEQ ID NO: 122833 - DNA, 20 bp, synthetic construct
  source 1..20: mol_type = other DNA
ggtggctcacatctgtaatc

SEQ ID NO: 122834 - DNA, 20 bp, synthetic construct
  source 1..20: mol_type = other DNA
tggtggctcacatctgtaat

SEQ ID NO: 122835 - DNA, 20 bp, synthetic construct
  source 1..20: mol_type = other DNA
gtggtggctcacatctgtaa

SEQ ID NO: 122836 - DNA, 20 bp, synthetic construct
  source 1..20: mol_type = other DNA
tgtggtggctcacatctgta

SEQ ID NO: 122837 - DNA, 20 bp, synthetic construct
  source 1..20: mol_type = other DNA
gtgtggtggctcacatctgt

SEQ ID NO: 122838 - DNA, 20 bp, synthetic construct
  source 1..20: mol_type = other DNA
tgtgtggtggctcacatctg

SEQ ID NO: 122839 - DNA, 20 bp, synthetic construct
  source 1..20: mol_type = other DNA
gtgtgtggtggctcacatct

SEQ ID NO: 122840 - DNA, 20 bp, synthetic construct
  source 1..20: mol_type = other DNA
agtgtgtggtggctcacatc

SEQ ID NO: 122841 - DNA, 20 bp, synthetic construct
  source 1..20: mol_type = other DNA
cagtgtgtggtggctcacat

SEQ ID NO: 122842 - DNA, 20 bp, synthetic construct
  source 1..20: mol_type = other DNA
gcagtgtgtggtggctcaca

SEQ ID NO: 122843 - DNA, 20 bp, synthetic construct
  source 1..20: mol_type = other DNA
ggcagtgtgtggtggctcac

SEQ ID NO: 122844 - DNA, 20 bp, synthetic construct
  source 1..20: mol_type = other DNA
aggcagtgtgtggtggctca

SEQ ID NO: 122845 - DNA, 20 bp, synthetic construct
  source 1..20: mol_type = other DNA
caggcagtgtgtggtggctc

SEQ ID NO: 122846 - DNA, 20 bp, synthetic construct
  source 1..20: mol_type = other DNA
ccaggcagtgtgtggtggct

SEQ ID NO: 122847 - DNA, 20 bp, synthetic construct
  source 1..20: mol_type = other DNA
accaggcagtgtgtggtggc

SEQ ID NO: 122848 - DNA, 20 bp, synthetic construct
  source 1..20: mol_type = other DNA
taccaggcagtgtgtggtgg

SEQ ID NO: 122849 - DNA, 20 bp, synthetic construct
  source 1..20: mol_type = other DNA
ttaccaggcagtgtgtggtg

SEQ ID NO: 122850 - DNA, 20 bp, synthetic construct
  source 1..20: mol_type = other DNA
tttaccaggcagtgtgtggt

SEQ ID NO: 122851 - DNA, 20 bp, synthetic construct
  source 1..20: mol_type = other DNA
atttaccaggcagtgtgtgg

SEQ ID NO: 122852 - DNA, 20 bp, synthetic construct
  source 1..20: mol_type = other DNA
tatttaccaggcagtgtgtg

SEQ ID NO: 122853 - DNA, 20 bp, synthetic construct
  source 1..20: mol_type = other DNA
gtatttaccaggcagtgtgt

SEQ ID NO: 122854 - DNA, 20 bp, synthetic construct
  source 1..20: mol_type = other DNA
tgtatttaccaggcagtgtg

SEQ ID NO: 122855 - DNA, 20 bp, synthetic construct
  source 1..20: mol_type = other DNA
atgtatttaccaggcagtgt

SEQ ID NO: 122856 - DNA, 20 bp, synthetic construct
  source 1..20: mol_type = other DNA
tatgtatttaccaggcagtg

SEQ ID NO: 122857 - DNA, 20 bp, synthetic construct
  source 1..20: mol_type = other DNA
atatgtatttaccaggcagt

SEQ ID NO: 122858 - DNA, 20 bp, synthetic construct
  source 1..20: mol_type = other DNA
aatatgtatttaccaggcag

SEQ ID NO: 122859 - DNA, 20 bp, synthetic construct
  source 1..20: mol_type = other DNA
aaatatgtatttaccaggca

SEQ ID NO: 122860 - DNA, 20 bp, synthetic construct
  source 1..20: mol_type = other DNA
gaaatatgtatttaccaggc

SEQ ID NO: 122861 - DNA, 20 bp, synthetic construct
  source 1..20: mol_type = other DNA
tgaaatatgtatttaccagg

SEQ ID NO: 122862 - DNA, 20 bp, synthetic construct
  source 1..20: mol_type = other DNA
ttgaaatatgtatttaccag

SEQ ID NO: 122863 - DNA, 20 bp, synthetic construct
  source 1..20: mol_type = other DNA
attgaaatatgtatttacca

SEQ ID NO: 122864 - DNA, 20 bp, synthetic construct
  source 1..20: mol_type = other DNA
aattgaaatatgtatttacc

SEQ ID NO: 122865 - DNA, 20 bp, synthetic construct
  source 1..20: mol_type = other DNA
taattgaaatatgtatttac

SEQ ID NO: 122866 - DNA, 20 bp, synthetic construct
  source 1..20: mol_type = other DNA
ttaattgaaatatgtattta

SEQ ID NO: 122867 - DNA, 20 bp, synthetic construct
  source 1..20: mol_type = other DNA
attaattgaaatatgtattt

SEQ ID NO: 122868 - DNA, 20 bp, synthetic construct
  source 1..20: mol_type = other DNA
tattaattgaaatatgtatt

SEQ ID NO: 122869 - DNA, 20 bp, synthetic construct
  source 1..20: mol_type = other DNA
ttattaattgaaatatgtat

SEQ ID NO: 122870 - DNA, 20 bp, synthetic construct
  source 1..20: mol_type = other DNA
cttattaattgaaatatgta

SEQ ID NO: 122871 - DNA, 20 bp, synthetic construct
  source 1..20: mol_type = other DNA
tcttattaattgaaatatgt

SEQ ID NO: 122872 - DNA, 20 bp, synthetic construct
  source 1..20: mol_type = other DNA
ttcttattaattgaaatatg

SEQ ID NO: 122873 - DNA, 20 bp, synthetic construct
  source 1..20: mol_type = other DNA
tttcttattaattgaaatat

SEQ ID NO: 122874 - DNA, 20 bp, synthetic construct
  source 1..20: mol_type = other DNA
gtttcttattaattgaaata

SEQ ID NO: 122875 - DNA, 20 bp, synthetic construct
  source 1..20: mol_type = other DNA
agtttcttattaattgaaat

SEQ ID NO: 122876 - DNA, 20 bp, synthetic construct
  source 1..20: mol_type = other DNA
tagtttcttattaattgaaa

SEQ ID NO: 122877 - DNA, 20 bp, synthetic construct
  source 1..20: mol_type = other DNA
ctagtttcttattaattgaa

SEQ ID NO: 122878 - DNA, 20 bp, synthetic construct
  source 1..20: mol_type = other DNA
gctagtttcttattaattga

SEQ ID NO: 122879 - DNA, 20 bp, synthetic construct
  source 1..20: mol_type = other DNA
tgctagtttcttattaattg

SEQ ID NO: 122880 - DNA, 20 bp, synthetic construct
  source 1..20: mol_type = other DNA
ttgctagtttcttattaatt

SEQ ID NO: 122881 - DNA, 20 bp, synthetic construct
  source 1..20: mol_type = other DNA
attgctagtttcttattaat

SEQ ID NO: 122882 - DNA, 20 bp, synthetic construct
  source 1..20: mol_type = other DNA
gattgctagtttcttattaa

SEQ ID NO: 122883 - DNA, 20 bp, synthetic construct
  source 1..20: mol_type = other DNA
agattgctagtttcttatta

SEQ ID NO: 122884 - DNA, 20 bp, synthetic construct
  source 1..20: mol_type = other DNA
aagattgctagtttcttatt

SEQ ID NO: 122885 - DNA, 20 bp, synthetic construct
  source 1..20: mol_type = other DNA
gaagattgctagtttcttat

SEQ ID NO: 122886 - DNA, 20 bp, synthetic construct
  source 1..20: mol_type = other DNA
agaagattgctagtttctta

SEQ ID NO: 122887 - DNA, 20 bp, synthetic construct
  source 1..20: mol_type = other DNA
tagaagattgctagtttctt

SEQ ID NO: 122888 - DNA, 20 bp, synthetic construct
  source 1..20: mol_type = other DNA
ttagaagattgctagtttct

SEQ ID NO: 122889 - DNA, 20 bp, synthetic construct
  source 1..20: mol_type = other DNA
tttagaagattgctagtttc

SEQ ID NO: 122890 - DNA, 20 bp, synthetic construct
  source 1..20: mol_type = other DNA
ctttagaagattgctagttt

SEQ ID NO: 122891 - DNA, 20 bp, synthetic construct
  source 1..20: mol_type = other DNA
actttagaagattgctagtt

SEQ ID NO: 122892 - DNA, 20 bp, synthetic construct
  source 1..20: mol_type = other DNA
cactttagaagattgctagt

SEQ ID NO: 122893 - DNA, 20 bp, synthetic construct
  source 1..20: mol_type = other DNA
tcactttagaagattgctag

SEQ ID NO: 122894 - DNA, 20 bp, synthetic construct
  source 1..20: mol_type = other DNA
atcactttagaagattgcta

SEQ ID NO: 122895 - DNA, 20 bp, synthetic construct
  source 1..20: mol_type = other DNA
aatcactttagaagattgct

SEQ ID NO: 122896 - DNA, 20 bp, synthetic construct
  source 1..20: mol_type = other DNA
caatcactttagaagattgc

SEQ ID NO: 122897 - DNA, 20 bp, synthetic construct
  source 1..20: mol_type = other DNA
acaatcactttagaagattg

SEQ ID NO: 122898 - DNA, 20 bp, synthetic construct
  source 1..20: mol_type = other DNA
cacaatcactttagaagatt

SEQ ID NO: 122899 - DNA, 20 bp, synthetic construct
  source 1..20: mol_type = other DNA
acacaatcactttagaagat

SEQ ID NO: 122900 - DNA, 20 bp, synthetic construct
  source 1..20: mol_type = other DNA
gacacaatcactttagaaga

SEQ ID NO: 122901 - DNA, 20 bp, synthetic construct
  source 1..20: mol_type = other DNA
tgacacaatcactttagaag

SEQ ID NO: 122902 - DNA, 20 bp, synthetic construct
  source 1..20: mol_type = other DNA
atgacacaatcactttagaa

SEQ ID NO: 122903 - DNA, 20 bp, synthetic construct
  source 1..20: mol_type = other DNA
aatgacacaatcactttaga

SEQ ID NO: 122904 - DNA, 20 bp, synthetic construct
  source 1..20: mol_type = other DNA
aaatgacacaatcactttag

SEQ ID NO: 122905 - DNA, 20 bp, synthetic construct
  source 1..20: mol_type = other DNA
aaaatgacacaatcacttta

SEQ ID NO: 122906 - DNA, 20 bp, synthetic construct
  source 1..20: mol_type = other DNA
taaaatgacacaatcacttt

SEQ ID NO: 122907 - DNA, 20 bp, synthetic construct
  source 1..20: mol_type = other DNA
gtaaaatgacacaatcactt

SEQ ID NO: 122908 - DNA, 20 bp, synthetic construct
  source 1..20: mol_type = other DNA
tgtaaaatgacacaatcact

SEQ ID NO: 122909 - DNA, 20 bp, synthetic construct
  source 1..20: mol_type = other DNA
atgtaaaatgacacaatcac

SEQ ID NO: 122910 - DNA, 20 bp, synthetic construct
  source 1..20: mol_type = other DNA
aatgtaaaatgacacaatca

SEQ ID NO: 122911 - DNA, 20 bp, synthetic construct
  source 1..20: mol_type = other DNA
gaatgtaaaatgacacaatc

SEQ ID NO: 122912 - DNA, 20 bp, synthetic construct
  source 1..20: mol_type = other DNA
ggaatgtaaaatgacacaat

SEQ ID NO: 122913 - DNA, 20 bp, synthetic construct
  source 1..20: mol_type = other DNA
tggaatgtaaaatgacacaa

SEQ ID NO: 122914 - DNA, 20 bp, synthetic construct
  source 1..20: mol_type = other DNA
ttggaatgtaaaatgacaca

SEQ ID NO: 122915 - DNA, 20 bp, synthetic construct
  source 1..20: mol_type = other DNA
gttggaatgtaaaatgacac

SEQ ID NO: 122916 - DNA, 20 bp, synthetic construct
  source 1..20: mol_type = other DNA
agttggaatgtaaaatgaca

SEQ ID NO: 122917 - DNA, 20 bp, synthetic construct
  source 1..20: mol_type = other DNA
cagttggaatgtaaaatgac

SEQ ID NO: 122918 - DNA, 20 bp, synthetic construct
  source 1..20: mol_type = other DNA
tcagttggaatgtaaaatga

SEQ ID NO: 122919 - DNA, 20 bp, synthetic construct
  source 1..20: mol_type = other DNA
atcagttggaatgtaaaatg

SEQ ID NO: 122920 - DNA, 20 bp, synthetic construct
  source 1..20: mol_type = other DNA
gatcagttggaatgtaaaat

SEQ ID NO: 122921 - DNA, 20 bp, synthetic construct
  source 1..20: mol_type = other DNA
tgatcagttggaatgtaaaa

SEQ ID NO: 122922 - DNA, 20 bp, synthetic construct
  source 1..20: mol_type = other DNA
ctgatcagttggaatgtaaa

SEQ ID NO: 122923 - DNA, 20 bp, synthetic construct
  source 1..20: mol_type = other DNA
cctgatcagttggaatgtaa

SEQ ID NO: 122924 - DNA, 20 bp, synthetic construct
  source 1..20: mol_type = other DNA
acctgatcagttggaatgta

SEQ ID NO: 122925 - DNA, 20 bp, synthetic construct
  source 1..20: mol_type = other DNA
tacctgatcagttggaatgt

SEQ ID NO: 122926 - DNA, 20 bp, synthetic construct
  source 1..20: mol_type = other DNA
gtacctgatcagttggaatg

SEQ ID NO: 122927 - DNA, 20 bp, synthetic construct
  source 1..20: mol_type = other DNA
tgtacctgatcagttggaat

SEQ ID NO: 122928 - DNA, 20 bp, synthetic construct
  source 1..20: mol_type = other DNA
atgtacctgatcagttggaa

SEQ ID NO: 122929 - DNA, 20 bp, synthetic construct
  source 1..20: mol_type = other DNA
catgtacctgatcagttgga

SEQ ID NO: 122930 - DNA, 20 bp, synthetic construct
  source 1..20: mol_type = other DNA
acatgtacctgatcagttgg

SEQ ID NO: 122931 - DNA, 20 bp, synthetic construct
  source 1..20: mol_type = other DNA
cacatgtacctgatcagttg

SEQ ID NO: 122932 - DNA, 20 bp, synthetic construct
  source 1..20: mol_type = other DNA
acacatgtacctgatcagtt

SEQ ID NO: 122933 - DNA, 20 bp, synthetic construct
  source 1..20: mol_type = other DNA
tacacatgtacctgatcagt

SEQ ID NO: 122934 - DNA, 20 bp, synthetic construct
  source 1..20: mol_type = other DNA
ctacacatgtacctgatcag

SEQ ID NO: 122935 - DNA, 20 bp, synthetic construct
  source 1..20: mol_type = other DNA
cctacacatgtacctgatca

SEQ ID NO: 122936 - DNA, 20 bp, synthetic construct
  source 1..20: mol_type = other DNA
acctacacatgtacctgatc

SEQ ID NO: 122937 - DNA, 20 bp, synthetic construct
  source 1..20: mol_type = other DNA
aacctacacatgtacctgat

SEQ ID NO: 122938 - DNA, 20 bp, synthetic construct
  source 1..20: mol_type = other DNA
gaacctacacatgtacctga

SEQ ID NO: 122939 - DNA, 20 bp, synthetic construct
  source 1..20: mol_type = other DNA
ggaacctacacatgtacctg

SEQ ID NO: 122940 - DNA, 20 bp, synthetic construct
  source 1..20: mol_type = other DNA
tggaacctacacatgtacct

SEQ ID NO: 122941 - DNA, 20 bp, synthetic construct
  source 1..20: mol_type = other DNA
atggaacctacacatgtacc

SEQ ID NO: 122942 - DNA, 20 bp, synthetic construct
  source 1..20: mol_type = other DNA
catggaacctacacatgtac

SEQ ID NO: 122943 - DNA, 20 bp, synthetic construct
  source 1..20: mol_type = other DNA
acatggaacctacacatgta

SEQ ID NO: 122944 - DNA, 20 bp, synthetic construct
  source 1..20: mol_type = other DNA
cacatggaacctacacatgt

SEQ ID NO: 122945 - DNA, 20 bp, synthetic construct
  source 1..20: mol_type = other DNA
acacatggaacctacacatg

SEQ ID NO: 122946 - DNA, 20 bp, synthetic construct
  source 1..20: mol_type = other DNA
aacacatggaacctacacat

SEQ ID NO: 122947 - DNA, 20 bp, synthetic construct
  source 1..20: mol_type = other DNA
gaacacatggaacctacaca

SEQ ID NO: 122948 - DNA, 20 bp, synthetic construct
  source 1..20: mol_type = other DNA
agaacacatggaacctacac

SEQ ID NO: 122949 - DNA, 20 bp, synthetic construct
  source 1..20: mol_type = other DNA
cagaacacatggaacctaca

SEQ ID NO: 122950 - DNA, 20 bp, synthetic construct
  source 1..20: mol_type = other DNA
gcagaacacatggaacctac

SEQ ID NO: 122951 - DNA, 20 bp, synthetic construct
  source 1..20: mol_type = other DNA
tgcagaacacatggaaccta

SEQ ID NO: 122952 - DNA, 20 bp, synthetic construct
  source 1..20: mol_type = other DNA
atgcagaacacatggaacct

SEQ ID NO: 122953 - DNA, 20 bp, synthetic construct
  source 1..20: mol_type = other DNA
gatgcagaacacatggaacc

SEQ ID NO: 122954 - DNA, 20 bp, synthetic construct
  source 1..20: mol_type = other DNA
ggatgcagaacacatggaac

SEQ ID NO: 122955 - DNA, 20 bp, synthetic construct
  source 1..20: mol_type = other DNA
aggatgcagaacacatggaa

SEQ ID NO: 122956 - DNA, 20 bp, synthetic construct
  source 1..20: mol_type = other DNA
aaggatgcagaacacatgga

SEQ ID NO: 122957 - DNA, 20 bp, synthetic construct
  source 1..20: mol_type = other DNA
caaggatgcagaacacatgg

SEQ ID NO: 122958 - DNA, 20 bp, synthetic construct
  source 1..20: mol_type = other DNA
gcaaggatgcagaacacatg

SEQ ID NO: 122959 - DNA, 20 bp, synthetic construct
  source 1..20: mol_type = other DNA
ggcaaggatgcagaacacat

SEQ ID NO: 122960 - DNA, 20 bp, synthetic construct
  source 1..20: mol_type = other DNA
tggcaaggatgcagaacaca

SEQ ID NO: 122961 - DNA, 20 bp, synthetic construct
  source 1..20: mol_type = other DNA
ttggcaaggatgcagaacac

SEQ ID NO: 122962 - DNA, 20 bp, synthetic construct
  source 1..20: mol_type = other DNA
gttggcaaggatgcagaaca

SEQ ID NO: 122963 - DNA, 20 bp, synthetic construct
  source 1..20: mol_type = other DNA
tgttggcaaggatgcagaac

SEQ ID NO: 122964 - DNA, 20 bp, synthetic construct
  source 1..20: mol_type = other DNA
gtgttggcaaggatgcagaa

SEQ ID NO: 122965 - DNA, 20 bp, synthetic construct
  source 1..20: mol_type = other DNA
agtgttggcaaggatgcaga

SEQ ID NO: 122966 - DNA, 20 bp, synthetic construct
  source 1..20: mol_type = other DNA
aagtgttggcaaggatgcag

SEQ ID NO: 122967 - DNA, 20 bp, synthetic construct
  source 1..20: mol_type = other DNA
caagtgttggcaaggatgca

SEQ ID NO: 122968 - DNA, 20 bp, synthetic construct
  source 1..20: mol_type = other DNA
ccaagtgttggcaaggatgc

SEQ ID NO: 122969 - DNA, 20 bp, synthetic construct
  source 1..20: mol_type = other DNA
accaagtgttggcaaggatg

SEQ ID NO: 122970 - DNA, 20 bp, synthetic construct
  source 1..20: mol_type = other DNA
taccaagtgttggcaaggat

SEQ ID NO: 122971 - DNA, 20 bp, synthetic construct
  source 1..20: mol_type = other DNA
ataccaagtgttggcaagga

SEQ ID NO: 122972 - DNA, 20 bp, synthetic construct
  source 1..20: mol_type = other DNA
aataccaagtgttggcaagg

SEQ ID NO: 122973 - DNA, 20 bp, synthetic construct
  source 1..20: mol_type = other DNA
caataccaagtgttggcaag

SEQ ID NO: 122974 - DNA, 20 bp, synthetic construct
  source 1..20: mol_type = other DNA
acaataccaagtgttggcaa

SEQ ID NO: 122975 - DNA, 20 bp, synthetic construct
  source 1..20: mol_type = other DNA
cacaataccaagtgttggca

SEQ ID NO: 122976 - DNA, 20 bp, synthetic construct
  source 1..20: mol_type = other DNA
acacaataccaagtgttggc

SEQ ID NO: 122977 - DNA, 20 bp, synthetic construct
  source 1..20: mol_type = other DNA
aacacaataccaagtgttgg

SEQ ID NO: 122978 - DNA, 20 bp, synthetic construct
  source 1..20: mol_type = other DNA
taacacaataccaagtgttg

SEQ ID NO: 122979 - DNA, 20 bp, synthetic construct
  source 1..20: mol_type = other DNA
ataacacaataccaagtgtt

SEQ ID NO: 122980 - DNA, 20 bp, synthetic construct
  source 1..20: mol_type = other DNA
gataacacaataccaagtgt

SEQ ID NO: 122981 - DNA, 20 bp, synthetic construct
  source 1..20: mol_type = other DNA
agataacacaataccaagtg

SEQ ID NO: 122982 - DNA, 20 bp, synthetic construct
  source 1..20: mol_type = other DNA
aagataacacaataccaagt

SEQ ID NO: 122983 - DNA, 20 bp, synthetic construct
  source 1..20: mol_type = other DNA
aaagataacacaataccaag

SEQ ID NO: 122984 - DNA, 20 bp, synthetic construct
  source 1..20: mol_type = other DNA
aaaagataacacaataccaa

SEQ ID NO: 122985 - DNA, 20 bp, synthetic construct
  source 1..20: mol_type = other DNA
aaaaagataacacaatacca

SEQ ID NO: 122986 - DNA, 20 bp, synthetic construct
  source 1..20: mol_type = other DNA
taaaaagataacacaatacc

SEQ ID NO: 122987 - DNA, 20 bp, synthetic construct
  source 1..20: mol_type = other DNA
ttaaaaagataacacaatac

SEQ ID NO: 122988 - DNA, 20 bp, synthetic construct
  source 1..20: mol_type = other DNA
attaaaaagataacacaata

SEQ ID NO: 122989 - DNA, 20 bp, synthetic construct
  source 1..20: mol_type = other DNA
aattaaaaagataacacaat

SEQ ID NO: 122990 - DNA, 20 bp, synthetic construct
  source 1..20: mol_type = other DNA
aaattaaaaagataacacaa

SEQ ID NO: 122991 - DNA, 20 bp, synthetic construct
  source 1..20: mol_type = other DNA
gaaattaaaaagataacaca

SEQ ID NO: 122992 - DNA, 20 bp, synthetic construct
  source 1..20: mol_type = other DNA
tgaaattaaaaagataacac

SEQ ID NO: 122993 - DNA, 20 bp, synthetic construct
  source 1..20: mol_type = other DNA
ttgaaattaaaaagataaca

SEQ ID NO: 122994 - DNA, 20 bp, synthetic construct
  source 1..20: mol_type = other DNA
gttgaaattaaaaagataac

SEQ ID NO: 122995 - DNA, 20 bp, synthetic construct
  source 1..20: mol_type = other DNA
tgttgaaattaaaaagataa

SEQ ID NO: 122996 - DNA, 20 bp, synthetic construct
  source 1..20: mol_type = other DNA
ctgttgaaattaaaaagata

SEQ ID NO: 122997 - DNA, 20 bp, synthetic construct
  source 1..20: mol_type = other DNA
cctgttgaaattaaaaagat

SEQ ID NO: 122998 - DNA, 20 bp, synthetic construct
  source 1..20: mol_type = other DNA
acctgttgaaattaaaaaga

SEQ ID NO: 122999 - DNA, 20 bp, synthetic construct
  source 1..20: mol_type = other DNA
gacctgttgaaattaaaaag

SEQ ID NO: 123000 - DNA, 20 bp, synthetic construct
  source 1..20: mol_type = other DNA
agacctgttgaaattaaaaa

SEQ ID NO: 123001 - DNA, 20 bp, synthetic construct
  source 1..20: mol_type = other DNA
tagacctgttgaaattaaaa

SEQ ID NO: 123002 - DNA, 20 bp, synthetic construct
  source 1..20: mol_type = other DNA
ttagacctgttgaaattaaa

SEQ ID NO: 123003 - DNA, 20 bp, synthetic construct
  source 1..20: mol_type = other DNA
attagacctgttgaaattaa

SEQ ID NO: 123004 - DNA, 20 bp, synthetic construct
  source 1..20: mol_type = other DNA
cattagacctgttgaaatta

SEQ ID NO: 123005 - DNA, 20 bp, synthetic construct
  source 1..20: mol_type = other DNA
ccattagacctgttgaaatt

SEQ ID NO: 123006 - DNA, 20 bp, synthetic construct
  source 1..20: mol_type = other DNA
cccattagacctgttgaaat

SEQ ID NO: 123007 - DNA, 20 bp, synthetic construct
  source 1..20: mol_type = other DNA
acccattagacctgttgaaa

SEQ ID NO: 123008 - DNA, 20 bp, synthetic construct
  source 1..20: mol_type = other DNA
cacccattagacctgttgaa

SEQ ID NO: 123009 - DNA, 20 bp, synthetic construct
  source 1..20: mol_type = other DNA
acacccattagacctgttga

SEQ ID NO: 123010 - DNA, 20 bp, synthetic construct
  source 1..20: mol_type = other DNA
gacacccattagacctgttg

SEQ ID NO: 123011 - DNA, 20 bp, synthetic construct
  source 1..20: mol_type = other DNA
agacacccattagacctgtt

SEQ ID NO: 123012 - DNA, 20 bp, synthetic construct
  source 1..20: mol_type = other DNA
aagacacccattagacctgt

SEQ ID NO: 123013 - DNA, 20 bp, synthetic construct
  source 1..20: mol_type = other DNA
taagacacccattagacctg

SEQ ID NO: 123014 - DNA, 20 bp, synthetic construct
  source 1..20: mol_type = other DNA
ataagacacccattagacct

SEQ ID NO: 123015 - DNA, 20 bp, synthetic construct
  source 1..20: mol_type = other DNA
cataagacacccattagacc

SEQ ID NO: 123016 - DNA, 20 bp, synthetic construct
  source 1..20: mol_type = other DNA
ccataagacacccattagac

SEQ ID NO: 123017 - DNA, 20 bp, synthetic construct
  source 1..20: mol_type = other DNA
accataagacacccattaga

SEQ ID NO: 123018 - DNA, 20 bp, synthetic construct
  source 1..20: mol_type = other DNA
taccataagacacccattag

SEQ ID NO: 123019 - DNA, 20 bp, synthetic construct
  source 1..20: mol_type = other DNA
ataccataagacacccatta

SEQ ID NO: 123020 - DNA, 20 bp, synthetic construct
  source 1..20: mol_type = other DNA
gataccataagacacccatt

SEQ ID NO: 123021 - DNA, 20 bp, synthetic construct
  source 1..20: mol_type = other DNA
agataccataagacacccat

SEQ ID NO: 123022 - DNA, 20 bp, synthetic construct
  source 1..20: mol_type = other DNA
gagataccataagacaccca

SEQ ID NO: 123023 - DNA, 20 bp, synthetic construct
  source 1..20: mol_type = other DNA
tgagataccataagacaccc

SEQ ID NO: 123024 - DNA, 20 bp, synthetic construct
  source 1..20: mol_type = other DNA
atgagataccataagacacc

SEQ ID NO: 123025 - DNA, 20 bp, synthetic construct
  source 1..20: mol_type = other DNA
aatgagataccataagacac

SEQ ID NO: 123026 - DNA, 20 bp, synthetic construct
  source 1..20: mol_type = other DNA
caatgagataccataagaca

SEQ ID NO: 123027 - DNA, 20 bp, synthetic construct
  source 1..20: mol_type = other DNA
acaatgagataccataagac

SEQ ID NO: 123028 - DNA, 20 bp, synthetic construct
  source 1..20: mol_type = other DNA
cacaatgagataccataaga

SEQ ID NO: 123029 - DNA, 20 bp, synthetic construct
  source 1..20: mol_type = other DNA
tcacaatgagataccataag

SEQ ID NO: 123030 - DNA, 20 bp, synthetic construct
  source 1..20: mol_type = other DNA
atcacaatgagataccataa

SEQ ID NO: 123031 - DNA, 20 bp, synthetic construct
  source 1..20: mol_type = other DNA
gatcacaatgagataccata

SEQ ID NO: 123032 - DNA, 20 bp, synthetic construct
  source 1..20: mol_type = other DNA
agatcacaatgagataccat

SEQ ID NO: 123033 - DNA, 20 bp, synthetic construct
  source 1..20: mol_type = other DNA
aagatcacaatgagatacca

SEQ ID NO: 123034 - DNA, 20 bp, synthetic construct
  source 1..20: mol_type = other DNA
taagatcacaatgagatacc

SEQ ID NO: 123035 - DNA, 20 bp, synthetic construct
  source 1..20: mol_type = other DNA
ttaagatcacaatgagatac

SEQ ID NO: 123036 - DNA, 20 bp, synthetic construct
  source 1..20: mol_type = other DNA
tttaagatcacaatgagata

SEQ ID NO: 123037 - DNA, 20 bp, synthetic construct
  source 1..20: mol_type = other DNA
atttaagatcacaatgagat

SEQ ID NO: 123038 - DNA, 20 bp, synthetic construct
  source 1..20: mol_type = other DNA
catttaagatcacaatgaga

SEQ ID NO: 123039 - DNA, 20 bp, synthetic construct
  source 1..20: mol_type = other DNA
acatttaagatcacaatgag

SEQ ID NO: 123040 - DNA, 20 bp, synthetic construct
  source 1..20: mol_type = other DNA
tacatttaagatcacaatga

SEQ ID NO: 123041 - DNA, 20 bp, synthetic construct
  source 1..20: mol_type = other DNA
gtacatttaagatcacaatg

SEQ ID NO: 123042 - DNA, 20 bp, synthetic construct
  source 1..20: mol_type = other DNA
tgtacatttaagatcacaat

SEQ ID NO: 123043 - DNA, 20 bp, synthetic construct
  source 1..20: mol_type = other DNA
atgtacatttaagatcacaa

SEQ ID NO: 123044 - DNA, 20 bp, synthetic construct
  source 1..20: mol_type = other DNA
aatgtacatttaagatcaca

SEQ ID NO: 123045 - DNA, 20 bp, synthetic construct
  source 1..20: mol_type = other DNA
aaatgtacatttaagatcac

SEQ ID NO: 123046 - DNA, 20 bp, synthetic construct
  source 1..20: mol_type = other DNA
gaaatgtacatttaagatca

SEQ ID NO: 123047 - DNA, 20 bp, synthetic construct
  source 1..20: mol_type = other DNA
agaaatgtacatttaagatc

SEQ ID NO: 123048 - DNA, 20 bp, synthetic construct
  source 1..20: mol_type = other DNA
gagaaatgtacatttaagat

SEQ ID NO: 123049 - DNA, 20 bp, synthetic construct
  source 1..20: mol_type = other DNA
agagaaatgtacatttaaga

SEQ ID NO: 123050 - DNA, 20 bp, synthetic construct
  source 1..20: mol_type = other DNA
cagagaaatgtacatttaag

SEQ ID NO: 123051 - DNA, 20 bp, synthetic construct
  source 1..20: mol_type = other DNA
tcagagaaatgtacatttaa

SEQ ID NO: 123052 - DNA, 20 bp, synthetic construct
  source 1..20: mol_type = other DNA
atcagagaaatgtacattta

SEQ ID NO: 123053 - DNA, 20 bp, synthetic construct
  source 1..20: mol_type = other DNA
catcagagaaatgtacattt

SEQ ID NO: 123054 - DNA, 20 bp, synthetic construct
  source 1..20: mol_type = other DNA
tcatcagagaaatgtacatt

SEQ ID NO: 123055 - DNA, 20 bp, synthetic construct
  source 1..20: mol_type = other DNA
atcatcagagaaatgtacat

SEQ ID NO: 123056 - DNA, 20 bp, synthetic construct
  source 1..20: mol_type = other DNA
catcatcagagaaatgtaca

SEQ ID NO: 123057 - DNA, 20 bp, synthetic construct
  source 1..20: mol_type = other DNA
tcatcatcagagaaatgtac

SEQ ID NO: 123058 - DNA, 20 bp, synthetic construct
  source 1..20: mol_type = other DNA
gtcatcatcagagaaatgta

SEQ ID NO: 123059 - DNA, 20 bp, synthetic construct
  source 1..20: mol_type = other DNA
agtcatcatcagagaaatgt

SEQ ID NO: 123060 - DNA, 20 bp, synthetic construct
  source 1..20: mol_type = other DNA
cagtcatcatcagagaaatg

SEQ ID NO: 123061 - DNA, 20 bp, synthetic construct
  source 1..20: mol_type = other DNA
tcagtcatcatcagagaaat

SEQ ID NO: 123062 - DNA, 20 bp, synthetic construct
  source 1..20: mol_type = other DNA
atcagtcatcatcagagaaa

SEQ ID NO: 123063 - DNA, 20 bp, synthetic construct
  source 1..20: mol_type = other DNA
gatcagtcatcatcagagaa

SEQ ID NO: 123064 - DNA, 20 bp, synthetic construct
  source 1..20: mol_type = other DNA
ggatcagtcatcatcagaga

SEQ ID NO: 123065 - DNA, 20 bp, synthetic construct
  source 1..20: mol_type = other DNA
tggatcagtcatcatcagag

SEQ ID NO: 123066 - DNA, 20 bp, synthetic construct
  source 1..20: mol_type = other DNA
ctggatcagtcatcatcaga

SEQ ID NO: 123067 - DNA, 20 bp, synthetic construct
  source 1..20: mol_type = other DNA
cctggatcagtcatcatcag

SEQ ID NO: 123068 - DNA, 20 bp, synthetic construct
  source 1..20: mol_type = other DNA
tcctggatcagtcatcatca

SEQ ID NO: 123069 - DNA, 20 bp, synthetic construct
  source 1..20: mol_type = other DNA
ctcctggatcagtcatcatc

SEQ ID NO: 123070 - DNA, 20 bp, synthetic construct
  source 1..20: mol_type = other DNA
gctcctggatcagtcatcat

SEQ ID NO: 123071 - DNA, 20 bp, synthetic construct
  source 1..20: mol_type = other DNA
tgctcctggatcagtcatca

SEQ ID NO: 123072 - DNA, 20 bp, synthetic construct
  source 1..20: mol_type = other DNA
gtgctcctggatcagtcatc

SEQ ID NO: 123073 - DNA, 20 bp, synthetic construct
  source 1..20: mol_type = other DNA
ggtgctcctggatcagtcat

SEQ ID NO: 123074 - DNA, 20 bp, synthetic construct
  source 1..20: mol_type = other DNA
aggtgctcctggatcagtca

SEQ ID NO: 123075 - DNA, 20 bp, synthetic construct
  source 1..20: mol_type = other DNA
gaggtgctcctggatcagtc

SEQ ID NO: 123076 - DNA, 20 bp, synthetic construct
  source 1..20: mol_type = other DNA
tgaggtgctcctggatcagt

SEQ ID NO: 123077 - DNA, 20 bp, synthetic construct
  source 1..20: mol_type = other DNA
atgaggtgctcctggatcag

SEQ ID NO: 123078 - DNA, 20 bp, synthetic construct
  source 1..20: mol_type = other DNA
gatgaggtgctcctggatca

SEQ ID NO: 123079 - DNA, 20 bp, synthetic construct
  source 1..20: mol_type = other DNA
tgatgaggtgctcctggatc

SEQ ID NO: 123080 - DNA, 20 bp, synthetic construct
  source 1..20: mol_type = other DNA
atgatgaggtgctcctggat

SEQ ID NO: 123081 - DNA, 20 bp, synthetic construct
  source 1..20: mol_type = other DNA
catgatgaggtgctcctgga

SEQ ID NO: 123082 - DNA, 20 bp, synthetic construct
  source 1..20: mol_type = other DNA
acatgatgaggtgctcctgg

SEQ ID NO: 123083 - DNA, 20 bp, synthetic construct
  source 1..20: mol_type = other DNA
cacatgatgaggtgctcctg

SEQ ID NO: 123084 - DNA, 20 bp, synthetic construct
  source 1..20: mol_type = other DNA
acacatgatgaggtgctcct

SEQ ID NO: 123085 - DNA, 20 bp, synthetic construct
  source 1..20: mol_type = other DNA
cacacatgatgaggtgctcc

SEQ ID NO: 123086 - DNA, 20 bp, synthetic construct
  source 1..20: mol_type = other DNA
acacacatgatgaggtgctc

SEQ ID NO: 123087 - DNA, 20 bp, synthetic construct
  source 1..20: mol_type = other DNA
cacacacatgatgaggtgct

SEQ ID NO: 123088 - DNA, 20 bp, synthetic construct
  source 1..20: mol_type = other DNA
acacacacatgatgaggtgc

SEQ ID NO: 123089 - DNA, 20 bp, synthetic construct
  source 1..20: mol_type = other DNA
aacacacacatgatgaggtg

SEQ ID NO: 123090 - DNA, 20 bp, synthetic construct
  source 1..20: mol_type = other DNA
aaacacacacatgatgaggt

SEQ ID NO: 123091 - DNA, 20 bp, synthetic construct
  source 1..20: mol_type = other DNA
caaacacacacatgatgagg

SEQ ID NO: 123092 - DNA, 20 bp, synthetic construct
  source 1..20: mol_type = other DNA
acaaacacacacatgatgag

SEQ ID NO: 123093 - DNA, 20 bp, synthetic construct
  source 1..20: mol_type = other DNA
aacaaacacacacatgatga

SEQ ID NO: 123094 - DNA, 20 bp, synthetic construct
  source 1..20: mol_type = other DNA
aaacaaacacacacatgatg

SEQ ID NO: 123095 - DNA, 20 bp, synthetic construct
  source 1..20: mol_type = other DNA
aaaacaaacacacacatgat

SEQ ID NO: 123096 - DNA, 20 bp, synthetic construct
  source 1..20: mol_type = other DNA
gaaaacaaacacacacatga

SEQ ID NO: 123097 - DNA, 20 bp, synthetic construct
  source 1..20: mol_type = other DNA
tgaaaacaaacacacacatg

SEQ ID NO: 123098 - DNA, 20 bp, synthetic construct
  source 1..20: mol_type = other DNA
ctgaaaacaaacacacacat

SEQ ID NO: 123099 - DNA, 20 bp, synthetic construct
  source 1..20: mol_type = other DNA
gctgaaaacaaacacacaca

SEQ ID NO: 123100 - DNA, 20 bp, synthetic construct
  source 1..20: mol_type = other DNA
agctgaaaacaaacacacac

SEQ ID NO: 123101 - DNA, 20 bp, synthetic construct
  source 1..20: mol_type = other DNA
cagctgaaaacaaacacaca

SEQ ID NO: 123102 - DNA, 20 bp, synthetic construct
  source 1..20: mol_type = other DNA
acagctgaaaacaaacacac

SEQ ID NO: 123103 - DNA, 20 bp, synthetic construct
  source 1..20: mol_type = other DNA
gacagctgaaaacaaacaca

SEQ ID NO: 123104 - DNA, 20 bp, synthetic construct
  source 1..20: mol_type = other DNA
tgacagctgaaaacaaacac

SEQ ID NO: 123105 - DNA, 20 bp, synthetic construct
  source 1..20: mol_type = other DNA
ttgacagctgaaaacaaaca

SEQ ID NO: 123106 - DNA, 20 bp, synthetic construct
  source 1..20: mol_type = other DNA
gttgacagctgaaaacaaac

SEQ ID NO: 123107 - DNA, 20 bp, synthetic construct
  source 1..20: mol_type = other DNA
ggttgacagctgaaaacaaa

SEQ ID NO: 123108 - DNA, 20 bp, synthetic construct
  source 1..20: mol_type = other DNA
aggttgacagctgaaaacaa

SEQ ID NO: 123109 - DNA, 20 bp, synthetic construct
  source 1..20: mol_type = other DNA
aaggttgacagctgaaaaca

SEQ ID NO: 123110 - DNA, 20 bp, synthetic construct
  source 1..20: mol_type = other DNA
aaaggttgacagctgaaaac

SEQ ID NO: 123111 - DNA, 20 bp, synthetic construct
  source 1..20: mol_type = other DNA
aaaaggttgacagctgaaaa

SEQ ID NO: 123112 - DNA, 20 bp, synthetic construct
  source 1..20: mol_type = other DNA
aaaaaggttgacagctgaaa

SEQ ID NO: 123113 - DNA, 20 bp, synthetic construct
  source 1..20: mol_type = other DNA
aaaaaaggttgacagctgaa

SEQ ID NO: 123114 - DNA, 20 bp, synthetic construct
  source 1..20: mol_type = other DNA
aaaaaaaggttgacagctga

SEQ ID NO: 123115 - DNA, 20 bp, synthetic construct
  source 1..20: mol_type = other DNA
taaaaaaaggttgacagctg

SEQ ID NO: 123116 - DNA, 20 bp, synthetic construct
  source 1..20: mol_type = other DNA
ctaaaaaaaggttgacagct

SEQ ID NO: 123117 - DNA, 20 bp, synthetic construct
  source 1..20: mol_type = other DNA
actaaaaaaaggttgacagc

SEQ ID NO: 123118 - DNA, 20 bp, synthetic construct
  source 1..20: mol_type = other DNA
tactaaaaaaaggttgacag

SEQ ID NO: 123119 - DNA, 20 bp, synthetic construct
  source 1..20: mol_type = other DNA
ttactaaaaaaaggttgaca

SEQ ID NO: 123120 - DNA, 20 bp, synthetic construct
  source 1..20: mol_type = other DNA
tttactaaaaaaaggttgac

SEQ ID NO: 123121 - DNA, 20 bp, synthetic construct
  source 1..20: mol_type = other DNA
atttactaaaaaaaggttga

SEQ ID NO: 123122 - DNA, 20 bp, synthetic construct
  source 1..20: mol_type = other DNA
catttactaaaaaaaggttg

SEQ ID NO: 123123 - DNA, 20 bp, synthetic construct
  source 1..20: mol_type = other DNA
ccatttactaaaaaaaggtt

SEQ ID NO: 123124 - DNA, 20 bp, synthetic construct
  source 1..20: mol_type = other DNA
accatttactaaaaaaaggt

SEQ ID NO: 123125 - DNA, 20 bp, synthetic construct
  source 1..20: mol_type = other DNA
aaccatttactaaaaaaagg

SEQ ID NO: 123126 - DNA, 20 bp, synthetic construct
  source 1..20: mol_type = other DNA
gaaccatttactaaaaaaag

SEQ ID NO: 123127 - DNA, 20 bp, synthetic construct
  source 1..20: mol_type = other DNA
tgaaccatttactaaaaaaa

SEQ ID NO: 123128 - DNA, 20 bp, synthetic construct
  source 1..20: mol_type = other DNA
ttgaaccatttactaaaaaa

SEQ ID NO: 123129 - DNA, 20 bp, synthetic construct
  source 1..20: mol_type = other DNA
tttgaaccatttactaaaaa

SEQ ID NO: 123130 - DNA, 20 bp, synthetic construct
  source 1..20: mol_type = other DNA
atttgaaccatttactaaaa

SEQ ID NO: 123131 - DNA, 20 bp, synthetic construct
  source 1..20: mol_type = other DNA
gatttgaaccatttactaaa

SEQ ID NO: 123132 - DNA, 20 bp, synthetic construct
  source 1..20: mol_type = other DNA
agatttgaaccatttactaa

SEQ ID NO: 123133 - DNA, 20 bp, synthetic construct
  source 1..20: mol_type = other DNA
aagatttgaaccatttacta

SEQ ID NO: 123134 - DNA, 20 bp, synthetic construct
  source 1..20: mol_type = other DNA
aaagatttgaaccatttact

SEQ ID NO: 123135 - DNA, 20 bp, synthetic construct
  source 1..20: mol_type = other DNA
aaaagatttgaaccatttac

SEQ ID NO: 123136 - DNA, 20 bp, synthetic construct
  source 1..20: mol_type = other DNA
aaaaagatttgaaccattta

SEQ ID NO: 123137 - DNA, 20 bp, synthetic construct
  source 1..20: mol_type = other DNA
aaaaaagatttgaaccattt

SEQ ID NO: 123138 - DNA, 20 bp, synthetic construct
  source 1..20: mol_type = other DNA
gaaaaaagatttgaaccatt

SEQ ID NO: 123139 - DNA, 20 bp, synthetic construct
  source 1..20: mol_type = other DNA
ggaaaaaagatttgaaccat

SEQ ID NO: 123140 - DNA, 20 bp, synthetic construct
  source 1..20: mol_type = other DNA
tggaaaaaagatttgaacca

SEQ ID NO: 123141 - DNA, 20 bp, synthetic construct
  source 1..20: mol_type = other DNA
atggaaaaaagatttgaacc

SEQ ID NO: 123142 - DNA, 20 bp, synthetic construct
  source 1..20: mol_type = other DNA
aatggaaaaaagatttgaac

SEQ ID NO: 123143 - DNA, 20 bp, synthetic construct
  source 1..20: mol_type = other DNA
aaatggaaaaaagatttgaa

SEQ ID NO: 123144 - DNA, 20 bp, synthetic construct
  source 1..20: mol_type = other DNA
aaaatggaaaaaagatttga

SEQ ID NO: 123145 - DNA, 20 bp, synthetic construct
  source 1..20: mol_type = other DNA
taaaatggaaaaaagatttg

SEQ ID NO: 123146 - DNA, 20 bp, synthetic construct
  source 1..20: mol_type = other DNA
ataaaatggaaaaaagattt

SEQ ID NO: 123147 - DNA, 20 bp, synthetic construct
  source 1..20: mol_type = other DNA
aataaaatggaaaaaagatt

SEQ ID NO: 123148 - DNA, 20 bp, synthetic construct
  source 1..20: mol_type = other DNA
aaataaaatggaaaaaagat

SEQ ID NO: 123149 - DNA, 20 bp, synthetic construct
  source 1..20: mol_type = other DNA
taaataaaatggaaaaaaga

SEQ ID NO: 123150 - DNA, 20 bp, synthetic construct
  source 1..20: mol_type = other DNA
ataaataaaatggaaaaaag

SEQ ID NO: 123151 - DNA, 20 bp, synthetic construct
  source 1..20: mol_type = other DNA
aataaataaaatggaaaaaa

SEQ ID NO: 123152 - DNA, 20 bp, synthetic construct
  source 1..20: mol_type = other DNA
aaataaataaaatggaaaaa

SEQ ID NO: 123153 - DNA, 20 bp, synthetic construct
  source 1..20: mol_type = other DNA
taaataaataaaatggaaaa

SEQ ID NO: 123154 - DNA, 20 bp, synthetic construct
  source 1..20: mol_type = other DNA
ataaataaataaaatggaaa

SEQ ID NO: 123155 - DNA, 20 bp, synthetic construct
  source 1..20: mol_type = other DNA
aataaataaataaaatggaa

SEQ ID NO: 123156 - DNA, 20 bp, synthetic construct
  source 1..20: mol_type = other DNA
aaataaataaataaaatgga

SEQ ID NO: 123157 - DNA, 20 bp, synthetic construct
  source 1..20: mol_type = other DNA
taaataaataaataaaatgg

SEQ ID NO: 123158 - DNA, 20 bp, synthetic construct
  source 1..20: mol_type = other DNA
ataaataaataaataaaatg

SEQ ID NO: 123159 - DNA, 20 bp, synthetic construct
  source 1..20: mol_type = other DNA
aataaataaataaataaaat

SEQ ID NO: 123160 - DNA, 20 bp, synthetic construct
  source 1..20: mol_type = other DNA
aaataaataaataaataaaa

SEQ ID NO: 123161 - DNA, 20 bp, synthetic construct
  source 1..20: mol_type = other DNA
taaataaataaataaataaa

SEQ ID NO: 123162 - DNA, 20 bp, synthetic construct
  source 1..20: mol_type = other DNA
ataaataaataaataaataa

SEQ ID NO: 123163 - DNA, 20 bp, synthetic construct
  source 1..20: mol_type = other DNA
aataaataaataaataaata

SEQ ID NO: 123164 - DNA, 20 bp, synthetic construct
  source 1..20: mol_type = other DNA
aaataaataaataaataaat

SEQ ID NO: 123165 - DNA, 20 bp, synthetic construct
  source 1..20: mol_type = other DNA
caaataaataaataaataaa

SEQ ID NO: 123166 - DNA, 20 bp, synthetic construct
  source 1..20: mol_type = other DNA
tcaaataaataaataaataa

SEQ ID NO: 123167 - DNA, 20 bp, synthetic construct
  source 1..20: mol_type = other DNA
atcaaataaataaataaata

SEQ ID NO: 123168 - DNA, 20 bp, synthetic construct
  source 1..20: mol_type = other DNA
catcaaataaataaataaat

SEQ ID NO: 123169 - DNA, 20 bp, synthetic construct
  source 1..20: mol_type = other DNA
ccatcaaataaataaataaa

SEQ ID NO: 123170 - DNA, 20 bp, synthetic construct
  source 1..20: mol_type = other DNA
tccatcaaataaataaataa

SEQ ID NO: 123171 - DNA, 20 bp, synthetic construct
  source 1..20: mol_type = other DNA
ttccatcaaataaataaata

SEQ ID NO: 123172 - DNA, 20 bp, synthetic construct
  source 1..20: mol_type = other DNA
attccatcaaataaataaat

SEQ ID NO: 123173 - DNA, 20 bp, synthetic construct
  source 1..20: mol_type = other DNA
gattccatcaaataaataaa

SEQ ID NO: 123174 - DNA, 20 bp, synthetic construct
  source 1..20: mol_type = other DNA
agattccatcaaataaataa

SEQ ID NO: 123175 - DNA, 20 bp, synthetic construct
  source 1..20: mol_type = other DNA
gagattccatcaaataaata

SEQ ID NO: 123176 - DNA, 20 bp, synthetic construct
  source 1..20: mol_type = other DNA
tgagattccatcaaataaat

SEQ ID NO: 123177 - DNA, 20 bp, synthetic construct
  source 1..20: mol_type = other DNA
gtgagattccatcaaataaa

SEQ ID NO: 123178 - DNA, 20 bp, synthetic construct
  source 1..20: mol_type = other DNA
agtgagattccatcaaataa

SEQ ID NO: 123179 - DNA, 20 bp, synthetic construct
  source 1..20: mol_type = other DNA
gagtgagattccatcaaata

SEQ ID NO: 123180 - DNA, 20 bp, synthetic construct
  source 1..20: mol_type = other DNA
agagtgagattccatcaaat

SEQ ID NO: 123181 - DNA, 20 bp, synthetic construct
  source 1..20: mol_type = other DNA
tagagtgagattccatcaaa

SEQ ID NO: 123182 - DNA, 20 bp, synthetic construct
  source 1..20: mol_type = other DNA
atagagtgagattccatcaa

SEQ ID NO: 123183 - DNA, 20 bp, synthetic construct
  source 1..20: mol_type = other DNA
aatagagtgagattccatca

SEQ ID NO: 123184 - DNA, 20 bp, synthetic construct
  source 1..20: mol_type = other DNA
caatagagtgagattccatc

SEQ ID NO: 123185 - DNA, 20 bp, synthetic construct
  source 1..20: mol_type = other DNA
gcaatagagtgagattccat

SEQ ID NO: 123186 - DNA, 20 bp, synthetic construct
  source 1..20: mol_type = other DNA
ggcaatagagtgagattcca

SEQ ID NO: 123187 - DNA, 20 bp, synthetic construct
  source 1..20: mol_type = other DNA
gggcaatagagtgagattcc

SEQ ID NO: 123188 - DNA, 20 bp, synthetic construct
  source 1..20: mol_type = other DNA
tgggcaatagagtgagattc

SEQ ID NO: 123189 - DNA, 20 bp, synthetic construct
  source 1..20: mol_type = other DNA
ctgggcaatagagtgagatt

SEQ ID NO: 123190 - DNA, 20 bp, synthetic construct
  source 1..20: mol_type = other DNA
cctgggcaatagagtgagat

SEQ ID NO: 123191 - DNA, 20 bp, synthetic construct
  source 1..20: mol_type = other DNA
gcctgggcaatagagtgaga

SEQ ID NO: 123192 - DNA, 20 bp, synthetic construct
  source 1..20: mol_type = other DNA
agcctgggcaatagagtgag

SEQ ID NO: 123193 - DNA, 20 bp, synthetic construct
  source 1..20: mol_type = other DNA
cagcctgggcaatagagtga

SEQ ID NO: 123194 - DNA, 20 bp, synthetic construct
  source 1..20: mol_type = other DNA
ccagcctgggcaatagagtg

SEQ ID NO: 123195 - DNA, 20 bp, synthetic construct
  source 1..20: mol_type = other DNA
tccagcctgggcaatagagt

SEQ ID NO: 123196 - DNA, 20 bp, synthetic construct
  source 1..20: mol_type = other DNA
ttccagcctgggcaatagag

SEQ ID NO: 123197 - DNA, 20 bp, synthetic construct
  source 1..20: mol_type = other DNA
gttccagcctgggcaataga

SEQ ID NO: 123198 - DNA, 20 bp, synthetic construct
  source 1..20: mol_type = other DNA
cgttccagcctgggcaatag

SEQ ID NO: 123199 - DNA, 20 bp, synthetic construct
  source 1..20: mol_type = other DNA
gcgttccagcctgggcaata

SEQ ID NO: 123200 - DNA, 20 bp, synthetic construct
  source 1..20: mol_type = other DNA
tgcgttccagcctgggcaat

SEQ ID NO: 123201 - DNA, 20 bp, synthetic construct
  source 1..20: mol_type = other DNA
ctgcgttccagcctgggcaa

SEQ ID NO: 123202 - DNA, 20 bp, synthetic construct
  source 1..20: mol_type = other DNA
actgcgttccagcctgggca

SEQ ID NO: 123203 - DNA, 20 bp, synthetic construct
  source 1..20: mol_type = other DNA
cactgcgttccagcctgggc

SEQ ID NO: 123204 - DNA, 20 bp, synthetic construct
  source 1..20: mol_type = other DNA
ccactgcgttccagcctggg

SEQ ID NO: 123205 - DNA, 20 bp, synthetic construct
  source 1..20: mol_type = other DNA
accactgcgttccagcctgg

SEQ ID NO: 123206 - DNA, 20 bp, synthetic construct
  source 1..20: mol_type = other DNA
caccactgcgttccagcctg

SEQ ID NO: 123207 - DNA, 20 bp, synthetic construct
  source 1..20: mol_type = other DNA
gcaccactgcgttccagcct

SEQ ID NO: 123208 - DNA, 20 bp, synthetic construct
  source 1..20: mol_type = other DNA
ggcaccactgcgttccagcc

SEQ ID NO: 123209 - DNA, 20 bp, synthetic construct
  source 1..20: mol_type = other DNA
tggcaccactgcgttccagc

SEQ ID NO: 123210 - DNA, 20 bp, synthetic construct
  source 1..20: mol_type = other DNA
atggcaccactgcgttccag

SEQ ID NO: 123211 - DNA, 20 bp, synthetic construct
  source 1..20: mol_type = other DNA
gatggcaccactgcgttcca

SEQ ID NO: 123212 - DNA, 20 bp, synthetic construct
  source 1..20: mol_type = other DNA
agatggcaccactgcgttcc

SEQ ID NO: 123213 - DNA, 20 bp, synthetic construct
  source 1..20: mol_type = other DNA
aagatggcaccactgcgttc

SEQ ID NO: 123214 - DNA, 20 bp, synthetic construct
  source 1..20: mol_type = other DNA
caagatggcaccactgcgtt

SEQ ID NO: 123215 - DNA, 20 bp, synthetic construct
  source 1..20: mol_type = other DNA
ccaagatggcaccactgcgt

SEQ ID NO: 123216 - DNA, 20 bp, synthetic construct
  source 1..20: mol_type = other DNA
gccaagatggcaccactgcg

SEQ ID NO: 123217 - DNA, 20 bp, synthetic construct
  source 1..20: mol_type = other DNA
agccaagatggcaccactgc

SEQ ID NO: 123218 - DNA, 20 bp, synthetic construct
  source 1..20: mol_type = other DNA
gagccaagatggcaccactg

SEQ ID NO: 123219 - DNA, 20 bp, synthetic construct
  source 1..20: mol_type = other DNA
tgagccaagatggcaccact

SEQ ID NO: 123220 - DNA, 20 bp, synthetic construct
  source 1..20: mol_type = other DNA
gtgagccaagatggcaccac

SEQ ID NO: 123221 - DNA, 20 bp, synthetic construct
  source 1..20: mol_type = other DNA
agtgagccaagatggcacca

SEQ ID NO: 123222 - DNA, 20 bp, synthetic construct
  source 1..20: mol_type = other DNA
cagtgagccaagatggcacc

SEQ ID NO: 123223 - DNA, 20 bp, synthetic construct
  source 1..20: mol_type = other DNA
gcagtgagccaagatggcac

SEQ ID NO: 123224 - DNA, 20 bp, synthetic construct
  source 1..20: mol_type = other DNA
tgcagtgagccaagatggca

SEQ ID NO: 123225 - DNA, 20 bp, synthetic construct
  source 1..20: mol_type = other DNA
ttgcagtgagccaagatggc

SEQ ID NO: 123226 - DNA, 20 bp, synthetic construct
  source 1..20: mol_type = other DNA
gttgcagtgagccaagatgg

SEQ ID NO: 123227 - DNA, 20 bp, synthetic construct
  source 1..20: mol_type = other DNA
ggttgcagtgagccaagatg

SEQ ID NO: 123228 - DNA, 20 bp, synthetic construct
  source 1..20: mol_type = other DNA
aggttgcagtgagccaagat

SEQ ID NO: 123229 - DNA, 20 bp, synthetic construct
  source 1..20: mol_type = other DNA
gaggttgcagtgagccaaga

SEQ ID NO: 123230 - DNA, 20 bp, synthetic construct
  source 1..20: mol_type = other DNA
ggaggttgcagtgagccaag

SEQ ID NO: 123231 - DNA, 20 bp, synthetic construct
  source 1..20: mol_type = other DNA
cggaggttgcagtgagccaa

SEQ ID NO: 123232 - DNA, 20 bp, synthetic construct
  source 1..20: mol_type = other DNA
gcggaggttgcagtgagcca

SEQ ID NO: 123233 - DNA, 20 bp, synthetic construct
  source 1..20: mol_type = other DNA
ggcggaggttgcagtgagcc

SEQ ID NO: 123234 - DNA, 20 bp, synthetic construct
  source 1..20: mol_type = other DNA
aggcggaggttgcagtgagc

SEQ ID NO: 123235 - DNA, 20 bp, synthetic construct
  source 1..20: mol_type = other DNA
gaggcggaggttgcagtgag

SEQ ID NO: 123236 - DNA, 20 bp, synthetic construct
  source 1..20: mol_type = other DNA
ggaggcggaggttgcagtga

SEQ ID NO: 123237 - DNA, 20 bp, synthetic construct
  source 1..20: mol_type = other DNA
gggaggcggaggttgcagtg

SEQ ID NO: 123238 - DNA, 20 bp, synthetic construct
  source 1..20: mol_type = other DNA
tgggaggcggaggttgcagt

SEQ ID NO: 123239 - DNA, 20 bp, synthetic construct
  source 1..20: mol_type = other DNA
ctgggaggcggaggttgcag

SEQ ID NO: 123240 - DNA, 20 bp, synthetic construct
  source 1..20: mol_type = other DNA
cctgggaggcggaggttgca

SEQ ID NO: 123241 - DNA, 20 bp, synthetic construct
  source 1..20: mol_type = other DNA
acctgggaggcggaggttgc

SEQ ID NO: 123242 - DNA, 20 bp, synthetic construct
  source 1..20: mol_type = other DNA
aacctgggaggcggaggttg

SEQ ID NO: 123243 - DNA, 20 bp, synthetic construct
  source 1..20: mol_type = other DNA
gaacctgggaggcggaggtt

SEQ ID NO: 123244 - DNA, 20 bp, synthetic construct
  source 1..20: mol_type = other DNA
tgaacctgggaggcggaggt

SEQ ID NO: 123245 - DNA, 20 bp, synthetic construct
  source 1..20: mol_type = other DNA
ttgaacctgggaggcggagg

SEQ ID NO: 123246 - DNA, 20 bp, synthetic construct
  source 1..20: mol_type = other DNA
cttgaacctgggaggcggag

SEQ ID NO: 123247 - DNA, 20 bp, synthetic construct
  source 1..20: mol_type = other DNA
gcttgaacctgggaggcgga

SEQ ID NO: 123248 - DNA, 20 bp, synthetic construct
  source 1..20: mol_type = other DNA
tgcttgaacctgggaggcgg

SEQ ID NO: 123249 - DNA, 20 bp, synthetic construct
  source 1..20: mol_type = other DNA
ttgcttgaacctgggaggcg

SEQ ID NO: 123250 - DNA, 20 bp, synthetic construct
  source 1..20: mol_type = other DNA
attgcttgaacctgggaggc

SEQ ID NO: 123251 - DNA, 20 bp, synthetic construct
  source 1..20: mol_type = other DNA
aattgcttgaacctgggagg

SEQ ID NO: 123252 - DNA, 20 bp, synthetic construct
  source 1..20: mol_type = other DNA
gaattgcttgaacctgggag

SEQ ID NO: 123253 - DNA, 20 bp, synthetic construct
  source 1..20: mol_type = other DNA
agaattgcttgaacctggga

SEQ ID NO: 123254 - DNA, 20 bp, synthetic construct
  source 1..20: mol_type = other DNA
aagaattgcttgaacctggg

SEQ ID NO: 123255 - DNA, 20 bp, synthetic construct
  source 1..20: mol_type = other DNA
taagaattgcttgaacctgg

SEQ ID NO: 123256 - DNA, 20 bp, synthetic construct
  source 1..20: mol_type = other DNA
gtaagaattgcttgaacctg

SEQ ID NO: 123257 - DNA, 20 bp, synthetic construct
  source 1..20: mol_type = other DNA
cgtaagaattgcttgaacct

SEQ ID NO: 123258 - DNA, 20 bp, synthetic construct
  source 1..20: mol_type = other DNA
gcgtaagaattgcttgaacc

SEQ ID NO: 123259 - DNA, 20 bp, synthetic construct
  source 1..20: mol_type = other DNA
ggcgtaagaattgcttgaac

SEQ ID NO: 123260 - DNA, 20 bp, synthetic construct
  source 1..20: mol_type = other DNA
aggcgtaagaattgcttgaa

SEQ ID NO: 123261 - DNA, 20 bp, synthetic construct
  source 1..20: mol_type = other DNA
aaggcgtaagaattgcttga

SEQ ID NO: 123262 - DNA, 20 bp, synthetic construct
  source 1..20: mol_type = other DNA
taaggcgtaagaattgcttg

SEQ ID NO: 123263 - DNA, 20 bp, synthetic construct
  source 1..20: mol_type = other DNA
ctaaggcgtaagaattgctt

SEQ ID NO: 123264 - DNA, 20 bp, synthetic construct
  source 1..20: mol_type = other DNA
gctaaggcgtaagaattgct

SEQ ID NO: 123265 - DNA, 20 bp, synthetic construct
  source 1..20: mol_type = other DNA
ggctaaggcgtaagaattgc

SEQ ID NO: 123266 - DNA, 20 bp, synthetic construct
  source 1..20: mol_type = other DNA
aggctaaggcgtaagaattg

SEQ ID NO: 123267 - DNA, 20 bp, synthetic construct
  source 1..20: mol_type = other DNA
gaggctaaggcgtaagaatt

SEQ ID NO: 123268 - DNA, 20 bp, synthetic construct
  source 1..20: mol_type = other DNA
ggaggctaaggcgtaagaat

SEQ ID NO: 123269 - DNA, 20 bp, synthetic construct
  source 1..20: mol_type = other DNA
gggaggctaaggcgtaagaa

SEQ ID NO: 123270 - DNA, 20 bp, synthetic construct
  source 1..20: mol_type = other DNA
tgggaggctaaggcgtaaga

SEQ ID NO: 123271 - DNA, 20 bp, synthetic construct
  source 1..20: mol_type = other DNA
ttgggaggctaaggcgtaag

SEQ ID NO: 123272 - DNA, 20 bp, synthetic construct
  source 1..20: mol_type = other DNA
cttgggaggctaaggcgtaa

SEQ ID NO: 123273 - DNA, 20 bp, synthetic construct
  source 1..20: mol_type = other DNA
acttgggaggctaaggcgta

SEQ ID NO: 123274 - DNA, 20 bp, synthetic construct
  source 1..20: mol_type = other DNA
tacttgggaggctaaggcgt

SEQ ID NO: 123275 - DNA, 20 bp, synthetic construct
  source 1..20: mol_type = other DNA
ctacttgggaggctaaggcg

SEQ ID NO: 123276 - DNA, 20 bp, synthetic construct
  source 1..20: mol_type = other DNA
gctacttgggaggctaaggc

SEQ ID NO: 123277 - DNA, 20 bp, synthetic construct
  source 1..20: mol_type = other DNA
agctacttgggaggctaagg

SEQ ID NO: 123278 - DNA, 20 bp, synthetic construct
  source 1..20: mol_type = other DNA
cagctacttgggaggctaag

SEQ ID NO: 123279 - DNA, 20 bp, synthetic construct
  source 1..20: mol_type = other DNA
ccagctacttgggaggctaa

SEQ ID NO: 123280 - DNA, 20 bp, synthetic construct
  source 1..20: mol_type = other DNA
cccagctacttgggaggcta

SEQ ID NO: 123281 - DNA, 20 bp, synthetic construct
  source 1..20: mol_type = other DNA
tcccagctacttgggaggct

SEQ ID NO: 123282 - DNA, 20 bp, synthetic construct
  source 1..20: mol_type = other DNA
atcccagctacttgggaggc

SEQ ID NO: 123283 - DNA, 20 bp, synthetic construct
  source 1..20: mol_type = other DNA
aatcccagctacttgggagg

SEQ ID NO: 123284 - DNA, 20 bp, synthetic construct
  source 1..20: mol_type = other DNA
taatcccagctacttgggag

SEQ ID NO: 123285 - DNA, 20 bp, synthetic construct
  source 1..20: mol_type = other DNA
gtaatcccagctacttggga

SEQ ID NO: 123286 - DNA, 20 bp, synthetic construct
  source 1..20: mol_type = other DNA
tgtaatcccagctacttggg

SEQ ID NO: 123287 - DNA, 20 bp, synthetic construct
  source 1..20: mol_type = other DNA
ctgtaatcccagctacttgg

SEQ ID NO: 123288 - DNA, 20 bp, synthetic construct
  source 1..20: mol_type = other DNA
cctgtaatcccagctacttg

SEQ ID NO: 123289 - DNA, 20 bp, synthetic construct
  source 1..20: mol_type = other DNA
gcctgtaatcccagctactt

SEQ ID NO: 123290 - DNA, 20 bp, synthetic construct
  source 1..20: mol_type = other DNA
tgcctgtaatcccagctact

SEQ ID NO: 123291 - DNA, 20 bp, synthetic construct
  source 1..20: mol_type = other DNA
atgcctgtaatcccagctac

SEQ ID NO: 123292 - DNA, 20 bp, synthetic construct
  source 1..20: mol_type = other DNA
catgcctgtaatcccagcta

SEQ ID NO: 123293 - DNA, 20 bp, synthetic construct
  source 1..20: mol_type = other DNA
gcatgcctgtaatcccagct

SEQ ID NO: 123294 - DNA, 20 bp, synthetic construct
  source 1..20: mol_type = other DNA
cgcatgcctgtaatcccagc

SEQ ID NO: 123295 - DNA, 20 bp, synthetic construct
  source 1..20: mol_type = other DNA
gcgcatgcctgtaatcccag

SEQ ID NO: 123296 - DNA, 20 bp, synthetic construct
  source 1..20: mol_type = other DNA
ggcgcatgcctgtaatccca

SEQ ID NO: 123297 - DNA, 20 bp, synthetic construct
  source 1..20: mol_type = other DNA
tggcgcatgcctgtaatccc

SEQ ID NO: 123298 - DNA, 20 bp, synthetic construct
  source 1..20: mol_type = other DNA
gtggcgcatgcctgtaatcc

SEQ ID NO: 123299 - DNA, 20 bp, synthetic construct
  source 1..20: mol_type = other DNA
ggtggcgcatgcctgtaatc

SEQ ID NO: 123300 - DNA, 20 bp, synthetic construct
  source 1..20: mol_type = other DNA
tggtggcgcatgcctgtaat

SEQ ID NO: 123301 - DNA, 20 bp, synthetic construct
  source 1..20: mol_type = other DNA
atggtggcgcatgcctgtaa

SEQ ID NO: 123302 - DNA, 20 bp, synthetic construct
  source 1..20: mol_type = other DNA
catggtggcgcatgcctgta

SEQ ID NO: 123303 - DNA, 20 bp, synthetic construct
  source 1..20: mol_type = other DNA
gcatggtggcgcatgcctgt

SEQ ID NO: 123304 - DNA, 20 bp, synthetic construct
  source 1..20: mol_type = other DNA
ggcatggtggcgcatgcctg

SEQ ID NO: 123305 - DNA, 20 bp, synthetic construct
  source 1..20: mol_type = other DNA
aggcatggtggcgcatgcct

SEQ ID NO: 123306 - DNA, 20 bp, synthetic construct
  source 1..20: mol_type = other DNA
caggcatggtggcgcatgcc

SEQ ID NO: 123307 - DNA, 20 bp, synthetic construct
  source 1..20: mol_type = other DNA
ccaggcatggtggcgcatgc

SEQ ID NO: 123308 - DNA, 20 bp, synthetic construct
  source 1..20: mol_type = other DNA
gccaggcatggtggcgcatg

SEQ ID NO: 123309 - DNA, 20 bp, synthetic construct
  source 1..20: mol_type = other DNA
agccaggcatggtggcgcat

SEQ ID NO: 123310 - DNA, 20 bp, synthetic construct
  source 1..20: mol_type = other DNA
tagccaggcatggtggcgca

SEQ ID NO: 123311 - DNA, 20 bp, synthetic construct
  source 1..20: mol_type = other DNA
ttagccaggcatggtggcgc

SEQ ID NO: 123312 - DNA, 20 bp, synthetic construct
  source 1..20: mol_type = other DNA
attagccaggcatggtggcg

SEQ ID NO: 123313 - DNA, 20 bp, synthetic construct
  source 1..20: mol_type = other DNA
aattagccaggcatggtggc

SEQ ID NO: 123314 - DNA, 20 bp, synthetic construct
  source 1..20: mol_type = other DNA
aaattagccaggcatggtgg

SEQ ID NO: 123315 - DNA, 20 bp, synthetic construct
  source 1..20: mol_type = other DNA
aaaattagccaggcatggtg

SEQ ID NO: 123316 - DNA, 20 bp, synthetic construct
  source 1..20: mol_type = other DNA
caaaattagccaggcatggt

SEQ ID NO: 123317 - DNA, 20 bp, synthetic construct
  source 1..20: mol_type = other DNA
acaaaattagccaggcatgg

SEQ ID NO: 123318 - DNA, 20 bp, synthetic construct
  source 1..20: mol_type = other DNA
tacaaaattagccaggcatg

SEQ ID NO: 123319 - DNA, 20 bp, synthetic construct
  source 1..20: mol_type = other DNA
atacaaaattagccaggcat

SEQ ID NO: 123320 - DNA, 20 bp, synthetic construct
  source 1..20: mol_type = other DNA
aatacaaaattagccaggca

SEQ ID NO: 123321 - DNA, 20 bp, synthetic construct
  source 1..20: mol_type = other DNA
aaatacaaaattagccaggc

SEQ ID NO: 123322 - DNA, 20 bp, synthetic construct
  source 1..20: mol_type = other DNA
aaaatacaaaattagccagg

SEQ ID NO: 123323 - DNA, 20 bp, synthetic construct
  source 1..20: mol_type = other DNA
aaaaatacaaaattagccag

SEQ ID NO: 123324 - DNA, 20 bp, synthetic construct
  source 1..20: mol_type = other DNA
taaaaatacaaaattagcca

SEQ ID NO: 123325 - DNA, 20 bp, synthetic construct
  source 1..20: mol_type = other DNA
ctaaaaatacaaaattagcc

SEQ ID NO: 123326 - DNA, 20 bp, synthetic construct
  source 1..20: mol_type = other DNA
actaaaaatacaaaattagc

SEQ ID NO: 123327 - DNA, 20 bp, synthetic construct
  source 1..20: mol_type = other DNA
cactaaaaatacaaaattag

SEQ ID NO: 123328 - DNA, 20 bp, synthetic construct
  source 1..20: mol_type = other DNA
acactaaaaatacaaaatta

SEQ ID NO: 123329 - DNA, 20 bp, synthetic construct
  source 1..20: mol_type = other DNA
tacactaaaaatacaaaatt

SEQ ID NO: 123330 - DNA, 20 bp, synthetic construct
  source 1..20: mol_type = other DNA
ctacactaaaaatacaaaat

SEQ ID NO: 123331 - DNA, 20 bp, synthetic construct
  source 1..20: mol_type = other DNA
cctacactaaaaatacaaaa

SEQ ID NO: 123332 - DNA, 20 bp, synthetic construct
  source 1..20: mol_type = other DNA
acctacactaaaaatacaaa

SEQ ID NO: 123333 - DNA, 20 bp, synthetic construct
  source 1..20: mol_type = other DNA
cacctacactaaaaatacaa

SEQ ID NO: 123334 - DNA, 20 bp, synthetic construct
  source 1..20: mol_type = other DNA
ccacctacactaaaaataca

SEQ ID NO: 123335 - DNA, 20 bp, synthetic construct
  source 1..20: mol_type = other DNA
cccacctacactaaaaatac

SEQ ID NO: 123336 - DNA, 20 bp, synthetic construct
  source 1..20: mol_type = other DNA
ccccacctacactaaaaata

SEQ ID NO: 123337 - DNA, 20 bp, synthetic construct
  source 1..20: mol_type = other DNA
accccacctacactaaaaat

SEQ ID NO: 123338 - DNA, 20 bp, synthetic construct
  source 1..20: mol_type = other DNA
aaccccacctacactaaaaa

SEQ ID NO: 123339 - DNA, 20 bp, synthetic construct
  source 1..20: mol_type = other DNA
aaaccccacctacactaaaa

SEQ ID NO: 123340 - DNA, 20 bp, synthetic construct
  source 1..20: mol_type = other DNA
gaaaccccacctacactaaa

SEQ ID NO: 123341 - DNA, 20 bp, synthetic construct
  source 1..20: mol_type = other DNA
tgaaaccccacctacactaa

SEQ ID NO: 123342 - DNA, 20 bp, synthetic construct
  source 1..20: mol_type = other DNA
gtgaaaccccacctacacta

SEQ ID NO: 123343 - DNA, 20 bp, synthetic construct
  source 1..20: mol_type = other DNA
ggtgaaaccccacctacact

SEQ ID NO: 123344 - DNA, 20 bp, synthetic construct
  source 1..20: mol_type = other DNA
tggtgaaaccccacctacac

SEQ ID NO: 123345 - DNA, 20 bp, synthetic construct
  source 1..20: mol_type = other DNA
atggtgaaaccccacctaca

SEQ ID NO: 123346 - DNA, 20 bp, synthetic construct
  source 1..20: mol_type = other DNA
catggtgaaaccccacctac

SEQ ID NO: 123347 - DNA, 20 bp, synthetic construct
  source 1..20: mol_type = other DNA
acatggtgaaaccccaccta

SEQ ID NO: 123348 - DNA, 20 bp, synthetic construct
  source 1..20: mol_type = other DNA
aacatggtgaaaccccacct

SEQ ID NO: 123349 - DNA, 20 bp, synthetic construct
  source 1..20: mol_type = other DNA
caacatggtgaaaccccacc

SEQ ID NO: 123350 - DNA, 20 bp, synthetic construct
  source 1..20: mol_type = other DNA
ccaacatggtgaaaccccac

SEQ ID NO: 123351 - DNA, 20 bp, synthetic construct
  source 1..20: mol_type = other DNA
accaacatggtgaaacccca

SEQ ID NO: 123352 - DNA, 20 bp, synthetic construct
  source 1..20: mol_type = other DNA
gaccaacatggtgaaacccc

SEQ ID NO: 123353 - DNA, 20 bp, synthetic construct
  source 1..20: mol_type = other DNA
tgaccaacatggtgaaaccc

SEQ ID NO: 123354 - DNA, 20 bp, synthetic construct
  source 1..20: mol_type = other DNA
atgaccaacatggtgaaacc

SEQ ID NO: 123355 - DNA, 20 bp, synthetic construct
  source 1..20: mol_type = other DNA
catgaccaacatggtgaaac

SEQ ID NO: 123356 - DNA, 20 bp, synthetic construct
  source 1..20: mol_type = other DNA
gcatgaccaacatggtgaaa

SEQ ID NO: 123357 - DNA, 20 bp, synthetic construct
  source 1..20: mol_type = other DNA
agcatgaccaacatggtgaa

SEQ ID NO: 123358 - DNA, 20 bp, synthetic construct
  source 1..20: mol_type = other DNA
cagcatgaccaacatggtga

SEQ ID NO: 123359 - DNA, 20 bp, synthetic construct
  source 1..20: mol_type = other DNA
ccagcatgaccaacatggtg

SEQ ID NO: 123360 - DNA, 20 bp, synthetic construct
  source 1..20: mol_type = other DNA
accagcatgaccaacatggt

SEQ ID NO: 123361 - DNA, 20 bp, synthetic construct
  source 1..20: mol_type = other DNA
gaccagcatgaccaacatgg

SEQ ID NO: 123362 - DNA, 20 bp, synthetic construct
  source 1..20: mol_type = other DNA
agaccagcatgaccaacatg

SEQ ID NO: 123363 - DNA, 20 bp, synthetic construct
  source 1..20: mol_type = other DNA
gagaccagcatgaccaacat

SEQ ID NO: 123364 - DNA, 20 bp, synthetic construct
  source 1..20: mol_type = other DNA
agagaccagcatgaccaaca

SEQ ID NO: 123365 - DNA, 20 bp, synthetic construct
  source 1..20: mol_type = other DNA
tagagaccagcatgaccaac

SEQ ID NO: 123366 - DNA, 20 bp, synthetic construct
  source 1..20: mol_type = other DNA
ttagagaccagcatgaccaa

SEQ ID NO: 123367 - DNA, 20 bp, synthetic construct
  source 1..20: mol_type = other DNA
gttagagaccagcatgacca

SEQ ID NO: 123368 - DNA, 20 bp, synthetic construct
  source 1..20: mol_type = other DNA
agttagagaccagcatgacc

SEQ ID NO: 123369 - DNA, 20 bp, synthetic construct
  source 1..20: mol_type = other DNA
gagttagagaccagcatgac

SEQ ID NO: 123370 - DNA, 20 bp, synthetic construct
  source 1..20: mol_type = other DNA
ggagttagagaccagcatga

SEQ ID NO: 123371 - DNA, 20 bp, synthetic construct
  source 1..20: mol_type = other DNA
aggagttagagaccagcatg

SEQ ID NO: 123372 - DNA, 20 bp, synthetic construct
  source 1..20: mol_type = other DNA
caggagttagagaccagcat

SEQ ID NO: 123373 - DNA, 20 bp, synthetic construct
  source 1..20: mol_type = other DNA
tcaggagttagagaccagca

SEQ ID NO: 123374 - DNA, 20 bp, synthetic construct
  source 1..20: mol_type = other DNA
gtcaggagttagagaccagc

SEQ ID NO: 123375 - DNA, 20 bp, synthetic construct
  source 1..20: mol_type = other DNA
ggtcaggagttagagaccag

SEQ ID NO: 123376 - DNA, 20 bp, synthetic construct
  source 1..20: mol_type = other DNA
aggtcaggagttagagacca

SEQ ID NO: 123377 - DNA, 20 bp, synthetic construct
  source 1..20: mol_type = other DNA
gaggtcaggagttagagacc

SEQ ID NO: 123378 - DNA, 20 bp, synthetic construct
  source 1..20: mol_type = other DNA
tgaggtcaggagttagagac

SEQ ID NO: 123379 - DNA, 20 bp, synthetic construct
  source 1..20: mol_type = other DNA
ctgaggtcaggagttagaga

SEQ ID NO: 123380 - DNA, 20 bp, synthetic construct
  source 1..20: mol_type = other DNA
cctgaggtcaggagttagag

SEQ ID NO: 123381 - DNA, 20 bp, synthetic construct
  source 1..20: mol_type = other DNA
acctgaggtcaggagttaga

SEQ ID NO: 123382 - DNA, 20 bp, synthetic construct
  source 1..20: mol_type = other DNA
cacctgaggtcaggagttag

SEQ ID NO: 123383 - DNA, 20 bp, synthetic construct
  source 1..20: mol_type = other DNA
tcacctgaggtcaggagtta

SEQ ID NO: 123384 - DNA, 20 bp, synthetic construct
  source 1..20: mol_type = other DNA
atcacctgaggtcaggagtt

SEQ ID NO: 123385 - DNA, 20 bp, synthetic construct
  source 1..20: mol_type = other DNA
gatcacctgaggtcaggagt

SEQ ID NO: 123386 - DNA, 20 bp, synthetic construct
  source 1..20: mol_type = other DNA
agatcacctgaggtcaggag

SEQ ID NO: 123387 - DNA, 20 bp, synthetic construct
  source 1..20: mol_type = other DNA
tagatcacctgaggtcagga

SEQ ID NO: 123388 - DNA, 20 bp, synthetic construct
  source 1..20: mol_type = other DNA
gtagatcacctgaggtcagg

SEQ ID NO: 123389 - DNA, 20 bp, synthetic construct
  source 1..20: mol_type = other DNA
ggtagatcacctgaggtcag

SEQ ID NO: 123390 - DNA, 20 bp, synthetic construct
  source 1..20: mol_type = other DNA
aggtagatcacctgaggtca

SEQ ID NO: 123391 - DNA, 20 bp, synthetic construct
  source 1..20: mol_type = other DNA
caggtagatcacctgaggtc

SEQ ID NO: 123392 - DNA, 20 bp, synthetic construct
  source 1..20: mol_type = other DNA
gcaggtagatcacctgaggt

SEQ ID NO: 123393 - DNA, 20 bp, synthetic construct
  source 1..20: mol_type = other DNA
ggcaggtagatcacctgagg

SEQ ID NO: 123394 - DNA, 20 bp, synthetic construct
  source 1..20: mol_type = other DNA
aggcaggtagatcacctgag

SEQ ID NO: 123395 - DNA, 20 bp, synthetic construct
  source 1..20: mol_type = other DNA
gaggcaggtagatcacctga

SEQ ID NO: 123396 - DNA, 20 bp, synthetic construct
  source 1..20: mol_type = other DNA
cgaggcaggtagatcacctg

SEQ ID NO: 123397 - DNA, 20 bp, synthetic construct
  source 1..20: mol_type = other DNA
ccgaggcaggtagatcacct

SEQ ID NO: 123398 - DNA, 20 bp, synthetic construct
  source 1..20: mol_type = other DNA
gccgaggcaggtagatcacc

SEQ ID NO: 123399 - DNA, 20 bp, synthetic construct
  source 1..20: mol_type = other DNA
ggccgaggcaggtagatcac

SEQ ID NO: 123400 - DNA, 20 bp, synthetic construct
  source 1..20: mol_type = other DNA
aggccgaggcaggtagatca

SEQ ID NO: 123401 - DNA, 20 bp, synthetic construct
  source 1..20: mol_type = other DNA
gaggccgaggcaggtagatc

SEQ ID NO: 123402 - DNA, 20 bp, synthetic construct
  source 1..20: mol_type = other DNA
ggaggccgaggcaggtagat

SEQ ID NO: 123403 - DNA, 20 bp, synthetic construct
  source 1..20: mol_type = other DNA
gggaggccgaggcaggtaga

SEQ ID NO: 123404 - DNA, 20 bp, synthetic construct
  source 1..20: mol_type = other DNA
tgggaggccgaggcaggtag

SEQ ID NO: 123405 - DNA, 20 bp, synthetic construct
  source 1..20: mol_type = other DNA
ttgggaggccgaggcaggta

SEQ ID NO: 123406 - DNA, 20 bp, synthetic construct
  source 1..20: mol_type = other DNA
tttgggaggccgaggcaggt

SEQ ID NO: 123407 - DNA, 20 bp, synthetic construct
  source 1..20: mol_type = other DNA
ctttgggaggccgaggcagg

SEQ ID NO: 123408 - DNA, 20 bp, synthetic construct
  source 1..20: mol_type = other DNA
actttgggaggccgaggcag

SEQ ID NO: 123409 - DNA, 20 bp, synthetic construct
  source 1..20: mol_type = other DNA
cactttgggaggccgaggca

SEQ ID NO: 123410 - DNA, 20 bp, synthetic construct
  source 1..20: mol_type = other DNA
gcactttgggaggccgaggc

SEQ ID NO: 123411 - DNA, 20 bp, synthetic construct
  source 1..20: mol_type = other DNA
agcactttgggaggccgagg

SEQ ID NO: 123412 - DNA, 20 bp, synthetic construct
  source 1..20: mol_type = other DNA
cagcactttgggaggccgag

SEQ ID NO: 123413 - DNA, 20 bp, synthetic construct
  source 1..20: mol_type = other DNA
tcagcactttgggaggccga

SEQ ID NO: 123414 - DNA, 20 bp, synthetic construct
  source 1..20: mol_type = other DNA
ctcagcactttgggaggccg

SEQ ID NO: 123415 - DNA, 20 bp, synthetic construct
  source 1..20: mol_type = other DNA
tctcagcactttgggaggcc

SEQ ID NO: 123416 - DNA, 20 bp, synthetic construct
  source 1..20: mol_type = other DNA
atctcagcactttgggaggc

SEQ ID NO: 123417 - DNA, 20 bp, synthetic construct
  source 1..20: mol_type = other DNA
aatctcagcactttgggagg

SEQ ID NO: 123418 - DNA, 20 bp, synthetic construct
  source 1..20: mol_type = other DNA
taatctcagcactttgggag

SEQ ID NO: 123419 - DNA, 20 bp, synthetic construct
  source 1..20: mol_type = other DNA
gtaatctcagcactttggga

SEQ ID NO: 123420 - DNA, 20 bp, synthetic construct
  source 1..20: mol_type = other DNA
tgtaatctcagcactttggg

SEQ ID NO: 123421 - DNA, 20 bp, synthetic construct
  source 1..20: mol_type = other DNA
ctgtaatctcagcactttgg

SEQ ID NO: 123422 - DNA, 20 bp, synthetic construct
  source 1..20: mol_type = other DNA
cctgtaatctcagcactttg

SEQ ID NO: 123423 - DNA, 20 bp, synthetic construct
  source 1..20: mol_type = other DNA
acctgtaatctcagcacttt

SEQ ID NO: 123424 - DNA, 20 bp, synthetic construct
  source 1..20: mol_type = other DNA
cacctgtaatctcagcactt

SEQ ID NO: 123425 - DNA, 20 bp, synthetic construct
  source 1..20: mol_type = other DNA
acacctgtaatctcagcact

SEQ ID NO: 123426 - DNA, 20 bp, synthetic construct
  source 1..20: mol_type = other DNA
cacacctgtaatctcagcac

SEQ ID NO: 123427 - DNA, 20 bp, synthetic construct
  source 1..20: mol_type = other DNA
tcacacctgtaatctcagca

SEQ ID NO: 123428 - DNA, 20 bp, synthetic construct
  source 1..20: mol_type = other DNA
ctcacacctgtaatctcagc

SEQ ID NO: 123429 - DNA, 20 bp, synthetic construct
  source 1..20: mol_type = other DNA
gctcacacctgtaatctcag

SEQ ID NO: 123430 - DNA, 20 bp, synthetic construct
  source 1..20: mol_type = other DNA
ggctcacacctgtaatctca

SEQ ID NO: 123431 - DNA, 20 bp, synthetic construct
  source 1..20: mol_type = other DNA
tggctcacacctgtaatctc

SEQ ID NO: 123432 - DNA, 20 bp, synthetic construct
  source 1..20: mol_type = other DNA
gtggctcacacctgtaatct

SEQ ID NO: 123433 - DNA, 20 bp, synthetic construct
  source 1..20: mol_type = other DNA
agtggctcacacctgtaatc

SEQ ID NO: 123434 - DNA, 20 bp, synthetic construct
  source 1..20: mol_type = other DNA
cagtggctcacacctgtaat

SEQ ID NO: 123435 - DNA, 20 bp, synthetic construct
  source 1..20: mol_type = other DNA
gcagtggctcacacctgtaa

SEQ ID NO: 123436 - DNA, 20 bp, synthetic construct
  source 1..20: mol_type = other DNA
cgcagtggctcacacctgta

SEQ ID NO: 123437 - DNA, 20 bp, synthetic construct
  source 1..20: mol_type = other DNA
gcgcagtggctcacacctgt

SEQ ID NO: 123438 - DNA, 20 bp, synthetic construct
  source 1..20: mol_type = other DNA
ggcgcagtggctcacacctg

SEQ ID NO: 123439 - DNA, 20 bp, synthetic construct
  source 1..20: mol_type = other DNA
aggcgcagtggctcacacct

SEQ ID NO: 123440 - DNA, 20 bp, synthetic construct
  source 1..20: mol_type = other DNA
caggcgcagtggctcacacc

SEQ ID NO: 123441 - DNA, 20 bp, synthetic construct
  source 1..20: mol_type = other DNA
acaggcgcagtggctcacac

SEQ ID NO: 123442 - DNA, 20 bp, synthetic construct
  source 1..20: mol_type = other DNA
gacaggcgcagtggctcaca

SEQ ID NO: 123443 - DNA, 20 bp, synthetic construct
  source 1..20: mol_type = other DNA
ggacaggcgcagtggctcac

SEQ ID NO: 123444 - DNA, 20 bp, synthetic construct
  source 1..20: mol_type = other DNA
aggacaggcgcagtggctca

SEQ ID NO: 123445 - DNA, 20 bp, synthetic construct
  source 1..20: mol_type = other DNA
taggacaggcgcagtggctc

SEQ ID NO: 123446 - DNA, 20 bp, synthetic construct
  source 1..20: mol_type = other DNA
ttaggacaggcgcagtggct

SEQ ID NO: 123447 - DNA, 20 bp, synthetic construct
  source 1..20: mol_type = other DNA
attaggacaggcgcagtggc

SEQ ID NO: 123448 - DNA, 20 bp, synthetic construct
  source 1..20: mol_type = other DNA
tattaggacaggcgcagtgg

SEQ ID NO: 123449 - DNA, 20 bp, synthetic construct
  source 1..20: mol_type = other DNA
ttattaggacaggcgcagtg

SEQ ID NO: 123450 - DNA, 20 bp, synthetic construct
  source 1..20: mol_type = other DNA
attattaggacaggcgcagt

SEQ ID NO: 123451 - DNA, 20 bp, synthetic construct
  source 1..20: mol_type = other DNA
aattattaggacaggcgcag

SEQ ID NO: 123452 - DNA, 20 bp, synthetic construct
  source 1..20: mol_type = other DNA
aaattattaggacaggcgca

SEQ ID NO: 123453 - DNA, 20 bp, synthetic construct
  source 1..20: mol_type = other DNA
gaaattattaggacaggcgc

SEQ ID NO: 123454 - DNA, 20 bp, synthetic construct
  source 1..20: mol_type = other DNA
agaaattattaggacaggcg

SEQ ID NO: 123455 - DNA, 20 bp, synthetic construct
  source 1..20: mol_type = other DNA
aagaaattattaggacaggc

SEQ ID NO: 123456 - DNA, 20 bp, synthetic construct
  source 1..20: mol_type = other DNA
aaagaaattattaggacagg

SEQ ID NO: 123457 - DNA, 20 bp, synthetic construct
  source 1..20: mol_type = other DNA
aaaagaaattattaggacag

SEQ ID NO: 123458 - DNA, 20 bp, synthetic construct
  source 1..20: mol_type = other DNA
aaaaagaaattattaggaca

SEQ ID NO: 123459 - DNA, 20 bp, synthetic construct
  source 1..20: mol_type = other DNA
caaaaagaaattattaggac

SEQ ID NO: 123460 - DNA, 20 bp, synthetic construct
  source 1..20: mol_type = other DNA
acaaaaagaaattattagga

SEQ ID NO: 123461 - DNA, 20 bp, synthetic construct
  source 1..20: mol_type = other DNA
gacaaaaagaaattattagg

SEQ ID NO: 123462 - DNA, 20 bp, synthetic construct
  source 1..20: mol_type = other DNA
agacaaaaagaaattattag

SEQ ID NO: 123463 - DNA, 20 bp, synthetic construct
  source 1..20: mol_type = other DNA
gagacaaaaagaaattatta

SEQ ID NO: 123464 - DNA, 20 bp, synthetic construct
  source 1..20: mol_type = other DNA
tgagacaaaaagaaattatt

SEQ ID NO: 123465 - DNA, 20 bp, synthetic construct
  source 1..20: mol_type = other DNA
ttgagacaaaaagaaattat

SEQ ID NO: 123466 - DNA, 20 bp, synthetic construct
  source 1..20: mol_type = other DNA
attgagacaaaaagaaatta

SEQ ID NO: 123467 - DNA, 20 bp, synthetic construct
  source 1..20: mol_type = other DNA
cattgagacaaaaagaaatt

SEQ ID NO: 123468 - DNA, 20 bp, synthetic construct
  source 1..20: mol_type = other DNA
acattgagacaaaaagaaat

SEQ ID NO: 123469 - DNA, 20 bp, synthetic construct
  source 1..20: mol_type = other DNA
aacattgagacaaaaagaaa

SEQ ID NO: 123470 - DNA, 20 bp, synthetic construct
  source 1..20: mol_type = other DNA
aaacattgagacaaaaagaa

SEQ ID NO: 123471 - DNA, 20 bp, synthetic construct
  source 1..20: mol_type = other DNA
gaaacattgagacaaaaaga

SEQ ID NO: 123472 - DNA, 20 bp, synthetic construct
  source 1..20: mol_type = other DNA
agaaacattgagacaaaaag

SEQ ID NO: 123473 - DNA, 20 bp, synthetic construct
  source 1..20: mol_type = other DNA
cagaaacattgagacaaaaa

SEQ ID NO: 123474 - DNA, 20 bp, synthetic construct
  source 1..20: mol_type = other DNA
gcagaaacattgagacaaaa

SEQ ID NO: 123475 - DNA, 20 bp, synthetic construct
  source 1..20: mol_type = other DNA
ggcagaaacattgagacaaa

SEQ ID NO: 123476 - DNA, 20 bp, synthetic construct
  source 1..20: mol_type = other DNA
aggcagaaacattgagacaa

SEQ ID NO: 123477 - DNA, 20 bp, synthetic construct
  source 1..20: mol_type = other DNA
caggcagaaacattgagaca

SEQ ID NO: 123478 - DNA, 20 bp, synthetic construct
  source 1..20: mol_type = other DNA
ccaggcagaaacattgagac

SEQ ID NO: 123479 - DNA, 20 bp, synthetic construct
  source 1..20: mol_type = other DNA
cccaggcagaaacattgaga

SEQ ID NO: 123480 - DNA, 20 bp, synthetic construct
  source 1..20: mol_type = other DNA
acccaggcagaaacattgag

SEQ ID NO: 123481 - DNA, 20 bp, synthetic construct
  source 1..20: mol_type = other DNA
cacccaggcagaaacattga

SEQ ID NO: 123482 - DNA, 20 bp, synthetic construct
  source 1..20: mol_type = other DNA
gcacccaggcagaaacattg

SEQ ID NO: 123483 - DNA, 20 bp, synthetic construct
  source 1..20: mol_type = other DNA
tgcacccaggcagaaacatt

SEQ ID NO: 123484 - DNA, 20 bp, synthetic construct
  source 1..20: mol_type = other DNA
gtgcacccaggcagaaacat

SEQ ID NO: 123485 - DNA, 20 bp, synthetic construct
  source 1..20: mol_type = other DNA
agtgcacccaggcagaaaca

SEQ ID NO: 123486 - DNA, 20 bp, synthetic construct
  source 1..20: mol_type = other DNA
cagtgcacccaggcagaaac

SEQ ID NO: 123487 - DNA, 20 bp, synthetic construct
  source 1..20: mol_type = other DNA
ccagtgcacccaggcagaaa

SEQ ID NO: 123488 - DNA, 20 bp, synthetic construct
  source 1..20: mol_type = other DNA
gccagtgcacccaggcagaa

SEQ ID NO: 123489 - DNA, 20 bp, synthetic construct
  source 1..20: mol_type = other DNA
agccagtgcacccaggcaga

SEQ ID NO: 123490 - DNA, 20 bp, synthetic construct
  source 1..20: mol_type = other DNA
gagccagtgcacccaggcag

SEQ ID NO: 123491 - DNA, 20 bp, synthetic construct
  source 1..20: mol_type = other DNA
tgagccagtgcacccaggca

SEQ ID NO: 123492 - DNA, 20 bp, synthetic construct
  source 1..20: mol_type = other DNA
gtgagccagtgcacccaggc

SEQ ID NO: 123493 - DNA, 20 bp, synthetic construct
  source 1..20: mol_type = other DNA
cgtgagccagtgcacccagg

SEQ ID NO: 123494 - DNA, 20 bp, synthetic construct
  source 1..20: mol_type = other DNA
gcgtgagccagtgcacccag

SEQ ID NO: 123495 - DNA, 20 bp, synthetic construct
  source 1..20: mol_type = other DNA
ggcgtgagccagtgcaccca

SEQ ID NO: 123496 - DNA, 20 bp, synthetic construct
  source 1..20: mol_type = other DNA
aggcgtgagccagtgcaccc

SEQ ID NO: 123497 - DNA, 20 bp, synthetic construct
  source 1..20: mol_type = other DNA
caggcgtgagccagtgcacc

SEQ ID NO: 123498 - DNA, 20 bp, synthetic construct
  source 1..20: mol_type = other DNA
acaggcgtgagccagtgcac

SEQ ID NO: 123499 - DNA, 20 bp, synthetic construct
  source 1..20: mol_type = other DNA
tacaggcgtgagccagtgca

SEQ ID NO: 123500 - DNA, 20 bp, synthetic construct
  source 1..20: mol_type = other DNA
ttacaggcgtgagccagtgc

SEQ ID NO: 123501 - DNA, 20 bp, synthetic construct
  source 1..20: mol_type = other DNA
attacaggcgtgagccagtg

SEQ ID NO: 123502 - DNA, 20 bp, synthetic construct
  source 1..20: mol_type = other DNA
aattacaggcgtgagccagt

SEQ ID NO: 123503 - DNA, 20 bp, synthetic construct
  source 1..20: mol_type = other DNA
gaattacaggcgtgagccag

SEQ ID NO: 123504 - DNA, 20 bp, synthetic construct
  source 1..20: mol_type = other DNA
ggaattacaggcgtgagcca

SEQ ID NO: 123505 - DNA, 20 bp, synthetic construct
  source 1..20: mol_type = other DNA
tggaattacaggcgtgagcc

SEQ ID NO: 123506 - DNA, 20 bp, synthetic construct
  source 1..20: mol_type = other DNA
ctggaattacaggcgtgagc

SEQ ID NO: 123507 - DNA, 20 bp, synthetic construct
  source 1..20: mol_type = other DNA
gctggaattacaggcgtgag

SEQ ID NO: 123508 - DNA, 20 bp, synthetic construct
  source 1..20: mol_type = other DNA
tgctggaattacaggcgtga

SEQ ID NO: 123509 - DNA, 20 bp, synthetic construct
  source 1..20: mol_type = other DNA
gtgctggaattacaggcgtg

SEQ ID NO: 123510 - DNA, 20 bp, synthetic construct
  source 1..20: mol_type = other DNA
agtgctggaattacaggcgt

SEQ ID NO: 123511 - DNA, 20 bp, synthetic construct
  source 1..20: mol_type = other DNA
aagtgctggaattacaggcg

SEQ ID NO: 123512 - DNA, 20 bp, synthetic construct
  source 1..20: mol_type = other DNA
aaagtgctggaattacaggc

SEQ ID NO: 123513 - DNA, 20 bp, synthetic construct
  source 1..20: mol_type = other DNA
caaagtgctggaattacagg

SEQ ID NO: 123514 - DNA, 20 bp, synthetic construct
  source 1..20: mol_type = other DNA
ccaaagtgctggaattacag

SEQ ID NO: 123515 - DNA, 20 bp, synthetic construct
  source 1..20: mol_type = other DNA
cccaaagtgctggaattaca

SEQ ID NO: 123516 - DNA, 20 bp, synthetic construct
  source 1..20: mol_type = other DNA
tcccaaagtgctggaattac

SEQ ID NO: 123517 - DNA, 20 bp, synthetic construct
  source 1..20: mol_type = other DNA
ctcccaaagtgctggaatta

SEQ ID NO: 123518 - DNA, 20 bp, synthetic construct
  source 1..20: mol_type = other DNA
cctcccaaagtgctggaatt

SEQ ID NO: 123519 - DNA, 20 bp, synthetic construct
  source 1..20: mol_type = other DNA
gcctcccaaagtgctggaat

SEQ ID NO: 123520 - DNA, 20 bp, synthetic construct
  source 1..20: mol_type = other DNA
ggcctcccaaagtgctggaa

SEQ ID NO: 123521 - DNA, 20 bp, synthetic construct
  source 1..20: mol_type = other DNA
tggcctcccaaagtgctgga

SEQ ID NO: 123522 - DNA, 20 bp, synthetic construct
  source 1..20: mol_type = other DNA
ttggcctcccaaagtgctgg

SEQ ID NO: 123523 - DNA, 20 bp, synthetic construct
  source 1..20: mol_type = other DNA
gttggcctcccaaagtgctg

SEQ ID NO: 123524 - DNA, 20 bp, synthetic construct
  source 1..20: mol_type = other DNA
ggttggcctcccaaagtgct

SEQ ID NO: 123525 - DNA, 20 bp, synthetic construct
  source 1..20: mol_type = other DNA
aggttggcctcccaaagtgc

SEQ ID NO: 123526 - DNA, 20 bp, synthetic construct
  source 1..20: mol_type = other DNA
caggttggcctcccaaagtg

SEQ ID NO: 123527 - DNA, 20 bp, synthetic construct
  source 1..20: mol_type = other DNA
ccaggttggcctcccaaagt

SEQ ID NO: 123528 - DNA, 20 bp, synthetic construct
  source 1..20: mol_type = other DNA
tccaggttggcctcccaaag

SEQ ID NO: 123529 - DNA, 20 bp, synthetic construct
  source 1..20: mol_type = other DNA
atccaggttggcctcccaaa

SEQ ID NO: 123530 - DNA, 20 bp, synthetic construct
  source 1..20: mol_type = other DNA
catccaggttggcctcccaa

SEQ ID NO: 123531 - DNA, 20 bp, synthetic construct
  source 1..20: mol_type = other DNA
ccatccaggttggcctccca

SEQ ID NO: 123532 - DNA, 20 bp, synthetic construct
  source 1..20: mol_type = other DNA
tccatccaggttggcctccc

SEQ ID NO: 123533 - DNA, 20 bp, synthetic construct
  source 1..20: mol_type = other DNA
atccatccaggttggcctcc

SEQ ID NO: 123534 - DNA, 20 bp, synthetic construct
  source 1..20: mol_type = other DNA
gatccatccaggttggcctc

SEQ ID NO: 123535 - DNA, 20 bp, synthetic construct
  source 1..20: mol_type = other DNA
tgatccatccaggttggcct

SEQ ID NO: 123536 - DNA, 20 bp, synthetic construct
  source 1..20: mol_type = other DNA
atgatccatccaggttggcc

SEQ ID NO: 123537 - DNA, 20 bp, synthetic construct
  source 1..20: mol_type = other DNA
aatgatccatccaggttggc

SEQ ID NO: 123538 - DNA, 20 bp, synthetic construct
  source 1..20: mol_type = other DNA
aaatgatccatccaggttgg

SEQ ID NO: 123539 - DNA, 20 bp, synthetic construct
  source 1..20: mol_type = other DNA
caaatgatccatccaggttg

SEQ ID NO: 123540 - DNA, 20 bp, synthetic construct
  source 1..20: mol_type = other DNA
tcaaatgatccatccaggtt

SEQ ID NO: 123541 - DNA, 20 bp, synthetic construct
  source 1..20: mol_type = other DNA
ctcaaatgatccatccaggt

SEQ ID NO: 123542 - DNA, 20 bp, synthetic construct
  source 1..20: mol_type = other DNA
gctcaaatgatccatccagg

SEQ ID NO: 123543 - DNA, 20 bp, synthetic construct
  source 1..20: mol_type = other DNA
ggctcaaatgatccatccag

SEQ ID NO: 123544 - DNA, 20 bp, synthetic construct
  source 1..20: mol_type = other DNA
tggctcaaatgatccatcca

SEQ ID NO: 123545 - DNA, 20 bp, synthetic construct
  source 1..20: mol_type = other DNA
ttggctcaaatgatccatcc

SEQ ID NO: 123546 - DNA, 20 bp, synthetic construct
  source 1..20: mol_type = other DNA
gttggctcaaatgatccatc

SEQ ID NO: 123547 - DNA, 20 bp, synthetic construct
  source 1..20: mol_type = other DNA
tgttggctcaaatgatccat

SEQ ID NO: 123548 - DNA, 20 bp, synthetic construct
  source 1..20: mol_type = other DNA
ctgttggctcaaatgatcca

SEQ ID NO: 123549 - DNA, 20 bp, synthetic construct
  source 1..20: mol_type = other DNA
actgttggctcaaatgatcc

SEQ ID NO: 123550 - DNA, 20 bp, synthetic construct
  source 1..20: mol_type = other DNA
aactgttggctcaaatgatc

SEQ ID NO: 123551 - DNA, 20 bp, synthetic construct
  source 1..20: mol_type = other DNA
aaactgttggctcaaatgat

SEQ ID NO: 123552 - DNA, 20 bp, synthetic construct
  source 1..20: mol_type = other DNA
caaactgttggctcaaatga

SEQ ID NO: 123553 - DNA, 20 bp, synthetic construct
  source 1..20: mol_type = other DNA
tcaaactgttggctcaaatg

SEQ ID NO: 123554 - DNA, 20 bp, synthetic construct
  source 1..20: mol_type = other DNA
ctcaaactgttggctcaaat

SEQ ID NO: 123555 - DNA, 20 bp, synthetic construct
  source 1..20: mol_type = other DNA
tctcaaactgttggctcaaa

SEQ ID NO: 123556 - DNA, 20 bp, synthetic construct
  source 1..20: mol_type = other DNA
gtctcaaactgttggctcaa

SEQ ID NO: 123557 - DNA, 20 bp, synthetic construct
  source 1..20: mol_type = other DNA
ggtctcaaactgttggctca

SEQ ID NO: 123558 - DNA, 20 bp, synthetic construct
  source 1..20: mol_type = other DNA
tggtctcaaactgttggctc

SEQ ID NO: 123559 - DNA, 20 bp, synthetic construct
  source 1..20: mol_type = other DNA
ctggtctcaaactgttggct

SEQ ID NO: 123560 - DNA, 20 bp, synthetic construct
  source 1..20: mol_type = other DNA
gctggtctcaaactgttggc

SEQ ID NO: 123561 - DNA, 20 bp, synthetic construct
  source 1..20: mol_type = other DNA
ggctggtctcaaactgttgg

SEQ ID NO: 123562 - DNA, 20 bp, synthetic construct
  source 1..20: mol_type = other DNA
aggctggtctcaaactgttg

SEQ ID NO: 123563 - DNA, 20 bp, synthetic construct
  source 1..20: mol_type = other DNA
caggctggtctcaaactgtt

SEQ ID NO: 123564 - DNA, 20 bp, synthetic construct
  source 1..20: mol_type = other DNA
tcaggctggtctcaaactgt

SEQ ID NO: 123565 - DNA, 20 bp, synthetic construct
  source 1..20: mol_type = other DNA
ctcaggctggtctcaaactg

SEQ ID NO: 123566 - DNA, 20 bp, synthetic construct
  source 1..20: mol_type = other DNA
cctcaggctggtctcaaact

SEQ ID NO: 123567 - DNA, 20 bp, synthetic construct
  source 1..20: mol_type = other DNA
tcctcaggctggtctcaaac

SEQ ID NO: 123568 - DNA, 20 bp, synthetic construct
  source 1..20: mol_type = other DNA
ttcctcaggctggtctcaaa

SEQ ID NO: 123569 - DNA, 20 bp, synthetic construct
  source 1..20: mol_type = other DNA
gttcctcaggctggtctcaa

SEQ ID NO: 123570 - DNA, 20 bp, synthetic construct
  source 1..20: mol_type = other DNA
tgttcctcaggctggtctca

SEQ ID NO: 123571 - DNA, 20 bp, synthetic construct
  source 1..20: mol_type = other DNA
atgttcctcaggctggtctc

SEQ ID NO: 123572 - DNA, 20 bp, synthetic construct
  source 1..20: mol_type = other DNA
catgttcctcaggctggtct

SEQ ID NO: 123573 - DNA, 20 bp, synthetic construct
  source 1..20: mol_type = other DNA
tcatgttcctcaggctggtc

SEQ ID NO: 123574 - DNA, 20 bp, synthetic construct
  source 1..20: mol_type = other DNA
gtcatgttcctcaggctggt

SEQ ID NO: 123575 - DNA, 20 bp, synthetic construct
  source 1..20: mol_type = other DNA
tgtcatgttcctcaggctgg

SEQ ID NO: 123576 - DNA, 20 bp, synthetic construct
  source 1..20: mol_type = other DNA
ttgtcatgttcctcaggctg

SEQ ID NO: 123577 - DNA, 20 bp, synthetic construct
  source 1..20: mol_type = other DNA
tttgtcatgttcctcaggct

SEQ ID NO: 123578 - DNA, 20 bp, synthetic construct
  source 1..20: mol_type = other DNA
ttttgtcatgttcctcaggc

SEQ ID NO: 123579 - DNA, 20 bp, synthetic construct
  source 1..20: mol_type = other DNA
gttttgtcatgttcctcagg

SEQ ID NO: 123580 - DNA, 20 bp, synthetic construct
  source 1..20: mol_type = other DNA
ggttttgtcatgttcctcag

SEQ ID NO: 123581 - DNA, 20 bp, synthetic construct
  source 1..20: mol_type = other DNA
gggttttgtcatgttcctca

SEQ ID NO: 123582 - DNA, 20 bp, synthetic construct
  source 1..20: mol_type = other DNA
agggttttgtcatgttcctc

SEQ ID NO: 123583 - DNA, 20 bp, synthetic construct
  source 1..20: mol_type = other DNA
cagggttttgtcatgttcct

SEQ ID NO: 123584 - DNA, 20 bp, synthetic construct
  source 1..20: mol_type = other DNA
acagggttttgtcatgttcc

SEQ ID NO: 123585 - DNA, 20 bp, synthetic construct
  source 1..20: mol_type = other DNA
gacagggttttgtcatgttc

SEQ ID NO: 123586 - DNA, 20 bp, synthetic construct
  source 1..20: mol_type = other DNA
agacagggttttgtcatgtt

SEQ ID NO: 123587 - DNA, 20 bp, synthetic construct
  source 1..20: mol_type = other DNA
aagacagggttttgtcatgt

SEQ ID NO: 123588 - DNA, 20 bp, synthetic construct
  source 1..20: mol_type = other DNA
aaagacagggttttgtcatg

SEQ ID NO: 123589 - DNA, 20 bp, synthetic construct
  source 1..20: mol_type = other DNA
caaagacagggttttgtcat

SEQ ID NO: 123590 - DNA, 20 bp, synthetic construct
  source 1..20: mol_type = other DNA
gcaaagacagggttttgtca

SEQ ID NO: 123591 - DNA, 20 bp, synthetic construct
  source 1..20: mol_type = other DNA
tgcaaagacagggttttgtc

SEQ ID NO: 123592 - DNA, 20 bp, synthetic construct
  source 1..20: mol_type = other DNA
ttgcaaagacagggttttgt

SEQ ID NO: 123593 - DNA, 20 bp, synthetic construct
  source 1..20: mol_type = other DNA
tttgcaaagacagggttttg

SEQ ID NO: 123594 - DNA, 20 bp, synthetic construct
  source 1..20: mol_type = other DNA
ttttgcaaagacagggtttt

SEQ ID NO: 123595 - DNA, 20 bp, synthetic construct
  source 1..20: mol_type = other DNA
tttttgcaaagacagggttt

SEQ ID NO: 123596 - DNA, 20 bp, synthetic construct
  source 1..20: mol_type = other DNA
ttttttgcaaagacagggtt

SEQ ID NO: 123597 - DNA, 20 bp, synthetic construct
  source 1..20: mol_type = other DNA
tttttttgcaaagacagggt

SEQ ID NO: 123598 - DNA, 20 bp, synthetic construct
  source 1..20: mol_type = other DNA
ttttttttgcaaagacaggg

SEQ ID NO: 123599 - DNA, 20 bp, synthetic construct
  source 1..20: mol_type = other DNA
tttttttttgcaaagacagg

SEQ ID NO: 123600 - DNA, 20 bp, synthetic construct
  source 1..20: mol_type = other DNA
ttttttttttgcaaagacag

SEQ ID NO: 123601 - DNA, 20 bp, synthetic construct
  source 1..20: mol_type = other DNA
tttttttttttgcaaagaca

SEQ ID NO: 123602 - DNA, 20 bp, synthetic construct
  source 1..20: mol_type = other DNA
ttttttttttttgcaaagac

SEQ ID NO: 123603 - DNA, 20 bp, synthetic construct
  source 1..20: mol_type = other DNA
cttttttttttttgcaaaga

SEQ ID NO: 123604 - DNA, 20 bp, synthetic construct
  source 1..20: mol_type = other DNA
tcttttttttttttgcaaag

SEQ ID NO: 123605 - DNA, 20 bp, synthetic construct
  source 1..20: mol_type = other DNA
ttcttttttttttttgcaaa

SEQ ID NO: 123606 - DNA, 20 bp, synthetic construct
  source 1..20: mol_type = other DNA
tttcttttttttttttgcaa

SEQ ID NO: 123607 - DNA, 20 bp, synthetic construct
  source 1..20: mol_type = other DNA
ttttcttttttttttttgca

SEQ ID NO: 123608 - DNA, 20 bp, synthetic construct
  source 1..20: mol_type = other DNA
tttttcttttttttttttgc

SEQ ID NO: 123609 - DNA, 20 bp, synthetic construct
  source 1..20: mol_type = other DNA
ttttttcttttttttttttg

SEQ ID NO: 123610 - DNA, 20 bp, synthetic construct
  source 1..20: mol_type = other DNA
cttttttctttttttttttt

SEQ ID NO: 123611 - DNA, 20 bp, synthetic construct
  source 1..20: mol_type = other DNA
tcttttttcttttttttttt

SEQ ID NO: 123612 - DNA, 20 bp, synthetic construct
  source 1..20: mol_type = other DNA
ttcttttttctttttttttt

SEQ ID NO: 123613 - DNA, 20 bp, synthetic construct
  source 1..20: mol_type = other DNA
tttcttttttcttttttttt

SEQ ID NO: 123614 - DNA, 20 bp, synthetic construct
  source 1..20: mol_type = other DNA
ttttcttttttctttttttt

SEQ ID NO: 123615 - DNA, 20 bp, synthetic construct
  source 1..20: mol_type = other DNA
tttttcttttttcttttttt

SEQ ID NO: 123616 - DNA, 20 bp, synthetic construct
  source 1..20: mol_type = other DNA
atttttcttttttctttttt

SEQ ID NO: 123617 - DNA, 20 bp, synthetic construct
  source 1..20: mol_type = other DNA
aatttttcttttttcttttt

SEQ ID NO: 123618 - DNA, 20 bp, synthetic construct
  source 1..20: mol_type = other DNA
taatttttcttttttctttt

SEQ ID NO: 123619 - DNA, 20 bp, synthetic construct
  source 1..20: mol_type = other DNA
ctaatttttcttttttcttt

SEQ ID NO: 123620 - DNA, 20 bp, synthetic construct
  source 1..20: mol_type = other DNA
gctaatttttcttttttctt

SEQ ID NO: 123621 - DNA, 20 bp, synthetic construct
  source 1..20: mol_type = other DNA
ggctaatttttcttttttct

SEQ ID NO: 123622 - DNA, 20 bp, synthetic construct
  source 1..20: mol_type = other DNA
tggctaatttttcttttttc

SEQ ID NO: 123623 - DNA, 20 bp, synthetic construct
  source 1..20: mol_type = other DNA
ctggctaatttttctttttt

SEQ ID NO: 123624 - DNA, 20 bp, synthetic construct
  source 1..20: mol_type = other DNA
cctggctaatttttcttttt

SEQ ID NO: 123625 - DNA, 20 bp, synthetic construct
  source 1..20: mol_type = other DNA
gcctggctaatttttctttt

SEQ ID NO: 123626 - DNA, 20 bp, synthetic construct
  source 1..20: mol_type = other DNA
tgcctggctaatttttcttt

SEQ ID NO: 123627 - DNA, 20 bp, synthetic construct
  source 1..20: mol_type = other DNA
gtgcctggctaatttttctt

SEQ ID NO: 123628 - DNA, 20 bp, synthetic construct
  source 1..20: mol_type = other DNA
tgtgcctggctaatttttct

SEQ ID NO: 123629 - DNA, 20 bp, synthetic construct
  source 1..20: mol_type = other DNA
ctgtgcctggctaatttttc

SEQ ID NO: 123630 - DNA, 20 bp, synthetic construct
  source 1..20: mol_type = other DNA
tctgtgcctggctaattttt

SEQ ID NO: 123631 - DNA, 20 bp, synthetic construct
  source 1..20: mol_type = other DNA
ttctgtgcctggctaatttt

SEQ ID NO: 123632 - DNA, 20 bp, synthetic construct
  source 1..20: mol_type = other DNA
cttctgtgcctggctaattt

SEQ ID NO: 123633 - DNA, 20 bp, synthetic construct
  source 1..20: mol_type = other DNA
gcttctgtgcctggctaatt

SEQ ID NO: 123634 - DNA, 20 bp, synthetic construct
  source 1..20: mol_type = other DNA
cgcttctgtgcctggctaat

SEQ ID NO: 123635 - DNA, 20 bp, synthetic construct
  source 1..20: mol_type = other DNA
gcgcttctgtgcctggctaa

SEQ ID NO: 123636 - DNA, 20 bp, synthetic construct
  source 1..20: mol_type = other DNA
tgcgcttctgtgcctggcta

SEQ ID NO: 123637 - DNA, 20 bp, synthetic construct
  source 1..20: mol_type = other DNA
atgcgcttctgtgcctggct

SEQ ID NO: 123638 - DNA, 20 bp, synthetic construct
  source 1..20: mol_type = other DNA
aatgcgcttctgtgcctggc

SEQ ID NO: 123639 - DNA, 20 bp, synthetic construct
  source 1..20: mol_type = other DNA
gaatgcgcttctgtgcctgg

SEQ ID NO: 123640 - DNA, 20 bp, synthetic construct
  source 1..20: mol_type = other DNA
ggaatgcgcttctgtgcctg

SEQ ID NO: 123641 - DNA, 20 bp, synthetic construct
  source 1..20: mol_type = other DNA
aggaatgcgcttctgtgcct

SEQ ID NO: 123642 - DNA, 20 bp, synthetic construct
  source 1..20: mol_type = other DNA
taggaatgcgcttctgtgcc

SEQ ID NO: 123643 - DNA, 20 bp, synthetic construct
  source 1..20: mol_type = other DNA
ataggaatgcgcttctgtgc
